United States Patent Application Publication US 2012/0017338 A1 - sequence listing, part 17

SEQ ID NO: 72669 - protein, 355 aa, Zea mays
  Coding DNA Sequence Number=SeqID_30890
EPGKADYSVVVPMHPEQGYVCLGLQAFRTAQLPVPEVMTAREVRRLAVEEKKRKMDEEKKGARKKILANDSLEKRHRAQAREGLPLEASPSTEDEEDDDDDEGAEVCMGFSPEVGPESTPASAGPSSGVAPFAQGPIAEEWDPPASLVVQRMPPHDSWSLNCGTRFIAPQPQWPQSPPPKKLRLITLNAFAAESRWEDDLGATNSSLSLRVRRVPSVGQDPARAVWGTSEGLTKGFDDDVQALRRSSEAHDAEGIWALLLRARSRLGEQREYKAAAGVDAVTDRLRTPEGECIAPTKGYELSAKEQVPGRDRYLGEPKTKTLVLSSGKGWLGLHPPWLGIEALSRSLRPHALGVG

SEQ ID NO: 72670 - protein, 406 aa, Zea mays
  Coding DNA Sequence Number=SeqID_30891
  Gene Ontology: Mol. function=2 iron, 2 sulfur cluster binding; Biological process=electron transport
  Homolog annotation: Hit_ID=Q6AUV1; Match level="QueryCoverage=45%, HitCoverage=13%, E-value=7e-89, Identity=84%"; Hit description =Xanthine dehydrogenase, putative
  Pfam annotation: Domain name=Ald_Xan_dh_C; Domain location=17-124; Score=145.3; E_value=1.7e-40; Accession=PF01315.12; Description =Aldehyde oxidase and xanthine dehydrogenase, ab hammerhead domain
MGTVDVYGDGVPRHIVTGDAEYTDDTPTPPNTLYAALVLSKKAHARILSIDDSLAKSSPGFAGLFLSKYIPGVNHTGPIIHDEEFFASNIVTCVGQIIGIVVADTHDNAKTAANKVHIEYCELPAILSIEEAVKVGSFHPNTKKCLVKGDVEQCFLSGACDKIVSGQVHVGGQEHFYMEPQCTLVWPVDFGNEIHMVSSTQVEGSIKINPITRVGGHDDKKVMIPTIITLRDMFTHAELRITAGKRLPDLDLWSQHLSIKISGFHKSQESCREFELSRDLGELRINILRKKKGKGLRTDRVQTTPCGGKGKNGSNNSSIVALYSPFAILIVPFKLGFGQSMISANNSYADQHCSLFYPYSMGATVRSVDSGSDDGFKNGSDMPIEMAMARMTKKIDRIPILFIRER

SEQ ID NO: 72671 - protein, 212 aa, Zea mays
  Coding DNA Sequence Number=SeqID_30892
MAGSRPASRETTWSSKNGRVDEDGIRRRRDQRGVRSHQSTRSKQRSLAHGHGRKTRKETSSYGQRAESKARAHGAGGRATKEGLRQDASEQELGGKPRHADWRTEQGAPAMDGARRATQEKQRPSQGHARAALGNSTTMGAGEQGEDGARRAQQGEGEGEEGRERAMGIRKLRALETIRGLRSAKKSEEEKSGGEKSEEWRMKQKIYEERDL

SEQ ID NO: 72672 - protein, 298 aa, Zea mays
  Coding DNA Sequence Number=SeqID_30893
  Gene Ontology: Mol. function=oxidoreductase activity; Cellular component=cytosol; Biological process=leukotriene metabolic process
  Homolog annotation: Hit_ID=Q2QVJ8; Match level="QueryCoverage=89%, HitCoverage=77%, E-value=1e-123, Identity=77%"; Hit description=NADP- dependent oxidoreductase P2, putative, expressed
  Pfam annotation: Domain name=ADH_zinc_N; Domain location=93-240; Score=99.4; E_value=1e-26; Accession=PF00107.16; Description=Zinc -binding dehydrogenase
DLTDPYSPTLVQIVQVLENFGVCKVIASGHQDFKVGDLVWGMTGWEEYTLIHNPESFFKIKHPELPLSYYTGVLGMPGLTAWAGFFDVGKPKKGDYVFVSAASGAVGQLVGQFAKLTGCYVVGSAGSDEKVNLLKTKFGFDEAFNYKKEQDLDAALRRYFPEGIDIYFENVGGSTLEAVLPNMRIHGRIPTCGMISQYNLEEPEGVHNLFEIITKRLRMEGFMVFDYYGQYHKFEQEMVGYLKAGKIAYVEDIAEGLEKAPEALIGLFTGRNVGKQLFCAVRVKCFDFLPFVFWAICV

SEQ ID NO: 72673 - protein, 190 aa, Zea mays
  Coding DNA Sequence Number=SeqID_30894
MAQLSSIEDLRPRAVILSRKPHSVHAPGHPPPSRDSWALPLLRALKCLTQSLGGGVGRDLSKVLGQRITRLAAQQGDRTRAETNLHVFNVHCARQSTPDARPRVPRVTPSQPGAVARTRAYKATRGFDRTPPHALDLTGALDHRRCPAHGMPAATRSPATAGALAADEFTRLRTWTGRFRPPPPLSRTSL

SEQ ID NO: 72674 - protein, 81 aa, Zea mays
  Coding DNA Sequence Number=SeqID_30895
MCDDVQLCNSCVFSTEETDIEAVQTDKPKVEMLKVLLLAPTKFLILLLDKKKDEEGVAEMPIQDKVSLASLQSEVSSKVVP

SEQ ID NO: 72675 - protein, 415 aa, Zea mays
  Coding DNA Sequence Number=SeqID_30896
  Gene Ontology: Mol. function=RNA-directed DNA polymerase activity; Cellular component=intracellular; Biological process=RNA-dependent DNA replication
  Homolog annotation: Hit_ID=UPI00005A975E; Match level="QueryCoverage =97%, HitCoverage=26%, E-value=0.0, Identity=87%"; Hit description =PREDICTED: similar to Retrovirus-related Pol polyprotein from transposon 297
  Pfam annotation: Domain name=RVT_1; Domain location=20-194; Score =103.5; E_value=6.2e-28; Accession=PF00078.17; Description=Reverse transcriptase (RNA-dependent
MSPSTRWIFGPEPDPSGSLCADSTRRSTSDRRGDPQANGSRVHQRDYTGLNKACPKVPYPLPRIDQIMDSTAGCETLSFLDAYSGYHQIRMKESDQLATSFITPFGMYCYVTMPFGLRNAGATYQRCMNHVFGEHIGRTVEAYVDDIVVKTRKASDLLSDLEVTFRCLKAKGVKLNPEKCVFGVPQGMLLGFIVSERGIEANLEKIAAITSMGPIKDLKGVQRVMGCLAALSRFISRLGERGLPLYRLLRKTECFAWTPEAEEALENLKALLTKAPVLVPPADGEALLVYVAATTQVVSAAIVVGRQEEGHALPVQRPVYFVSEVLSETKIRYPQVQKLLYAVILTRRKLQHYFESHPVTVVSSFPLGEIIQCREASGRIAKWAVEIMGETISFAPRKAIKSQVLADFVAEWVDT

SEQ ID NO: 72676 - protein, 186 aa, Zea mays
  Coding DNA Sequence Number=SeqID_30897
MPSGSPAPAHLRHRCIASLELAMDVGHSCVLAPTFIPNTVDPAWTRQAATSPWPPAAARLNGRRSFLVVASSAAPTSAPPSLGSRISWPVHNYQPIKLIPMAPSSDLALVARRSQRRCLPARTTCLCSISHGAPLKLARFALVVVKTPPAPCSSAPLAELVVMYLFRYAPGRALPPRGQHHLGHEG

SEQ ID NO: 72677 - protein, 79 aa, Zea mays
  Coding DNA Sequence Number=SeqID_30898
MGAVVKPFEPGLRLYYPDILFIDGRVDDDPISDDEPMWLSCIEIAKSRPTKSMDATYQDKAKKTKNWALKHKRILCETK

SEQ ID NO: 72678 - protein, 166 aa, Zea mays
  Coding DNA Sequence Number=SeqID_30899
  Homolog annotation: Hit_ID=Q6QP51; Match level="QueryCoverage=43%, HitCoverage=38%, E-value=1e-09, Identity=47%"; Hit description =Putative growth-regulating factor 1
MVMVERLSQWRGCERVEQRKMGMGVVRVRGKGVRGVQGPCFEAQENSAACPAPTAVPPVRVRLTAAESSLRRHRKLRLARPRGSAPASTLEDGLRLARPQGSAPGRRSLPRPTPGLGLNLDLGRRSPPRPTPGLSLNLDLGEVTASPDLGLGPTTLQGVHHYPTPS

SEQ ID NO: 72679 - protein, 76 aa, Zea mays
  Coding DNA Sequence Number=SeqID_30900
MAEPTPSQSPAQTPPPPPTQQTPAAGGLEDMLACVAALEAALLPCLPARELQAVDRSLQSSHQSTADPHHFPTLLL

SEQ ID NO: 72680 - protein, 144 aa, Zea mays
  Coding DNA Sequence Number=SeqID_30901
MQQRTTRLQHGGSGRCEKSTCPRELATHGRSPGTSSTTEQDAESSAGGAPARTQYDRRVTQQQSFFGGREAERMMARSLRELGVGLWRASSVGRQRTAIDSAVFGEQDVVQRVFWASSGDKTRPRWPGRAAQVARRGGRNKGTR

SEQ ID NO: 72681 - protein, 91 aa, Zea mays
  Coding DNA Sequence Number=SeqID_30902
  Subcellular localization annotation: CTP_CleavageSite=35; ConfidenceScore=5.11e-01
MDAETVHHPALALKHPYGQVYVQTQWARRSGTGIRCVSFASGPPVQRERTQPSLLVMADECTHTGLLWDHVSIYRQATVRKVKFKYEYKNG

SEQ ID NO: 72682 - protein, 138 aa, Zea mays
  Coding DNA Sequence Number=SeqID_30903
TDEFVADDSPDSPMYHRTVRLLGAFGLRRSSKTRFDNVFQVKYVNMYLRNWVTAFENKFPTPVIYSRTTPSIPESGWFNVGQPGAPDTVRCATGQSVFGELDGRGGRRGSPASDVAEDPSDVRECALTGPPQARGGRN

SEQ ID NO: 72683 - protein, 100 aa, Zea mays
  Coding DNA Sequence Number=SeqID_30904
MAEQTVLSVRSSTSVTRVQDMGDVHNDLLDWALLGVCFITKAFENKSRIGLKTKRRYRWQVLRSLGLKTRRRRFQWESVAAHGITAMGASSRSNFVWSEW

SEQ ID NO: 72684 - protein, 57 aa, Zea mays
  Coding DNA Sequence Number=SeqID_30905
MTGSLSGRDPGAIGERRQPYTHADHPANRRRLSGLVQGTLLLLPGFRLSSSDSSPSR

SEQ ID NO: 72685 - protein, 77 aa, Zea mays
  Coding DNA Sequence Number=SeqID_30906
MEANPMESYPSKEVENLREKLVEENFYLITEILPPHFNFCQSLLANVVKNLSSSDDVVRYTMVLGSRITLLVHLTVV

SEQ ID NO: 72686 - protein, 197 aa, Zea mays
  Coding DNA Sequence Number=SeqID_30907
MGLTRARLDGVDARGNSDARSYTREGTATTAPALPNARAKRQHARLPRQRTLHESCVPAAVNPAGTELPLPETTRTPPPYHPPPRRNPTAAAIAAASATAVNAVNRPPARHNPAAAGAGVATSANPPRDNPAAVATAAAAPGPARPHGANQVATMANRPNARPTARTCPRLPSVPLPPPMPRPPPRLRSRIPRPLPP

SEQ ID NO: 72687 - protein, 60 aa, Zea mays
  Coding DNA Sequence Number=SeqID_30908
MANLVAGNFSPWNSLCLGSPKSKDSALCVVFTVRWAEEIQRAPRVELCFVAAVLNHQERR

SEQ ID NO: 72688 - protein, 66 aa, Zea mays
  Coding DNA Sequence Number=SeqID_30909
  Subcellular localization annotation: CTP_CleavageSite=46; ConfidenceScore=5.48e-01
MVRPEPSPPTNSPTSSTTLPEQSRRRNLRKAVKNNKQRRNIFFLVYLSVKEHRKNTENPSPELVQG

SEQ ID NO: 72689 - protein, 277 aa, Zea mays
  Coding DNA Sequence Number=SeqID_30910
  Gene Ontology: Mol. function=protein binding; Cellular component =clathrin vesicle coat; Biological process=intracellular protein transport
  Homolog annotation: Hit_ID=Q283P0; Match level="QueryCoverage=97%, HitCoverage=68%, E-value=2e-98, Identity=56%"; Hit description=AP-1 mu subunit
  Pfam annotation: Domain name=Adap_comp_sub; Domain location=117-277; Score=190.9; E_value=3.1e-54; Accession=PF00928.11; Description =Adaptor complexes medium subunit family
GDSEVHSPVVYDDAGVTYMFIQHNNVFLLTAARQNCNAASILLFLHRVVDVFKHYFEELEEESLRDNFVVVYELLDEMMDFGYPQYTEAKILSEFIKTDAYRMEVTQRPPMAVTNAVSWRSEGIRYKKNEVFLDVVESVNILVNSNGQIVRSDVVGALKMRTYLRCVRLARFENDRTISFIPPDGSFDLMTYRLSTQVKPLIWVEAQIEKHSRSRIELMVKARSQFKERSTATNVEIEVPVPSDATNPNIRTSMGSAAYAPERDAMVWKVKSFPGGK

SEQ ID NO: 72690 - protein, 98 aa, Zea mays
  Coding DNA Sequence Number=SeqID_30911
  Gene Ontology: Mol. function=protein phosphatase type 2C activity
  Homolog annotation: Hit_ID=Q2HW33; Match level="QueryCoverage=54%, HitCoverage=15%, E-value=2e-08, Identity=51%"; Hit description =Protein phosphatase 2C-like
MASSRRPAHRPPEAQPATTMVVLTLRVAHPVVIRQVYYLTDEPEVHFIWQPSQKSSVLAISRAFDDYYVKDCGVISASEMTQRRTDNKTSSSSSPPSG

SEQ ID NO: 72691 - protein, 147 aa, Zea mays
  Coding DNA Sequence Number=SeqID_30912
  Gene Ontology: Mol. function=nucleoside-triphosphatase activity; Cellular component=membrane; Biological process=electron transport
  Homolog annotation: Hit_ID=Q93YY0; Match level="QueryCoverage=54%, HitCoverage=54%, E-value=2e-36, Identity=67%"; Hit description=68 kDa protein HP68
  Pfam annotation: Domain name=ABC_tran; Domain location=29-122; Score=- 63.7; E_value=0.075; Accession=PF00005.17; Description=ABC transporter
  Subcellular localization annotation: CTP_CleavageSite=44; ConfidenceScore=5.63e-01
MPPPSRSTASLPLLIDSALLPTTPSLCQSRFTPPAPVSVSVPSSASQGSNIFKTRIEDANNVDADIYLIDEPSAYLDLEQRIVASKVIKRFILHAKKTAFIVEHDFIMATYLADKVIVYEGRPSIDCTANAPQSLVSGMNKFLSVSA

SEQ ID NO: 72692 - protein, 57 aa, Zea mays
  Coding DNA Sequence Number=SeqID_30913
MASVFVFKQKVVVSWICLSFVMVYVACAMQRNIPFLCVATCKSSKNVLSMYEMKTLY

SEQ ID NO: 72693 - protein, 714 aa, Zea mays
  Coding DNA Sequence Number=SeqID_30914
  Gene Ontology: Mol. function=nucleoside-triphosphatase activity; Cellular component=integral to membrane; Biological process=response to nematode
  Homolog annotation: Hit_ID=Q69S68; Match level="QueryCoverage=96%, HitCoverage=95%, E-value=0.0, Identity=73%"; Hit description =Putative ABC transporter
  Pfam annotation: Domain name=ABC2_membrane; Domain location=442-649; Score=156.0; E_value=1e-43; Accession=PF01061.14; Description=ABC-2 type transporter
  Pfam annotation: Domain name=ABC_tran; Domain location=59-247; Score =131.7; E_value=2e-36; Accession=PF00005.17; Description=ABC transporter
  Pfam module annotation: Pfam domain module=ABC2_membrane::ABC_tran; Domain location=442-649::59-247
MAQQQPEKPAGVGRFGFTGGLEFTGLTYTVVKKQRGAGGEWEKKDVDLLHEITGYAPKGCVTAVMGPSGAGKSTFLDALAGRIASLDGRVALDGVEMSPSLIKRSSAYVMQDDRLFPMLTVYETLMFAADFRLGSSVSASDKKLRVENLIEQLGLTSSRNTYIGDEGTRGVSGGERRRVSIGVDIIHGPALLFLDEPTSGLDSTSAHSVIEKVHDIACAGSTVVLTIHQPSSRILLLLDHLIILARGQLMYSGGPKEVTAHLGRMGRKVPKGESSIEHLLDVIQEYEQSEFGVKALAEFCLTGLKPPKLTATYGAEGLSTVSSIVQTPISGPGGGDDDDFDRSLRSQHSKSPWSGVRLTPSRRPRHKDQQHGRPGPGPGPGNHRYTPDIVMGTPTPLSSAYTVNEDDYLTPTHRAAPNATGAPGVGVNALGHRGKFANSYVGEVWVLMRRNFTNIWRTPELFLSRLMVLTVMGFLMATMFTKPKDNAQGITNRLSFFIFTVCVFFFSSNDAVPAFIQERFIFIRETSHNAYRASAYVVAGLITYLPFLLLQSATYAAIVWFALKLHGQFLYFLVMLYASLLSTNSFVVFISSVVPNFILGYAAVIAFTALFFLFCGYFLDSHSIPVAWKWMNTVSTMKYPYEGLLMNEFDGDRVFASDPAVGLTLTGNNILQQLGISVEEDRKWWMVLYLLGWAVFYRVLFYLVLRFASKNKRK

SEQ ID NO: 72694 - protein, 667 aa, Zea mays
  Coding DNA Sequence Number=SeqID_30915
  Gene Ontology: Mol. function=voltage-gated chloride channel activity; Cellular component=integral to membrane; Biological process=chloride transport
  Homolog annotation: Hit_ID=Q8GX93; Match level="QueryCoverage=82%, HitCoverage=77%, E-value=1e-153, Identity=54%"; Hit description =Chloride channel protein CLC-e
  Pfam annotation: Domain name=CBS; Domain location=505-624; Score=1.1; E_value=0.048; Accession=PF00571.18; Description=CBS domain
  Pfam annotation: Domain name=Voltage_CLC; Domain location=133-504; Score=78.8; E_value=1.8e-20; Accession=PF00654.10; Description =Voltage gated chloride channel
  Pfam module annotation: Pfam domain module=CBS::Voltage_CLC; Domain location=505-624::133-504
  Subcellular localization annotation: CTP_CleavageSite=63; ConfidenceScore=5.66e-01
MAAFAAPSLSSLILLASPHSAPTLLRLRRAGGRSLELSSRRGGSARLRVVRRAVTEEESEAARGDEEVEEAPEEPVAGRDLVTLAACLVGLLTGVSIVLFNLSVHEIRDVFWDGIPLRGASWLREEPIGEVWQRVIFVPVSGGVIVGGLNALRSQIETNSDAPVSKIKSAFRPFLKAVAASFTLGTGNSLGPEGPSVEIGSAIAKGFGDVFEWDGGKRLSLVAAGSAAGLSSGFNAAVAGCFFAVESVLWPSADSSSLANSTPMVILSSVIASVVSEIGLGSDPAFTVPEYDFRSPTELPLYLLLGVFCGLVSIALSRCTSLAMKAVESLQRTTGLPKAASPALGGLIVGLLALLYPEVLYWGFENVDILLESRPFTSGLSTTILVQLIGVKILATSLCRASGLVGGYYAPSLFIGAATGMAYGKFMKFTFTGPEPLLHVPFLDVASPQAYGLVGMAATLAGVCKVPLTSVLLLFELTQDYRIVLPLLGAVGLSSWIASPQRFSKRIRSKLDSWEDKSSIPQQANDMLTENKEATSMDAADLSLELYKIESSLCVYDANDSNMFKNLTVGEAMKTNYFSVSMTTPLIEALDLMLAEKQPFVMITENNTSARGLLALKNIQDFCKAAKTTRSQAEIKEAYIENTKSLHQEDTNPWYRTSGLCLMHISN

SEQ ID NO: 72695 - protein, 115 aa, Zea mays
  Coding DNA Sequence Number=SeqID_30916
  Gene Ontology: Mol. function=two-component response regulator activity; Biological process=two-component signal transduction system (phosphorelay)
  Homolog annotation: Hit_ID=Q9FRZ1; Match level="QueryCoverage=90%, HitCoverage=45%, E-value=2e-39, Identity=82%"; Hit description =Response regulator 4
MVYYEDTRMILPDGAEEFFLKPVKPADMKKLKSHLLKRKQPNQKNKPQAQAVESPEQQLDPHPQPVHEPEEAAADRNGVNKRKAAAMEEGLTVVVTAPESTKPRRLSTSSLTVET

SEQ ID NO: 72696 - protein, 226 aa, Zea mays
  Coding DNA Sequence Number=SeqID_30917
  Gene Ontology: Mol. function=carboxyl- and carbamoyltransferase activity; Cellular component=ornithine carbamoyltransferase complex; Biological process=amino acid metabolic process
  Homolog annotation: Hit_ID=Q8SA97; Match level="QueryCoverage=70%, HitCoverage=24%, E-value=5e-18, Identity=40%"; Hit description =Ornithine carbamoyltransferase
MAPPVDVVGPRPRLGDVEAPPRSRSSLSSVAVVESEPLGRARRRPSAGARAESEPWGRAKRSSSSSGVEPKSEPWVGRSGVRRLSGLSPSPSPESGGADSRSGAGGAVLLSGRSVERRSDCGHFGSVDWRMRVRIKLYADGGYQLRIRRLEGTPNYGPQQFQTSDLKNCCDVSKRGLPVVLKFSQDIKRVRVPTIEMLDANASTAVAVAFRMLLEERRMVEFVEVV

SEQ ID NO: 72697 - protein, 143 aa, Zea mays
  Coding DNA Sequence Number=SeqID_30918
  Gene Ontology: Mol. function=two-component response regulator activity; Cellular component=nucleus; Biological process=two -component signal transduction system (phosphorelay)
  Homolog annotation: Hit_ID=Q9FRZ1; Match level="QueryCoverage=86%, HitCoverage=53%, E-value=1e-52, Identity=87%"; Hit description =Response regulator 4
  Pfam annotation: Domain name=Response_reg; Domain location=10-130; Score=23.1; E_value=5.7e-05; Accession=PF00072.14; Description =Response regulator receiver domain
MTVLDAESRFHVLAVDDSIIDRKLIEMLLKSSSYQVTTVDSGNKALELLGLRDNGAEDASPPSSSSSSSSSSSPDHQEIDVSLIITDYCMPGMTGYDLLKRVKGSSSLKDIPVVIMSSENVPARISSSLQQQQQSLFVPSTLG

SEQ ID NO: 72698 - protein, 1037 aa, Zea mays
  Coding DNA Sequence Number=SeqID_30919
  Gene Ontology: Mol. function=zinc ion binding; Cellular component =membrane; Biological process=defense response
  Homolog annotation: Hit_ID=Q1SA17; Match level="QueryCoverage=98%, HitCoverage=99%, E-value=0.0, Identity=62%"; Hit description =Pleckstrin-like; Regulator of chromosome condensation/beta-lactamase- inhibitor protein II; ...
  Homolog annotation: Hit description=Zinc finger, FYVE/PHD-type
  Pfam annotation: Domain name=DZC; Domain location=983-1018; Score =81.7; E_value=2.4e-21; Accession=PF08381.1; Description=Disease resistancezinc fingerchromosome co
  Pfam annotation: Domain name=FYVE; Domain location=600-668; Score =55.9; E_value=1.3e-13; Accession=PF01363.12; Description=FYVE zinc finger
  Pfam annotation: Domain name=RCC1; Domain location=240-298; Score =10.1; E_value=0.058; Accession=PF00415.9; Description=Regulator of chromosome condensation (RCC1)
  Pfam annotation: Domain name=RCC1; Domain location=301-350; Score =21.9; E_value=0.0024; Accession=PF00415.9; Description=Regulator of chromosome condensation (RCC1)
  Pfam annotation: Domain name=RCC1; Domain location=380-429; Score =21.2; E_value=0.0036; Accession=PF00415.9; Description=Regulator of chromosome condensation (RCC1)
  Pfam annotation: Domain name=RCC1; Domain location=444-493; Score =34.9; E_value=2.8e-07; Accession=PF00415.9; Description=Regulator of chromosome condensation (RCC1)
  Pfam annotation: Domain name=RCC1; Domain location=496-545; Score =26.1; E_value=0.00012; Accession=PF00415.9; Description=Regulator of chromosome condensation (RCC1)
  Pfam annotation: Domain name=RCC1; Domain location=550-597; Score =24.9; E_value=0.00028; Accession=PF00415.9; Description=Regulator of chromosome condensation (RCC1)
  Pfam module annotation: Pfam domain module=DZC::FYVE::RCC1::RCC1::RCC1 ::RCC1::RCC1::RCC1; Domain location=983-1018::600-668::240-298::301 -350::380-429::444-493::496-545::550-597
MSDVSLDLGGIRAGPVERDIEQAITALKKGAYLLKYGRRGKPKFCPFRLSNDESVLIWFSGKEEKHLRLSHISKIIPGQRTICKDKDEAEVWFAGLKTLISRCHQRKWRTESRSDLLSSGATSPRTYTRRSSPLSSPFSSNDSIHKDGSDNYRLRTPYGSPPKNGLEKAFSDVMLYAVPPRGFFPSDSNAGSVHSMSSGHSDNTNGHPRGVPMDAFRASYSSAVSSSSHGSGHDDGDALGDVFIWGEGTGEGILGGGGSRVGSSSGAKMDCLVPKPLEFAVRLDVQNISCGGRHAALVTKQGEIYSWGEESGGRLGHGVDCDVSQPKLIDALSHMNIELVACGEYHTCAVTLSGDLYTWGDGTFKFGLLGHGNDISHWVPKHLFTFGDGSFGVLGHGDRESISVPREVESLKGLRTVRAACGVWHTAAVVEVMAGNSSSSNCSSGKIFTWGDGDKGRLGHGDKGPKLVPTCVAALVEPNFCQVACGHCLTVALTTSGHVYTMGSAVYGQLGNAQADGMLPVRVEGKLHKNFVEEISCGAYHVAVLTSKTEVYTWGKGANGRLGHGDTDDKNTPTLVEALKDKQVRIVVCGINFTAAICIHKWVSGVDQSMCSGCRQPFNLRRKRHNCYNCALVFCHSCSSKKSLKASLAPNTNKPYRVCDTCYSKLTKGLETDMHSSAKRAATVPGVSDANEEDLETRSNAQLSRLSSMESFKHLDSRYSKKNKKFEFNSTRVSPVPNGSSHWSGLNISRSFNPVFGSSKKFFSASVPGSRIVSRATSPISRRASPPRSTTPTPTLGGLTSPRVVPNDGKPTNDALSQEVLNLRSQVESLARKSQLLEVELERTTKQLKEAISIAGEETAKCKAAKEVIKSLTAQLKGMAERLPGGAAKNTKLPPLPGIFIPSDIPSMPTESEGSPSSSGEQIINGHNGLLTSNGQSSIRNKTSHPEVGKNGGRLPDAESCHDAEWVEQDEPGVYITLTALPGGARDLKRVRFSRKRFSETQAEQWWQQNRARVYQQYNVRVIDKSTASVNSDIAAN

SEQ ID NO: 72699 - protein, 48 aa, Zea mays
  Coding DNA Sequence Number=SeqID_30920
MGNITIYDIEFIQTIRQCRHHTIKTIVTQPPLWWLWIAQISRHQIPRH

SEQ ID NO: 72700 - protein, 150 aa, Zea mays
  Coding DNA Sequence Number=SeqID_30921
  Gene Ontology: Mol. function=oxidoreductase activity, acting on single donors with incorporation of molecular oxygen, incorporation of two atoms of oxygen; Cellular component=cytosol
  Homolog annotation: Hit_ID=Q9SIR5; Match level="QueryCoverage=70%, HitCoverage=36%, E-value=3e-42, Identity=74%"; Hit description =Expressed protein
  Pfam annotation: Domain name=UPF0103; Domain location=6-149; Score= -91.8; E_value=7.2e-05; Accession=PF01875.8; Description=Protein of unknown function DUF52
MERARRASHAGSWYTNDARKLEEELNGWLGAAGLTKSPDVRAVIAPHAGYSYSGRCAAYAFGNIDPTNISRVFLLGPSHHYYTPKCALTRASVYCTPIGDLPVDQEGSWTSATEFVVSDNNGVGISPRTPYGEGGEIRKKGDWGNESVIA

SEQ ID NO: 72701 - protein, 100 aa, Zea mays
  Coding DNA Sequence Number=SeqID_30922
MPCFNMYMSSSVMDDGGIQGGYTSLLLGVDQDAASAVKAGSVFDNILICDEPDYARHVVDETFAANKEAEKEAFEGAEKKRKAREEERQRHRHYDYHDEL

SEQ ID NO: 72702 - protein, 305 aa, Zea mays
  Coding DNA Sequence Number=SeqID_30923
  Gene Ontology: Mol. function=metal ion binding
  Homolog annotation: Hit_ID=Q2QZM2; Match level="QueryCoverage=74%, HitCoverage=34%, E-value=6e-12, Identity=24%"; Hit description =Expressed protein
MRGIRESLRTVQGSLLRLEAVVLLSALILAALVLYGSANRRSSDKLLRGAMWMAYSMSYVVVSYAVGIIQDGPFRGETFVLWAAALLLIQASAYSAPVHSRRDVDQRKKLLLQHVLQTGLVLWLIVNATGHNASYRAAIWAFWALNVLKTAAKIAEMIEVSRPDLSVRVVAEYMAEYMAEADGVQQQPAADPATMQGYAYIFHGEEVMEPVIHTGGHRVRENMLSQSAVKSVVTIDQVYQWIDQQPDSDVEKDRAKDFCLAFALFKLLKRRFYGYVPAEAGSEKARSLVLNGLILMDATGPDAAF

SEQ ID NO: 72703 - protein, 178 aa, Zea mays
  Coding DNA Sequence Number=SeqID_30924
  Homolog annotation: Hit_ID=Q2QMP1; Match level="QueryCoverage=86%, HitCoverage=18%, E-value=1e-45, Identity=64%"; Hit description=MATH domain containing protein, expressed
MTAGEVDMFLFIKWSVGARGDWGARSIFLYILKDVMSLIIFHYSFALLIMTNFSQALIMEKVDRPFRCLDRPYRRELIRIYMTNVEQIYRRFIEERRSKLSKLIEDKIKWSSFRAFWSAIDPNTRHRMSREKTDTILKMLVKQFFVEKEVTSTLVMDSLYTSLKALEYQMNGRKGKQN

SEQ ID NO: 72704 - protein, 945 aa, Zea mays
  Coding DNA Sequence Number=SeqID_30925
  Gene Ontology: Mol. function=calcium ion binding; Cellular component =integral to membrane; Biological process=neuropeptide signaling pathway
  Homolog annotation: Hit_ID=Q2QMP1; Match level="QueryCoverage=34%, HitCoverage=27%, E-value=8e-30, Identity=33%"; Hit description=MATH domain containing protein, expressed
GIEVAYQEAVALKRQEELIREEEEEAGLLEHQMKGKRGGGVNEKDKRAKKKQTKQKKNRKAKDKERDEKCEVKILERLRDETAIDNSDGLPSQVEVIAKIDALEEGSSDGSDMSNRGKNQRNKGLSIISFAEEGDGLPSTSNVTGGLGRNSSGCCTAPKLDQDTVLLTLRDRLRKLGQRLHEKNIEGQKLLKKHFEARDAKAKEEPSDSSNSLDKPPDVPEIPVHSSEDTVDLKVNGTPKKDASVVNPVLEDSVSGIPVTANNEPVPSPTTTKMDPVSNKVNGSSLKMKVTMASPCSKSHPADMDKDASLPSKSPRTNRAAPVPPKLPSADKATLVPSKLPSVDKATPVPQKSPLVNKVAQARPKSPAVDKATPHRPKSPAVDKATPVRSQSPAVDKATLVRPQSPAVDKATPVRPQSAAVDKATPVRPKSPAIDKATPIAPKSPPVDKASPALPKSLSGAKDALFPSRSLQIDKFTPAAPRLSQDDKAALPSSEQSHISPATSSEAQGATTRKVTTTTSLSEAAAAWRPSSAPVLPTPRSTGPAASHIQTSTLLSRSMSEAAGRRPVNDPSFSAPSYTPQTYRNAIIGKSGLSMTSASLAYQPSSLDQDTAPSRPLSAYASSTVMMPPAGRSDQSSARHGFKSGPGKLEAHDGWQQWKGDSNVDMHLWRDHAPYQQMTNSQAYEQSRRDDTYQQACSRGTEKFSRHAGLQARQQFQTETPASHVWHQPQGPVAEEFPHLDIINDLLEEDQINGSIPESFRQDYNVFGLPFSPRGNLSDMEMASVRSPARFNSPKYDGGLSGAYDMNAVNGLRERQFPSLDIYSNGLSDVSASKPWLNGSASPSVSLGVNTNGYHPQLNLAVACGREKNGMKVSVNVEPTTKSGYHLLTQNGTRATLLDYSLLDGATAKGHVAATTDQHVSTSSFDLDVSWQAVGRQHQTDDTGL

SEQ ID NO: 72705 - protein, 264 aa, Zea mays
  Coding DNA Sequence Number=SeqID_30926
  Gene Ontology: Mol. function=metal ion binding; Biological process =ubiquitin-dependent protein catabolic process
  Homolog annotation: Hit_ID=Q2QZM2; Match level="QueryCoverage=94%, HitCoverage=40%, E-value=8e-42, Identity=39%"; Hit description =Expressed protein
  Pfam annotation: Domain name=DUF594; Domain location=195-254; Score =66.2; E_value=1.1e-16; Accession=PF04578.4; Description=Protein of unknown function, DUF594
SIAPPETRYWEDKVGQYVLLKRFERRPCNLLSWLTLYLVEPRRQGQKRGRRKPLPPEVKRAVLLWLKQNHCHLSNGVATLRKHHLLPRLAWACRLPMVTDQILAWHVVTTSCDWSYSFRPAGRFAAGDDHHRLVAKKLSNYCAYLVAFVPEMLPDPSYNAEQIFDTAVQQARDHLDGCKTHSSIIARLEEMEIAERPAAFGVDDARRWEVLAEFWTELVLFLAPSDNVDIHAEMLGAGGEFMTQLWALLSHAGVLERPPIMQRQ

SEQ ID NO: 72706 - protein, 454 aa, Zea mays
  Coding DNA Sequence Number=SeqID_30927
  Gene Ontology: Mol. function=beta-amylase activity; Biological process=polysaccharide catabolic process
  Homolog annotation: Hit_ID=Q5NB81; Match level="QueryCoverage=91%, HitCoverage=74%, E-value=0.0, Identity=77%"; Hit description =Putative beta-amylase PCT-BMYI
  Pfam annotation: Domain name=Glyco_hydro_14; Domain location=1-401; Score=210.4; E_value=4e-60; Accession=PF01373.8; Description =Glycosyl hydrolase family 14
MGASLAALAAAGVAGIAVELWWGVIERHRPGEYDWAGYLELAAMARRHGLRVRAILAFHQCGAGPHDPPWIPLPQWVLEEMDKVPDLSYTNRYQKRNREYISLGCDILPVLKGRSPMQAYSDFMRSFRNTFEDYLGAIVTVCILPVFKTHKINSEQPKDVSLITLYLRKFKLEWAQEFMQASLSARAQIFGLQEWGNDGSTGTDGSQKNLEEASFFRLDGGYWDTPYGHFFLEWYSGMLLLHGERLCMIADAIFSGTGVTISGKVAGIHWHYYTCSHPSELTAGYYNTLLRDGYLPIAQMFAKYKAALCCSCFDLRDTERTDSESSPEGTLRQLAGAAKMCGLPLNGENSMTRLDDASLNQVIRSSRLYSGRTSGTSFSFNYVRMNKSLFEFHNWNRFTKFVRQMSDARTFLARLYVRRGQQCLSSMSVVWVLQQSKQLQQCRLAACRTRPWLI

SEQ ID NO: 72707 - protein, 37 aa, Zea mays
  Coding DNA Sequence Number=SeqID_30928
MVRSEGVDKGRRLQVVNDLIQGLRELELVLSVGEKDD

SEQ ID NO: 72708 - protein, 92 aa, Zea mays
  Coding DNA Sequence Number=SeqID_30929
MEYQRQQAEYQKKDEYYSNLQAHNQALLSQLTQQAGVPMSTYGMSSPDFALPMPTLSPPPPPPSQFPMGFQTPPASVAASRDVSGQDDASNS

SEQ ID NO: 72709 - protein, 141 aa, Zea mays
  Coding DNA Sequence Number=SeqID_30930
MTSITPSSVSDSQLDETFTHGSRITFGSLDFLATATDELRLVDSDTLVKASMGGPTRFTTATSKVEKRCLKSHVAALKRCLHKLAATIKHKVEGASPSTFMAIIDHQPTSILDLLKDDSSHGSMEEPNIDAVRKMYPDPFG

SEQ ID NO: 72710 - protein, 142 aa, Zea mays
  Coding DNA Sequence Number=SeqID_30931
  Homolog annotation: Hit_ID=Q6ASU6; Match level="QueryCoverage=23%, HitCoverage=15%, E-value=1e-09, Identity=81%"; Hit description =Expressed protein
MAPALSSLRYGNSLSVVSIFARDGRALRGHLPYHRRLPGNDPTDCSMIFRYFLCSMTIRTNLQKLLDFAPPAPFPPVEASWCSSTGPKQTSSPAGGTLAASTKAGSRLASPRASLSTGAAVAAPTSFPPCWCLLPGVGRMGG

SEQ ID NO: 72711 - protein, 142 aa, Zea mays
  Coding DNA Sequence Number=SeqID_30932
  Homolog annotation: Hit_ID=Q6ASU6; Match level="QueryCoverage=23%, HitCoverage=15%, E-value=1e-09, Identity=81%"; Hit description =Expressed protein
MAPALSSLRYGNSLSVVSIFARDGRALRGHLPYHRRLPGNDPTDCSMIFRYFLCSMTIRTNLQKLLDFAPPAPFPPVEASWCSSTGPEQTSSPAGGTLAASTKAGSRLASPRASLSTGAAVAAPTSFPPCWCLLPGVGRMGG

SEQ ID NO: 72712 - protein, 46 aa, Zea mays
  Coding DNA Sequence Number=SeqID_30933
MAQRGVGRAGSGAGVLWRAQSASNMSRRDRKRANLGKNLAQASSCT

SEQ ID NO: 72713 - protein, 54 aa, Zea mays
  Coding DNA Sequence Number=SeqID_30934
MEPSNLQQAGVLTFRKSKVEEDPYAYDKWAQGQMKKIIDLLVIFGSIAPVLQMD

SEQ ID NO: 72714 - protein, 104 aa, Zea mays
  Coding DNA Sequence Number=SeqID_30935
MVQLLQLAGLTSHKAMKQTLLEMRGQERNDWLLCCVSKMSPSTKDIVNGPTVSMALIPLMSHPVLEGKSNANHVADSGFAANPCLELIVLLELLGILHLDFIFS

SEQ ID NO: 72715 - protein, 118 aa, Zea mays
  Coding DNA Sequence Number=SeqID_30936
MAELAHGEEMGPRTIEEQRQSNSPLMKVEQGREATDHISSRASRPFWFDDRWVLSASRSSLLSTCSVRRWAGARAGPASEAEGGRDMQGQGGCAGGSGLRGWEQACGGGFNLVEETRE

SEQ ID NO: 72716 - protein, 47 aa, Zea mays
  Coding DNA Sequence Number=SeqID_30937
MKTNDPRHIQLCQYGTAIVGLDRVNRIGCLMSFLENQLPNGLDIGNT

SEQ ID NO: 72717 - protein, 116 aa, Zea mays
  Coding DNA Sequence Number=SeqID_30938
  Gene Ontology: Mol. function=acyl-CoA binding; Cellular component =cellular_component; Biological process=transport
  Homolog annotation: Hit_ID=Q75G87; Match level="QueryCoverage=98%, HitCoverage=56%, E-value=1e-33, Identity=66%"; Hit description =Putative Acyl-CoA-binding protein
  Pfam annotation: Domain name=ACBP; Domain location=3-114; Score =141.6; E_value=2.1e-39; Accession=PF00887.9; Description=Acyl CoA binding protein
MPLDEEFEEHAEKAKTLPESTSNENKLILYGLYKQATVGDVNTDRPGIFYQKDRAKWDAWKAVEVFYMDVSIPIASQGITVLLAQTLEILAGKSKDEAMNDYITKVKQLQEEAAAS

SEQ ID NO: 72718 - protein, 414 aa, Zea mays
  Coding DNA Sequence Number=SeqID_30939
  Gene Ontology: Mol. function=metal ion binding
  Homolog annotation: Hit_ID=Q84SC7; Match level="QueryCoverage=95%, HitCoverage=95%, E-value=1e-48, Identity=33%"; Hit description=Zinc finger (C3HC4-type RING finger) protein-like
  Pfam annotation: Domain name=zf-C3HC4; Domain location=209-249; Score= 30.9; E_value=4.6e-06; Accession=PF00097.15; Description=Zinc finger, C3HC4 type (RING finger)
MAGKEAAESSRARRRMDLNLYVGLPPLSPPRLWLDTSAPSRTTWVSHSGPGAALDAPRTREPEEPLAPAAAAAAAYSPSNALFAPDPEEHPVFDPLVYSWLDGSGEEYTDAPALSAPAPTPVDGHGVSGPQFLMAATGLDGDDLAVPRPVHPSRVAAAAAAAGGLEMVGTIVLGQSTQDPDGGGDKVRGSDAAEKDGSCDCNCDSSFECNICLERAKQPVVTSCGHLFCWPCLYRWLHAQSPFCDCPVCKGEVLLTSITPIYGRGGDEEGDSGSSAVPDLPPRPQANRRDSLRQQLQTATDARGIAAVLREMIQNQGIVTSVPAGRQRAGSARRQRRQGSNASRSAVVNAGNAAPEGSDPIQPPHSNGGNGEQVVHAAPQQPPPAVVLGEPGPSRRSRHSESAAIRRTRRRPQQ

SEQ ID NO: 72719 - protein, 99 aa, Zea mays
  Coding DNA Sequence Number=SeqID_30940
MDETPVKNRKSERASPYSENGTMPEVRIQMGSSKIEPPARTYGDFTGIWRRRRRAEVLSGPTISGDSGGEERPKLVPGSSMRSETREWARTVKTTAQEK

SEQ ID NO: 72720 - protein, 131 aa, Zea mays
  Coding DNA Sequence Number=SeqID_30941
  Gene Ontology: Mol. function=kinase activity; Cellular component =ornithine carbamoyltransferase complex; Biological process=amino acid metabolic process
  Homolog annotation: Hit_ID=Q6QP54; Match level="QueryCoverage=70%, HitCoverage=32%, E-value=2e-20, Identity=61%"; Hit description =Putative kinase
MAEGIALRGYTAITFDIRDDSRVISAPEVMQRRTDNNDQFVILVTVGEDDELRFARPQGSDSALASADDLRLARPRGSDSASTTEDRLDLGFGGASTSPNLGRRPATSTGGAIITLPRADSGRREPDRRPI

SEQ ID NO: 72721 - protein, 55 aa, Zea mays
  Coding DNA Sequence Number=SeqID_30942
MGTQTSTVVVDGSRGWAQWWDRWGVDDGAWVWDWGVTADAAVRARNEPSRARLGS

SEQ ID NO: 72722 - protein, 115 aa, Zea mays
  Coding DNA Sequence Number=SeqID_30943
MAPFGDGGVGCGDGGEALRGWDPLRSGSAPPTMEGAAAAAAAAERRVFGGGGDGASFFSGIDGLMFGARMDELLFIDEITYDMDGVFVYFSIFDRYRCISVRNSSFSSSRTSRVR

SEQ ID NO: 72723 - protein, 225 aa, Zea mays
  Coding DNA Sequence Number=SeqID_30944
  Gene Ontology: Mol. function=voltage-gated potassium channel activity; Cellular component=voltage-gated potassium channel complex; Biological process=potassium ion transport
  Homolog annotation: Hit_ID=Q8LPN4; Match level="QueryCoverage=92%, HitCoverage=34%, E-value=3e-65, Identity=42%"; Hit description =Putative pumilio/Mpt5 family RNA-binding protein
  Pfam annotation: Domain name=PUF; Domain location=135-169; Score =37.8; E_value=3.7e-08; Accession=PF00806.9; Description=Pumilio -family RNA binding repeat
  Pfam annotation: Domain name=PUF; Domain location=16-45; Score=29.6; E_value=1.1e-05; Accession=PF00806.9; Description=Pumilio-family RNA binding repeat
  Pfam annotation: Domain name=PUF; Domain location=60-94; Score=32.1; E_value=1.9e-06; Accession=PF00806.9; Description=Pumilio-family RNA binding repeat
  Pfam annotation: Domain name=PUF; Domain location=96-130; Score=32.7; E_value=1.3e-06; Accession=PF00806.9; Description=Pumilio-family RNA binding repeat
  Pfam module annotation: Pfam domain module=PUF::PUF::PUF::PUF; Domain location=135-169::16-45::60-94::96-130
VLEVVDKDRKIDIVHELRNHILKCIGDQNGNHVIQKCIEVIQRVLEHCHDPVTQSATMNEIVQQTFHLTDDKFGNYVVQHVLKHGKPEERSAIIQKLSGQVVILSKLKYASNVIEKCLEFGTLEERDSLIGEIISSGQTFQELMKDQFGNYVVQKVLKTCDERYLEMILSSIKLHLNELKNYTYGKHIVTRVEKLIVTGEERARMASLSGQRQQQPPNCTAVDAH

SEQ ID NO: 72724 - protein, 152 aa, Zea mays
  Coding DNA Sequence Number=SeqID_30945
MALVSRCGSSPNSSPIMFALSSLLTVTEEQVESLGDEELALVSVQGQAEHTSSKHKSRGRFNKEALKKKYLEKAKIKESTFPVSLSDLNHDSNESTSSLSDEELKRHVYDKLNGLCFIADTARGLCTMALGDDAMDINDEDIGNDSAYEFAY

SEQ ID NO: 72725 - protein, 127 aa, Zea mays
  Coding DNA Sequence Number=SeqID_30946
TPSLSSLVFRFSASSAPLLPSHGQHGINGRSTYYDYDDIPTYSDTYKYSSTHLPPIVRDTTKQSRDGPKKATSKATTSLDDATKASLTDKKCKAALTIDAPQDAPENNNEAVNSKHPRTENPPSLGG

SEQ ID NO: 72726 - protein, 996 aa, Zea mays
  Coding DNA Sequence Number=SeqID_30947
  Gene Ontology: Mol. function=nucleoside-triphosphatase activity; Cellular component=integral to membrane; Biological process=transport
  Homolog annotation: Hit_ID=Q53KA2; Match level="QueryCoverage=94%, HitCoverage=93%, E-value=0.0, Identity=52%"; Hit description=ABC transporter-like protein
  Pfam annotation: Domain name=ABC2_membrane; Domain location=749-943; Score=-6.3; E_value=0.0037; Accession=PF01061.14; Description=ABC-2 type transporter
  Pfam annotation: Domain name=ABC_tran; Domain location=428-618; Score= 119.3; E_value=1.1e-32; Accession=PF00005.17; Description=ABC transporter
  Pfam module annotation: Pfam domain module=ABC2_membrane::ABC_tran; Domain location=749-943::428-618
MRDARAPQFQRRGQGGVGVVLLPLMLLLAGTASGQQQIQPPPVPPADLPDVERRLNNLTDHVATTISDKFRFCVADPKEDWNEAFNYTSDLSFVDRCLTETQGDLPQRLCGPDEVKFYFSSLYDRDGDKNINLKTNINCNMSSWGKGCDAGWACATDPVPDRPSNRGSNDIPLRTSSCQACCEGFFCPRGLTCMLRTIADWVPQLRRGALCLLLLVIYNCSDKFLSIRERRKARSRENAIRLARQQLKAQEGWKAAKQFARRHVSGMQGHLSRTFSRRRSFRQQVDADKSSHRVQEAPLMGQVQMQEMSDSAVFASESANEITEAMPSVIVDVSDGEVVATNENPAPKGKHRSTHTQVFKYAYGEIEKEKFQQRQDNKNLTFTGVIAMVKDQQKEITRPLLKVEFRDLTLMLGKKKLLRSINGELRPGRVTAVMGPSGAGKTTFLNAVTGKVNGYKMTGSVLVNGKNLNIRSYKKVIGFVPQDDIVHGNLTVEENLWFSAKCRLSASMKHRDKVLLVERVIDSLDLQGIRNSLVGTVEKRGISGGQRKRVNVGIEMVMEPSLLILDEPTSGLDSSSSQLLLRALRHEALQGVNVCAVVHQPSYTLYNMFDDLILLAKGGLMVYNGPVKTVEEYFTALGIHVPDRVNPPDHYIDILEGIVKPDSSAIKAKHLPVHWMLHNGYEVPSDMQDDVKEIGEQAPQFRSSSSTSGSPSPHCLPIRNAFAEERDRLEQRLSKPKDLSSRKTPGIFMQYKYYLGRVTKQRLREARLLMVDFLILGLAGICLGTIAKLSDKTFGMPGYIYTIIAVSLLCKIAALRSFSLERLQYFRERESGMSSLAYFLARDTIDHFSTVVKPIIYLSMFYYFNNPRSTIADNYIVLLALVYCVTGIGYTFAICFSPGSAQLCSALIPVVLTLLSTQKSTPTLIRRLCYSKWALEGFIIVNAKKYPGVWLITRCGLLFQSQFDIHNYKLCILILFMYGLFFRMVAFAAMILLKKR

SEQ ID NO: 72727 - protein, 72 aa, Zea mays
  Coding DNA Sequence Number=SeqID_30948
MSLIGQQSSRRSPGQWQALLVKRIYEPLPDPNIKSIKCSYSRLGTSTLSLHTMKAQISNGRGGCLALALADR

SEQ ID NO: 72728 - protein, 73 aa, Zea mays
  Coding DNA Sequence Number=SeqID_30949
  Subcellular localization annotation: CTP_CleavageSite=61; ConfidenceScore=5.11e-01
MPTEAREALDAWTSTSRIGGAGERNTSPQKTLRRNRTLGYEQSTSTPRAALPVFRRGRRPRGSGADGVCGGRA

SEQ ID NO: 72729 - protein, 151 aa, Zea mays
  Coding DNA Sequence Number=SeqID_30950
LDTSLELPPFPAMHSELPARSFWPQILPPHQEWSPPMRVRAGATPRTYRVRRRCCLLCSSSVWVSSPAHLPEPDNGPSPTRTKTAGRGGQVRCSINVFGVRVVDGPVVLLCRTSHERVAACLLARGAVTHARCARRRSTQQVKELCCPGQY

SEQ ID NO: 72730 - protein, 230 aa, Zea mays
  Coding DNA Sequence Number=SeqID_30951
  Subcellular localization annotation: CTP_CleavageSite=74; ConfidenceScore=5.08e-01
MTLFHRPSDATLQQPTPKHAHASREHWLPRGPDPSLLPTPLSHLTAPLRSRRRRPGPAQAPAPTPPRLSHAAICTALASYAGLLQPRGLLYPALTTASHDDLEGARCVAPASSPELTRTPSSPIPSPSLREDTSMANTSSGSASFGTLPLGLPQRHQRGSSMAPRNPPDPRWGTMAPTGDDALAPFSVPAPLPRPGAIVDVLRDALDNLHTCVYCKASQQLSTALGTTES

SEQ ID NO: 72731 - protein, 70 aa, Zea mays
  Coding DNA Sequence Number=SeqID_30952
  Gene Ontology: Mol. function=nucleotide binding; Cellular component =membrane; Biological process=small GTPase mediated signal transduction
  Homolog annotation: Hit_ID=P11620; Match level="QueryCoverage=71%, HitCoverage=20%, E-value=5e-09, Identity=80%"; Hit description=GTP -binding protein ypt1
MARTSSTGKERVRLQRLLHNDEKIRTVEVEDKTVKLQILMADAACFNSGTQQGRSGSGPSRAATTEELTG

SEQ ID NO: 72732 - protein, 50 aa, Zea mays
  Coding DNA Sequence Number=SeqID_30953
MAEQEERCSAAHADPMNKILAQRKGQSYTKTHRNIRAKTDVFVKHDMADV

SEQ ID NO: 72733 - protein, 207 aa, Zea mays
  Coding DNA Sequence Number=SeqID_30954
MAAVRIDRGTEEVQMAVGMQSGRAISPTGKGAIDVSAAARPSSLSAPALPTAAGEQGVRMAGFVDRVNRRSRVLERGGSIESLEVVALAPLRFVLGEGKNLLCNKGHRCHLSLSISLPRSRLQHVISTAREIREEKKKEATLSGRFFFRRCSQCAPVIDRGSMKAFNHNAKEQLSGMTPGRNKGCRYTRQKEKEKHTATLYCPHLAL

SEQ ID NO: 72734 - protein, 73 aa, Zea mays
  Coding DNA Sequence Number=SeqID_30955
  Subcellular localization annotation: CTP_CleavageSite=36; ConfidenceScore=5.39e-01
MVGGTLALAGRARAGPPCPPGRGRAPVAARCRGRCRRAAVPAWPGLCARAEAACRRPETAVAPTPSQKRTPRP

SEQ ID NO: 72735 - protein, 297 aa, Zea mays
  Coding DNA Sequence Number=SeqID_30956
  Gene Ontology: Mol. function=protein kinase activity; Cellular component=membrane; Biological process=protein amino acid phosphorylation
  Homolog annotation: Hit_ID=Q6H6T1; Match level="QueryCoverage=99%, HitCoverage=100%, E-value=2e-73, Identity=47%"; Hit description =Putative serine/threonine-specific protein kinase
  Pfam annotation: Domain name=Pkinase; Domain location=18-280; Score= -2.7; E_value=2.1e-08; Accession=PF00069.15; Description=Protein kinase domain
  Pfam annotation: Domain name=Pkinase_Tyr; Domain location=18-280; Score=-76.8; E_value=9.2e-08; Accession=PF07714.7; Description =Protein tyrosine kinase
  Pfam module annotation: Pfam domain module=Pkinase::Pkinase_Tyr; Domain location=18-280::18-280
MFRGCGLFVCARRGRGDLRKRGELGGASSRVAPAEPVCVDESEDSGAARQLAWAEVEAATGGFSSKVVGPRRVQHGVPRLALLLLLAGSAPSRLHGGAAGVQVLPWARRVAVAFQVATALEYLHEGRDPAVIHGDVKASNVLLDASMDARLCDFGFAHVGVAATMGGRPSDRAVMGSPGYVDPHLLRSGVPTKKSDVYSFGVLLLELLTGKEAVCRETGHRLTAAVRPKLSDGQLPDVLDPRLRGDCDVSEAAAVAELAMQCVSDSPGLRPSIADVVRVLQEKTSADGSRLGRKMLS

SEQ ID NO: 72736 - protein, 180 aa, Zea mays
  Coding DNA Sequence Number=SeqID_30957
  Gene Ontology: Mol. function=aldehyde dehydrogenase [NAD(P)+] activity; Biological process=aldehyde metabolic process
  Homolog annotation: Hit_ID=Q6H627; Match level="QueryCoverage=61%, HitCoverage=15%, E-value=5e-11, Identity=38%"; Hit description =Putative aldehyde dehydrogenase
MKTVRAVIRLVLYAGTLVAIDARRKEKGKAALRHRQVYHGSLKIAILFSSAREQFTMNCKTSQVKLPKGTFQQEKTRTTPSGSGTTCAVAGQAISGTRTCVRRHRGVREQRLPKKKPLLDYWSIMFPWLAFSGAIHLPSCCSAPLADLMSTPTWQTRENPTEPTREAETMSIDTSNRGKG

SEQ ID NO: 72737 - protein, 93 aa, Zea mays
  Coding DNA Sequence Number=SeqID_30958
MGRTEAADDGAESGGLGLGVGVGVGETVRELREAYESGRTRSLAWRQAQLRGLLRLLEEKEVGVLIKSANGALQQLGKWMAPEKASHGNIMLQ

SEQ ID NO: 72738 - protein, 111 aa, Zea mays
  Coding DNA Sequence Number=SeqID_30959
MTHRHYVELVVCTGWRWCSSDGAGDVLSTFVSFPRYHYRNRRLCRVSDALGEALKTLGKLFAECGTQQRGLGIQCIGKAVFVEYFFWGTRQRGLLSAREHSTKKSNRYGDA

SEQ ID NO: 72739 - protein, 88 aa, Zea mays
  Coding DNA Sequence Number=SeqID_30960
MGAESPRKQYCVFLALMLLGDRSGASPIHRECTPGTVACYIIAIDDWLPTGIRHAAVCGDKYLRHHGHVDMDRAALGARYLFVVGGIA

SEQ ID NO: 72740 - protein, 88 aa, Zea mays
  Coding DNA Sequence Number=SeqID_30961
  Subcellular localization annotation: CTP_CleavageSite=17; ConfidenceScore=5.28e-01
MSRPEHASLTSPTAYARGQPYSGHHRRQSAPRRDRQKPPDLTRPSTGPLLPSIVTLLTESTSSFRSKELLRKESKSQHQSLPLRISLP

SEQ ID NO: 72741 - protein, 138 aa, Zea mays
  Coding DNA Sequence Number=SeqID_30962
MANSGKARACGGELQRVWARERERERRRGEKRPVITTPLMAINGGLHYGEEIGRGKEAVVAVSGAQEAEGTQAGSGRGEGRRSGGSRWHARCGHQAAARLGGGKRGLTGGPRLAVREGGRKGWHDGWLGPGGPKRPCG

SEQ ID NO: 72742 - protein, 126 aa, Zea mays
  Coding DNA Sequence Number=SeqID_30963
  Homolog annotation: Hit_ID=Q6IEN8; Match level="QueryCoverage=37%, HitCoverage=7%, E-value=4e-09, Identity=66%"; Hit description=WRKY transcription factor 43
MDSSYLGKRKLDGGEREPPAAAFLPAVALGYEYEYGDAEAVDHRPCRAAAGEMDFFKKEEKRERKAAAALVPSDDLGIKEDEVTINMGLHHVDRRKSSSEESIVIDDGVSSNDVDHREAKAEVREK

SEQ ID NO: 72743 - protein, 402 aa, Zea mays
  Coding DNA Sequence Number=SeqID_30964
  Gene Ontology: Mol. function=catalytic activity; Cellular component =cellular_component; Biological process=metabolic process
  Homolog annotation: Hit_ID=Q2R712; Match level="QueryCoverage=90%, HitCoverage=45%, E-value=1e-133, Identity=62%"; Hit description =Cycloartenol synthase, putative, expressed
  Pfam annotation: Domain name=Prenyltrans; Domain location=230-272; Score=27.0; E_value=6.7e-05; Accession=PF00432.11; Description =Prenyltransferase and squalene oxidase re
  Pfam annotation: Domain name=Prenyltrans; Domain location=279-334; Score=28.7; E_value=2e-05; Accession=PF00432.11; Description =Prenyltransferase and squalene oxidase re
  Pfam module annotation: Pfam domain module=Prenyltrans::Prenyltrans; Domain location=230-272::279-334
MVKPISLSISLPLALVFVAGGRSRGTGRPTRGYIEWVVYDGCQSWETSFIIQAFCATDLVNDYGSTLQRAYEFMKNSQVMRNHPGDQRYWHRHRSKGSWTLSSADNGWAVSDTTGEALKTSKATFFLSNLKAVLLLSKISNKNNLVGDPIERERLHDAIDCLLSFANKDGTFSTYECKRTYSWLEILSPCETFPNIVVDYPYPECTSSVLQALILFKDLYPGYRTEEIEALVRSAATFIETKQQEDGSWLGNWGICFTYGAFFSIKGLVASGRTYKNSPCIRKACHFILSKQLSTGGWGESHIAIETQVYVNLKGDRAHAVNTAWAMLALIYAGQFERDPTPLHRAAKELINMQLETGEFPQQEHVGCFNCSLYFNYPSYRNLFPIWALGEYHRGLRAKKDN

SEQ ID NO: 72744 - protein, 93 aa, Zea mays
  Coding DNA Sequence Number=SeqID_30965
  Subcellular localization annotation: CTP_CleavageSite=50; ConfidenceScore=5.04e-01
MANNNSGVVWTLGTTIRFGSLDFVINDRRTMARTPEPWFPQRATCSTLPEASTASDSVPHEVVTGDDMAPANIAKYFGESNPILWLGYYLLAC

SEQ ID NO: 72745 - protein, 118 aa, Zea mays
  Coding DNA Sequence Number=SeqID_30966
MTNLANADIISAFISRTTSETQVHKLGRKSPQTTKELHDITTSHALGEDALGRSSTTVSRRPNTTRSSMGADRGQGPIFREFLIVDILAFPKSLLVLPKVTNHQNIHVTKRSETQLTR

SEQ ID NO: 72746 - protein, 90 aa, Zea mays
  Coding DNA Sequence Number=SeqID_30967
MCAGDRWPGGSRCSAGTPDSLVNYSGAASRIPEGEQFGVGVPGAPDTVRWHTGQSGSLEDMVARVTWPSILPPGWTVEWDPTSVEEEHEE

SEQ ID NO: 72747 - protein, 102 aa, Zea mays
  Coding DNA Sequence Number=SeqID_30968
  Gene Ontology: Mol. function=catalytic activity; Biological process =metabolic process
  Homolog annotation: Hit_ID=Q5R1L3; Match level="QueryCoverage=55%, HitCoverage=18%, E-value=7e-20, Identity=66%"; Hit description=Beta -amyrin synthase-related
MGARSSPCTPVSGRLEQGSWRHQELHSEGRSWAQQWISTRKFWCFARMVYLPMAYLYGKKFVGPITPTILALREEIYDTPYGKIDWSDARSKCAKENYTSLY

SEQ ID NO: 72748 - protein, 173 aa, Zea mays
  Coding DNA Sequence Number=SeqID_30969
MAPWLLPEQGLPADARRRKEGASMEVAGARPWESGQRHGRCTCWQPWELGRRKRGRWLLLREGQGAGGVEEAGAEGEKGRTPWERARKIWAPWLEQGRPRPWRLLGDGSRWLLLAGEKEEDGRAREEGAAARQEEEQRSGRGERATSMLAAVKQGGRRCVGKKIGGWWKRSDG

SEQ ID NO: 72749 - protein, 141 aa, Zea mays
  Coding DNA Sequence Number=SeqID_30970
MAVGHKGRDPPWGVTQVGWKHLRDVARAIKGADLFMPHSVGRLARIRRRPTYHRMMGQAEATEGLHDGVEIPKRKGSGFRGLDHFPFAVEDEVEAPKMDGHYEGPNNIVVDHPELGEENVGNMQGPYLAHQLSVFRTSSDK

SEQ ID NO: 72750 - protein, 238 aa, Zea mays
  Coding DNA Sequence Number=SeqID_30971
  Gene Ontology: Mol. function=DNA-directed RNA polymerase activity; Cellular component=chromatin; Biological process=chromatin assembly or disassembly
  Homolog annotation: Hit_ID=Q1SJG5; Match level="QueryCoverage=55%, HitCoverage=12%, E-value=4e-10, Identity=31%"; Hit description=SNF2 -related; Chromo; DEAD/DEAH box helicase, N-terminal; DNA-directed RNA polymerase, subunit beta-prime
PVAHPPPAPLVGRGRSNSGSKADSEGYNLNEKADDDGIHESIRDGNDGLNSRQWNLNEKAEDAYHSEAEQYESGQSGLYASRQHVQRGGRSSGGPWGTNFLKDSRSKQTAKEVASNSGRGMDAANSHDDMDGSREDDELNRANGEVPAEEMLSDDYYEQDGEDQIESLHRGGMKQSSCSTSGGAAKSGSRQMKKMSKYNAYDNDEYNDENDDDSDADEDDPADMDFEPDGETDKATDK

SEQ ID NO: 72751 - protein, 245 aa, Zea mays
  Coding DNA Sequence Number=SeqID_30972
MPIQEDIAVNTVNDKWIYITGPAASTDDFTVEFKDYKDNGEVIALGETIVYDVELEATDSLGGTATYTIHLTFIDDENDPLTLSCIKKTPVGAIDNNWITLTSISTGVEVRGTTPADNSYAGTYVITCTIADEELSNSYDFTLTVNANQPIVITNIADVSIEEGVLSLGATYSDAQLYDVAFIGIDNIGQEAEVDFTIEILGCYSNCESCDGILANQCTSCIANYLLLKKQCVTSCPEGTFTDTA

SEQ ID NO: 72752 - protein, 166 aa, Zea mays
  Coding DNA Sequence Number=SeqID_30973
  Gene Ontology: Mol. function=translation elongation factor activity; Cellular component=ribosome; Biological process=translation
  Homolog annotation: Hit_ID=Q17ME5; Match level="QueryCoverage=71%, HitCoverage=13%, E-value=1e-17, Identity=39%"; Hit description =Translation elongation factor
MFVQFVMDPLVKEYNKLFNSDMLTNSAEYKEARNKIKTLFSKWMPMEKGQMVNVIGPKHGINDQVDIKEAKIDHIFLLMGGQNIQIIDEAPAGTIVGIADLEDIVLKTATVSTSTLCPNFSKSKAISQGLVKVALETENLSDMETLKRGLIKLDRSDPSVQFYINH

SEQ ID NO: 72753 - protein, 212 aa, Zea mays
  Coding DNA Sequence Number=SeqID_30974
MAQRVVFFATDLDLAFREGPRWGGDILGCLGVGRLSKVPLVDAELKRGIGMAIGPVGMDTHGFRTRWTWIRALIPAARPRRQDPSAAAPHASRHIPAPPPSSQSPAARPHPRPAATPRRRPPARPHPRACYACGLRGCDLRRGASRELRLRPATSPERSSCACVAATGDRPQAATATATVTGDRLQPATSSSPRPDRRPRAVPAPSPTSGTQ

SEQ ID NO: 72754 - protein, 1109 aa, Zea mays
  Coding DNA Sequence Number=SeqID_30975
  Homolog annotation: Hit_ID=Q5XPJ9; Match level="QueryCoverage=15%, HitCoverage=12%, E-value=9e-49, Identity=56%"; Hit description =Protein SCAR2
MPLSRHTVRSEYALGGRDLYRGADQHDPEAVLDGAAMAGLVGVLRQLGDLAEFAAQVFHGLYDEVMSTSARGHGLMLRVQQLEAELPLLEEDSCQRNYLHVVASNRGVDWHPNPRVDHGVVAGGDTPRFIMESVKQCRGPPKLFVLDKYDVGGDGACLKRYTDPSSFRTGSACPTTLLQEGTRDDRRPLRAVEISPNLQNAEIFRSPNAADNFSKLETGSSAGALDEVPTNRRRLKFRQLNGSVFQSFRPLMQNLHEKPSSEERLITGDHSKVHVFMVESPEPGAEERDVMVDTSDNMEKGKLTVRRKRSVSEEALSRSSDARSAGSSRGGYDSELDIYVDALTTMDSEDFSAPESGAREQATEEEEEEQRCNGSVTSAVSNGTRDITKKTKEVKENSKKIASKRSKYVGSMELTASKVGILPRELSEKHAPFSGSLRYMAKQLLELRYDGTQDSELYDVEADGVGRDVKYQEISDHAVEAKESDAVHKILSGSPYDDAGLGKCPQEEINHGQEHDVPPTDSPHDSAPDEGNGFQDSNMAYLVGIITSSSSQEGEGCTSTALHENSSMAVLNHVLEHAQERFGEDLDKEVDVDIHTEAISENTSDKCEDLKEVSIYTEQVNVEDMEEINESDVYALDDERAEYIEQQVVSDGSISSPVSSKQSDDPCWITPLTLADEDDTVACKVVDRPEGDHVILSETFKGIDLPNVVTESVINSKHDMPNNGQYYLHPKATFGQDLCLGSYKIVGENGEVPLCSSTTATTTPELTVNTETKHEFHQAVYQEPSNSFNSSAEVFGDPLAPDSRDDAPSVISSFDWMLNGATQKSFNIFPSHPTNGNAEENGSSEDVPPLPPLPPMQWRTNKIQTGPSPLSAKIGRPPRPKPSVKQQQSEASHVLQENSLHKGLSLQNELVQANISSDHEKNQILNIDFRESHHQEGEEYDAQDSNPFASSEVECLAEVASLPELIVVLEEAWSEFGNIKFMPEQEGKFQLSNGLSVWNDLCTSGSDEVADSEENKPNGAVKHLQNPDLPAQQKDDIHDCDGKVTKFSSALEEDSSQSPTHTVSGPPRYPLLPVTSHDRSMIRKAPTLVQPSSMLADEKNTLLEQIKNK

SEQ ID NO: 72755 - protein, 320 aa, Zea mays
  Coding DNA Sequence Number=SeqID_30976
  Gene Ontology: Mol. function=calcium ion binding; Cellular component =microtubule
  Homolog annotation: Hit_ID=Q9N9X3; Match level="QueryCoverage=99%, HitCoverage=48%, E-value=2e-53, Identity=36%"; Hit description =Ciliary WD repeat-containing protein ctxp80
  Pfam annotation: Domain name=WD40; Domain location=129-168; Score =8.3; E_value=3.9; Accession=PF00400.22; Description=WD domain, G -beta repeat
  Pfam annotation: Domain name=WD40; Domain location=266-304; Score =13.0; E_value=1.1; Accession=PF00400.22; Description=WD domain, G -beta repeat
  Pfam module annotation: Pfam domain module=WD40::WD40; Domain location=129-168::266-304
KYNHKGQAVFMAAALGIVLDTDKNEMKVFGGQETKMVAKNVADDSKFHMDDILSLDVSADRKTVVTGQVGKAPSVHIWDSETCESKGFFKLKEGSRGVAAISVSPCLRYVACVDLHNDHRVVIHNIKRNKQLLVIEGSKEKIIHCAWSKKVDDLRFCTVGVKEIKFWNPADATKRLFAKGTVGTKAKLTSFNSVCFDVEGTAYTSGTNGGKDCKLVIYSAKGGEYNLEKTIDFETSYPRSLDYFNGKILAGLRSGSIFEVNEETEERRLLLASHHEGEAWGLEIIPEDKTILSIGDDNKVMVFDYENKRFLKKGTISEKD

SEQ ID NO: 72756 - protein, 71 aa, Zea mays
  Coding DNA Sequence Number=SeqID_30977
MPSSRAHRPVRELHPVPMKVSMALLSRREPRCHRDLLAGVAGSRRADIHRGRETTQPDHRLVGAPISALSG

SEQ ID NO: 72757 - protein, 106 aa, Zea mays
  Coding DNA Sequence Number=SeqID_30978
  Homolog annotation: Hit_ID=Q3E0G9; Match level="QueryCoverage=65%, HitCoverage=9%, E-value=8e-07, Identity=38%"; Hit description=Ig -like, group 1
  Subcellular localization annotation: CTP_CleavageSite=30; ConfidenceScore=5.25e-01
MARRGHRTVRCAQDMSVLKFYRITYSPPSRCSQPWGRARRRPSSGVEAESEPWSRARRSPSSEVEAESEPWGRARRSPSSEVEVESEPWGRARRSPSSEAETGAEP

SEQ ID NO: 72758 - protein, 83 aa, Zea mays
  Coding DNA Sequence Number=SeqID_30979
MNTIHFLNTRLEVKLNYNYDAMRHCVRQAPAQPPFGHGPEVLHRVVHRQAWDLMVVANVGDSRVVLSTTSDDGAITPSSSSST

SEQ ID NO: 72759 - protein, 134 aa, Zea mays
  Coding DNA Sequence Number=SeqID_30980
  Subcellular localization annotation: CTP_CleavageSite=31; ConfidenceScore=5.13e-01
MAHLPPHGGQTHDESPSAAAPWPVSCTSCIRAPNSKPNRATRSRDQYKTMGKVLTSDDDMMKPYHGMVQLAVISQLWKVTNMCERPLRVITTTRHAGAMLEVRHPHDNPPPLSPIWRWCHLIQAKGWEPAPWLL

SEQ ID NO: 72760 - protein, 144 aa, Zea mays
  Coding DNA Sequence Number=SeqID_30981
MAVTTLGMRGGGRVCPRREWCRQPRAPEARSVAVAMTFGGVSGVGCGDCPWWNMKTMISFDTAHLGRPAPAPMTTFDLMASKTSFDLAASGFVLLDELSNPCYVIDELGVGGGAHPTTWLGVWVGMSAWSIQVVGVVGQSFLFL

SEQ ID NO: 72761 - protein, 156 aa, Zea mays
  Coding DNA Sequence Number=SeqID_30982
MDQIVHRWRMIPRLQNQRMPQRPLDQRWSSSEDTRDVPHYRISLSSDSTMDGRHSHRRSRLGSSSPSPPITPQEVAITATSHALGRRGHRHSRLGQSQPPRRSRLGLPLAGIAGATARAIRSHSPLTPQEAVVDVRPTLAAARTSRDCNRWQAPKP

SEQ ID NO: 72762 - protein, 414 aa, Zea mays
  Coding DNA Sequence Number=SeqID_30983
  Gene Ontology: Mol. function=methyltransferase activity; Biological process=metabolic process
  Homolog annotation: Hit_ID=Q1SW51; Match level="QueryCoverage=54%, HitCoverage=69%, E-value=8e-25, Identity=43%"; Hit description =Generic methyltransferase
MATGTGRRFRRAKLKILLVVIASNLVCVHLFSGASLSVHIPASAPRIHLWDSAAPLRGLNATRAALAGARAELAAVRAQCNASSYLLESVLAGPGTVHGGTPEEIALCLRHDRVQGHFPVILCLPCMSHDEPRKSSIVQLLSMAGEADQRPFIFTSNAQKRLHDLTTENLSVQLPVLAMVIIFWHTTSSSRSSLTAEPHRLPLGFHANFGTDELFPGLGFAFACRNFQEELARYMTYNVGGECPEDDALALQVALKGCEPLPRRCCRPREPARYAEPVVRRSVPPDATVRWALYTCRNYSCLVKRARARGGPYFCKDCFDLEGKERRRWQADNGVLDMVRSMNVLSDWVHRARRRARVDALRHLLPAQHNLRGYVPIFDRVGFRRLRWKAGRKLDLGAERNEWYVSALLEKPMT

SEQ ID NO: 72763 - protein, 68 aa, Zea mays
  Coding DNA Sequence Number=SeqID_30984
AWSIRMVVNGEVTDTWDTHWCEDIAERIVSPMRPRTGGSCFTELRPQNSVVWFRWESEAACGVIAKGA

SEQ ID NO: 72764 - protein, 143 aa, Zea mays
  Coding DNA Sequence Number=SeqID_30985
MNVVEGRFSNNSRDAEALSTACGAANSRSRIWERLRVCGGWPRRWRTEQQATSKGARGVGNLVVVFSGDEGVRKPGRLRRELAGRTEEGERRQRAYRLHRSGMTQVSARERAAGVGKEVSPAMAFIAEEEGAKGRRIEEHQDH

SEQ ID NO: 72765 - protein, 446 aa, Zea mays
  Coding DNA Sequence Number=SeqID_30986
  Gene Ontology: Mol. function=DNA binding; Cellular component =mitochondrion; Biological process=DNA integration
  Homolog annotation: Hit_ID=UPI00004C1731; Match level="QueryCoverage =90%, HitCoverage=30%, E-value=1e-169, Identity=73%"; Hit description= UPI00004C1731 related cluster
  Pfam annotation: Domain name=RnaseH; Domain location=1-123; Score= -16.4; E_value=0.002; Accession=PF00075.14; Description=RNase H
  Pfam annotation: Domain name=rve; Domain location=177-317; Score =66.5; E_value=8.7e-17; Accession=PF00665.16; Description=Integrase core domain
  Pfam module annotation: Pfam domain module=RnaseH::rve; Domain location=1-123::177-317
MFFDGSLMKTGAGAGLLFISPLGKHLRYVLRLHFPVYNNVAEYEALVNGLRIAIELGVRRLDARGDSQLVIDQVMENSHCHDPKMEAYCDEVRRLEDKFYGLELNHIARRYNETADELAKIASGRTTVPPDVFSRDLHQPSVKTDDAPEPEAPSAQPEAPSARPEAPSAWPKASSAQPEAPSARPEKAPGGYTHLLVAIDKFSKWIEAVAFFTNIIHRFWVPNSIITDSGTQFTGRKFLDFCEDHHIRVDWAAVAHPMTNGQVERANGMILQGLKPRIYNDLNKFGKRWMKELPSVVWSLRTTPSRATGFTPFFLVYGAEAILPTDLEYGSPRTRAYADQSNQANREDSLDQLEEARDMALLHSARYQQSLRRYHARGVRSRDLQVGDLVLRLRQDARGRHKLTPPWEGPFVVAKVLKPGTYKLANSQGEVYINAWNIRQLRRFYP

SEQ ID NO: 72766 - protein, 173 aa, Zea mays
  Coding DNA Sequence Number=SeqID_30987
  Homolog annotation: Hit_ID=Q6QP51; Match level="QueryCoverage=28%, HitCoverage=22%, E-value=3e-11, Identity=67%"; Hit description =Putative growth-regulating factor 1
MESQAHASCNWRADCYVRATAPPLAPLPRLLDCGTSTATRGNPAYDPTVPARRIGHGTGSTFGRRSGRRFAFAVMIASKKVCHVIRFRILFLFLSLTTGTGKGGYPERDPSPRRKRAPSPPTDQRFEGWPLGGVQQPPQSARALCPLLVRGSKAGPSEGFNDRLRPLGLRAHY

SEQ ID NO: 72767 - protein, 70 aa, Zea mays
  Coding DNA Sequence Number=SeqID_30988
MGVALTAQMATAQHLILGHLSIDHEGDLPMREYYRQMKGMADSLRDLGELVANRTLVLNLCVASALATTT

SEQ ID NO: 72768 - protein, 144 aa, Zea mays
  Coding DNA Sequence Number=SeqID_30989
MVIETPALASALYNAPPDGQASLGGGKPLTLHQPGCCLPSSCRPRDPSSLPQGQPRGWRLHPGWSLQPRWQPGMVVILQPLDRDHLHVAGPVPECLPSSGAGPTDSTSLWRACAALIRRAIDGFGSTLAPAPEDPHLDYVVPAG

SEQ ID NO: 72769 - protein, 570 aa, Zea mays
  Coding DNA Sequence Number=SeqID_30990
  Gene Ontology: Mol. function=arginyltransferase activity; Cellular component=cytoplasm; Biological process=regulation of protein catabolic process
  Homolog annotation: Hit_ID=Q9C776; Match level="QueryCoverage=91%, HitCoverage=88%, E-value=1e-88, Identity=36%"; Hit description =Arginine-tRNA-protein transferase, putative; 58258-55831
  Pfam annotation: Domain name=ATE_C; Domain location=321-450; Score =117.8; E_value=3.2e-32; Accession=PF04377.6; Description=Arginine -tRNA-protein transferase, C terminus
  Pfam annotation: Domain name=ATE_N; Domain location=16-89; Score =45.0; E_value=2.5e-10; Accession=PF04376.4; Description=Arginine -tRNA-protein transferase, N terminus
  Pfam module annotation: Pfam domain module=ATE_C::ATE_N; Domain location=321-450::16-89
MEAWSRGGAVGAEGAQSEQRAAGAEGTQPRAGEGTTTTVRLLWYRRSGCFLYKPEMERTCCPSYTIRLKANDFICSKEQARVLKKIQRFLDGELDPQIGSPQCKASPTKRSLGEPLNSPTSKVSKVSAEEFQKGTSPNILKEDDIICCLANKINEATATCFRGGVFGSVQLPKAVVKTVKPQVKRKVGEAVQEKKVGEAVQALVYTCNISFQIVAAVRRALPKENGATQTEVPADLSPNSVAEKLSVAMERLGELAGFEVKACNGHLNFYLASNQAMQNHTSVVVPVQASDKSSGSKPSSVNQTNAKYPLKRKNLEIRLSTSHFDPEEFALYRRYQTKVHKEKAVTESSYKRFLVDTPILFVPPKTGDNTVPPCGFGSFHQQYRIDGKLVAVGVVDILPKCLSSKYLFWDPDLPFLSLGKWVRYDLAKPLLDASQYSVLSDYATMQGEVPQPQICGPSDDSSAKVDHHESPSDEDEDDDDEDFDNYESDMMVDEETIHSEKPDTAEGSSEINDINNITLDLKGSRVKFKGLQQVFGPIERRHLNALERQLSRYVKVVGKELSDRMVYCLS

SEQ ID NO: 72770 - protein, 111 aa, Zea mays
  Coding DNA Sequence Number=SeqID_30991
MACGEERIHGDCAAPVKNSSMPVHNPTSPGREHLPTNPAELLELAMRKWWRRYAISADFGGSWRDRVGITPFDRQCWRHYKKLVKNRSKFDGPVELKVKNVGTVELSIKNV

SEQ ID NO: 72771 - protein, 52 aa, Zea mays
  Coding DNA Sequence Number=SeqID_30992
MMKHSRARINSYPTLVGSYKIGMVLLRATSHRSLPQIKRRLDVLSLVKFLVR

SEQ ID NO: 72772 - protein, 110 aa, Zea mays
  Coding DNA Sequence Number=SeqID_30993
MRGLLLALQLPGSSGWLLGQEGKVPGCSGTGTNFFLVGCSDGTAGATKETASDTAAGGADAGDLASTAKSFRHMVTTEVVPELLPGDGFRVSMGGEREIVSTFPIINFGV

SEQ ID NO: 72773 - protein, 147 aa, Zea mays
  Coding DNA Sequence Number=SeqID_30994
MGKSNKRKREPTPPSEDFGDSEYSEEEFSSESEGSPAPVSPPVSSGDSDDSQGLAVEVWTYIRAVECSGLEGSDESEYSSDEEDSLDSSEEGGGGDGGDNDDDDGGDGDDGDDDGDGGSRGGNVGSKGGNSRGSTARSSKGSNKASG

SEQ ID NO: 72774 - protein, 270 aa, Zea mays
  Coding DNA Sequence Number=SeqID_30995
  Homolog annotation: Hit_ID=Q6QP51; Match level="QueryCoverage=27%, HitCoverage=41%, E-value=1e-13, Identity=60%"; Hit description =Putative growth-regulating factor 1
MQAACNRTKGAHPFDFDASSMEAQAHTSCNRHSRHYRASSTAEPDRRHLWQAKQATLRFRHNDRVKKGTRKGDIPKGILLREGNGPRAPLLIRGSKAGPSERFNSRLRALGLHAHYWSEVRRSAPRKGSTAASGHSGSVPTTDQGFVGWPPKGSTAALDAERGMTLGSSASPDPRARPPSRPRTTNSASPDPGLGLSLGSERRRTPPRPTQGSDSASAPEDDELRLARPGARTRPQKTDSTSTSEEPPPRPTQGSDRPSHRGGHHYPTPS

SEQ ID NO: 72775 - protein, 120 aa, Zea mays
  Coding DNA Sequence Number=SeqID_30996
  Subcellular localization annotation: CTP_CleavageSite=68; ConfidenceScore=5.46e-01
MSFNTRWRSSTSLSHTPNDGEGPRRRHSSSSATHGPSRCPHGSWCNNRRKRGENHLMLCGKVLRLICPAERPQRPSRFPGRWPQGSRQFCYGQEDGSDETGPQVSDKENQLTRARNQVHK

SEQ ID NO: 72776 - protein, 369 aa, Zea mays
  Coding DNA Sequence Number=SeqID_30997
  Gene Ontology: Mol. function=DNA binding; Cellular component=nucleus; Biological process=regulation of transcription
  Homolog annotation: Hit_ID=Q9AV06; Match level="QueryCoverage=46%, HitCoverage=51%, E-value=5e-65, Identity=71%"; Hit description =Putative NAM (No apical meristem) protein
  Pfam annotation: Domain name=NAM; Domain location=78-207; Score =263.5; E_value=4.1e-76; Accession=PF02365.6; Description=No apical meristem (NAM) protein
MDNWRDSASSSGDQADPERAGGAVLVPQAYMRHGNTPSISGVGNWNLPPQPRVFWADTKAGIIGGRRRDGAEGDESTLPPGFRFYPSDEELVCHYLYRKVANERSVQGTLVEVDLHAREPWELPDAAKLTASEWYFFSFRDRKYATGPRTNRATKTGYWKATGKDREVRDPAARAVVVGMRKTLVFYQGRAPSGVKSCWVMHEFRLDSPRTTTTPPKEDWVLCRVFQKRKVDGSEQDNGVSPSPPVFAGASQSQGVVLPPDQPCVVDAYVVVDQPGSSSVGLAPPQENLGSGLDALLTNGAMWQYTSSVFGHLLPQEATSSPPVMDLGSRGGEGGDYGCSFFYDSSFEDMANIGFRQRVDGLIQDQEAH

SEQ ID NO: 72777 - protein, 372 aa, Zea mays
  Coding DNA Sequence Number=SeqID_30998
  Homolog annotation: Hit_ID=Q9LHK2; Match level="QueryCoverage=97%, HitCoverage=42%, E-value=2e-57, Identity=41%"; Hit description =Arabidopsis thaliana genomic DNA, chromosome 3, P1 clone: MMF12
MDMAYNVLIDHALAESDRRSLTTHFPILDNILNQPSSCSEMRVIVKEISYPLVKFVCTKTIKDFVFRSLLSQLTPEVISNREHLESKECHSSPDFISSASEKVDVGEPVDDSKYISFDILSWRWHVYGERQSSLSAKERSSDFVGLQDFHIHGFLEVGAAALLVGDMDAKINDQQWKYSVIQEFPDIDLLQPSSSAASTFASSQSHLKAITASKRMRSAPNQVWMNIPINTFQPRARPLFQYRYYSEQQPLRLNPAEISEVIAEVCSEATSNANQLIVPSRLSTQSRQPSADVAFSVLIKLVIDMYMMDSETAAPLTLYMLEIEERQEIVWASALSCLFYFVCDGGKIIRSRLGGLDIRHFSVLIFRHICIM

SEQ ID NO: 72778 - protein, 130 aa, Zea mays
  Coding DNA Sequence Number=SeqID_30999
MIRAPEALVPPTSELFDIAGSLGGLRLSSPQGSGGQQCTLQPAYEEIVGMLDLVRDSFHDLLLSGSESGLSSPSRQASHDPAQECIVANSLEGRSPLIESLKGTPTSAMMCVWHPPHLDSTRLPKSHFKD

SEQ ID NO: 72779 - protein, 350 aa, Zea mays
  Coding DNA Sequence Number=SeqID_31000
  Homolog annotation: Hit_ID=UPI0000DA43ED; Match level="QueryCoverage =40%, HitCoverage=94%, E-value=3e-09, Identity=33%"; Hit description =PREDICTED: similar to keratinocytes proline-rich protein
MAGGRLLRRAGGWFPPQKLEEEVVRRPARELELRLASPSAPARMMKILEAEGGAEVAARFASPHHQASAGADRVFSNTLQGPPPTTRGLGPTRHASWPRAEEAKPPRAVRVTAQRLQALLHFRPDQRVKERTAMQAACNRTKGAHPFDFDASKHGGPGPHIMDREWGYSERDPSPRRKRAPSPPTDQRFEGWPLGRVSTAASEHSGSTPTTGWPPKGSDSRLKARRARDDPGARTQPRPRTANSASPDLKARTQPRFRKTTNSASPDPRARTQPRLWKTTNSASPDPRVWTQPRLRKTTNSASPDPRARTQPRLWKTTNSASPEPRAWTQPRPRKTDSTSASEEPPPRPT

SEQ ID NO: 72780 - protein, 147 aa, Zea mays
  Coding DNA Sequence Number=SeqID_31001
MATGPTSSLLYAIQNGLPCTFHLTYHCVNNYDSDNVSIRQARVAFEPRLWPRLSAQSKMQIHGPDILLAQVSSKYKSHTKDHTIYRGSDTSPLQYATNHGTPGAPLDVINRGAQCFIQGGEHFTGFQPNSVIGTCLNHQGLENFSLS

SEQ ID NO: 72781 - protein, 89 aa, Zea mays
  Coding DNA Sequence Number=SeqID_31002
  Gene Ontology: Mol. function=sequence-specific DNA binding; Cellular component=nucleus; Biological process=regulation of transcription, DNA-dependent
  Homolog annotation: Hit_ID=P24345; Match level="QueryCoverage=74%, HitCoverage=18%, E-value=8e-24, Identity=82%"; Hit description =Homeotic protein knotted-1
  Pfam annotation: Domain name=KNOX1; Domain location=39-83; Score =86.5; E_value=8.3e-23; Accession=PF03790.4; Description=KNOX1 domain
MLCLEIFKCLLRCLHRLGPWCCLRRLEPLLSSPYGGDVEAIKAKIISHPGYYSLLTAYLECNKVGAPPEVSARLTEIAQKVEAQRCTAA

SEQ ID NO: 72782 - protein, 613 aa, Zea mays
  Coding DNA Sequence Number=SeqID_31003
  Gene Ontology: Mol. function=protein transporter activity; Cellular component=endoplasmic reticulum; Biological process=ER to Golgi vesicle-mediated transport
  Homolog annotation: Hit_ID=Q6H8D5; Match level="QueryCoverage=99%, HitCoverage=67%, E-value=0.0, Identity=91%"; Hit description =Putative coatomer protein complex, subunit beta 2
  Pfam annotation: Domain name=Coatomer_WDAD; Domain location=271-613; Score=393.3; E_value=3.6e-115; Accession=PF04053.4; Description =Coatomer WD associated region
  Pfam annotation: Domain name=WD40; Domain location=1-37; Score=0.8; E_ value=29; Accession=PF00400.22; Description=WD domain, G-beta repeat
  Pfam annotation: Domain name=WD40; Domain location=127-167; Score =39.1; E_value=1.5e-08; Accession=PF00400.22; Description=WD domain, G-beta repeat
  Pfam annotation: Domain name=WD40; Domain location=171-209; Score =52.3; E_value=1.6e-12; Accession=PF00400.22; Description=WD domain, G-beta repeat
  Pfam annotation: Domain name=WD40; Domain location=41-79; Score=48.4; E_value=2.5e-11; Accession=PF00400.22; Description=WD domain, G-beta repeat
  Pfam annotation: Domain name=WD40; Domain location=84-123; Score =50.5; E_value=5.6e-12; Accession=PF00400.22; Description=WD domain, G-beta repeat
  Pfam module annotation: Pfam domain module=Coatomer_WDAD::WD40::WD40:: WD40::WD40::WD40; Domain location=271-613::1-37::127-167::171-209::41- 79::84-123
MVKSFEVTDLPVRSAKFIARKQWVVAGADDMFIRVYNYNTMDKVKVFEAHTDYIRCVAVHPTQPFVLSSSDDMLIKLWDWDKGWVCTQIFEGHSHYVMQVTFNPKDTNTFASASLDRTIKIWSLGSPDPNFTLDGHSKGVNCVDYFTGGDRPYLITGSDDQTAKVWDYQTKSCVQTLEGHAHNVSAVCFHPELPIIITGSEDGTVRMWHSTTYRLENTLNYGLERVWALGYMKGSRRVVIGYDEGTIMIKIGREVPVASMDSSGKIIWAKHNEIQTVNIKSVGADNEIADGDRLPLAVKELGSCDLYPQSLRHNPNGRFVVVCGDGEYIIYTALAWRNRSFGSALEFVWSTDGEYAIRESTSRIKIYSKNFQERKSIRPSFSVERIFWWCVTLLCVQMTSFAFNDWVECRLIRRIDVNVKNLYWADSGDLVTIASDTSFYILKYNRDVVSSHLDGGGSAAEEGVEDAFELLHEINERVRTGLWVGDCFIYNNSSWRLNYCVGGEVTTLFHLDRPMYLLGYLANQSRVYLIDKQFNVVGYTLLLSLIEYKTLVMRGDFDRANDVLSSIPKEQYDSVARFLESRGMLEEALEIATDTNYRFDLAVQLGRLEIAKA

SEQ ID NO: 72783 - protein, 142 aa, Zea mays
  Coding DNA Sequence Number=SeqID_31004
MGYREVTTHIQLWLLGALISHSEFDVVDFLICEIEDTVLDVPGHPRAPRLLFGSYRLAPDDPVPVPDPVPDTQAEDVAFHQFETQGTIVPDDDDFGIPPPPPVPPRSHDHEAGSSSAAPAAPPAVDPALAVILRSLSQQQAL

SEQ ID NO: 72784 - protein, 215 aa, Zea mays
  Coding DNA Sequence Number=SeqID_31005
MAGRGGAGRRPRAVFMAFGTQGDVFPIAALAAAFACDQQEYAVVFITHSAHRSCLIHWNITEVRFSDNCRIQRSTANQPQEEASHTRPVVPFAIKRKKISITCYQHSSLPAKSGPSSCIEWLASASPQSDETTFDAWYGFSKEIVECPDNDDALSIHNAADVLVGAIRSALSPETKAQAARIADRLSSEDGIGEALRILKARVLTQNKIISSFIA

SEQ ID NO: 72785 - protein, 66 aa, Zea mays
  Coding DNA Sequence Number=SeqID_31006
MADIDQDEPLNPKALTDPNSSFYKINSVRLHHKSGNNGRGWRRVLMAGILGHLSLMEEGVDGGAEG

SEQ ID NO: 72786 - protein, 56 aa, Zea mays
  Coding DNA Sequence Number=SeqID_31007
  Homolog annotation: Hit_ID=Q6AVJ1; Match level="QueryCoverage=75%, HitCoverage=4%, E-value=5e-12, Identity=79%"; Hit description =Expressed protein
MVVMEGNGGAGRITIGVCVMEKKAFSSPMEQILERLRSFGEFEVCKSLPLPRPTNL

SEQ ID NO: 72787 - protein, 230 aa, Zea mays
  Coding DNA Sequence Number=SeqID_31008
MGSRSSVRPRHAACLHRASRATARTTHEDLLARQRISATHVVTSVAASPPAQPHRAPPRWDLGAARPPRWDLGGGKQSSIFGNELKLKSEAALLVAASTELFLGSLTAGGHTTTARQFRQAVRAMHVWTTACGHCPMTDFPLDCVAAKRSLPASTFGSGAWYRTKQQLDDHGFHIFYLRPFLLRVRVGYCLTGFGVLRISLWIIPGWDRAIEARAIRAGASNLQQAVESR

SEQ ID NO: 72788 - protein, 135 aa, Zea mays
  Coding DNA Sequence Number=SeqID_31009
  Gene Ontology: Mol. function=transition metal ion binding
  Homolog annotation: Hit_ID=Q6AVJ1; Match level="QueryCoverage=88%, HitCoverage=11%, E-value=4e-55, Identity=88%"; Hit description =Expressed protein
MQRIENEDESVAFFPARLHEIIISSEKAKNTEGPVEFPWMVDGAGLPANASQLLPKMAKLTKEVTSQVKLLAEGEDERLALTSTFSKYDQAKALGKTTIDVARIAAGLPCGSESFLLMFARWRKLERDLYNERKE

SEQ ID NO: 72789 - protein, 590 aa, Zea mays
  Coding DNA Sequence Number=SeqID_31010
  Gene Ontology: Mol. function=hydrolase activity, acting on acid anhydrides, catalyzing transmembrane movement of substances; Cellular component=integral to membrane; Biological process =metabolic process
  Homolog annotation: Hit_ID=P22180; Match level="QueryCoverage=99%, HitCoverage=61%, E-value=0.0, Identity=80%"; Hit description=Plasma membrane ATPase 1
  Pfam annotation: Domain name=Hydrolase; Domain location=11-249; Score= 41.9; E_value=2.1e-09; Accession=PF00702.16; Description=haloacid dehalogenase-like hydrolase
MGFRASGIENHDAIDTAIVGSLADPKEARIGILEVHFIPFNPTDKRTALTYIDSDVKMYRVSKGAPEQILILVYNKLEIERRVHAVMDKFAERGLRSLAVEYQVVPDGRKESPGGPWHFVALMPLFDPPRHDSAETIRRALNLGVSVKMITGDQLAIGKETGRRLGMGTNMYPSSALLGQNKDESIAVLPVDDLIEKADGFAGVFPEHKYEIVKRLQARKHICGMTGDGVNDAPALKKADIGIAVADATDAARSASDIVLTEPGLSVIISAVLTSRAIFQRMKNYTIYAVSITIRIVLGFMLLALIWEFDFPPFMVLIIAILNDGTIMTISKDRVKPSPLPDSWKLAEIFTTGIVLGGYLAVMTVIFFWAAYKTNFFPRIFHVESLEKTAQDDYQKLASAVYLQVSTISQALIFVTRSRSWSFAERPGFLLVFAFLVAQLIATLVAVYADWGFTSIEGIGWGWAGVVWLYNLVFYFPLDLLKFLIRYALSGKAWDLVIEQRIAFTRKKDFGKEERALKWAHAQRTLHGLQPPDAKLFPDRVNELNQMAEEAKRRAEIARLRELHTLKGHVESVVKLKGLDIDTIQQSYTV

SEQ ID NO: 72790 - protein, 34 aa, Zea mays
  Coding DNA Sequence Number=SeqID_31011
MTFSSFVLSCGVAAACVVWALYVDDDSLDDSRGG

SEQ ID NO: 72791 - protein, 760 aa, Zea mays
  Coding DNA Sequence Number=SeqID_31012
  Gene Ontology: Mol. function=nucleic acid binding; Cellular component= nucleus
  Homolog annotation: Hit_ID=Q941Q3; Match level="QueryCoverage=33%, HitCoverage=65%, E-value=2e-33, Identity=32%"; Hit description =Floral homeotic protein HUA1
  Pfam annotation: Domain name=zf-CCCH; Domain location=307-333; Score =37.5; E_value=4.7e-08; Accession=PF00642.15; Description=Zinc finger C-x8-C-x5-C-x3-H type (and similar)
  Pfam annotation: Domain name=zf-CCCH; Domain location=456-482; Score =32.8; E_value=1.2e-06; Accession=PF00642.15; Description=Zinc finger C-x8-C-x5-C-x3-H type (and similar)
  Pfam annotation: Domain name=zf-CCCH; Domain location=527-553; Score =43.8; E_value=5.9e-10; Accession=PF00642.15; Description=Zinc finger C-x8-C-x5-C-x3-H type (and similar)
  Pfam annotation: Domain name=zf-CCCH; Domain location=596-622; Score =31.1; E_value=3.8e-06; Accession=PF00642.15; Description=Zinc finger C-x8-C-x5-C-x3-H type (and similar)
  Pfam annotation: Domain name=zf-CCCH; Domain location=629-655; Score =35.1; E_value=2.4e-07; Accession=PF00642.15; Description=Zinc finger C-x8-C-x5-C-x3-H type (and similar)
  Pfam annotation: Domain name=zf-CCCH; Domain location=692-710; Score =4.0; E_value=0.4; Accession=PF00642.15; Description=Zinc finger C-x8- C-x5-C-x3-H type (and similar)
  Pfam module annotation: Pfam domain module=zf-CCCH::zf-CCCH::zf -CCCH::zf-CCCH::zf-CCCH::zf-CCCH; Domain location=307-333::456 -482::527-553::596-622::629-655::692-710
MEQSAGDESRETEAENAVEYNKKVDQEDTINRQGTAKEDSGVEPQEENVVDPDQGVDDFSVLDEGNVVAQCTSDQLRTTMEDNAAEMQEVVEQEGAIFEKGVTSDGITVEDQDKEMEQSAGDESRVTKGENAVKDKKVYQEDAIDKQGAAEDGSGVKSQEDNMVVPGQCTDGLPVLDEGNVVPQYTSDQLRTTTDNNAAVDPELVEQEGVDSIVGAAKVGIAVEESREDIMVEKQVEGVLLQDQDEAVEQCTSDQLRTITDGNDVEDQEVHREKLKAKLEVSSFPSEQRNHEAEFLELNRVGLPIREGARKCIYYMRNGTCRYGKKCCFNHPEQVLDVQRHTATGWDDTNLQSSPHSKKSPEHKTMDDISSGSEVLPPNILRMLLPPQNVPPSTKEKEIRIKKDVIDQIRGHMTSETMIHCSDDPDWASASDDSDGCCSADSSDGPLCKQEHEDYPERPECPFLLRFGNCKFASSCQYYHPKDKFPSTYHPEDKFQSRYHQKEKSSRHHPKKEPALSGELMVYPDRPSEPDCPFYVKTGSCKFGANCKFHHPKDITPNMQGPASPKRSVAAKEHHAAARATLQDQMYQQQKFPERPGQPDCRYYMQFGKCKFQSACIFNHSKDILSSGWHPAECPFYMKTRTCQFGSACEFYHPKDRCSGRGGVIDGTDYGHDFATKSRNVLQELAIYPERPDELECSHYMKHGYCKYKDELQISSSKRSSSKEIGTAFPVYQVHENHTRRYLFAIAGPFATTTVVTGCR

SEQ ID NO: 72792 - protein, 287 aa, Zea mays
  Coding DNA Sequence Number=SeqID_31013
  Gene Ontology: Mol. function=transition metal ion binding
  Homolog annotation: Hit_ID=Q6AVJ1; Match level="QueryCoverage=71%, HitCoverage=19%, E-value=1e-101, Identity=89%"; Hit description =Expressed protein
MTEIDLRKQQQEGGKEQKAGCVRVRYPVLLTPTEKQMARDVCNAFRQMVCGFDLLRCDGRSYVCDVNGWSFVKNSYKYYDDAACILRKIFLDAKAPHLSSTIPPTLPWKSEPVQPTEGLTRQGSGIIGTFGQSEELRCVIVVIRHGDRTPKQKVKLKVTEEKLLNLMLKYNGGKPRVETKLKSAVQLQDLLDATRQLVPPTRSGRESDSDADDIEHIEKLRQVKAVLEEPQSSRIDRVEEQGRLLVRDIYIVGTKMTLRIRVGDHVSGSRVITTVPVSCDYGLYSCV

SEQ ID NO: 72793 - protein, 331 aa, Zea mays
  Coding DNA Sequence Number=SeqID_31014
  Homolog annotation: Hit_ID=Q1SU13; Match level="QueryCoverage=16%, HitCoverage=12%, E-value=7e-13, Identity=60%"; Hit description=IMP dehydrogenase/GMP reductase
MPTLFAGNSAGGPRRHSVENIEEGIRRNGGVGVGFSVLETQATAKLQNGKKTTLGAALTGAPWPSPSSSSTAGSTSASAAPGSQRRPTPRVQLNLTVLGEPDPRFVFEFDGETEYSPQVLQVKGSMKQLQYGTRVLGEPDPRFVFEFDGETECSPQLLQVKGSMKQPMFTCKFSCRSNSDLRSRLVAVAPSSFPPDAGIFSARLPTSTRTNGHGSMASWLADCNACDADPSSLVRREAMRTGSETERSGGGEPARDGVETNSQLLEVYPQSHFILVPPVKVPQWRQRVGIPVGCSSLVKGTMKIWQRDRRRLELLACDSVGGDLGVWRDAR

SEQ ID NO: 72794 - protein, 101 aa, Zea mays
  Coding DNA Sequence Number=SeqID_31015
MAPKRATSKAAASIDDAAKAALLAEKKGKALVDTTPKRPSKDDAVNSKRQRQDHPTPTALRTPAVPRAHPKHHHQALLRQRAGTYPKYNGSTDPTQYIMNY

SEQ ID NO: 72795 - protein, 132 aa, Zea mays
  Coding DNA Sequence Number=SeqID_31016
MKHGWRWRDVDEHPSNCWSARRGCDELAGTDAMWPAGRPCREGMPAGASSPAAGRAWPMCSHEEAMEEGVGVALNKGGRLRRHRGGLLEQQATGAHGWERHAGLGARHEPFPEMRGYEQFVGGQGGVTVSPD

SEQ ID NO: 72796 - protein, 51 aa, Zea mays
  Coding DNA Sequence Number=SeqID_31017
  Homolog annotation: Hit_ID=Q7G8Y5; Match level="QueryCoverage=57%, HitCoverage=29%, E-value=3e-08, Identity=96%"; Hit description =Putative glutaredoxin
MEKALARLLGRNPAVPAVFIGGRLVGSTDKEINGWRLSENEDRARVYGVLY

SEQ ID NO: 72797 - protein, 160 aa, Zea mays
  Coding DNA Sequence Number=SeqID_31018
  Subcellular localization annotation: CTP_CleavageSite=68; ConfidenceScore=5.49e-01
MGKNKKGGSSLHHSGDKRKARAKSPSKNFGDSEYSKRSFPPSPRGHRSTPLPRCRPMTRMIPSGLPPRCRRKSRPSSAPGSRARMSRRSPRTRRAPSNHPRRRAAVTATTRATTAMAVTAAMAATTTARATEATAARATVTARAAAAPARPKAKRHWFKY

SEQ ID NO: 72798 - protein, 45 aa, Zea mays
  Coding DNA Sequence Number=SeqID_31019
MTKVMLAEGVRNSKNGNHYVNGNMENHLGKQCYHKGLMGRLWLIN

SEQ ID NO: 72799 - protein, 36 aa, Zea mays
  Coding DNA Sequence Number=SeqID_31020
MVRLYRYNFALYFPEEGYDAASYPKRPLMLIKGSEK

SEQ ID NO: 72800 - protein, 160 aa, Zea mays
  Coding DNA Sequence Number=SeqID_31021
  Subcellular localization annotation: CTP_CleavageSite=82; ConfidenceScore=5.12e-01
MRYGRCSTKRGDGARQGSSPTARGCTGRVDGKGAVGASTTALLGHVRPASTERARRLAGARAGRLAWAAAGAPRLPWAPGRCAAAVQAALAAMAEPRWDAALLWASCSTGPPHKASRSWPRRAAGGMGGKTATMVFEAVGRLQAERGGAAAQGCETRRGV

SEQ ID NO: 72801 - protein, 186 aa, Zea mays
  Coding DNA Sequence Number=SeqID_31022
  Gene Ontology: Mol. function=transporter activity; Cellular component= membrane; Biological process=transport
  Homolog annotation: Hit_ID=Q41268; Match level="QueryCoverage=57%, HitCoverage=20%, E-value=5e-37, Identity=69%"; Hit description =OsNramp1
  Pfam annotation: Domain name=Nramp; Domain location=1-183; Score= -209.3; E_value=0.00018; Accession=PF01566.9; Description=Natural resistance-associated macrophage protein
AQSILALCPGTLKEHSVISKRNQSEKKWLQINQGTSVRSFAFQDACRFFLLESGVAMFVALLINICIISISGTVCNSSNVSPDDSAKCSDITLDSSSFLLRNVLGNISAVVYGVALLACGISSSITGTYAGQYIMQVDAATFLHGRPPHRLLPEQDGAREFHSIHLFLPSSGSVLLGNFDQQTQKS

SEQ ID NO: 72802 - protein, 49 aa, Zea mays
  Coding DNA Sequence Number=SeqID_31023
  Homolog annotation: Hit_ID=Q9LTW8; Match level="QueryCoverage=70%, HitCoverage=5%, E-value=3e-09, Identity=77%"; Hit description=CTP synthase
MALVENDLGIREENVKEKLSHFCHVPAANIITLYDVSNIWRIPLLLHVW

SEQ ID NO: 72803 - protein, 58 aa, Zea mays
  Coding DNA Sequence Number=SeqID_31024
MSESSGEEKGETLTVRAPCGSGRQSELSAPVTDKLGPLVGAKLRVGSAGEIPWWAEVP

SEQ ID NO: 72804 - protein, 390 aa, Zea mays
  Coding DNA Sequence Number=SeqID_31025
  Gene Ontology: Mol. function=phospholipase C activity; Cellular component=membrane; Biological process=intracellular signaling cascade
  Homolog annotation: Hit_ID=Q69U53; Match level="QueryCoverage=83%, HitCoverage=83%, E-value=6e-80, Identity=48%"; Hit description=MAP3K- like protein
  Subcellular localization annotation: CTP_CleavageSite=59; ConfidenceScore=5.17e-01
MAVVATIRQRRCFVLVLGTAIVVAFSALFGTTSGAALVGDSCRASSSTSDGGGCGKGLRCTTCVPPPGTGPAACARTTPVDPKTHGTGLPFNRHQVAAGVCHHLSAQPGGLGDRPAEERRAGPDAGCLRLQRRSYVPALSVLTEVRVFLDANPSEVVTVFLEDYAAPGSLSNTFNAAGLSKYWFPEAQMPSPSKGGGDWPLLRDMIADNHRLIVFTSKKGKQGTEGLAYQWDYVVETQYGSEGMADGSCPKRTESKPMDSKAQSLVLLNFFTSNPSQSWACSNNSAPLISRLNACYHASAKRWPNYIAVDFYMEQRRRSSPGHRHRQWPPPVWPRQHRTLQDFFCIGTGTRFGFFTGTRFSLFTVSCPGTGFCRHFSRHLIVSWAGAWAS

SEQ ID NO: 72805 - protein, 81 aa, Zea mays
  Coding DNA Sequence Number=SeqID_31026
  Subcellular localization annotation: CTP_CleavageSite=71; ConfidenceScore=5.07e-01
MARVACTLRGKRLNSGSTLSKHFCKQSLIIDKPYLTPSSQHTLESLFFSRVKKRQTFAAFVQRWCPRRKTRSKAARGKDPP

SEQ ID NO: 72806 - protein, 119 aa, Zea mays
  Coding DNA Sequence Number=SeqID_31027
  Homolog annotation: Hit_ID=Q5JMX2; Match level="QueryCoverage=75%, HitCoverage=16%, E-value=6e-22, Identity=59%"; Hit description =Putative vascular plant one zinc finger protein
MGEEINPSDALALYRLEYKPYSSKRSAKSKLSISPLNEIQQQMDRLTADSPMESKQTARSKPKANQKGTNANIHLHVNAHNQVNAPNAYQATPQGLLKVIAGVDKSINVTSKGGDDEFS

SEQ ID NO: 72807 - protein, 52 aa, Zea mays
  Coding DNA Sequence Number=SeqID_31028
  Homolog annotation: Hit_ID=Q69MH0; Match level="QueryCoverage=94%, HitCoverage=9%, E-value=9e-15, Identity=78%"; Hit description =Putative cytochrome P450 monooxygenase CYP72A5
MVYTLVEAKVVLAMLMSHFRIAISNDYHHAPVNVLSLRPKHGMLVHLRPLRP

SEQ ID NO: 72808 - protein, 130 aa, Zea mays
  Coding DNA Sequence Number=SeqID_31029
MPQPLALNASGELASSRRLLPRTYDLCGSTGPLSKWIVGTKGACCHEDLGLACRGSECQMTKSCLSNPARRTDRPSLGEQLCEANHPTKSCRATLQGELVDQVLVSNHAMWGSTRSAMAYVEVQNLPMGV

SEQ ID NO: 72809 - protein, 188 aa, Zea mays
  Coding DNA Sequence Number=SeqID_31030
  Gene Ontology: Mol. function=acyl-[acyl-carrier-protein] desaturase activity; Cellular component=chloroplast; Biological process=fatty acid metabolic process
  Homolog annotation: Hit_ID=Q9LF05; Match level="QueryCoverage=51%, HitCoverage=24%, E-value=8e-27, Identity=57%"; Hit description =Stearoyl-acyl carrier protein desaturase
LFALHARRRVRALEYMMRERILMPAYYMFDGRDPDLFRHYAAVAQRLGVYTTADYADLVQFFVDRWGVADLGPGLTGEGRQAQDYVCRLPERVRRMDQLDARRRLQPQTRQSPELSILLLRLLLYFYFLLVGHSVVPGGAAPAPGRGPSGHVPRIVRASAESTAKWSIPVFGVGANTLFGDSAGDKDV

SEQ ID NO: 72810 - protein, 83 aa, Zea mays
  Coding DNA Sequence Number=SeqID_31031
MAHGGFCGGDELRSSAGTYALGARGFAQGSKAVGSWLFGKASPVVTAESGARETLLATGPTQQRHSEATRTQAHMAASARGAA

SEQ ID NO: 72811 - protein, 180 aa, Zea mays
  Coding DNA Sequence Number=SeqID_31032
  Homolog annotation: Hit_ID=Q2HRF3; Match level="QueryCoverage=95%, HitCoverage=36%, E-value=1e-47, Identity=58%"; Hit description=SDL-1 protein
MARTGGIIMQRAQNLTSRRDRCGCKPTKEDVKRCFMLDFDRAAFIIASTASEEEMLRWYNERVVWTDKQLNLKLLRKGVLTRIYTPMTIVQSLRESGVFTSAITAGQPAVNAKLSPKETNAQSQNVTAPGNMTRVVRSTDSKASGRKILQAVDLAFSDTNVTAVPPLSPPSLDEHRHHSE

SEQ ID NO: 72812 - protein, 1525 aa, Zea mays
  Coding DNA Sequence Number=SeqID_31033
  Gene Ontology: Mol. function=RNA-directed DNA polymerase activity; Cellular component=chromatin; Biological process=chromatin assembly or disassembly
  Homolog annotation: Hit_ID=Q108V0; Match level="QueryCoverage=84%, HitCoverage=82%, E-value=0.0, Identity=60%"; Hit description =Expressed protein
MPHPSSDTRCLIVTGWGRINLSGMATQLSAIMLAGVTCLAFGCSVILSILDPHMPLPPDIDLCKSSVHEIDKVPLAVLDNHAPQPCNPENIAGRDASETTIRPENFEQCSFLFAPEELNQSELTSLYTLKGKGHDVITQTSLNHDIPEGRSKEKLSSDPFLLDNVVAADYFDSQADYQQLENYQDCELRAQEFHRIALNLCMQQEPTLEGHNAGIDALLLAAECYVNPFFLLGFQSNLEPLDKIERIHSELMQGNASSVSKNLHLKDFNKKTIYNLENKRDRSVIDLLLQAARFDFEYHGKIPEGELYPNIAEDGKRSVEISPEALQFADAVTLVRKNQAMLCHFIMKQFQRKGHLGSEILLQSLLFLLHSATDLFCPPENVVDIILKSAESLNDQLTCLYSFFSAGNKKLDRIKIHGLRRRWMLLQKLVLASSGSDSTRELARNKRDGFHFRSLVPPSTWIQKISDFSMFSSPLPRFFGWMAVSCYAKEYLNEKLFLASDFSQLTSLLSIYMDELCLMDGVAIPKVRSAKGEQFSCTDLFLKKETTLSDQPSMTEQFKILLPELHFFFPSMGKLFNAFGESILEAVGLQLKCLPNSAIPDVLCWFSELCLWPYLEHIKEHLVVANGVSYIRGSIAANAKSVVFYLLESIVTEHLEAVIPEMPRIVHILVSLCRASYTDVAFLKSVLCLIKPLISYFLRKGTNETKVLGHIKEGSNFELLCFEELFEIVRCGKDSVDTTEDNIQAPLVIFILGSMFLDFSFERRIEMLGSLLVWIDCISSDPPSLLCNYLQGFQTLLDGFEAVLIQNIELLGVGILSATNSSIESSDSLGIDGTMLLEKKAQDNEEQTLMKSVTYCENDGNHKGLRNLHPNSIIEFCGTLEKFILHLTSYIEDSWKWHHQLASRISLSMAKCLLFAKFLKSIAQEDTISSSSEQDVAVKISCELAQKHWQSALEGLGDTILINQETQFWQVASAMLDYIMGIPNVLAWGNVLNTTCSAVKHFCSHAPRLSWRLQTDKWLSLLVSGGIEGFKNSEICLIDLFCTMLNHSEPEQRFVAVQQLGRIINSTSSTEADLKYPNYDQNFLISVSTVTSLLVTHTWDRVAALALHDSSMLLRNHAMALLTEYVPFVDRKHLQSFLSSSNGGFGYMEKDLCLALCQLKSESDATTVLPLPTPSPVAKVLSGCNSQPVSPDFKSIRESILQVMSSLSSIEAYFEFFAARSAQEHEELEEAEIELELIEKEKSVPNFVEHTNDTMVLAMPSYDRDGSEVNKRLQQIRENIRSLERSRLKEEITARRQKKLLLRHAREKYLEETRSRETELMQELDRERALEMEREVERQRQLDIERAKSRELQFNIDLEKEKQTQRELQRELEQVELGRSSRREFSANPNSRSRERYRERDGGGRAQQEAGSLRSSSSRGQEGGSAQAPAPAGPGPTVMLAGSRTFSGANLPTILQPRERAADEDSAWAEDASSNGDPELDGVRPHGPRGSRSSSSRQVAERRERDGTAAGTGRREGKWERKQHP

SEQ ID NO: 72813 - protein, 78 aa, Zea mays
  Coding DNA Sequence Number=SeqID_31034
  Subcellular localization annotation: CTP_CleavageSite=50; ConfidenceScore=5.61e-01
MALASGTCRPLLGGPASTARLHLAVSSSSTACSIRFPRGAGGGRAAVSLRAPAPPATIAPESEALEKIEYKHIVHDFL

SEQ ID NO: 72814 - protein, 129 aa, Zea mays
  Coding DNA Sequence Number=SeqID_31035
  Gene Ontology: Mol. function=RNA-directed DNA polymerase activity; Cellular component=mitochondrion; Biological process=RNA-dependent DNA replication
  Homolog annotation: Hit_ID=UPI00004C1731; Match level="QueryCoverage =78%, HitCoverage=7%, E-value=8e-47, Identity=89%"; Hit description =UPI00004C1731 related cluster
DFQERANGMILQGLKPRIYNDLNKFGKRWIKELPSVVWSLRTTPSRATCFSLFFLVYGAEAILPMDLEYGSPRTKAYDDQSNQTNREDSLDQLEEARDVALLHSVRLANDQGEIYSNAWNIQQLRRFYP

SEQ ID NO: 72815 - protein, 194 aa, Zea mays
  Coding DNA Sequence Number=SeqID_31036
PISWMMEEDQQIVAGVDAAARGGGGLGRAGAVFLTATCAAATYSAAAAGDVPSVAFVVASYGALLLLLRSLRAYELAPPEAAARREALRRRVWALCTLLSVMFAWKVASVVATPWPVAVGVWAAAAVTSAAGLDCPCNACMHDDDVVHMLLKVFRVLVLVLAWLAFGFPEIIESAAGGVSEEIRCELLIVRFCQ

SEQ ID NO: 72816 - protein, 643 aa, Zea mays
  Coding DNA Sequence Number=SeqID_31037
  Gene Ontology: Mol. function=protein binding; Cellular component =nucleus; Biological process=negative regulation of ethylene mediated signaling pathway
  Homolog annotation: Hit_ID=Q6Z796; Match level="QueryCoverage=99%, HitCoverage=100%, E-value=0.0, Identity=77%"; Hit description =Putative F-box protein
  Pfam annotation: Domain name=F-box; Domain location=60-106; Score =20.1; E_value=0.0079; Accession=PF00646.23; Description=F-box domain
  Pfam annotation: Domain name=LRR_1; Domain location=218-245; Score =5.9; E_value=22; Accession=PF00560.23; Description=Leucine Rich Repeat
  Pfam annotation: Domain name=LRR_1; Domain location=270-293; Score =1.9; E_value=1.3e+02; Accession=PF00560.23; Description=Leucine Rich Repeat
  Pfam annotation: Domain name=LRR_1; Domain location=350-373; Score =3.7; E_value=58; Accession=PF00560.23; Description=Leucine Rich Repeat
  Pfam annotation: Domain name=LRR_1; Domain location=376-399; Score =4.1; E_value=49; Accession=PF00560.23; Description=Leucine Rich Repeat
  Pfam annotation: Domain name=LRR_1; Domain location=428-449; Score =0.4; E_value=2.4e+02; Accession=PF00560.23; Description=Leucine Rich Repeat
  Pfam annotation: Domain name=LRR_1; Domain location=454-476; Score =3.3; E_value=69; Accession=PF00560.23; Description=Leucine Rich Repeat
  Pfam annotation: Domain name=LRR_1; Domain location=507-530; Score =6.8; E_value=15; Accession=PF00560.23; Description=Leucine Rich Repeat
  Pfam annotation: Domain name=LRR_1; Domain location=534-555; Score =4.0; E_value=52; Accession=PF00560.23; Description=Leucine Rich Repeat
  Pfam annotation: Domain name=LRR_1; Domain location=560-585; Score =5.6; E_value=25; Accession=PF00560.23; Description=Leucine Rich Repeat
  Pfam annotation: Domain name=LRR_1; Domain location=586-609; Score =11.9; E_value=1.7; Accession=PF00560.23; Description=Leucine Rich Repeat
  Pfam annotation: Domain name=LRR_1; Domain location=612-636; Score =3.2; E_value=72; Accession=PF00560.23; Description=Leucine Rich Repeat
  Pfam module annotation: Pfam domain module=F-box::LRR_1::LRR_1::LRR _1::LRR_1::LRR_1::LRR_1::LRR_1::LRR_1::LRR_1::LRR_1::LRR_1; Domain
  Pfam module annotation: Domain location=534-555::560-585::586 -609::612-636
MPALYAYGDDGCLVSAPAELAGLFCRGAVQQRKRTLVAASAVAAAAAECVRAAKKQRQLPSLDALPDECLFEILRRVPGRRGAAACVSRRWLALLGSIRVSEFGQAAAAADTPSLPDLNEEFVMEEDKEEVPADRCVDRVLEGKEATDVRLAAMAVVAGSCGGLEKLSVRGSHPARGVTDQGLSAVARGSPNLSSLALWDVPLITDAGLVEIAAGCPLLERLDISRCPLITDKGLAAFAQGCPDLVSLTIEACSSVGDEGLRAIGRSCMKLQAVNIKNCPLVGDQGISSLVCSATASLAKIRLQGLNITDASLAVIGYYGKAITDLSLTRLATVGERGFWVMANAAGLQNLRCMSVTSCPGVTDLALASIAKFCPSLKKLYLRKCGHVSDAGLKAFTESAKVFENLQLEECNRVTLVGILAFLNCSQKFRALSLVKCMGIKDICSVPQLPFCRSLRFLTIKDCPGFTNASLAVVGMICPQLEQVDLSGLGEVTDNGLLPLIQSSESGLIKVDLSGCKNITDVAVSSLVKRHGKSLKKVSLEGCSKITDASLFTMSESCTELAELDLSNCMVSDYGVAMLASARHLKLRVLSLSGCSKVTQKSVPFLGNLGQSLEGLNLQFCNMIGNHNIASLEKKLWWCDILA

SEQ ID NO: 72817 - protein, 48 aa, Zea mays
  Coding DNA Sequence Number=SeqID_31038
MELMQFKTNLISSFQGIRNHARSQLILIGAPMQRIAHARVKHHGRVTP

SEQ ID NO: 72818 - protein, 48 aa, Zea mays
  Coding DNA Sequence Number=SeqID_31039
MPSLRSALELHHSLTNTTHPFPSPIAPGNLAGDPTAMDARHLAVDWPP

SEQ ID NO: 72819 - protein, 44 aa, Zea mays
  Coding DNA Sequence Number=SeqID_31040
METDEQGAGTTFKDELHAGAGGEPWRLKQQPPAEDRKFRRGAQA

SEQ ID NO: 72820 - protein, 165 aa, Zea mays
  Coding DNA Sequence Number=SeqID_31041
  Gene Ontology: Mol. function=protein binding; Cellular component =protein complex; Biological process=protein catabolic process
  Homolog annotation: Hit_ID=Q8W424; Match level="QueryCoverage=72%, HitCoverage=38%, E-value=6e-63, Identity=96%"; Hit description=26S proteasome regulatory particle non-ATPase subunit8
  Pfam annotation: Domain name=Mov34; Domain location=12-125; Score =166.6; E_value=6.2e-47; Accession=PF01398.11; Description =Mov34MPNPAD-1 family
MDVVKAAQLSGRTLERVVVHPLVLLSIVDHYNRVARDTRKRVVGVLLGTSSRGSVDVTNSYAVPFEEDDKDPRIWFLDHNYHESMFSMFKRINAKEHVVGWYSTGPKLRENDLDVHALFNRCGEPASEVMSSYGCSFKLLIQPLSYRQICKFPNQRHSGLTLRSA

SEQ ID NO: 72821 - protein, 54 aa, Zea mays
  Coding DNA Sequence Number=SeqID_31042
MGSVCGLGFRSSCWPVAGSGDWQADLVGHGERAALGTRIGTITGTLVSNLHRYN

SEQ ID NO: 72822 - protein, 116 aa, Zea mays
  Coding DNA Sequence Number=SeqID_31043
MDFIILWTGRIINRNSRGYCVNYPMTQTILSWMGERVSTNPSREINQGQLRLDLISREAGKGESAQREIRWRGREDPEIPGDGHGGIARVRRGLRSEVDGRADNWDPRSSVSPERA

SEQ ID NO: 72823 - protein, 632 aa, Zea mays
  Coding DNA Sequence Number=SeqID_31044
MATSQKEEERWEKMWRILDRLDHQLENWEVGQHRLQGQAELVTARKTEEHGSHNCVPVILGGTNFSVFGEKSAEKMDVEPNVPWMFVGMPQQASTYPVSSEMGLTVAWDEEMQVETHTHEGLLQQLAQGGEALEELAEKKGDVVDETSKSDPSSMAVAMVMKVGSMEGLLPASVISVLGESPEKEQNAENVDATSAGGILSQDLVSESTHETNGAGEIISAPKVDDEDWEILQVREISEEEVEDYFVVSQEGAVDEVMQVELADGGTGEEEMLCGKEVAGNLVQVIVMSAVRWICDGQGLPDEILSKIQWDKEFSSNLSMRRGLLRDMVVERSYLNVFHSGEGVLIITPSQGYHPEEMLDLSLVDTDILCIVKLLKVNNSLLLEAHGSGFVLIFDGRQNNGSVHYVIFELTQGWLPASSPGNSDMAFQSQLDIQRKSMNKLMSLQFRMVYDKGKENIVTDDYAQDLWSMVTGHISCQDVFSGQRVVPYHWFKSLFGWTDLKIGVDQLVRQCPVFQQTQQGQQLPIGSLHQASMGGYFFNSLYRYAVLVLAVPMIKGSEDLWVAVWIQQQAADSSVFKEQGTLDHIKCWQWLGQWHTVCNFQPRHMRARFPTVLAWGQASFGEGGNVRIVDGA

SEQ ID NO: 72824 - protein, 202 aa, Zea mays
  Coding DNA Sequence Number=SeqID_31045
  Gene Ontology: Mol. function=serine-type peptidase activity; Cellular component=integral to membrane; Biological process=proteolysis
  Homolog annotation: Hit_ID=Q2R135; Match level="QueryCoverage=58%, HitCoverage=47%, E-value=3e-31, Identity=61%"; Hit description =Signal peptidase I family protein, expressed
MKSTSSSSRCLSQQQAGLLRRTPPRIDGFDTNCHNPLVMEHRQTPVSVRLGRVAPGDIVLMISPEDPRKSVVKRVVGMQGDSVTYLVDPGKSDSSSRTVVILNELELCAGKTLHYATLGIFTPPDQKVPQDHVWVQGDNIFASNDSRQFGAVPYGLITGKIFCRLRRVLTVALLDPRFGRRRVSAQLMTQPSSLNAEEEPRR

SEQ ID NO: 72825 - protein, 79 aa, Zea mays
  Coding DNA Sequence Number=SeqID_31046
MAHRTVREQFTVRCTPESPVRVRCATKIHFRDCALGFLRLGESLPWTSLAHLAEGAPDSPVHTGQSGAPNPETLSLVFS

SEQ ID NO: 72826 - protein, 94 aa, Zea mays
  Coding DNA Sequence Number=SeqID_31047
KSRLDEPVDRNSPRFGMICALGTLKDKQFWRIYFLLAKSYISPYELRAIQKEKLRRMETENCKPKQVISVEVEMQESKRTSLSQASEVDLESQV

SEQ ID NO: 72827 - protein, 517 aa, Zea mays
  Coding DNA Sequence Number=SeqID_31048
  Gene Ontology: Mol. function=magnesium ion binding; Cellular component=cytoskeleton; Biological process=Mo-molybdopterin cofactor biosynthetic process
  Homolog annotation: Hit_ID=Q309F9; Match level="QueryCoverage=100%, HitCoverage=78%, E-value=0.0, Identity=87%"; Hit description =Molybdenum cofactor biosynthesis protein
  Pfam annotation: Domain name=MoCF_biosynth; Domain location=180-330; Score=130.3; E_value=5.4e-36; Accession=PF00994.14; Description =Probable molybdopterin binding domain
  Pfam annotation: Domain name=MoeA_C; Domain location=341-419; Score =79.5; E_value=1.1e-20; Accession=PF03454.5; Description=MoeA C -terminal region (domain IV)
  Pfam annotation: Domain name=MoeA_N; Domain location=1-167; Score =215.3; E_value=1.4e-61; Accession=PF03453.7; Description=MoeA N -terminal region (domain I and II)
  Pfam module annotation: Pfam domain module=MoCF_biosynth::MoeA _C::MoeA_N; Domain location=180-330::341-419::1-167
MLQVEEALAAVLSAAAGHAEPHAVPLQGALGLVLAEDVCAPDPLPPFRASIKDGYAVVASDGPGEYPVVTESRAGDDALGVVVVPGTVAYVTTGGPVPDGADAVVQVEDTEQLPGGADGSKRVRILARASQRQDIRSVGCDIEKDSIVLKSGEHIGPAEIGLLATVGVTTVKVYPRPTIAVFSTGDELVQPATATLSRGQIRDSNRAMLLACAIQQKCKVVDLGIAEDTEESLKEHMDAALRSNADIIITSGGVSMGDRDLVKPCLAKMGKIHFEKIQMKPGKPLTFAEITTQDTPKPSKTVLAFGLPGNPVVILIVTMLSVLFSPYTIQRIPYNSITRVHVRISHPLRADPHRTEFHRAAIRWVLDDGSGRPGFVAESTGHQASSRLLSMKSANALLEIPSTGQILAAGTSIQAILISDIITSSDKLPTPSNPYPSRGPSAKSISADVSQIASPQDAEVKVAILTVSDTVSSGAGPDRSGPRAVSVVNSSSEKLGGATVVATAVVPDEVDKIKGIL

SEQ ID NO: 72828 - protein, 218 aa, Zea mays
  Coding DNA Sequence Number=SeqID_31049
  Gene Ontology: Mol. function=transferase activity, transferring glycosyl groups; Cellular component=integral to membrane; Biological process=metabolic process
  Homolog annotation: Hit_ID=Q75HA1; Match level="QueryCoverage=75%, HitCoverage=34%, E-value=9e-56, Identity=65%"; Hit description =Putative glucosyl-transferase
PGDAQGRFLVGPTVSPSPLAVARGDTERDPIQQRLDGRDEGSEVYVCFGSTCSLGETQLRELATGLRASGRPFVWVVSTTPRGDGGCAEREARASSNGMVVAGRWAPQAEILAHRAVGGFVTHCGWNSVLEAVSAGVPLATWPLRAEQFLNELFLVEVLRVGVRDEEVLAARKARSRELGAAARAAVAEGGSSSGDWARLVYELKAFHGRHNDPQTYK

SEQ ID NO: 72829 - protein, 91 aa, Zea mays
  Coding DNA Sequence Number=SeqID_31050
  Gene Ontology: Mol. function=transcription coactivator activity; Cellular component=nucleus; Biological process=positive regulation of transcription
  Homolog annotation: Hit_ID=Q8L8V0; Match level="QueryCoverage=91%, HitCoverage=50%, E-value=9e-28, Identity=71%"; Hit description =Transcription co-activator-like protein
  Pfam annotation: Domain name=MED7; Domain location=1-88; Score=23.5; E_value=2.1e-08; Accession=PF05983.2; Description=MED7 protein
GDVVIPSLESHNVRQLYPKGPNIDFKKELRTLNRELQLHILELADILVERPSQYARRVEDITLIFKNLHHLLNSLRPHQYLLGKSHIDSHA

SEQ ID NO: 72830 - protein, 92 aa, Zea mays
  Coding DNA Sequence Number=SeqID_31051
MDHGDSMTVNHRFVLVKCNVMTAECSLAHCVTVFMAVGSCYRVSSFITRIFQYPNYPDPELNGVTPNAQSYVGARAYGQPLGLGSQRENIKP

SEQ ID NO: 72831 - protein, 77 aa, Zea mays
  Coding DNA Sequence Number=SeqID_31052
MNPFAQASLVEARKLVLLTWRPGGVAGAGQRAPEWECRGLSGQGTWRPSGGGLSRSLRASGVAASGDPTSGQAASGG

SEQ ID NO: 72832 - protein, 116 aa, Zea mays
  Coding DNA Sequence Number=SeqID_31053
MSGAPEDSDCQLATFGNFQRRLRYNSPDCPVYTAHVRCSKEERPQELASLGNSLHLLRYNSPDMSGVHRTVRCNYATTATSGANGYLLCINCAPARAEVRHAHAGAPDNLQYMSVF

SEQ ID NO: 72833 - protein, 131 aa, Zea mays
  Coding DNA Sequence Number=SeqID_31054
  Homolog annotation: Hit_ID=Q10SV0; Match level="QueryCoverage=84%, HitCoverage=59%, E-value=9e-14, Identity=47%"; Hit description =Expressed protein
MSLQSSPSFRVRRLGLRVPHGHRNHHHLHSIPANVRIHRPDLPHPAAGPQERARDIFVVVIGLLFGVACGALTAASVYLVWSMVAGAAAVSAYDELYDDEDEASDIESPKKVGYVIIQELEVDEGVGTWEP

SEQ ID NO: 72834 - protein, 127 aa, Zea mays
  Coding DNA Sequence Number=SeqID_31055
MAAARSRICAWGKGFLGENNKWNLDEVDSAAEGCPGRGSHRDPNDDVEGRLDGEFLAPESNPRVPGRTSRPNMPQTRVTVSRAPLGPFFKVAEVHDALPLSALVVLGGVDNILVLTFDSSALVLLII

SEQ ID NO: 72835 - protein, 409 aa, Zea mays
  Coding DNA Sequence Number=SeqID_31056
  Subcellular localization annotation: CTP_CleavageSite=59; ConfidenceScore=5.73e-01
MASVSTAPRAPLPAAASSSLSARQVDPNPSGSHFLDGRRLRVVRRLAGAAPSRRAPLVCCSARSPDADAGDERRRRGWDAMLHDAFKGAVRRWSEYVSNYWPPPTSVKEAGTGKRVGRSHEEEVMNGDEEERKVGEEEGKWSWARWKRHFALIEESGRLVDELQSDRWAEEREEWDDRRLKEILTGNRTALMSSDASENCQMLHVISVATGAPQTMRLEQKPKMIASGCRGNRSRDGRDRLTRNDDLVLQGGSTFEHQRSTGPRCDTEGPTRCWGPSCFSRPVVRNPAKEADVAHASAPVKTAGGAGDGARHGVDRRVDGVGAQAPLTEGAEALRKAAHPGGAQAPSAMETEQRGRRLHGWRGGAEDDGAGEGRPRGGEVRPLGCWPALGGKDEHPEDDNAGADGGCWR

SEQ ID NO: 72836 - protein, 91 aa, Zea mays
  Coding DNA Sequence Number=SeqID_31057
MDELATQDHCNVLSFQDAWSMIVKRLTAVKIILASRSPKGTNRGGGADHDVRVTSGEGDESEDLSTHTIASDFSSGCLTERFQEPGSSIFM

SEQ ID NO: 72837 - protein, 134 aa, Zea mays
  Coding DNA Sequence Number=SeqID_31058
MAGRGWARFDGARGRTHKETLAATNATKWIPIQPGRAGRAEKGGTRQVMAEESTMAKRENPSAGVSREERPSGARSSTQGTERGRRDLGERSREPDRAAMIGAKRWDTVASAQEAKRAMGGSRRAGVSASHRRG

SEQ ID NO: 72838 - protein, 157 aa, Zea mays
  Coding DNA Sequence Number=SeqID_31059
MCGIVSGDGRSRPIHVRMRRKLVGGEGFGPSRAVEFNLNWASILAWRSFTAPRGSCPKARLRLKVSRNGWSRWPALGWIGRVAQSSPELRVVSGQRSLPPLKEYRPKIQVRVLQGEAKTQRAGGGVGHGYVPVPLGRQSGKFERRNSSASQVVSSSE

SEQ ID NO: 72839 - protein, 84 aa, Zea mays
  Coding DNA Sequence Number=SeqID_31060
  Gene Ontology: Mol. function=protein serine/threonine kinase activity; Cellular component=integral to membrane; Biological process=protein amino acid phosphorylation
  Homolog annotation: Hit_ID=O49318; Match level="QueryCoverage=63%, HitCoverage=5%, E-value=1e-12, Identity=62%"; Hit description =Putative receptor-like protein kinase
MASQSSSPLDWEMRFLIALGAAEGLSYLHRKIKSSNNILLDENFEALVGDFGLAKVIEVDVCSCSRVFSIPIRLHGIRKGYVLA

SEQ ID NO: 72840 - protein, 308 aa, Zea mays
  Coding DNA Sequence Number=SeqID_31061
  Gene Ontology: Biological process=ubiquitin cycle
  Homolog annotation: Hit_ID=Q6YUN4; Match level="QueryCoverage=89%, HitCoverage=74%, E-value=8e-39, Identity=38%"; Hit description =Putative Avr9/Cf-9 rapidly elicited protein
  Pfam annotation: Domain name=F-box; Domain location=34-80; Score =31.0; E_value=4.1e-06; Accession=PF00646.23; Description=F-box domain
MAPPQQLRLTAPLQVAAGGSGSDSSSSFVPPARDYTQDLPDEILALVFASLSPTDRNACSLTCSRWMEVDATTRHRLSLDARAALGNAATALFSRFTAVTKLALRCARDSGLDSLSDHGAAALAAALPSERLARLKLRGLRKLSDAGLASLAAGAPAIRKLSIASCTFGPRAFVAVLQSCPLLEDLSVKRLRSVADTSGAASSIAEEIKFPPALSLRSVCVKDLYNALCFVPLVASSPNLRSLKILRCSGAWDLPLERWAALKKLCIKGCPVSDRGMEALNGGCPGLVKVKLKRCRGVSYECIENLKV

SEQ ID NO: 72841 - protein, 172 aa, Zea mays
  Coding DNA Sequence Number=SeqID_31062
MPRSKRYALLIPAAECTINSHNVYLLPRPTQVAPPIPHGGSSPANRWPVALAPQVAIRKVLRAEEENANPGKEVSPRDEAQAKLPTAPRESAATFWPRQAIAPPPIAPPPIGRITGFRLGPEDLKSKSMIKFRNSNFYYILKINYEVIDFGPYMGRKWGRRGERRRKRFFFF

SEQ ID NO: 72842 - protein, 98 aa, Zea mays
  Coding DNA Sequence Number=SeqID_31063
MQLFAPEANLGHDTIMARKANLRRETQSRLARDQSRAEDAVTARPKPISGRRQSQLARPTSCGRRSHDSSEASLGWETRSWVAEREMCPWAISKYFGD

SEQ ID NO: 72843 - protein, 458 aa, Zea mays
  Coding DNA Sequence Number=SeqID_31064
  Homolog annotation: Hit_ID=Q10Q73; Match level="QueryCoverage=59%, HitCoverage=80%, E-value=2e-93, Identity=63%"; Hit description =Expressed protein
  Pfam annotation: Domain name=Syntaxin-6_N; Domain location=11-94; Score=54.5; E_value=3.5e-13; Accession=PF09177.1; Description =Syntaxin 6, N-terminal
MATSFDRWEKDPFFLAAEEERSGGDSEAASVTGGPTAAQLRRELHTALGTAKWQLDELARAVRSNDLVMSAGKDTRARHDDFVTAIGYRILEVENYLKESNLADGRGPLSWVHLDEDERDDLAAFLSASPFQQKDKVVTIPSAGDIEVGSNAARMKNDISTDSSKDSAGSTDLISGTAKQDLHRGHRRAASASADIGSWSMSIPNECEGTTEQLSDGSDKLPLHKIVKTCALTSTLQSKTRTKWKNGAVRWAGSNQQDVEEAIPLNTSQLSQVLPHVPGGVELASRAAPAAPVPGAKSVLVPERVGVRIQVEVGEAGPTGGTARGEELGGARHAGIPSVRSEVTHGSVPPRKRSPRKTTADNWRQGVFQLRAKGTIPPDWWGSRFVLSIIHGRRAMAPLCGLASVPPAEASVAGSSRASASAIQRLAHLRHSLRAAAISSDVEVARGMTQGEGVVWEG

SEQ ID NO: 72844 - protein, 152 aa, Zea mays
  Coding DNA Sequence Number=SeqID_31065
  Homolog annotation: Hit_ID=Q8LIY0; Match level="QueryCoverage=47%, HitCoverage=11%, E-value=1e-11, Identity=51%"; Hit description =Putative CSLC9
MPQWWGREAQGDGDVTSVVVKMESPDWAVRKPEVARGKAGRGKNARQITCVLLLKAHHAAGKLTGAASTALSPSTPKALAAQCLEHGALLLHVLADAFAGKLDNSGCSLSDLKRNMRSLQSRNHLQHHSEGKVKLKSYRLTYLTQKQCFDDS

SEQ ID NO: 72845 - protein, 96 aa, Zea mays
  Coding DNA Sequence Number=SeqID_31066
  Pfam annotation: Domain name=L51_S25_CI-B8; Domain location=18-70; Score=5.3; E_value=0.03; Accession=PF05047.6; Description =Mitochondrial ribosomal protein L51  S25  CI-B8 domain
MALRGVWQLQKLVVNYCDWGGSSRGIRAFMEAHLPAFKEKNPHLEVVTELVRVRSWLLSFIAIYDLLFSTGFLIGIQLMEVPLDIWIGIEMTYNIA

SEQ ID NO: 72846 - protein, 463 aa, Zea mays
  Coding DNA Sequence Number=SeqID_31067
PDAASDPITKAAAAAKSWRKAGQGQGQAMMVWFTSREKSIDRAAVVPGPDCLHADMGVDHHVSGVERQAPDQTTDWPMPTQAHTQQGGETGRLKHVTPALARAVPADPSHGRTSLGSCWTVDILTWTSPAAADEPAAAPPAWQWQWHWHRSPLPVIKKLRWEAKASILGPGFGCLALKQALAGSPPPHARTATAGPTARHAASAVVSFRRRCGINKSRSQPSPTTEAQALPGQGRAGRQAHRHSSASRPSRRRKPHTRTHWLGRRRSRSAARGCLFCCRLIASLLLPRRRLLVASESNPFPPTPRAPADTDPELGRAEARPPPEAFSPARRGDVRAEMFASRPVVHPLEVAAPAHPVQQPAPGVLMKDLPGMPGTPGGLGLRVLQLLFAAISLAVMSSTADFASVSAFWYASSLLFHPPPHHLASFSSRMPRISESHCGFGGSDRDKKRKFLPLAKIQTNVFN

SEQ ID NO: 72847 - protein, 102 aa, Zea mays
  Coding DNA Sequence Number=SeqID_31068
LRGQHRTGDGHGSPEASDGRHSHDSLEANPRREIITAREASPRRETQSRLALGQPRSGDGHGSLEASLGRETSSRIARGHPRMGYAVMPRLRPISGRSQSHA

SEQ ID NO: 72848 - protein, 241 aa, Zea mays
  Coding DNA Sequence Number=SeqID_31069
  Homolog annotation: Hit_ID=Q53LP7; Match level="QueryCoverage=30%, HitCoverage=21%, E-value=9e-07, Identity=43%"; Hit description =Expressed protein
  Subcellular localization annotation: CTP_CleavageSite=30; ConfidenceScore=5.09e-01
MAAASASDPAPAPPHHGQARADRWPRSPSPAAARGGEEEARFNGGSLACAGQGGQGNAQIRVDKVHERHRDGSGDCWGSWGPTPSYGPKQMSYISSEYVREPKFIEISMPLGVETQIEGGLVAARDQGSLQASADMDYNSDGSGSVTPSPQLWASHPEHHQFDQHYSVGVAKHLAVVSVGHSGRGYCREMLELIRGLPQSAYELSLHDIVEHPSVTPVLAPHSSLSTAPAAPTPSAADCKR

SEQ ID NO: 72849 - protein, 591 aa, Zea mays
  Coding DNA Sequence Number=SeqID_31070
  Gene Ontology: Mol. function=actin binding; Biological process =protein modification process
  Homolog annotation: Hit_ID=Q1S960; Match level="QueryCoverage=87%, HitCoverage=76%, E-value=2e-93, Identity=38%"; Hit description =Prefoldin
  Pfam annotation: Domain name=DUF827; Domain location=1-486; Score =333.4; E_value=3.8e-97; Accession=PF05701.2; Description=Plant protein of unknown function (DUF827)
  Pfam annotation: Domain name=Pox_A_type_inc; Domain location=106-128; Score=5.7; E_value=12; Accession=PF04508.3; Description=Viral A-type inclusion protein repeat
  Pfam annotation: Domain name=Pox_A_type_inc; Domain location=276-298; Score=1.1; E_value=55; Accession=PF04508.3; Description=Viral A-type inclusion protein repeat
  Pfam annotation: Domain name=Pox_A_type_inc; Domain location=35-57; Score=7.1; E_value=7.5; Accession=PF04508.3; Description=Viral A -type inclusion protein repeat
  Pfam annotation: Domain name=Pox_A_type_inc; Domain location=7-29; Score=2.7; E_value=33; Accession=PF04508.3; Description=Viral A-type inclusion protein repeat
  Pfam module annotation: Pfam domain module=DUF827::Pox_A_type _inc::Pox_A_type_inc::Pox_A_type_inc::Pox_A_type_inc; Domain location= 1-486::106-128::276-298::35-57::7-29
RVLAKETELHLAQKELNKYKEQLNNAETTKVQALSELEKAKKTVEELTTKLDVVNKSKQLAIQATEDAKTRTKQLEGGSTNECLGTDGPLRQELESAREQHAIALAELDAAKQELRKLKKDFETSLDMRLCAAQQEDESLHTTEANKEKANQLLGEIAEIQESLMHVKAATVQAHEEEAQILAEKDVARATYKQALEETQKKLLSLRNDFDPAAYDSLKEKLEQTNSEVASMQKKIEDARAQDLESVAVVSTELDDAKEMLQKVAEEESSLRSLVESLKVELEAVKQEHNQLKEKDTETESIVGDLHVKLQKCKSVLEAAVAAESKATSASDDLMLALQQLSAESNNALQEAEIMQKSAAELREEAKKARAELAEAEQKLQLTLKEAEEAKAAEAMALDRIKQLSDRASAARASTSESGANIAISKEEFESLSRKVEESEKLSEMKVAAAMAQVEAIRASENEAIKKLEAARKEMEDMELATEEALKRAEMAEAAKKAVEGELKRWHEKEQKKTAEAAQPSAGAEELGSAASPPVRQTSAGKASEKNEGHQRSSKALLKRSFMLPNIASMFHKKKSHPSSSPSHLPGEKSV

SEQ ID NO: 72850 - protein, 112 aa, Zea mays
  Coding DNA Sequence Number=SeqID_31071
MAEVASRVLGVIEESGGGGAATKAAMDCSIHERNCGWLNVQIGIKINASADEYEHLMYLVMCVEKFWAVMFEDYTAREKDEYEHLMYLVMCVEKFWAVMFEDYTAREKGCSD

SEQ ID NO: 72851 - protein, 214 aa, Zea mays
  Coding DNA Sequence Number=SeqID_31072
  Gene Ontology: Mol. function=oxidoreductase activity; Cellular component=integral to membrane; Biological process=electron transport
  Homolog annotation: Hit_ID=Q2QUC5; Match level="QueryCoverage=99%, HitCoverage=41%, E-value=1e-101, Identity=84%"; Hit description =Cytochrome P450 family protein, expressed
  Pfam annotation: Domain name=p450; Domain location=1-197; Score= -166.3; E_value=0.0021; Accession=PF00067.12; Description=Cytochrome P450
MFVAGTDTTFATLEWVMTELVRHPRILKKAQDEVRRVVGGKGRVEESDVGELHYMRAIIKETFRLHPAVPLLVPRESVAACTLGGYHIPAKTRVFINTFAMGRDPEIWDSPLEYRPERFENGGEIDLKDPDYKLLPFGGGRRGCPGYTFALATVQVSLASLLYHFEWALPPGVAAEDVNLDECFGLATRKKEPLFVVVTKSEAYEFKGEELNEV

SEQ ID NO: 72852 - protein, 134 aa, Zea mays
  Coding DNA Sequence Number=SeqID_31073
  Subcellular localization annotation: CTP_CleavageSite=36; ConfidenceScore=5.19e-01
MAHRTLSSAPGPYTLKSATLGNSAGALRYNSPDCPVCTGLSGEPAEQRLPARQQSTSKVYIGKQCRAEVRDRRTVRCNQKTKGSNGQQLQTLTSALTWRAPDSESDCPKFEDYMKKLYEEFHRQQAQKSEKAKS

SEQ ID NO: 72853 - protein, 77 aa, Zea mays
  Coding DNA Sequence Number=SeqID_31074
MKANMGTKARPLSVDADKGEIGEIDTRAPFESVKAAVSLFGEVKVSSDISAARKPKVPQAEVQNRQYDGKEFQSEIV

SEQ ID NO: 72854 - protein, 64 aa, Zea mays
  Coding DNA Sequence Number=SeqID_31075
MTWRNPNEGAIWVVALGWKDDRRESIYIITLLMINEKMRTTPFHYWDPMSLDIMGDDVNLKGHN

SEQ ID NO: 72855 - protein, 55 aa, Zea mays
  Coding DNA Sequence Number=SeqID_31076
MVPHGWTNVDGTNLPFYHPPCPFLISLVVDTTCCPTIGLGECQFFDIHHIFISLS

SEQ ID NO: 72856 - protein, 132 aa, Zea mays
  Coding DNA Sequence Number=SeqID_31077
  Homolog annotation: Hit_ID=Q53LY1; Match level="QueryCoverage=30%, HitCoverage=10%, E-value=1e-12, Identity=82%"; Hit description =Endonuclease III homologue
MKENTLRPGLLTGVSSIHIFHFIGIFLMFMYVGAPDNWETVLGGIKIMRLSGEAPIDTKGCVKAGSLLPPKFLVPEIQEMTGTDAPMTILAMMHLLASCYCPSKEVPKRAALDDLQDYNLFSNPSLQSGPHA

SEQ ID NO: 72857 - protein, 163 aa, Zea mays
  Coding DNA Sequence Number=SeqID_31078
  Homolog annotation: Hit_ID=Q5I7L4; Match level="QueryCoverage=25%, HitCoverage=19%, E-value=5e-14, Identity=83%"; Hit description =Ribosomal protein L6
  Pfam annotation: Domain name=Ribosomal_L6e_N; Domain location=5-55; Score=20.8; E_value=0.00038; Accession=PF03868.5; Description =Ribosomal protein L6, N-terminal domain
MRDRDLLSRSPCESNVTVLASRSHAYHRRGLWAIKAKHDGAFPKAEKPTVVAEPKFYLADDTKPRKPSTRKPKPRSLVERCRLNISQYSRLGVEMLDVEVNIVLKFDDYYGNLFLLSVFAFDDGNYLYCSDIEFYGRVLFGNESLNNCVYSKSNTLIRNGWNY

SEQ ID NO: 72858 - protein, 397 aa, Zea mays
  Coding DNA Sequence Number=SeqID_31079
  Gene Ontology: Mol. function=protein binding; Cellular component =intracellular; Biological process=small GTPase mediated signal transduction
  Homolog annotation: Hit_ID=Q6ZH85; Match level="QueryCoverage=95%, HitCoverage=83%, E-value=1e-111, Identity=54%"; Hit description =Putative leucine-rich protein
  Pfam annotation: Domain name=LRR_1; Domain location=162-183; Score =13.8; E_value=0.62; Accession=PF00560.23; Description=Leucine Rich Repeat
  Pfam annotation: Domain name=LRR_1; Domain location=185-207; Score =10.2; E_value=3.5; Accession=PF00560.23; Description=Leucine Rich Repeat
  Pfam annotation: Domain name=LRR_1; Domain location=209-230; Score =6.2; E_value=20; Accession=PF00560.23; Description=Leucine Rich Repeat
  Pfam annotation: Domain name=LRR_1; Domain location=232-253; Score =7.2; E_value=13; Accession=PF00560.23; Description=Leucine Rich Repeat
  Pfam annotation: Domain name=LRR_1; Domain location=255-278; Score =7.9; E_value=9.5; Accession=PF00560.23; Description=Leucine Rich Repeat
  Pfam annotation: Domain name=LRR_1; Domain location=280-301; Score =18.6; E_value=0.022; Accession=PF00560.23; Description=Leucine Rich Repeat
  Pfam annotation: Domain name=LRR_1; Domain location=303-324; Score =7.0; E_value=14; Accession=PF00560.23; Description=Leucine Rich Repeat
  Pfam module annotation: Pfam domain module=LRR_1::LRR_1::LRR_1::LRR _1::LRR_1::LRR_1::LRR_1; Domain location=162-183::185-207::209 -230::232-253::255-278::280-301::303-324
MTRAVADVSAARSALQVLGPRPDHELVDSSRAIVAAAEAGDSRIPAGDVEACRAVVRLDETHDAYEALLHEAESRLERVYRSAMEGTDLDDEAAESVKDQGPVAGPEGGDAAVGEEVVAVLKQAEEGKPVDSVRLVDRQLRHLPEAFGRILGLRVLDVSRNQLEILNVSSNRLRALPDSISKCRSLVELNVSYNGLTYLPTNIGYDLVNLRKLWIHMNKLRSLPSSVCEMRSLYLLDAHFNELCGLPSLFGKLSGLEILNLSSNFSDLKELPPSFGDLLNLRELDLSNNQIHALPDTFGRLDKLEKLNLEQNPLVMPPEDIVNKGVDAVKEYMSKRWLDILLEEEQRRIAAETPEMSSTPKAWLTRSVSWVTDVSESLAGYLGGNKSEKDAYLDQQF

SEQ ID NO: 72859 - protein, 179 aa, Zea mays
  Coding DNA Sequence Number=SeqID_31080
  Pfam annotation: Domain name=DUF295; Domain location=58-108; Score =53.5; E_value=7.2e-13; Accession=PF03478.8; Description=Protein of unknown function (DUF295)
MRRATVEPLLSEANLPFNPATVFAPPYDTVSSFTRGQHRVAENEILVLRYYPRRRPCWDVVKDLGGHSLFVGRNNAVSMYGEGVPGLRGNCVYWIGGRGRDQGMVFDMESGRSTPCRVPPVGFLPGHPHSTICWYFLSDVMSINNCYSNSVSSSNSSGGRKIYQTRARARADLAQDMEE

SEQ ID NO: 72860 - protein, 191 aa, Zea mays
  Coding DNA Sequence Number=SeqID_31081
  Gene Ontology: Mol. function=phospholipase C activity; Cellular component=membrane; Biological process=intracellular signaling cascade
  Homolog annotation: Hit_ID=Q6YW97; Match level="QueryCoverage=54%, HitCoverage=25%, E-value=1e-47, Identity=87%"; Hit description=MAP3K protein kinase-like protein
MAAGDPGIVPGSCPNRKESQPLNSRPASLFLQNYFPTIPVQNEACKENSGLPQMAQACYAAAGNRIPNFIAVNFYMRSDGGGVFDVQDRINGRTLCGCDTIAACQALVFIYLDLFPTYCIAESNISFCCELAFSIGMTIYACVLHLDRNFVHINGNRVFSVPSTDGWVTTVSDHGGATKADGWGHHLPYSN

SEQ ID NO: 72861 - protein, 474 aa, Zea mays
  Coding DNA Sequence Number=SeqID_31082
  Gene Ontology: Mol. function=DNA binding; Cellular component=nucleus; Biological process=protein modification process
  Homolog annotation: Hit_ID=Q9LL45; Match level="QueryCoverage=97%, HitCoverage=80%, E-value=1e-94, Identity=43%"; Hit description =Telomere binding protein-1
MEKDVGSGSVSAFPRQAKNCLAENSSTRNGADTVLESLTVKSNMLAKIPECGSYGIHHAGSSSSAEPEQVHQAEPKVSRRQADGHPVAYGIFNSVDVDGKPPALVSSDSSSCVPLSSHDKEHQTSSLYRGVVQYTADREDDENSSGCTHPSTIETSGTSFAMEGQNKSCEAENYHVKLRIKSFNIPELFIKVPENATIGSLKRAVMDVVNSIMEGGLRVGVLLQGKDIQDDNKTLCQAGICHDKKLNNIDFTLECEREREPPSGVIIQEQMDFLTTDMVEPLARMKCEEPFPEADVGDDSQQPRAPYRSRSLSDLYSVHCPVQMASQDTTASSQAIVPVSPAPSDVGALAIVPLCKSKGSEVGQRRMRRPFTVGEVEALVGAVEQLGTGRWRAVKTLAFDSIDHRTYVDLKLKDLQKQPVLVDFNAVLDKWKTLVHTASISPQQRRGQPVPQELLDRVLLAQAYWSQQQQQARL

SEQ ID NO: 72862 - protein, 391 aa, Zea mays
  Coding DNA Sequence Number=SeqID_31083
  Gene Ontology: Mol. function=binding; Biological process =peptidoglycan metabolic process
  Homolog annotation: Hit_ID=Q3XV38; Match level="QueryCoverage=54%, HitCoverage=61%, E-value=3e-19, Identity=33%"; Hit description=Sel1 -like repeat precursor
  Pfam annotation: Domain name=Sel1; Domain location=113-148; Score =7.5; E_value=1.9; Accession=PF08238.2; Description=Sel1 repeat
  Pfam annotation: Domain name=Sel1; Domain location=149-180; Score =15.5; E_value=0.18; Accession=PF08238.2; Description=Sel1 repeat
  Pfam annotation: Domain name=Sel1; Domain location=239-274; Score =51.0; E_value=4.1e-12; Accession=PF08238.2; Description=Sel1 repeat
  Pfam annotation: Domain name=Sel1; Domain location=275-310; Score =40.7; E_value=4.9e-09; Accession=PF08238.2; Description=Sel1 repeat
  Pfam annotation: Domain name=Sel1; Domain location=311-351; Score =1.3; E_value=12; Accession=PF08238.2; Description=Sel1 repeat
  Pfam module annotation: Pfam domain module=Sel1::Sel1::Sel1::Sel1::Sel 1; Domain location=113-148::149-180::239-274::275-310::311-351
  Subcellular localization annotation: CTP_CleavageSite=22; ConfidenceScore=5.72e-01
MDGNQTWPPPTPSPPPFSSRPRASPSPATHRRRRRHSKKHKPRPAPAPTPQGADFSALPPDLVHRALAAACASDVAAASRACRAWWDALRPLREAAALHAYGRRVKHDPVTGARAVAAAAASRGGGERVETERQRALGLFRRAARLGSAAAMVDAGLMCWEDGRREEAVGYYRSAADLGHPHWDVQPWGLLPRSSLLINCLVNLKALHLILLLNVSAADPPKAEEAIRWFYPSASAGNARAQYNLGLCLQNGKGVKRNQKEAAKWYLRAAEGGNVRAMYNISLCYSYGEGLAQDPVRAKRWLQLAADCGHKKALYECGIKLCASGCAGNIGKAGDKVKCLMYLELATRRGEAAAAHMRDVILESLSVVNAQRAMSDADKWKPRTLHPRPRR

SEQ ID NO: 72863 - protein, 105 aa, Zea mays
  Coding DNA Sequence Number=SeqID_31084
MDTESDTPLPSSIVAGGTSRENLFEWAKKNVGDTHVGKRNVQFMLPKTRKKGKKAVASGDEIDMEIKVHGTKSPNTFHIYYQMLVDSWSTTSTWTRQTWSGQYEN

SEQ ID NO: 72864 - protein, 218 aa, Zea mays
  Coding DNA Sequence Number=SeqID_31085
  Subcellular localization annotation: CTP_CleavageSite=51; ConfidenceScore=5.11e-01
ILGLTNLSGTIIRGTLKTPNSQLSRGDRCHSTAPLASLTEGQRRLRHSDCSATRQSESDRQLGLAKGATANSAPPDPRARTRARTRKTANSAPPDPRARTRARTRKTANSAPPDPRARTRAKTRKTANSAPPDPRARTRAKTRKTANSAPPDPRARTRAKTRKTANSAPPDPRARTRAKTRKTTKLRLARPQGSDSALASAGRLPPRPTPWLGLGHGN

SEQ ID NO: 72865 - protein, 111 aa, Zea mays
  Coding DNA Sequence Number=SeqID_31086
MAADYLTDGSRLPLFSALGDGLVGVFDFGRTRSSGRARFYGPARAVCSESCGAYGGAEIGAQLRLGRSPRGGGELGGDSARATHALVMACADPVEFGRGDGGKSQQTRLLR

SEQ ID NO: 72866 - protein, 251 aa, Zea mays
  Coding DNA Sequence Number=SeqID_31087
  Gene Ontology: Mol. function=catalytic activity; Cellular component =endoplasmic reticulum; Biological process=metabolic process
  Homolog annotation: Hit_ID=Q6L479; Match level="QueryCoverage=73%, HitCoverage=17%, E-value=6e-92, Identity=89%"; Hit description =Putative phospholipase D
  Pfam annotation: Domain name=PLDc; Domain location=171-198; Score =29.5; E_value=1.2e-05; Accession=PF00614.12; Description =Phospholipase D. Active site motif
MGFDAAVYGWGRGSGVFLTCVVRSVGPWSAGTAQIEGSIHNAYFSLIEKAEHFVYIENQFFISGLSGDDTIKNRVLEALYRRILRAEKEKRRFRVIIVIPLLPGFQGGIDDGGAASVRAIMHWQYRTICRGPNSILKNLYDVVGSKADDYISFYGLRAHGRSDDGGPLVTNQIYVHSKLMIIDDRMALIGSPNINDISLLGSRDSEGWWLVMAWAGARRRRRRLSVRRQLALVVGARAADDSRHRLWHVTV

SEQ ID NO: 72867 - protein, 207 aa, Zea mays
  Coding DNA Sequence Number=SeqID_31088
MTSMPPRAGHDEVFTVARKTDLGEIGNWEALVDDQRQGLVHWMRNYLAELTGASIYRVLRRWRLILRRRAGGRREGNALARVIVAFTVAKPPAMDGLTTIVHCDVLKLLGTWRTGGKRPTPARINTAGRRASGYSEPSSDRVQDYLGAKIFYSPRLSTLRRARIAATGVNSDTESPAAKCSESVIFFSLLYNGKPHSEYVTERFAGL

SEQ ID NO: 72868 - protein, 55 aa, Zea mays
  Coding DNA Sequence Number=SeqID_31089
MAFTGASTQRTGMLPIATNGDVVTKVLLIEDNPKAAHNCPYGEVLRKQPEPPKES

SEQ ID NO: 72869 - protein, 203 aa, Zea mays
  Coding DNA Sequence Number=SeqID_31090
  Gene Ontology: Mol. function=catalytic activity; Biological process =metabolic process
  Homolog annotation: Hit_ID=Q6L479; Match level="QueryCoverage=93%, HitCoverage=17%, E-value=3e-72, Identity=72%"; Hit description =Putative phospholipase D
MEFRWLLYKKASQVLYLHFALKRRAFLEEFHEKQEQVKEWLQNLGIGEHVPVVHDDDEADDVHVPSQHDENSVKNRNVPSSAVLPVIRPALGRQQSISDRAKAAMQEYLNHFLGNLDIVNSREVCKFLEVSLLSFLPEYGPKLKEDYVTARHLPKIEMDSKERYCSSCCFSFCSSSWQKVWAVLKPGFLALLQRSILILSSWT

SEQ ID NO: 72870 - protein, 236 aa, Zea mays
  Coding DNA Sequence Number=SeqID_31091
  Subcellular localization annotation: CTP_CleavageSite=42; ConfidenceScore=5.47e-01
MSPASGRETWTILARGSSSNTRTDSGRRNDARRRGRPTPPARGGLRRHPDVPVATVLLLLLAGHRFLGGIYMDGLFWRLGVRARHEAEAEGEERFEERRKGAVSWTAAPWQEKGCTPNFEPLLRGRAGTAARESELHGRAPRARGSGARRPRASSGRASQACGGGARRPRVSTTREQPRAKRTSTTRSRLYFGFNSDDDGVLPSPPSSRRGGRSGESSHTAVTVVGCCACAGSSAY

SEQ ID NO: 72871 - protein, 70 aa, Zea mays
  Coding DNA Sequence Number=SeqID_31092
MLLSYTIEVHYKQVRPRAPPLPTSGFVWPSSSRWAVISIFDYRLMCRETELLVRFGFCEWVVVLNGKLML

SEQ ID NO: 72872 - protein, 209 aa, Zea mays
  Coding DNA Sequence Number=SeqID_31093
MPLCEITDAFHNHQCVEESLIYFPNREALLQAGSAPQPGGESISRSCNLKALIETHAKHGEPLSEVGAIEGDEGKWHKRGGTRSHVEWDWEDEGAARRKSLKEEGTTRAGGERTDRQAWRRELAGGDWPALGWEAEGPQAAGAARGLAVRPVGDGRQAEERAVGGAAGSHATTDKGGRRRSRRARGGARGWKPRPVATAGGRNPSSVPC

SEQ ID NO: 72873 - protein, 221 aa, Zea mays
  Coding DNA Sequence Number=SeqID_31094
  Gene Ontology: Mol. function=DNA binding; Cellular component=nucleus; Biological process=regulation of transcription, DNA-dependent
  Homolog annotation: Hit_ID=Q1RWX0; Match level="QueryCoverage=55%, HitCoverage=15%, E-value=1e-13, Identity=37%"; Hit description=SBP
MEPLHSSLLNQTHPKSEVENMFGLSNFVPILFGSKQLCSELERIHDALCGSYSENNVLGELLSASSDPHEHRKLCSSVMSGFLIDIGWLIRKPTPDEFKSVLSSTNIQRWICMLKFLIQNDFINVLEIIVKSMDSIMGSEVLSNLERGRLEDHVTAFLGYVSHARNIADRRANHDEKTQIETRGIIVTSPNQPNLGASVPFASEVSAIMLERFFVIIKNVK

SEQ ID NO: 72874 - protein, 892 aa, Zea mays; identical to SEQ ID NO: 72463
  Coding DNA Sequence Number=SeqID_31095
  Homolog annotation: Hit_ID=Q48IW3; Match level="QueryCoverage=25%, HitCoverage=65%, E-value=8e-08, Identity=27%"; Hit description =Inosine-uridine preferring nucleoside hydrolase
  Pfam annotation: Domain name=IU_nuc_hydro; Domain location=39-389; Score=-21.1; E_value=1.7e-09; Accession=PF01156.9; Description =Inosine-uridine preferring nucleoside hydrolase
  Subcellular localization annotation: CTP_CleavageSite=30; ConfidenceScore=5.26e-01

SEQ ID NO: 72875 - protein, 254 aa, Zea mays
  Coding DNA Sequence Number=SeqID_31096
  Homolog annotation: Hit_ID=Q75GP1; Match level="QueryCoverage=96%, HitCoverage=97%, E-value=1e-24, Identity=43%"; Hit description =Expressed protein
MVGEAPTEDFGLPAELMAVLPSDPFAQLDVARKITSIALSHRLGRLEAEAARLRSQLAERDAEAEELRERVEKLDSALAVATGRLRRAEEEKETLLRDNSALSNTVRKLNRDVAKLEVFKKTLVQSLQEDDSSDNTAPRASVAATSNFSAPSDEDSAFPTSKSSQISETASSVSEENSQVEPDGRTRVDGKEFFRHVRNRLSYEQFGAFLANVKELNAHRQTREDTLRKADEIFGPENKDLYTVFESLITRNIR

SEQ ID NO: 72876 - protein, 175 aa, Zea mays
  Coding DNA Sequence Number=SeqID_31097
  Gene Ontology: Mol. function=DNA binding; Cellular component=nucleus; Biological process=regulation of transcription, DNA-dependent
  Homolog annotation: Hit_ID=Q8S9G8-2; Match level="QueryCoverage=51%, HitCoverage=11%, E-value=2e-24, Identity=59%"; Hit description =Isoform 2 of Q8S9G8
  Pfam annotation: Domain name=SBP; Domain location=49-127; Score =152.3; E_value=1.3e-42; Accession=PF03110.5; Description=SBP domain
  Pfam annotation: Domain name=zf-NADH-PPase; Domain location=67-99; Score=10.3; E_value=0.017; Accession=PF09297.1; Description=NADH pyrophosphatase zinc ribbon domain
  Pfam module annotation: Pfam domain module=SBP::zf-NADH-PPase; Domain location=49-127::67-99
MVAAAEVEDVATEFLAGARKKTKTAGRRGKAEAAGTAGGTVRAAVAEMKCQVPGCEADIRELKGYHRRHRVCLRCAHAATVMLDGVQKRYCQQCGKFHVLLDFDEDKRSCRRKLERHNKRRRRKPDSKGTLDKEIDEPLDMPADVSGSDELREALQSTTVAIVSDRVGAGAQSRF

SEQ ID NO: 72877 - protein, 70 aa, Zea mays
  Coding DNA Sequence Number=SeqID_31098
MNAGGGRLLDLLYHATVILLRCLVGENVSAPFMIFESTGSPRYTERDYNMWLRFPYSCLPLNEQKNFFMP

SEQ ID NO: 72878 - protein, 154 aa, Zea mays
  Coding DNA Sequence Number=SeqID_31099
MGEAYTAVQVTVGSNGPIALSAYIQTYNPNYGAPYRASDLRMSSRRAEAPANATFGIPLLSFEEQTGHSEKFLQTTAAFLCFQTSQSTRITTKLNPLRNILATDLLDLHHHSWKRHVEMGLEPKKVAITHFIVTCEQAMVNLVVFACVHCDKPC

SEQ ID NO: 72879 - protein, 132 aa, Zea mays
  Coding DNA Sequence Number=SeqID_31100
MAEPWLAMVVPRHGASSSKLNAAKSYGGQSEVSRDFLPGYSTPTYPAHGTGGSAVAPPGSMTNSGRVPPFPAPKGHANTRCMSVKHSALPIWPDRQGSRKAPRRVSPRRGKFVGGEGKTPRSPATVMAATRG

SEQ ID NO: 72880 - protein, 524 aa, Zea mays
  Coding DNA Sequence Number=SeqID_31101
  Gene Ontology: Mol. function=5-formyltetrahydrofolate transporter activity; Cellular component=membrane
  Homolog annotation: Hit_ID=Q69P43; Match level="QueryCoverage=98%, HitCoverage=98%, E-value=0.0, Identity=72%"; Hit description =Integral membrane transporter-like protein
  Pfam annotation: Domain name=BT1; Domain location=58-502; Score =296.2; E_value=6.3e-86; Accession=PF03092.7; Description=BT1 family
  Pfam annotation: Domain name=DUF81; Domain location=117-373; Score= -63.6; E_value=0.026; Accession=PF01925.9; Description=Domain of unknown function DUF81
  Pfam annotation: Domain name=MFS_1; Domain location=51-449; Score =25.6; E_value=2.1e-05; Accession=PF07690.6; Description=Major Facilitator Superfamily
  Pfam module annotation: Pfam domain module=BT1::DUF81::MFS_1; Domain location=58-502::117-373::51-449
MDADSLVGQDPRSGVRPSGGERDWAAAVLEPVRWMRMLCRELGATFVAGVVLVYGLSQGFAGSFFRVASDYYWKDVQRVQPATVQFLSVFFFIPWVLKPLWGIMTDVFPICGYRRRPYFLFSGILGTVSAAIVAVTIGLPMSSAVLCLMGISTAVAIADVTIDASIAKNSIDKPALAPDMQSLCAFSSSLGALVGYATSGLFVHHLGAQGALGVMAIPPATVVFLGFFIYELKTHQHNVKEKKLKFFRSEPSELTEESGDAYVCGWVLNKVGGAVKGMVRTIRYPVVWRPSLYMFLSLALSISTHEGQFYWYTNKTPPNPGFSQEFVGLVHAIGAVASMLGVLVYHKCLKDYPFRSILLYAQLLYGVSGLLDLTFVLRWNLALGIPDAAFVTLEECVSRVVARVRLMPMMVLSTKLCPPGMEGTFFALLMCIDSLGMLAAKAGGAAVLRALRVTRTDFGHLWLAVLLRNVLRLATLGAIGLVPTAGQTDVLVPRELLVSSPAGVADDEEERLQLAMLTSHTDDV

SEQ ID NO: 72881 - protein, 248 aa, Zea mays
  Coding DNA Sequence Number=SeqID_31102
  Gene Ontology: Mol. function=1,2-diacylglycerol 3-beta-galactosyltrans ferase activity; Biological process=carbohydrate metabolic process
  Homolog annotation: Hit_ID=P93115; Match level="QueryCoverage=75%, HitCoverage=13%, E-value=1e-15, Identity=87%"; Hit description =Monogalactosyldiacylglycerol synthase
MEECMGACDCIITKAGPGTIAEAMIRGLPIILNDYIAGQQTAAIWKINKRLPGTSGPRKSTMDATDVASVALVGDDLHSLALLDRTISTRASAAATATATVEEAHATVQHRSACLTQARACEDTADGQAGPNSSLANPYGNCRVGFDRLVSRVGLEAGNVPYVVENGCGKFSKSPKQIAKIVADWFGPRLGYEPNPMKFSMDYLDDMDFLGTCRSNSNPGKLKGAGRIWSKSNRLVGSGQSQTCEHSS

SEQ ID NO: 72882 - protein, 320 aa, Zea mays
  Coding DNA Sequence Number=SeqID_31103
  Gene Ontology: Mol. function=ATPase activity, coupled to transmembrane movement of ions, phosphorylative mechanism; Cellular component=integral to membrane; Biological process=phospholipid transport
  Homolog annotation: Hit_ID=P98205; Match level="QueryCoverage=58%, HitCoverage=16%, E-value=6e-72, Identity=72%"; Hit description =Putative phospholipid-transporting ATPase 2
MRGTMHGGGGLGGQRLGEEEVTVWCHGERRWISDIKGALTAGALIEYLHVWEALSDIDMQPNIEDKHIFSFASDGRYSAKAAYKSLFLGSSSFGHYRRVRDLGPHQNVNSSFGWLPKTGVGRLTYWLRETAALDGETDLKTRTIPPISANLSVEQLGKVKGVIECPNPDNDIRRFDANMRLFLPIIDNEKSPLTINNTLLQSCYLRYTEWACGVAVYTGNETKSGISRGAAEPKFTAADVIIDKLTIAIFMFQVVVVLVLGYFGNTWKDTQGLKQWYLMYPMEVEGPWYDFLIIPLRFELLCSIMIPISIKSCLVLASSY

SEQ ID NO: 72883 - protein, 183 aa, Zea mays
  Coding DNA Sequence Number=SeqID_31104
MGARTKKKKSGDDKDEEDKDKSEEEEGTDDDEESFEGEKGNNNGGKDKKKKSKTKKKKTNIKDSLKISVRSKMTKGYKPCDFKIADNWTQNLGNKELRQQLSRKIVDNKDYKSVQFMSPKSDTARRDTDTWNLTGSDIAKSFVDKTLCEDTVVTFYVQCLMYDEGQLGADEKTVFSTDTSDHL

SEQ ID NO: 72884 - protein, 78 aa, Zea mays
  Coding DNA Sequence Number=SeqID_31105
MEEVERGASGRQPGSTELRDCSVAAAEAATVRIADEGGTEEIRADRRGSRVNGRESRAVAWLKCFYNYWCSQRHKYHL

SEQ ID NO: 72885 - protein, 729 aa, Zea mays
  Coding DNA Sequence Number=SeqID_31106
  Gene Ontology: Mol. function=transferase activity; Cellular component= nucleus; Biological process=mRNA editing
  Homolog annotation: Hit_ID=Q2QNV4; Match level="QueryCoverage=89%, HitCoverage=68%, E-value=2e-97, Identity=25%"; Hit description =Pentatricopeptide, putative, expressed
  Pfam annotation: Domain name=PPR; Domain location=244-278; Score=8.5; E_value=0.74; Accession=PF01535.11; Description=PPR repeat
  Pfam annotation: Domain name=PPR; Domain location=341-375; Score =25.7; E_value=0.00017; Accession=PF01535.11; Description=PPR repeat
  Pfam annotation: Domain name=PPR; Domain location=404-438; Score =36.6; E_value=8.7e-08; Accession=PF01535.11; Description=PPR repeat
  Pfam annotation: Domain name=PPR; Domain location=505-539; Score =39.7; E_value=1e-08; Accession=PF01535.11; Description=PPR repeat
  Pfam annotation: Domain name=PPR; Domain location=540-574; Score =24.9; E_value=0.00028; Accession=PF01535.11; Description=PPR repeat
  Pfam annotation: Domain name=PPR; Domain location=73-107; Score=25.5; E_value=0.00019; Accession=PF01535.11; Description=PPR repeat
  Pfam module annotation: Pfam domain module=PPR::PPR::PPR::PPR::PPR::PP R; Domain location=244-278::341-375::404-438::505-539::540-574::73-107
MLRRAAPSLAFWRWRPQDNDAGRKLAAQLLLQPLSHTSLAVPDRIAQQRATQVSFPRGRTRYLFDGTRHRDAISWNAVVSGHARHGNVPDALDTAARMHSSGVPFTEATFASVVGACARGRMFCAGTQAHGQVIKSGCEGFAVTGASLLDFYSSCFDLRATRTLFESLRPKNELLWSPMVVALVRFGLLAEALDLLQNTPAPRDVFAWTAVISGYAKGTDQCCGKALQLFVKLLADDGVMPNEYTYDSVLRACVRLGALDFGRSVHGCLIRCGFRSEQLITSALVDLYCTSDALDDALLVYNDLDRPSSITSNTLIAGLISIGRTEHAKMVFSQMPEQDSGSYNLMIKAYAMEGELEHCRRIFEKMPRRNMVSLNSMMSVLLQNGRLEEGLKLFKQIKDERDTITWNSMISGYIQNDKPSEALKLFVVMCRLSIECSPSTFSALLHACATIGTLEQGRMVHCHLCKTSFDSSDHVGTALADMYFKCGCVIDAQSAFTYVTSPNVASWTSLINGLAQNGHWLEALSQFGRMLKHHVKPNEITFLGLLMASARAGLVNKGMKIFYSMENFGLVPTVQHCTCVVDLLGRTGRTREAEKFIYEMPLPADGVIWGALLTACWYSMDLEMGEKVAQRLFFMGTKHRSAYVAMSNIYAKLGKWEDVVKVRTWLRSLNAEKEPGCSWIEIKGIVHVFLVDDQNHPERETMYSMLEALVSHISLHSKPDDMVIQSLNS

SEQ ID NO: 72886 - protein, 80 aa, Zea mays
  Coding DNA Sequence Number=SeqID_31107
MKLIVVVRSSEVGANVGHLFPIVTWHQKQGNTKLRNENLRPQAFLVCPSLHWTYLQVYLRLLSNGMHGGFAKAKHYKAGV

SEQ ID NO: 72887 - protein, 57 aa, Zea mays
  Coding DNA Sequence Number=SeqID_31108
  Subcellular localization annotation: CTP_CleavageSite=24; ConfidenceScore=5.44e-01
MGISYTSNGALGTPPWPTQPLSSPAKRVKNVGTHVLKVKNVGTVELNGSPRRPTQDL

SEQ ID NO: 72888 - protein, 106 aa, Zea mays
  Coding DNA Sequence Number=SeqID_31109
MKGLMLNKALRMQQEKEEKECSTLQDEVAELRKTLEEKDAKMASLKEKAEKAEKEIDEARKIHNGDVSKLKKQDKLIKELQANLEAENRGNADKDMENQKLLEILK

SEQ ID NO: 72889 - protein, 43 aa, Zea mays
  Coding DNA Sequence Number=SeqID_31110
MTLNSVWVRTENIPSSKFTKLKEHAKSKTQISFIVMLSHPVLE

SEQ ID NO: 72890 - protein, 64 aa, Zea mays
  Coding DNA Sequence Number=SeqID_31111
  Homolog annotation: Hit_ID=Q10QW0; Match level="QueryCoverage=85%, HitCoverage=9%, E-value=1e-07, Identity=73%"; Hit description =Fiddlehead, putative, expressed
MVKARPARKASTVATGEVDRAGGLSRVPIDLTPQLVVAEAAHLGAAHEHDDRDGGQYRNTHFMH

SEQ ID NO: 72891 - protein, 131 aa, Zea mays
  Coding DNA Sequence Number=SeqID_31112
MEGGAAQGMTNSTGTWGRAIEKEARRAQPPGARPGRELGVGARAPREMAEQVEARCRDAPWESGSREMGGSAQWSRRPEARRPWPRNVGQGEDADQQSTEGERAASGNEMRAEDAGSKGTGEGLGRQQDMS

SEQ ID NO: 72892 - protein, 308 aa, Zea mays
  Coding DNA Sequence Number=SeqID_31113
  Gene Ontology: Mol. function=drug transporter activity; Cellular component=membrane; Biological process=multidrug transport
  Homolog annotation: Hit_ID=Q5GAV3; Match level="QueryCoverage=85%, HitCoverage=21%, E-value=3e-26, Identity=35%"; Hit description =Putative integral membrane protein
MVDVTTSSPEQAQNPDQTQTVVRGVWKRRANVRVSGPEWALEGVRHVGDLSGGPRGGECARRRLPHAGCAGFPRVGTGTPIVTRDGADGPRFGHYDDFYHRDSGPWHPGANVRYPVKGRGGILLATESLVVVILTILPGDLLNKQLLLINVWGRHRLTVSKWIAPTPTSSIDMELPQARWSVHGLEFCCSFKVIPVPYYDVILGMDWLEMFSPMIVDWKHKWLSLPHSGSTVVLQGCQPLVPVGTILELWPVMVTEPASAKLRSIEELFLPAPVVQLLRNYVSLFQQPATLSPSRFCDHSIPLLKVPD

SEQ ID NO: 72893 - protein, 137 aa, Zea mays
  Coding DNA Sequence Number=SeqID_31114
MEPVRISSSLPLLISPPYLLLIVSRRVCSACCWSLRGARHHAIAIVVSSEFVDAFAAQPSCLARYLHYATTRLCTPSSELLRCSTSSVFCSVLYRSTIVSLLVVVPSSRQQLRHCLCHARALTYVPPIVVYIVLVAA

SEQ ID NO: 72894 - protein, 72 aa, Zea mays
  Coding DNA Sequence Number=SeqID_31115
MPRNMVNRGLYPSRDMRRGLPFRLWWVQVRSLHDGSRGSLEDMVAGVTWPSILPPGWTVKWDPTSAKEEHEE

SEQ ID NO: 72895 - protein, 73 aa, Zea mays
  Coding DNA Sequence Number=SeqID_31116
MDRGISGQNCAINGGIRVARGGIRCRTKNEEEVIVEEETAPQPEIPPVENNFYFDICGTYPESPTTQGKARCI

SEQ ID NO: 72896 - protein, 95 aa, Zea mays
  Coding DNA Sequence Number=SeqID_31117
MRQSLEASITNPSRLEGYYRVPKLGRRPPRSGCYANRPGETDNGQDKPRAQQEAPPRPTPGLSLGLGLGRRSPPCLTPGLGLDFGLEKSHILARL

SEQ ID NO: 72897 - protein, 153 aa, Zea mays
  Coding DNA Sequence Number=SeqID_31118
MWGASNRTTVAHPFGIIASGGPAWRLGPTCHVTGVPVATCKETAPLLAPMLRLLDCGTCAATQGSPARDPTAPVECGDHGSPSRGDRRDSRYDQRQAGSNCGNRHAEAVVQSPTGTGKEEIMKRILPSEGNGLRALLLIRGSKVAPSGVRQLP

SEQ ID NO: 72898 - protein, 76 aa, Zea mays
  Coding DNA Sequence Number=SeqID_31119
  Homolog annotation: Hit_ID=Q6ZFC1; Match level="QueryCoverage=80%, HitCoverage=24%, E-value=2e-23, Identity=83%"; Hit description =Pentatricopeptide (PPR) repeat-containing protein-like protein
MGCRAGLARPKFQIFADMEELGVRPDEDTTRRIGKAFVASGQEEKEKHVLEKYLKKWKYIHFNGERVRVRRDGPLV

SEQ ID NO: 72899 - protein, 59 aa, Zea mays
  Coding DNA Sequence Number=SeqID_31120
MAAAVVTTTTNSSSSRDSDIGGGGSTIIGSEFLSCCRLKDNKASELLLKGKRIPRFPSL

SEQ ID NO: 72900 - protein, 225 aa, Zea mays
  Coding DNA Sequence Number=SeqID_31121
  Homolog annotation: Hit_ID=Q6ZFC1; Match level="QueryCoverage=94%, HitCoverage=71%, E-value=9e-80, Identity=71%"; Hit description =Pentatricopeptide (PPR) repeat-containing protein-like protein
MALEESYMLHVSKLPNEREAIYGALDKWSAFEPEFPIIAAAKALGMLKRRRQWLRIIQVTKWLMSKGQVLTWTTYDTLLLALLMDKRVDEAESVWNTVIQTHTRSVPKRLFSRMILIYDIHQRPDKVLESCAVQCSRLSSIHVVTVTVTHLVLFMEPNHKRQIFADMEELGVRPDKDTVRRIGKAFVASGQEEKEKHVLEKYLKKWKYIHFNGERVRVRRDGPLA

SEQ ID NO: 72901 - protein, 219 aa, Zea mays
  Coding DNA Sequence Number=SeqID_31122
  Subcellular localization annotation: CTP_CleavageSite=60; ConfidenceScore=5.34e-01
MAAPALARSSAGGPPVARACGPSPGPSLGGDQPPPGGRGHGTAGRPRRRGQRLPGRAGPSGAQPRRTRGCGLWDTGVPDVAPHGGGGPSQASARGRGCAGPGPVVLARRLPAPSTRARVLCSGARPPGPSVAWHRPAHEGGRGCSAQARGPSAAVRGGAGEAPGPGDGIPCAGALSGSPDLGTRTRLQRGQMAPAHSPAAVRPSDPGVATPHRSGSGLA

SEQ ID NO: 72902 - protein, 42 aa, Zea mays
  Coding DNA Sequence Number=SeqID_31123
MAGHHHGGGYREKNGPVRVPNPNRPYNWAAANGPPRQAGSWG

SEQ ID NO: 72903 - protein, 857 aa, Zea mays
  Coding DNA Sequence Number=SeqID_31124
  Gene Ontology: Mol. function=cellulose synthase (UDP-forming) activity; Cellular component=membrane; Biological process=cellulose biosynthetic process
  Homolog annotation: Hit_ID=Q944E0; Match level="QueryCoverage=99%, HitCoverage=100%, E-value=0.0, Identity=72%"; Hit description =Cellulose synthase-like protein OsCslF3
  Pfam annotation: Domain name=Cellulose_synt; Domain location=67-854; Score=958.1; E_value=3.5e-285; Accession=PF03552.5; Description =Cellulose synthase
MASPAPAGDAVYAANGGLTDPLLVSANGHGAAARKAGHGARGRYWVASDKAERRAAKESGGEDGRALLFRKYKVKGALLHPYRLLIIIRLVAVLAFFAWRIRHNKSDIMWFWTMSIVGDVWFGFSWLLNQLPKFNPVKTIPDLAALQRHFGYPDGGASRLPGIDVFVTTADPIDEPILYTMNCVLSILSVDYPVDRLACYLSDDSGALVLYEALAEVGKFAPLWVPFCRKYSIEPRAPESYFEHVAPPQAGRVTQEFLNDYRRVQMEYDEFKARLDNLPDAIRKRSDVYNSVRDAGGAQKATWMANGTQWPGTWIDPAENHRKGHHAPIAKVVLNHPSRGQHPITESNPSIATTDERLPMLVYVSREKNPGYDHNKKAGALNAQLRASALLSNAQLIINFDCDHYINNSQALSSAVCFMLDQRDGDNTAFVQFPQRFDNVDPTDRYGNHNRVFFDGTMLALNGLQGPSYLGTGCMFRRLALYGIDPPHCRAENITAEASRFGNSTIFLDSVSKALKNDRTITPPPIDDTFLAELERVVTCSYDKGTDWGKGVGYIYDIATEDIVTGFRIHGQGWRSMYCTMEHDAFCGVAPINLTERLHQIVRWSGGSLEMFFSHNNPFIGGRRIQPLQRVSYLNMTVYPVTSVFILIYALSPVMWLIPDEVYIQRPFTRYVVYLLVIIVMIHMIGWLEIKWAGVTWLDYWRNEQFFMIGSTSAYPMAVLHMAVNLLTKKGIHFRVTSKQTAADDNDKFADLYDFRWVPMLIPTMAVLICNVGAIGVALGKTVVYIGTWTAAKKMHAALGLLFNIWIMFLLYPFALAIMGRWAKRPIILVVLLPVVFALVALLYVGIHILLAGLIPF

SEQ ID NO: 72904 - protein, 228 aa, Zea mays
  Coding DNA Sequence Number=SeqID_31125
  Subcellular localization annotation: CTP_CleavageSite=46; ConfidenceScore=5.20e-01
MRSPIPFLDVRAGRAAHRREPNPLKRLFLMSCTPPGSPSPSLAFLRSQRYWTLPSSILMSGGTKLFWLNKDCVFRVLQNGLAIDVESHNQIKERKNKANKICGVNKTTGSNCNKVNRAVCKFYSKEVVDTTPGRVGGGFFINSKAEGRLLSCPLSDKGERQYTSVYYHRRMAETEKDIFRSMDESRFMVGGRFKKMTGSTLSIKKVMVKTSGFQEGVEKFVVGATIRS

SEQ ID NO: 72905 - protein, 834 aa, Zea mays
  Coding DNA Sequence Number=SeqID_31126
  Gene Ontology: Mol. function=dopamine beta-monooxygenase activity; Biological process=histidine catabolic process
  Homolog annotation: Hit_ID=Q67UR7; Match level="QueryCoverage=97%, HitCoverage=92%, E-value=0.0, Identity=61%"; Hit description =Dopamine beta-monooxygenase N-terminal domain-containing protein-like
  Pfam annotation: Domain name=Cytochrom_B561; Domain location=595-797; Score=-74.1; E_value=0.022; Accession=PF03188.6; Description =Cytochrome b561
  Pfam annotation: Domain name=DOMON; Domain location=124-264; Score =30.7; E_value=5.2e-06; Accession=PF03351.8; Description=DOMON domain
  Pfam annotation: Domain name=DOMON; Domain location=460-579; Score =50.4; E_value=5.8e-12; Accession=PF03351.8; Description=DOMON domain
  Pfam module annotation: Pfam domain module=Cytochrom_B561::DOMON::DOMO N; Domain location=595-797::124-264::460-579
MLQHQLRGTVRLAAEGKCALELTRFDLLAASPSARFWASDGPTMSDLAAGRAFSPLPLNKTFQNASLELPFARPLPRLLALYDPDTFSDFGHVFLPNGTDPGLDAAAEPAPTMFDNCIPLSEAETYRLRWTLNASAGTVEIGLEAAVGSEYYMAFGWADPKANSPAMIHADVVVAGFTEEGTPFAEDYYISDYTECKLGKEDSPVSGVCPDKVYEGGSNDSILVYGHRQDGVSFVRYARKLDAEDAKYDVPVGATEEMVVLWAIGRLRPPDTMRPHYLPQNHGGPRDTTFGFARLNLSETVDNCLGPLDADNKEDQERIIADRKTPLVVTSAPAVRYPNPPNPDKVLYINKKEAPLLKVERGVPVKFSVQAGHDMALYITSDPIGGNATLRNKTEVIYAGGPDAHGVLATPKELVWLPDRNTPDLVYYQSLYEQKMGWKVQVVDGGLSDMYNNSVVLDDQQVTLFWTLSVDYKSISIAARGEKKSGYLAIGFGSGMVNSFTYVAWVGNDGVGRVKTYWIDGKSATGIHPTSENITFVRCKSENGIITFEFTRPLNPSCTGKVECKNIIDPTTPLKVVWAMGASWSGDDLTDSNMHSVTSSRPIRVLLLRGSAEAEQDLRPVLAVHGFMMFVAWGILLPGGIMAARYLKSLKGDGWFQIHVYLQYSGIAIMFLGVLFAAAELRGFFVSSVHVKFGVLALLLAVLQPLNAKFRPSKPANGEVPSHNRIMWEYLHVITGRSAVIVGIVALFTGMKHLGHRYDSENVEELTWALMLWVLSVIVVVLCLEYKEVKRRIGDRSARGHWVLGNTEEEDSVDLLHPDGAARNSESSATGVME

SEQ ID NO: 72906 - protein, 54 aa, Zea mays
  Coding DNA Sequence Number=SeqID_31127
MGVAGATVSGRGIGEDTRGPLDGTSVDEVRSVDRTVTMAYRFITNEGLIGALDF

SEQ ID NO: 72907 - protein, 72 aa, Zea mays
  Coding DNA Sequence Number=SeqID_31128
MAHRTLNSACPVHHRTIRWPRRQKLQRSESNDLVTWQAHRIVSGANLEDSPDSRNSGMRTAGCFLISSGTLM

SEQ ID NO: 72908 - protein, 127 aa, Zea mays
  Coding DNA Sequence Number=SeqID_31129
MALGDDVVVGDGQDIDNNFEYETKLVERNARIASLEKASLVSASAPVYWVSCSEPYLGKMDSQFKRGTGGLGLGFVVKDVSVACFGMVGPSSLEALSPYGNNAPQTKVKKHGMQPEQKYIYVLNVYT

SEQ ID NO: 72909 - protein, 85 aa, Zea mays
  Coding DNA Sequence Number=SeqID_31130
MVVTLILFILLHIVYLWKGLTCHRHTTSPPTWGPPTIFTSLRFEYDDKVLPSISNKVLKVVVAQFFTKLPRGQVEKERHAPMPAA

SEQ ID NO: 72910 - protein, 96 aa, Zea mays
  Coding DNA Sequence Number=SeqID_31131
MEGERKGHQGSHNRGGNGGERGEKRAAVMGSGKTKGWLGWRQSGSAARAVGRAWWSTGRIGGHMLRRDTRKTGVTVGPTYKRDRQRGWERWKPIGP

SEQ ID NO: 72911 - protein, 306 aa, Zea mays
  Coding DNA Sequence Number=SeqID_31132
  Gene Ontology: Mol. function=RNA-directed DNA polymerase activity; Cellular component=nucleus; Biological process=RNA-dependent DNA replication
  Homolog annotation: Hit_ID=UPI00004C1733; Match level="QueryCoverage =91%, HitCoverage=23%, E-value=3e-69, Identity=45%"; Hit description =UPI00004C1733 related cluster
MGTGSERKAPPRRPANTTRKGQKEDAIGSAQGPRRQARHRSREAQPSSPQGGPGVFDKMLKELCPYHKGPIKHSLSECDMLRRFYNKPGLSVEGGNKKAPDGGDDDKGGGFSDVRNCYMIFRGDTVNLSSRQRKQERREVFSVEVATPVYLDWSDRAITFDRDDHSDHIPNPGRYPLVVDPIIGNTHLTNVLMDGGSSLNIIYAHTLDLLGGSKVRTMLCSGVHVTPIGRMYYHAYECDVDCVEYAEAQANYEALIADLENLAGEVPNTKKHAGNFEPTEDTKTIPLDPSDSGEKTLWIGSQLEPK

SEQ ID NO: 72912 - protein, 222 aa, Zea mays
  Coding DNA Sequence Number=SeqID_31133
  Gene Ontology: Mol. function=ATPase activity, coupled to transmembrane movement of ions, phosphorylative mechanism; Cellular component=integral to membrane; Biological process=phospholipid transport
  Homolog annotation: Hit_ID=P98205; Match level="QueryCoverage=66%, HitCoverage=13%, E-value=2e-54, Identity=71%"; Hit description =Putative phospholipid-transporting ATPase 2
NANVPDSNVLTDEVKIDLNMLCVLVLDRVDGEPNIEDKHIFSFASDGRYSAKAAYKSLFLGSSSFGHYRRTAALDGETDLKTRTIPPISANLSVEQLGKVKGVIECPNPDNDIRRFDANMRLFLPIIDNEKSPLTINNTLLQSCYLRYTEWACGVAVYTGNETKSGISRGAAEPKFTAADVIIDKLTIAIFMFQVVVVLVLGYFGNTWKDTQGLKMVAFIRN

SEQ ID NO: 72913 - protein, 185 aa, Zea mays
  Coding DNA Sequence Number=SeqID_31134
  Gene Ontology: Mol. function=RNA-directed DNA polymerase activity; Cellular component=mitochondrion; Biological process=RNA-dependent DNA replication
  Homolog annotation: Hit_ID=UPI00004C1731; Match level="QueryCoverage =65%, HitCoverage=9%, E-value=4e-54, Identity=79%"; Hit description =UPI00004C1731 related cluster
  Pfam annotation: Domain name=rve; Domain location=48-185; Score=39.2; E_value=1.4e-08; Accession=PF00665.16; Description=Integrase core domain
MGSCLIETGRPRTYNISTEESYPSTEPKLGNWHGAPSHSSYWVTKRSSTTTAPQASSNDAYPSPKKVPGGFTHLLVAIDKFSKWIEAVAFFTQHHPSLFGSPNSIITDNGTQFTGRKFLDFCEDHHIRVDWATVAHPVTNGQVERANSMILQGLKPRIYNDLNKFSNRWMKELPSVVWSLRTTPS

SEQ ID NO: 72914 - protein, 62 aa, Zea mays
  Coding DNA Sequence Number=SeqID_31135
MVENPSYRGLDQHMVEITGKEVLVSILAQVKDKETGRKREDEQSNLRALTHQVKEITRSLIS

SEQ ID NO: 72915 - protein, 127 aa, Zea mays
  Coding DNA Sequence Number=SeqID_31136
MERTSVVSPHRTPSGNIQQQRAQYEGTGEAMLYRGGRSPRRGLVGEPFCRDRGWLIVCEDRREKQLGGRDFVAPKAQRPVRRSGRIPTTQPSPSHARKKIPVRAAHSQREKRSGYVEREKLGSGSRP

SEQ ID NO: 72916 - protein, 91 aa, Zea mays
  Coding DNA Sequence Number=SeqID_31137
MAAKGTGTGGVGGGGLGRWRRRRRWLSRRRQREDGHGNETARESYGEVYRADWNGTVDTILDKENFTLEELLDEDEIIQECKALNSILINL

SEQ ID NO: 72917 - protein, 129 aa, Zea mays
  Coding DNA Sequence Number=SeqID_31138
MAFLGRCSLVDYQALLHRCNGLDFDKLECGGGLLRQALLLAYKSGFQVWDVEHVDDFYTKTVSTTCTETFSAKRVQYSRRQLGSILCYVTDPGFTLKLVTVYVVLVHVLRFDLTEPETHASGACGGLPG

SEQ ID NO: 72918 - protein, 62 aa, Zea mays
  Coding DNA Sequence Number=SeqID_31139
MASPTGAHFGCDYKSVNYVGYLDVNVMLEFLGVIVILDVNAGMGRAGATSYGYSFSNRRSYR

SEQ ID NO: 72919 - protein, 78 aa, Zea mays
  Coding DNA Sequence Number=SeqID_31140
  Gene Ontology: Mol. function=structural molecule activity; Biological process=response to gibberellin stimulus
  Homolog annotation: Hit_ID=Q6YZ10; Match level="QueryCoverage=98%, HitCoverage=33%, E-value=2e-13, Identity=53%"; Hit description=27k vesicle-associated membrane protein-associated protein-like
MKASMVATESEFDEQKDQVAVEQILRVVFLDAERPSPQMDKLKRQLAEAEAALEARKKPPEDNGTRIVGEGLVIDEWR

SEQ ID NO: 72920 - protein, 141 aa, Zea mays
  Coding DNA Sequence Number=SeqID_31141
MAVEGEAWGRRLRPRRGDGGDGGVGGAAVVVKGRYGGVWAVGGLRRGARARQVGTATARAGRGHCEGRARPRSQALGKDGFAECQLTCTRQSSVLGSLPSAKGMALDKEDSLPSVHRLTLDKEDSLSSVIFEHSTKYIFIF

SEQ ID NO: 72921 - protein, 52 aa, Zea mays
  Coding DNA Sequence Number=SeqID_31142
MTKGGFTVALQIRRAIGYPHLRQAPVDHPQPRNLSTVVSSPGFMGGGSFGSL

SEQ ID NO: 72922 - protein, 121 aa, Zea mays
  Coding DNA Sequence Number=SeqID_31143
MTELSPEIVIPRPETFPHCPTSATRTGGHGESREANLTEFGGVEFPAHGEARPWQTPLLRRAIRYESPAACVGRVHTNPPADVAQHPAYSIGSQRRRGDEDDGGGQLSPLGDDRHWRNLTR

SEQ ID NO: 72923 - protein, 71 aa, Zea mays
  Coding DNA Sequence Number=SeqID_31144
MPRHQLCRYRAQGTSPTATLLPLQGSRHFSDGHVTTSTGLKLVPRRPRYYLYRAQGTSLQATLALSYTPIV

SEQ ID NO: 72924 - protein, 98 aa, Zea mays
  Coding DNA Sequence Number=SeqID_31145
MANPEKQISPSLEVWNSLPTERRDCGRRPCSGEQFVTSRLPLALGESTQTLQRTCRSTRPTRLGPNGVVGMKTTVAVGFLHSVMTPLAKSHTIGGVGG

SEQ ID NO: 72925 - protein, 230 aa, Zea mays
  Coding DNA Sequence Number=SeqID_31146
  Homolog annotation: Hit_ID=Q84ST1; Match level="QueryCoverage=72%, HitCoverage=29%, E-value=2e-19, Identity=32%"; Hit description =Expressed protein
  Subcellular localization annotation: CTP_CleavageSite=22; ConfidenceScore=5.27e-01
MPLSHRNLLLFIPSVIVLVVTSAAALSVSTPVELTGRPSRIRDPSRFFHALRLRANATRPHGLELCFHRNATVGPCKCAASQWQKMPKSGLWMQVISPYDYRILDFRMPADPSSSSLFPSVSCSSCLQEFLLHRVVFFVVGLVLMVVAHTLSESVVFYYGGAMTIGIFLVILIILFQGMKLLPTGRKSSLAIFAYSSVVGMTTYFLHYLSGMLRSVLVEIGIAEDMHNPV

SEQ ID NO: 72926 - protein, 72 aa, Zea mays
  Coding DNA Sequence Number=SeqID_31147
MTFRLGFGHIANPGEMEEKREATKKSQKDLKNIGSKEPKFCWSGPHRINPVVHRIGFVRGLHLGTRLAVAPG

SEQ ID NO: 72927 - protein, 100 aa, Zea mays
  Coding DNA Sequence Number=SeqID_31148
MAEPTIGWSHRTVRCAPDSVRCANGTKDPTVGFARKGRRSCIGQELFMSGALLNRRQELIGTGCLIFRQVKDHLFTPLWVLSIGIRAVLFIKGTYRPKRW

SEQ ID NO: 72928 - protein, 142 aa, Zea mays
  Coding DNA Sequence Number=SeqID_31149
MRMVMIMLMVMVGVNKCNLGRGDPCAGADTEQEELVSSEVEQKAKHDDQHHQALEIDDMHGEGGCSYQSARGRRPALVALGLGDDGARCLGSGTTALDLGLGDGSARPRAWGRRRSASGTAALGLGLGEPGGATVSAWSGVS

SEQ ID NO: 72929 - protein, 108 aa, Zea mays
  Coding DNA Sequence Number=SeqID_31150
VTDGGVGVASGIEAEGTGEDVAPTSEEPGRLGAGTSEEGVGTGEEDVDDELDGETAPSSDAVPRTTRESPGVGDDHKRSNWQSLSFFSSSMSDANASASCQWCLFGVS

SEQ ID NO: 72930 - protein, 37 aa, Zea mays
  Coding DNA Sequence Number=SeqID_31151
MKGYGQILATQLEFHGPDYIKLCRSDEQYPRIVHAGL

SEQ ID NO: 72931 - protein, 131 aa, Zea mays
  Coding DNA Sequence Number=SeqID_31152
  Gene Ontology: Mol. function=protein serine/threonine kinase activity; Cellular component=intracellular; Biological process =protein amino acid phosphorylation
  Homolog annotation: Hit_ID=Q40734; Match level="QueryCoverage=58%, HitCoverage=25%, E-value=4e-35, Identity=90%"; Hit description =Protein cdc2 kinase
  Pfam annotation: Domain name=PWI; Domain location=1-54; Score=17.0; E_ value=0.00017; Accession=PF01480.8; Description=PWI domain
  Pfam annotation: Domain name=Pkinase; Domain location=2-131; Score= -99.8; E_value=0.013; Accession=PF00069.15; Description=Protein kinase domain
  Pfam module annotation: Pfam domain module=PWI::Pkinase; Domain location=1-54::2-131
MDSKLVSKMVAYGNEEADGKKIQIQLTGFMEKNTVKFMKELWSLLLSAQQNASGLCKGVGFVHGRGVLHRDLKPHNLLMDRKTMALKIADLGLSRAITVPVKKYTHEILTLWYRAPEVLLGATHYSMPVDI

SEQ ID NO: 72932 - protein, 264 aa, Zea mays
  Coding DNA Sequence Number=SeqID_31153
  Homolog annotation: Hit_ID=Q1S1U2; Match level="QueryCoverage=48%, HitCoverage=21%, E-value=6e-29, Identity=52%"; Hit description =Membrane attack complex component/perforin/complement C9
  Subcellular localization annotation: CTP_CleavageSite=22; ConfidenceScore=5.23e-01
MEGCATKSRGWKVHLLLLSPNRASVAPSNLRGRSLFSRSPSWEGPRSLLAITAPAPSISHIPSRHSLGASIAIHGRQTIPSSRFMKVLFLRLGFSGVADLKIRRSEWGGALVAPRRSGSLSARISAALSGGLVLAPPAVEEKVEVNSAIFPKGPPVPLPVQKMATHIDTTEVSRGPDDLPGYWVVTGAKLCMEGGKVALKVKYSLLIAVQEDPEGHYALRPPLPSSTPQLCLSVVLPRCKVQLWATTLYRIQCAQRLMFFGLFT

SEQ ID NO: 72933 - protein, 103 aa, Zea mays
  Coding DNA Sequence Number=SeqID_31154
MADGVTPVMRLHEWRTNGRMAWSQSLGCCTDELHGGELGMARAGLDGGRGNGESARERELGEEKSSCRGEQGLVGFYRERVGEEGSAREENGGRRDGIHGERT

SEQ ID NO: 72934 - protein, 75 aa, Zea mays
  Coding DNA Sequence Number=SeqID_31155
  Subcellular localization annotation: CTP_CleavageSite=42; ConfidenceScore=5.23e-01
MACRALALRFLLLPDPLHRLPATPPSVGRASGSRGGRRPHLRCSSGGGGGEPGQPPQEAVLEAISIGLGVGGYFG

SEQ ID NO: 72935 - protein, 130 aa, Zea mays
  Coding DNA Sequence Number=SeqID_31156
MPEPAGYAPLGAAERQRRRALFLQSYRFSSVDDDGVRQRRRQWLGLAGGRLARMLREAGGAVVRAAGRARWCVGAGLARAWRGWRPRADPLLGCFGSATHHKIHLYRIDDASSSTLSVRYVSAPFVKCIC

SEQ ID NO: 72936 - protein, 490 aa, Zea mays
  Coding DNA Sequence Number=SeqID_31157
  Gene Ontology: Mol. function=protein dimerization activity; Cellular component=membrane; Biological process=regulation of transcription, DNA-dependent
  Homolog annotation: Hit_ID=Q0GPE9; Match level="QueryCoverage=70%, HitCoverage=73%, E-value=5e-50, Identity=39%"; Hit description=BZIP transcription factor bZIP28
  Pfam annotation: Domain name=bZIP_1; Domain location=333-397; Score =35.7; E_value=1.6e-07; Accession=PF00170.11; Description=bZIP transcription factor
  Pfam annotation: Domain name=bZIP_2; Domain location=333-387; Score =28.3; E_value=2.7e-05; Accession=PF07716.5; Description=Basic region leucine zipper
  Pfam module annotation: Pfam domain module=bZIP_1::bZIP_2; Domain location=333-397::333-387
  Subcellular localization annotation: CTP_CleavageSite=79; ConfidenceScore=5.17e-01
MDEDRSADPARSGRLLSPTSGQPQTQTQSQPPLPMDLASQYQRLFAPSVFLPPMAPPPPRLASSSCFSAFSNYQSLPTLAPAVGAGSHLARSVPKPPLFSVDSLAPLPYSTSPAARAAAGAGAAVPRSPPSPGSSELQGPSASGLPPRGAGHRRSRSDFLVGFSGANQLHLPMTPAAGAYRPRDASALEELFRSYRDPNLGSSGDNNNERNDHLSRQLTGQRAWSPGDNSDNEAESWAVSGSADTSASHPRHCRSLSVDSIMANLNFGGLDQVSLRVPPLSPVADASVSLSRTGTGASGGAAAAASSELTNGEFSEAEMKKIMANDRLAEIALSDPKRVKRILANRISAAKSKERKVKYMGELERKVRVLQTETNTLSSKAALSQRECEALRTLNNEMKIRLQAMEQQAQLKDALNEALTAEVQRLKQMAGEASDLHVPNGSHHHMNRQILEQQLQQVQKQPSEAQQAQQQQQQPQEPEQFKAQQKQWNH

SEQ ID NO: 72937 - protein, 143 aa, Zea mays
  Coding DNA Sequence Number=SeqID_31158
MPLMRTQQQFGALNVSTMTPSLHHCKTLSPQVHPFMAIKPILPKKGIKVPAALHLEVPLACGLMMLNPELNMDVAVCRTRIARVCIRERSSVGMKPPLGEDMDQMSGRGTWAGSVWGRHASPIGGASGGGIGRCRSRAQVLLI

SEQ ID NO: 72938 - protein, 137 aa, Zea mays
  Coding DNA Sequence Number=SeqID_31159
MEKFTITILHERGWFGDLENESRYNQTRHKGFRHSVLTELTCAEAVLASSREKRYHLVTLEMWTAQVSSESAFTGHRPPGPPHTSNGLRRAVSAAHVEVAEEDRGPEGASVATSRRDADAAGLREVGVGVNPNPASR

SEQ ID NO: 72939 - protein, 137 aa, Zea mays
  Coding DNA Sequence Number=SeqID_31160
MTKTKVMKDIPSLLQYMLMKGETYEIRCGHCEEDHILATLTKIWEHHHHPSQLGGFEPNDLALLIRKIVTFKMSRKMCEEEPTSSKPYAFTCDEHKKMKDKKKVASSSYSSEEEEYEKEDDNNDDDQPLHHPSRTKR

SEQ ID NO: 72940 - protein, 226 aa, Zea mays
  Coding DNA Sequence Number=SeqID_31161
MKIWLLLEDVMEDIAEVITADELRVVTWSLRVGHEISSCRWLSIKRGSPDPNSSSRFRHPQPWNQTKTACVPCIRKQQTVNPQSKALSSPRLPKFQFPHFAPPKQRDANLILCNVFHPFESSAEICGTIPPPRHMEVVYRSTTSGTSRGSTAAVDTRLLLVLLATRDGREYDVITAQLLSTAPSLAFLLPLVLSHLIPSLQHASPRLTQTCFDKSRAAMLPFRTTT

SEQ ID NO: 72941 - protein, 195 aa, Zea mays
  Coding DNA Sequence Number=SeqID_31162
  Gene Ontology: Mol. function=actin binding; Cellular component =cytoskeleton; Biological process=cytoskeleton organization and biogenesis
  Homolog annotation: Hit_ID=Q6Z3N3; Match level="QueryCoverage=82%, HitCoverage=17%, E-value=3e-77, Identity=85%"; Hit description =Putative villin
  Pfam annotation: Domain name=Gelsolin; Domain location=20-100; Score =31.0; E_value=4.2e-06; Accession=PF00626.12; Description=Gelsolin repeat
MVQELESDPHLFSCILSKGNLKVKEMHHFTQDDLMTEDVFVLDCHTSIFVWVGQQVDVKLRLQALDVGEKFIVLDFLMENLARETPIFTIMEGSEPLFFTRFFTWDLAKSLMHGNSYQRKLAIVKGGGAPALDKPKRRTSIYSGRSTAQDKSQRPRSMSFSPERVRVRGRSPAFTALAATFEKFKQQKSFDSTCS

SEQ ID NO: 72942 - protein, 855 aa, Zea mays
  Coding DNA Sequence Number=SeqID_31163
  Gene Ontology: Mol. function=two-component response regulator activity; Cellular component=membrane; Biological process=two -component signal transduction system (phosphorelay)
  Homolog annotation: Hit_ID=Q9FXT2; Match level="QueryCoverage=98%, HitCoverage=95%, E-value=1e-122, Identity=42%"; Hit description =Ethylene receptor homologue
  Pfam annotation: Domain name=GAF; Domain location=168-349; Score =28.1; E_value=3e-05; Accession=PF01590.16; Description=GAF domain
MAARCSGGCDGREDSAVEALVQWQKVSDFLIGASYMSIPLELLHFATCADLAPLRWVLLQFGAFIVLCGLVHLVAIFTYARPDSRRLLLAITAAKALAAVAASVAAVSFSTFVPAAAPLQDPRGAAPGQGAPAGPRRRPRQAPRGDRHAHRPRHHEARLLRLHGGASLAPDVLRTAVFHLSDALGLHSCAVWMPAAAAAASDGGPSLLHLVHRLPEDDHQDPTTRLAICSTDPDVAAVMASKNAKVLRPGSALRRTTSTSGHGHAGAAAIRMPMLRVSNFVDASSSLSDGQGAGVSYAIMVLVLPAPAPTTKNHRTRGPRGEGGGGAREWSRQELEIVEVAADQLAVALSHAAVLKEWQLTRHKLAERQRVLVHARHDAAVATRARDASQSAMRDGVLRPMHSVAGLLSLMQAQQHEDEAFRCTEQRVAVGAMARISALSTTLTDDVMAALLTPTAAGVSLARRPFDPRALVKDAAGVAGCLARCRGLGFSHRAEMSSLPAGCWVVGDDRRVFHLLLHMVGVLLDQCECHCHDLCFAVDTVPVGDQETMSGSGLPDWITPNFSGCNTVCVRFRFGITRHFRNGLLLSSSPRPQERITRRTSVSISSASSKTRLSIATCNKIVQMMNGKMWWESTPASGGQHEEHMSLILHFQLVYGVASPSASSPAGGGGFYHIGGRFGVPSPSTSAPPQHNFNGLRVLLLNTDDTSREVTRKLLERLGCQVLPVPSAARCLSLLLGSATATGGGDQPSFQSPYLVLQAVLVDLHTPAAAIADAATAMDDGFEVALRIREVTGDRFSWLLILVALPLPPRASRIDVRDVCKRTGVNGVIYKPISPSRCQRWQLSFTGFSKTTTDR

SEQ ID NO: 72943 - protein, 97 aa, Zea mays
  Coding DNA Sequence Number=SeqID_31164
MTRTEEKNALALVGTVAQAMDNWRWVRDIVSHLSLVGQQQYLKLWDVIGEVTLSQEGGQASLDAHGFWAVLLRSCIMPSWGSSPLSLEKIVEDSGSP

SEQ ID NO: 72944 - protein, 157 aa, Zea mays
  Coding DNA Sequence Number=SeqID_31165
  Gene Ontology: Mol. function=protein serine/threonine kinase activity; Biological process=protein amino acid phosphorylation
  Homolog annotation: Hit_ID=Q6YVV8; Match level="QueryCoverage=74%, HitCoverage=16%, E-value=1e-33, Identity=58%"; Hit description =Putative serine/threonine-specific protein kinase
  Pfam annotation: Domain name=DUF26; Domain location=57-111; Score =62.1; E_value=1.8e-15; Accession=PF01657.8; Description=Domain of unknown function DUF26
MSYNINNNANVTSDPARFERLLAALVNATAEHAASNSTRRFATGEADADFDRQFPKVYALAQCTPDQTPAQCRKCLAGLISQSLDGFQNNIGGRVLWVNCTWRYETSPFFNGPAMVRLASSSSPPAAAAAGGGFHPIRSFESKFNIIIGITETLTLH

SEQ ID NO: 72945 - protein, 127 aa, Zea mays
  Coding DNA Sequence Number=SeqID_31166
MACQSSTPRSSNDHIELPGAKCNWNMGGAEEPSIFSGRDPCTEVTHPDHTADTVQRRRQGKGVAASFLPRRKWRANNSARCSRALVRWARRSWTLGYIVRSPMCSGVDLRPGLPRLQPRSRPRNSSE

SEQ ID NO: 72946 - protein, 74 aa, Zea mays
  Coding DNA Sequence Number=SeqID_31167
MAKEGGMFLKTKLDGGSIMVVMGSTSEKMYLYQHTLESLFLSRVRKQETFVVSVPRWFQKKKSKSKAAGGRVPP

SEQ ID NO: 72947 - protein, 92 aa, Zea mays
  Coding DNA Sequence Number=SeqID_31168
MLSKSSEGYSTGGEGYDPTRECLHVDLEIPDEGDHLGMPRIGDQPPLCVQEAVEPGGAQTLLGATWLTSSNSESYTTSSGRNNSSSSSYDKR

SEQ ID NO: 72948 - protein, 104 aa, Zea mays
  Coding DNA Sequence Number=SeqID_31169
MACTPRVGSRREPHLKSHHYRARVKKNTARLDCGCSGVGLAISWLGAPWGPQGGTHDLLGQDEPPRQLEFLTVPVTQPRSAPLHGQYAGAPIRGEVFTLVFART

SEQ ID NO: 72949 - protein, 48 aa, Zea mays
  Coding DNA Sequence Number=SeqID_31170
MWHYYGWQGTNGCYKGTKERKTQGETVVNYGLQRPIHEGLADAPVKTE

SEQ ID NO: 72950 - protein, 138 aa, Zea mays
  Coding DNA Sequence Number=SeqID_31171
MRPRHDTDEAACQGPRRWSRRAPGRTAWGRGPPSGERVQVGGRRAKGGQGRRAREGRDHQGCRGGMRGRGLTTSMTNGGNHNSSGILARAGREWERRKREKGSGGFFSPRSWVRAGEGWGSWEVARGRAPGCFSSSFL

SEQ ID NO: 72951 - protein, 111 aa, Zea mays
  Coding DNA Sequence Number=SeqID_31172
MSWPSVTMFPARLTIHPTQPAARLFPSHILTQVENHVLLMGLAEEDTCLYIDSHRDALDNIEVSHAQWHDKELRSMIAWATIIHPEHARGGEQALRVVFRVSAFTDRLCVV

SEQ ID NO: 72952 - protein, 125 aa, Zea mays
  Coding DNA Sequence Number=SeqID_31173
  Gene Ontology: Mol. function=transferase activity, transferring glycosyl groups; Cellular component=chloroplast; Biological process =starch biosynthetic process
  Homolog annotation: Hit_ID=Q8VYU1; Match level="QueryCoverage=46%, HitCoverage=9%, E-value=1e-20, Identity=89%"; Hit description =Granule binding starch synthase II
VTEARSLNKERLQAEVGLPVDSSIPVIVFVGRLEEQKGSDILIVAIPEFVGENVQIIVLIPICSSIGGLVDTVEEGVTGFHMGSCNVEFMFYATICPSKNSCPMGRTLVRDVAIPGWGFLIYPVS

SEQ ID NO: 72953 - protein, 99 aa, Zea mays
  Coding DNA Sequence Number=SeqID_31174
MDLLDAIVDNTPQFITLNQRTKSNRGHFRYKIPKCEIHLVFRSEKNISALGEECPYSVMPQYSIKRTKAKLDLSFDEYSCVYGVCQKSLSNYIGLNAST

SEQ ID NO: 72954 - protein, 119 aa, Zea mays
  Coding DNA Sequence Number=SeqID_31175
  Subcellular localization annotation: CTP_CleavageSite=26; ConfidenceScore=5.00e-01
MVQAAKEDSGEQFPVTPLLPVHANTCASSHMSRRRSMVIPQGPGDGEPRVQLWRHVPLSASASTLSMEMVAYEPSCGGELDGGYVGGGGHGEYPMHMDRRITMEGRYRERGSAQMPPFG

SEQ ID NO: 72955 - protein, 391 aa, Zea mays
  Coding DNA Sequence Number=SeqID_31176
  Homolog annotation: Hit_ID=Q6QP51; Match level="QueryCoverage=37%, HitCoverage=90%, E-value=2e-13, Identity=48%"; Hit description =Putative growth-regulating factor 1
  Pfam annotation: Domain name=AT_hook; Domain location=178-190; Score =3.4; E_value=6.1; Accession=PF02178.9; Description=AT hook motif
  Pfam annotation: Domain name=AT_hook; Domain location=256-268; Score =8.2; E_value=0.88; Accession=PF02178.9; Description=AT hook motif
  Pfam annotation: Domain name=AT_hook; Domain location=275-287; Score =8.2; E_value=0.88; Accession=PF02178.9; Description=AT hook motif
  Pfam annotation: Domain name=AT_hook; Domain location=294-306; Score =5.7; E_value=2.4; Accession=PF02178.9; Description=AT hook motif
  Pfam module annotation: Pfam domain module=AT_hook::AT_hook::AT _hook::AT_hook; Domain location=178-190::256-268::275-287::294-306
MTASKKVCHVIRFHILFHFLLSSLATGTRKGDTPKGILLHEGSGPRAPLLIRGSKAGPSEGFNSRLRALGLRAHYWSEVRRLAPRKGSMADSGHSGSAPTTDQGFVGWPPKGLTVASDAERGMTLGAIRNSASPDPRARTRARLRKTTNSASPDPRAQTRTRPRLWKTTNSASPDPRARTRARPQKTTNSASPDPRAQTRARLWKTTNSASPNPRARTRARLQKTTNSASPDPRAWTRTRPRLWKTTNSASPDLRARTRARPRKTTNSASPDPRARTRARPRKTTNSASPDPRARTRPRPRKTTNSASPDRRARTQPWPRTTVSASPDPRLGLDLDLRRQTRPRPRRSLHLARPRARTDHITRGAIITLPLASSGYGEQDRHPIWLAPVNK

SEQ ID NO: 72956 - protein, 679 aa, Zea mays
  Coding DNA Sequence Number=SeqID_31177
  Gene Ontology: Mol. function=RNA-directed DNA polymerase activity; Cellular component=intracellular; Biological process=RNA-dependent DNA replication
  Homolog annotation: Hit_ID=UPI00004C1731; Match level="QueryCoverage =99%, HitCoverage=49%, E-value=0.0, Identity=79%"; Hit description =UPI00004C1731 related cluster
  Pfam annotation: Domain name=RnaseH; Domain location=334-461; Score= -3.1; E_value=0.00011; Accession=PF00075.14; Description=RNase H
  Pfam annotation: Domain name=rve; Domain location=463-645; Score =86.5; E_value=8.4e-23; Accession=PF00665.16; Description=Integrase core domain
  Pfam module annotation: Pfam domain module=RnaseH::rve; Domain location=334-461::463-645
MKESDQLTTSFITTFGMYCYVTMPFGLRNAGATYQRCMNHVFGEHIGRTVEAYVDDIVVKTRKASDLLPDLETTFRCLKAKGVKLNPEKCVFGVPRGMLLGFIVSERGIEANPEKITAITNMGPIKDLKGVQRVMGCLATLSRFISRLGERGLPLYRLLRKTECFTWTSEAEEALGNLKALLTNAPILVPPAAGEALLIYDAATTQVVSAAIVVERREEGHALPVQRPVYFISEVLSETKIRYPQIQKLLYAVILTRRKLRHYFESHLVTVVSSFALGEIIQCREASGRIAKWAVEIMGETISFAPRKAIKSQVLADFVAEWVDTQLPTASIQPELWIMFFDGSLMKTEAGAGLLFISPLRKHLRYVLRLHFPASNNVAEYEALVNGLRIAIELGVRRLDARGDSQLVIDQVMKNSHCRDPKMEAYCDEVWCLEDKFYGLELNHIARRYNETTDELAKIASGRTTVPPDVFSRDLHQPLVKTDDTPEPERASAQPEAPSAQPEKAPGGYTHLLVAIDKFSKWIEVRPLNNIRSEQAVAFFTNIIHRFGVPNSIITDNGTQFTDRKFLDFCEDHHIWVDWAAMAHPMTNGQVERANDMILQGLKPRIYNDLNKFGKLWMKELPLVVWSLRTTPSRAMGFTPFFLVYGAEAILPTDLEYGSLRARAYDDRSNQTDREDSLD

SEQ ID NO: 72957 - protein, 131 aa, Zea mays
  Coding DNA Sequence Number=SeqID_31178
  Gene Ontology: Mol. function=oxidoreductase activity
  Homolog annotation: Hit_ID=Q2R0H4; Match level="QueryCoverage=97%, HitCoverage=53%, E-value=3e-44, Identity=51%"; Hit description =Oxidoreductase, aldo/keto reductase family protein, expressed
MLGEQVAGPSWQMTWIRGGPSSLDSQNIAAAIDDRYVPMFGEKEYDPNCQYMYVPMRHHMNLYNLLCQNFDSRLAECCHHERISLLAYSPMAMGILSGKYHLSDNCGPLDARMNLFKGRYSKGESRYKLHL

SEQ ID NO: 72958 - protein, 112 aa, Zea mays
  Coding DNA Sequence Number=SeqID_31179
  Subcellular localization annotation: CTP_CleavageSite=58; ConfidenceScore=5.41e-01
MVPWIAYEQATKWSKPDPSFKKHARLLRNGPSPIHLRGSGSSARPSVGSSGGLAGCPTAEARAAGHSRHVPPRLYRDAPARLQAWADEEAYTDAEAGLPPRRSPTFYSSVFT

SEQ ID NO: 72959 - protein, 323 aa, Zea mays
  Coding DNA Sequence Number=SeqID_31180
  Gene Ontology: Mol. function=nucleic acid binding; Cellular component= nucleus
  Homolog annotation: Hit_ID=Q2QTY4; Match level="QueryCoverage=87%, HitCoverage=78%, E-value=1e-136, Identity=53%"; Hit description=Zinc finger C-x8-C-x5-C-x3-H type family protein, expressed
  Pfam annotation: Domain name=zf-CCCH; Domain location=227-253; Score =28.5; E_value=2.3e-05; Accession=PF00642.15; Description=Zinc finger C-x8-C-x5-C-x3-H type (and similar)
  Pfam annotation: Domain name=zf-CCCH; Domain location=273-299; Score =32.9; E_value=1.1e-06; Accession=PF00642.15; Description=Zinc finger C-x8-C-x5-C-x3-H type (and similar)
  Pfam annotation: Domain name=zf-CCCH; Domain location=32-58; Score =13.6; E_value=0.021; Accession=PF00642.15; Description=Zinc finger C- x8-C-x5-C-x3-H type (and similar)
  Pfam annotation: Domain name=zf-CCCH; Domain location=80-106; Score =42.3; E_value=1.6e-09; Accession=PF00642.15; Description=Zinc finger C-x8-C-x5-C-x3-H type (and similar)
  Pfam module annotation: Pfam domain module=zf-CCCH::zf-CCCH::zf -CCCH::zf-CCCH; Domain location=227-253::273-299::32-58::80-106
MGRPGGALARVARPLTPRPGPTKLGAPSLAEARSPPVEYYSTPGGCKFGKTCKYLHREGNGGKTEVEKAELNFLGLPLRPGEKECPYYMRTGSCKFATNCKFHHPDPTNASSKEPGLEHENGDVPLQNVQGSSQPSLQMWPDQRALNEQHVPFLAPAPSYSGGMVPPQGMYPSSDWSGYHQVPLNPYYPPGVPFPHFPAAHMNHPMYKAADIPGHQPPPSDEYPERPGQPECQHFVKSGFCKYRMKCRYHHPRSRQSAPPPAGLSPIGLPIKPDQPVCTYYGRYGFCKYGPACMFNHPFNFGPPVPAAGPPLPGQYPTHGNFA

SEQ ID NO: 72960 - protein, 213 aa, Zea mays
  Coding DNA Sequence Number=SeqID_31181
  Gene Ontology: Mol. function=nucleic acid binding; Cellular component= nucleus
  Homolog annotation: Hit_ID=Q2QTY4; Match level="QueryCoverage=58%, HitCoverage=25%, E-value=1e-26, Identity=51%"; Hit description=Zinc finger C-x8-C-x5-C-x3-H type family protein, expressed
  Pfam annotation: Domain name=zf-CCCH; Domain location=107-133; Score =38.6; E_value=2.1e-08; Accession=PF00642.15; Description=Zinc finger C-x8-C-x5-C-x3-H type (and similar)
MADADAKSQPPDAAASPDASISSPSSLGGGGGDAADADAIEKQLAGLGIAVAGGFPEPSGWDDGPVPVPIPADVLVGGDEGAGEKPRAPAPAPTGAVDVKVRFPRRPGEPDCSYYLKFGTCRFGMKCKFNHPARKKKTSRVRGVGSNGSGSNSSSNKASSPDDDQVFLQLLAAICAKSLAKKTLYVFFACHNYIVANYGDNPNTLQVRKVYIV

SEQ ID NO: 72961 - protein, 254 aa, Zea mays
  Coding DNA Sequence Number=SeqID_31182
  Homolog annotation: Hit_ID=Q8SA97; Match level="QueryCoverage=52%, HitCoverage=21%, E-value=7e-08, Identity=36%"; Hit description =Ornithine carbamoyltransferase
MALPVDVAGLCPRQGDVGAPPKPRLSLSSVAEAESEPWGRARRRSFGRGQGGVRALGSGEAEFRRFPGLSPSPSLGVGRGGGRSAEARADSEPWGRARRSFVVFRVLARVRALGSGGAEFAVFRVLARVRALGSGGAEFVVFRVLARVRALGSGGAEFAVFRVLARVRALGSGGAEFAVFRFLARVRALGSGGAEFAVAPLARPDCLSDSLCRVAPQSEWRRRRCPSVRLLYADGGYQLRIRRLEGTPNYGPRQ

SEQ ID NO: 72962 - protein, 73 aa, Zea mays
  Coding DNA Sequence Number=SeqID_31183
MARRPPLALARERLDFGSFIRGVPVNTVKICAPLIAMNYAILDGVKNHNRDGGVQHWPQQHAKIILCVRLQQK

SEQ ID NO: 72963 - protein, 68 aa, Zea mays
  Coding DNA Sequence Number=SeqID_31184
MAPKQRPHGRELDTVQLQSEFPAPLSCTAPLPTSSTSPAMDAAQKLLHGAPCNLPLSFLCSSMFQRLK

SEQ ID NO: 72964 - protein, 197 aa, Zea mays
  Coding DNA Sequence Number=SeqID_31185
  Subcellular localization annotation: CTP_CleavageSite=58; ConfidenceScore=5.17e-01
MQWPLSLSLSLSLSLSLSLSLSCKDQNAQSCKGLIGAIQDKAPSTQGTRSRLARAQPRAKAGDPENSVACPASTIVPLDRVMLTAAKSSLGRHRKLRLARPQGSDSTSTSDDGLRLARPQGSDSASTSDDGLSLDLGRRTPPRPTLGLGLSLDLGRRSPPRPTSGLRLDLDLGGASASPDLGLGPTTSQEGPSLPYP

SEQ ID NO: 72965 - protein, 120 aa, Zea mays
  Coding DNA Sequence Number=SeqID_31186
MGQRTDFSELTVKQFLSTVEINIEDQLIVWMIGFKRYVAIFVEFAIANNLDYDVISNGVDLYIEDQFEDYIQYYEPARLGIPRRYGETPGLRHHPAVINKIAKVTILPNGGDKSKNRDKF

SEQ ID NO: 72966 - protein, 46 aa, Zea mays
  Coding DNA Sequence Number=SeqID_31187
MARAGGDGMARLAQGDRDARRQLCWWSPPVRRRGHGPAGLDWAGLG

SEQ ID NO: 72967 - protein, 97 aa, Zea mays
  Coding DNA Sequence Number=SeqID_31188
MIPYPCPCLATTPSSQNRDPDGEPPRGLTGGRAPAGSPPPSSDHPTPSASPPSGTWAHAHGAVPASFPRWRAKWAACPRGRARPRSAGPNSPPGPTS

SEQ ID NO: 72968 - protein, 253 aa, Zea mays
  Coding DNA Sequence Number=SeqID_31189
MYMVRIRFAFQNRGTPNVGGDPDKGDDGGSSDHSTELLEGQEPEGWVAQPISCDTARDCHFHDTLDILLCRAFDRHTWSIEYRCVVYQYSRGTYLNHWEATCLVRCPEDDLQGAETCLELYAISKKDTIEVAMQDAARRALSQYCFCSVGWLTVLTSDSTWSVIVSPIGEGNPRLSSTVNLVDVLNSELDHALDHLGRARAEIVELRAERTESYHQEDASPAPTEAQHPYHSPPHGHHAYDTPDCRTKIDLDP

SEQ ID NO: 72969 - protein, 59 aa, Zea mays
  Coding DNA Sequence Number=SeqID_31190
MSGRGSPLAGRRRPGKARYGGSPSREAPRLAGVCGRTLSCGCHGTDRGEERRSLSRLER

SEQ ID NO: 72970 - protein, 68 aa, Zea mays
  Coding DNA Sequence Number=SeqID_31191
  Homolog annotation: Hit_ID=Q6Z7E5; Match level="QueryCoverage=69%, HitCoverage=26%, E-value=3e-08, Identity=62%"; Hit description =Putative outer arm dynein intermediate chain 1
MAGATTPASGALVRLCLPSLLLFLYRCCRCEAVEMERTLAMIKPDGLSVVQFLLWFWKDLTPLRNGAL

SEQ ID NO: 72971 - protein, 56 aa, Zea mays
  Coding DNA Sequence Number=SeqID_31192
MAIWPRLLLCKDWTSGEPKVARRWHGDAARATGREAAAKGTLLDKSISPGLYLYPF

SEQ ID NO: 72972 - protein, 195 aa, Zea mays
  Coding DNA Sequence Number=SeqID_31193
  Gene Ontology: Mol. function=hydrolase activity, acting on glycosyl bonds; Cellular component=beta-galactosidase complex; Biological process=metabolic process
  Homolog annotation: Hit_ID=Q5Z7X8; Match level="QueryCoverage=98%, HitCoverage=44%, E-value=5e-89, Identity=80%"; Hit description =Putative endo-beta-1,4-mannanase
MAAYIKSLDRKHLITVGTEGFYGPGRGERLGVNPGDWAASVCSDFIQNSAVKDIDFASVHAYPDSWLPKASMEEKVKYLSVWVDSHLNDSEYVLRKPVLFTEVGYLQHAEANSTVDGDILLKVVYDKLYDSAKKLQAGSGALIWQLMVEGTQMYHDDFSMVARDRPSTYKLMKEQSCRLQSLYGKEGDPTWKCSP

SEQ ID NO: 72973 - protein, 198 aa, Zea mays
  Coding DNA Sequence Number=SeqID_31194
  Gene Ontology: Mol. function=hydrolase activity, acting on glycosyl bonds; Cellular component=beta-galactosidase complex; Biological process=metabolic process
  Homolog annotation: Hit_ID=Q5Z7X8; Match level="QueryCoverage=78%, HitCoverage=35%, E-value=2e-75, Identity=82%"; Hit description =Putative endo-beta-1,4-mannanase
  Pfam annotation: Domain name=RNA_pol_Rpb2_4; Domain location=68-131; Score=-14.6; E_value=0.07; Accession=PF04566.3; Description=RNA polymerase Rpb2, domain 4
MWRGTRMYSLLGVLLLLALAYLNWHPGHGPSAGGPGGFKLPMPWLQPRMSFVGRAGTHFVDTLTGAPIYINGWNSYWLLSARSPSLSVEMLRRGRRMGLTICRTWAFSDGGPGALQISPGRFSEPVFQMLDYVIYESRRNHVRLILCLVNNLDNFGGKAQYVQWAQAAGVNVTNSTDSFFFHPTIKGYYMEYVKDYAL

SEQ ID NO: 72974 - protein, 35 aa, Zea mays
  Coding DNA Sequence Number=SeqID_31195
MADIPVLHSTHVAHLYPQDVFPLSPRVDRTLKHYQ

SEQ ID NO: 72975 - protein, 429 aa, Zea mays
  Coding DNA Sequence Number=SeqID_31196
  Gene Ontology: Mol. function=calcium ion binding
  Homolog annotation: Hit_ID=Q4RI26; Match level="QueryCoverage=61%, HitCoverage=55%, E-value=2e-29, Identity=34%"; Hit description =Chromosome 8 SCAF15044, whole genome shotgun sequence
MSSGPTLDYLHRPKKLFDVRSIFVKWHLVLMIDLCHDPCLGNTRRFSSDPETTMGLVQHEGGPCGVLATVQKIDAALEDLSVESAVDLQKVLKTSTFTSRKDAFNTLLANIPLFQSRLGAMLFLISALLSRGLEDIQADRDDPSQPLVTAPFGHASQEIVNLLLCGEAVPNVFDGKMDLGGGMSLKGIPNNVEVGFLTLLESLNLCKVGQYLKCPKWPIWVVGSESHYTVLFALNPNVQEENELEERESKIRRAFDAQDQSGGGGFISVEGFQQVLRDTDINFPSDKLEDLCNAGIIVWSEFWQALLQLDKRAGGMKDPTGLMGKKQFTIFHFNGIAKSVPNGNASAGGSCPIQRPRLCKLNVTVPPRWTQDEYLADVVSASTSSSKDDSILSLAPPGQTNQHAPLVDCIRTRWPRAVCSWVGDVPSIV

SEQ ID NO: 72976 - protein, 388 aa, Zea mays
  Coding DNA Sequence Number=SeqID_31197
  Gene Ontology: Mol. function=oxidoreductase activity; Biological process=electron transport
  Homolog annotation: Hit_ID=Q10RL6; Match level="QueryCoverage=82%, HitCoverage=89%, E-value=4e-31, Identity=31%"; Hit description=FAD binding domain containing protein, expressed
  Pfam annotation: Domain name=DAO; Domain location=18-326; Score= -15.6; E_value=5.4e-05; Accession=PF01266.14; Description=FAD dependent oxidoreductase
  Pfam annotation: Domain name=FAD_binding_3; Domain location=16-324; Score=-63.5; E_value=7.3e-07; Accession=PF01494.9; Description=FAD binding domain
  Pfam annotation: Domain name=Lycopene_cycl; Domain location=18-382; Score=-182.2; E_value=0.0049; Accession=PF05834.3; Description =Lycopene cyclase protein
  Pfam module annotation: Pfam domain module=DAO::FAD_binding _3::Lycopene_cycl; Domain location=18-326::16-324::18-382
MASGGGNAAADAKHVDAEVVIVGGGIAGLATALALRRAGAARRVLVLERHAGHRATGAALTIFPNGWFALRALGVAHKLASRYDAYETSRVTNLETGATQVFRFAGNKNKGEEVRVRALDRKALLEALAEELPPGTVRFSSKVVSIDTERAAGDSSVTVVLGLDDGTVIRAKASEVTAACHFGASPSELSSDARVLVVPAFAEKEAAGDPVKTLLEVTDNLARHMPAEYLDVVRHSDHGNLSWAPLLYRNPVSVLLGPAARGPVTVAGDAFHPMTPDMAQGGCSALEDAVVLARALSREATPAEGVSAYVAQRRWRAAWLVAGAYLSGWIQQGGTNVGGVRGRLVKVFRDWIFYRFVFPRLADTMWFDCGDLTPPPPTAAVGKSHHIE

SEQ ID NO: 72977 - protein, 73 aa, Zea mays
  Coding DNA Sequence Number=SeqID_31198
MSGEHAKKEVPTREMPDSLGKKHEVKTPSKEAKIYGDKNKEDKEESANSINLHKTKGDKKKNKMKKVVYYETN

SEQ ID NO: 72978 - protein, 90 aa, Zea mays
  Coding DNA Sequence Number=SeqID_31199
  Subcellular localization annotation: CTP_CleavageSite=65; ConfidenceScore=5.25e-01
MAQPTTAAGTLTLALPTDGGAIAPKSASRLWSSIFAGAHAPSPRRQEHPRRHICSRALPASPLSMCPHRGGVEVLDNLNHHAEQENRRKT

SEQ ID NO: 72979 - protein, 300 aa, Zea mays
  Coding DNA Sequence Number=SeqID_31200
  Subcellular localization annotation: CTP_CleavageSite=44; ConfidenceScore=5.37e-01
APAASRRPGRLDCHSAKAVVATGKRQYAAAPSQLFRRVATISFRASPNQPLESTMDVNHITEMEDGLNDDEMEYPFEGDANASNNDQIVEDHADDAPIASGENAIVQQQVGLRKKKYMYVNDHRVVKQRKLVPTVTIPAMNKDKGPMPMSISKMKTKKPIGTPTSSKLMASAFKVTSSKNELMVLMQKSAEVVQPAIASATASANASASSSVRASASASIPASAQASVGDDEKQVDGQIGKRLTSWVWQHFTRYEIDVEQPDGSSVKQKWAKCLRCSHKAKADASNALLDFSGQFQFTRP

SEQ ID NO: 72980 - protein, 86 aa, Zea mays
  Coding DNA Sequence Number=SeqID_31201
  Gene Ontology: Mol. function=protein serine/threonine kinase activity; Biological process=protein amino acid phosphorylation
  Homolog annotation: Hit_ID=Q84VQ3; Match level="QueryCoverage=77%, HitCoverage=28%, E-value=4e-12, Identity=37%"; Hit description=NAF specific protein kinase family
MGSYVRMKLGTKGVYHRDLKPQNLLLDSRGNLKLSDFGLSTLSQNITAAQYSCPYWFSPGAKSLIQRILDPNPRTPIVCVKLYESS

SEQ ID NO: 72981 - protein, 125 aa, Zea mays
  Coding DNA Sequence Number=SeqID_31202
  Gene Ontology: Mol. function=protein serine/threonine kinase activity; Cellular component=cytoplasm; Biological process=protein amino acid phosphorylation
  Homolog annotation: Hit_ID=Q304W8; Match level="QueryCoverage=64%, HitCoverage=17%, E-value=2e-33, Identity=83%"; Hit description =Serine/threonine kinase
  Pfam annotation: Domain name=NAF; Domain location=55-96; Score=9.1; E_ value=0.00061; Accession=PF03822.5; Description=NAF domain
RITIEEIREDPWFKKNYVTIRCGEDENVSLDDVQAIFDNIEDKYVSDEVTHKDGGPLMMNAFEMIALSQGLDLSALFDRQQWTIAWTYLGDPEPKKHNHADVWHPHHKGKDIGDSRNLGKQISKL

SEQ ID NO: 72982 - protein, 73 aa, Zea mays
  Coding DNA Sequence Number=SeqID_31203
MRAHEQQKKRSLYIKEEDAEARAEIKDDSIAIAECLRDLNQPLGCGVQSYSYGVVVALSADLVIRDTGRIGKD

SEQ ID NO: 72983 - protein, 111 aa, Zea mays
  Coding DNA Sequence Number=SeqID_31204
  Gene Ontology: Mol. function=protein serine/threonine kinase activity; Cellular component=cytoplasm; Biological process=protein amino acid phosphorylation
  Homolog annotation: Hit_ID=Q304W8; Match level="QueryCoverage=41%, HitCoverage=10%, E-value=2e-16, Identity=89%"; Hit description =Serine/threonine kinase
MSPSNWLHGHTYDCIRAWSLVRQVGCIQPRLTTATKNGMEIKREISIMKIVRHPNIVRLNEVLAGRTKIYIVLELVTGGELFDRIQQPLHEINMPLKSGRNGYSMNLEGYR

SEQ ID NO: 72984 - protein, 138 aa, Zea mays
  Coding DNA Sequence Number=SeqID_31205
GYEIDGFGYDYGAGEDEAVEGDFQEFQDYDEFYVWVSGNPQSAACEGRGTRGQAQGRAGAREAGARTPGAMGKGRTRHAAPWRPLRREGPNGVGSWAAGEAARAHHAKAARHGRAEDRTRGRASLGLAARNVWLGQAE

SEQ ID NO: 72985 - protein, 168 aa, Zea mays
  Coding DNA Sequence Number=SeqID_31206
MTPPVSAARSCRRRGLGPGEDPGYWGKGLERTQCDMADSTVGTTPARGHQRAQTATARTCSGKQSREGQGNKQGNKGMGDSSPREETLEYWSNAGDAGCLGSTASGLRLHGGNDGERGLGKTKRLGANQKVSRVVGEGAELTKATDVADARQRPHNGGESLVELHGRV

SEQ ID NO: 72986 - protein, 61 aa, Zea mays
  Coding DNA Sequence Number=SeqID_31207
MGVHGDPGRSSSIRGVKELEEDLRMLELMTRELELTWSKLATARCFYGQTPPNLEVTKLQS

SEQ ID NO: 72987 - protein, 78 aa, Zea mays
  Coding DNA Sequence Number=SeqID_31208
  Gene Ontology: Mol. function=endopeptidase Clp activity; Cellular component=membrane fraction; Biological process=proteolysis
  Homolog annotation: Hit_ID=Q9M4F0; Match level="QueryCoverage=73%, HitCoverage=18%, E-value=1e-22, Identity=82%"; Hit description=ClpP protein
  Pfam annotation: Domain name=CLP_protease; Domain location=1-68; Score=-4.3; E_value=3.8e-08; Accession=PF00574.13; Description=Clp protease
MGVYDAMKFCKADVSTVCFGLAASMGAFLLAAGTKGKRYCMPNARIMIHQPSGGAGGKGWFDDKGIVWDPWDMKSLAI

SEQ ID NO: 72988 - protein, 104 aa, Zea mays
  Coding DNA Sequence Number=SeqID_31209
MRVGLELHYVPTEVIVDTPRRIGDWAQWNCSSKLIPTVNPPIVVDYPSATSTIAPVRMKVGESKYRDDRHRRVLHRVNERHHQGSRSDDGDKALSVDPVAGGGD

SEQ ID NO: 72989 - protein, 108 aa, Zea mays
  Coding DNA Sequence Number=SeqID_31210
MNVCELTLAVSHPPQVKNSFTDSIVEGSKQLSTHKPSKIEDPDPGLACKLKDTTALYSLQILKHVVKASFLSYQVNFMISCRYWGQQQPAADAGERWLNRSYCYSYLA

SEQ ID NO: 72990 - protein, 278 aa, Zea mays
  Coding DNA Sequence Number=SeqID_31211
  Homolog annotation: Hit_ID=Q9FJ58; Match level="QueryCoverage=19%, HitCoverage=12%, E-value=3e-16, Identity=72%"; Hit description =Arabidopsis thaliana genomic DNA, chromosome 5, P1 clone:MTE17
MAATYQTGLVAEPQLLNTEIITRRATYFVADTNRKDKCVGYLDVFVHQARDIHNVCVYHKQDVNAKLCLTSSPDILCSTKVISRAGRNPVFECCPHIITQKSPSTVDDSGNDHVVPAQLEKIVFPDLNVEKEDEIMVSKYLEMTSDSETPIKVENDMSLHSTNDDVPSKLEKIKFIDSGRTSAVCPDGAGSRWWPPARAGSCRDWWPPMLSRGGVAALLAACAYSTPAAQTATAGVLRNLVVFPDLLPAFRDEGALPMLLQLVSLGTPRAQELALACL

SEQ ID NO: 72991 - protein, 74 aa, Zea mays
  Coding DNA Sequence Number=SeqID_31212
MYGLQVVMRMMVMIMTMVLLVHYSQTGHFAEYVDVYSPLLYTSNPPGCPRCNHCSGEDEVVEEDFQEFQEYDEF

SEQ ID NO: 72992 - protein, 432 aa, Zea mays
  Coding DNA Sequence Number=SeqID_31213
  Gene Ontology: Mol. function=protein binding; Cellular component =endoplasmic reticulum; Biological process=ER to Golgi vesicle -mediated transport
  Homolog annotation: Hit_ID=Q10M68; Match level="QueryCoverage=82%, HitCoverage=74%, E-value=2e-51, Identity=65%"; Hit description =Serologically defined breast cancer antigen NY-BR-84, putative, expressed
  Pfam annotation: Domain name=DUF1692; Domain location=249-409; Score =124.0; E_value=4.2e-34; Accession=PF07970.2; Description=Protein of unknown function (DUF1692)
  Pfam annotation: Domain name=Ribosomal_S11; Domain location=106-177; Score=-40.8; E_value=0.024; Accession=PF00411.9; Description =Ribosomal protein S11
  Pfam module annotation: Pfam domain module=DUF1692::Ribosomal_S11; Domain location=249-409::106-177
MDGLLSKLRSLDAYPKVNEDFYSRTLSGGIITLVSSAVMLLLFVSELRLYLHAVTETTLRVDTSRGETLRINFDVTFPALQCSIISLDAMDISGQEHLDVKHDVFKQRIDAHGNVIATRQDVVGGMKTHQVGSLGTCGFKSSRKASPYAGQRTAVDAIRTVGLQQKLWSCIPDLLRKIAEECRMWGMAGPLELRNFRSSWSGPSLEMLNAWLISLFWVFGLRNELSDDQCCNTCEDVREAYRKKGWGVSNPDLLDQCKREGFLQSIKDEEGEGCNIYGFIEVNKVAGNFHFAPGKSFQQSNVHVHDLLPFQKDSFNVSHKINRLSFGEYFPGVVNPLDGANWVQHSSYGMYQYFIKALKQVDVGLGKLKTKSAHKDVLWFLPPGHKKEKPEWGKPLLASRFAIQQRLLVTKRYISAGNKDDEKHQAATRRPH

SEQ ID NO: 72993 - protein, 50 aa, Zea mays
  Coding DNA Sequence Number=SeqID_31214
MTLLARSLEDSIVQCEVALGYALVITVVGDYLDDPEVAIKSLVSVRFEVV

SEQ ID NO: 72994 - protein, 313 aa, Zea mays
  Coding DNA Sequence Number=SeqID_31215
  Gene Ontology: Mol. function=microtubule motor activity; Cellular component=microtubule associated complex; Biological process =microtubule-based movement
  Homolog annotation: Hit_ID=Q75LL2; Match level="QueryCoverage=93%, HitCoverage=28%, E-value=1e-137, Identity=72%"; Hit description =Kinesin-like protein
  Pfam annotation: Domain name=Kinesin; Domain location=42-311; Score =344.4; E_value=1.8e-100; Accession=PF00225.13; Description=Kinesin motor domain
MMHLDGVDDELGDGDCAPSTARFELQEDPSFWKDNNVQVVIRIRPLSGSEISLQGQKRCVRQDSSKGQCLAWTGNPESRFTFDLVADEHVSQEDMFKVAGVPMVENCIAGYNSCMFAYGQEKELRIDETLRFTCKCSFLEIYNEQILDLLNPNSVNLQIREDSRKGVHVESLTEHEISNAREALQQLIEGAANRKVAATNMNHASSRSHSVFTCLIKSKWESKGINYHRFSRLNLVDLAGSERLVITNLIAVSNKKSQHVPYRDSKLTFLLQDSLGGNSKTTIIANISPSSCCAAETLSTLKFAQRAKYIRNN

SEQ ID NO: 72995 - protein, 139 aa, Zea mays
  Coding DNA Sequence Number=SeqID_31216
MGKNNKRKREPTPPSEDFGDSEYSEEEFSSESEGSPAPIPLRESSDDSDDSQGLAAKVWTYIRAVERSGLEGSDESEYSSDEEDSSEEDGGGDGEDDDDDGGGGDDGDGGGRGGSSGSKDGDGGSGGGGSSKGSNKASG

SEQ ID NO: 72996 - protein, 554 aa, Zea mays
  Coding DNA Sequence Number=SeqID_31217
  Homolog annotation: Hit_ID=Q45GG2; Match level="QueryCoverage=92%, HitCoverage=90%, E-value=1e-48, Identity=29%"; Hit description =Expressed protein
  Pfam annotation: Domain name=DUF547; Domain location=318-470; Score =178.2; E_value=2e-50; Accession=PF04784.5; Description=Protein of unknown function, DUF547
  Subcellular localization annotation: CTP_CleavageSite=35; ConfidenceScore=5.29e-01
MDYVVARMQLQQAAVPPPVHSIADHRPPPVSQRTRGSATMQRQRREALEQEVAELKQQLSNEQTVHQILERALQPSSSMALANIPAFIPTKAKELLAELLLVEEEIARLEDQIKRMKKSAATQQQQQQQTEHCKSMFFISQAMDGEAYLSTVVNNKRHSLASSSDGHAVLEKKIAQHELPITKKSPTVIAKRRARDQQQPPNKLSERILKCLVCIFMRLLRSSRASESAAGNLGGFRMDMGLVNVAAAAAAKEKERGQQDHYGIFGIQDSMVRDIGPYKNLVRFTTSAGSGSGSGSGSLDLHLLSRGFSASPLVSKLREMLEALQQVDVRSLNHHQRLAFWLNIYNTCIMHGILQHGLPSNSDKLLALKNKATINVSGQTFNALVIENFILRQPSSVKQHMHERIIQQELWQCDVDVEEEQAVREVYGLKTSEPNILFALCCGIRSSPALRIYKADRVLVDLDKAKLEYLQASLVVTSTRRLMIPSLLHSNMHDFAKDTESLLRWICEQLPTSWSIRKSMVDCLAAITNNNNKLEEVVVDVIPLDYDFQYLLPM

SEQ ID NO: 72997 - protein, 122 aa, Zea mays
  Coding DNA Sequence Number=SeqID_31218
MVEERPRDALKTDDVGGHGVLHDFRWVMAMDGKGHGSSREGVEAAEGSRGGRRWGLGRACPPGRGQERAQRRRGEGARAEARRSHGQAPASTGSHGRELEGAGARRWEKNGGSRKISGGDKG

SEQ ID NO: 72998 - protein, 190 aa, Zea mays
  Coding DNA Sequence Number=SeqID_31219
  Homolog annotation: Hit_ID=Q9LTP9; Match level="QueryCoverage=86%, HitCoverage=61%, E-value=9e-37, Identity=47%"; Hit description =Arabidopsis thaliana genomic DNA, chromosome 3, P1 clone: MQC12
MWLPPLRKTSMPWLYCLTTRFVLNTCKRLKEKKSYLVWNAVGCLGVTAVNDLVREVEAIQKCGGQTIADGSRFRTGGGILWNILKSREPKAYKEIMAKGKELEKQFRCTKRPQISRNEDASSQGSALIDDEIEARDQKETLDDPKQLDDVEIHVSDNKAQRKPLADRIRAPVAYDDLFEEGEIHDGEPRS

SEQ ID NO: 72999 - protein, 56 aa, Zea mays
  Coding DNA Sequence Number=SeqID_31220
MEVMVTMLLLVFTMCGLSLMSKTCFIGHTTLKVKLVMLMDECNLNKLIYFMAHDVT

SEQ ID NO: 73000 - protein, 155 aa, Zea mays
  Coding DNA Sequence Number=SeqID_31221
  Subcellular localization annotation: CTP_CleavageSite=44; ConfidenceScore=5.19e-01
MPPSPTTVIHVPSKHALAIPGSAILPSVPMMWQSPSAPPYGTCVAQQATAQESAIHPLPPLPVMWQRSSTSPATAGDLGPLEILVVESYTNHAHFANLLAYEQSQGQCFKMNTELAELLGMISLKGSFGAKGSQEDSWGRSSLGLQRSIGGDLTG

SEQ ID NO: 73001 - protein, 92 aa, Zea mays
  Coding DNA Sequence Number=SeqID_31222
MPTNGPGFTKLHDRASGNAHKNKKPSIEACGHFWGAFVILFIGLSEMFTCDVEFAPIPAVAEPPELFQLKCLSHASGVATHLNRNNPSVTQI

SEQ ID NO: 73002 - protein, 67 aa, Zea mays
  Coding DNA Sequence Number=SeqID_31223
MSSPQHYSGQVCAMSFVNYEGAPIRVSLWSEDDSDLEGLQGFLQLVCRSCGKTRRMTSYDREILHED

SEQ ID NO: 73003 - protein, 80 aa, Zea mays
  Coding DNA Sequence Number=SeqID_31224
MGAFVHCSAPSTFDVVPLGEVIHNLEAVGRIAKWALELMGYGIYYVSWTTIKSVGASDERLSMSQSQDGNILQGGMTPRG

SEQ ID NO: 73004 - protein, 110 aa, Zea mays
  Coding DNA Sequence Number=SeqID_31225
DDRSPRVDRARESPRTTPHEQIDIIRRGGPLRGRCGLPSIVVLVGPIAGQVDPRSPNSSSSSIAVGSEEVEDARRRRLDGPTHAASFPVEDYLVATCHLSPVQALKAKEI

SEQ ID NO: 73005 - protein, 782 aa, Zea mays
  Coding DNA Sequence Number=SeqID_31226
  Gene Ontology: Mol. function=DNA binding; Cellular component =intracellular; Biological process=DNA integration
  Homolog annotation: Hit_ID=O24587; Match level="QueryCoverage=96%, HitCoverage=82%, E-value=0.0, Identity=86%"; Hit description=Pol
  Pfam annotation: Domain name=RVT_2; Domain location=423-678; Score =518.6; E_value=7e-153; Accession=PF07727.4; Description=Reverse transcriptase (RNA-dependent
  Pfam annotation: Domain name=rve; Domain location=47-210; Score =116.6; E_value=7.3e-32; Accession=PF00665.16; Description=Integrase core domain
  Pfam module annotation: Pfam domain module=RVT_2::rve; Domain location=423-678::47-210
MGIKARRSDGSLAFKGVLDGKLYLVDFAKEEAGLDACLMAKTCMGWLWHRRLAHVGMKNLHKLLKGEHVIGLTNVHFEKDRPCAACQAGKQDKSETQGTLKRFLRRAQNEFELKVKKIRSDNGSEFKNLQVEEFLEEEGIKHEFSAPYTPQQNGVVERKNRTLIDMARTMLGEFKTPECFWSEAVNTACHAINRVYLHRLLKKTSYELLTGNKPNVSYFRVFGSKCYILVKKGRNSKFAPKAVEGFLLGYDSNTKAYRVFNKSSGLVEVSSDVVFDETNGSPREQVVDCDDVDEEDVPTAAIRTMAIGEVRPQEQDEQNQPSSSTTVNPPTQDDEQVHQKEACDQGGAQDDHVMEEEAQPAPPTQVRAVIQRDHPVDQILGDISKGVTTRSRLVNFCEHYSFVSSIEPFRVEEALLDPDWVLAMQEELNNFKRNEVWTLVPRPKQNVVGTKWVFRNKQDEHGVVTRNKARLVAKGYAQVAGLDFEETFAPVARLESIHILLAYAAHHSFRLYQMDVKSAFLNGPIKEEVYVEQPPGFEDERYPDHVCKLSKALYGLKQAPRAWYECLRDFLIVNAFKVGKADPTLFTKTCDGDLFVCQIYVDDIIFGSTNQKSCEEFSRVMTQKFEMLMMGESNYFLGFQVKQLKDGTFISQTKYTQDLLKRFGMKDAKPAKTPMGTDGHTDLNKRDSDYAGCKVDRKSTSGTCQFLGRSLVSWNSKKQTSVALSTAEAEYVAAGQCCAQLLWMRQTLRDFGYNLSKVHSYVIMRVLPAWRKILLNTAAQST

SEQ ID NO: 73006 - protein, 127 aa, Zea mays
  Coding DNA Sequence Number=SeqID_31227
MGKSKKGSGSSHHSGDKRKREPTPPSEDFGDSEYSEEEFSSGSEGSPAPGIAAEVWTYIRAVERAGLEGSDESEYSSDEEDSLDSSEEGSGGDGGDDGDDGGDGNGGGNSGRGGEDGDSKGSDKASG

SEQ ID NO: 73007 - protein, 556 aa, Zea mays
  Coding DNA Sequence Number=SeqID_31228
  Homolog annotation: Hit_ID=Q2QX94; Match level="QueryCoverage=93%, HitCoverage=98%, E-value=1e-138, Identity=75%"; Hit description=ZW18 protein, putative, expressed
MDARLGCLSVHLDTPQCFSAEIYAVDLNVSGAQEDLKDSPRAAAKRVSPASWRLDTAAAEAETGAGGAAAKGPRVCFRPPDVMETVHEVAIYIHRFHNLDLFQQGWYQMKISALWEEGGNRTPASPARVVQYEASDVGGDDALGIWKIDDIDNSFHTQPFRIKYARQDIYLSVMVSFNIFNSEEEGPAASDVMMKFELIYAPTLDNGSELHASSATSSAAVHEFRIPHRALLGLHSYCPVHFDAFHSVLVDLTLHIVYLKAGAAKSSLKVPEQGLRPTSYHIVKALLTSRKMLLEELNKISGAIGKTVEDLDVADLNLGKYESFNPSKSWLPNSSKVFPETGKGVGQLAGILHDFLESMSDDSPHRYSLRVSGSRKFHDDHVQSSASRAELHRKSIAQMKINPHYVQDMHIYGDPSRVPVVLIEQHVMVVPQHSSSKDMASNVSEQKDTIVVPKLQGEPLDGYVPYHSARIELCPAASSDTSKKGQVFTEMLNNCLDQIRTPSSDTRTFMRCDVNFDQSNQGRSLNTMIGRAAHIEFLETDLYAKFIMWSFPDLFR

SEQ ID NO: 73008 - protein, 433 aa, Zea mays
  Coding DNA Sequence Number=SeqID_31229
  Pfam annotation: Domain name=DUF793; Domain location=20-428; Score =507.7; E_value=1.3e-149; Accession=PF05633.2; Description=Protein of unknown function (DUF793)
  Subcellular localization annotation: CTP_CleavageSite=18; ConfidenceScore=5.06e-01
ERDEIRSGPAARRIAGGRAMPVTDHQSSSPSPFSFGRSLLSLRRDPTAMPSGEEADLEAFQRHVASTLAELLPAAEAGVGGSDATAGAGEEFLSAAWIRRLLEAFVLCQEEFRVFVAQARRRAGALPAAAEKTVAEFHERAVKALDVCNAARDGVDQVRRWERLADIAASALRAPGEVHEGQLRRARKALTDVAALLVDDTAASGAGGVASFLSSHRNRSFGRARASPSRSAGASASASASASHFRSLSWSVSRTWSAARQLQAIGAGLAAPRAHEPGLAAPVYSMGCVLHLTAWALVVAVPCPDRGNALQAHHLPGAPPRATFPWAPPLLTLQERLTEEGKRKDRRHSCGLLKEIHSLERSTQRLAEAIDAAPIPLFGDREADVREAAAELAAVCEAMRDGLEPLERLLREVFHRIVRSRVDGLDSSMHNAD

SEQ ID NO: 73009 - protein, 71 aa, Zea mays
  Coding DNA Sequence Number=SeqID_31230
  Subcellular localization annotation: CTP_CleavageSite=36; ConfidenceScore=5.07e-01
MPSLSVCYARASAALTVEKTVLVDLFFSSAPGQGLKATNSGSLVIVPPTSGDFGDVTASWCPVCLSPPAET

SEQ ID NO: 73010 - protein, 64 aa, Zea mays
  Coding DNA Sequence Number=SeqID_31231
MVPPGDVAGRLTVHCWLLCRVQAHGIEETLAPLDRHGAVQIGCPHCGKPESGKYFELAPAFLCL

SEQ ID NO: 73011 - protein, 221 aa, Zea mays
  Coding DNA Sequence Number=SeqID_31232
  Homolog annotation: Hit_ID=Q10N09; Match level="QueryCoverage=42%, HitCoverage=39%, E-value=9e-43, Identity=87%"; Hit description=LOB domain protein 1, putative, expressed
  Pfam annotation: Domain name=DUF260; Domain location=41-141; Score =214.2; E_value=3e-61; Accession=PF03195.5; Description=Protein of unknown function DUF260
  Subcellular localization annotation: CTP_CleavageSite=13; ConfidenceScore=5.41e-01
MEYSSSDTAVCTVAAAAAAASSSPPSSPQPQPQPAAVVLSPCAACKILRRRCVDRCVLAPYFPPTEPHKFATAHRVFGASNIIKLLQELPEEHRADAVSSMVYEAAARIRDPVYGCAGAICQLQKQANELKAQLARAHAELACARAQHAHLLALLCVEVAAAADSSSYSASHHQIAVVAANPMVAVAAADAQAADALYVVDGAGAACLQMQASWGDEALWT

SEQ ID NO: 73012 - protein, 221 aa, Zea mays
  Coding DNA Sequence Number=SeqID_31233
  Gene Ontology: Mol. function=hydrolase activity; Cellular component =cytoplasm; Biological process=negative regulation of progression through cell cycle
  Homolog annotation: Hit_ID=Q5YJN3; Match level="QueryCoverage=76%, HitCoverage=75%, E-value=3e-50, Identity=62%"; Hit description =Diadenosine tetraphosphate hydrolase
  Pfam annotation: Domain name=HIT; Domain location=59-172; Score=56.1; E_value=1.2e-13; Accession=PF01230.13; Description=HIT domain
  Subcellular localization annotation: CTP_CleavageSite=47; ConfidenceScore=5.00e-01
MLRLRWRAVLPPLPLPPLPGLLRRLPPHRRALSSSSGSIPLPPPVMEASYKFGPYKIDAREVFHATPLSYAMVNLRPLLPGHCLLIAHCSIVHETLLTFVLVLFFLDLREVKRFADLSSDEISDLWVTAKEVGARLEQYHKASSLTFAIQDGPQAGQTVAHVHIHLIPRKKGDFEKNDEIYDAIDVKEKELKEKLDLDIERKDRSMEEMANEANEYRALFS

SEQ ID NO: 73013 - protein, 817 aa, Zea mays
  Coding DNA Sequence Number=SeqID_31234
  Gene Ontology: Mol. function=nucleoside-triphosphatase activity; Cellular component=membrane; Biological process=cell division
  Homolog annotation: Hit_ID=Q1SK92; Match level="QueryCoverage=96%, HitCoverage=91%, E-value=1e-143, Identity=68%"; Hit description=AAA ATPase, central region; DEAD/DEAH box helicase, N-terminal
  Pfam annotation: Domain name=AAA; Domain location=545-730; Score =261.6; E_value=1.6e-75; Accession=PF00004.19; Description=ATPase family associated with various cellular activities (AAA)
  Pfam annotation: Domain name=AAA_3; Domain location=545-671; Score= -8.5; E_value=0.0027; Accession=PF07726.2; Description=ATPase family associated with various
  Pfam annotation: Domain name=AAA_5; Domain location=545-677; Score =13.8; E_value=0.00016; Accession=PF07728.4; Description=ATPase family associated with various cel
  Pfam module annotation: Pfam domain module=AAA::AAA_3::AAA_5; Domain location=545-730::545-671::545-677
MAATKGGDRNRSLFDSSSSPIPIRSEQTRVVLTSAAYVHLKQADISKYTRNLAPASRTILLSGPAELYQQMLARALAHYFQAKLLLLDPTDFLIKIHSKYGTGGSTEKTVKRSISETTLERVSGLLGSLSILPQKEQPKGTIRRQSSMMDVKLRSSESMSNLTKLRRNASTSSDMSSMASQGPSTSTAPLRRSSSWTFDEKILVQALYKVLLSVSKKYPVVLYIRDVEKFLHKSPKMYLLFEKLLNKLEGPVLILGSRIVDMNSDEESDDRLTVLFPYNIEIKPPENENHLVSWNSQLEEDMKMIQFQDNRNHIMEVLAENDLECDDLGSICLSDTMCLSKYIEEIVVSAVSYHLMNNKDPEYRNGKLVLSTKSLSHALEIFQGNKISDKDSMKLEATDDALKMPNFLGILVSLVWKHLKSAAEKATAPTTAKSETKSATSLPPARAPAAAAAAPASAPAPRIESKTELEKKDNPPPVAKAPEVTPDNEFEKRIRPEVIPANEIGVSFDDIGALDDIKESLQELVMLPLRRPDLFKGGLLKPCRGILLFGPPGTGKTMLAKAIANEAQASFINVSMSTITSKWFGEDEKNVRALFTLAAKVSPTIIFVDEVDSMLGQRNRAGEHEAMRKIKNEFMTHWDGLLSRPDQRILVLAATNRPFDLDEAIIRRFERRIMVGLPSMGSRELIMRRLLSKEKVDEGLDFKELATMTEGYSGSDLKNLCTTAAYRPVRELIQKERKKELEKLKCEKGETPSDPPKKEKEETIILRPLNMTDLKEAKNQVAASFAAEGAIMSELRQWNELYGEGGSRKKQQLTYFL

SEQ ID NO: 73014 - protein, 224 aa, Zea mays
  Coding DNA Sequence Number=SeqID_31235
  Gene Ontology: Mol. function=transcription factor binding; Cellular component=intracellular; Biological process=regulation of transcription, DNA-dependent
  Homolog annotation: Hit_ID=Q5MGQ9; Match level="QueryCoverage=99%, HitCoverage=88%, E-value=1e-95, Identity=78%"; Hit description=Rab7
  Pfam annotation: Domain name=Arf; Domain location=28-193; Score= -102.1; E_value=0.07; Accession=PF00025.11; Description=ADP -ribosylation factor family
  Pfam annotation: Domain name=Miro; Domain location=43-145; Score= -6.9; E_value=0.025; Accession=PF08477.3; Description=Miro-like protein
  Pfam annotation: Domain name=Ras; Domain location=1-195; Score=177.7; E_value=2.8e-50; Accession=PF00071.12; Description=Ras family
  Pfam module annotation: Pfam domain module=Arf::Miro::Ras; Domain location=28-193::43-145::1-195
MNQYVNNRFSNQYKATIGADFLTKEVQIDDRLFTLQLGSEPESTTIAFYRVGCLLEMPSGSSPHRATLGSVHTVTPLIWDTAGQERFQSLGVAFYRGADCCVLVYDVNVSKSFEKLNNWREEFLIQASPSDPENFPFVVLGNKIDVDGGNSRTVSEKKAKAWCASKGNIPYFETSAKEGFNVEAAFECIARNAVKNEPEEDMYLPDTIDVGGAGRQQRSSGCEC

SEQ ID NO: 73015 - protein, 150 aa, Zea mays
  Coding DNA Sequence Number=SeqID_31236
MDITKKVPFRALLEEKTEKLGEEWERGTCSHVALHAFANHNDREDETKDMQEEEIHRFYTHLNKEDKVLLMKLLRRNKEQGEMLLRLEETLIKTNNSLEKVTKVHEELRSSHDDLVQCYDSILIEQRNNEHALSCVSQFKVENAMLKSQV

SEQ ID NO: 73016 - protein, 579 aa, Zea mays
  Coding DNA Sequence Number=SeqID_31237
  Gene Ontology: Mol. function=ubiquitin thiolesterase activity; Biological process=ubiquitin-dependent protein catabolic process
  Homolog annotation: Hit_ID=Q5SMN6; Match level="QueryCoverage=91%, HitCoverage=61%, E-value=1e-101, Identity=43%"; Hit description =Putative ubiquitin-specific protease 23
MKRVGQGREKQSLSRAETIGEACRHELGPADSHGIKVIDRHRCQGPFQVRQVREADVLKQKAYMLFYVRNSIGKSVVCKDNNAANLLKKKTSEKISSLNGIAQTNVRAQNLNGVSPFGDKTHGTIIGYSTISSKTKTIHCSKNEVKAEDAPASQNNALPSTQAPIARNDVGILPTKPMQFAVKNEEKTSSHQPAPFTNTCGEQTVVGRPLQEMEPKAGAGENTSVVSAVANDAATLSKADKLTSQPQTAPSSKPTANVKDTATEFATLSLSKKDSVVSNGAVLSIGCLTSGEKAMNLSESVDQANEITKALPTSQNNTAPVIAQADCGVEISSGVIMHVAVSASCNGTTEKKVNSKSKKFVRYPVVNMWLGSRHLKPGKKANRKRSKMIRRVVACKDAANLSCLSEQLTSTSSTACSETVECTSSHQKRSHASARSKDDAQSSQNKQKVDGARVGAGTSAPSCSAGVPKSDPNPSTDAKVVATQPASIRATDLMEATVPRWDDVDMPNIKVAEPQSKRKSGGYILDEWDEEYDRGKTKKVRRSKQDFGGPNPFQEEADYVSQRRTKQKSYRGKSWNKRA

SEQ ID NO: 73017 - protein, 177 aa, Zea mays
  Coding DNA Sequence Number=SeqID_31238
  Gene Ontology: Mol. function=ubiquitin thiolesterase activity; Biological process=ubiquitin-dependent protein catabolic process
  Homolog annotation: Hit_ID=Q6K8Z3; Match level="QueryCoverage=71%, HitCoverage=10%, E-value=4e-33, Identity=61%"; Hit description =Putative hematopoietic-specific IL-2 deubiquitinating enzyme
MAGVSMAAAPEGVLHRRIEFHLARRPHGSVAVGGGGFRMETLNPDAAGKVGPGEAVGSSEGDARRPEKGDSGGIDPELSVARIYLGRILLDVSQGAGLENLGNTCYLNSVLQCLTYTEPFAAYLQSGKHTSSCTFQSQWTNSRADRASSDDSAETVEDRAPNIGHPNVPFVPDDSLS

SEQ ID NO: 73018 - protein, 223 aa, Zea mays
  Coding DNA Sequence Number=SeqID_31239
  Gene Ontology: Mol. function=unfolded protein binding; Cellular component=chloroplast; Biological process=protein folding
  Homolog annotation: Hit_ID=Q6L5N6; Match level="QueryCoverage=41%, HitCoverage=44%, E-value=6e-26, Identity=61%"; Hit description=Heat shock protein 70
MFRLNPVTGEDVMFSTIGGSQSSVEINVLQGEREIVKTASLLIKVKFDIDANGILSVTAVNKGTGKKQDIKITGASNLPKDEVDRMVGEAGKFTEEDKQKARNIEATEENAIAAESNTGTITNVVEEKIPNEEIILGTISFNMANNSVKEEKMYNEEVNKGLVRGKDESTGADPVSHETNLAQTSDGADEEMITEPAVDTGQEEHLRENHDESGILAFIFAAC

SEQ ID NO: 73019 - protein, 401 aa, Zea mays
  Coding DNA Sequence Number=SeqID_31240
RIIGKKKEYNRAHLARAASGVDEQPSPRSLLSRILLRGGGDGGSGGGGGFGCRVRLPRRYGGGLREERKDGAEQGETPRVKVVEPPPPPLPELPLETPRSSLGRKKPEEELVSMNLGLGASLVLLLSKSAVELNKMVELRAQMEALVSEIRQASRYREEEEKQAASHPTSAAAAAVAGPATSQESDGGSSATTTAVKDPIAFPAADADADAASNCSRTAVVMDLMEAELQAELSRMQQQRGRGGTVVHGHGGDSRIAPTRGLELPLLKVKTKGDAPDSASRSCVDYDGGGCDKHDDNDEVDGEGEEDDDGDEEEEEDDVEYGEDRMSPPHGGVSARALERRLHELLQKRQQDRIVELESALDSAQRRLHEKEREVVWWRDAAKLVSHRRDESRRIATASAR

SEQ ID NO: 73020 - protein, 100 aa, Zea mays
  Coding DNA Sequence Number=SeqID_31241
MVLPSAVGGCLHGKNMQCSALTISFGKPYTSHELPPLEVKSGRMPTDVEVYMQGHRGSDSQNLDVLWTQTTTDHLASYGQDYDWRSQPIDPQTAYASTGG

SEQ ID NO: 73021 - protein, 263 aa, Zea mays
  Coding DNA Sequence Number=SeqID_31242
MRATRTVPMVYRTVTVHCPMCLLTPALTSARADVHCSDSLFLCIRPLAWYSRYSAGTPDSPVLHPDSPVNYSGVAPRIPEGGKFGVDLPGAPDTVMWCTGQSGVSLFPFQLRRMGNEDGIATGGRELPIPNAIGKRPSSPQQDMPNGLLDRPLRGAPPPTSSIMSHESTPLKVYFRKNLKHQQQHDQLAQNGSDAKDEGLTRRSRKEDFINNICRRPSGMGRDGNGCDLSPYSREKNLLGTDLGTSMYPWIRIRVAFDILGYF

SEQ ID NO: 73022 - protein, 232 aa, Zea mays
  Coding DNA Sequence Number=SeqID_31243
  Gene Ontology: Mol. function=RNA-directed DNA polymerase activity; Cellular component=chromatin; Biological process=RNA-dependent DNA replication
  Homolog annotation: Hit_ID=UPI00004C1733; Match level="QueryCoverage =88%, HitCoverage=17%, E-value=5e-85, Identity=69%"; Hit description =UPI00004C1733 related cluster
MLRRHFHKAGPPAEGGRARDDDKKEDHQTGEFPEVRDCFMIYGGQAANASTHHHKQERREVCSVKVAAPVYLDWSDKPITFDQADHPDRVLSPGKYLLVSTPSSATETLTFEVVGFRGTYHAVLGRPCYAKFMVVPNYTYLKLKMPGPNGVITVGPTYRHAYECDVECVEYAEALAESEALIADLESLSKEAPDVKRHADNFEPAETVKSVPLDPSNDASKEIRIGSKLDPK

SEQ ID NO: 73023 - protein, 586 aa, Zea mays
  Coding DNA Sequence Number=SeqID_31244
  Gene Ontology: Mol. function=receptor activity; Cellular component =integral to membrane; Biological process=transport
  Homolog annotation: Hit_ID=Q53N02; Match level="QueryCoverage=97%, HitCoverage=100%, E-value=0.0, Identity=60%"; Hit description =Expressed protein
  Pfam annotation: Domain name=Ank; Domain location=131-163; Score =10.2; E_value=1.1; Accession=PF00023.20; Description=Ankyrin repeat
  Pfam annotation: Domain name=Ank; Domain location=165-196; Score=8.4; E_value=1.9; Accession=PF00023.20; Description=Ankyrin repeat
  Pfam annotation: Domain name=Ank; Domain location=197-229; Score =14.8; E_value=0.23; Accession=PF00023.20; Description=Ankyrin repeat
  Pfam annotation: Domain name=Ank; Domain location=231-263; Score =16.0; E_value=0.14; Accession=PF00023.20; Description=Ankyrin repeat
  Pfam annotation: Domain name=Ank; Domain location=299-334; Score=9.8; E_value=1.2; Accession=PF00023.20; Description=Ankyrin repeat
  Pfam annotation: Domain name=Ank; Domain location=335-368; Score =17.5; E_value=0.048; Accession=PF00023.20; Description=Ankyrin repeat
  Pfam annotation: Domain name=Ank; Domain location=49-79; Score=14.0; E_value=0.29; Accession=PF00023.20; Description=Ankyrin repeat
  Pfam annotation: Domain name=Ank; Domain location=92-124; Score=12.0; E_value=0.57; Accession=PF00023.20; Description=Ankyrin repeat
  Pfam module annotation: Pfam domain module=Ank::Ank::Ank::Ank::Ank::An k::Ank::Ank; Domain location=131-163::165-196::197-229::231-263::299 -334::335-368::49-79::92-124
MTNSSSTPPRSVSVAIQQRLLGAAVSGNSAEMKHMALRAPGVLLGTTPQGNTCLHIACIYGHERFCRDVLALTTNSQQSPAAAPLLVTINADGETPLLAAVASGHVSVALFILGRCREERLSEAILTQDKRGFNALHHAIRNGHRGLALQLVDAEPGLSKAVNKHDESPLFIAVMRNYADVAEKLLEIPDSAHVGAYGYNALHAAVRSGNPVVAKRIMETRPELARQEDKHKATPMHMAVHWDKIDVLRVLLEHDWSLGYVLDSSGIPILASVASRGYVGAAQELLRHCPDAPYAPTNGLLTCLHQAVQGGHMELLEFFLRSKHLRKLVNMRDGAEETPLHDAVRKCNPKIVNALLQHPDTDVTVLNRSGNPATWLLRGDHAKTLNWNEVSMLMLKADPDAANDTYNLHKQIKDRVTSESRKDIKLLTQTYTSNTSLVAILIATITFAAAFTLPGGYDNDAGSEGLPIMSRKVAFQAFLISDCLAMCSSLAVAFISILARWEDFEFLVYYRSFTKKLMWVSYVATTIAFATGLYTVLAPRLLWLAITICLMSVLLPFLTWLLGEWPVLKLRFHLGKTFKSELLDMV

SEQ ID NO: 73024 - protein, 116 aa, Zea mays
  Coding DNA Sequence Number=SeqID_31245
MATETESFYSAQSSPEPEVAPMAPNVEPASQPAEPAAPQPVEPASQPAEPAARPADRLEILIELTQRTGLDGGASSATSSASADRTLSKQVFTLRADTLGPPHALRLNVVPCVPHA

SEQ ID NO: 73025 - protein, 564 aa, Zea mays
  Coding DNA Sequence Number=SeqID_31246
  Homolog annotation: Hit_ID=Q10MF5; Match level="QueryCoverage=77%, HitCoverage=92%, E-value=2e-46, Identity=33%"; Hit description =Expressed protein
  Pfam annotation: Domain name=DUF247; Domain location=72-550; Score =311.0; E_value=2.2e-90; Accession=PF03140.6; Description=Plant protein of unknown function
MATETESFYSAQSSPEPEVAPMAPNVEPASQPAKPAAPQPVEPASQPAEPAARPADRLEILIERGLGQRREGESSMMTIFRVPAHVRDASKELYEPRLVSIGPYYRDRAALRTMEQHKWRYMRELMRRPHSLPPLDSYVRAVRNVEQEARCCYSERTDIFGSTAQSEPSGGGEIEEAHSPGFAEMLMLDGCFILEFFLKWHKSEKDKLCDVAWGLTLLHSDLLLLENQIPFFVLEALLHVVYPTATRLHLFMLIIPYLKFSYYKLSTPEDLDRSEIQPQHLLHLFYEAIMPGDDETASAHQDSTPSWMVQLREMIIRLKKAASTRFVFIRDMPRVPHWMKTTLPATLLRKVGAWFSKLLSLIRSTSADSTPTLVVPSVTQLREAGVRFEKKESPRHMFDIAFDRNTGVLEMPQMELDYANKALLVNLVAFEQTRDLPGAAKRLSSYVALVGALVRTGKDVEHLQKHDIIQNLLDGDDEAATNFFQHLGDCSSLDYKNHMFADMFKELRDFYDSSWQRHRAKFLRDHCSSPWAVLALVVAICGFCFVLFKLSTTIFNLAHPDCHC

SEQ ID NO: 73026 - protein, 71 aa, Zea mays
  Coding DNA Sequence Number=SeqID_31247
MAPGGGAAGITPGEGEGGAAIAASGRRDNRGADTGSARLGLERIAEGREGRTVHHMDVYVYTTVLKSSIDI

SEQ ID NO: 73027 - protein, 139 aa, Zea mays
  Coding DNA Sequence Number=SeqID_31248
MRHPRRASLWPGTGAASLEAEGGTRRASPSVVLQTSLIVLRHNKVSCTAGDANVDHPIRFGMPATAYSELLDRRAISGAANISYRPRAHQAWLEAGISGDFPLDSLYNKYCERMLVFHKIIVQLMKIQDIVTAAEFFLL

SEQ ID NO: 73028 - protein, 71 aa, Zea mays
  Coding DNA Sequence Number=SeqID_31249
MVADSFELWGPKRGRNGAYTLLYIAPDEPVQGWMNELVRFPPMYSGELRLKLWKANVANHILHYGCLLQVG

SEQ ID NO: 73029 - protein, 170 aa, Zea mays
  Coding DNA Sequence Number=SeqID_31250
MKGILTQSGNSCEGYPEGAKKRNSKKCLGFVSWSYIDTRDLTSMLLTMKGKNEEEAAVKTLAPVAPRVFGTPSSEEGNESPSLRLDVEGIAGTPLPKMKKAPEPKKAVKEPPKAIELGVKAISPSERESREEIDFYIRHIADGELNVEVVANMKDHTEASGILLGQLSSR

SEQ ID NO: 73030 - protein, 265 aa, Zea mays
  Coding DNA Sequence Number=SeqID_31251
  Gene Ontology: Cellular component=integral to membrane
  Homolog annotation: Hit_ID=Q6YWF4; Match level="QueryCoverage=75%, HitCoverage=60%, E-value=5e-33, Identity=42%"; Hit description =Rhomboid family protein-like
  Subcellular localization annotation: CTP_CleavageSite=57; ConfidenceScore=5.02e-01
MEIGDLVQEPSNSSPGPISPSARSALPARTPQIPNGHAYRRLQVGAGCTASCGPEHRAELKRHLMAGVYKWKLASYKQMERTKVASERLSLRSNSTKHHDTVHLGLGHFGKDGNLICRSLKSILKPKARQYAIVKVHNKDVDEGCSSKDNEIISSPSDRKEGSQLRALESYFSKFNPSQQLYSLPQKKHKSGPSSSNEVDAIIADEDANLKNRADSLQVQIDRGHTGIKSNQNTPNEVYKEYLIFDEKSLLDMHTDDQASGFCLT

SEQ ID NO: 73031 - protein, 148 aa, Zea mays
  Coding DNA Sequence Number=SeqID_31252
MTVAAQATIPSFLRSRSLKDGSPETITHDAARSFHFHDAHDTLLRRALDQYTWSIEYSCVVYQHSRNPRISSTVNLDIVLNTELDHTIDELSRARAEIAELRAEHVKCHHQEDGFPAPTGTQHPYRSPLRGHYAYGTPDYRTNIDMDP

SEQ ID NO: 73032 - protein, 74 aa, Zea mays
  Coding DNA Sequence Number=SeqID_31253
MASEPLGLWNRGTGSARTWLNGSDDSKEEVSSEEEDSSDSEEGGNDEGDGDGSGDDDGKGGGEGTDGDCDDAGG

SEQ ID NO: 73033 - protein, 283 aa, Zea mays
  Coding DNA Sequence Number=SeqID_31254
  Homolog annotation: Hit_ID=Q9LWV8; Match level="QueryCoverage=98%, HitCoverage=37%, E-value=3e-56, Identity=48%"; Hit description =Putative SEU1 protein
  Subcellular localization annotation: CTP_CleavageSite=68; ConfidenceScore=5.10e-01
MAKFQNMHDSRQLMAAANLANNQSNTKLMGTKEEASASATNQTPGVGAIGNNALQHATPLNSYQNMLRSSSANPVLLQQEASSVFKGPTAMHSGIQLEAARSFRGPNQVQFQHPAAIQQQQPMPQQSNFQGFGGVNPQYQHHVLNQLLQEVKNNNHVKAQQLPPDAPKASGGLAPGVAIPNVAAAGEQGQHINSNTRDHNGAVKGAAPAGTGPSNVINNTASMPPGRNNSFKSVSSSPAAATGGIAVNSKVDDSFHQLEDLDLDGLITNELMESGLFGAGQGW

SEQ ID NO: 73034 - protein, 148 aa, Zea mays
  Coding DNA Sequence Number=SeqID_31255
MAGLLQHASTSGQACEDVVVALTLKIAAGGSAKHTLTYSLSFDPILDPPLEVSALDDALKSEMPDSRCLFPLWRESIPAAINHSCRDHGHNCAQDMSWSLPSEDSESPLIVLTSHMPTLSEVSCHHRIRPLADGIVLRRTFHYIQIST

SEQ ID NO: 73035 - protein, 542 aa, Zea mays
  Coding DNA Sequence Number=SeqID_31256
  Gene Ontology: Mol. function=transferase activity; Cellular component= mitochondrion; Biological process=metabolic process
  Homolog annotation: Hit_ID=Q9LWW3; Match level="QueryCoverage=98%, HitCoverage=98%, E-value=0.0, Identity=63%"; Hit description=Salt -inducible protein-like
  Pfam annotation: Domain name=PPR; Domain location=165-199; Score=0.8; E_value=6.1; Accession=PF01535.11; Description=PPR repeat
  Pfam annotation: Domain name=PPR; Domain location=201-235; Score =38.0; E_value=3.3e-08; Accession=PF01535.11; Description=PPR repeat
  Pfam annotation: Domain name=PPR; Domain location=236-270; Score =38.4; E_value=2.4e-08; Accession=PF01535.11; Description=PPR repeat
  Pfam annotation: Domain name=PPR; Domain location=271-305; Score =39.9; E_value=8.7e-09; Accession=PF01535.11; Description=PPR repeat
  Pfam annotation: Domain name=PPR; Domain location=306-340; Score =39.5; E_value=1.2e-08; Accession=PF01535.11; Description=PPR repeat
  Pfam annotation: Domain name=PPR; Domain location=341-375; Score =18.6; E_value=0.022; Accession=PF01535.11; Description=PPR repeat
  Pfam annotation: Domain name=PPR; Domain location=376-409; Score =16.7; E_value=0.078; Accession=PF01535.11; Description=PPR repeat
  Pfam annotation: Domain name=PPR; Domain location=410-444; Score =39.1; E_value=1.5e-08; Accession=PF01535.11; Description=PPR repeat
  Pfam annotation: Domain name=PPR; Domain location=445-479; Score =40.2; E_value=6.9e-09; Accession=PF01535.11; Description=PPR repeat
  Pfam module annotation: Pfam domain module=PPR::PPR::PPR::PPR::PPR::PP R::PPR::PPR::PPR; Domain location=165-199::201-235::236-270::271 -305::306-340::341-375::376-409::410-444::445-479
  Subcellular localization annotation: CTP_CleavageSite=67; ConfidenceScore=5.26e-01
MLRAGSTHRWSPGARAFSTAPATRTTVPLAHLADLPASLPESGYTVTPPVQPWPRRLTARSLSRLLLGAATPELAVLALRHALFHAAHPLPPSLPVFAAALSRLSHADAGAAARHLPPVLSLLRASRLPAFSDRPFLPLLRALRPLPSLRLFLSLPSFNSRPSTRSFNALLHSLVSARRLRLAAALFRAAPTKLYITPNLVSCNILLKGLVGIGDLNSALKVLDEMIGWGIVPDVVTYTTVLTAYCAKGDLEGAQQLFDDIIASGRRPDATMYTVLIDGYCHHRKLQDAARIMDEMGAAGVQPNEVTYSVVIEACCKERKSTEARDLTREMLGAGYVPDTPLCAKVVDVLCQDGKAGEANEMWRQMVKKSVPPDNTVVSTLIYWLCKKGMVQEARKLFDELERGFLPSLLTYNSLIIGLCENGELQEAGRVWDDMVERRYEPNAMTYEALIKGFCKIGKSNEGYALFKEMMSRGCTPSKFLYQALVDSLSKPSHDDTVCTIVEAAALRGQDFLDGHSWEIFIKKMVDTNETWKKYLDLVLNM

SEQ ID NO: 73036 - protein, 126 aa, Zea mays
  Coding DNA Sequence Number=SeqID_31257
  Subcellular localization annotation: CTP_CleavageSite=63; ConfidenceScore=5.00e-01
MVINTKTHVICFPRFNSKTPTLEAIRQSGASPDQSGALAPIMSFYMLYANLVRIATETVRCASSEMAKSAPLLGWSASLEGSPDNSTRTCCTAPVSDPWTSHEFGARIQGHKVLKAMWEDLKRPSL

SEQ ID NO: 73037 - protein, 165 aa, Zea mays
  Coding DNA Sequence Number=SeqID_31258
MEWLYVQWTTSAGTAEAGMREIRYARERTTAKNALEEDDGLHPVRAGTTGPARVPGQGRKGVGRGRTRVGLRSKRNRVSASLGTTISESAHPYKYAGEKVDVQGFDIFKGKVSVADMISFSPSEVASSKYDGALKSWENSITLVNIIRNEIRDGQLSFRGKRVLE

SEQ ID NO: 73038 - protein, 89 aa, Zea mays
  Coding DNA Sequence Number=SeqID_31259
MVHPEVGLVRVTGTLSSDSGCSTIEPSRLGERASTLSKPSIMGVQLRVVDRDRRSGKGQLGLGLGRRCSGAVDLDMDGLMGKGLRIHVC

SEQ ID NO: 73039 - protein, 52 aa, Zea mays
  Coding DNA Sequence Number=SeqID_31260
MANVIGELLPGIGAPRLAVDGVLHLMTQGWSLQRQVDIRRLVAIDCHVTVGG

SEQ ID NO: 73040 - protein, 408 aa, Zea mays
  Coding DNA Sequence Number=SeqID_31261
  Gene Ontology: Mol. function=nutrient reservoir activity; Cellular component=cellulose and pectin-containing cell wall
  Homolog annotation: Hit_ID=Q43557; Match level="QueryCoverage=89%, HitCoverage=90%, E-value=4e-77, Identity=44%"; Hit description =Unidentified precursor
  Pfam annotation: Domain name=DUF642; Domain location=49-399; Score =455.2; E_value=8.7e-134; Accession=PF04862.3; Description=Protein of unknown function, DUF642
MVIDRRSVQRAALVVLPLVLFVAARAVSAVGDGPLQNGNFEDSPDQSQMSGSVVAGEHAISGWKTSGHIELVCSGQKQGDMVLTVPDGAQALRLGAGASIEQQISGLTQGSYYSLTFAASRTCSQDETLSVTAAPAPSGAGSPAPAQTGELPMQTVYTSIGWDSYSWAFRAEGAGLMSVVITHNCGQEEDPACGPIVDAFAIKALHDQPPDQAAADNNMLRNGGFEEGPYIPPGSPWGVLVPPVDEDPVSPLPGWKVMAYKKSVRYVDSAHFAVPRGARAVELVSGVEAALLQEVDTTVEGSWYRLEFSAGDAANGCASSSDGSSSSGMKLKAYAGTSETTVDIDFRGAGGSNRGKIEFRAAASPTRVVFVSLGYHTKSDNSGTLCGPVVDDVSLVPIPPPYARRLLL

SEQ ID NO: 73041 - protein, 188 aa, Zea mays
  Coding DNA Sequence Number=SeqID_31262
  Gene Ontology: Cellular component=integral to membrane
  Homolog annotation: Hit_ID=Q8H399; Match level="QueryCoverage=76%, HitCoverage=32%, E-value=8e-28, Identity=47%"; Hit description =Putative membrane protein PTM1
  Subcellular localization annotation: CTP_CleavageSite=57; ConfidenceScore=5.47e-01
MDAPDSTVTTKYAPFTVQCPSHIKSTGGGRPRRRVLRRHGGPRGQRERRHRERPLAVADEEFVPGTPCGSPQRCVRVLDLQLVVEDAEQAQVEKRMTTKLEMYRRLNNALIIAVAMSLVWITFESAARYAYLDDEDRDMEDTRPLIRPGPLSYVDNRAISVSKDTTTIILRTDSRVYAKAADDGGKWV

SEQ ID NO: 73042 - protein, 253 aa, Zea mays
  Coding DNA Sequence Number=SeqID_31263
  Subcellular localization annotation: CTP_CleavageSite=38; ConfidenceScore=5.18e-01
ADDVLDFTIEEVKKLQDALNKLLRRAKSKSSSSSSSSRGSGASATDEDRRASHSQLPLDRFLNCPSSLEVDRRVSLIRHDGGGESGEFSPDTQIILSKARDLFVHSNGTAIRKKSFKFLLKKMFVCHGGFAPAPSLKDPVESRMEKLFRTMLQKKMNARPSNAAVSSRKYYLDDKPSGRMMTRDGRRRHDGEDDDEKGSDRIKWDKTDTDCNSLLVLKFCGGLIFISQLTSGGDDLESEEKSTTIIRIKGVFS

SEQ ID NO: 73043 - protein, 459 aa, Zea mays
  Coding DNA Sequence Number=SeqID_31264
  Gene Ontology: Mol. function=protein serine/threonine kinase activity; Cellular component=membrane; Biological process=protein amino acid phosphorylation
  Homolog annotation: Hit_ID=Q8H3A6; Match level="QueryCoverage=88%, HitCoverage=89%, E-value=0.0, Identity=79%"; Hit description =Putative auxin-regulated dual specificity cytosolic kinase
  Pfam annotation: Domain name=Pkinase; Domain location=86-363; Score =124.7; E_value=2.6e-34; Accession=PF00069.15; Description=Protein kinase domain
  Pfam annotation: Domain name=Pkinase_Tyr; Domain location=86-363; Score=137.8; E_value=3e-38; Accession=PF07714.7; Description=Protein tyrosine kinase
  Pfam module annotation: Pfam domain module=Pkinase::Pkinase_Tyr; Domain location=86-363::86-363
  Subcellular localization annotation: CTP_CleavageSite=63; ConfidenceScore=5.04e-01
MRARKAKTATSSSFWRSLLGGCLGGGGGGGRAAGDRQRKVRPGGGGGRLSFTDLSGAADQDLSASLVGSNLHVFSVAELREATRGFVSGNFLGEGGFGPVYRGFVADGAKKGLKAQAIAVKLWDPEGAQGHKEWLAEVIFLGQLRHPNLVKLVGYCCEDEHRLLVYEYMEHGSLENHLFKQIPAVLPWSTRLNIAVGAAKGLAFLHDAEKPVIYRDFKASNILLDSDYKAKLSDFGLAKDGPEGDDTHVSTRVMGTHGYAAPEYIMTGHLTAKSDVYSFGVVLLEILTGRRSVDKTRPSREQNLVDYARPCLKDPLRLGRIMDPAMEGQYSPRAAQSAALVAYRCLSASPKNRPDMSAVVRALEPLLDLHDDVPVAPLGHAGPVVLFVAAAAEEEKKERAPRKDVHVHRRRPMSPKASPRKRPGTGAGTKEEFWVWHLPVPADHKTRPTLGGGVVQACA

SEQ ID NO: 73044 - protein, 99 aa, Zea mays
  Coding DNA Sequence Number=SeqID_31265
MDAATKGNKNLYTVTPSSFDLALFQCILGTQSAPQMTELVITRGRLEHGLQRTAYHDKKPDKGLTVPMGHVMEAVTSVLTPMAAQAPMRVMSAGFALKA

SEQ ID NO: 73045 - protein, 185 aa, Zea mays
  Coding DNA Sequence Number=SeqID_31266
MEMVESEMSDFCVTDELSRGYFQDFAEIRENAGKIATASKVIIPEVDAVKFPDLDVDSPDGGALHLPLVAPTLQADDGEAGDHKIPGASLVCLSFRASSLVSSAPLLILSLAKISPNRPLALQPLGAFPPTIGMASTVARGPPVAAKAAPVDSRDGNISKLDRILHISAHDHIRGCNQYLRLDWI

SEQ ID NO: 73046 - protein, 126 aa, Zea mays
  Coding DNA Sequence Number=SeqID_31267
MSSGKVFFGSSALGMAMGWVRIGLLSVARDAALLMLAVVGPCRFPPEGADGGHQQPSEVKTRLPAMDTRDKDHGGETHWRRNSSGEVVVDVGEVTTVTWRWLELVRLRVQAGELIGDEDSGLTEST

SEQ ID NO: 73047 - protein, 60 aa, Zea mays
  Coding DNA Sequence Number=SeqID_31268
MELGNSTKFGVKTSIGATSGAPDIVRCLGQGTHELAALEFFLESLRYNSPDCPGLSDPSD

SEQ ID NO: 73048 - protein, 76 aa, Zea mays
  Coding DNA Sequence Number=SeqID_31269
MDRLIPATPVVESYLAVTARTSRSQPRPSPDLPHRREYILVPEQGVAQEVAPDPAPEPALEDLPAPALEGKPRFYA

SEQ ID NO: 73049 - protein, 254 aa, Zea mays
  Coding DNA Sequence Number=SeqID_31270
  Gene Ontology: Mol. function=protein serine/threonine kinase activity; Cellular component=mitochondrion; Biological process=two -component signal transduction system (phosphorelay)
  Homolog annotation: Hit_ID=Q6K624; Match level="QueryCoverage=56%, HitCoverage=24%, E-value=1e-25, Identity=40%"; Hit description=BRI1 -KD interacting protein 135
METFVMIIIKRLKDANLFVSQGGLIILAQEVEECLLKVEQSPPESTSNALQVATAALDVFSLIVEAFKHLDDIESPFFGRRTSIFDTVAKVRSCVVMLDLECDDLINDMFHHFLRTVNSGHSEAIICCMETIIMRLVIEESEDVQPQIASCLLQNVRKEEKVSTCACSASRNLGLQTLHLTPKLVSGSDHGNGVDWWAFGVFLYELVCGRTPFKGHTKEATLKNILSKQTTYLGFSLSGFARHFVLVLLTYLFA

SEQ ID NO: 73050 - protein, 89 aa, Zea mays
  Coding DNA Sequence Number=SeqID_31271
MAMHLYERFQQLDQGAKVKSGAPDHALAAPTVMEAMVEQREEMRVMRGDHHHCRNVCVEAGAPVVVVVNGEADDGEVGMGSVGGAEQMG

SEQ ID NO: 73051 - protein, 212 aa, Zea mays
  Coding DNA Sequence Number=SeqID_31272
  Gene Ontology: Mol. function=oxidoreductase activity, acting on the CH-CH group of donors; Cellular component=mitochondrion; Biological process=tricarboxylic acid cycle
  Homolog annotation: Hit_ID=Q6ZDY8; Match level="QueryCoverage=62%, HitCoverage=28%, E-value=3e-57, Identity=68%"; Hit description =Succinate dehydrogenase [ubiquinone] flavoprotein subunit, mitochondrial precursor
SVQPTSYQQRPEKITRERSRGEGGILRNSEGPLKDHIYLHLNHLPPEVLKERLPGISETAAIFAGVDVTKEPIPVLPTVHYNMGGIPTNYHGEVVDIKGDNPDAVIPGLMAAGEAACASVHGANRLGANSLLDIVVLAELVQTGEAMKGLDIRKVLEAPKEVKCVPMKNVLEPGDIPTLAELGLTTPPGMAQVQLERFLAFSTMMRSVVEPV

SEQ ID NO: 73052 - protein, 779 aa, Zea mays
  Coding DNA Sequence Number=SeqID_31273
  Gene Ontology: Mol. function=protein serine/threonine kinase activity; Cellular component=cell surface; Biological process =protein amino acid phosphorylation
  Homolog annotation: Hit_ID=Q8LMB0; Match level="QueryCoverage=99%, HitCoverage=96%, E-value=0.0, Identity=54%"; Hit description =Putative S-receptor kinase
  Pfam annotation: Domain name=B_lectin; Domain location=53-168; Score =125.2; E_value=1.8e-34; Accession=PF01453.15; Description=D-mannose binding lectin
  Pfam annotation: Domain name=PAN_2; Domain location=325-388; Score =79.6; E_value=1e-20; Accession=PF08276.2; Description=PAN-like domain
  Pfam annotation: Domain name=Pkinase; Domain location=477-756; Score =154.1; E_value=3.6e-43; Accession=PF00069.15; Description=Protein kinase domain
  Pfam annotation: Domain name=Pkinase_Tyr; Domain location=478-756; Score=85.9; E_value=1.3e-22; Accession=PF07714.7; Description =Protein tyrosine kinase
  Pfam annotation: Domain name=S_locus_glycop; Domain location=183-308; Score=105.9; E_value=1.2e-28; Accession=PF00954.11; Description=S -locus glycoprotein family
  Pfam module annotation: Pfam domain module=B_lectin::PAN _2::Pkinase::Pkinase_Tyr::S_locus_glycop; Domain location=53-168::325- 388::477-756::478-756::183-308
TDTLSRGGSLAGDARLVSSNGKYALGFFETNSNNPTHNASNSYLGIWFHKVPKLTPVWSANGDNPVSSPASPELMISDDGNLVIIADDGTKVWWSTQANITANTTVVVAVLLADGNLVLRSSSNSSDVFWQSFDHPTDTLLPGAKLGRNKVTGLDRRFVSRRNSNDQAPGVYSMGLGPGALDESMRLSWRSTEYWSSGEWNGRYFDAIPEMSGPRYCKYMFVTSGPEFYFSYTLVNESTAFQVVLDVSGQWKVRVWDWDRNDWITFSYSPRSKCDVYAVCGAYGICSNNAGPLCSCMKGFSVRSPEDWEMEDRAGGCIRDTPLDCNATSMTDKFYPMPFSRLPSNGMGLQNATSAESCEGSCLSSCSCTAYSYGQGGCSLWHDDLTNVAADDDTGETLYLRLAAKEVQSWQDRHRHGMVTGVSVAVGVSTATVITLVLVSLIVMMIWRRSSSHPADSDQGGIGIIAFRYADIKRATNNFSEKLGTGGFGSVFKGCLGESVAIAVKRLDGAHQGEKQFRSEVSSIGIIQHVNLVKLVGFCCEGDRRLLVYEHMPNRSLDFHLFHQSAHGGGTTGLRWDIRYQIALGVARGIAYLHHSCRDCIIHCDIKPQNILLDASFVPKIADFGMAKFLGRDFSRVLTTMRGTVGYLAPEWISGTAITSKVDVYSYGMVLLDIVSGRRNAGREASTDGDCCHAKCCFPVQVVDKLLNGGVGSLVDASLGGDVNLDDVERVCRVACWCVQDNEYDRPTMVEVVQFLEGLSEPDMPPMPTFLHAIAGGSP

SEQ ID NO: 73053 - protein, 138 aa, Zea mays
  Coding DNA Sequence Number=SeqID_31274
MATRPTSSLLMSYGMDYHVFFTILIIVSTTVTQRAPPSDRLGYAFEPRTLASALCSVKDAKTGTGCPPLVQVNSKYEGHADGHGSLLEAIKGGAQGFIQGGEHYTSFHPPQRYWQLPQSPGLGNLSLSRPACIPYESI

SEQ ID NO: 73054 - protein, 797 aa, Zea mays
  Coding DNA Sequence Number=SeqID_31275
  Gene Ontology: Mol. function=protein serine/threonine kinase activity; Cellular component=cell surface; Biological process =protein amino acid phosphorylation
  Homolog annotation: Hit_ID=Q8LMB0; Match level="QueryCoverage=99%, HitCoverage=98%, E-value=0.0, Identity=56%"; Hit description =Putative S-receptor kinase
  Pfam annotation: Domain name=B_lectin; Domain location=78-191; Score =122.4; E_value=1.3e-33; Accession=PF01453.15; Description=D-mannose binding lectin
  Pfam annotation: Domain name=PAN_2; Domain location=349-412; Score =81.4; E_value=2.9e-21; Accession=PF08276.2; Description=PAN-like domain
  Pfam annotation: Domain name=Pkinase; Domain location=495-774; Score =156.0; E_value=9.9e-44; Accession=PF00069.15; Description=Protein kinase domain
  Pfam annotation: Domain name=Pkinase_Tyr; Domain location=496-774; Score=98.8; E_value=1.7e-26; Accession=PF07714.7; Description =Protein tyrosine kinase
  Pfam annotation: Domain name=S_locus_glycop; Domain location=206-332; Score=124.9; E_value=2.3e-34; Accession=PF00954.11; Description=S -locus glycoprotein family
  Pfam module annotation: Pfam domain module=B_lectin::PAN _2::Pkinase::Pkinase_Tyr::S_locus_glycop; Domain location=78-191::349- 412::495-774::496-774::206-332
MHLLAVLCGVIFSLLQLHTPTRSAATDTLSRGGSLAGDETLVSSNGKFALGFFETKSDNSTHNASNSYLGIWFHKVPRLTPVWSANGDNPVSSTASPELMISDDGNLVIIAATGTKVWSTQANITANISVVAVLLADGNLVLRSSTNSSDVFWQSFDHPTDTLLPGAKLGRNKATGLDRRFVSRRNSNDQAPGVYSIGLAPDGVDESMRLSWRSSTEYWSSGEWNGRYFNGIPEMSDPSYCNYMFVSSGPEFYFSYTLVNESTAFQVVLDVSGQWMVRVWDWDRNDWITFSYSPRSKCDVYAVCGAYAVCSSNADPVCSCMKGFSVRSPEDWEMEDRTGGCIRDTPLDCNATSMADRFYPMPFSRLPSNGMGIQNATSAKSCEGSCLSSCSCTAYSYGQGGCSLWHDDLTNVAPDDTGETLYLRLAAKEVQSWKHHRHGMVIGVAVGVSAVTATLVFIFLIWRRSSRRSSHPADSDQGGIGIIAFRYADIKRATNNFTEKLGTGGFGSVFKGCLGESVAIAVKRLDGAHQGEKQFRSEVSSIGIIQHVNLVKLVGFCCEGDRRLLVYEHMPNRSLDVHLFHQSAHGSGTTGLRWDIRYQIALGVARGLAYLHHSCQDCIIHCDIKPQNILLDASFVPKIADFGMAKFLGRDFSRVLTTMRGTVGYLAPEWISGTAITSKVDVYSYGMVLLEIVSGRRNAGREASTDDDCCHAKCCFPVQVVDKLLNGGVESVVDASLGGDVNLDDVERVCRVACWCVQDNEYDRPTMVEVVQFLEGLSEPDMPPMPRLLHAIAGGSP

SEQ ID NO: 73055 - protein, 62 aa, Zea mays
  Coding DNA Sequence Number=SeqID_31276
  Subcellular localization annotation: CTP_CleavageSite=30; ConfidenceScore=5.12e-01
MASILNPPPLQANDSGNQGGGGDPAPPPPRQDQSSPLQGTRAGVARLTNVALHQGRVDQFYV

SEQ ID NO: 73056 - protein, 83 aa, Zea mays
  Coding DNA Sequence Number=SeqID_31277
  Subcellular localization annotation: CTP_CleavageSite=6; ConfidenceScore=5.11e-01
MARTARQSSYVPRTTRREVKYSTTRPPPQAPGAGFFAARRGTGTRMLDRAEDPERRGGDAEAGGRRAAPGRRRSPAKAGTGGP

SEQ ID NO: 73057 - protein, 212 aa, Zea mays
  Coding DNA Sequence Number=SeqID_31278
  Subcellular localization annotation: CTP_CleavageSite=52; ConfidenceScore=5.54e-01
LDSPPGGTTTTEPSSPARTPQRTPSKPRAIRKLRYRLTAQYPTSPISIDPTNSSARAPLAFLPSPLRASSCTAATHTNNSSLPSTQVISTGEVSDLGLGTSGGRTGGVRALPVGDCGPATPRFLVVVGRPPWIHATSWTEGFSPRIEVRFSVIPFVFPSVWYRTIQIRSLAPYGVRCGHASHGAAAPGSRAVGQLVGFEQESVPPSDFVWAV

SEQ ID NO: 73058 - protein, 65 aa, Zea mays
  Coding DNA Sequence Number=SeqID_31279
MADFWGSSWIEGQAPRTIAPNLYKKARRKSITVSKALRNNYWIQFCAPFTREDEIRIGYTKYRVT

SEQ ID NO: 73059 - protein, 190 aa, Zea mays
  Coding DNA Sequence Number=SeqID_31280
MDLSVNMCLLGQAALLLDLLSGLPAVSELTLSLALLGYRGGQSERALIKSLLKAAENLVSVTLYIHPILQNSLLLPTDAISEIKDYPRASTRRFPPSEDIKESKDDLFPWDGADESSEGEEDDASSEEDPMDDDDDDEGDKDTDKGAGDTGGSISSDGDSDSDDDDDWEDDDDGNDNGGGEDGMDPPCKC

SEQ ID NO: 73060 - protein, 111 aa, Zea mays
  Coding DNA Sequence Number=SeqID_31281
MRNRIPNITEVAMNEDFYRGSHDEAFVHAILQWDLATSEKLVRDIDRYITATNEPTTSSTSEKYMSMNKEDVLREFKNSIGHGRPFPELPTPPARQNHNPPPLPPLWEDNS

SEQ ID NO: 73061 - protein, 49 aa, Zea mays
  Coding DNA Sequence Number=SeqID_31282
MKKLMRNTLTMVTMSTESSDSPVIFLYGKLPKIFLLYFDYDTIKTLKFG

SEQ ID NO: 73062 - protein, 97 aa, Zea mays
  Coding DNA Sequence Number=SeqID_31283
MGWFEAMKSLGMAKYHKPTCPTALRPTLLRKLKDKEYQLVDPMGALLKIPSQECVQVESQLGAPLGGHDTSYYLRILASSPDTSRPYPRGAKYQGRS

SEQ ID NO: 73063 - protein, 59 aa, Zea mays
  Coding DNA Sequence Number=SeqID_31284
MTMLLVPQTLMLSNVLLDTSSTGYGGPLLGTEDRFWELRIAFGNYPSSSRLLLELPPAV

SEQ ID NO: 73064 - protein, 86 aa, Zea mays
  Coding DNA Sequence Number=SeqID_31285
MDMSRMETLYHADKEKIEALILELAGRVASSSNQQIRKLQWRCKVSHQISSQLTNTKGCCNHTVVVQNKQFATDSHPRGPGYAKGC

SEQ ID NO: 73065 - protein, 430 aa, Zea mays
  Coding DNA Sequence Number=SeqID_31286
  Gene Ontology: Mol. function=transferase activity; Biological process= flavonoid biosynthetic process
  Homolog annotation: Hit_ID=Q7XXN5; Match level="QueryCoverage=99%, HitCoverage=100%, E-value=0.0, Identity=77%"; Hit description =Putative anthranilate N-benzoyltransferase
  Pfam annotation: Domain name=Transferase; Domain location=1-429; Score=173.4; E_value=5.5e-49; Accession=PF02458.6; Description =Transferase family
MEVKVLSSKLVKPAYNAGAGPAPAVSADEYTPLTIFDVVTYKMQMAIIYAFPPPAPSTAAIENGLAAVLAEYRAFAGQLGVAPDGTPAVLLNDRGARLVEAAVDADLVDMAPAKPTPELLRLHPDLEEEELQEVVLLQLTRFRCGSLAVGFTSNHVVADGHATSNFLVAWGRATRGLPTGLPPVPRQAGLFKPRPSPRVDFDHRSREWYLPSPAETEKQHGHGREGAAAAESIVIQKAHFTKDFIARLRAKASEGRGRPFSRFETVLAHLWRAMTRARGLSPDETSQIRLSVDGRHRLGLPAEYFGNLVLWAFPTATVIHDEVASVDGSYFRSFIDFATSGAAEREGLAPSAVCKDVLCPNVEVDSWLTFPFYELDFGTGSPTYFMPSYFPTEGMLFLVPSYIGDGSVDAFVPVFQQNLEAFKECCYAMD

SEQ ID NO: 73066 - protein, 261 aa, Zea mays
  Coding DNA Sequence Number=SeqID_31287
  Gene Ontology: Mol. function=transferase activity; Biological process= flavonoid biosynthetic process
  Homolog annotation: Hit_ID=Q7XXN4; Match level="QueryCoverage=84%, HitCoverage=48%, E-value=1e-102, Identity=84%"; Hit description =Putative anthranilate N-benzoyltransferase
  Subcellular localization annotation: CTP_CleavageSite=44; ConfidenceScore=5.10e-01
MFSLIRSPAHAHHPAAAHGGDTRHSVVIHKAHFTKDFVAGLRARASQGRGRPFSRFETILAHVWRAMTRARGLGVDPLQTSTVRISVDGRPRLAAPAGYFGNLVLWAFPRATVGDLLSRPLKHAAQAIHDAVARVDGAYFQSFVDWASSGAVDKEVLQTTAVLKDVLCPDLEVDSWLTFPFYELDFGTGSPTYFMPSYFPHGRDAVPRAVLPGRRQRGRLRAAVRAQPGGVQAVLLLHGGVAKLASTRSCIPVHMHACMHA

SEQ ID NO: 73067 - protein, 171 aa, Zea mays
  Coding DNA Sequence Number=SeqID_31288
  Homolog annotation: Hit_ID=Q5VPC4; Match level="QueryCoverage=32%, HitCoverage=9%, E-value=1e-16, Identity=76%"; Hit description =Pherophorin-like protein
  Subcellular localization annotation: CTP_CleavageSite=62; ConfidenceScore=5.39e-01
MAIVIINNSLARTLYQQLAGALETLARRRSGRGAVVGVCCRVLNSAISFSSSTILCFLLVTSSAAASSSAHSRSFLASSRSAVSLHLWSSVFLAASLASRTAPKPNCYCYNSAALSMEASAPRSTAFGRWCPAPSSTPSSSVPQRFCPRPPLPLQHVQDRELAVGGSPSTV

SEQ ID NO: 73068 - protein, 89 aa, Zea mays
  Coding DNA Sequence Number=SeqID_31289
MSPRAHLGVVAVFLCCAVGEHRQGNLGTSPKYLGQAQVDGKPRPGRHRIAQIPSSLHRASSQDHYVNWNMENHPGNSATTRWYGTPLAD

SEQ ID NO: 73069 - protein, 110 aa, Zea mays
  Coding DNA Sequence Number=SeqID_31290
MALVRMKEFRVLEASVATIVSDEPSSHASRGEEKKEKTSATPETESFVIRIEVSDDVPLAAPVGMTEGASASEGVAKDNLAPEGGAEDDPSPKGAEPGSSLSHPFPKGRA

SEQ ID NO: 73070 - protein, 161 aa, Zea mays
  Coding DNA Sequence Number=SeqID_31291
MGRGKRGGKGWPHRVDNKSKHPQSPPSEDFGDSKYSEEVSSEYDWSPALVSPMACPRTRTTPWGYPPRCRHTGDPSSVSGSMGRMTRRRPPWRRWKTPPTPWSGGEDDGGSGDDGGKGGSDGNDEGGDDESDGEGNGDGDGKGDGGDGVRRPTQDESVSSL

SEQ ID NO: 73071 - protein, 53 aa, Zea mays
  Coding DNA Sequence Number=SeqID_31292
MADSAVGTTPAQGHQRAQTSTDRPNGGERLSDSGDAERPRVNGGGPSAARRGR

SEQ ID NO: 73072 - protein, 101 aa, Zea mays
  Coding DNA Sequence Number=SeqID_31293
MRTHDGVPFRQKRRGYSQPREGVDGGIRPITGDELQGYYEPAHTTILLACTTRPAKHPRMITGVPMSVDEQAHDGGPSPTPMVPAAASLMLMCLQWRKKMR

SEQ ID NO: 73073 - protein, 69 aa, Zea mays
  Coding DNA Sequence Number=SeqID_31294
MGKPVPSLLMLLLSQVTALVPIITGMGDHVSGRVRGNVRCQVQSDSSVTLGLYVKNHRKRPTRYLVVIF

SEQ ID NO: 73074 - protein, 192 aa, Zea mays
  Coding DNA Sequence Number=SeqID_31295
MPCLAELKEARTRDRVGTWGEFTATDTLDNYRRSRITKNTVTAKNRLGDDDRHAREELDAETRHAIASREFSGKRCGGHGDELETEHEQGRERSAWHTELEQTERACRGQEASTPAVKLRLGGSAGEQGEEEGEQRSWARQPGGQAPWEGAQPGAPEKRAGRAGAWTGAKPKSRGWEGSELGSYHGRGRDAP

SEQ ID NO: 73075 - protein, 88 aa, Zea mays
  Coding DNA Sequence Number=SeqID_31296
MAAERFGREGIAHYRDISGPCCRRIDSRHGECGRRLWGTVVMHQQVYGRLPKLAGDLRVGGELPTMNAIGGPPCTREKALHFTNHGAK

SEQ ID NO: 73076 - protein, 678 aa, Zea mays
  Coding DNA Sequence Number=SeqID_31297
  Gene Ontology: Mol. function=protein serine/threonine kinase activity
  Homolog annotation: Hit_ID=Q5K2M9; Match level="QueryCoverage=88%, HitCoverage=95%, E-value=0.0, Identity=71%"; Hit description=START domain-containing protein
  Pfam annotation: Domain name=DUF1336; Domain location=478-635; Score =175.5; E_value=1.3e-49; Accession=PF07059.3; Description=Protein of unknown function (DUF1336)
  Pfam annotation: Domain name=PH; Domain location=39-145; Score=27.0; E_value=6.7e-05; Accession=PF00169.19; Description=PH domain
  Pfam annotation: Domain name=START; Domain location=183-380; Score =1.2; E_value=9.6e-05; Accession=PF01852.10; Description=START domain
  Pfam module annotation: Pfam domain module=DUF1336::PH::START; Domain location=478-635::39-145::183-380
MALRDAANKTAGIEPNKAASNNNVATVAAVSIKEAIAAVRHEGWMVRYGRRKIGRSFFHTRYFVLDNRLLAYYKKKPKDNMVPLNSLLIDGNCRVEDRGLKTLHGQMIYVLCIYNKKEKEHQITMGAYDIEDAMAWKKKIELIIDQQQDSMTAKNRKAFASMDFDMELGGQFLFSDHDSTSIILPLKIFFEVEVVAGLILPGLRIFEELLEVDYPARGCSRAMRAVGVVEATCEAIFGLIMSMDVTRYEWDCSFRNGSLVEEVDGHTAILYHRLHLHWCPMLVWPRDLCYARYWRRNDDGSYVVLFRSTEHLKCGRRRGFVRAFIESGGFKISPLKCRNGRPRTQVQHLMQIDLKGWFLNYSLSFQYHSLLQILNCVADDIHITPRIPVMESMFDADSEPKNRKLQEFDTKANRNMGMIDEESDDDDDYQVPEANIEEDVNKSHHDIKRTDEPTEKIDLSCFLSILHRDPEEKSRNCWTIPDSKIFKVRSKNFPQDKSKIPAASYLMELAAIDWFKDTKRMDNVARQKGCVAQVAADRGMHTFVVNIQGSWIVRQSVGSTPCLLGKAVDCSYVRGPAYLEVDVDIGSSAVANGVLGIVFGVVTTLVVDMAFLIQANTYEELPEQVIGAARLAHVEPATAVVPDLSNTSNDSSNSNNDNNNNNNNNNGSSEDDLSKKTN

SEQ ID NO: 73077 - protein, 859 aa, Zea mays
  Coding DNA Sequence Number=SeqID_31298
  Gene Ontology: Mol. function=signal transducer activity; Biological process=G-protein coupled receptor protein signaling pathway
  Homolog annotation: Hit_ID=Q9LI02; Match level="QueryCoverage=99%, HitCoverage=99%, E-value=0.0, Identity=76%"; Hit description =Putative extra-large G-protein
  Pfam annotation: Domain name=G-alpha; Domain location=426-838; Score =25.2; E_value=5.4e-19; Accession=PF00503.10; Description=G-protein alpha subunit
MAEAHAEAMDGSTWEDMMRRILPPGTPIPEAPPNLDYSIALEYDGPPVPYELPRVDPVEIPAIPTAEPVSGSQVLGGLPVAPVVQPIRLPVSRIARCADPVAAQAAGSSESVLHNQEFSDDDEEGDDSRSQSHGSAQSSPGPQNRPERQEGRRGPVVTFGFTPDSKYESKEFEEMSEQYVAVTKKEKRRRACYRCGKRKWESKESCLVCDARYCGYCVLRMMGSMPEGRKCVNCIGQPIDESKRSKLGKNSRTLSRLLSPLEVRQILKAEKECQANQLRPEQLIVNGCPLRPEELTDLLSCSRPPQKLKPGKYWYDKESGLWGKEGEKPDRIISSNLNFTGKLQVNASNGNTQVYMNGREITKIELKVLKVANVQCPRDTHFWVYDDGRYEEEGQNNIKGKIWESALARFACALFSLPVPPGNSNGTRDEVPYTARAVPDYLDQKRIQKLLLLGPPGAGTSTIFKQAKYLYGTRFTQEELEGIKLMIQSNMFKYLGILLEGRERFEEEALSRLNYTISQGEETQHDENKANGSNSCIYSINARLKKFSDWLLDIIAMGDLDAFFPAATREYAPFVDEMWKDPAIQATFKRKEELHFLPDVAEHFLSRAVEVSSNEYEPSEKDVIFAEGVTQGNGLAFIEFTLDDRSPMSEPYIDNSEAHSQPLTKYQLIRVSAKGMNDGCKWVEMFEDVRMVIFCVALSDYDQLGPPVSGSSRPLVNKMMQSKELFEATIRQPCFCDTPFVLVLNKYDLFEEKINRAPLSSCEWFNDFCPVRTHHNNQSLAHQAYYYVAMKFKDLYSAQTNRKLFVWQARARERQTVDEAFKYIREVLKWEEEKDDNCYQEESFYSTTEMSSSPFIRAE

SEQ ID NO: 73078 - protein, 46 aa, Zea mays
  Coding DNA Sequence Number=SeqID_31299
MEECMSRLRSRHDADNRGWNPLHVAARKGDLKEIMDPKATLVFGLT

SEQ ID NO: 73079 - protein, 132 aa, Zea mays
  Coding DNA Sequence Number=SeqID_31300
  Gene Ontology: Mol. function=ATPase activity, coupled to transmembrane movement of ions, phosphorylative mechanism; Cellular component=integral to membrane; Biological process=proton transport
  Homolog annotation: Hit_ID=Q7XPY2; Match level="QueryCoverage=70%, HitCoverage=9%, E-value=8e-21, Identity=62%"; Hit description=Plasma membrane ATPase
MVHSRRSARARDDSAKLHAAAQEVHFLPFNFNPIDKCMALTACIADGRCHRVSNKGAPEQIMTLRKCQEEDVTNKVDATIDKHAERGLAVARHEVPEKRSKDDGTGGPWQFVALPLLPLLDPSPTEDNGGSA

SEQ ID NO: 73080 - protein, 88 aa, Zea mays
  Coding DNA Sequence Number=SeqID_31301
MKRTTSRECVRLGALPMAVKGVPRKVIYKVLYLLNDTLTYTILENDSKYIIQGLSPLSPLSGMIRESLVWEGLKNILKKGFERFGIEL

SEQ ID NO: 73081 - protein, 206 aa, Zea mays
  Coding DNA Sequence Number=SeqID_31302
  Gene Ontology: Mol. function=methyltransferase activity; Biological process=menaquinone biosynthetic process
  Homolog annotation: Hit_ID=Q8YLP4; Match level="QueryCoverage=80%, HitCoverage=97%, E-value=1e-28, Identity=33%"; Hit description =Menaquinone biosynthesis methyltransferase ubiE
  Pfam annotation: Domain name=Ubie_methyltran; Domain location=33-206; Score=-40.6; E_value=4.3e-09; Accession=PF01209.9; Description =ubiECOQ5 methyltransferase family
  Subcellular localization annotation: CTP_CleavageSite=31; ConfidenceScore=5.24e-01
MVALTAGISVATGVVFSPAGRRRGRGHAAFRCSSSSAGERQALFSRIAPVYDHLNDVLSLGQHRTWKRICVSWSRAKMGDRVLDLCCGSGDLAFLLSQKVGLDGEVGVGFAYTTTDCCWPSGATVEAVLQEHQVSILNVRSWAIDNVVVPLASGYGLTEEYKYLKSSISQYLTGEELEKLAKEAGFCAAKHYELGGGLMGNLVATR

SEQ ID NO: 73082 - protein, 35 aa, Zea mays
  Coding DNA Sequence Number=SeqID_31303
MAKLVFKYWLNWFQAGSAGIQKPAQPILTVVHPPA

SEQ ID NO: 73083 - protein, 135 aa, Zea mays
  Coding DNA Sequence Number=SeqID_31304
MPKGSVCYPDPLLAPKRHQRRWRHLNPTSPTDWFFMMQAEVARGATVLLPDPAPPPAWSPFATAYTVGVSGLPKVKNVAEARASSTADRGQGSYAGLHRWRRPGARDHGAREGVPRLGLRESTGVRGGRWRRGAC

SEQ ID NO: 73084 - protein, 135 aa, Zea mays
  Coding DNA Sequence Number=SeqID_31305
MDEELASAPVDPRTAGDSVGERSDRVAPRSSHSAVENEAATQAHRSVGKRKHWRAAVFDTWDPDLSVSVTQTITGGFGFEMKHLRTRTNIGAHLWCTHFHNLRQSIKLRYTAEEDSSAKGCTAATGHELGDTPSP

SEQ ID NO: 73085 - protein, 140 aa, Zea mays
  Coding DNA Sequence Number=SeqID_31306
MHFFYAYHDLGAQTSPCDKSEGEVGTRFLKWLQEELESLLSIVTGLMSYASLVTCEGVANALSREGYKHFKAFDQSDEDFNQGVFQAMWDEEVKNLTGLESSVSKQDTDEEAGIKEQSSLATVGVTDPGAARTLHPSASP

SEQ ID NO: 73086 - protein, 151 aa, Zea mays
  Coding DNA Sequence Number=SeqID_31307
MGSTEAEFVIHPYLARWCNLFVLRLIGHLMDVPWLVFTSLLSRRSSPLSPRGLQLPSLCVSRLLAAEVWTYIRAVERSGLEGSDESEYSLDEEDSSEGGGGDGGDDDDDDDDDEGGGGNDGDGGGSGGSKDGDGGSSGGGSSSKGSNKASG

SEQ ID NO: 73087 - protein, 174 aa, Zea mays
  Coding DNA Sequence Number=SeqID_31308
SQRRFEREKVDLDHERLPLHSNERPKSAQSGSTGQCAVCQAGSSKLAALRNSPATYGYNSPDCPVSQRSAAQSARDTWPSQRSEGGTGLSGVHRTVFGAPTAPKYQRSASPKKERDPHRTVSGGAPDCPVRQTTEGKICLPTMLSTAPSCLRAIKGTPWRMEKITKHSLSIPKH

SEQ ID NO: 73088 - protein, 99 aa, Zea mays
  Coding DNA Sequence Number=SeqID_31309
MDALAPGAIRTQLEVEATSRGQAPLKGSYEEEGDHDGNESADSKKNPRNAPLPLTREFSSTEGKTLEGCRGRLRCSYGHILYKTNFIFMASHKLRKWER

SEQ ID NO: 73089 - protein, 121 aa, Zea mays
  Coding DNA Sequence Number=SeqID_31310
MSAPPLTSGEPFHVFVGYDPREHEAYEAIRGGSISRKGRGAGGAAREQTGIERQNTVHGYDMNTCATNLDKLGALKVKARYIIKKRFANNDVLRKVNAKYKPPRNNHGRRALGYSPSKLIT

SEQ ID NO: 73090 - protein, 77 aa, Zea mays
  Coding DNA Sequence Number=SeqID_31311
  Subcellular localization annotation: CTP_CleavageSite=50; ConfidenceScore=5.34e-01
MALQHLSSAACGLNSLAPGPCFRFGFGLSVPRQPRLEELRFLARNRYKVRCVVIAKGRGDSMRWRRRPVTAESASVS

SEQ ID NO: 73091 - protein, 109 aa, Zea mays
  Coding DNA Sequence Number=SeqID_31312
  Subcellular localization annotation: CTP_CleavageSite=21; ConfidenceScore=5.02e-01
MAWPPRRHARVNPGARELSPQAAEDSSLFLSATAAQGGNGKSTPSLSRVASWRSSVDQVGGPRYGILGFSGSGSGNGNGSSGSGLAVPWAAGRWPRFCFRCECGTADRQ

SEQ ID NO: 73092 - protein, 106 aa, Zea mays
  Coding DNA Sequence Number=SeqID_31313
MAASAFLLCAARWALAARRPHDMSLSLPYLIFGSCSATVGMIMRACIITHNIIIKDEYEGAYDVHNYELVEFFVATLTITFEVSMSFAAILQREAAIHASSAHDLL

SEQ ID NO: 73093 - protein, 225 aa, Zea mays
  Coding DNA Sequence Number=SeqID_31314
  Gene Ontology: Mol. function=protein dimerization activity
  Homolog annotation: Hit_ID=Q53M47; Match level="QueryCoverage=96%, HitCoverage=71%, E-value=5e-60, Identity=64%"; Hit description=HAT family dimerisation domain, putative
  Pfam annotation: Domain name=hATC; Domain location=102-196; Score =10.9; E_value=0.0023; Accession=PF05699.5; Description=hAT family dimerisation domain
MNDIVADPGLRKPIDESRHEIRDDAKRDYLQMGPCQPFGHTFPRTPVLVEFNNRFPERSTQLLGCVGCLDPRDSFANFDLEKLIELSKIYDADFSDYERTCLMDQLLLFIDEVRNDDGFRDCNDLGHLATKIVKTYRHICFSLVYRLVELALILPVATTTVEKAFSAMNIIKTERRNKMGDEWMNNNMLCYIERDMFVEIQDEKILKHFQGLRTQKINLPRSINS

SEQ ID NO: 73094 - protein, 130 aa, Zea mays
  Coding DNA Sequence Number=SeqID_31315
MWTRHAWSRLAGSRRCSGRRRGERRCGSAPTSFLLSKALKLLQESEDKENELIVNDLEKKVKNLENMLEEKDSKLKVVEENLTEVHLCNKNQVIQISDHNKKLEGLSKELDQVKSSFEDAVTHFKREAEE

SEQ ID NO: 73095 - protein, 76 aa, Zea mays
  Coding DNA Sequence Number=SeqID_31316
MSGDHAKREIMTGEKAASLGRTLSREFGNKNKEESSSSIKSHQRGDKKKMKKVVYYETDSLSASTSSSESSVTEPP

SEQ ID NO: 73096 - protein, 174 aa, Zea mays
  Coding DNA Sequence Number=SeqID_31317
MEAKQAEARWEKMMLAIEKLTGKVDAMEEERTLFRKQMEETGKAVSLLRVEAMARDMDRYGNEEAGERDNKNSQNRGERMHRVMSQLPATVHKAQLLAQVQQDIIDKGGMKFTKQPVLGRLGGGNRAEEKFEPGHQARCQRGNAVQLHVLVPKDMEKVLTPEVLEQIEQEEKHE

SEQ ID NO: 73097 - protein, 229 aa, Zea mays
  Coding DNA Sequence Number=SeqID_31318
MQVACNRTAEAHPFDLNASSMEAQAHTSWTGKGDISKGILLREGNGPRALLLIRGSKAGPSEGGSKAGASEGFDNRPRARRARDDSGYVRYMAEARATLPRVRLTTAKSSLRRNRKLRLARPWASASGGGLRLARPQGSASTSASEGGLRLARPQGSASTSTSGGIASSLDLGLRRSLRLARPWARTNHATGAPYGSKEHQQGPSSPDSCASTELNRSSDGHDTTYTGL

SEQ ID NO: 73098 - protein, 62 aa, Zea mays
  Coding DNA Sequence Number=SeqID_31319
MFTVFRKYRAVDKNLDLAGDKDITVARRHTGIVQELFSSYPEPQGPFRKIASAGARAGAFSL

SEQ ID NO: 73099 - protein, 532 aa, Zea mays
  Coding DNA Sequence Number=SeqID_31320
  Gene Ontology: Mol. function=oligopeptide transporter activity; Cellular component=integral to membrane; Biological process =oligopeptide transport
  Homolog annotation: Hit_ID=Q5VRJ9; Match level="QueryCoverage=99%, HitCoverage=81%, E-value=0.0, Identity=67%"; Hit description =Putative isp4 protein
  Pfam annotation: Domain name=OPT; Domain location=1-495; Score=366.3; E_value=4.9e-107; Accession=PF03169.6; Description=OPT oligopeptide transporter protein
SHVFIPIFANAGAGTGVARIFDLCRVFTGKHMSFLIALLLISPARALHEKERRRKGSMTRNQFFTVAFICSFAYYIFPGYLFQMLTSLSWICWVFPSSVIAQQLGSGLHGLGIGAVGLDWSSISSYLGSPLASPWFATANIAAAFFIVVYIITPINYWFNVYKARNFPIYSDGLYTVAGQKYNISSIMDSHFYFDTDAYEKSGPLYISTFFASSYGLSFACLTATVSHVLLFHGSEIWQLSKSAFEDKKMDIHTKLMRRYRQVPEWWFICILVAKYIMGYLYPGRPMANMCFKVYGYVGPHQALEFLQDFKLGHYMKIPPRAMFTAQVVGTLIAGSVYLGTIWWLLDTIPDVCNTELLPAGSPWTCPYDHVFYDASVLWGLIGPRRIFGDLGTYSAVNWFFLGGAIAPLLVWCTHKAFPAQKWIRHVNAPVLIGATTFMPPATAANYTTWILVAFLSGYVVYKYRRNWWERHNYLLSGALDAGLAFMAVLLYLCLGLENKSLNWWGNDLDGCPLASCPTAKGITVDGCPVHN

SEQ ID NO: 73100 - protein, 101 aa, Zea mays
  Coding DNA Sequence Number=SeqID_31321
  Subcellular localization annotation: CTP_CleavageSite=28; ConfidenceScore=5.20e-01
MAAVIASTQNCRVRVPALIVFTAVLLVTAAAATVEPASATGWSSVTDSPQRRLLGVQPAGRKKATAAGLVHTARGEGSFLAATVSVLCCASFGFYMVRVQR

SEQ ID NO: 73101 - protein, 214 aa, Zea mays
  Coding DNA Sequence Number=SeqID_31322
MHPEHCCFLFISNYQTPSLSVARCSRPPPPIVWFRLPLTPRGVDPLAVLGVEEAATGCGSAGSLLSRAQKNEKLGMEAMGIGNPPPPPPSSGSQGSPNEKPEPPKAEEAEQGGGAGSVMNAENDDLQTAANVGEQQSPRPRPHPSTRWGHACQSSRPCSRRQRREKEHERRPPVEGRSSWHCPHEFLGVAVFLHPRCFCVGRKHWLNPRNENGT

SEQ ID NO: 73102 - protein, 73 aa, Zea mays
  Coding DNA Sequence Number=SeqID_31323
RLEGTQGVAKQEQVKGKASYFKCGLAAFSFDKSSLFPNEHHTYLMAKEKKDKSKTQGTLNVSYGELKMSLSSR

SEQ ID NO: 73103 - protein, 226 aa, Zea mays
  Coding DNA Sequence Number=SeqID_31324
MGRGRRGSGWPRLADGKRKHAPSPPSEDFGDSEYSEETSSEADRSPAPASPPASSEDSDDSMGLSTAAQAYWRSIERVGLGGSDESGPSSDETDSSEEWSGGDGDDEGDGSSRGDGDGSSGSKGNDGEGDGDGSNGDDKGDNDGSSGDGEGDGDNDRGNSSKGDGNNDSGNGDGSRGNDGSGDGDEGSSGKGDSSGKGVGGSSKGQWYNATGLNISIDSSGSSRIR

SEQ ID NO: 73104 - protein, 34 aa, Zea mays
  Coding DNA Sequence Number=SeqID_31325
MANCSAAAGKLIVAETFSNLREQGKWFYVEYTSS

SEQ ID NO: 73105 - protein, 52 aa, Zea mays
  Coding DNA Sequence Number=SeqID_31326
MRRLASGPTKPPGVGAAGQSAEGTDMEVGVTEGGLTARLSGLSILVCASLKL

SEQ ID NO: 73106 - protein, 96 aa, Zea mays
  Coding DNA Sequence Number=SeqID_31327
MGALAGRDIGKMSRGGARPDGCHGNGQRDSGVQGRVDGGLKKRERERRGKYQQAAGKRVERGRGRHSCPQRSPGRALGHEREQETAPRMGGKSQVF

SEQ ID NO: 73107 - protein, 86 aa, Zea mays
  Coding DNA Sequence Number=SeqID_31328
MTRPSLRRLLWVHNSARLHHMGGSEADTCLQKVIYSKASTVSPDFHRRAPNPWMYGPDPKGYGYYSGGYPVSRFSLGLLPVGCWAA

SEQ ID NO: 73108 - protein, 309 aa, Zea mays
  Coding DNA Sequence Number=SeqID_31329
PQAVRHLVDCEIIEVGWTPGPGREELNENVGGQDRRRQPAGGGGPRARAPRPNACAISQTPPTDSRDVAGECVGALGELANGSVVAPSLPSATPSPTETALPRLPHCLPDCPPGPVYPLESQTRKRAGHRKESDHETARLLPLHLLHIYYLSTVSRRAGPLSSWCARSVSLPFPSRAANLESDGGAGEGRGGGPAGQGRTMCCGGDGECRPLGWLLGLPFALLAVLVSFVGAVIWIIGLPISFMPLLPLRDGAAGGGRGARQGAAPWNPHENPSEIASGAVPESKLASSASASAGWGEDSAEWAWGSLG

SEQ ID NO: 73109 - protein, 66 aa, Zea mays
  Coding DNA Sequence Number=SeqID_31330
MTLIGTRSRACDYRVELVRDKRGLNRSQYCGTVGTLIDRAMRKTTQVDPKRGLICKLKLMNQPKDG

SEQ ID NO: 73110 - protein, 124 aa, Zea mays
  Coding DNA Sequence Number=SeqID_31331
MGVSATSVGARLQGSLGTELGPSHGCGTRREKRRLLSAYRGEEKPSWSKTRQGNSRESSAGRLEMAGDASNRQALGMVRWSRGVPRLKESVARGRSSSWARDKKSREAASTDRNERFFFLRAER

SEQ ID NO: 73111 - protein, 86 aa, Zea mays
  Coding DNA Sequence Number=SeqID_31332
MKVVAGGTMGCHRRGRVVGLGDFTSAPHARVQPARLLMGRPFGWLFVRPDFRTGGFGAAAIPHRVSGSTALPHCSVDGDNHGSTLG

SEQ ID NO: 73112 - protein, 34 aa, Zea mays
  Coding DNA Sequence Number=SeqID_31333
MRLLGKEKMNLEQNFPSYSRKFLNLEDEILFKKG

SEQ ID NO: 73113 - protein, 48 aa, Zea mays
  Coding DNA Sequence Number=SeqID_31334
MANSIRARTADGGQWRELATEKSGPAVEVEVRLNSNLNSKFVMSFTFE

SEQ ID NO: 73114 - protein, 219 aa, Zea mays
  Coding DNA Sequence Number=SeqID_31335
  Gene Ontology: Mol. function=calcium ion binding; Cellular component =oxygen evolving complex; Biological process=photosynthesis
  Homolog annotation: Hit_ID=Q6EP57; Match level="QueryCoverage=57%, HitCoverage=56%, E-value=2e-59, Identity=91%"; Hit description =Putative Oxygen-evolving enhancer protein 3-2, chloroplast
  Pfam annotation: Domain name=PsbQ; Domain location=12-219; Score =115.1; E_value=2e-31; Accession=PF05757.2; Description=Oxygen evolving enhancer protein 3 (PsbQ)
  Subcellular localization annotation: CTP_CleavageSite=10; ConfidenceScore=5.45e-01
MATLARHLILCSSSPSQRRRRPLPPDATAGTQQQQQQQAPPPQPSTTRRLAVAASAALAATAALSARRPAPPPPAMAAEAAVPPAPPTQASHGTVTRWDTKSYVRKRFFEPELTAEEAAARIRQTAEGMRTLRPMLETMSWKYVLFYVRLKSKYLGLDLTTAMAGVPAGRRADYVRVANELVDNMTEFDRFVRTPKVYESYLFYEKTLKSLDDVAEFLV

SEQ ID NO: 73115 - protein, 77 aa, Zea mays
  Coding DNA Sequence Number=SeqID_31336
  Subcellular localization annotation: CTP_CleavageSite=35; ConfidenceScore=5.50e-01
MLTPGSREPTTPSTRCVERSVASSGSRPPGSTSTNCSALANHTTARNESPHAGRGAPEVTKTTSEQLRIKANYICNP

SEQ ID NO: 73116 - protein, 286 aa, Zea mays
  Coding DNA Sequence Number=SeqID_31337
  Gene Ontology: Mol. function=kinase activity; Cellular component =ornithine carbamoyltransferase complex; Biological process=amino acid metabolic process
  Homolog annotation: Hit_ID=Q6QP54; Match level="QueryCoverage=69%, HitCoverage=37%, E-value=9e-22, Identity=63%"; Hit description =Putative kinase
MVPPVDVVGPCPRLSEVEAPPRSRSSLSSKAEVESEPLGRARRRPSADARAESEPWGRAKRSSSSFGAEPESEPWGRAKRSSSSSGAEPESEPWGRAKRSSSSSGAEPESEPWGRAKQSSLSSGAEPESEPWGRAKRSSSSFGAEPESEPWGQAKRSSSSSGAEPESEPWGRAKQSSLSSGAEPNSRSGAGGAVLLSDWSVERRSDYGHFGSINWRPRVRIKLRADGGYQLRFRSLEGTPNYGPQHLAGGTTVGAGQAILTLNAPAIRSAGDAIWPRLLLREACPG

SEQ ID NO: 73117 - protein, 252 aa, Zea mays
  Coding DNA Sequence Number=SeqID_31338
  Gene Ontology: Mol. function=two-component response regulator activity; Cellular component=nucleus; Biological process=two -component signal transduction system (phosphorelay)
  Homolog annotation: Hit_ID=Q4GZL0; Match level="QueryCoverage=94%, HitCoverage=96%, E-value=1e-51, Identity=51%"; Hit description=Type A response regulator 1
  Pfam annotation: Domain name=Response_reg; Domain location=14-157; Score=40.1; E_value=7.8e-09; Accession=PF00072.14; Description =Response regulator receiver domain
MEAAAGGVEAEGVMRVLVVDDSPVDRRVAQLLLSSDSCAGSFHVIAVDSARKAMEFLGLKDGGEEQAVDMVLTDYCMPRDDRLRPPQGHQGTYNLLTPLQEAISVAAAFYALNPLEPIPVVVMSSEDEPQRISRCLSAGAEDFIVKPLQSKDVQRLRNCSAAARPSKGAAPCEAAVVAKRNQKPPHPAGAASPSGRRASLAGVAMVLHSSGVEYLPLLLKLVVLAYAALCLGELLHRWASSDGRCSLSPWCA

SEQ ID NO: 73118 - protein, 665 aa, Zea mays
  Coding DNA Sequence Number=SeqID_31339
  Gene Ontology: Mol. function=transferase activity; Cellular component= nucleus; Biological process=metabolic process
  Homolog annotation: Hit_ID=Q9LRV2; Match level="QueryCoverage=84%, HitCoverage=92%, E-value=1e-134, Identity=34%"; Hit description =Selenium-binding protein-like
  Pfam annotation: Domain name=PPR; Domain location=115-149; Score =31.4; E_value=3.2e-06; Accession=PF01535.11; Description=PPR repeat
  Pfam annotation: Domain name=PPR; Domain location=150-184; Score=2.8; E_value=3.5; Accession=PF01535.11; Description=PPR repeat
  Pfam annotation: Domain name=PPR; Domain location=216-250; Score =31.5; E_value=2.9e-06; Accession=PF01535.11; Description=PPR repeat
  Pfam annotation: Domain name=PPR; Domain location=286-320; Score =14.7; E_value=0.13; Accession=PF01535.11; Description=PPR repeat
  Pfam annotation: Domain name=PPR; Domain location=348-382; Score =30.8; E_value=4.9e-06; Accession=PF01535.11; Description=PPR repeat
  Pfam annotation: Domain name=PPR; Domain location=405-438; Score =23.3; E_value=0.00087; Accession=PF01535.11; Description=PPR repeat
  Pfam annotation: Domain name=PPR; Domain location=439-473; Score=3.0; E_value=3.3; Accession=PF01535.11; Description=PPR repeat
  Pfam annotation: Domain name=PPR; Domain location=505-539; Score =33.8; E_value=5.9e-07; Accession=PF01535.11; Description=PPR repeat
  Pfam annotation: Domain name=PPR; Domain location=576-610; Score=2.3; E_value=4; Accession=PF01535.11; Description=PPR repeat
  Pfam module annotation: Pfam domain module=PPR::PPR::PPR::PPR::PPR::PP R::PPR::PPR::PPR; Domain location=115-149::150-184::216-250::286 -320::348-382::405-438::439-473::505-539::576-610
  Subcellular localization annotation: CTP_CleavageSite=68; ConfidenceScore=5.40e-01
MVAASTAVSTVSAISTHIAAGHLFAAIDALPSCSASLLPPSLYASLLRLATSRRSLAAARRIASHLASSSSASPSTSVSFTPTFLFNRAIECLAACGSLADAREMFDAMPRRDGGSWNAIISASSRAGHPAEAFSLFADMNSLGIRPKDVTLASVLACCAECLDLRGAQQLHGLIAKRDFQSNVILGTALVDVYGKCLSLTDVRRAFDDILQPNDVSWNIIIRRYRLAGMGDMALHMFFMMVRAGVRPLVYTVAHAMLACRDNCALKEGKCIHSFVLRRGYDHHIHARSSVVDMYAKCGDIDAAQRLFNLAPKKDVVMSTSVVSGLAACGRIADAKMVFDGMEQHNLVSWNAMLTGYVKSMDLTGALDLFQQMRHETKELDVVTLASVLNACTGLLDLGKERDRYAWNSIISGYERHSMSEDALHALREMQSEAKPSQSTFSSALAACANIFLLKHGKQIHAYMIRNRYDIDDILRSALVDMYSKCRLFDYSTRIFELGSSDDVILWNSMIFACAYHSKGDYGLGLLDEMRKQGVRPDSVTFLGALVSCICEGHVGLGRSYFTLMIDEYSIVPRIEHYECMIELLGKHGYMVELEDFVDHMPFEPTTAMWLRIFDCCREYGNRKLGQRAAQRINDSKPLTPVIFVESAPVYECSDCDDAEPMSFC

SEQ ID NO: 73119 - protein, 1204 aa, Zea mays
  Coding DNA Sequence Number=SeqID_31340
  Gene Ontology: Mol. function=nucleoside-triphosphatase activity; Cellular component=integral to membrane; Biological process =proteolysis
  Homolog annotation: Hit_ID=Q8GU89; Match level="QueryCoverage=99%, HitCoverage=83%, E-value=0.0, Identity=83%"; Hit description =Pleiotropic drug resistance protein 4
  Pfam annotation: Domain name=ABC2_membrane; Domain location=263-475; Score=190.1; E_value=5.4e-54; Accession=PF01061.14; Description=ABC -2 type transporter
  Pfam annotation: Domain name=ABC2_membrane; Domain location=929-1143; Score=249.0; E_value=1e-71; Accession=PF01061.14; Description=ABC-2 type transporter
  Pfam annotation: Domain name=ABC_tran; Domain location=642-832; Score= 103.6; E_value=5.7e-28; Accession=PF00005.17; Description=ABC transporter
  Pfam annotation: Domain name=PDR_assoc; Domain location=480-542; Score=108.9; E_value=1.4e-29; Accession=PF08370.2; Description=Plant PDR ABC transporter associated
  Pfam module annotation: Pfam domain module=ABC2_membrane::ABC2 _membrane::ABC_tran::PDR_assoc; Domain location=263-475::929 -1143::642-832::480-542
MTVRETLAFSARCQGVGTRYEMLTELARREKAANIKPDHDIDVYMKASAMGGQESSIVTDYTLKILGLEVCADTLVGNEMMRGISGGQRKRVTTGEMLVGPARALFMDEISTGLDSSTTYQIVNSLRQTIHILGGTAVISLLQPAPETYNLFDDIILLSDGHVVYQGPREHVLEFFEFMGFRCPARKGVADFLQEVTSRKDQGQYWYRQDRPYRFVPVKKFADAFSIFHVGRSTQNELSEPFDRTRSHPAALATSKFGASRMELLKATIDRELLLMKRNAFMYIFKAVNLTVMSFIVMTTFFRTNMKRDASYGNIYMGALFFALDTIMFNGFAELAMTVMKLPVFFKQRDLFFFPAWAYTIPSWIVQIPITFLEVGVYVFTTYYVIGFDPNVFRFLKQYLLLLALNQMSSALFRFIAGIGRDMVVSHTFGPLALLAFQALGGFILARPDVKKWWIWGYWISPLSYAQNAISTNEFLGHSWSKIQNGTTVGIGVLQSRGVFTEAKWYWIGLGVLVGYALLFNLLYTVALAVLSPFTDSHGSMSEEELKEKHANLTGEVIEVRKEKTSRRQELELSHSVGQNSVHSSEDSSQNRKGMALPFPPLSLTFNDIRYSVDMPEAMKAQGVTEDRLLLLKGVSGSFRPGVLTALMGVSGAGKTTLMDVLAGRKTGGYIEGDITISGYPKKQETFARISGYCEQNDIHSPHVTVYESLLFSAWLRLPSGINLETRKMFIEEVMDLVELTSLRGALVGLPGVSGLSTEQRKRLTIAVELVANPSIIFMDEPTSGLDARAAAIVMRTVRNTVNTGRTVVCTIHQPSIDIFEAFDELFLMKRGGEEIYVGPVGQNSSKLIEYFEGIEGISQIKDGYNPATWMLEVSSSSQEEILGVDFSEIYRQSELYQRNKALIEELSTPPPGSSDLNFPTQYSRSFFTQCLACFWKQKKSYWRNPTYTAVRLLFTVVIALMFGTMFWDLGRKTNKQQDLFNAMGSMYAAVVYIGMQNSGSVQPVVVVERTVFYRERAAGMYSAFPYAFGQVAIEIPYIFVQTLLYGVLVYSMIGFEWTVAKFLWYLFFMYFTLLYFTFYGMMAVGLTPNETIAVITSSAFYNVWNLFSGYLIPRPKLPVWWRWYSWICPVAWTLYGLVASQFGDIAHPLEDSPTGQTVAQFITDYFGFHHDFLWVVAGVHVGLTVLFAFLFSFAIMKFNFQNR

SEQ ID NO: 73120 - protein, 1139 aa, Zea mays
  Coding DNA Sequence Number=SeqID_31341
  Gene Ontology: Mol. function=nucleoside-triphosphatase activity; Cellular component=integral to membrane; Biological process=transport
  Homolog annotation: Hit_ID=Q8GU90; Match level="QueryCoverage=99%, HitCoverage=79%, E-value=0.0, Identity=80%"; Hit description =Pleiotropic drug resistance protein 3
  Pfam annotation: Domain name=ABC2_membrane; Domain location=162-397; Score=173.4; E_value=5.6e-49; Accession=PF01061.14; Description=ABC -2 type transporter
  Pfam annotation: Domain name=ABC2_membrane; Domain location=854-1081; Score=227.9; E_value=2.3e-65; Accession=PF01061.14; Description=ABC-2 type transporter
  Pfam annotation: Domain name=ABC_tran; Domain location=567-757; Score= 110.3; E_value=5.7e-30; Accession=PF00005.17; Description=ABC transporter
  Pfam annotation: Domain name=PDR_assoc; Domain location=402-468; Score=155.5; E_value=1.4e-43; Accession=PF08370.2; Description=Plant PDR ABC transporter associated
  Pfam module annotation: Pfam domain module=ABC2_membrane::ABC2 _membrane::ABC_tran::PDR_assoc; Domain location=162-397::854 -1081::567-757::402-468
MGGQDANVVTDYILKILGLEICADTMVGDEMLRGISGGQRKRVTTGEMLVGPARALFMDEISTGLDSSTTFQIVNSLRQSIHILGGTAVISLLQPAPETYNLFDDIILLSDGQVVYQGPREEVLEFFESVGFRCPERKGVADFLQEVTSKKDQKQYWARPNEPYRFVAVKEFATAFKSSHTGRSITNELAVPFDKSKSHPAALTTTRTFQLMLMSIIAMTLFFRTKMKHGTVNDGGLYMGALFFGVLMIMFNGFSELALTVFKLPVFFKQRDLLFFPAWSYTIPSWILKVPITFIEVGGYVFLTYYVIGFDPNVGRFFKQYLLLLVVNQMAASLFRFIGGVSRNMIVANVFASFMLLVVMVLGGFILVRDKVKKWWIWGYWISPMMYAQNAISVNEMLGHSWDKILNSTASNETLGVQVLKSRGVFTEAKWYWIGFGAMVGFTILFNALFTVALTYLKPYGNSRPSVSEEELKEKHANIKGEVLDGNHLVSASSHRSTGVNPETDSAIMEDDSALTKRGMILPFVPLSLTFDNIKYSVDMPQEMKAQGVQEDRLELLKGVSGSFRPGVLTALMGVSGAGKTTLMDVLAGRKTGGYIEGDIRISGYPKKQDTFARVSGYCEQNDIHSPQVTVYESLLFSAWLRLPKDVDSNKRKIFIEEVMELVELKPLRNALVGLPGVNGLSTEQRKRLTIAVELVANPSIIFMDEPTSGLDARAAAIVMRTVRNTVDTGRTVVCTIHQPSIDIFEAFDELFLMKRGGEEIYAGPLGHHSSDLIKYFESLHGVSKIKDGYNPATWMLEVTTTSQEQILGVDFSDIYKKSELYQRNKALIKELSQPAPGSTDLHFPSKYAQSSITQCVACLWKQNLSYWRNPPYNTVRFFFTTIIALLLGTIFWDLGGKTYTSQDLMNAMGSMYSAVLFIGVMNCTSVQPVVAVERTVFYRERAAGMYSAFPYAFGQVVIELPYALAQDILYGVIVYSMIGFEWTAAKFFWYLFFGYFTLLYFTFYGMMAVGLTPNYHIAAIVSSAFYAIWNLFSGFIIPPTAHSRSCLPLRYLQKVPIWWRWYCWICPVAWTLYGLVVSQFGDVMTPMDDGRAVKVFVEDYFDFKHSWLGWVAAVVVAFAVLFATLFGFAIMKLNFQKR

SEQ ID NO: 73121 - protein, 126 aa, Zea mays
  Coding DNA Sequence Number=SeqID_31342
  Homolog annotation: Hit_ID=Q7FS87; Match level="QueryCoverage=80%, HitCoverage=7%, E-value=1e-25, Identity=52%"; Hit description =Putative glycerol 3-phosphate permease
MEIGNGKSTLLWHDRWNEQRLSEKFLELWSFASVKELNIYQARLASPDEIFHTPLSTEAFEQLLSLQDTLDNIQLLDHDDIWRCSASSNRFSSQKVYSHLTGAILLSDVGFFWASSRLVLRISCIP

SEQ ID NO: 73122 - protein, 297 aa, Zea mays
  Coding DNA Sequence Number=SeqID_31343
  Gene Ontology: Mol. function=protein kinase activity; Cellular component=cytoplasm; Biological process=protein amino acid phosphorylation
  Homolog annotation: Hit_ID=Q5ZE15; Match level="QueryCoverage=94%, HitCoverage=89%, E-value=3e-80, Identity=57%"; Hit description =Mitogen-activated protein kinase kinase-like
  Pfam annotation: Domain name=Pkinase; Domain location=20-276; Score =120.9; E_value=3.6e-33; Accession=PF00069.15; Description=Protein kinase domain
  Pfam annotation: Domain name=Pkinase_Tyr; Domain location=20-276; Score=4.9; E_value=9.1e-13; Accession=PF07714.7; Description=Protein tyrosine kinase
  Pfam module annotation: Pfam domain module=Pkinase::Pkinase_Tyr; Domain location=20-276::20-276
MMKQAPALPADDVDLRLSDLEQVCHLGEGTCGVVTKVRHRGTGTEFALKTSYYAHPNRAMDEEAEALRRCAGSPHVVRCHAVLSGAGGEPAYVLEFMDAGTLGDLLGRRGGRGIPECALAEVAARCLQGLAHVHSRGVAHLDLRPDNLLVNSRGDIKIGDFSVSRILHGRADERPQGSPSPLVPPWPRGAIAADVWAFGVTVLELFLGRCPFLPPDGVRPSYVKLRQAICDGEPPSPADYACVAASPELRGFVAACLQKDPRRRATVAQLLAHPIVAQRHVEESRRALRELIVDTLE

SEQ ID NO: 73123 - protein, 101 aa, Zea mays
  Coding DNA Sequence Number=SeqID_31344
MEDKEEPKPEEWVSQPITRDSPHVSSTSHRRYPDRQEATCLVCRPEDDLQGEEVVSEHYSISERESIEAAMKDTTQRALSHYRALFGELADDLNIRYYTPP

SEQ ID NO: 73124 - protein, 131 aa, Zea mays
  Coding DNA Sequence Number=SeqID_31345
  Subcellular localization annotation: CTP_CleavageSite=76; ConfidenceScore=5.34e-01
MGAPDNPVRHRTVSGAPPRHPAVRSWSWSTVGGDVLMWHRTVRCRTGQSGAPLTAALTSAAVLFIRQSRPLRVDSRCSAGAPDSLVNYSGAAPGKPKGEEFELIHPGAPDTVRCARPGQPSACFLLLSFET

SEQ ID NO: 73125 - protein, 480 aa, Zea mays
  Coding DNA Sequence Number=SeqID_31346
  Gene Ontology: Mol. function=hydrolase activity, hydrolyzing O -glycosyl compounds; Cellular component=chloroplast; Biological process=carbohydrate metabolic process
  Homolog annotation: Hit_ID=Q41290; Match level="QueryCoverage=98%, HitCoverage=83%, E-value=0.0, Identity=73%"; Hit description =Dhurrinase
  Pfam annotation: Domain name=Glyco_hydro_1; Domain location=14-465; Score=674.9; E_value=6e-200; Accession=PF00232.9; Description =Glycosyl hydrolase family 1
MRLKGLGTKVERGQALGTTSATTIRWIADGSSGDVGANSYYLYREDVRLLKEMGMDAYRFSISWPRILPKGTLEGGINHKGIEYYKKLINLLKENGIEPYVTLFHWDTPQALVDSYGGFLDDRIVKDYTDFAKVCFVHFGDVVKNWFTFNEPQTFSSFSYGTGICAPGRCSPGQKCANPVGNSLTEPYIVGHNLLRAHAETVHQYNKYYRGNKEGHIGMAFDVMGRVPYEKMFLDDQAQERSIDYNLGWFVEPVVRGDYPFSMRSLVKDRLPYFTDEEKEKLVGSYDIMGINYYTSRFSKHVDISTGYTPVLNTDDAYATQETKGPDGNTIGPSMGNSWIYMYPNGLKDILMVMKNKYGNPPIYITENGIGDIDSKEKPLPVKDALNDHARLDYLQRHISVLKDAIDLGADVRGHFTWSLLDNFEWCGGYTERYGIVYVDRSNGCKRRMKRSAKWLKKFNRAAHSKKKDKTGIIPPPSAY

SEQ ID NO: 73126 - protein, 175 aa, Zea mays
  Coding DNA Sequence Number=SeqID_31347
MMFPGGRLVEEVRVLPNQQHCGKRICHSRKGRGGARSGKGLTGGGRPCPHAGPSAEEGGTDPHAPGTSAARARRSGNDGWEGWGGAGGRPPTTVATRPVAAAAEPARPPTAAAGPVRPGEAVAAARRPGEAARGQKERGGKGSSAMGVAAWRVHQGGAAAAAGPPRMSSGGGWAA

SEQ ID NO: 73127 - protein, 121 aa, Zea mays
  Coding DNA Sequence Number=SeqID_31348
MGGAQLSAAWIAVTVIAFLSLMRVARRTSCGHRRHGEGRTPDNGGWLEEHRTVVELGRDSAAGSGGDPLGADSCGDLRHGDDERSAGMEGIGETMREHAAIGSDTDRWGLRGKERRRAWAR

SEQ ID NO: 73128 - protein, 127 aa, Zea mays
  Coding DNA Sequence Number=SeqID_31349
MAYGVRRVSGWVLGRSRAHGRPPCACNCLPNFMLRREPVARHGPAILCPHHRFCSGCRRARSGGRRRFWCRRYGRGRLRLAQSLDGAVGSSQPSDRRWANMVRSRFIKTATVDLRSDGPLVDQIWAA

SEQ ID NO: 73129 - protein, 318 aa, Zea mays
  Coding DNA Sequence Number=SeqID_31350
MDFRKEANEGYAFVNLTSPEVACQMWGPHGGLSCASVGFQGQLQDLHGPLHQPYVGHQLGSTAFGAAIVGHRLSFALDSHEGSTSRYLTKESDAQCRSVDEAQVSISALRTPSRGGLGVPRLHTLPTPALHSSRDPVLARGLWRMTEATRHSSTRASGVGATRIKYGQAAHMFAPVTGGVRHALKAGDMCSLQGLGHASNPRVTEAKTIESLRHTWVALIMTFTIPAIDTWDGDMQRGQDDIVLLLPYASRRDSLHCSLHKSLRPHANKTRRRQVWPKSSHDDQEKISAHHRRRPWSTSSFCGSTPHIIVFLGPLVGV

SEQ ID NO: 73130 - protein, 490 aa, Zea mays
  Coding DNA Sequence Number=SeqID_31351
  Gene Ontology: Mol. function=hydrolase activity, hydrolyzing O -glycosyl compounds; Cellular component=chloroplast; Biological process=carbohydrate metabolic process
  Homolog annotation: Hit_ID=P49235; Match level="QueryCoverage=90%, HitCoverage=78%, E-value=0.0, Identity=73%"; Hit description=Beta -glucosidase, chloroplast precursor
  Pfam annotation: Domain name=Glyco_hydro_1; Domain location=20-476; Score=702.3; E_value=3.5e-208; Accession=PF00232.9; Description =Glycosyl hydrolase family 1
MAPLLLASRTACHPGLTSSRHDNGRHGLSSSPGSSKWIADGSTGDVGANSYYLYREDVRLLKEMGMDAYRFSIAWSRILPKGTLEGGINHKGIEYYKRLINLLKENGIEPYVTLFHWDTPQALVDSYGGFLDDRIVKDYTDFAKVCFVHFGDTVKNWFTFNEPQTFSSFSYGTGIFAPGRCSPGQKCANPTGNSLTEPYIVAHNLLRAHAETVHEYNKHYRGNKDAQIGIAFDVMGRVPYDNMFLDDQAQERSIDYNLGWFMEPVVRGDYPFSMRSLIKDRLPYFTDDEKEKLVGSYDIMGINYYTSRFSKHIDISPKYSPVLNTDDAYAAQETKGPDGNTIGPSMGNPWIYMYPNGLKDILMFMKNKYGNPPVYITENGIGDVDTKDKPLPIKDALNDHVRLDYLQRHISVLKDAIDLGADVRGHFTWSLLDNFEWSAGYTERYGIVYVDRGNGCKRRMKRSAKWLKKFNRAAHTKKKDMTGIIPPSAY

SEQ ID NO: 73131 - protein, 382 aa, Zea mays
  Coding DNA Sequence Number=SeqID_31352
  Gene Ontology: Mol. function=binding
  Homolog annotation: Hit_ID=A0CCJ6; Match level="QueryCoverage=67%, HitCoverage=24%, E-value=6e-10, Identity=24%"; Hit description =Chromosome undetermined scaffold_167, whole genome shotgun sequence
  Pfam annotation: Domain name=HEAT; Domain location=117-153; Score =12.2; E_value=1.4; Accession=PF02985.12; Description=HEAT repeat
  Pfam annotation: Domain name=HEAT; Domain location=159-194; Score =2.2; E_value=23; Accession=PF02985.12; Description=HEAT repeat
  Pfam annotation: Domain name=HEAT; Domain location=195-229; Score =10.3; E_value=2.4; Accession=PF02985.12; Description=HEAT repeat
  Pfam annotation: Domain name=HEAT; Domain location=76-112; Score=0.1; E_value=41; Accession=PF02985.12; Description=HEAT repeat
  Pfam module annotation: Pfam domain module=HEAT::HEAT::HEAT::HEAT; Domain location=117-153::159-194::195-229::76-112
MSGRALKDLNVSQSADLENGKDNSVKSCITKPVLNGNKCANKEEKAPSACHDAVTNGNAAAIADVEYIDSENLVDLPDVDAALSTLAKRLDSKDWVMTCEALNNVRQLAMYHKERLQELLEPLVPLIVKSVKNPRSAVCKTALMTCADIFKAYGDLMVHSIDPLLVQLFLKASQDKRFVCEAAEAALISMTSWISPLLLLPRMLPYLKNKNPRIRAKASVCFSKSVPRLDVVGIKEYGMDKLIQIAATQLSDQLPESREAARNLALELQAFYEKSQASTSDEHEVEASASPDAESWEAFCQSKLSALSAQAILRVTSTTTKECVTSAPKEGLACYTQQSLFFVFDAGPVILKEMTYFVFRTLMLLPVSVNHLQHVPVGVTGC

SEQ ID NO: 73132 - protein, 208 aa, Zea mays
  Coding DNA Sequence Number=SeqID_31353
MGTSVEAKQTTQQINPEVTDGATEESDSTNNTPVGAKWKSLQSRTTTLEYAEKYSSRNATPTEGKQLGFGVAPSTAATQALTLRQLSTTTLDPPQESSAIPTPATVARKLTRETGQPAQIRAAVNAAKREIVTSNRGNGRLCEGKGRGGEGRQGITWHEGAAAAAARSLPSSAWAGTERGCVRTANGGLCIGPGHNHTNTTSLDSEKK

SEQ ID NO: 73133 - protein, 147 aa, Zea mays
  Coding DNA Sequence Number=SeqID_31354
MGKNNKRKREPTPPSEDFGDSEYSEEEFSSESEGSPAPVSPPASSDDSDDSQGIAAEVWTYIRVIERSGIEGPDESEYSSDEEDSPEEDGEGDNDDDDGGDGSDDGDGGSRGGNGGSRSGDSRGGDSGSSRGSNGGGNNKGSNRASG

SEQ ID NO: 73134 - protein, 271 aa, Zea mays
  Coding DNA Sequence Number=SeqID_31355
  Gene Ontology: Mol. function=protein serine/threonine kinase activity; Cellular component=membrane; Biological process=protein amino acid phosphorylation
  Homolog annotation: Hit_ID=Q6ER39; Match level="QueryCoverage=91%, HitCoverage=44%, E-value=6e-71, Identity=74%"; Hit description=CTR1 -like kinase kinase kinase-like
  Pfam annotation: Domain name=Pkinase; Domain location=17-263; Score =20.0; E_value=9.4e-10; Accession=PF00069.15; Description=Protein kinase domain
  Pfam annotation: Domain name=Pkinase_Tyr; Domain location=66-263; Score=20.0; E_value=1.1e-13; Accession=PF07714.7; Description =Protein tyrosine kinase
  Pfam module annotation: Pfam domain module=Pkinase::Pkinase_Tyr; Domain location=17-263::66-263
MAANPTNFCKISANTERGKYVHVENQEPAGDSNDDEASTRRPSALEGLRRQFNSQKAVSLPSSPNRSGILGLRSPSDYTEADLMATWNEVLQSSPFLNKPLLPYEEWCIEFSEITVGIRVGVGKGLMCMHRLKIVHRDLKSANCLVNKYWTVKICDFGLSRVMSNSAMNDNSSAGTPEWMAPELIRNEPFTEKCDIFSFGVIMWELCTLCRPWEGIPPVQIVYSVANDGARLEIPDGPLGSLIADCWAEPERRPCCQEILTRLLDCEYTLC

SEQ ID NO: 73135 - protein, 107 aa, Zea mays
  Coding DNA Sequence Number=SeqID_31356
  Homolog annotation: Hit_ID=P12365; Match level="QueryCoverage=22%, HitCoverage=4%, E-value=2e-07, Identity=95%"; Hit description =Catalase isozyme 2
  Subcellular localization annotation: CTP_CleavageSite=34; ConfidenceScore=5.28e-01
MDPYKHRPSSTFNAPYWTTNSGAPCGTTTAPSPSAHEKPNPLPLAPLQDGSMKEKWTSNLSGSCKASGGTSVSPEPSLGLDNIDERTPDATNPSAKTADNGMATETA

SEQ ID NO: 73136 - protein, 92 aa, Zea mays
  Coding DNA Sequence Number=SeqID_31357
  Homolog annotation: Hit_ID=Q6ER39; Match level="QueryCoverage=75%, HitCoverage=8%, E-value=4e-25, Identity=82%"; Hit description=CTR1 -like kinase kinase kinase-like
QEQDDGNRSFKVLSLRNIMLKSTNSMEGKMSCSSHSEPNVANAFCGRSRDKVVDEHQRTASSRLPQHIVSYCVTLITEAVVDLGLGQLRLHP

SEQ ID NO: 73137 - protein, 93 aa, Zea mays
  Coding DNA Sequence Number=SeqID_31358
MEPPPLPLPWWPLTSLLPSTKAGRALAPSPVELAQAISLALVPRPVLVAPRCPPGPLHDPDRASPSPFAAFVLRSATPVPHLAVTKLPHSSQG

SEQ ID NO: 73138 - protein, 56 aa, Zea mays
  Coding DNA Sequence Number=SeqID_31359
MGTRSSPDTDVSLSPVVVGALVKYAHTDTEVAGTGAWRACMYFAHGFCENGSTCRF

SEQ ID NO: 73139 - protein, 77 aa, Zea mays
  Coding DNA Sequence Number=SeqID_31360
MSSSSVASYINCYRNFAFLFLRRPLCIVIIAVRAMSESMRQNRLSREQKDGSLGSSNDSMKHDIQNMSSLLGRHQKK

SEQ ID NO: 73140 - protein, 121 aa, Zea mays
  Coding DNA Sequence Number=SeqID_31361
MELKQDLQSGKGGETTKDGIGKTTLTNRSVREEDLKCRNMISIKTNTQQMVDLRQNSQGDKKGEAIKGELGEAPYSNWDGKQEPLKVRFKSRTRQPKVLNGYVLSSSSIIPWDITIFGRRF

SEQ ID NO: 73141 - protein, 565 aa, Zea mays
  Coding DNA Sequence Number=SeqID_31362
  Gene Ontology: Mol. function=DNA-dependent ATPase activity; Cellular component=nucleus; Biological process=DNA replication initiation
  Homolog annotation: Hit_ID=Q948Y5; Match level="QueryCoverage=96%, HitCoverage=82%, E-value=0.0, Identity=80%"; Hit description =Replication licensing factor MCM7 homologue
  Pfam annotation: Domain name=AAA_3; Domain location=394-520; Score= -21.6; E_value=0.075; Accession=PF07726.2; Description=ATPase family associated with various
  Pfam annotation: Domain name=DUF1610; Domain location=184-206; Score =11.0; E_value=0.1; Accession=PF07754.2; Description=Domain of unknown function (DUF1610)
  Pfam annotation: Domain name=MCM; Domain location=336-565; Score =374.1; E_value=2.1e-109; Accession=PF00493.13; Description=MCM235 family
  Pfam annotation: Domain name=Mg_chelatase; Domain location=360-543; Score=-143.0; E_value=0.0067; Accession=PF01078.11; Description =Magnesium chelatase, subunit ChlI
  Pfam module annotation: Pfam domain module=AAA_3::DUF1610::MCM::Mg _chelatase; Domain location=394-520::184-206::336-565::360-543
MKNPDFTADKALAKDFLSNFVGPHGDPKYLNILQDVANRKIRAVQIELDDLFHVPAPHLHTIQFPSVCQFCGRKHKDVDEEFLQRVTENTRRYVGIFAEAMDEIMPEPTEAYTVDEDRDILMTQRVDEGVDGGADGTDPLQRMPPDIKRFFEVYIKTFSKATPLTIRQVKASNIGQLVKISGIVTRCSDVKPLMQVAVYTCEECGFEIYQEVTARVFMPLIECPSQRCKLNKAKGNLILQLRASKFLKFQEVKLQELAEHVPKGHIPRSLTVHLRGELTRKVAPGDVVEMSGIFLPMPYYGFRAMRAGLVADTYLEAMSVTHFKKKYEEYDLKGDEQEQIDRLAEDGDIYSKLARSLAPEIFGHEDVKKALLLLLVGAPHRKLADGMKIRGDLHICMMGDPGVAKSQLLKHIINVAPRGVYTTGRGSSGVGLTAAVQKDPVTNEFVLEGGALVLADMGICAIDEFDKMEESDRTAIHEVMEQQTVSIAKAGITTSLNARTAILAAANPAWAYISAARRVIPSVPRELEEYIATAYSSIRQEEAKSNAPTSYTTIRTLLSILRISI

SEQ ID NO: 73142 - protein, 156 aa, Zea mays
  Coding DNA Sequence Number=SeqID_31363
MAIWPRLLLREDWALGETKLCTGGGYQLRLGVLGVPLIMVPDSSRTVRARKVGKKNNHGACKSDRVFVTRQLMCEIANNRHDEREEESLLFVSRPIWEGQVQEPILINEQWVCYDKCENWQLLLYGMNRDILPKNGGVVCRVGLVALLLQDPIEFD

SEQ ID NO: 73143 - protein, 102 aa, Zea mays
  Coding DNA Sequence Number=SeqID_31364
  Gene Ontology: Mol. function=RNA polymerase II transcription factor activity; Cellular component=DNA-directed RNA polymerase II, core complex; Biological process=regulation of transcription, DNA -dependent
  Homolog annotation: Hit_ID=Q2QNM4; Match level="QueryCoverage=85%, HitCoverage=77%, E-value=3e-46, Identity=94%"; Hit description=DNA -directed RNA polymerase II 14.5 kDa polypeptide, putative, expressed
  Pfam annotation: Domain name=RNA_POL_M_15KD; Domain location=4-58; Score=80.8; E_value=4.4e-21; Accession=PF02150.7; Description=RNA polymerases M15 Kd subunit
MSTMKFCRECNNILYPKEDREQKVLLYACRNCDHQEVADNNCVYRNVVHHSAGEFTQVLQDVAGDPTLPRTKSVRCSSCGHGEAVFFQLMVMQVQILEQPRA

SEQ ID NO: 73144 - protein, 343 aa, Zea mays
  Coding DNA Sequence Number=SeqID_31365
  Gene Ontology: Mol. function=pseudouridine synthase activity; Biological process=RNA processing
  Homolog annotation: Hit_ID=Q2QNM3; Match level="QueryCoverage=81%, HitCoverage=81%, E-value=1e-130, Identity=79%"; Hit description=RNA pseudouridylate synthase, putative, expressed
  Pfam annotation: Domain name=PseudoU_synth_2; Domain location=88-279; Score=79.8; E_value=8.2e-21; Accession=PF00849.12; Description=RNA pseudouridylate synthase
  Subcellular localization annotation: CTP_CleavageSite=66; ConfidenceScore=5.66e-01
MTKLPLPLLLLQPPAGAASPLRSLLPPARSLTAMSAATSTAPSIGEYPSPVSPPYPATSKDLELRRAMTASARSAAFASADVVFEDEWLAVVDKPAGVYCDALLTSFPCSAVSENPATKPNLHLANRLDRDTSGLMVITKCNKVAGKLVKAFTDHKVKKTYLALCIGFPPAWEKIKICSGHGRSKHGAWRVYAMSDVGRSLPGGSVVRDMSTRFEVLGVNGKGQFREPYSLDTDDIEPITVQEKATDQTCGGDANSSVILVRAYPQSGRTHQIRLHCQYLGLPIRGDVKYGGVIEWDGVECEGHALHAESLSFVHPITGLPITLRCSSAPELVLGLDGHSSDN

SEQ ID NO: 73145 - protein, 298 aa, Zea mays
  Coding DNA Sequence Number=SeqID_31366
MIRSLPSKSDQIPAKECEAERRTRSLPSKFARRNERPSPTEQDCEAERPTKPLPSKFAKQSDRAFPAEQACEAGQPTKSLSGKSAERSDQSGYKASLVQLKSPSRSDRSHFAAPLTDLIEGQRRLRRSDYCATRQSEADRQPGLASGTVGNSATPDPGLGLGLSPGRRRTPLCPTQGSDSGSAPEDGELRSARPRAQTWAQPRKMANSAPPDPGLGLGLSPGRRRTPLRPTQGSDSGSAPEDGELRSARPRARTRAQPRKTANSAPPDPGLRLGLSPGRRRTPLRSTQGSDSGSTEST

SEQ ID NO: 73146 - protein, 206 aa, Zea mays
  Coding DNA Sequence Number=SeqID_31367
  Gene Ontology: Mol. function=3'-5' exonuclease activity; Cellular component=intracellular; Biological process=oocyte nucleus migration during oocyte axis determination (sensu Insecta)
  Homolog annotation: Hit_ID=Q2V9B5; Match level="QueryCoverage=69%, HitCoverage=41%, E-value=4e-57, Identity=75%"; Hit description=3'-5' exonuclease domain-containing protein-like
  Pfam annotation: Domain name=3_5_exonuc; Domain location=29-188; Score=27.3; E_value=5.8e-07; Accession=PF01612.11; Description=3'-5' exonuclease
MASHHSEPLDPADADDPSDNNPELPCPSYHIVTKPGQLPVEFLEPSAAQKLVIGFDCEGVDLCRNGALCIMQLAFPDAVYLVDAIEGGKELIQACKPALESDHITKVIHDCKRDSEALYFQFGIKLHNVMDTQIAYSLIEEQEQEGKKMTSDDYNYISFVSLLADKRYCGMYYTPIRAVCLFMKGTYIVQPYRLVQPCSQDTNMEV

SEQ ID NO: 73147 - protein, 67 aa, Zea mays
  Coding DNA Sequence Number=SeqID_31368
MDVVFSNVINFVLGDIFHFGSISYVADKSGTLHHVANVGKDRGANNCHLDPEGPFTQACNSSSDDCG

SEQ ID NO: 73148 - protein, 150 aa, Zea mays
  Coding DNA Sequence Number=SeqID_31369
  Gene Ontology: Mol. function=3'-5' exonuclease activity; Cellular component=intracellular
  Homolog annotation: Hit_ID=Q2V9B5; Match level="QueryCoverage=54%, HitCoverage=24%, E-value=6e-26, Identity=63%"; Hit description=3'-5' exonuclease domain-containing protein-like
  Pfam annotation: Domain name=KH_1; Domain location=83-143; Score =41.6; E_value=2.8e-09; Accession=PF00013.19; Description=KH domain
MLVAAAALEVAGMGIGEVSSTRLLGIRIWWVDRIADPTGDVAQQKNVKCMTVIVIQSVCTDCCSMFVIDDIEADVYVPEADILSVLDVPPGKMGRVIGRKGSTIMAVKECCKVEIHIGGAKGPPDRVFIIGPEKEVRKAEAIFRGRMLEF

SEQ ID NO: 73149 - protein, 86 aa, Zea mays
  Coding DNA Sequence Number=SeqID_31370
MSQDSFMVFQRQVLDFHTLITNHLSALTAQLGAIKVQSTPAPYMIEPSSSSHVFPPLRKITPTALPAMGASPQCPLQRPPCPYQPL

SEQ ID NO: 73150 - protein, 430 aa, Zea mays
  Coding DNA Sequence Number=SeqID_31371
  Homolog annotation: Hit_ID=Q657D1; Match level="QueryCoverage=38%, HitCoverage=34%, E-value=2e-54, Identity=69%"; Hit description=BHLH transcription-like
  Pfam annotation: Domain name=HLH; Domain location=323-370; Score =29.8; E_value=9.7e-06; Accession=PF00010.16; Description=Helix-loop -helix DNA-binding domain
MDHNFSDMISSESAWSGGVGAGDGAGSGMTVLERLVLDEALAAAILELQGIQQAPACAGKEVVMVAEPTAGGGVVGEAAVAFPSMGMATPTPAYADVDADVLQRQQHHHRHHGAMGMPPDYDLTPATPAVTVTAVPPAFTSAAAYSGGNFVVGQSPAVFSTSNETTATAAAVTSTTSLNCEQGGGGGGGRRQRRANRKRKAAAERSPVAAAQESTLCSLLASTTTAGEGGIQIAFSNAAAAAKRSAKPSSLSSSGSSSISFDGRNPETNCGGVDDPMYEPDTEALAQVKEMIYRAAAMRPVSLGSEEDAGERPRRRNVRISSDPQTVAARQRRERISERLRVLQKLVPGGAKMDTASMLDEAASYLRFLQSQVRELQTLDRRNYGLTTADNNASRATATMAASGPLMSYNNGHGALPAFTFPAAAGETLY

SEQ ID NO: 73151 - protein, 122 aa, Zea mays
  Coding DNA Sequence Number=SeqID_31372
MDLHKITMGRERKNSRAKDSKNLARTQTELKPTERYGADLATLPQMKHKSHRHSRRQNRCGSSWHRGVRHQGWSPYCSGPSAKTQHSSFTTLGPSARARMTFTSDVGHRPCAPPLTAISRPT

SEQ ID NO: 73152 - protein, 781 aa, Zea mays
  Coding DNA Sequence Number=SeqID_31373
  Gene Ontology: Mol. function=hydrolase activity, acting on acid anhydrides, catalyzing transmembrane movement of substances; Cellular component=integral to membrane; Biological process=calcium ion transport
  Homolog annotation: Hit_ID=Q2QMX9; Match level="QueryCoverage=100%, HitCoverage=76%, E-value=0.0, Identity=75%"; Hit description=Calcium- transporting ATPase 1, plasma membrane-type (EC 3.6.3.8) (Ca(2+) -ATPase isoform 1)
  Pfam annotation: Domain name=Cation_ATPase_N; Domain location=110 -191; Score=52.4; E_value=1.5e-12; Accession=PF00690.16; Description =Cation transporterATPase, N-terminus
  Pfam annotation: Domain name=E1-E2_ATPase; Domain location=205-446; Score=233.8; E_value=3.7e-67; Accession=PF00122.10; Description=E1 -E2 ATPase
  Pfam annotation: Domain name=Hydrolase; Domain location=450-779; Score=53.6; E_value=6.4e-13; Accession=PF00702.16; Description =haloacid dehalogenase-like hydrolase
  Pfam module annotation: Pfam domain module=Cation_ATPase_N::E1-E2 _ATPase::Hydrolase; Domain location=110-191::205-446::450-779
MESYLKENFGGVQAKHSSDEALRRWRKVVGLVKNPKRRFRFTANLDKRNEATAMKRNNHVGLRFPDLCSLRFPCFSAGVAPSSEYKVPADVKAAGFGICAEELSSIVEGHDVKKLKSHGGVQGLASKLSTSESDGLTTSADKLATRRDVFGVNKFAEAESRGFLVFVWEALQDMTLMILAACAFFSLIVGIATEGWPKGAHDGLGIVASILLVVFVTASSDYRQSLQFKDLDKEKKKITVQVTRSGYRQKLSIYELLVGDIVHLSIGDQVPADGLFMSGFSLLINESSLTGESEPVAVNVEYPFLLSGTKVQDGSCKMLVTTVGMRTQWGKLMATLSEGGDDETPLQVKLNGVATIIGKIGLIFAVVTFAVLTQSLFRRKIIDGTYLSWTGDDALELLEFFAIAVTIVVVAVPEGLPLAVTLSLAFAMKKMMNDKALVRHLAACETMGSATSICSDKTGTLTTNHMTVVKACICGKIKEVDGVSDIKNLFSELPDSVMAILSQSIFNNTGGDVVLNQDGKREILGTPTETAILEFGLSLGGDFLAVRKASTLVKVEPFNSAKKRMGVVIQLPEGALRAHCKGASEIILASCSKYLNEDGNVIPLDAGTIDHLKATIDSFANEALRTLCLAYIEVEDGFSVNDQIPTDGYTCIGIVGIKDPVRPGVKESVAICRSAGITVRMVTGDNINTAKAIARECGILTEGGIAIEGPDFRTKSEEELTQLIPKIQVMARSSPPDKHTLVKHLRTKLYEVVAVTGDGTNDAPALHEADIGLAMGIAGTE

SEQ ID NO: 73153 - protein, 173 aa, Zea mays
  Coding DNA Sequence Number=SeqID_31374
  Gene Ontology: Mol. function=ATPase activity, coupled to transmembrane movement of ions, phosphorylative mechanism; Cellular component=membrane; Biological process=calcium ion transport
  Homolog annotation: Hit_ID=Q94IN2; Match level="QueryCoverage=97%, HitCoverage=36%, E-value=7e-64, Identity=66%"; Hit description=P -type ATPase
  Pfam annotation: Domain name=Cation_ATPase_C; Domain location=37-172; Score=22.4; E_value=3.8e-06; Accession=PF00689.11; Description=Cation transporting ATPase, C-terminus
VVQFQLTVNVVALVVNFSLSLPDRECSSHCCAIALGQHDHGYTGNILGQALYQFLVIWYLQTEGKWLFGIKGDNSDLVLNTLIFNCFVFCQVFNEVSSREMERINVFEGILNNNVFIAVLGSTVIFQFIIIQFLGDFANTTPLTLNQWIACVFIGFIGMPIAAIVKMIPVGST

SEQ ID NO: 73154 - protein, 466 aa, Zea mays
  Coding DNA Sequence Number=SeqID_31375
  Gene Ontology: Cellular component=nucleus; Biological process =regulation of progression through cell cycle
  Homolog annotation: Hit_ID=Q1XAH2; Match level="QueryCoverage=69%, HitCoverage=93%, E-value=1e-144, Identity=82%"; Hit description =Cyclin D5,2
  Pfam annotation: Domain name=Cyclin_N; Domain location=61-188; Score =72.7; E_value=1.2e-18; Accession=PF00134.13; Description=Cyclin, N -terminal domain
MGDAAAAAATASTSAPATPTSILICLEDGSDLLSDAYDGAGATDFVVARDEHLLVEDQDEEYVALLLSKESAAVCAPAEEETEEWMKTARSGCVRWIIKTTAMFGFGGKTAYVAVTYLDRFLVQRRVNRGNEWALRLLTVACLSLAIKLEEEHAPRLSEFPLDEDEFDSASILRMELLVLGTLEWRMIAVTPFPYISYFAARFREDERRAILMRAVECVFAAIKVISSVEYRPSTIAVASILVARGREETPAGSLDALKAILGSSCPQLDTGHVYSCYRAMIREDDKSPTHSTSTGVASSGVSVAGNGSPSPGANNAAGSGPPATPDSHKHNHNQRRRLRSPQRQGGQNARIQAGARSDSSDLFPGSKWEGSVKTRPKLKQSKALAQSAKASAGQTSQVAVHGRHREDRERNALQHQQLRVPLSDGVAFCAVSSNRLLVLLAARSDHGQHHIWLQLQEAAAVGQVR

SEQ ID NO: 73155 - protein, 87 aa, Zea mays
  Coding DNA Sequence Number=SeqID_31376
  Gene Ontology: Mol. function=oxidoreductase activity
  Homolog annotation: Hit_ID=Q1RDK5; Match level="QueryCoverage=55%, HitCoverage=12%, E-value=3e-21, Identity=95%"; Hit description =Putative monooxygenase YcdM
  Subcellular localization annotation: CTP_CleavageSite=5; ConfidenceScore=5.13e-01
MAPAPAEKRSHQSKRGNIKAGWQMKYGPRLSSRPKTSTVLRDLWGTGKSDFKGDFFTMNDCRVSPQPSVPMKVICAGQSDAGMAFSA

SEQ ID NO: 73156 - protein, 351 aa, Zea mays
  Coding DNA Sequence Number=SeqID_31377
  Homolog annotation: Hit_ID=Q10QA8; Match level="QueryCoverage=80%, HitCoverage=79%, E-value=1e-86, Identity=58%"; Hit description =Somatic embryogenesis related protein, putative, expressed
MTTREPREASRRDGRDSHGRRPHSSFRSRRDDPSFLQDTIFRISFGSPRRRDDRRRESDRAHHRSRDGEFLEVVDHDQKRNRDAAQSADPPNAESKSASDMKNGPSTRHERSPRGTKRFSESSEAWRPRSFFQNHLKCGDYLCFYVQHNERGSAGQGGRHYDRQASDYGRQREHLSDRDKQKTERHSLQGKIELDQQKKDGDSTWKHDGFFQLEEAAPLAKKRPPFQEMKIQESADTVTEPDSRSRNYQARGYGNHRPFLRPDDRGFRRGFPDHRSDGQRNGHDIRGRFSVRGGMDRDRFNNSYGGRSNAEQASGDQEEKWKHDLYDQTNRSPPPKTEEEQIAKVEALLAL

SEQ ID NO: 73157 - protein, 136 aa, Zea mays
  Coding DNA Sequence Number=SeqID_31378
  Subcellular localization annotation: CTP_CleavageSite=18; ConfidenceScore=5.06e-01
MARQHASRVGPARPSPYRATAEKTRRKFLVFELKNALRRWSISVRTSQELSSSPYGIYKRRTRLELFESPFNQPASARIVGACSVAVAFLQKMSIDSPRFLPPLAAAQSMDLNLLSSWVTCLPQPHHKLMVLGSNF

SEQ ID NO: 73158 - protein, 111 aa, Zea mays
  Coding DNA Sequence Number=SeqID_31379
MANRGAAAGKLTVAETFSNLREQGKNVTREVSWALDWSDKCAACAAPTAEPLDRVRLTAAKSGLRRHRKLRFARPQGSDSGSAPEDDELRFARPQGSDSGSAPEDDELRFA

SEQ ID NO: 73159 - protein, 570 aa, Zea mays
  Coding DNA Sequence Number=SeqID_31380
  Homolog annotation: Hit_ID=Q10QA7; Match level="QueryCoverage=73%, HitCoverage=52%, E-value=1e-142, Identity=60%"; Hit description =Expressed protein
PIKKETSEHNDQAFDIVEVSALECVRSMAELLQKTATGIPVTIKDSKCVIKIEDCRNTVCWKRLSCSMSCIGGFLQGLNSALESTFNDHPIASPEDRKMLLQYCSRFSSYVAKFGTFVDICVHVLFMDNKDSASIDLVSVHLPQELDCANGFLNIEAIMDELTKCGSHGVDLSKIQYMENVLLENLLKGECPLISFTLREIYSISAAIIKFHGYLSFSSDVSRQTCSPVEQLSLGTMLGIAFITLQKVADMSSWPHMFCLVWIDGVLRYLEVLGSAFTLSELNISIELYTQIINALLRAVGKCILLQQKNATLPTHEIGSSTKTLQLQNASGYAFPKDFIDTQNRLNSLKSRLRLVLGKFVSIASNTHLNAALQVIERALVGVNHCSHSIYQIYTGNPDGGTVSSDVAAGIDCLYMILDFVPGAIGNSASPDPRARTRAQPRKTTNSASPDPRARTRAQPRKTTNSASPDPRARTRAQPRKTTNSASPDPRARTRAQPRKATNSASPDPRARTRPWPRPTVSASPDPGARTRPRPWKTDSTSTSEEPPPRPTQGSDRPRHRRRHHYPTPS

SEQ ID NO: 73160 - protein, 116 aa, Zea mays
  Coding DNA Sequence Number=SeqID_31381
  Subcellular localization annotation: CTP_CleavageSite=57; ConfidenceScore=5.26e-01
MAPWWPRCAPDPPAAQPKYSPVARKLGLPFHVGPTRLLSLQPRRYQNRNRGELLYSKSDSAQQITMCRAFLVTNSATNSDLLGRHEILSEYINSHALGIAADKRRTVLQVLLVTAE

SEQ ID NO: 73161 - protein, 72 aa, Zea mays
  Coding DNA Sequence Number=SeqID_31382
MSGSATPSIGGAVEACIVGEIRGWVPSWTRQGGAQGEGEALISLLMETKFSIFRQIDDNYRFRARHMFALRS

SEQ ID NO: 73162 - protein, 88 aa, Zea mays
  Coding DNA Sequence Number=SeqID_31383
MVVVVPHLNSYPASTVTRAAGCRHITMEEHFVAKIWEAPALKSDIVTRNGYSGSDPRLGNVVPDPETWGHFRYHHVKTSHSSLYKFEL

SEQ ID NO: 73163 - protein, 352 aa, Zea mays
  Coding DNA Sequence Number=SeqID_31384
  Gene Ontology: Cellular component=chloroplast thylakoid membrane
  Homolog annotation: Hit_ID=Q9FF91; Match level="QueryCoverage=86%, HitCoverage=38%, E-value=8e-41, Identity=31%"; Hit description =Arabidopsis thaliana genomic DNA, chromosome 5, P1 clone:MRO11
MGKTTRENRDAKEEKYDALKSRQHLLGKQCVKLCFPHAVLDQIIEKDVSSSDFCTRREFARWFVKLSSKFERKRMCRIVPNKLTSDTVQCAFDDVNIDDPDFLYIQWRIWYRIPASYLSRFDLVNWKVLVEHPRALRIDEKIPSQNVCILDLRACPDVSPSMLIELMAGENNIISRVFGNTRRLQPGKPVTKAQAAAALTSGRMKEAVHEELNKLEAENQAHLSLIAEIMEELISRGDIQQQWEQKMKKEQERALEVDNNLQHVLHEHANERTDREEELADLLKERAALECQNQELINLSKHQAVNEAKSYLEAEKEALTMLRTWVEDEAGRVHERAETLEKALRRWRIPED

SEQ ID NO: 73164 - protein, 397 aa, Zea mays
  Coding DNA Sequence Number=SeqID_31385
  Gene Ontology: Mol. function=ATPase activity; Cellular component =chromosome; Biological process=chromosome organization and biogenesis
  Homolog annotation: Hit_ID=Q8L6H8; Match level="QueryCoverage=68%, HitCoverage=22%, E-value=1e-103, Identity=70%"; Hit description=SMC4 protein
MVFIGYESGSKGYRLFDPMTNRLVVSRNVIFEESKPWDWENFIDNSGFQLTETFIVDHQLPVQATTTVEDSEGSVPMASREGLSVYVSGAVAWAVQRAAEQRTWDQQSQIVMNCDPNRKTIVDITTTELDKTSSEINRHKVNVTTSEKLVKRLTKGIEESKKDREKLSAETEKMMSMFKEIEKKVFVVQEEYKKTQEMIDNHKVELDKTKEEYTKLKKAMDELRATEVDAEYKLQDTKKLAKEWEMKVKTFKKRLDEIHIIIQKDAVDPEKLKATPGDEQLNDTYDMKRAMEMVALLEAQIKDLNPNLDSIAEYRTKACLYGERVDELNATTQERDDLKKLYDGLRKRRLDEFMAGFNIISLKLKEMYQIMETFGFNASSSDKLATYLNQLTGLSLT

SEQ ID NO: 73165 - protein, 135 aa, Zea mays
  Coding DNA Sequence Number=SeqID_31386
  Gene Ontology: Mol. function=oxidoreductase activity; Biological process=lignin catabolic process
  Homolog annotation: Hit_ID=Q75J71; Match level="QueryCoverage=63%, HitCoverage=16%, E-value=8e-26, Identity=63%"; Hit description =Putative L-ascorbate oxidase
MGREAQRGRRRAGRPVEAAWMSGAQRGVVWAKGISWGKEHDVCGAPLIGNEIMMVELKDVYDSLDIHVVHCLSVLVDADQALGDYYMVASTRFIHDVGAASIVIRYAGSSSAPPTPNMTESPAGWAWSINQARLF

SEQ ID NO: 73166 - protein, 184 aa, Zea mays
  Coding DNA Sequence Number=SeqID_31387
  Homolog annotation: Hit_ID=Q75J71; Match level="QueryCoverage=39%, HitCoverage=13%, E-value=2e-17, Identity=72%"; Hit description =Putative L-ascorbate oxidase
  Subcellular localization annotation: CTP_CleavageSite=61; ConfidenceScore=5.26e-01
MVSRGHIDGKLRYIFNDISHRDTETPPSSPSTSTSLTGCSATTRWATCPSPSTGHSMSSPKSSSPSCIYLIISATWSAWRKRSPLFTNYVDFLTKFPSLQIHRKYGTNGNTDKRRTESCRTTILQQKNDFSKNMVLICHVVFSGILPILRFLLDHGDDLHEEGSLEGHDRFTVLHTTTKKDIIV

SEQ ID NO: 73167 - protein, 151 aa, Zea mays
  Coding DNA Sequence Number=SeqID_31388
  Homolog annotation: Hit_ID=Q53NY5; Match level="QueryCoverage=33%, HitCoverage=21%, E-value=2e-07, Identity=50%"; Hit description =Expressed protein
MACSKCYETSAVLSLKFLNHRNRRTIKRDPRRLMYKEKNYIEKCGFYPVQISSNVGAVLLLPLLPRCPLFVEESLGHVVAELGHEQRPRRARASHCSEAEAKVEAAIELLWVLLREALRPGTTLEMVIGKGSDEGTHFHERRGGEPYIECV

SEQ ID NO: 73168 - protein, 121 aa, Zea mays
  Coding DNA Sequence Number=SeqID_31389
MAGKFWIGPHFLGPLCELAWPKGYRGRWAIGSLLDDPESNPTRRSRDRRLLHLSSTSDRPTAMALASPLRRTTSTVPGALSPHANGCNETHEENRINKGHLTTNHGDRSSSHGAATTENSR

SEQ ID NO: 73169 - protein, 93 aa, Zea mays
  Coding DNA Sequence Number=SeqID_31390
  Subcellular localization annotation: CTP_CleavageSite=18; ConfidenceScore=5.23e-01
MASKELGGFDGHGRAQISATETKTGRGSRKSTPTSRETGREQRAREAARLCTRRSCAIRRAERKKDREEATNRTGARRGHDKAENEMEADCRK

SEQ ID NO: 73170 - protein, 45 aa, Zea mays
  Coding DNA Sequence Number=SeqID_31391
MDTLQEAPFRSLFFLNHGTMPYSVYMCGCTDALPIPVKLIIGIGQ

SEQ ID NO: 73171 - protein, 89 aa, Zea mays
  Coding DNA Sequence Number=SeqID_31392
  Subcellular localization annotation: CTP_CleavageSite=70; ConfidenceScore=5.21e-01
MNPPNPPLVGIDQVVATPNDGNTTNGKYGYQNAKSDKTRTRGNTSGPAGDTSRNKTVTVGKTTTTTPTTSTTTTSSTKLHKHMSQPVFE

SEQ ID NO: 73172 - protein, 76 aa, Zea mays
  Coding DNA Sequence Number=SeqID_31393
MGKRAGFKLIHDEVCDQLKGPRSAGQQSVIKHLKHKEGANAHGKAEDCRGVAYTTMGELEERWRWSRSAVREKQRK

SEQ ID NO: 73173 - protein, 105 aa, Zea mays
  Coding DNA Sequence Number=SeqID_31394
MAKEQKDVAYPSGSKEGSAPSGVEENVNHLCALGSQVSSSGPMTFGIAVVSTQHAPDTAITDPSQDVAYPSSLKDSGTPTRQKRCEANDGYNDINLVATKTTRRP

SEQ ID NO: 73174 - protein, 439 aa, Zea mays
  Coding DNA Sequence Number=SeqID_31395
  Gene Ontology: Mol. function=RNA-directed DNA polymerase activity; Cellular component=mitochondrion; Biological process=RNA-dependent DNA replication
  Homolog annotation: Hit_ID=UPI00004C1731; Match level="QueryCoverage =99%, HitCoverage=34%, E-value=0.0, Identity=68%"; Hit description =UPI00004C1731 related cluster
  Pfam annotation: Domain name=rve; Domain location=346-439; Score= -12.2; E_value=0.062; Accession=PF00665.16; Description=Integrase core domain
MGPIKDLKGVQRVMGCLAALSRFISRLGERGLPLYRLLRKIERFTWTPEAEEALGNLKALLTSAPILVPPAAGEALLVYVAATTQVKLLYAVILTRQKLRHYFESHLVTMVSSFPLGEIIQCREALGRIAKWAVEIMGETISFAPRKAIKFQVLADFVAEWVDTQLPAAPIQPELWTMFFDGSLMKTGAGASLLFISPLGKHLRYVLRLHFLASNNVAEYEALVNGLHIAIELGVQRLDARGDSQLVIDQVMKNSHCRDPKMEAYCDEPEAPSAQPKAPSAPEGEALRVEEERNGVTPNRNWQNPYLQYLHRGELPLDRTEARRLARRAKSFVLLVPRALVGNAFRQGFYWPTAVADATRIKAPGGYTHLLVAIDKFSKWIEVRPLNSIKSEQAVAFFTNIIHRFGVPNSIITDNGTQFTGRKFLDFCEDHHIRVDWLP

SEQ ID NO: 73175 - protein, 104 aa, Zea mays
  Coding DNA Sequence Number=SeqID_31396
  Subcellular localization annotation: CTP_CleavageSite=51; ConfidenceScore=5.07e-01
MGISYTSNGALGTPPIATITFITSGAFVILSYFSILKSHLPLLLAVALTTSANAAGLGSWLPLLPYHVTPRTWTLWHGAWLAAFPRAARAGEQEPQQRPPPRPR

SEQ ID NO: 73176 - protein, 146 aa, Zea mays
  Coding DNA Sequence Number=SeqID_31397
  Gene Ontology: Mol. function=metal ion binding; Cellular component =proton-transporting two-sector ATPase complex; Biological process =ATP synthesis coupled proton transport
  Homolog annotation: Hit_ID=Q7XIK9; Match level="QueryCoverage=98%, HitCoverage=41%, E-value=4e-49, Identity=66%"; Hit description =Putative RES protein
GQALSHDAPQLYWLTIVFLAFDVFFVVFCIALACVIGIAVCCCLPCIIGILYAVTDQEEGASEDDVNNLSKFKFRTMSDADKLAAGIAAPVGGVMTECGTNPPVEHILSAEDAENCTSLLLEYNISELPTPPISLSFWVELVGACN

SEQ ID NO: 73177 - protein, 234 aa, Zea mays
  Coding DNA Sequence Number=SeqID_31398
  Homolog annotation: Hit_ID=Q84YP7; Match level="QueryCoverage=88%, HitCoverage=63%, E-value=6e-93, Identity=65%"; Hit description =Putative UVB-resistance protein UVR8
MAGEKAPRAFPIEELPGHLIGEVLTSGGLAAADLARLEATCRALRPLAEYAASKLCAARAAFAAMGPAARGGLLERCGGSWKKVLRFLQSVEQSSGTVETTSGSMQVATGRYHTLLVHDSSVYSCGSSLCGVLGHGPDTTQCAAFSRVSFPSLSCVINISASHNHAAFVLESGEVFTCGDNSSLCCGHGEVGRTIFRPMQVEALKGIPCKQYKRKQQARGHAAGEGDQGWDSQQ

SEQ ID NO: 73178 - protein, 229 aa, Zea mays
  Coding DNA Sequence Number=SeqID_31399
  Subcellular localization annotation: CTP_CleavageSite=38; ConfidenceScore=5.04e-01
MAGLPVALTGMRVCTRGGPVAGLVVTCGSFSLGADGIRAVLNFQFFSSNLNALNTEPKSSEEIESSRPILEHAMDHPLSLNPENKTDAQVDYGPNNTSTTGRAHSGRLVSTVAPGDGKEDDDNNGVEAEEARDERDEVVDGDNSALGGAAEAEDKTTEISISAWRWFERTVTLRDSRGTRTNWCSRHTNSSAHICHVAAAVGANAANKQPATAVRRWDLCTVCCRGRRR

SEQ ID NO: 73179 - protein, 203 aa, Zea mays
  Coding DNA Sequence Number=SeqID_31400
MVDERTGRAAGTPAGSGSTRTGDRRHGDELGMQRARSNSAATRRGETCDVHENSGAMHVGAIQFSCNSCNLEFRVGVGGQGTELARGGCAGRALGPLETCLQQAGRSAKATTAGHDCALAEARHARGRSAKAAMAEQGGRYVVAASMKAHAAGGGTWDARRATSARQNGFLAAWDKAERRGHEGSYARKKGSEARRKKAHLCT

SEQ ID NO: 73180 - protein, 113 aa, Zea mays
  Coding DNA Sequence Number=SeqID_31401
  Subcellular localization annotation: CTP_CleavageSite=23; ConfidenceScore=5.12e-01
MAPRARRIKTSTSPAAARERTVSASTSRRRPRPEHLPLDIDTNATATATANGSDASPSPAPSSSHTPCPTPTGAGGIGSRHNQACAACKYQRRKCNSHCELFFFSPPSSSAAS

SEQ ID NO: 73181 - protein, 350 aa, Zea mays
  Coding DNA Sequence Number=SeqID_31402
  Gene Ontology: Mol. function=nucleic acid binding
  Homolog annotation: Hit_ID=Q69NK8; Match level="QueryCoverage=95%, HitCoverage=64%, E-value=1e-118, Identity=71%"; Hit description=CwfJ / zinc finger(CCCH-type)-like protein
  Pfam annotation: Domain name=CwfJ_C_1; Domain location=277-349; Score= -2.5; E_value=4.8e-06; Accession=PF04677.5; Description=Protein similar to CwfJ C-terminus 1
  Pfam annotation: Domain name=zf-CCCH; Domain location=210-236; Score =15.7; E_value=0.011; Accession=PF00642.15; Description=Zinc finger C- x8-C-x5-C-x3-H type (and similar)
  Pfam annotation: Domain name=zf-CCCH; Domain location=242-268; Score =25.9; E_value=0.00014; Accession=PF00642.15; Description=Zinc finger C-x8-C-x5-C-x3-H type (and similar)
  Pfam module annotation: Pfam domain module=CwfJ_C_1::zf-CCCH::zf -CCCH; Domain location=277-349::210-236::242-268
MGGGGFYTPEGAAEGFKEKSQITWKGAHPCPSRRMSPETTAQPRRDAIVRPPLVLAGSHPVASRYAPTSSGLGEATASPSTVLDPNGYDPIVAELVAEIKPRYHIAGTKGVFYSREPYVNDSAAHVTRFIGLANVGNKEKQKFIHAISPTPASVMSSADINAKPPNATLSPYVGSAKSVPIEEAPKRAAENIDSQYWRYDVKRQRHGEAGGGGLCFKFVSSGSCQRGSRCSYRHDEEAVEHYQRNVCFDFLNKGKCERGPECKFVHSLSGETALRDARPPSERRRVESSCWFCLSSPDVESHLVISIGEGYYCTLAKGPLVPNHVLMIPVGTLPQYIDDASGSRGRTWEI

SEQ ID NO: 73182 - protein, 148 aa, Zea mays
  Coding DNA Sequence Number=SeqID_31403
  Subcellular localization annotation: CTP_CleavageSite=59; ConfidenceScore=5.19e-01
MVVMTALLLLCRACWSAAASLSPFSSLCLLTTALSFSPSVEPAPRLLGSALLADVAVIAAVPLASISLVLHVRCNHASVHRRPQPSCSRSSLRRPSPLLHATREAEAKRLHPLQRHKYLLVLCCRAASPLELPPYTAGNPIVEPSLTT

SEQ ID NO: 73183 - protein, 90 aa, Zea mays
  Coding DNA Sequence Number=SeqID_31404
  Subcellular localization annotation: CTP_CleavageSite=37; ConfidenceScore=5.76e-01
MPDYKLAQRTGCALHSTSMMSHRPPRSTRPVPLASSRCSSARSRRFKTPRLNPSDIKPNLLGLGLEPPPDSGSIILSLRRTAVPSSFRLS

SEQ ID NO: 73184 - protein, 63 aa, Zea mays
  Coding DNA Sequence Number=SeqID_31405
MPSLGSSKHVATNSLGVVETMLRRRRSCKKKQLRLKLLEHAAEDAVHEASELQHIRRRRVEPT

SEQ ID NO: 73185 - protein, 123 aa, Zea mays
  Coding DNA Sequence Number=SeqID_31406
  Subcellular localization annotation: CTP_CleavageSite=20; ConfidenceScore=5.20e-01
MAPSSATSAPRQPIVTSGASTSMPRSVAPNRVISVLRYFVLDFQYPIGSKLCQDKEDNLQQWRHHQCAQNIHRRSSWHGGLSLSVGLPLYGPVIGFNALVALATIPALAPLPSPLCTSASLLE

SEQ ID NO: 73186 - protein, 95 aa, Zea mays
  Coding DNA Sequence Number=SeqID_31407
MVLLYLDQPEICPGGPPQQRLPRCSLGGLRLGPPSSPPTTATFAALTAAADDEGCGDGDASGKRLTKKEIYARLCRSTLLLMPQKRKLIWSFLPW

SEQ ID NO: 73187 - protein, 109 aa, Zea mays
  Coding DNA Sequence Number=SeqID_31408
MQNLHIQCCVTGAASVPRAAGPRAHAVGDYGREAAPAMGNRAAVGSTRRLVGPGGSSRHNNRPHALLSSPIAPRRGIHTTDRNIAAPLLGLPARATFSPFECAVVSSRV

SEQ ID NO: 73188 - protein, 356 aa, Zea mays
  Coding DNA Sequence Number=SeqID_31409
  Gene Ontology: Mol. function=hydrogen ion transporting ATP synthase activity, rotational mechanism; Cellular component=proton -transporting two-sector ATPase complex; Biological process =intracellular signaling cascade
  Homolog annotation: Hit_ID=Q5NA51; Match level="QueryCoverage=74%, HitCoverage=62%, E-value=1e-113, Identity=74%"; Hit description=Leaf senescence related protein-like
MASPGRMGRVKQVGWNRTTLSPAGREGMRRGMAVFVTELIRGADPWTERQWTARFAVNWLGADLATGKLSNGRSSGGSGGGGEMVSGSFSRSTSARLTSRGGVGSPRVSTPGAVHRNWWPPAPSGPSFDRVVLAFFLASVALVLSCALYLYVFRYLGRSRVVAEFAGENLESCDVFDGVWVPDQRHPLYNSSQCPFAERGFNCLANGRKDTEYLKWRWKPRGCDLPRFSARALLQWLRGKRVVFVGDSMSRTQWESFICMLMTGVDDPETVYEVNGNQISKTIQFLGVRFESFNLSVEFFRSVFLVQQIPALRHGRRRVRAILKLDKLDGLSQEWVNSDVLIFNSGHWWTASKLFD

SEQ ID NO: 73189 - protein, 102 aa, Zea mays
  Coding DNA Sequence Number=SeqID_31410
MSRALLSHVLHRPPHFAYTCAVEAVPGPTEEVPAPHARKSRMRRLHQIQKTEVKKRSEPKQASFKNKRCPIRFHFVFLCAAAGEGEEEEATGLPSDCRAAIC

SEQ ID NO: 73190 - protein, 74 aa, Zea mays
  Coding DNA Sequence Number=SeqID_31411
MWSLVPDEDTLGGRHETRGPTGGEGFRNLSWGPTSAVCGMTSLVFKTKILSGSNDGKCRSFHHLRFRPNRGGKY

SEQ ID NO: 73191 - protein, 96 aa, Zea mays
  Coding DNA Sequence Number=SeqID_31412
  Subcellular localization annotation: CTP_CleavageSite=30; ConfidenceScore=5.27e-01
MWTKSSNDGTLTFVANTDRTLLRKSRRYARRPMGKGTDTRQDLPRVNPFFTSHYAPFWEKALYAQKSRFPAGQAHMSHTTLIQLANQAHSDGLGTL

SEQ ID NO: 73192 - protein, 647 aa, Zea mays
  Coding DNA Sequence Number=SeqID_31413
  Gene Ontology: Mol. function=protein serine/threonine kinase activity; Cellular component=membrane; Biological process=protein amino acid phosphorylation
  Homolog annotation: Hit_ID=Q8RZP4; Match level="QueryCoverage=94%, HitCoverage=94%, E-value=1e-179, Identity=57%"; Hit description =Putative receptor protein kinase PERK1
  Pfam annotation: Domain name=Pkinase; Domain location=312-598; Score =1.8; E_value=1.1e-08; Accession=PF00069.15; Description=Protein kinase domain
  Pfam annotation: Domain name=Pkinase_Tyr; Domain location=312-598; Score=-20.1; E_value=3.1e-11; Accession=PF07714.7; Description =Protein tyrosine kinase
  Pfam module annotation: Pfam domain module=Pkinase::Pkinase_Tyr; Domain location=312-598::312-598
MAAVWKWKHAVFLVLVTMMRPQAAEAGGAANATAACPLDLGYVATLPWDRAPCEPPVTNGTACCMTLLSVFAVGLASRLRATGRFRLPSARASAACLRAFSAALAAPPLSLPASLVPGCFPVQSQFAISPDYCAGVTTAAEYVAVAGNASAAGLNASCGADVTSMSLCNRCLAAGVDASARLTAAAGNESKSLNCFYLTVLYAAGISSSAGPESPVTARCALGLALSTPPPTSSPTSSSATHTTNIAVAATVPIASLLLVSLVALLVWRYRHELSKDRRSIQISEERRSRPRPNTGSVMFDICELAKATGGFAERNLIGRGGFGVVYRGVLVDGTVVAVKKMLEPDVEGGDEEFTNEVEIISHLRHRNLVPLRGCCIVDADADPDPDEGKQMFLVYDYMPKGSLDQYIFDDAQGRRRPALSWAQRRTVLWTWPGGSSTCTTASSRGSTTGTSRRRTSSWTRTCARAWRTSASPRRSREGQSHLTTRVAGTHGYLSPEYALYGQLTEKSDVYSFGVLVLEVMSGRRALDLSDPSGVVLITDWAWAHAKAGRPGDVLAQALRKEPSTSVAAMERYVLVGILCAHVTVAFRPTMPEALRMLEGDMDVPDLPDRPQPFGQRIAFDEGETNFSASSILSGGGPFVDFGDMLR

SEQ ID NO: 73193 - protein, 509 aa, Zea mays
  Coding DNA Sequence Number=SeqID_31414
  Homolog annotation: Hit_ID=Q6H6L0; Match level="QueryCoverage=32%, HitCoverage=22%, E-value=1e-43, Identity=60%"; Hit description =Putative Scl1 protein
  Pfam annotation: Domain name=RNA_pol_N; Domain location=317-376; Score=125.6; E_value=1.4e-34; Accession=PF01194.8; Description=RNA polymerases N  8 kDa subunit
MDCFSMSGEGEASGIVKVNFIPALTTLAPLRSSKDEDRLRRPSFSASAPQSGVLGGIPHLDQLEVTGEPTRTEAPEPRSRELILLTAAAAGRRTGPAAVSCRRVPPASTWGVVVADSWDAMLGNAAAAAQDQTFLNWFIGAAGDLNQSGPPLPVHHQPLLDNVGFGFPAADPLGFTLDPHLGGVASDMSSPGAVSQTTNSGGGGNKASSAFGLLSPESASFQPPPFPVLFQEGIDTKPPLDTQSPGLLHQYRHQPTPAATFLMNLRGSRRRAFSPGWTKGHSIQSSDRVGVLWRKNTRSLARGRLVRRRESAAAVKMIIPVRCFTCGKVIGNKWDLYLDLLQADYSEGDALDALELFRYCCRRMLMTHVDLIEKLLNYNTDGAAQTTATIYASWTLAEASGSQRPVLVRSGAQPVQEAQMLESVRVREGSFGQVATGHRLDCNCGQLQSLNLAAVIASLTRESPAWLQDVLSSGLWTCAAIRAWLRWQTAALACAPWDLHGRLLEMANI

SEQ ID NO: 73194 - protein, 89 aa, Zea mays
  Coding DNA Sequence Number=SeqID_31415
MLHTRGGGAPTSLPWGSTTDTVEGAQSACQLPCHAVETGGPCVVAYTPTPAHPSTPSSGTASAPASAPYSCSHPLVYVWNYKFKLLVYN

SEQ ID NO: 73195 - protein, 75 aa, Zea mays
  Coding DNA Sequence Number=SeqID_31416
  Gene Ontology: Mol. function=sequence-specific DNA binding; Cellular component=nucleus; Biological process=regulation of transcription, DNA-dependent
  Homolog annotation: Hit_ID=Q40702; Match level="QueryCoverage=59%, HitCoverage=21%, E-value=1e-16, Identity=88%"; Hit description=MADS -box transcription factor 2
MWRAASCPLPSKPVEVYEEKIGGTAAEDEKHQQDIALSGSMGDLELGYHTDRDLAAQMPITFRMQPSHPNLQDNN

SEQ ID NO: 73196 - protein, 62 aa, Zea mays
  Coding DNA Sequence Number=SeqID_31417
MHDLLLVLGLLGHFGWLLGQEDELPGCSDGTVAAAAKETASSTGAGADADAGAGAGGECVVH

SEQ ID NO: 73197 - protein, 58 aa, Zea mays
  Coding DNA Sequence Number=SeqID_31418
MEDFEEFQDYDEFLVYFSGNPQLCGCLGHVDVLEYLSTIYFEHCVMMSNYVIAVYCGY

SEQ ID NO: 73198 - protein, 185 aa, Zea mays
  Coding DNA Sequence Number=SeqID_31419
  Subcellular localization annotation: CTP_CleavageSite=82; ConfidenceScore=5.51e-01
MALGRPAVSSSLRSDFLCSMANSPQPPARIPASARAGARPSAISMPELVLQVAPWRSASPPCPSAIGSPSSFNLAVGLVSVQAAIAPCQLSIFDPRLDVILPCNACLVLDKTPKSGPSSFSRSSSWFRSHRIISRHFSECSFMCIMHLIRYASWSRDAKVKSQVFPQEDAKSGHLRKTMSSVGPT

SEQ ID NO: 73199 - protein, 369 aa, Zea mays
  Coding DNA Sequence Number=SeqID_31420
  Homolog annotation: Hit_ID=Q6H4U9; Match level="QueryCoverage=29%, HitCoverage=30%, E-value=8e-13, Identity=40%"; Hit description =Dentin sialophosphoprotein-like
  Subcellular localization annotation: CTP_CleavageSite=64; ConfidenceScore=5.06e-01
MGCLFGCFRASGDGGDAKGAGDRNTSLAPATTTTIQQDGTGRRIRPPSRNALSAVFQREDEGSRAAQAASSWAEQTGESKRMDQELEPQKETHSGCLPVMSDDVHFMEAPKVENCENSSKVSSELHCTRCNEGEEQQQALDLAEDFEECGVSKEDFFPPEKLEDPKCAKNDHVVSMEISISDECSLFQSSEGSVSPSNKIRGSMNTTSTEKSPKTEATIHATRKKLLKSNTSELELPSLAQWLKPPNPKKAFRDEAVTGDRSHSAKSSDEDRPIIGMVAAHWKDKEPANFTSKWWDGNGIPNSTNKYKEDQKVSWHATPFEERLEKALSEEKSLSERNCSSGKTSQFLGVEGEESDTAGSNRLYATAYA

SEQ ID NO: 73200 - protein, 225 aa, Zea mays
  Coding DNA Sequence Number=SeqID_31421
  Gene Ontology: Mol. function=transporter activity; Cellular component= integral to membrane; Biological process=transport
  Homolog annotation: Hit_ID=Q53CL7; Match level="QueryCoverage=72%, HitCoverage=31%, E-value=9e-17, Identity=30%"; Hit description =Putative high affinity nitrate transporter
MEGERARAESVEWCWPGGRTARPDGKARPWGSSIGYKQLLGSMLSKHLADDEENCWYCVGGAEAECGVDDEFRATDLRPLSLLSPHTQAFHLASLSLFACFFAAFAAPPILPALRPALVLTPSDAPAAAVGSLSATLVGRLTMGPACDLLGPRRASGFASLLATLAVAVTASSPAGFVVLRFVAGLSLANFVANQHWMSGIFAPSVVGLANAVTAGWANVGSAAA

SEQ ID NO: 73201 - protein, 143 aa, Zea mays
  Coding DNA Sequence Number=SeqID_31422
  Subcellular localization annotation: CTP_CleavageSite=25; ConfidenceScore=5.49e-01
MGASNASLLFEYSRTSSTDQLYETNSMTNSPIMNNSHMMTNSPMMNNSRMMTNSRMMTNSPMTNSADQLCETDRMTISLMMTNSRMMTNSSVMTKSSMMTKSSMMTNSPVMSNSSMMTNPLMTNSDDQLSTNQLWRTDSLSSN

SEQ ID NO: 73202 - protein, 482 aa, Zea mays
  Coding DNA Sequence Number=SeqID_31423
  Gene Ontology: Mol. function=protein binding
  Homolog annotation: Hit_ID=Q8H8M9; Match level="QueryCoverage=23%, HitCoverage=11%, E-value=1e-11, Identity=47%"; Hit description =Putative glutamic acid-rich protein
  Pfam annotation: Domain name=AUX_IAA; Domain location=88-210; Score= -100.3; E_value=0.027; Accession=PF02309.7; Description=AUXIAA family
MAKVPDLGSDFAQKLLRDLRRRRERLGFDSTAAAPRARGELHQLDLQGAPATLAMADLHFSLGRRCPPLVRARAGELAPWPRLLASRLGYEDTTLALTLRLPGSDSGRSSSLAAPSAAPSPKARVVGWPPVRSYRKNALADSSKANRAANFVKVVVSRRSSASAPPAPGSHRRSLPQRVFFPSRAVSSCFLRTRRAELAPELCSSLARRVLPCTCPWRPSSQPARPPVLCVARCSSSHGAQPPSRLTGSPSAAPSFFLPQLPRFSLHLPPFSVACPAELPCAPGFSPSLLEFGQARAAPWRPASSVLSLDAHSVPSNSCAVPCSGSMAAPNSLRALAYNSTAHLPTCHGHRALLPDFCSPRALISLFASAHNSPSSMAGSLLAGDAPAPAQPRLHRQGSSSSSIARPGTPRRHDAPAIADSHATVPLQGGRGGKQTAPAANAGGVDVQMALALALSNSGKLQNVHLVARQGGSGGSSFFWLV

SEQ ID NO: 73203 - protein, 51 aa, Zea mays
  Coding DNA Sequence Number=SeqID_31424
  Gene Ontology: Mol. function=nucleotide binding; Cellular component =microtubule; Biological process=microtubule-based process
  Homolog annotation: Hit_ID=P33626; Match level="QueryCoverage=62%, HitCoverage=52%, E-value=5e-12, Identity=93%"; Hit description =Tubulin alpha-4 chain
MRECISVHIGQAGIQVGNACWELYCLEHGIQSRQFLTDSDVVLSHLPFRDQ

SEQ ID NO: 73204 - protein, 54 aa, Zea mays
  Coding DNA Sequence Number=SeqID_31425
MGCMGTTLCSYQGAARTRTPSATNYDVHSPTWEDGRPAHLPSAMQATDLDHGPY

SEQ ID NO: 73205 - protein, 50 aa, Zea mays
  Coding DNA Sequence Number=SeqID_31426
  Homolog annotation: Hit_ID=Q6Q625; Match level="QueryCoverage=94%, HitCoverage=15%, E-value=1e-07, Identity=58%"; Hit description =Putative root hair defective 3
MKLTCVLSAFNLDEPTEKVLLMKLEKDGRTFLESKAKEEVGRVLICMKDR

SEQ ID NO: 73206 - protein, 415 aa, Zea mays
  Coding DNA Sequence Number=SeqID_31427
ARWEIGSAAGRLHCAVRDGGDVLVFRLDDRRGGWELATVVSVCEILQRPWQPETTFELSDSEDDDDDEAAAGQAELERVGAVIAVANRYSRSRVRVPRDDVRLLPFQGADVEVVLLSGWRVVAFETVTRRRREAVLPVPGQPTTKDWGVVEYIAHTNTLALVGPVVFMEPPDDQEEVSSVLSGTIIRGTLKTPNSQLVTPISIKLQRPDGATRQGESDRQSGLAKGATANSAPPDPRARTRAKTRKMANSAPPDPRARTRAKTRKTANSAPPDPRARTRAKTRKTANSAPPDPRAQTRAKTRKTANSAPPDPRARTRAKTRKTANSAPPDPRARTRAKTRKTANSAPPDPRARTRAKTRKTTKLRFARPQGSDSALASAERLPPRPTPWLGLGHGNKGQTQPRLRRNPHVALPRA

SEQ ID NO: 73207 - protein, 149 aa, Zea mays
  Coding DNA Sequence Number=SeqID_31428
MDPAPEPIAGGGGLQRRPAAAARSGVGAQEPPPRGQLAIHADVEPPPRPWPGMQKLAIVAIVVLGCLQFLPATHFRDPNDPQRNWIPFDGSRNPTFCSAYVNSLVDTEMHTYTQVFSSVNGSMARSGTHRKTTQGSITQGWVGFPCTSL

SEQ ID NO: 73208 - protein, 694 aa, Zea mays
  Coding DNA Sequence Number=SeqID_31429
  Homolog annotation: Hit_ID=Q8H8M9; Match level="QueryCoverage=99%, HitCoverage=73%, E-value=1e-142, Identity=46%"; Hit description =Putative glutamic acid-rich protein
MLMMLQDATDYMEMGSSGNDGKVLLLEGTESWKRSAPRSTSSASARLVEIVDDDSGTEQADDAKSSSDTFMQIVPHGMSQSYRRNHISPSQLAGAATNCKSNASSGEKDGSKVRMPGLIAKLMGLENLPSAKTAAERKETERFVKPEAVPRKSTAATVMAGTLPIRIIASERMPSRGQLKNFQTREWNISLTKSEEPVLSSRFSHLKVDKQTRQTMRQMLSKQEGTERRASVNQVADEKIVHQDTKLAEDSNQQKTTVSAGRKMSFLQRFRKTGKNKPATEEKVTVEENKQKLGKKQTTSTKQRDSEVKPRKTREKFNKENLANPGNKTLGNNGKTAKTDQTRRQAQSKPSDKQVMEKKVQSYRRMQSETAIQNLEQKRPLKPEPAHSNTKEKLQSVTPTEPQNGEGTKVDDTRSQKPSDNTPGDDGVCEQSAAEMEDSGTKALPYQSEKELTEETIDPITAAQATPESIAETNDDSTVSEAIQTPETFPEEEQQQQMKEVNDESTNGLDHLMNPSNPNDLRNHNMDVVSCDSFTENQLLLAEMLLKDPYLLETTKAITGFHVPASAAQVNTGKWLDEGNRVLSDIGREVIRRKGKRMEAMVDVSATRAANLKLRTLDDLVRELDSDIQSLHVPRKIQQRGDDHSTAENLRMVLRYDMESTHSDANSVWDFGWNRAWDCGREDEVVRIWRDILG

SEQ ID NO: 73209 - protein, 134 aa, Zea mays
  Coding DNA Sequence Number=SeqID_31430
MAEIERGHRGERKRKKGLTSVTRGRWHGRRAGHGEHIRAVPIWGVVDERTMGKQRKWGEQLSEKMNWAPWGEDGEGMWLSGCMTWAPKGAASRLGERARAPCGQGGGTKIWGGACCAGGPGWATRLHTGAGRLG

SEQ ID NO: 73210 - protein, 123 aa, Zea mays
  Coding DNA Sequence Number=SeqID_31431
MGSLLGLHNQNSDGEGADCGRGWSQGEHHNWKVRERVTSTPLEVSRRDAAIGRDHGRVERHGELTMGWPWEEEQGAEESVLAAGSGDASHQGEEGDIHGKLGLIHAMERDRGGAPWEGARGGQ

SEQ ID NO: 73211 - protein, 74 aa, Zea mays
  Coding DNA Sequence Number=SeqID_31432
MPTGETLRCPVVLRPSPLSLLPHVIPSSPAVAVRVEHGREKGGHEDDGFGYDYGNGEDEVVEEDFQEFQEYDEF

SEQ ID NO: 73212 - protein, 130 aa, Zea mays
  Coding DNA Sequence Number=SeqID_31433
GRMGSRGEEGKVVMAGARQGSAGTRRSACRGGAQGCAVNAAKRKHAGTGHDCSRTEGGCTAMDKAGAGRELGLGRGLAAFGWIGGARTEARPTMGTAGHGGRGAGRTGHGSNNSLAANMSFRIDGREWGA

SEQ ID NO: 73213 - protein, 84 aa, Zea mays
  Coding DNA Sequence Number=SeqID_31434
MTVSAKMLRHVTCHVITFYDENVRHKCIATGTYDEIERHRCSDKSDMRHKIYDDLLMIVIVVHLTRTFCDDGLYVTMTSQKYNP

SEQ ID NO: 73214 - protein, 109 aa, Zea mays
  Coding DNA Sequence Number=SeqID_31435
  Homolog annotation: Hit_ID=Q651K5; Match level="QueryCoverage=34%, HitCoverage=5%, E-value=9e-09, Identity=84%"; Hit description =AlphaSNBP(B)-like
MKHINKELTGLEHSHLRKLSDSSGCGASAGEEKGITIAKPDAGLLGVDGVKDALIPDLALQSQANAAPDVQLCGSDHPTAGGRGSREVEEEDVEADGGASAAMAVIGSR

SEQ ID NO: 73215 - protein, 59 aa, Zea mays
  Coding DNA Sequence Number=SeqID_31436
MQGRSSLPGLLAMGAELAAGGTFGQGKKWGELCWNFWAPSKGPTAMEVAGELWEKELAP

SEQ ID NO: 73216 - protein, 102 aa, Zea mays
  Coding DNA Sequence Number=SeqID_31437
MAAADVSPYGRSVHKQSEHLPYVPDIHLRWWRHGRARRDERQEQVSKYDEGVGRACYRQDGSAGGEPPEAHDVACGGGEQEEIGLPGRRPRRGAEDLGKETR

SEQ ID NO: 73217 - protein, 128 aa, Zea mays
  Coding DNA Sequence Number=SeqID_31438
  Subcellular localization annotation: CTP_CleavageSite=49; ConfidenceScore=5.47e-01
MAFSAALAWAATQLLRGSLPPARFAAAVSPLTYSSSRQLCSTPIANDSSAAGPWDEAETEILRDVEPIVNIVKDIIHSRSFWDLVRLETLVKDKNLLQSGKINSGKAWNGRAPVACINAFVCDKEACS

SEQ ID NO: 73218 - protein, 122 aa, Zea mays
  Coding DNA Sequence Number=SeqID_31439
  Homolog annotation: Hit_ID=Q7X9J6; Match level="QueryCoverage=44%, HitCoverage=24%, E-value=2e-07, Identity=58%"; Hit description=S -locus protein 5
MAVLAKVASIMLQWAPTVAAHIEVQFVGRVHSSNTMLLHSLLAPFLQIPDAFGAEDERIMAHRLALAAREIEIPRTFVYAESKILLFPSGLLASLASGSIQQGMECKHNTHGPTFMVNMVGT

SEQ ID NO: 73219 - protein, 118 aa, Zea mays
  Coding DNA Sequence Number=SeqID_31440
  Homolog annotation: Hit_ID=Q6QP51; Match level="QueryCoverage=42%, HitCoverage=22%, E-value=3e-07, Identity=57%"; Hit description =Putative growth-regulating factor 1
MAASRTTRPVALTPRRDRRRLWQGKQATLRLRHNNRVKKGPGKGDTPKRILLREGNRPRASLLIKGSKAGPSRGLTAASERVGSAPTTGQRFEGRPLGRVQRSPQATRAPHPLLIRGS

SEQ ID NO: 73220 - protein, 70 aa, Zea mays
  Coding DNA Sequence Number=SeqID_31441
MNTGILCKEMLRCVRKEGKVFFAFSSKVTHGFRPQQSNSHMDGKEVIKGSFSPTTFGMRFGLLTFGTAIL

SEQ ID NO: 73221 - protein, 54 aa, Zea mays
  Coding DNA Sequence Number=SeqID_31442
MSKLTQAPLLQLSDFDKTFELECDVRDWRSAHPRRTLYYVVPTLIIKNFGLGDI

SEQ ID NO: 73222 - protein, 169 aa, Zea mays
  Coding DNA Sequence Number=SeqID_31443
MAFFYLELVRREGFGKGERDGVVRRNLDGAPANGGWARRGGGRRISDEAHKAWARLSKNKVADSELGRGREERERELGRGDGREVRSAGLYRDQGERDEHRGGREDGDDAINAINGVPSMGARMGVEEGRGPAVSGAKGGETARRGFVGVGSAGEAERRGRACLALWRE

SEQ ID NO: 73223 - protein, 96 aa, Zea mays
  Coding DNA Sequence Number=SeqID_31444
EEVAKTTKQRDLKRSDRAFSKAVPNDDRPTMPVSKPPAIDDKLAALYAYRKAKGLCYKCGLAYTRGHKCVDIVQLHLVDEIWQFPSTPRRSGATHI

SEQ ID NO: 73224 - protein, 121 aa, Zea mays
  Coding DNA Sequence Number=SeqID_31445
  Pfam annotation: Domain name=Zea_mays_MuDR; Domain location=1-120; Score=-50.2; E_value=0.054; Accession=PF05928.2; Description=Zea mays MURB-like protein (MuDR)
MDRVPPVEAVADAYDAARAAVVAAVEAHSVAIIAEKEAIAAMKYAAIAREKFEGAVDSVKNPTFVYANATIEALDNVDFVQDNVDLKYHVSIKNSLRYAIQEMTIQSTLLVSRQWSEHSMV

SEQ ID NO: 73225 - protein, 121 aa, Zea mays
  Coding DNA Sequence Number=SeqID_31446
  Subcellular localization annotation: CTP_CleavageSite=50; ConfidenceScore=5.51e-01
MAPRGTGLRRSGRAQSAIGSRAAPAPPATRRWRVGAGGPMAVPAAASRSCAAERAPRRGHAGIAVLAPPRYGGVLDSWERGRTTALLCDADAAEKQREGSGGPEARGPVSFRWHLDEEDDI

SEQ ID NO: 73226 - protein, 421 aa, Zea mays
  Coding DNA Sequence Number=SeqID_31447
  Gene Ontology: Mol. function=voltage-gated potassium channel activity; Cellular component=integral to membrane; Biological process=potassium ion transport
  Homolog annotation: Hit_ID=O04242; Match level="QueryCoverage=97%, HitCoverage=42%, E-value=0.0, Identity=83%"; Hit description =Potassium channel
  Pfam annotation: Domain name=Ion_trans; Domain location=33-233; Score= 126.9; E_value=5.5e-35; Accession=PF00520.21; Description=Ion transport protein
  Pfam annotation: Domain name=Ion_trans_2; Domain location=142-239; Score=60.4; E_value=5.8e-15; Accession=PF07885.6; Description=Ion channel
  Pfam module annotation: Pfam domain module=Ion_trans::Ion_trans_2; Domain location=33-233::142-239
CWETFLIILVVYSAWVSPFEFGFIQKPTGALAAVDNVVNAFFAVDIILTFFVAYLDRMTYLLEDDPKRIAWRYTTSWFVLDVASTIPSEFARKILPPDLRSYGFFNMLRLWRLRRVSSLFARLEKDRHFNYFWVRCAKLICVTLFAVHCSACFYYLLADMYPTPTDTWIGNSMPDFHQRGLWIRYVVSVYWSITTLTTVGYGDLHAENTREMIFNIFYMLFNLGLTAYLIGNMTNLVVHGTSRTRKYVSRFSPFCLVLADTNLYKGHIEVAPNTLLFLLCFGRKRDTIQAATSFALRNQLPSRLQDQMISHLCLKFRTDSEGLQQQETLDVLPKAIRSSISQYLFFNLVQKVYLFEGVSNDLIFQLVSEMKAEYFPPREDVILQNEAPTDFYILVTGSAELIELQNGGEQASLCSLMLKWQ

SEQ ID NO: 73227 - protein, 110 aa, Zea mays
  Coding DNA Sequence Number=SeqID_31448
MGKSKKGGSSSHHSGDKRKREPSPPSEDFGDFEYSEEEFSTEAEGSPAIERSKLEGSDESEVSSGEENSSDSSEEESGGDGDDEGDGDGGKGDGKSGSGSSKASGKVPLA

SEQ ID NO: 73228 - protein, 95 aa, Zea mays
  Coding DNA Sequence Number=SeqID_31449
  Gene Ontology: Mol. function=DNA binding; Cellular component =chromatin; Biological process=regulation of transcription, DNA -dependent
  Homolog annotation: Hit_ID=P40621; Match level="QueryCoverage=82%, HitCoverage=50%, E-value=2e-20, Identity=66%"; Hit description =HMG1/2-like protein
  Pfam annotation: Domain name=HMG_box; Domain location=46-85; Score= -1.6; E_value=0.017; Accession=PF00505.9; Description=HMG (high mobility group) box
MAEVRKGPGRYGREFKLGGGLAVKSKGAEKPTKGRKAKAGKDPNKPKRAPNAFFVLMGEFRKEFKEKNPKIKSVAAVELNFPGWKSCRRQVEIPE

SEQ ID NO: 73229 - protein, 1068 aa, Zea mays
  Coding DNA Sequence Number=SeqID_31450
  Gene Ontology: Mol. function=RNA-directed DNA polymerase activity; Cellular component=intracellular; Biological process=RNA-dependent DNA replication
  Homolog annotation: Hit_ID=UPI00005A975E; Match level="QueryCoverage =95%, HitCoverage=59%, E-value=0.0, Identity=89%"; Hit description =PREDICTED: similar to Retrovirus-related Pol polyprotein from transposon 297
  Pfam annotation: Domain name=RVT_1; Domain location=56-225; Score =151.7; E_value=1.9e-42; Accession=PF00078.17; Description=Reverse transcriptase (RNA-dependent
  Pfam annotation: Domain name=RnaseH; Domain location=455-582; Score= -0.0; E_value=5.8e-05; Accession=PF00075.14; Description=RNase H
  Pfam annotation: Domain name=rve; Domain location=780-939; Score =124.3; E_value=3.3e-34; Accession=PF00665.16; Description=Integrase core domain
  Pfam module annotation: Pfam domain module=RVT_1::RnaseH::rve; Domain location=56-225::455-582::780-939
MPGIPRDVAEHSLDIRAGAQPVRQPLRRFDEEKRRVIGEEIHKLMAAGFIKEVFHPEWLANPVLVRKKGGKWRMCVDYTGLNKACPKVPYPLPRIDQIVDSTAGCKTLSFLDAYSGYHQIRMKESDQLATSFITPFGMYCYVTMPFGLRNAGATYQRCMNHVFGEHIGRTVEAYVDDIVVKTRKASDLLSDLEVTFRCLKAKGVKLNPEKCVFGVPRGMLLGFIVSERGIEANPEKIAAITSMGPIKDLKGVQRVMGCLAALSRFISRLGERGLPLYRLLRKTECFAWTPEAEEALGNLKALLTKAPILVPPADGEALLVYVAATTQVVSTAIVVERPEEGHALPVQRPVYFVSEVLSETKIRYPQVQKLLYAVILTRRKLRHYFESHPVTVVSSFPLGEIIQCREASGRIAKWAVEIMGETISFAPRKAIKSQVLADFVAEWVDTQLPTAPIQPELWTMFFDGSLMKTGASAGLLFISPLGKHLRYVLRLHFPASNNVAEYEALVNELRIAIELGVRRLDARGDSQLVIDQVMKNSHCRDPKMEAYCDEVRRLEDKFYGLELNHIARRYNETADELAKIASGRTTVPPDVFSRDLHQPSVKIDDTPEPKAPSAQPEAPSAQPEASSVQPEVPSAPEGEALDVEEEQSGATPDRNWQTPYLQYLRQGELPLDQAEARRVARRAKSFVLLGDEEELYHRSPSGILQRCISIAEGQELLQEIHSGACGHHAVPRALVGNAFRQGFYWPTAVADATRIVCTCEGCQFYAKQTHLPAQALQTIPITWPFAVWGLDLVGPLQKAPGGYTHLLVAIDKFSKWIEVRPLNSIRSEQAVAFFTNIIHRFGVPNSIITDNGTQFTGKTFLDFCEDHHIRVDWAAVAHPMSNGQVERANGMILQGLKPRIYNDLNKFDKRWMKELPSVIWSLRTTPSRATGFTPFFLVYRAEAILPTDLENSSPRTRAYNDQSNQASREDSLDQLEEARDKALLHSARYQQSLRRYHARGVRSRDLQVGDLVLWLRQDARGRHKLTPPWEGPFVIAKVLKPGTYKLANNQGEIYDNAWNIKQLRRFYP

SEQ ID NO: 73230 - protein, 45 aa, Zea mays
  Coding DNA Sequence Number=SeqID_31451
MATTAAALAAHRPHRRRRQPKARIQLQTSSFKIMKIGLFGLKIAS

SEQ ID NO: 73231 - protein, 42 aa, Zea mays
  Coding DNA Sequence Number=SeqID_31452
  Homolog annotation: Hit_ID=Q41556; Match level="QueryCoverage=81%, HitCoverage=9%, E-value=2e-14, Identity=94%"; Hit description =Transcription factor HBP-1a
MYAQGTPYQQAPMPPGSHPYSPYPMQSPNGTVQTPGYCNNSN

SEQ ID NO: 73232 - protein, 135 aa, Zea mays
  Coding DNA Sequence Number=SeqID_31453
MEARGGRAAAPLRHGREKRPLLPVRCAREAAFGAPAQRSRGRAPWAVEGGEQLLPGSVCTLGDGSDCSLLLGKKGVVEGGHLLAFGPEEVPAGRRRKKGRWWSAAGVREQWKSCPSWSSGRGRKKTGRTQETLLR

SEQ ID NO: 73233 - protein, 168 aa, Zea mays
  Coding DNA Sequence Number=SeqID_31454
MNRRPSAPPPTPTRSTQSRDDAEHEGKFLTSSWATRTPADGAARVYGDGEKFRWPREFADDKLVECLDLYPDRRRGGPHPTRHGTSPNGRAEIQTVRAATDSRSVERSWRGKKMDPDEVGPVSVRGNQRMSKGYEADRWAPQSGEACARVRAADCNVGSGWQRHKGQR

SEQ ID NO: 73234 - protein, 175 aa, Zea mays
  Coding DNA Sequence Number=SeqID_31455
  Gene Ontology: Mol. function=DNA binding; Biological process =regulation of transcription
  Homolog annotation: Hit_ID=Q84QT1; Match level="QueryCoverage=87%, HitCoverage=60%, E-value=4e-34, Identity=54%"; Hit description =Transfactor-like
MDICCGSTASVVRMQNETNKEDYRKASYLLDAQSGMSVSPRVAAQDMKESQEVKEALRAQMEVQRRLHEQVEVQKRVQIRMEALEKYIDSILESACKMVTEQFASSGFSISNPDLPEISPGGVMCGSTDTLGSSVLNQLSVSSIDSHSPGGKPSPSGMEGPTLLQKSPELKRRSS

SEQ ID NO: 73235 - protein, 131 aa, Zea mays
  Coding DNA Sequence Number=SeqID_31456
  Homolog annotation: Hit_ID=Q6XZ79; Match level="QueryCoverage=43%, HitCoverage=26%, E-value=4e-10, Identity=48%"; Hit description =Fructokinase-1
  Subcellular localization annotation: CTP_CleavageSite=78; ConfidenceScore=5.42e-01
MATAPWLLLGRSSLARRGVRLPTRAPGFLLPVPLASPWCFPARACSPVQLDRPSLLAPPRCSSSLVLQKRKEAAEFLCAQPHSSRRSALALVAFIGKLGDDEFGRMLAAILRDNGANGEREFMFYRNPSVV

SEQ ID NO: 73236 - protein, 73 aa, Zea mays
  Coding DNA Sequence Number=SeqID_31457
MAVRRLGRRVVSAQGEGRKTRGASRGSYPQVKAYLNGISELTDGTRHARRWSTREEDGVARQLRVCPVGPAKQ

SEQ ID NO: 73237 - protein, 305 aa, Zea mays
  Coding DNA Sequence Number=SeqID_31458
MGLAEELARAAQDRDTELGTRQPEAGQAQHAARRPAGCCCRTDLHGAGVAIEHELALAVGDNAVVAEDSSAHATELVNAELADEGDEGERGSAPENPSARLSTAWEVDANRAPRVGCSATNEGVRRAGKSPWARWRSGQNRGTRLRAKELGCFFPRLQHQTRAAPWGREQGRSTELDRGASARRKAPGGREGNREQEPGRARRETGTAASQRASAEQEPGRRGHGRWARSRGASSGRGRGARRGSSELCASEQRGGELRGREGSGWERGWRQPTGYREKERAACQGRRPHARNRWKILSRGGEIG

SEQ ID NO: 73238 - protein, 75 aa, Zea mays
  Coding DNA Sequence Number=SeqID_31459
MKRMFEKKELGVVLRTPSIPLRTEWSEWLLAVPSGLRQTQRWVHYGVQDTLLICDAGDVSKVEDLSGIEGDHGVE

SEQ ID NO: 73239 - protein, 71 aa, Zea mays
  Coding DNA Sequence Number=SeqID_31460
MEKTVSVHGHQWWYSTDSRNGHGRRNCRNCAGVTWQHERANRRLPLRRGREASRRRLGCRTAAASLKRMKK

SEQ ID NO: 73240 - protein, 79 aa, Zea mays
  Coding DNA Sequence Number=SeqID_31461
MASPNSINRRTPYTTDPPTNTAENGMATETARPMSNLLYAIPDDARDGLPRTFYHVERYFNHYNSKRLIHRTDSGTVTP

SEQ ID NO: 73241 - protein, 104 aa, Zea mays
  Coding DNA Sequence Number=SeqID_31462
  Subcellular localization annotation: CTP_CleavageSite=68; ConfidenceScore=5.11e-01
MAQQSSNSGEVDAQNRDQQGAWGTIRLMCTREASRGRGLAGRIGGTTGTSGRTPTQPRRSSTARRQASAAERWGDEWSSVERRKTDAIDAHQQWEGGGTAVRSG

SEQ ID NO: 73242 - protein, 129 aa, Zea mays
  Coding DNA Sequence Number=SeqID_31463
MASNSGKPGDGGALTRESEAVAQWGKQPAAWGARASGRWHEARRSNSVAPWRDGGRAGRGATAQGGASCALGRRRLGGGLLLAGRLGATLLGVGSWEREVQCKCSVDGGSAARGYGLASGTQAAGWPGS

SEQ ID NO: 73243 - protein, 44 aa, Zea mays
  Coding DNA Sequence Number=SeqID_31464
  Gene Ontology: Mol. function=protein phosphatase type 2C activity
MAYGEYLDQETSSATLAVRRLVKEAVRERRCKDNCTAVLIVFRH

SEQ ID NO: 73244 - protein, 86 aa, Zea mays
  Coding DNA Sequence Number=SeqID_31465
MWVKVDAVMENRAHGATEGHEGALDKLAVMEEDAHNEGSRVGRSQGRNGRGKSRRERYYCIEQQQRARQGGDVEVGAAKELTVVNR

SEQ ID NO: 73245 - protein, 79 aa, Zea mays
  Coding DNA Sequence Number=SeqID_31466
MSVRKSVLDLVAALAALKASPSVAATAMPVPRARQLQNISYVDDVGNNMLHHDMTRQVITGMVFKAVRRSKALENRLDA

SEQ ID NO: 73246 - protein, 174 aa, Zea mays
  Coding DNA Sequence Number=SeqID_31467
MAENRARSSSCRRKNSPRASPQFRVFYRDEDGKFIHVCHVDGVTRRGTINKFLSLHRRLMRMSPTLIPSIIYPSVIVGYLGIGYPKKAPRSPKNGLPAKQFSGKAQKATRGTAHQFDPPTEGKSVSEAGLPTNLVIEQPSEARLPTNLLTKQPSEARLPTNRSFEQPSTTTTDS

SEQ ID NO: 73247 - protein, 87 aa, Zea mays
  Coding DNA Sequence Number=SeqID_31468
  Gene Ontology: Cellular component=protein complex
  Homolog annotation: Hit_ID=Q6H592; Match level="QueryCoverage=80%, HitCoverage=17%, E-value=2e-34, Identity=98%"; Hit description =Proteasome protein-like
  Subcellular localization annotation: CTP_CleavageSite=23; ConfidenceScore=5.03e-01
MGSSSHRSPQVKGPKRIGALYVTCQLFKIYFRLGTVNLCRSVIRSIETARNFDFEDFPVKDKVTYMYYTGRLEVFNENFLVTWVFIL

SEQ ID NO: 73248 - protein, 114 aa, Zea mays
  Coding DNA Sequence Number=SeqID_31469
MGKNKKGGSSSHHSGDKRKREPNDSQGIAAEVWTYIWAVERSGLESSDESEISSDEENSSDSSEEESGGDGDDKDDDGDGGDDGGDGNGDGEGDDNGGKGVGGSSKASGKAPLA

SEQ ID NO: 73249 - protein, 153 aa, Zea mays
  Coding DNA Sequence Number=SeqID_31470
MTKKREKGWKKECLSQPNQHQPVAHRTVRWCTRQVRCPDWPDGELAALENLRGNVAINHRTVRWCTRLSDESSAPAPMSSATNSSLLGKVEGAAAKIHRTVWWCTGLSGEPTALASNGRLRDQRVTRGLANSRMIAPDCPVCQQIRRTNSWLR

SEQ ID NO: 73250 - protein, 134 aa, Zea mays
  Coding DNA Sequence Number=SeqID_31471
  Gene Ontology: Cellular component=membrane
  Homolog annotation: Hit_ID=Q337N1; Match level="QueryCoverage=85%, HitCoverage=17%, E-value=1e-07, Identity=33%"; Hit description =Xyloglucan galactosyltransferase KATAMARI 1, putative, expressed
MVNPLLIFLPFLSVIALPGTIDAAGPDPCAGRRIHIRGLPPHFNTALLRHCGANAFPLADPSVAATSVPPYESLADHGLGPRTHPRNRSWYRNDARLLEAFFHHRILERDFLADDPADAVLKVPFAREQDMDVT

SEQ ID NO: 73251 - protein, 197 aa, Zea mays
  Coding DNA Sequence Number=SeqID_31472
MVPSPCSSLLLVPAAAAVWKMQLAAVQADAEVMLPSSSIATLLSLVLFCAAPCSLAPQAHRRSSLCPHRVRADLCTSIRRAQPFLLLARPALCPAMEIAPGSDPALGSFFSLPMAGLGILLASSWSDSLRPLHPPVPARDALCLLAMAVVRRARCSLVLAALLCRLLMCNDLPYGASRRLTISLGVHSTLQQTYGGR

SEQ ID NO: 73252 - protein, 156 aa, Zea mays
  Coding DNA Sequence Number=SeqID_31473
MASRQRASRAGTGGWRGRRESDQELASKIPKPAMGRENKEPSAGSEPGAISMAGQRAGRARRRNGWARRMEEQRSARTRRGTGRSAGEPAAQKSTRERNVAMELLGSITSASACTAASCISHTAAAAGTRRSEEQGLGTMGERRGFNELELEERAA

SEQ ID NO: 73253 - protein, 101 aa, Zea mays
  Coding DNA Sequence Number=SeqID_31474
MEKARPRSFGVRGARDMESSLLHAREQRGGRWHGEEEVEMAGGRGWAAIYRAKLWTCQTAPAGARCDSANIGRPFLSFSIWNQTRITAEDMFLEIYSTNLV

SEQ ID NO: 73254 - protein, 93 aa, Zea mays
  Coding DNA Sequence Number=SeqID_31475
MNVCELTLAVSPPQVKNSLACEEARYEKRPSPAKGLLLGVFFSAEGPQDEDIVCKQTVRVFFSAKGSQDEDIVCKQTLRILFSAEGSSDEGIV

SEQ ID NO: 73255 - protein, 359 aa, Zea mays
  Coding DNA Sequence Number=SeqID_31476
MGQRETEHEGGKKGRQAKGETRSLRVALRPGRVRAPGRARRRPSSEAKAESEPWGRARWSSSSSGAEAESESEPWGRARRSSSSSGVEAESEPWGRARRSSSSSEAEAESEPWGRERRSSSSSRAEAESEPWSRARRSFLWHPRLDLAAVSLTLSSGTAVRAAQAALSSCQAGQWSGEAILALNAPAIRSVGVAIRPRSLLGEDWASGEPKLCADGGYQLRLGVLGEEVSSESEGSLALASPLTSSDDSNDSQGIAVEVWTYIHSVERARLEESDESEVSSDEEDSFDSSEEWSGDDSDDEGGDGGGDSDDGDGGEGEDDDSKGGEGDNSGNGSGGGKASGKAPLVYIVVGDLFLNAMN

SEQ ID NO: 73256 - protein, 121 aa, Zea mays
  Coding DNA Sequence Number=SeqID_31477
METGRVDSLLTMLKEGKVGLQGWGKERCEHKYHSSVAALSRVNGGWRVVEHEAVTKIRVHDLIKGYEHVREKLNGVKGDTYMVPCARVVGGIASTRVGDEAGTKEWRHAGELLATPREGRA

SEQ ID NO: 73257 - protein, 177 aa, Zea mays
  Coding DNA Sequence Number=SeqID_31478
  Gene Ontology: Mol. function=carboxyl- and carbamoyltransferase activity; Cellular component=ornithine carbamoyltransferase complex; Biological process=amino acid metabolic process
  Homolog annotation: Hit_ID=Q8SA97; Match level="QueryCoverage=84%, HitCoverage=23%, E-value=8e-15, Identity=42%"; Hit description =Ornithine carbamoyltransferase
MALPVDVAGLRPRLGDVEAPPKPRSSLSSIAEVESEPLGRARRRSSAEARAESEPWGRAKRSSSSSGAEPESEPWGRAERIGVAQAALSFCQAGQWSGEVTAVTSALPGGGLGRAGDMSAVGGGPRARRKSSGLYADGGYQLRIRSLEGSRRVDELMSDEKAKCAAAGGLGHRLTGQ

SEQ ID NO: 73258 - protein, 142 aa, Zea mays
  Coding DNA Sequence Number=SeqID_31479
MSEDAAHSRHRAGSIWPSRASRSTGGSHDAPENDDQPVGKARSPQHTQFLGTLAVADGCKYVGQRQLRCAGEQYAERLENEKGGHVLNAIFVELLEQEISRATCHKKAEEEKNKTNYWSVYGYTVIYGQKKWKKSTCTSIYG

SEQ ID NO: 73259 - protein, 147 aa, Zea mays
  Coding DNA Sequence Number=SeqID_31480
  Gene Ontology: Mol. function=metal ion binding
  Homolog annotation: Hit_ID=Q1RSL7; Match level="QueryCoverage=87%, HitCoverage=29%, E-value=6e-27, Identity=52%"; Hit description=WD40 -like
VRRGLDKAEIYSIALSPNVQWLAVSSDKGTVHIFSLRVRVAGVDSSNEQRALEGPRMDHQNSSSSIDPLIQANTGSNASSSLSFMRGILPKYFSSEWSFAQFHLPEVTRYIVAFGAQNTVMMVGLDGRYEKYISQWKQQQFVSCLEV

SEQ ID NO: 73260 - protein, 153 aa, Zea mays
  Coding DNA Sequence Number=SeqID_31481
MRNTTSGRGRRWKGEGERPSRDSGKGRSGEGCLCEGRPEVAACVGTHGHGAGHLAHALRLMDMVGAWVKRPQTRPQKLRKLCTCRIIQQYMSTTVLKKRSKTKAPETWAKRCIRKTTRLGRAENNPGEVIEYRGPTNVSQVMNDVYERGPMGQ

SEQ ID NO: 73261 - protein, 403 aa, Zea mays
  Coding DNA Sequence Number=SeqID_31482
  Gene Ontology: Mol. function=nucleotide binding
  Homolog annotation: Hit_ID=Q10M06; Match level="QueryCoverage=83%, HitCoverage=66%, E-value=1e-147, Identity=72%"; Hit description=Axi 1 protein, putative, expressed
  Pfam annotation: Domain name=DUF246; Domain location=74-402; Score =628.7; E_value=5e-186; Accession=PF03138.5; Description=Plant protein family
MRAVASAVVWTAVVQVASIAGLFRPRVVADCGGKGGGGAAAGLAALAGEDSAAARLSPPALVPKRIYKSNGYLRVTCNGGLNQMRAGICDMVTIARHLNLTLVVPELDKRSFWADPSDFGDIFDVDHFINSLRDELMIVKELPLKLQLIRTKKRLYSMSPVSWSNETYYLKRILPLARKHKVIHFDKSDARLANNGLPVQLQMLRCRVNFDALRFTPQIEALGRQLISTLQRSGQFVVLHLRYEMDMLSFSGCTHGCSTEEAEELTRMRYAYPWWKEKEIGSEAKRLQGLCPLTPEEITLVLKALGFTKDTLIYIASGEIYGGERRLAVLKAAYPKLVRKEKILSPDELRPFQNHSTQMAALDYMVSLASDIFIPSYDGNMARVVEGHRRSASLDSVRNINNH

SEQ ID NO: 73262 - protein, 278 aa, Zea mays
  Coding DNA Sequence Number=SeqID_31483
  Gene Ontology: Mol. function=RNA-directed DNA polymerase activity; Biological process=RNA-dependent DNA replication
  Homolog annotation: Hit_ID=UPI00004C1731; Match level="QueryCoverage =41%, HitCoverage=7%, E-value=3e-62, Identity=98%"; Hit description =UPI00004C1731 related cluster
  Pfam annotation: Domain name=rve; Domain location=135-276; Score =45.6; E_value=1.7e-10; Accession=PF00665.16; Description=Integrase core domain
MTVADGQEQRSHRQPSLRPIRGQRENPLSWREDDTPEPEAPSAQSEAPLAQSEAPSASPEAPSAQPEAPSAQPEGEALRVEEEQSGVTPDRNWQTPYLQYLHRGELPLDQTEARRLARRAKSFVLLGDGNELYHRSPSGILQRCIPITEEGTRGLHRWIEVRPLNSIRSEQAVAFFTNIIHRFGVPNSIITDNGTQFTGRKFLDFCEDHHLRVDWAAVAHPMTNGQVERANGMILQGLKPRIYNDLNKFGKRWMKELPSVVWSLRTTPSRAIKLIEKT

SEQ ID NO: 73263 - protein, 106 aa, Zea mays
  Coding DNA Sequence Number=SeqID_31484
TREFCALVKHGVKPPAPMFAGSVEGALAVFDRAVELEQQRGRGWGQGQGAPLQGWSSDIVVSSGEGEGLTTGDVCGWSSGGAVGFAFGASEARCRRRHREAAAATL

SEQ ID NO: 73264 - protein, 315 aa, Zea mays
  Coding DNA Sequence Number=SeqID_31485
  Gene Ontology: Mol. function=O-sialoglycoprotein endopeptidase activity; Biological process=protein amino acid phosphorylation
  Homolog annotation: Hit_ID=Q6L4N8; Match level="QueryCoverage=49%, HitCoverage=41%, E-value=7e-83, Identity=95%"; Hit description =Putative glycoprotease
  Pfam annotation: Domain name=Peptidase_M22; Domain location=2-120; Score=-62.0; E_value=0.048; Accession=PF00814.15; Description =Glycoprotease family
MLAKKGEQFIDVPYVVKSMDVSFSGILSFIEAAAIEKLKNNECTPADLCYSLQETIFAMLVEITESAMAHCDSKDVLIVGGVGCNERLQEMMKIMCSERGGRLFATDDRYCIDNGAMIAYTGLLAYAHGMTTPLEESTFTQRFRTDEVHAIWREKEMPPSPGTWQGLRIVVLLYELQQYSYIPWYFFGTMKNRALMWAEKLREDSFVFDGATRNIIDWARREMEDDAQANNEDIGRCMFLEFLMFMTYEAMLNSRSSKATHMLTEKSFDPASSSMIRKEVKMRLAVIACLLLNQTFLMNPKYPSFCLINPCYERL

SEQ ID NO: 73265 - protein, 63 aa, Zea mays
  Coding DNA Sequence Number=SeqID_31486
MAAMSAFPWSVMHPLWCLRLLLLDARWRVILGFQIAATSCLLPSFSLLYIFTVDDVILSAVDE

SEQ ID NO: 73266 - protein, 66 aa, Zea mays
  Coding DNA Sequence Number=SeqID_31487
MDDGLRIAAYKNWIWVPSDLKTRTIDPTAGEDPVASCFGVRWKMHSSRLMSKLWSGFGYGDLPGIF

SEQ ID NO: 73267 - protein, 228 aa, Zea mays
  Coding DNA Sequence Number=SeqID_31488
  Gene Ontology: Mol. function=structural molecule activity; Cellular component=endoplasmic reticulum; Biological process=ER to Golgi vesicle-mediated transport
  Homolog annotation: Hit_ID=Q6Z382; Match level="QueryCoverage=51%, HitCoverage=13%, E-value=1e-43, Identity=79%"; Hit description =Putative coatomer protein gamma 2-subunit
  Pfam annotation: Domain name=Gamma-COP; Domain location=9-227; Score=- 11.1; E_value=4.7e-11; Accession=PF08752.1; Description=Coatomer gamma subunit appendage domain
MEAMFTVRKQQRVLQRHSSAPVELSEAETEYSVNVVKHIFDGHVLQYNCTNTIPEQLLEQVTVFVDASEADEFLEVASKPLESLPYDSPGQTFVAFEKPEGVIATGKFSNILKFIVKEPCLSLVRHGSEGDDYWLHVDLHGVTDHINSVIRRRGDDDRAWELASINGTQAGVHRGRGRCGARPAPGGGRICGTDPRGLSVTLGTRERNGGRSRSSESTMDLFNGGCVP

SEQ ID NO: 73268 - protein, 504 aa, Zea mays
  Coding DNA Sequence Number=SeqID_31489
  Gene Ontology: Mol. function=ubiquitin-protein ligase activity; Cellular component=ubiquitin ligase complex; Biological process =protein ubiquitination
  Homolog annotation: Hit_ID=Q2QU07; Match level="QueryCoverage=95%, HitCoverage=65%, E-value=0.0, Identity=79%"; Hit description =Armadillo/beta-catenin repeat family protein, putative, expressed
  Pfam annotation: Domain name=Arm; Domain location=135-176; Score=1.7; E_value=7.5; Accession=PF00514.13; Description=Armadillobeta-catenin -like repeat
  Pfam annotation: Domain name=Arm; Domain location=279-320; Score=1.0; E_value=9.1; Accession=PF00514.13; Description=Armadillobeta-catenin -like repeat
  Pfam annotation: Domain name=Arm; Domain location=362-402; Score =18.1; E_value=0.032; Accession=PF00514.13; Description=Armadillobeta- catenin-like repeat
  Pfam annotation: Domain name=Arm; Domain location=37-81; Score=4.6; E_ value=3.2; Accession=PF00514.13; Description=Armadillobeta-catenin -like repeat
  Pfam annotation: Domain name=Arm; Domain location=407-448; Score =12.6; E_value=0.33; Accession=PF00514.13; Description=Armadillobeta -catenin-like repeat
  Pfam annotation: Domain name=HEAT; Domain location=141-178; Score =4.4; E_value=12; Accession=PF02985.12; Description=HEAT repeat
  Pfam annotation: Domain name=HEAT; Domain location=367-404; Score =12.3; E_value=1.4; Accession=PF02985.12; Description=HEAT repeat
  Pfam annotation: Domain name=HEAT; Domain location=418-450; Score =7.8; E_value=4.8; Accession=PF02985.12; Description=HEAT repeat
  Pfam module annotation: Pfam domain module=Arm::Arm::Arm::Arm::Arm::HE AT::HEAT::HEAT; Domain location=135-176::279-320::362-402::37-81::407- 448::141-178::367-404::418-450
MDNWSTIALTKNLVLHDRSSPGMQLPMAAYLGELVLSNDVKILIEAGILPPLITDLFTVGSNQLPMRLKEVSATILANVVASGARFESIPLDHNRQTLVSEDIVHNLLHLISNTGPAIECKLLQVFVGLTDSSTSVQNIVDAIKSSGAIVSLIQFVEAPQREVRMNSIKLLNNISPYMGQELADAFRGNFSQLSSLVKVIVDNNGISEEQAAAAGLVADLPMGDSVLTRRLLQDGAFAAIISKVLRIRQGEIRGGRFVNPFLEGLVRIVSRITFVLDDDPDIIAVARDYNLASLFTDLLQMNGLDVVQIVSAVSLEKLSQQSKHLTKILPAPSPGLCFSIFPCLSQKTVATGVCRVHCGICSARESFCLLEGKAVEKLVACLDNNNEKVVEAALAALSTLLEDGVDIEQGVMVLCDAEGINPILAVLCENRNEALRQRAVWAVERILRTDEIAYEISGNQNVGTALVEAFRHGDSRTRQVAERALKHVDKLPNFSGIFSKMGAQ

SEQ ID NO: 73269 - protein, 324 aa, Zea mays
  Coding DNA Sequence Number=SeqID_31490
  Gene Ontology: Mol. function=ubiquitin-protein ligase activity; Cellular component=ubiquitin ligase complex; Biological process =protein ubiquitination
  Homolog annotation: Hit_ID=Q2QU07; Match level="QueryCoverage=78%, HitCoverage=33%, E-value=1e-101, Identity=73%"; Hit description =Armadillo/beta-catenin repeat family protein, putative, expressed
  Pfam annotation: Domain name=U-box; Domain location=72-151; Score =45.9; E_value=1.4e-10; Accession=PF04564.6; Description=U-box domain
  Subcellular localization annotation: CTP_CleavageSite=50; ConfidenceScore=5.57e-01
MPWCIFSGPSTALSGPQALGVRASSVSPPFSTPADPTPGLPNSPSVSLVMAEVQDGHYDSMSQATDSLRVEPIYESFLCPLTKQVMRDPVSIDSGVTFERNAILNYFNECLSSGRRLVCPVTKMELSNTELNPSIALRNTIDEWMNRNEAAKLDVARKSLTSDSTESDILQALQYVDEICQRSRSNRQVVRRDGLIIMIADLLKNSSTKVEIAAGDNIRTIVKFLNHGQTQEKEQAVSLLFELSENKALSERIGSVSGAILILVGLSSSKVENLLIVDRAEKTLENLESCEKNVRQMAENGRLQPLLRLLLDVRSVSLFHQVHL

SEQ ID NO: 73270 - protein, 98 aa, Zea mays
  Coding DNA Sequence Number=SeqID_31491
MGHWARECRKKRDKLTHVGHECDILAQVDVASPRARDGLTIQIVGGGSTWWVFAEEPEPMALMALAFASGTKLPPAKVVPTSTSKLHLNEIRLFVQLT

SEQ ID NO: 73271 - protein, 792 aa, Zea mays
  Coding DNA Sequence Number=SeqID_31492
  Homolog annotation: Hit_ID=Q2QU44; Match level="QueryCoverage=30%, HitCoverage=73%, E-value=7e-26, Identity=37%"; Hit description =Expressed protein
MTQLGHHGVYIPHAEDEWQRYHVQQGHGSGTRPCHRNMLDQPHHLTAERTSRWGRRRITFEHGIDNISTPRECGSSPTDPTQTTISPRSPMGAEPVDFSPPPPPEPTLSPEPEISGKDRGGVSILSLVLFLSSSRFQLVGVGLSSDFVTAYVYVRAWRGTGIQNWKADMMSALGESVSFGRFLSEPLEWGKRSAFAHNRYLEEAAVQARPGSVAQKKAFFEAHYARKKRKSEDHAAAASDDVAGGDGELEAAEDGGAASWSLSATESSCMTDEPPAPAEEVCCGWEEDRVVDCGGSASDKPVHVPEELADITDAVGPCCRMDAPTDETQHMEGGDEVVGAVLPLQKQDLCMDSLTAVDATLKDITDSVKRRRIQMASLLPKPAKLSSPPTAKKGQNSSAKRRSMRHSAKENNSPPSAGSNKLRTTSTPKKRSTLSALHMSMSFPRCESGNTSMASRNLGTTIAARISELEHANATKPAEKNTKPHDLRLPRKKFSSALPEIAPRTSQVDEESSDQAGPWMALETRFYGGRPYRTGIWTNVTSLCGKSSFSCYLSDVRFGVDLNRPSSAAHLTSRGEQCLVEAVGCYPEHHELVADGLGLGNTGMESFHGPSSPRLATSCMMRLSKAQLINGLLAGLHPHVEGFGTQSPQVCAVECRGRHIRWGTRMQTSIVDCASLAPGPWDPTNGIAACDLGHDRAWVRAYGRNLKQSARDSHRLLPSGVGLAVVAPLEIDDEHLEMLLFSLLPYAGESSSIELVGKLSWFLELWDNKREEFGLQLLGLAAPVVSSVGSCF

SEQ ID NO: 73272 - protein, 87 aa, Zea mays
  Coding DNA Sequence Number=SeqID_31493
  Subcellular localization annotation: CTP_CleavageSite=73; ConfidenceScore=5.50e-01
MLAWPRMSTRHLALPAWARQSARRPALSDWPRLSARRPALPAWPRQSARRPALPAWPRLSARRPALPTWPRLSAAQAAARSRTRPGI

SEQ ID NO: 73273 - protein, 103 aa, Zea mays
  Coding DNA Sequence Number=SeqID_31494
  Homolog annotation: Hit_ID=Q6QP51; Match level="QueryCoverage=43%, HitCoverage=20%, E-value=8e-10, Identity=74%"; Hit description =Putative growth-regulating factor 1
MQVACNRTTGTHPFDFDASGMEAQAHMSWTRKGDTPKEILLRERSGPRALLLIRGSKAGPSEGFDSRLRALGPRALLLIRGSKAGPSEGFDCRPRALGLQARY

SEQ ID NO: 73274 - protein, 183 aa, Zea mays
  Coding DNA Sequence Number=SeqID_31495
  Gene Ontology: Mol. function=DNA binding; Cellular component =mitochondrion; Biological process=DNA integration
  Homolog annotation: Hit_ID=UPI00004C1731; Match level="QueryCoverage =93%, HitCoverage=12%, E-value=6e-91, Identity=90%"; Hit description =UPI00004C1731 related cluster
  Pfam annotation: Domain name=rve; Domain location=3-149; Score=72.4; E_value=1.4e-18; Accession=PF00665.16; Description=Integrase core domain
MSRGRGVDSSHRKAPGGYTHLLVAVDKFSKWIEVRPLNNIRSEQAVAFFTNIIHRFGVPNNGTQFTGKKFLDFCEDHHIRVDWAAVAHPMSNGQVERANDMILQGLKPQIYNGLNRFGKRWMKELPSVVWSLRTTPSRATGFTPFFLVYGAEAILPTDLEYGSPRTRAYNDQSNQASREESLD

SEQ ID NO: 73275 - protein, 146 aa, Zea mays
  Coding DNA Sequence Number=SeqID_31496
  Homolog annotation: Hit_ID=Q6ESX9; Match level="QueryCoverage=28%, HitCoverage=13%, E-value=8e-16, Identity=92%"; Hit description =Putative WD repeat domain 5B
MDSCLTNDDAFVVGGSEDGYIFFWELVDAPVVARFRAHSSVVLFFPELHHMLSTSLTYMYLTLFLLAGHEISSSKFESIVPNSFARGPVMAHAKPKLICLAQQRTLTPRFPLAHATSPTAIEPASLAVWPGGQAQPPGSLPCSSSA

SEQ ID NO: 73276 - protein, 175 aa, Zea mays
  Coding DNA Sequence Number=SeqID_31497
  Subcellular localization annotation: CTP_CleavageSite=56; ConfidenceScore=5.04e-01
MGVIQENSAACPAPTVVPLDRVRLTAAKSSLGCHRKLHLARPQSSGSTSTPDDGLRLARPQGSDSASTPDDGPSLDLGRQTPPRPIPGLRLNLDLGRRSPPRPTPGLGLNLDLGRRSQPRPTPGLRLNLDPGRWSPPRPTPGPGLSLDLGGASTSPDLGLGSTTSQGGHHYPTPS

SEQ ID NO: 73277 - protein, 81 aa, Zea mays
  Coding DNA Sequence Number=SeqID_31498
  Gene Ontology: Cellular component=ribonucleoprotein complex
  Homolog annotation: Hit_ID=Q75LV5; Match level="QueryCoverage=70%, HitCoverage=11%, E-value=1e-20, Identity=86%"; Hit description =Putative U3 small nucleolar ribonucleoprotein complex-associated protein
MASFQVKLLDTNLFLFDTLICDKFSQGEDGFVNSLAIAKSGRFIVAGVGQEPRLGRWGRVRSAQNGVAIHPIRLKDVKEDL

SEQ ID NO: 73278 - protein, 130 aa, Zea mays
  Coding DNA Sequence Number=SeqID_31499
MAAPFCRWLGRPLRHGDFTFVAPGMVVPPTLVEVLPMLLLYDAHVVGIARPLSLAGRCDVKEALPPNEVEGEELDDQVIILDPHHAAGKVIVFQPDTKIGGSVVLRDGNTQPHGLGGMCPLLQDEVVWAW

SEQ ID NO: 73279 - protein, 143 aa, Zea mays
  Coding DNA Sequence Number=SeqID_31500
MALSLNVIIDLVKFLDEGIVFLLLLREVSLVGEDVRPTLALVFFFLVTGFLVPPAFSFRGGVATKRVLRFALMTMELGEQVVEHAGPPTPIVIDVSESTRHNSPVAVGIFIGHVVGDALRKLRDPNMIWVRSVKVSQLVNADD

SEQ ID NO: 73280 - protein, 89 aa, Zea mays
  Coding DNA Sequence Number=SeqID_31501
MARHINNEGKQYASWELELAGLDVELGGTLRHPRQRQTPRERGLLIRLSLTLRGLLLRRRLNRTTTTGMQDPRKVSKTLANTTLLSKVA

SEQ ID NO: 73281 - protein, 646 aa, Zea mays
  Coding DNA Sequence Number=SeqID_31502
  Gene Ontology: Mol. function=sequence-specific DNA binding; Cellular component=nucleus; Biological process=regulation of transcription, DNA-dependent
  Homolog annotation: Hit_ID=Q2QM96; Match level="QueryCoverage=82%, HitCoverage=62%, E-value=0.0, Identity=83%"; Hit description=Class III HD-Zip protein 4, putative, expressed
  Pfam annotation: Domain name=MEKHLA; Domain location=422-562; Score =227.0; E_value=4e-65; Accession=PF08670.1; Description=MEKHLA domain
CYWIALSGYLLCLQLICERSLTQSTGGPSGPNTPNFVRAEVLPSGYLIRPCEGGGSMIHIVDHVDLDAWSVPEVLRPLYESPKILAQKTTIAALRHIRQIAHESSGEMPYGGGRQPAVLRTFSQRLSRGFNDAVNGFPDDGWSLMSSDGAEDVTIAINSSPNKLIGPHVNSSQLFTAIGGGILCAKASMLLQNVPPALLVRFLREHRSEWADPGVDAYSAAALRASPYAVPGLRASGFMGSQVILPLAHTLEHEEFLEGIRLEGHSLCHDEVVLSRDMYLLQLCSGVDENAAGACAQLVFAPIDESFADDAPLLPSGFRVIPLDAKTDPPSGTRTLDLASTLEVGSGGTTRASSDASSTCNTRSVLTIAFQFSYENHLRESVAAMARQYVRTVVASVQRVAMAIAPSRIGGQLEMKQTPGSPEAHTLARWIGRSYRFHTGAELLRTDTQCTDASLKALWQHSDSIMCCSLKAAPVFTFANQAGLDMLETTLIALQDISLEKILDDDGRKALCTEYPKIMQQGFAYLPGGVCVSSMGRPVSYEQAVAWKRPPELAMDRKERWRRESYGSGHLRMAMGRLTTPDPVAAACAGVGRVAKLAAFWQRILASADRGAVEVEGCTWAVDDVSDPAWIGGMDGKPFVVGSFQP

SEQ ID NO: 73282 - protein, 76 aa, Zea mays
  Coding DNA Sequence Number=SeqID_31503
MEKQVPAGKSSGKAGRGWVPAGKSVGKAGRGFRAVFSEEEEEKVESSSSKTTHSHFGSVFCDRLDPPLPPDAAPLD

SEQ ID NO: 73283 - protein, 85 aa, Zea mays
  Coding DNA Sequence Number=SeqID_31504
MRREGQGFRYSTIPGTVVSTPEIHGEAPPCSARRLEMGIDYPGPPGLVVLQEYTNRGCGVVVVVYQKEQDPQKFGQKFDSEYDME

SEQ ID NO: 73284 - protein, 103 aa, Zea mays
  Coding DNA Sequence Number=SeqID_31505
  Gene Ontology: Mol. function=nutrient reservoir activity; Cellular component=cellulose and pectin-containing cell wall
  Homolog annotation: Hit_ID=Q43557; Match level="QueryCoverage=60%, HitCoverage=16%, E-value=7e-14, Identity=60%"; Hit description =Unidentified precursor
  Subcellular localization annotation: CTP_CleavageSite=32; ConfidenceScore=5.23e-01
MLVEAFAGNVTQKVPFDSAGKGGFKTAAFRFVAGGVRTRLTFYSSYYHTKVTDGVSLCGPVLDQEWHIGMNCLYKLTDQSQGSFEESLHRTDKDIREQKHIIL

SEQ ID NO: 73285 - protein, 140 aa, Zea mays
  Coding DNA Sequence Number=SeqID_31506
MIPNELSHSGMEIKVWSKDLVPKVHTLANKKTKNGFNQREQGITEGCPGLAHRTVRAAPLKFTGLSGAPEESDSELASFGNPLRYNSPGMSGAHLTVRRAQQSELQRSEPNDLVTWLAHRTLSGDRWREVVVAPLAHRTV

SEQ ID NO: 73286 - protein, 922 aa, Zea mays
  Coding DNA Sequence Number=SeqID_31507
  Gene Ontology: Mol. function=ATP binding; Biological process=defense response
  Homolog annotation: Hit_ID=Q5Z5Z4; Match level="QueryCoverage=65%, HitCoverage=47%, E-value=1e-92, Identity=35%"; Hit description =Putative Pib
  Pfam annotation: Domain name=NACHT; Domain location=757-919; Score= -36.8; E_value=0.042; Accession=PF05729.3; Description=NACHT domain
  Pfam annotation: Domain name=NB-ARC; Domain location=464-740; Score= -122.0; E_value=0.017; Accession=PF00931.13; Description=NB-ARC domain
  Pfam annotation: Domain name=Pkinase; Domain location=1-258; Score =83.0; E_value=9.3e-22; Accession=PF00069.15; Description=Protein kinase domain
  Pfam annotation: Domain name=Pkinase_Tyr; Domain location=1-258; Score=-31.0; E_value=1.4e-10; Accession=PF07714.7; Description =Protein tyrosine kinase
  Pfam module annotation: Pfam domain module=NACHT::NB-ARC::Pkinase::Pki nase_Tyr; Domain location=757-919::464-740::1-258::1-258
MAVKLLHSMAGLDDKLFEEEFHNIARLQHKNIVRLVGFCHETQRQFIPHDGKMIFADSKYMALCFEYMHNGSLDKFIIDENSVHDWSTRYAIIKGICEGLKYLHEELNPPIYHLDLKPANILLDDNMMPKLADFGLSKIFEQERTRITQSCVGTHGYLPPEYIDRKVISNKLDIFSLGVIIIKIISGPTGYTQCAEMPSKQFVELVHEKWRNKLQTTMDAAALETYCEQVVRCIEMALSCVETDRHKRPSIGAIIDELNKMETNTDQVFSVDICSTPAQTQPPPLPDSSHSTEETSNTKGVSRLGPREYVQSTMRDLVIGITKSVVEGVISKAQSVMEEENMLLISMQHDLHFITDEFQMIYSFLSITDEERINNAVVRIWVMQTRGLAYDLEDYMDAFSCLDKTRKWWSRLFRACLAPPGSPYMSVTSLAVELKHLKARVEDVSHRNTRYNLISDAGSKPGLVRQQPVPPGAVAYENDTRRKHILGDLTQLITNKDDADLQLISMWGAGGGTGTTSIIRKCYSDPEIIQNFICRAWVNLSHPFNPHEFVRSLMAHFYANSCQERQGGIIGVDVLTSMDATATQGDLLSEFVQLVDKNRYLVVLEDLPTMAEWDSIRTFLPDRKNGSWIIVSSQKYEIASLCVGHPYQILDLKQSSPTEHSVCAFLREEVTLKEKKGGNRKEKIYVGDESEVNNGSTSTNSKVISTEYDLSHNHRMVANSKWKEARDWMQNSSLVGRRLQMYQIHRCIAEAQRNHSHVMSVWGIVGVGKSAIVRNFYCDRILENQQFQEYGWVDLSHSQPFNLKDFSQNLLTNFQSDSLQANETTPSRGILGTVRKCCEFLSTRHCLVVIDGLQSKEEWDLIQSSLVSRYSKSNTIIIVITTEASIAAYCADKDDLVFNVKTLETDAAFDLFENEIGTYEGE

SEQ ID NO: 73287 - protein, 436 aa, Zea mays
  Coding DNA Sequence Number=SeqID_31508
  Gene Ontology: Mol. function=hydrolase activity, acting on glycosyl bonds; Cellular component=amyloplast; Biological process =carbohydrate metabolic process
  Homolog annotation: Hit_ID=Q84M40; Match level="QueryCoverage=86%, HitCoverage=85%, E-value=1e-154, Identity=69%"; Hit description =Putative polygalacturonase
  Pfam annotation: Domain name=Glyco_hydro_28; Domain location=89-432; Score=490.6; E_value=1.8e-144; Accession=PF00295.8; Description =Glycosyl hydrolases family 28
  Subcellular localization annotation: CTP_CleavageSite=55; ConfidenceScore=5.07e-01
MKLVYMVTLLPLLFMSGVLEAAGAGNDSSADGTNGNLHSSGTSRPAAAPRGRSLQASQSSVYSVDRYGARGDGRNDDTRALEMAWKAACASPRPAVVLVPDGRRYLLKLLTLRGPCKSSVTLTVKGTLVASPNRADWSDNDRRHWIVFRSIDKLTVNGGGAIDGNGEKWWPHSCKINKALPCKEAPTALSFHYCVDLKVEDLKIVNSQQIHMSVEDSANALLARLSITAPGTSPNTDGIHITRSKDVRVTDCKIKTGDDCMSIENGTHNLHVSKVNCGPGHGISIGSLGDDNSRAEVSGITIDSVQLHGTTNGARIKTYQGGSGYAKDITFQNMVMYDVKNPIIIDQNYCDKAKPCGEQESAVQVSGVVFKNIRGTTSTKDAIKMNCSENVPCQGITLQNIDLKMQDGKGNTRSTCQNAKWTEFGTVRPQPCTAIK

SEQ ID NO: 73288 - protein, 103 aa, Zea mays
  Coding DNA Sequence Number=SeqID_31509
MPLAELITLQCRLLFATRARTVKLANKIRTEFIDILQLLLQAAQVGAGCWMLGLDADLVMTRHAPCVQASMDLDMRFLIRHDRKEINVPELIMAESSPPPAGA

SEQ ID NO: 73289 - protein, 430 aa, Zea mays
  Coding DNA Sequence Number=SeqID_31510
  Gene Ontology: Mol. function=hydrolase activity, acting on glycosyl bonds; Cellular component=amyloplast; Biological process =carbohydrate metabolic process
  Homolog annotation: Hit_ID=Q84M40; Match level="QueryCoverage=98%, HitCoverage=98%, E-value=1e-157, Identity=64%"; Hit description =Putative polygalacturonase
  Pfam annotation: Domain name=Glyco_hydro_28; Domain location=81-424; Score=503.9; E_value=1.8e-148; Accession=PF00295.8; Description =Glycosyl hydrolases family 28
  Subcellular localization annotation: CTP_CleavageSite=39; ConfidenceScore=5.09e-01
MAPLLPLLFMSGVLEAAGAGSSADGTNGNLHGSVTSRPAAAPRGRSLPESQSVFSLDRYGARGDGRNDDTRALEMAWKAACASPRPAVVLVPAGRRYLLKLLTLRGPCKSSVTLTVKGTLVASPNRADWSDSDRRHWIVFRSIDELTVNGGGAIDGNGEKWWPHSCKINKALPCKEAPTALSFHYCVGLKVEDLKIMNSQQIHMSVEDSANVLLARLSITAPGTSPNTDGIHITRSKDVRVTDCKIKTGDDCMSIENGTHNLHVSKVTCGPGHGISIGSLGDDNSRAEVSGITIDSVQLHGTTNGARIKTYQGGSGYAKDITFQNMVMYDVKNPIIIDQNYCDRAKPCGEQESAVQVSGVVFKNIRGTTSTKDAIKMNCSENVPCQGITLQNIDLEMQDGKGSTRSTCRNAKWREFGTVHPQPCTATDTE

SEQ ID NO: 73290 - protein, 213 aa, Zea mays
  Coding DNA Sequence Number=SeqID_31511
  Subcellular localization annotation: CTP_CleavageSite=31; ConfidenceScore=5.19e-01
MAATFWLAQGNHEAHQAQPRARPPPLTGGPRLSAPAHARALSSPPPFAHWGRVVGAGRLLAPAPPFYLCLADPFRQHTESFSLCARSPSLCSGTALPAPPSPQTVVDQRARTPRSLATSPAHAPQLSFEPRPYPHSLPYPISRKLTLSRALLSLLGLAGVPRPRAGHPTRQKPRQAASSSVPSPSGLGTAVAHTRPSSGDLTVVSKSGVGRNR

SEQ ID NO: 73291 - protein, 53 aa, Zea mays
  Coding DNA Sequence Number=SeqID_31512
MAGTGPRIHGKRGENVGEEVSGGSEKLWVFKSKFKLGFKFKLIQTCATLQRIF

SEQ ID NO: 73292 - protein, 169 aa, Zea mays
  Coding DNA Sequence Number=SeqID_31513
  Gene Ontology: Mol. function=carboxyl- and carbamoyltransferase activity; Cellular component=ornithine carbamoyltransferase complex; Biological process=amino acid metabolic process
  Homolog annotation: Hit_ID=Q6QP54; Match level="QueryCoverage=47%, HitCoverage=28%, E-value=8e-15, Identity=64%"; Hit description =Putative kinase
MALPVDVAGLRPRLGDVEAPPKPRSSLSSMAEAESEPLGRVRRRSFGRGQGVVRALGSGEAEFAVFRDLARVRALGRAERIGVAQAALSFCQAGQWSGEVTAVTSALPGGVCQDKGLLLSEGRAKGEPELYADGGYQLRIRSLEGTIKWIVPRAGSLDTAHLTIYTSAR

SEQ ID NO: 73293 - protein, 143 aa, Zea mays
  Coding DNA Sequence Number=SeqID_31514
MDLALKPRTHVPLWCGPSHCLWTPLAVNLLLPREVSATRTNHTGSLAWELAKVVSVLPGVHKCRPGPPLRRASVTSPDPHHRSLVYRSSSPRTWRISPLLTIRSNRQLTAAVAPAPPGYKTPSPVAAALARPCCILDPERISP

SEQ ID NO: 73294 - protein, 68 aa, Zea mays
  Coding DNA Sequence Number=SeqID_31515
MAAAATMMARAGDSKGDGEGDGDGKGDSDDSKGGGHGGKGDGDGSMDDNDDGKGDDVDGKASGIMMLV

SEQ ID NO: 73295 - protein, 155 aa, Zea mays
  Coding DNA Sequence Number=SeqID_31516
  Gene Ontology: Cellular component=nucleus; Biological process=red or far red light signaling pathway
  Homolog annotation: Hit_ID=Q658D0; Match level="QueryCoverage=81%, HitCoverage=15%, E-value=5e-28, Identity=53%"; Hit description =Putative tDET1 protein
MLARRPLHGYTDQDTLLAVGGYAWIRVGRVQHLKKKFYFRFQDYVDLIIWKIWVRQTYKVPRVHVTNPGLALLFEASTKISFSHKTFFSRGPYSMVVDEAQFLDRHHLFVKFGSVDGGVSRSTNQNLAFFAVYNMETTDIVSLHQNSSEDIYAWY

SEQ ID NO: 73296 - protein, 137 aa, Zea mays
  Coding DNA Sequence Number=SeqID_31517
MGAPDNPVRQPRHPTVRVLEQLTVGGLSSSGIGQSGAAPDRRGQHVGEEDRAKTGKTNGTSDNGENDGLESDEFGEDAPSPTPSAKNWVVQRQRHEGREKRSRMANEVAATEARTIIIMRRAWVQTPPLAPLFNILR

SEQ ID NO: 73297 - protein, 272 aa, Zea mays
  Coding DNA Sequence Number=SeqID_31518
  Homolog annotation: Hit_ID=Q6QP51; Match level="QueryCoverage=42%, HitCoverage=38%, E-value=3e-10, Identity=42%"; Hit description =Putative growth-regulating factor 1
  Subcellular localization annotation: CTP_CleavageSite=83; ConfidenceScore=5.50e-01
MTASKKGSKKGILRKGSFSAKEAGSAPTTDQRFKGWPLGRVQTAASERSGSTPTTGQRFKGRPLERVQRPPQATRAPRPLLIRGSKAGPEGFDSCLRRRARDDPGYVRYITEARAALPRLGVGPGRRRTPPRPTQGSDSGSASEDDELRLARPRAQTRARPRKTMNSSSPDPGLGLGLGPGRRQTPPRPTQGSDSGSTPEDDELRLARPRARTRDRPRKTTNSASPDLGLGHDLDVGRPTRPRPRRSLRLARPRARTDHVSGKAIITLSLAS

SEQ ID NO: 73298 - protein, 257 aa, Zea mays
  Coding DNA Sequence Number=SeqID_31519
MEGFGRGETRRSDDDARMVQSVHCAVASTTDGVIPAMCSDGGVRTPVRLHGWRTVYGTQALARQRVRVSRAMAWAWSMGCCVGELRRSGVDTGEGERTERRERAWGRKRGREFGHFYRARGKRNGVSVFNRPSMAFIKSGINGEKTDDLNSINARTADGAGSRGYAAAQSSGPGVKRAVGSSVAWCWGRARWSVRGALARGSWVAAGAGVAGAAGITGAAGHGASTGKGGRGRAARGWLDDCCCRVRGVPMARGGCS

SEQ ID NO: 73299 - protein, 223 aa, Zea mays
  Coding DNA Sequence Number=SeqID_31520
MANGVRHASTGSTAGAREQSDGVGVVDGVLCGRAPAGGVDTGKGEKTERRERAWGRKRGREFGHFCRARGKRNGVSVFNRPSMAFINRGINGEKMDELNSMNAWMADGVGSRGYAAAQSSGPGVERVAQVSRARPGSRVQLGAVRRLGREAGGARHGAGSTAAAVGCAACPWRKAGAPGALRERVEEEREGAGGERRERKEVSGEWSPGGGGCGGQQGAAARS

SEQ ID NO: 73300 - protein, 138 aa, Zea mays
  Coding DNA Sequence Number=SeqID_31521
  Gene Ontology: Mol. function=nucleic acid binding
MVKKIETLKEMEIQIVSNILGGGVDNVQIPISIRSLEQVDADMNESGGHTQNVDTRKKLDFAVDGISLARPNNAKPKGRTIKGSEQKENRVRLASLARRKRGRPPGSRNKVGSNAPHWNETTTSKNTQLISTTYMRTV

SEQ ID NO: 73301 - protein, 52 aa, Zea mays
  Coding DNA Sequence Number=SeqID_31522
MSSPSRPPWEGTELCAAVSKSSGLRHLGALALDLAELQSWVTAIPGSGAALG

SEQ ID NO: 73302 - protein, 178 aa, Zea mays
  Coding DNA Sequence Number=SeqID_31523
  Subcellular localization annotation: CTP_CleavageSite=38; ConfidenceScore=5.40e-01
MAKNSPGFSSFLSCAWGRWTSPMGGGHKTRRDFLHRLYDSLVKPSSSPSQIVRKRRRRHGNCVPSSLEAQARVSGLRRGTVVIIVALAGGRSLSCCPNFSPAPIIATEPHFVAPGDCMTQPPIRLLIIAFGVARQIADPSFADTLITVDWPGSAAASGCGLGKRGFGRWMMKERHGLE

SEQ ID NO: 73303 - protein, 532 aa, Zea mays
  Coding DNA Sequence Number=SeqID_31524
  Gene Ontology: Mol. function=RNA-directed DNA polymerase activity; Cellular component=mitochondrion; Biological process=RNA-dependent DNA replication
  Homolog annotation: Hit_ID=UPI00004C1733; Match level="QueryCoverage =99%, HitCoverage=41%, E-value=0.0, Identity=77%"; Hit description =UPI00004C1733 related cluster
  Pfam annotation: Domain name=RnaseH; Domain location=190-317; Score= -10.0; E_value=0.00049; Accession=PF00075.14; Description=RNase H
  Pfam annotation: Domain name=rve; Domain location=390-531; Score =50.9; E_value=4.3e-12; Accession=PF00665.16; Description=Integrase core domain
  Pfam module annotation: Pfam domain module=RnaseH::rve; Domain location=190-317::390-531
MGPIKDLKGVQRVMGCLAALSRFISRHGERGLPLYHLLRKAECFAWTQEAEEALGNLKALLTKAPILVPPADGEALLVYVAATTQVVSAAIVVERQEEGHACPFRGQFTSSARRKLRHYFESHPVTVVSSFPLGEIIQCREASGRIAKWAVEIMGETISFAPRKAIKSQVLADFVAEWVDTQLPTAPIEPELWTMFFNGSLMKTGAGAGLLFISPLGKHLRYVLRLHFPASNNVAEYEALVNRLRIAIELGVRRLDARGDSQLVIDQVMKNSHCRDPKMEAYCDEVRRLEDKFYGLELNHIARRYNETADELAKIASGRTTVPPDVFSQDLHQPSVKIDDTPEPEAPSVQPEVPSAQPEAPSVRPEAPSVQPEVPSAPEGETLHVEEEQSGATPDRNWQTPYLQYLRQGELPLDQAEARRKAPGGYTHLLVAIDKFSKWIEVRSLNSIRSEQAVAFFTNIIHRFGVPNSIITDNGTQFTGRKFLDFCEDHHIRVDWAAVAHPMSNGQVECANGMILQGLKPRIYNDLNKFGK

SEQ ID NO: 73304 - protein, 1356 aa, Zea mays
  Coding DNA Sequence Number=SeqID_31525
  Gene Ontology: Mol. function=protein translocase activity; Cellular component=chloroplast outer membrane; Biological process =intracellular protein transport
  Homolog annotation: Hit_ID=Q1RV20; Match level="QueryCoverage=80%, HitCoverage=80%, E-value=0.0, Identity=43%"; Hit description=AAA ATPase; AIG1
  Pfam annotation: Domain name=AIG1; Domain location=719-905; Score =65.8; E_value=1.4e-16; Accession=PF04548.7; Description=AIG1 family
  Pfam annotation: Domain name=DUF258; Domain location=573-819; Score= -182.8; E_value=0.1; Accession=PF03193.7; Description=Protein of unknown function, DUF258
  Pfam annotation: Domain name=MMR_HSR1; Domain location=719-817; Score= 35.0; E_value=2.6e-07; Accession=PF01926.13; Description=GTPase of unknown function
  Pfam annotation: Domain name=Miro; Domain location=720-847; Score =1.3; E_value=0.0041; Accession=PF08477.3; Description=Miro-like protein
  Pfam module annotation: Pfam domain module=AIG1::DUF258::MMR _HSR1::Miro; Domain location=719-905::573-819::719-817::720-847
MATTSDAAPVAPVEEESTSPAAAEEEPPKKVEASMATTDVAPVAPAPVEDENLASAAAEESPSKKVEAAAAQEEVEEVVEAPKKVVAGGGEEEEVRLEGIDEGFGGPEAENGQAKGVGGGYDSGDVKEADAEDKGGNLGPTEAEAETDDGGEEPASGDGETPASLAAPMPVVESKSENAELGDGDPSLVFLDALEGDEMGELREEQDEDTGASVEVKVVDKVADDAEPPVTEEEKLEPEVEKGEEVGPRSGDGGELSNEKEVEVFSLREEAVEPQDMVAHVSEANGELGDEKEASDDVVVLGVEEAPEEPSNKDTDGDEVLVLGGKEAPEESTKKDDDVEDEATKPEPMSEASPVVSQHPQSDLVASSLDVGGDVNNANVTLTQVLNDGSIEELAPASADSVLEDSLEKEQNAENLATASEAVEDVGAEVENVAAPSVDGILSRELAPESINENNGADEIEGATEVVDREEEVAYNDIIEAVPDDEDGIDNEADDDNDGANSNTSPARVAILESSEAAKQIMKELTEGSSSGNVSRDFTNSMDGQIMLDDSEDDDDGDEKEFDSAALAALLKAATGGSSDGNVTVASQDGSRIFTMDRPAGLGSSAPSLRPTAPRQPARSNLFSPSELAVTADPTEEMTEEEKKLHDKVELIRVKFLRLVYRLGATPEETVAAQVLYRLSLAEGIRHGRQTNRAFSLDNARRKALLLEAEGKEDLNFSCNILVLGKTGVGKSATINSVFGEEKSKTDAFSSATTNVREIIGDVDGVKIRIIDTPGLRPNVMDQGSNRKILAAVKKYTKKCPPDIVLYVDRLDSLSRDLNDLPLLKTITSVLGSSIWFNAIVALTHAASAPPEGLNGAPMTYEVLMAQRSHIIQQSIRQAAGDMRLMNPVALVENHPSCRKNREGQKVLPNGQSWRHQMLLLCYSSKILSEANSLLKLQDPNPGKLFGFRFRSPPLPFLLSSLLQSRAHPKLSAEQGGNEGDSDIELDDYSDVEQDDEEEEYDQLPPFKPLTKAQLARLTKEQKNAYFDEYDYRVKLLQKKQWKDEIRRLKEMKKRGKTDLDDYGYANITGEDDQDPPPENVSVPLPDMVLPPSFDCDNPTYRYRFLEPTSTVLARPVLDAHGWDHDCGYDGVSVEETLAILSRFPANVAVQVTKDKKEFSIHLDSSIAAKHGENTSSLAGFDIQTVGRQLAYILRGETKIKNIKKNKTTGGFSVTFLGDIVATGLKIEDQLSLGKRLSLVASTGAMRAQGDTAYGANLEARLKDKDYPIAQSLSTLGLSLMKWRRDLALGANLQSQFSIGRGSKMAVRLGLNNKLSGQITVRTSTSEQVQIALLGLVPVAASIYRSFRPSEPSFAY

SEQ ID NO: 73305 - protein, 96 aa, Zea mays
  Coding DNA Sequence Number=SeqID_31526
MDEDPGEFFAISVETNAEETARMSQQTESKTTLTVGPTRQRFPRDNRLQVRGTGAQPQTQSTRTIPSSPRGVKKTDPTGWPHDAVTQRKGGRRIKY

SEQ ID NO: 73306 - protein, 32 aa, Zea mays
  Coding DNA Sequence Number=SeqID_31527
MEIVFRLRLRRKLGSVGFLGIRSRTPVRVVGS

SEQ ID NO: 73307 - protein, 671 aa, Zea mays
  Coding DNA Sequence Number=SeqID_31528
  Gene Ontology: Mol. function=RNA-directed DNA polymerase activity; Cellular component=intracellular; Biological process=RNA-dependent DNA replication
  Homolog annotation: Hit_ID=UPI00004C1733; Match level="QueryCoverage =90%, HitCoverage=44%, E-value=0.0, Identity=91%"; Hit description =UPI00004C1733 related cluster
  Pfam annotation: Domain name=RVT_1; Domain location=56-225; Score =129.2; E_value=1.2e-35; Accession=PF00078.17; Description=Reverse transcriptase (RNA-dependent
MPSIPRDVSEHSLDIRAGARPVKQPLRRFDEEKRRAIGEEIHKLMAAGFIKEVLHPEWLANPVLVRKKGGKWWMCVDYTGLNKACPKVPYPLPRIDQIVDSTAGCETLSFLDAYSEYHQIRMKESDQLATSFITPFGMYCYVTMPFGLRNAGATYQRCMNHVFGEHIGRTVEAFVDDIVVKTRKASDLLSDLETTFKCLKAKGVKLNPEKCVFGVPRGMLLGFIVSERGIEANPEKIAAITNMGPIKDLKGVQRVMGCLAALSRFISRLGKRGLPLYRLLRKTERFTWTPDAEEALGNLKALLTSAPILVPPAAGEALLIYVAATTQVVSAAIVVERREEGHALPIQRPVYFISEVLSETKIRYPQIQKLLYAVILTRRKLRHYFGSHLVTVVSSFPLGEIIQCREASGRIAKWAVEIMGETISFAPRKAIKSQVLADFVAEWVDTQLPAAPIQPKLWTMFFDGSLMKTGAGAGLLFISPLGKHLRYVLRLHFPASNNVAEYEALVNGLRIAIELGVRCLDARGDSQLIINQVMKNSHCRDPKMEAYCVRFGAWRTSSTGSSSTTSSDDTTRLRTSWLRYPRGGQRSLRTSSPETYINPQSRPTTRPSLRRSRPCPRCPRLSPRHPRLPRVRHCASRESGMGSRLIETGRPRTCNISTKESYPSTEPKLGD

SEQ ID NO: 73308 - protein, 83 aa, Zea mays
  Coding DNA Sequence Number=SeqID_31529
MAQCSALTILFDHHLIQYDQIKNGNSNKGQRIPTMSKEDKHQLKSSKIKLDRQKNQDLEFRMKSFLNIPLPQPLLAITVPHLT

SEQ ID NO: 73309 - protein, 91 aa, Zea mays
  Coding DNA Sequence Number=SeqID_31530
MAELLDYRAPAIQLRPPPHVDFTGNDQNSMMPSRLIPELRAPMQAGIYGGGQPSSFSLAHCAVDVADWMRGSRGQYLYQRIGARSEQKRRR

SEQ ID NO: 73310 - protein, 161 aa, Zea mays
  Coding DNA Sequence Number=SeqID_31531
MEASEILHHEPRAGEPLFRLDAATALRSSAPPPWVLGRRYRVGEQAAVEERDARREKIEQGFGYAIADDSQGIAAEVWTYIRAVERAGLEGSDESEYSSDEENSSDPSEEGRGGDGGDGDDDRVDGDGGCDSGKGGDSSGKGGSGDGGSKGSSKGSNKASG

SEQ ID NO: 73311 - protein, 66 aa, Zea mays
  Coding DNA Sequence Number=SeqID_31532
  Subcellular localization annotation: CTP_CleavageSite=26; ConfidenceScore=5.07e-01
MQYKGSSSLISCEKQTIRIKFLNLTRFMLRRSAFCIVGLRTSLGAPKVHPMGVAPELRVDFCKQST

SEQ ID NO: 73312 - protein, 157 aa, Zea mays
  Coding DNA Sequence Number=SeqID_31533
MGNPIPTHKTLSHSRVALKRKVYSEQFLLHQGSAARLLPIYTSAGSPEITPWHSSCTGSKESRQRVEDCRAKLCGPMEKVARRRRSLRATRVRLTPLAHAPAVRGMRSTCQGFVARASDADKRSLTRRDPILILTSGAREGEWTTPQSHQSAQGFGG

SEQ ID NO: 73313 - protein, 57 aa, Zea mays
  Coding DNA Sequence Number=SeqID_31534
MAAGGAYSKGARPCVQAGRGVEGEQQQGRELVHAMEERSSAPREEDTREGEEAAGGG

SEQ ID NO: 73314 - protein, 81 aa, Zea mays
  Coding DNA Sequence Number=SeqID_31535
MERRGGAAAAISGRCAEEGARGGVHAGMELGHGREDGREGAGELGRGEQQQGRELVHAMEERSSAPREEDTREGEEAAGGG

SEQ ID NO: 73315 - protein, 44 aa, Zea mays
  Coding DNA Sequence Number=SeqID_31536
MAILESDDENYNPMYKKMVPKEVLGKFLSHEMMVKHSKYTDDLA

SEQ ID NO: 73316 - protein, 194 aa, Zea mays
  Coding DNA Sequence Number=SeqID_31537
  Gene Ontology: Mol. function=catalytic activity; Cellular component =cellular_component; Biological process=metabolic process
  Homolog annotation: Hit_ID=Q2R712; Match level="QueryCoverage=97%, HitCoverage=33%, E-value=2e-16, Identity=43%"; Hit description =Cycloartenol synthase, putative, expressed
MWRLKIGEGRGPWMQTVSDFHGRQVWEYDPDAGTEEERSKVEQLRREFTENRFRRRESQDLLMRMQCDMMYDAHVCKQLTGQKHLHADDMGAATKIEDGDEVTEERLRESLRRALGWMSALQAEDGHWPDFRPAHHKGSHRMLSYRKEAIDVEILPPYLQPSRLLVYMIGVAIIQLYLNCGWYHVSSQFTQAVP

SEQ ID NO: 73317 - protein, 252 aa, Zea mays
  Coding DNA Sequence Number=SeqID_31538
  Gene Ontology: Mol. function=metal ion binding
  Homolog annotation: Hit_ID=Q2QY21; Match level="QueryCoverage=65%, HitCoverage=32%, E-value=8e-10, Identity=59%"; Hit description=Kelch motif family protein
MAEESCHPRALSWFVRSCIPADPAHHTAVLVPFTAPDVEDPEPEPPIAGLPDELLLDILRPCRELLLHLHASASASSLEVAVLPLPTRCGGAAFAHARAVAVGRHVYLVDRGATLRVDPLTGAARAGADAVPAEQVPGGRRVRADLHGGQLGAHRLGRGVRPGDRIMARRRGGPAPEATPPPLQPLLLVVPLRPPAPPESAFSSHTSNASMASLFPVCSFCHCYNRVSLLDLASRNRSMHMADDTWVLGLTA

SEQ ID NO: 73318 - protein, 301 aa, Zea mays
  Coding DNA Sequence Number=SeqID_31539
MDFGLQVLLLFVGLLGVFSSGSVLALSIREKEPLSARAKEPSCVRGMTSSFYRLRRGSACGAFLGKELPGDGQLMRRVIYDESVLGQEWDPLEWFPFSTPAPCPFPPCPTLGSVPQAIRSLVTLGLSFSSAFSISAPSAGSVNGYRVAGTSCSVGHESRVVAADQEVTSSPVGSLRLGSLSPSSLPKVSPGSCDVSHMAQEAVEAEAELLCTQLAEADGGVFQSGQCLIPYPDNTVFGVHRGATGALLMGEIYFGYHLRDIVGSPSSLLDEGLEDMLEGYDKVASHVVFWVSAHDIVRDAR

SEQ ID NO: 73319 - protein, 51 aa, Zea mays
  Coding DNA Sequence Number=SeqID_31540
MNINIEDLVELILWSLEKIMEHKAKVLQKQSSGKGNKVEFNNARNMENAFA

SEQ ID NO: 73320 - protein, 69 aa, Zea mays
  Coding DNA Sequence Number=SeqID_31541
  Homolog annotation: Hit_ID=Q53MS8; Match level="QueryCoverage=51%, HitCoverage=6%, E-value=1e-07, Identity=67%"; Hit description =Similar to beta-amyrin synthase
MANIAAELIESSLGACGLPRALRGGITVATGEHVGSTNCSVYFNYPNYRILFPVWALGEYHRKVCTKSN

SEQ ID NO: 73321 - protein, 89 aa, Zea mays
  Coding DNA Sequence Number=SeqID_31542
MSYPWYLPLTITPKPLEELDASSKRCTGLGHAPQFLIGQSGEPSELITGFMGTCRRRGEVNGTKVGSSDPWFYASPSYYMRSSSAVDDS

SEQ ID NO: 73322 - protein, 105 aa, Zea mays
  Coding DNA Sequence Number=SeqID_31543
MDWASITRKIRALGVSFLRHREQQPWTAGAKGSKKPMKKTKKRVQQREQGITEGTLVWRTGLSGVPPDSVRCTRGLEAKLITFGKNQRRSTIIHRTVRCSKEKRL

SEQ ID NO: 73323 - protein, 197 aa, Zea mays
  Coding DNA Sequence Number=SeqID_31544
  Gene Ontology: Mol. function=actin binding; Cellular component =intracellular; Biological process=cell division
  Homolog annotation: Hit_ID=Q9FVI2; Match level="QueryCoverage=70%, HitCoverage=100%, E-value=1e-59, Identity=79%"; Hit description =Actin-depolymerizing factor 1
  Pfam annotation: Domain name=Cofilin_ADF; Domain location=70-197; Score=192.8; E_value=8e-55; Accession=PF00241.10; Description =Cofilintropomyosin-type actin-binding pr
MEPFHLNEHQNRTLLRVPRQAQQLQTSPEAPTTPPAADPVTRLLPAAERLQPCPVPAQMANAASGMAVDDDCKRRFLELKAKRTHRFIIYRIDEKKKMVVVEQVGKPVLGYDDFAASLPANECRYAIFDYDFVTEENCQKSKIFFIAWSPDTARVRSKMIYASSKERFKRELDGIQVDLQATDSAEVGLDVIQGRAS

SEQ ID NO: 73324 - protein, 129 aa, Zea mays
  Coding DNA Sequence Number=SeqID_31545
  Subcellular localization annotation: CTP_CleavageSite=25; ConfidenceScore=5.22e-01
MDASSSAMLFYSVSSSPIVLPPSCVSMSIWNPSTEAVTYYSINAPTRFGCRPPHRRGHGPPPPILKHADVLGVLTCLLHDPLLLQRQQSVVAFCCNGLARHCPGHGIMWFRVRRVTGYRASGGTGYGAA

SEQ ID NO: 73325 - protein, 307 aa, Zea mays
  Coding DNA Sequence Number=SeqID_31546
  Homolog annotation: Hit_ID=Q69S79; Match level="QueryCoverage=49%, HitCoverage=20%, E-value=3e-61, Identity=79%"; Hit description =Putative ABC transporter
MDSSAADDPMADEAGVEDAFTQEITDYSYVPRYHVLSWMETVEGMVAGVAALPPVYLILNREIYDTCSCLLMMPKPDPFGWIIAEKSALIAAAKLLPINLHHCKNNQNAFQCLKMEKALLRYCASFLTPDDKRMILGIKDQAKQMIQSEVLQAMVQMGVLVPTGDMTVVRRTAQFFLNSFQECLIAQRKEREMATAELGFKKQLTKEEKFEKRKQRLAAIGEDLLAIAADQPFRFPATFTFVVRAFSVLDGTGKGLHPRFHITEIAKPNAKELLRFNDAGVEIVVKASFNIWSKLLTYLYDSTSPKG

SEQ ID NO: 73326 - protein, 150 aa, Zea mays
  Coding DNA Sequence Number=SeqID_31547
MDGGGSSAHAPGYGRTFYATRDAEDIKSEGKGSDNGFAYVRPGDYTSERERDHGSHFIAQLEGDSERWDGLRKVRIRVNPTRVFRQRPRWNPALGTEVGDGCFHSRPSGICGGKRNRSVGLLRARRRWWCGSHASVKDTDTARTGEVIFH

SEQ ID NO: 73327 - protein, 150 aa, Zea mays
  Coding DNA Sequence Number=SeqID_31548
MDGGGSSAHAPGYGRTFYATRGAEDIKSEGKGSGNGFAYVRPGDYASERERDHGSHFIAQLEGDSERWDGLRKVRIRVNPTRVFRQRPRWNPALGTEVGDGCFRSRPSGICGGKRNRSVGLLRARRRWWCGSHASVKDTDTARTGEVIFH

SEQ ID NO: 73328 - protein, 151 aa, Zea mays
  Coding DNA Sequence Number=SeqID_31549
  Pfam annotation: Domain name=SWIB; Domain location=78-135; Score=2.9; E_value=0.01; Accession=PF02201.9; Description=SWIBMDM2 domain
MEHHMVHDVNMVLDLSILTLKNQPKCDIPQPERNQNEIMYNIERRAQLDSIHVKSEAAASLVSISVYLHSVGKLQPHCNKVYKRFAMRKNKFMGSNKNQAKKTDINCDATLKSLFGGRDKVGMLEISELLSRGFPKISKLLWSMEPGMALW

SEQ ID NO: 73329 - protein, 156 aa, Zea mays
  Coding DNA Sequence Number=SeqID_31550
  Gene Ontology: Mol. function=zinc ion binding
  Homolog annotation: Hit_ID=Q5VMF2; Match level="QueryCoverage=96%, HitCoverage=18%, E-value=8e-49, Identity=58%"; Hit description=PHD zinc finger protein-like
MAPRSPLEALEKTIRSSIDPVVKRSHTNCLNCNEPVLPSSQTENVLCQVCLESKQPQDPLTTSYTCNGSSRDNRLHKLVFNVLLDGTEVAYYVDGQVYNLHCMMQRKVDGVSPSAFEAHAGEGSRRKPYDNIFTSNGVSLHELAMKISKDMELSEP

SEQ ID NO: 73330 - protein, 111 aa, Zea mays
  Coding DNA Sequence Number=SeqID_31551
MSSSSSWTFAATASSNAPSSEKAISDPAVVVELQHEHTMEFGTSRIYSGHVLEMQCLGYFGNEVGRVPGDQDIPEPEGELVVFEAFFATGLCLPAHQFMVEVPRKFEIQIH

SEQ ID NO: 73331 - protein, 375 aa, Zea mays
  Coding DNA Sequence Number=SeqID_31552
MEKDRQEIQRKKRKAPLRLVDPRHDAKELSVDDYLVGGVTIVDAQTGLPPARAEAGQLVVMPSKVTAGPRGTMKSDTRTSLDPWLKFCAAADDGGEVALGATANDVAASVTQQLRYAAVFADQVASAALTSQLCSERKRLKGRIERLSDATYRGNQEDAENAHAKAQAAHQRVADLELEVRNMRGYREKMKSATRARVDRAHTLFVDAYHDLGAQTTPFDKSGEEVGTRFLGWLQEELESLPSIVTGLMTYASLVTCEGAANALSHKGCRHFKAFDRGNEDFNAGVFQIEDDVLKRSAGALYDRMWGPHGRSIVRKRDDREFANAMRDEEVEDLASLESSVIRKDAKVETGAEEQSSLKKGGAEGPAMAGTSALV

SEQ ID NO: 73332 - protein, 51 aa, Zea mays
  Coding DNA Sequence Number=SeqID_31553
MAKSCFGEGDLRALFDGEELRLMLFNFCEASLIPKEEPICILGLLHTVRCR

SEQ ID NO: 73333 - protein, 125 aa, Zea mays
  Coding DNA Sequence Number=SeqID_31554
MDDSDDFDEEGGGGEDGSDYDGGDSRSSGNDNNYNGGDEGGNDKGDRGSSDRGGSGNVGGKAPSTKDEYLDIPMKDSVGGLRLPKILKNTTNMFSKYDTFIGTFGLGMKLYTIRKAWSGRRLNQF

SEQ ID NO: 73334 - protein, 126 aa, Zea mays
  Coding DNA Sequence Number=SeqID_31555
MQTDRRMTNLLVGAGEALADDLTLEGSSLVDGGPRSTAPAVSSPASYGQEMVPRHGQDYDWRSQPIDPQAAYASAEGKPMDSENLALPPLMLSPPPPPQSLVDIETRPASVAARVDVSGQDDASTT

SEQ ID NO: 73335 - protein, 144 aa, Zea mays
  Coding DNA Sequence Number=SeqID_31556
  Gene Ontology: Mol. function=transferase activity; Biological process= biosynthetic process
  Homolog annotation: Hit_ID=Q10QW6; Match level="QueryCoverage=63%, HitCoverage=19%, E-value=1e-41, Identity=89%"; Hit description =Glycosyl transferase, group 1 family protein, expressed
MPDEDFSIVLEAVLMYDRRVAAALGEDDSTDEEQLWIDIKNGKQFVYPRLLFIVTGKGPDRKKYEDQIKRLKLRRVALRTMWLASEDYPLLLGPVTPVAPWRSGLSGPIQKALISGLYGPNYVFQVSLGPVQNCLKPSFILKVV

SEQ ID NO: 73336 - protein, 77 aa, Zea mays
  Coding DNA Sequence Number=SeqID_31557
MAAARLPLSAVAPIRACVREERKEMLATPDPTSIDFLLLHLMCDPLCGCLWCNLCSGKEEGVEADLQEFQDFDEFED

SEQ ID NO: 73337 - protein, 79 aa, Zea mays
  Coding DNA Sequence Number=SeqID_31558
MADRSSGGGEVVRGEEAEGGAGLGMREAEPRTALAGCTEMEGAGHGCWCAMDKEEQGRESGELDVEARLEVIRALVREL

SEQ ID NO: 73338 - protein, 253 aa, Zea mays
  Coding DNA Sequence Number=SeqID_31559
MTKWISTQVHDLLLTKPPHSLHLPAQPLSLASLTWHRALAVLLRCQSLDLAPAATSAAPHTLSSLAPELQPWSLCPLCSPATCVFSSQAIAKLLSIADALALLLAMAGHRMPHSNLAVSEPDPAMELTAPPAAQPWAPSLSSPCSLVLPARRLWPSGELAVLPVRVARAPYPMAPGRPSLLVFAVGPVSSSLRPRLLSLFMLLSSPSSLVHCDSAGCGGTLQDMVDGVTWPSTLPPGWTVKWDAALAGEEQEE

SEQ ID NO: 73339 - protein, 154 aa, Zea mays
  Coding DNA Sequence Number=SeqID_31560
MQPQVSPRRTADGLKPHLAQSGGHNTGEVHPAACSPWSHTVALSVSKLYPAQRWCPSPEQRQSARQRLGLRQPGCRGPQKAPVFRKLQVTAVPRPQLAIEAGRRWKRDLTEIRCMRVVATNFRKKLPPTGSHAPRKKWHDTCVLGEQGAGPKDE

SEQ ID NO: 73340 - protein, 83 aa, Zea mays
  Coding DNA Sequence Number=SeqID_31561
MDDGELAAAAVLWGREEEQGPRAGRHCCCCFAWERKNRAQGTAATDRESGGRKKGAGLLLAMEGSAQSCCVREKKAGGKGSGG

SEQ ID NO: 73341 - protein, 127 aa, Zea mays
  Coding DNA Sequence Number=SeqID_31562
MRGDRRNKELLAQGIRGIYRGSLTGDGQRVTTSYDDAMDVLRHVAQGREAAVNGELIWSDPSELGHDFYSKVIPLPWIYKIDVVTYDKNFMIWKLQGLKVELISPISDLSKWSISGTLLQISPKLKV

SEQ ID NO: 73342 - protein, 136 aa, Zea mays
  Coding DNA Sequence Number=SeqID_31563
MAAFVNNGSENVYNIFSKNVDKVNIRTCNQEASTRHQCCCPEGFAQMQLATKLQVVHVLHDRRSWGCDDYLVTMDANLHKSYLWRHSMQTDGFWRWPSVHRARIRGRWGNEKVKGAMGKYMPSLGGGWDHKELVIP

SEQ ID NO: 73343 - protein, 68 aa, Zea mays
  Coding DNA Sequence Number=SeqID_31564
MVLNYRRSAAAKLNSSNHSTVVAKLFAIQSFIPSPKVPEHTLHLGNIVNHVFEDLRKTKVPNSSPSQY

SEQ ID NO: 73344 - protein, 754 aa, Zea mays
  Coding DNA Sequence Number=SeqID_31565
  Gene Ontology: Mol. function=RNA-directed DNA polymerase activity; Cellular component=intracellular; Biological process=RNA-dependent DNA replication
  Homolog annotation: Hit_ID=UPI00005A975E; Match level="QueryCoverage =99%, HitCoverage=44%, E-value=0.0, Identity=83%"; Hit description =PREDICTED: similar to Retrovirus-related Pol polyprotein from transposon 297
  Pfam annotation: Domain name=RVT_1; Domain location=12-181; Score =141.8; E_value=1.8e-39; Accession=PF00078.17; Description=Reverse transcriptase (RNA-dependent
  Pfam annotation: Domain name=RnaseH; Domain location=411-538; Score =10.8; E_value=5.8e-06; Accession=PF00075.14; Description=RNase H
  Pfam module annotation: Pfam domain module=RVT_1::RnaseH; Domain location=12-181::411-538
MVAGFIKEVFHPEWLANPVLVRKKGGKWRMCVDYTGLNKACPKVPYPLPRIDQIVDSTAGCETLSFLDAYSGYHQIRMKESDQLATSFITPFGMYCYVNMSFGLRNAGATYQRCMNHVFGEHIGRTIEAYVDDIVVKTRKASDLLSDLETTFQCLKATGVKLNPEKCVFGVPRAMLLGFIVSERGIEANPEKIAAITSMGPIKDLKGVQRVMGCLAALSRFISRLGERGLPLYRLLRKIERFTWTPEVEEALGNLKALLTNAPILVPPAAGEALLIYVAATTQVVSAAIVVERREEGHALPVQRPVYFISEVLSETKIRYPQIQKLLYAVILTQWKLRHYFESHLVTVVSSFPLGEIIQCREASGRIAKWAVEIMGETISFAPRKAIKSQLLADFVAEWVDTQLPAALIQPELWTMFFDGSLMKTGAGAGLLFISPLGKHLRYVLRLHFLASNNVAEYEALVNGLRIAIELGVRRLDARGDSQLVIDQVMKTHCRDPKMEAYYDEVRRLEDKFYGLEVNHVARRYNETADELAKIASARTTVPPNVFSRDLHQPSVKTNNTPEPEKVSALPEVPSAQPEAPSAREGEALRIEEERNGVTPNRNWQTSYLQYLHRGELPLDRAEARRLARRAKSFVLLGDGKELYHRSPSSVLQRCISIAEGHHTASRALVGNAFRQGFYWPTAVADATRIVRTCQGCQFYARQTHLPAQALQTIPITWSFVVWGLDLVGPLQKAPGGYTHLLVAIDKFSKWIEV

SEQ ID NO: 73345 - protein, 189 aa, Zea mays
  Coding DNA Sequence Number=SeqID_31566
MAPAWERARRALTARFCMRFAARRVVVEDAPRGMVDIEAPFPVAVAEAEQQQEQPEDEREMLLAAVSSEPVSEQLASSRSGSRSSAEAPPRPTPGLGLNLDAERQTPPRPTLGLGHSLGLGRRSPPRPTQGSDSTSTSEDGLRLARPQGSDSASTSEDGLDLDLGGASASPDLGLGPTTSHGGPPLPYP

SEQ ID NO: 73346 - protein, 149 aa, Zea mays
  Coding DNA Sequence Number=SeqID_31567
  Gene Ontology: Mol. function=DNA binding; Biological process=DNA integration
  Homolog annotation: Hit_ID=UPI00004C1733; Match level="QueryCoverage =62%, HitCoverage=17%, E-value=2e-20, Identity=88%"; Hit description =UPI00004C1733 related cluster
MPGIPRDATEHSLDIRAGARPFKQPLHRFDEEKRRAIGEEIHKLMAAGFIKEAKGVKLNPEKWVFGVPRGMFLGFIVSKWGIKANPEKIATITQHPEPLLGTPGGYTHPWEGPLVITKVLKPGTYKLANSQGKVYGNAWNIQQLRRFYP

SEQ ID NO: 73347 - protein, 92 aa, Zea mays
  Coding DNA Sequence Number=SeqID_31568
  Gene Ontology: Mol. function=protein serine/threonine kinase activity; Cellular component=mitochondrion; Biological process =protein amino acid phosphorylation
  Homolog annotation: Hit_ID=Q339V0; Match level="QueryCoverage=69%, HitCoverage=17%, E-value=4e-18, Identity=81%"; Hit description =Serine/threonine-protein kinase receptor, putative
NRCEEAGQGFGVRPERAEERAAAGRQAPAQQPRQASRRFVKGQEKLLVYEYMPNRSLDTYLFSTQAILPSTRVQRIESRPEVTPRRGGRAQV

SEQ ID NO: 73348 - protein, 737 aa, Zea mays
  Coding DNA Sequence Number=SeqID_31569
  Homolog annotation: Hit_ID=Q68Q07; Match level="QueryCoverage=28%, HitCoverage=36%, E-value=2e-66, Identity=58%"; Hit description =Putative nucleolin
  Pfam annotation: Domain name=RRM_1; Domain location=479-548; Score =77.1; E_value=5.4e-20; Accession=PF00076.12; Description=RNA recognition motif. (a.k.a. RRM, RBD, or
  Pfam annotation: Domain name=RRM_1; Domain location=579-653; Score =63.6; E_value=6.5e-16; Accession=PF00076.12; Description=RNA recognition motif. (a.k.a. RRM, RBD, or
  Pfam module annotation: Pfam domain module=RRM_1::RRM_1; Domain location=479-548::579-653
MGVGGSFWDLLKPYTRHEGAGYLRGRRVAVDLSFWVVSHSTVDLSFWVVSHSTAPPPGRRKEHTGEKRPLEQIDAGEKNVVSTAVVKVQPKKVIQPKKSTQPAKQESSDDSSSESSSDDEPSKKPVAGSKKPPASSSSSDDSSDSDDSSSDEEPAKKPTVLSKKPTVLSKKPTVLSKKPVTAVSNGSKQVKPDSSSSDSSSDEDEKPAASLKKPVVASVQKKTQESDSSDSDSDEDESEDDIPAKAQVVAKKKEESSSSSDSDSDSESEDEKPAANLKKPPVPSVQKKTQESDSSDSDSDEDESDDIPAKAQVVAKKKEESGSSSDSDSEFESDDEDSNAKTVQPAKAAAIKKKEDSSESSETDSQSDSEDSEPEKPTVPAKRPLATNKKNEQSSEKSDDSSDESSDESDEEPPQKKTKNSAPSGAAKAATNVSKKKSSSDEDDESSEESSDDEDTEQVETKPKTPAKSQSQATGSKTIFVGNLAYSIEREQVKEFFEEAGEVVDVRLATFDDGSFKGFGHVEFATVEAAQKALEFVGHDLMGRPLRIDMATERGAYTPSSGKDNGSFKKFAPRSGNTVFIKGFDTSGGEDQIRTALEEHFGSCGDITRISIPKDYDTGVSKGMAYMDFKDPDSLNKAYELNGTDLGGYSLYVDEAKPRPDNSGGFSGDRGGGRGRSGGFSGGRGGRSDRGRGGSRGRGFGGRGGRGDRGRGGRGTPFRQTAGTASTGKKTTFGDDD

SEQ ID NO: 73349 - protein, 93 aa, Zea mays
  Coding DNA Sequence Number=SeqID_31570
MAKLRVREGCSPRVEVLESRGNGGGVRTRRGDVDGAPAVQESLRYSIGVDLKAKVSPAYHHLGCVSHHSNSLHLVSQIPMSIKVTYTYAYWQI

SEQ ID NO: 73350 - protein, 87 aa, Zea mays
  Coding DNA Sequence Number=SeqID_31571
MAHQIVSGVHQTVFDAPGRAPSEHATLGFSQGALRYNSPDCLVCTGHVWKYKTLILMSSFVEQNEEPYFTLKVHQWSMFPQYSGTKF

SEQ ID NO: 73351 - protein, 90 aa, Zea mays
  Coding DNA Sequence Number=SeqID_31572
MAHRIARSTRGCERPKSGDDDLAVLMRQGFDSRLENLHGSSRKLSKGSVEAKGLYKRLAQVAGARVARAGCAELAGAKGGVWPARAYGFC

SEQ ID NO: 73352 - protein, 97 aa, Zea mays
  Coding DNA Sequence Number=SeqID_31573
MARARGERLLVCWWRIRNYEFARNIRISLVRMIPLVEILVQKIPLFMQDCYSQTVRSGSSDGLWPDLSDCPWPRTGRSDTWNLHSIELTVNFSIVEF

SEQ ID NO: 73353 - protein, 103 aa, Zea mays
  Coding DNA Sequence Number=SeqID_31574
MELFGGEGSGLSRAGFDPCLEKLHSSSGKLSKGSIEAEGLWKWLAMVVGAWVARTGGTELAGAKDGVWPAKVREERLMGFADWSQRYGVMRDQGEHAQVLGEG

SEQ ID NO: 73354 - protein, 91 aa, Zea mays
  Coding DNA Sequence Number=SeqID_31575
  Subcellular localization annotation: CTP_CleavageSite=78; ConfidenceScore=5.26e-01
MGRKPGHRRQTAVEPTGGRLPPGRSAGSPRRLAATPFSHSALAGEWARSDAVTLVHRAVSPSLMGRRWAVSAPARALRAQEENEKPQIRNL

SEQ ID NO: 73355 - protein, 206 aa, Zea mays
  Coding DNA Sequence Number=SeqID_31576
MDARHDVERRATAVLPRWCLGAAEHDGDLLTEQGHKPRRRGLAGHAAVQAGCRARRAPGQRPGRGRFWLSWARVGEKTASWALFGEDEQGQGEIVAAISICKAPAIDGQQRIVASGQEQRQGMASVLSCGAAPRLGRAERSCAGTSMGERRAGLRSGGRRDRLGWRRIERCWGFFMREVRKGWLQTCSCSFVRSEWEKQFSPRKRG

SEQ ID NO: 73356 - protein, 212 aa, Zea mays
  Coding DNA Sequence Number=SeqID_31577
  Gene Ontology: Mol. function=DNA binding; Cellular component =cytoplasm; Biological process=DNA integration
  Homolog annotation: Hit_ID=O24587; Match level="QueryCoverage=52%, HitCoverage=13%, E-value=3e-43, Identity=64%"; Hit description=Pol
  Pfam annotation: Domain name=rve; Domain location=108-211; Score =25.6; E_value=4.3e-05; Accession=PF00665.16; Description=Integrase core domain
MDLVSKGNQELNKQNVSNSIKEKEKAPMASSLHSFHDTKNHVYLYAYIKNTTNVAHHDSCYDHVVFPVCHDDVFSSHAMFASTNSSHVHACQAGKQVGTTHPSKNVMTTSRPLELLHMDLFGPVAYLSIGGTQNEFELKVKKIRSDNGFEFKNLQVGEYLEEGGIKPEFSAPYTPQQNGVIERKNRMLIDLVRTMLGEYKMKASRPLVGFSD

SEQ ID NO: 73357 - protein, 82 aa, Zea mays
  Coding DNA Sequence Number=SeqID_31578
MTKVDACRRCSELKKWNFGSALSFVFFVLPHIVALAYVRRLIPERPTRNGSGEMARVACTLYGKRLDCGVSVLSVGVNPVWT

SEQ ID NO: 73358 - protein, 171 aa, Zea mays
  Coding DNA Sequence Number=SeqID_31579
MKLSNKKASKKEERNESGDEETKDAEIDSDEESPLDRATPLKRKKTKIAKMEVEMTTTQEQWKGSYEDINCNTRNNLCDKADLAPARHGQRGNALAPKMVEGSPVGAKSPQIESLVEAVFRSLSLEEEDDEAKGTEGGESLGSEKGVEEQRVALEADIFGPTSSYVEEMGE

SEQ ID NO: 73359 - protein, 89 aa, Zea mays
  Coding DNA Sequence Number=SeqID_31580
MNTSMTLKSKSSLKVAEDEHEDRSTKPSYIEMGLSIMKDKDLKEMKEIGYFGDKVKVRLGSNETTPKPKNNERVLEASFELAFSYRCTR

SEQ ID NO: 73360 - protein, 105 aa, Zea mays
  Coding DNA Sequence Number=SeqID_31581
MDFVKASLGNSMVLKVVDCFFKYAHFLPLAIHTPSSSLSKHCSTTMLLGLTHIDPSTPKQEIKKGNYDTHHCEVEFQAPKYYEPFQVLERIGPNPYKPTTMGLYA

SEQ ID NO: 73361 - protein, 395 aa, Zea mays
  Coding DNA Sequence Number=SeqID_31582
  Gene Ontology: Mol. function=calcium ion binding; Cellular component =cytoskeleton; Biological process=actin filament bundle formation
  Homolog annotation: Hit_ID=Q5QMW7; Match level="QueryCoverage=91%, HitCoverage=58%, E-value=1e-141, Identity=67%"; Hit description =Putative plastin 3
  Pfam annotation: Domain name=CH; Domain location=156-272; Score=94.6; E_value=3.1e-25; Accession=PF00307.21; Description=Calponin homology (CH) domain
  Pfam annotation: Domain name=CH; Domain location=273-365; Score=27.4; E_value=4.9e-05; Accession=PF00307.21; Description=Calponin homology (CH) domain
  Pfam module annotation: Pfam domain module=CH::CH; Domain location =156-272::273-365
MGFDGLVVVSDPYLQRRFTQAELRALQAQYAALRDASPNGRLRMRDLPAAISGVRGAAKSRDAEKENSAPEPGPCHGLTDEEWASVLKAVARADEKPHQDASFELFLRVYAEMQLRLKAVSVCSGRAGGIVRSSSSSAVAFLTAATTTLLHTISESEKASYVGHINAYLADDPSLKSALPIDPATDHIFHITKDGVLLCKLINLAVPGTIDERAINTKRVLNLWEKNENHTLCLNSAKAIGCTVVNIGTQDLAEGRPHLVLGLISQIIKIQLLANVNLKSTPQLVELVEDSKDSEAYACLLNVLAPECSAKPSAMSVKDLLHRARLILEHADRMGCKRYLTPKDIVDGLPNLNLAFVAHIFQKRYKEIALCNVDLMQFMHRYVSNQKCYIISARR

SEQ ID NO: 73362 - protein, 166 aa, Zea mays
  Coding DNA Sequence Number=SeqID_31583
MELGGPVLLKELRRAIVGVVVPFYSPDDHPHIRDDQPNTPKPHTETNRRRRRDSSVGRAWPTSTERCAAWVLALGALTGNGFAGALRSRGERNSRAYRLDETEHARQPHRGLRGSVAMAKKQLTGGVTYQRQTSTSVCVRETGQWVLRVGEEPVASRAWGIDRFQN

SEQ ID NO: 73363 - protein, 85 aa, Zea mays
  Coding DNA Sequence Number=SeqID_31584
  Subcellular localization annotation: CTP_CleavageSite=29; ConfidenceScore=5.16e-01
MGCANAAVFCSGTAPAFIRVRKMGLYRRSANARSGLDPHRTGSRVDPSPWIEISRVRIDCNTLNSEPSDLYRTTLGAYRFDRDVI

SEQ ID NO: 73364 - protein, 123 aa, Zea mays
  Coding DNA Sequence Number=SeqID_31585
MAHTEASTVRCPQPWRRRIGRIRAEQLREIDNQRGRRFDEAAARNALCSPPCQWRTTLEIRSPPCSALPSSSGGFAMEEPPPLCPSGGWMALLTGAVYVGVVGYRGRLTAFVSPLVSGVRPGG

SEQ ID NO: 73365 - protein, 222 aa, Zea mays
  Coding DNA Sequence Number=SeqID_31586
  Gene Ontology: Mol. function=molecular_function; Cellular component =cellular_component; Biological process=biological_process
  Homolog annotation: Hit_ID=Q5JKQ4; Match level="QueryCoverage=99%, HitCoverage=100%, E-value=1e-110, Identity=88%"; Hit description =Thioredoxin family Trp26-like protein
  Pfam annotation: Domain name=DUF1000; Domain location=53-168; Score =192.0; E_value=1.4e-54; Accession=PF06201.4; Description=Domain of Unknown Function (DUF1000)
MACLHDHSCEDHNCAADWSLYNHIDVPKVVALNESVPGSVKSVFKPWEQRLDTSGGFLESNEGDPELLIFIPFTSDVKIKSISVVGGADGTSPSRMRAFINREGIDFSDAQNMQPVQEWELAENLQGALEYQTRYSRFQGVANLTLHFSDNFGGDTTKIYYIGLRGEATQKKQWNAILILIASCCLSQNKRDVVATIVYEVMPNPSDHKTKSETGGGFSHVE

SEQ ID NO: 73366 - protein, 177 aa, Zea mays
  Coding DNA Sequence Number=SeqID_31587
MDTALPFQSLFSNDSRWDMHASRHNLTLGRELRLARRQLQPWEKTPPRPSLASVYCHGNNSQRIPQEATPVTVLTTPYTTAYPAVGLTMASGITSASPKHGLGLDNIDERTPEATNSSAETGDNGMATETTRLVTNLLYTILITIPTTTTRTIHPQYRLGYAPEPPILASALYSVKM

SEQ ID NO: 73367 - protein, 512 aa, Zea mays
  Coding DNA Sequence Number=SeqID_31588
  Gene Ontology: Mol. function=metalloendopeptidase activity; Biological process=proteolysis
  Homolog annotation: Hit_ID=Q5JKR1; Match level="QueryCoverage=88%, HitCoverage=45%, E-value=0.0, Identity=81%"; Hit description =Chloroplast processing enzyme-like protein
  Pfam annotation: Domain name=Peptidase_M16_C; Domain location=179 -362; Score=28.7; E_value=2e-05; Accession=PF05193.11; Description =Peptidase M16 inactive domain
MRTIIAKVEHPGIGATEMILSNGMRICYKYTDFLDDQVVFTGFAYGGLSELSEAEYTSCSMGSTIAGEIGTFGYRPSVLMDMLAGKRAEVGTKVGAYMRTFSGDCSPSDLETALQLVYQLFTTNVEPREEEVKIVMQMAEEAIYAQERDPYTAFANRVREINYGNSYFFKPIRISDLKKVDPIRACEYFNNCFKDPSAFTVVIVGKIDPAISLPLVLQYLGGIPRVQDATQPLSRDDLRGLPFKFPATIIREVVRSPMVEAQCFVQLAFPVVLKNTMMTEDIHYVGFLSKLLETKIMQVLRFKYGQIYSVNVAVFLGGNKPSRTGDVRGDISVNFSCDPDISSKLENYFWLDRILRSYQSRLFSGDIGSTFAFQEEGRIKVRDALTPQSMQSALQRVIPFPCRKQYTVVILMPKSSCWASVKSMLSWSSNGVSRDAKHAELENCLQILAGMAGALVLANEEKSIMSRKCDIPLCCSVGFHILARTASKGSVGNRDVQERIVLKLVTFKEVFV

SEQ ID NO: 73368 - protein, 70 aa, Zea mays
  Coding DNA Sequence Number=SeqID_31589
  Subcellular localization annotation: CTP_CleavageSite=34; ConfidenceScore=5.47e-01
MELSPLPMLAASRFLSLSPLLAPTCPQRTAPSVRVATQTLEAPEAPNPRGRPPGAAPSRPRALDPIAALN

SEQ ID NO: 73369 - protein, 146 aa, Zea mays
  Coding DNA Sequence Number=SeqID_31590
  Gene Ontology: Mol. function=transferase activity; Cellular component= membrane
  Homolog annotation: Hit_ID=Q5VNX0; Match level="QueryCoverage=54%, HitCoverage=18%, E-value=7e-11, Identity=42%"; Hit description =Pectin-glucuronyltransferase-like
MNSRSQPTEEAHQYSSNRAGLGRIVGLRLVKDYLLRRPAYKKKRMTSPPGMMNENNKVPTPTFFFYLCHPLCIFPSSYLLFVVVLPFSEVLDWSTFSVVLAERRAYRRTSRTSCGTPHATPIKYDFFHMILHSIWLSRANQVELDG

SEQ ID NO: 73370 - protein, 235 aa, Zea mays
  Coding DNA Sequence Number=SeqID_31591
  Homolog annotation: Hit_ID=Q8LQ55; Match level="QueryCoverage=86%, HitCoverage=51%, E-value=3e-40, Identity=43%"; Hit description =Integral membrane protein-like
  Pfam annotation: Domain name=DUF588; Domain location=104-219; Score =28.8; E_value=1.9e-05; Accession=PF04535.3; Description=Domain of unknown function (DUF588)
  Subcellular localization annotation: CTP_CleavageSite=28; ConfidenceScore=5.55e-01
MATGPRPGPLSSQTSPATTNSPTPSGVSDAVESGQSTPKRAETKLPLSSPAVAVHFDPVEEAVTSPLRLGKARLDQQQQQQHAAGAAESGASVVPGVAAAVAAVAERRELLLALRLATAVLSLAAFSVIASARTSGWAGDYYARHLQYRYAVAVNVIVFAYSVAQSLGKIRHLVLAYLLMSASSAAASRNDLWVSRFGTDAFVRKITGALWLSFVAFLVLALNAVISTANLFSMV

SEQ ID NO: 73371 - protein, 480 aa, Zea mays
  Coding DNA Sequence Number=SeqID_31592
  Gene Ontology: Mol. function=nucleoside-triphosphatase activity; Cellular component=membrane; Biological process=cell division
  Homolog annotation: Hit_ID=Q6L567; Match level="QueryCoverage=70%, HitCoverage=77%, E-value=2e-76, Identity=42%"; Hit description =Putative AAA-type ATPase
  Pfam annotation: Domain name=AAA; Domain location=204-390; Score =72.8; E_value=1.1e-18; Accession=PF00004.19; Description=ATPase family associated with various cellular activities (AAA)
MLLRRLVAGVLPAGTPPLVGALLLLPPPSARRHAVVIEEFDGAFYNRVFLAVRAYVSTLLAAAPTGAPPVVKASLPRGAGAGAEQIRLAMGPGTAVVDVFRGAELTWRLRSHGSASTGSTGTWRSAPYLPFVMARFEAMARDRRQAKLYSNEWGKWRSVRLRNASTFATLAMDAALRQDVLDDLGRFLGQKEYYERTGWAWKRGYLIHGPPGTGKSSLVAAMSNHLHFDVYDLDLGAVRSNTELRKLLIRMKSRSILLIEDVDCASVTAQSREADASNPAPKHQKVTLSGLLSMVDGLWSSSGHERILVFTTNHMDRLDPALIRPGRMDKRIHMGYCGFGAFKELAAIYHGVDAHRLFPEIEALLREVDVAPAELAEKLLATDDADAALETAAKLLRDREAGIEEDGGGYVKQKLHVGPTRARPRPRPVPAPARGVSAARQVVFGEEIVLGISRRQGHGSGRRGAGQGGSGMRGLGRGRR

SEQ ID NO: 73372 - protein, 123 aa, Zea mays
  Coding DNA Sequence Number=SeqID_31593
MATKKSIVVMEFVGGGSLNAYLVHHDGHGIGEASVRRASSSSSCMHSTTSTRILKPDKILVDATSNIKVTNFGLSTLTRTAQQAAHVYIVYRMSMFRCSYGVLFPLVTIKENLWFKKGFKEIQ

SEQ ID NO: 73373 - protein, 170 aa, Zea mays
  Coding DNA Sequence Number=SeqID_31594
MASLKAAKPSGVAAQGKEPAPKLSETATKPSAAKSGGVKKAEQKPRETKRKYVLPMMKPGEEQQTGGGGQKVTYNQTQMTPRSRSLRTSLGGGELSAADYPRLSHGPPGSGPSNHKVGPSDRARCQIWCSTDDPCLLVELGEPKAPDTTILFQKTIDYTTCLVPKTRNLG

SEQ ID NO: 73374 - protein, 308 aa, Zea mays
  Coding DNA Sequence Number=SeqID_31595
  Gene Ontology: Mol. function=protein serine/threonine kinase activity; Cellular component=membrane; Biological process=protein amino acid phosphorylation
  Homolog annotation: Hit_ID=Q8LQ53; Match level="QueryCoverage=86%, HitCoverage=69%, E-value=1e-143, Identity=90%"; Hit description =Protein kinase 6-like
  Pfam annotation: Domain name=Pkinase; Domain location=12-278; Score =143.5; E_value=5.5e-40; Accession=PF00069.15; Description=Protein kinase domain
  Pfam annotation: Domain name=Pkinase_Tyr; Domain location=33-278; Score=180.4; E_value=4.3e-51; Accession=PF07714.7; Description =Protein tyrosine kinase
  Pfam module annotation: Pfam domain module=Pkinase::Pkinase_Tyr; Domain location=12-278::33-278
MCSAYDEALEVRRLQDKAADFSGGSVALFMGPGKLESICTRSEQEIAALRAAFAQEVVVWHKLEHPNVTKFIGAIMGARDLNIQTEHGHLGMPSNICCVVVEYLPGGALKSFLIKNRRRKLAFKVVVQIALDIARGLCYLHSEKIVHRDVKTENMLLDKTRTVKIADFGVARVEASNPSDMTGETGTLGYMAPEVLNGHAYNRKCDVYSFGICLWEVYCCDMPYPDLSFSEVTSAVVRQNLRPEIPRCCPSSLANVMKRCWDANPDKRPEMAEVVSMLEVIDTSKGGGMIPKDQTQGWLSCFRRYRGP

SEQ ID NO: 73375 - protein, 429 aa, Zea mays
  Coding DNA Sequence Number=SeqID_31596
  Gene Ontology: Mol. function=iron-sulfur cluster binding; Cellular component=nucleus; Biological process=translation
  Homolog annotation: Hit_ID=Q00XT4; Match level="QueryCoverage=85%, HitCoverage=58%, E-value=8e-84, Identity=48%"; Hit description =Homology to unknown gene
  Pfam annotation: Domain name=Radical_SAM; Domain location=151-346; Score=36.3; E_value=1.1e-07; Accession=PF04055.11; Description =Radical SAM superfamily
  Subcellular localization annotation: CTP_CleavageSite=43; ConfidenceScore=5.61e-01
MAAPAQAQAQVLPLLRWSRSASFLCASSRRLFSALQRPSAAARCEAGSKAMLKGMDYSELEAQGFRPGQAMMLWKCLYGNNVWAHCYDELAGLNKDFRKMITEHADLKALTMKDIHIASDGTRKILFSLEDGSVIETVIIPCARGRTTICVSSQVGCAMNCQFCFTGRMGLRKHLSTAEIVEQAVFARRLFSDELGSINNVVFMLAFNNISSCSLQDLKSYAVFVELMGMGEPFHNIDNVIKASAIMVDEQGLHFSPRKVTVSTSGLVPQLKRFLQESNCSLAVSLNATTDEVRNWIMPINRKYNLNLLLGTLREELNLRQKQIVLFEYVMLSGVNDSMDDAKRLIELVQGIPCKINLISFNPHGGSQFKPTPDDKIIEFRNVLIQGGLTVFVRLSRGDDQMAACGQLGEPGGYQLPLLRVPEKFQVAL

SEQ ID NO: 73376 - protein, 322 aa, Zea mays
  Coding DNA Sequence Number=SeqID_31597
  Homolog annotation: Hit_ID=Q6QP51; Match level="QueryCoverage=30%, HitCoverage=55%, E-value=6e-17, Identity=58%"; Hit description =Putative growth-regulating factor 1
MSAKQIPEAGEFLRPLFLGAPDTVRCTPDSPVNYSGVPLEFPEGDKFSVKSPGAPDSTHFTLVLTLTFYLCSKRNTALRKTESIIFTSSVHVWDFSGQTNLILMNEWNGLYDCFHADQAVASAAISDPSICHLRSFKAPCLHVIQNLLLAIVPEQPLILFLECTPDSSNGIMDHRLCTVLVKSYNDPKASVLSGEAEAPPRSRLSPSPGSGEAESVFRGRVRALGRARRRPSSEAEAVSETWGRARRSPSSSVEVEPEPWGQARWSFLWRPRLDLAAVSLTLSSGTAVGATQAALFSCQVGQWSGEVTAVTSALSTEERALG

SEQ ID NO: 73377 - protein, 119 aa, Zea mays
  Coding DNA Sequence Number=SeqID_31598
  Subcellular localization annotation: CTP_CleavageSite=72; ConfidenceScore=5.71e-01
MASAREHYAMVVASSTFAMSTSAAVCSSRAILLEPKSLSRGSSSATVCSSTRLWLPLLRPGPPPRHGSSASTAMARWSSGPPSPCDGPPPVSTTRGHRHGAAASSIVRTLLGDEDTHAR

SEQ ID NO: 73378 - protein, 226 aa, Zea mays
  Coding DNA Sequence Number=SeqID_31599
  Gene Ontology: Mol. function=carbonate dehydratase activity; Cellular component=chloroplast; Biological process=carbon utilization
  Homolog annotation: Hit_ID=Q41728; Match level="QueryCoverage=100%, HitCoverage=73%, E-value=1e-81, Identity=69%"; Hit description =Carbonic anhydrase
  Pfam annotation: Domain name=Pro_CA; Domain location=47-226; Score =215.8; E_value=1e-61; Accession=PF00484.9; Description=Carbonic anhydrase
MGDAVEHLKSGFQKFKTEVYDKKPELFEPLKAGQAPKGPLPRCLLALREQTRGCICRADMDTHVPVHGVRLLRLPRVPVVTLGLQPGEAFTVRNIAAMVPAYDKTKYTGIGSAIEYAVCALKVEVLVVIGHSCCGGIRALLSLQDGAPDNFHFVENWVKIGFPAKVKVKKEHASVPFDDQCSILEKEAVNVSLENLKTYPFVQEGLAKGTLKLVGAHYDFVSGNFL

SEQ ID NO: 73379 - protein, 66 aa, Zea mays
  Coding DNA Sequence Number=SeqID_31600
MDLAIKLYSLLHDVLPQKLKFCCIFSCEKLYTVYYLSVNLINPFPTLSLKKALGESVLPGAVYNRT

SEQ ID NO: 73380 - protein, 788 aa, Zea mays
  Coding DNA Sequence Number=SeqID_31601
  Gene Ontology: Mol. function=nucleotide binding; Cellular component =membrane; Biological process=defense response
  Homolog annotation: Hit_ID=Q7XA40; Match level="QueryCoverage=84%, HitCoverage=75%, E-value=7e-76, Identity=29%"; Hit description =Putative disease resistance protein RGA3
  Pfam annotation: Domain name=LRR_1; Domain location=357-379; Score =13.6; E_value=0.7; Accession=PF00560.23; Description=Leucine Rich Repeat
  Pfam annotation: Domain name=LRR_1; Domain location=381-405; Score =3.5; E_value=65; Accession=PF00560.23; Description=Leucine Rich Repeat
  Pfam annotation: Domain name=LRR_1; Domain location=542-563; Score =3.8; E_value=54; Accession=PF00560.23; Description=Leucine Rich Repeat
  Pfam annotation: Domain name=LRR_1; Domain location=593-627; Score =0.3; E_value=2.5e+02; Accession=PF00560.23; Description=Leucine Rich Repeat
  Pfam annotation: Domain name=NACHT; Domain location=69-223; Score= -35.0; E_value=0.031; Accession=PF05729.3; Description=NACHT domain
  Pfam annotation: Domain name=NB-ARC; Domain location=31-329; Score =230.4; E_value=4e-66; Accession=PF00931.13; Description=NB-ARC domain
  Pfam module annotation: Pfam domain module=LRR_1::LRR_1::LRR_1::LRR _1::NACHT::NB-ARC; Domain location=357-379::381-405::542-563::593 -627::69-223::31-329
MKKMRQRLEKIKEEAKLDIFNFKADCCSLDENVNSRATFSCISEDIVGRSTEKETIVAMLTTYSEEEILTICIYGFGGLGKTTLARLAFNDENVGGVFDYRVWVYVSMKFDLKKIGESILSEIDEGNCGHHGNLQEVTRHLQRVLDGKKFLVVLDDLWEDNWIQLQNLKAMLSCGAKGSKIVVTTRTGKIASLMDHCMPYKMDVLSDDDCWILFKRRAFVPGRDDPRIEVIGRDIVKKCNGVPLSAQALGFMMRFKEGVAAWEAVRDSEIWEIEDQNIMPSLKLSYCLMPCHLKLCFAYCVVFSKGAAIDKDMLIQQWIALGFIQPTSGSLTHVKRGEEYIRELLFALPESVTKLTNLEHLNLSCCISLEKMPGDYGSLKKLKLLNISYCFKVRIPNGIANMSNLKCLMAVGLDGYSCGNKDDFNIVSSLLCMPRIDLSKKDSPIGDFHGILKHKRLHLFGLGNVQSIDEFENLGLCRHQQLNSLRLSSSYMNGNEVAKFIPDDIVLEKIIPPRTLEHFELLGYHGSEFPEWMLNLTTILPNLVHLKLSGLATCDHLPPLGQLPNLQSLVIECIPNVKAVGEVFAGGSRAFLKLRDLTISGMPNLERWLTTLSTTNEEAHVYVFPNLHHLKLPFLRQLQIVCCNAKLELPGEITRAILARIPNISIHNVGCVRHIEQENGICQNVSVDKNPAVVARRMVLKSPRLRIKRPVVVAQLMKGSHRKRPAARKTRTGDKASSSTRQGTPNDSNITGEVDIGDLIDFLREEVIEKNANVKAAQDGFAKMPTEP

SEQ ID NO: 73381 - protein, 63 aa, Zea mays
  Coding DNA Sequence Number=SeqID_31602
MGLPSRGEASLAPRRPAFVDEWIRWLGIADIHAKSLFKRFSFTVRQAQCCRLPYEWGSNRAKT

SEQ ID NO: 73382 - protein, 507 aa, Zea mays
  Coding DNA Sequence Number=SeqID_31603
  Gene Ontology: Mol. function=methyltransferase activity; Cellular component=anaphase-promoting complex; Biological process=cell cycle
  Homolog annotation: Hit_ID=Q6F2D1; Match level="QueryCoverage=80%, HitCoverage=46%, E-value=1e-165, Identity=73%"; Hit description =Putative anaphase promoting complex protein, identical
  Pfam annotation: Domain name=Cullin; Domain location=223-490; Score =17.8; E_value=3.7e-11; Accession=PF00888.12; Description=Cullin family
MAGSYESDQLVDHEPFQRSNTSDWHSGMDIDGSEVSENSSLVKNIGKVVRDLRCIGFTSMTEDAYSSAIIWLLKSKVYELAGDDYRVSVLWCVKKWIQFLHALLTYLGDSVDHGSGSSGLKSPLASRPSSFPGIGVPSEALVRWHMRLEYFAYETLQDLRIGKLFEIIVDYPESSPAIEDLKLCLEYTGQHSKLVDSFISSLRYRLLTAGASTNDILHQYVSTIKALRTIDPTGVFLEAVGEPIRDYLRGRKDTIKCIVTMLTDGSGGSGSGTGNAGDNLLEELNRDAENQENADYDDHANIDEKQAWLNSESWEPDPVEADPLKGNRNRRKVDILGLMVSIIGSKDQLVNEYRVMLAEKLLNKSDFEIDSDIRTLELLKIHFGESSMQKCEIMLNDLIDSKRTNSNIKTSLLKSSQTVPGQEEAEVSHDVLDATIISSNFWPPIQRRYPVDNLPFGTGSVASLVCLGRGGWWWRLRGPRDVASVVGGYRIGEQRAGGAGAAATGVG

SEQ ID NO: 73383 - protein, 259 aa, Zea mays
  Coding DNA Sequence Number=SeqID_31604
  Gene Ontology: Mol. function=signal transducer activity; Biological process=G-protein coupled receptor protein signaling pathway
  Homolog annotation: Hit_ID=Q533M2; Match level="QueryCoverage=75%, HitCoverage=31%, E-value=6e-09, Identity=33%"; Hit description=XL
  Pfam annotation: Domain name=AT_hook; Domain location=105-117; Score =8.2; E_value=0.88; Accession=PF02178.9; Description=AT hook motif
  Pfam annotation: Domain name=AT_hook; Domain location=124-136; Score =8.2; E_value=0.88; Accession=PF02178.9; Description=AT hook motif
  Pfam annotation: Domain name=AT_hook; Domain location=181-193; Score =8.2; E_value=0.88; Accession=PF02178.9; Description=AT hook motif
  Pfam annotation: Domain name=AT_hook; Domain location=216-228; Score =0.5; E_value=19; Accession=PF02178.9; Description=AT hook motif
  Pfam annotation: Domain name=AT_hook; Domain location=48-60; Score =0.9; E_value=16; Accession=PF02178.9; Description=AT hook motif
  Pfam annotation: Domain name=AT_hook; Domain location=67-79; Score =8.2; E_value=0.88; Accession=PF02178.9; Description=AT hook motif
  Pfam annotation: Domain name=AT_hook; Domain location=86-98; Score =8.2; E_value=0.88; Accession=PF02178.9; Description=AT hook motif
  Pfam module annotation: Pfam domain module=AT_hook::AT_hook::AT _hook::AT_hook::AT_hook::AT_hook::AT_hook; Domain location=105 -117::124-136::181-193::216-228::48-60::67-79::86-98
  Subcellular localization annotation: CTP_CleavageSite=27; ConfidenceScore=5.39e-01
MPRVPSVLLLAGTSTPTGTKRNRERVRLTGAKSGLGAIGSSASPDPRARTQARPRKTTNSASPDPRARTRARPRKTTNSASPDPRARTRARPRKTTNSTSPDPRARTRARPRKTTNSASPDPRARTRARPRKTTNSASPDPRARTRAPSRKTTNSASPNPRARTRAQPRKTTNSASPDPRARTRARPRKTTNSASPDPRARTQPWPQPMISASPDPRARTRPRPQKTDSTPTSEEPPPRPTQGSDRPRHRRGHHYPTPS

SEQ ID NO: 73384 - protein, 289 aa, Zea mays
  Coding DNA Sequence Number=SeqID_31605
  Gene Ontology: Mol. function=zinc ion binding; Cellular component =integral to membrane
  Homolog annotation: Hit_ID=Q28H82; Match level="QueryCoverage=49%, HitCoverage=47%, E-value=5e-27, Identity=46%"; Hit description=Novel protein containing rhomboid domain
  Pfam annotation: Domain name=Rhomboid; Domain location=22-176; Score =66.8; E_value=6.8e-17; Accession=PF01694.12; Description=Rhomboid family
  Pfam annotation: Domain name=zf-RanBP; Domain location=227-256; Score= 28.8; E_value=2e-05; Accession=PF00641.9; Description=Zn-finger in Ran binding protein and others
  Pfam module annotation: Pfam domain module=Rhomboid::zf-RanBP; Domain location=22-176::227-256
MSSARRRRFGLEASRGMLPLLALQYGDLTRFFLSPFYHLSESHLFYNMTSLLWKGIHLETSMGSAEFASMVAVLLGLSQGITLLLSRGLLLLGDDTMYYDQHAVGFSGVLFAMKVVLNAWSDDFVYLHGMVIPAKYAAWAELILIQVFIPGTSFLGHLGGILAGLVYLWLKRASNGPDPITLLISSVANVVTWPVRFAQNLLRSARSQGRVTGRGRVGRRISARDSPRGFWRCPTCTYDNSVSTDICEMCSTARDNHAFLRRQHHQAVGNTVELPVDEMRRRRLQRFDR

SEQ ID NO: 73385 - protein, 148 aa, Zea mays
  Coding DNA Sequence Number=SeqID_31606
MDKSKKGSGSSHRSSDKRKREPTRPSEDFGDSEYSEEEFSSESEGSPAPASPPASSDDSNDSQGIAAEVWTYIRAVERSGLEGSDESEYSSDEEDSSDSSEEGSGGDGGDDDDDGGDGDGGDDNGRGGDGGDEGGSGGGSKGSNKASG

SEQ ID NO: 73386 - protein, 298 aa, Zea mays
  Coding DNA Sequence Number=SeqID_31607
  Homolog annotation: Hit_ID=Q09J79; Match level="QueryCoverage=20%, HitCoverage=13%, E-value=3e-14, Identity=77%"; Hit description=(+) -abscisic acid 8'-hydroxylase
MGRGPWLLPAEKEGASAQTDELHMEAYAGPTGHLLPAGRLPRPPPPPRLPGFLPQAIRASVPTVGAVALRSLRSWDGLLVNTFQEMKLDGSCCCCSCSSSSYITCSVPLRASVRCCILSVCFPSLRVAQRYPPLAHSRVARPPAPRTLRALRGDARPPARARCALCAGTLARACMHSPGAAKPCFFFSDRPALMSLALAFPLPRMTVHFSLTHPAQRAGPPPSRRMEELPSQPSATIGVTHLCSPGAASAACAFRIDPCATPVQQSRRRRASSRAHLAVRCCREVSFVYPGLHIISML

SEQ ID NO: 73387 - protein, 36 aa, Zea mays
  Coding DNA Sequence Number=SeqID_31608
MWRRSGVRGQFIAYRPESDENRGHLIAQVYKFDVVT

SEQ ID NO: 73388 - protein, 70 aa, Zea mays
  Coding DNA Sequence Number=SeqID_31609
MERGKEKGEKKRASSPRRDTGDLHGDGGAPGGARLLRWFMARSWRESWGDERNKLRNWRRKLRVGRFLGR

SEQ ID NO: 73389 - protein, 258 aa, Zea mays
  Coding DNA Sequence Number=SeqID_31610
MGSRHSACSAEAECRGSFVLLLLVTLLRGEDPWNGFYTLVESGGKVTSLANAEGVAARAVKAFTWATEAMKPAVEKFCYLEAAKVELEAKIDRLLVESTDRMQAKSAMESKSWRLLEMGQATHERVAALESELSTVKAGRERVEIVMSVGMGRAHALFCEAYHDFGAETTPFDRAGKGLVTRFLGWLQEELASLPLIVTRIMAYASLVTCEGVVNALCREGCKHFKTFEQSNLDLDREVFHVKDLSFKRPTGALFERM

SEQ ID NO: 73390 - protein, 301 aa, Zea mays
  Coding DNA Sequence Number=SeqID_31611
MTAARALRGAVHARFDVRDTAEGGDSPAAEWARRTGDQRDGDELGMRQAQRLGCDAQGRGTLRSWPGLGPPGRKAGQRQSGVSPVKRDTAATALDVNAAGRAERPEEEETRGRPGRLSRAPVAASERRGGEQWREERTRERRRGRAHLADTQATCTATVALRAGRGCYGGSWRDRGEKAGRRAEQTTQLAKKTARRAVSGEINSSAGFLTRGSHWVATAAGAPRTGRSCVRATRAWPILRARGGAGPRRCAGPPGARSRAGLAGEARWGSWVGGWRARAGKLGALAWAEATRGPTREEAGA

SEQ ID NO: 73391 - protein, 428 aa, Zea mays
  Coding DNA Sequence Number=SeqID_31612
  Gene Ontology: Mol. function=transferase activity
  Homolog annotation: Hit_ID=Q6K6U4; Match level="QueryCoverage=51%, HitCoverage=50%, E-value=2e-54, Identity=53%"; Hit description =Putative quercetin 3-O-glucoside-6''-O-malonyltransferase
  Pfam annotation: Domain name=Transferase; Domain location=23-420; Score=2.3; E_value=4.6e-11; Accession=PF02458.6; Description =Transferase family
  Subcellular localization annotation: CTP_CleavageSite=28; ConfidenceScore=5.37e-01
MAVSPDQQQPPAGVGSPLPSPRLRVRVRDTTLVPPSPSPPETSLPLTFLDIFWLHSPPVERLFIYRLAPDADVDAIISRLRDSLHQAVRAFYPLAGRLRLTPGTSDRYELHYRPGDAVTFTVAECDDDDADAHFDALATDEPREVAKIATLVPPLPERGGLFAVQATLLPARRGLSIGVTVHHAACDGSGSTHFLHTWAVACRAGAEAPPPPPPVIDRSLIADPRRMYDVFIQGAPSTEEYEFVKMSADQLFATFALSKDELKRIKDAVAEEAARRGVAPPRLPCRDKYLGNCVGPAFALAPTGELAQAGAGGFFSACAAVASSIDEAVRDIETSNVEVWFDRIRDLIPMGFLTVAGSPRFRVYDMDFGFGRPAKVDVVSVARTGAVAVAESWDGNGGIEVGVSLQPAAMKRYRKCFADAIAWLHQRT

SEQ ID NO: 73392 - protein, 233 aa, Zea mays
  Coding DNA Sequence Number=SeqID_31613
  Subcellular localization annotation: CTP_CleavageSite=46; ConfidenceScore=5.06e-01
MEVFAKNYCLHRQKKDAGDKIVQFGTFIFSSRMGRTSTEVMKLVSCVKNKWGTGGTTSYLFRWKTTKGCEGRTLAFVREVEAKAVKFIRKYSTKTGLPRSWAIRGSNGPYPEEATDDADDVVVGKKNRLGKHVVRDEGSSKGKDVVSPLRKRKKSKLGSTGGDVGGRGLVQGVKASFTEDLAGTCAKPWEVMPSATLREATKLMLKMIGVEWHNDVPVPRASSKDYIMSWLAW

SEQ ID NO: 73393 - protein, 104 aa, Zea mays
  Coding DNA Sequence Number=SeqID_31614
MLWGVRAGFAAGAGTCGRFGCGWLRAGFAAGAAAELVCHHVRKGLGLDFKNASKICVSVEQDRLSGYFKDVFGCLAQPEPGSKQNCMNYNQQTELYAETELYEL

SEQ ID NO: 73394 - protein, 539 aa, Zea mays
  Coding DNA Sequence Number=SeqID_31615
MDPAGPRVATDPAGSGAAPPREELDRRGGACSGAAAAEGSASRLAGAGLGDPRAGILESSGQAEAYLHTCTMDVSQLTAEGVTQCGARVSLLPQIGALQSETPCLTLGRDSSAESMEKLHGSESLPCCKENIGTVRQPKPDPEHVDNRMSVARLGLDLNTVDSSDAAELNPFFPYKKLGQSKVSDPSECGSTTAATAESESHRKWREMKRNGFLSSSHGNAVVPRPRGRPPKRKKDDEFKRSTSTQHGQANKSVKVAAPSGLLSGLNPGIINHVRNSKQVYSIIKAMVHSERLENEKQPAFTSQTGGRGREASEGIQDEKYGAGFKKCHMLMKDNNAVFHQALPTTSQFLAQDGDRLKLQLSSAVTMSSDRACSTSADDPATNHDYMTVLSVKALKRSRKRVRNALHTELPYLISTEFSSNQENESSIANTCDAGCTEKAVSEAHVARWRSLFVQMDRALQEEGKQLENRLKQVQEMQSNCDKGLKHMSCEAPLLGPIPELWKLKNPDISESEWAVQAAAASIYSTCNMAMRTENVPCF

SEQ ID NO: 73395 - protein, 51 aa, Zea mays
  Coding DNA Sequence Number=SeqID_31616
  Homolog annotation: Hit_ID=Q8W0W3; Match level="QueryCoverage=63%, HitCoverage=10%, E-value=9e-07, Identity=81%"; Hit description =Transcription initiation factor IIB
MESWELAALTDFQRRFSSTLGMTNQAVNAAKEAVQRSEDLDIRFGISDSTC

SEQ ID NO: 73396 - protein, 615 aa, Zea mays
  Coding DNA Sequence Number=SeqID_31617
  Homolog annotation: Hit_ID=Q9LW36; Match level="QueryCoverage=86%, HitCoverage=81%, E-value=2e-53, Identity=31%"; Hit description =Arabidopsis thaliana genomic DNA, chromosome 3, P1 clone: MDJ14
MAGAVSVSAHRRQWRYTWEALNHLPLLRLYLLPRAALPFRIPSDLRADLRLQGSLLHLSFSLPGDGAAVALRVPVPRVLVDPSAPVECRAAAAGDHLELRLALVLPVDHPVVAAAFPPPPGAEPPASLALRDDLKSLSTGDVHLYCKNCSSRLTKQPLRLESDCLYLPPKMDVDNPRNLIANSNARKIMEMPSVDWVDVADNWVGGCCTSFGGAGEKLVSQFIRAYGRLEGTSLLDATSITVETDNLETDLVSQVACSALSRHFVAIKEDIFNVSVEKDHTTGKIKLKNSEEQANITATHAQPPIILEEGPSVSCSETNGVTQTNQPGISQTEADTDAYFEKSENDCCVEKVGKSKKEVDLLLVDPCRCCCVNGYSEKAEDNPSQLSLVNEKKQNMLEIKRDYKLTKTISLGSSFIVKASNLLNDFEWVELLCGQCSSPLGSYPSQCSLGPADGRLRLFKCYTSTEIPVTGPHDVFRGHTLERVFVNLLLEVAEDEISFRTLVRDLKTKRPMLQLVLLSSKAWLSSGCCYENDIDGSHGTTDLQPSVKLLYSDYSNASEADLRIVEAWASKYRAEELYMMKRQIDELTECLSSGRNNFPVSCSSLEGMRLSSLRR

SEQ ID NO: 73397 - protein, 114 aa, Zea mays
  Coding DNA Sequence Number=SeqID_31618
VQGVPRLHWWDKARFLSVLRRCAASGNPEASYIFGLELFCNRPGREASGLRRATERGHAAAAYMVEMLTLHHAHSPPGGTERALQRLDYCSSAGAGHGAGPPPSAERPCRSCAG

SEQ ID NO: 73398 - protein, 235 aa, Zea mays
  Coding DNA Sequence Number=SeqID_31619
  Gene Ontology: Mol. function=carboxyl- and carbamoyltransferase activity; Cellular component=ornithine carbamoyltransferase complex; Biological process=amino acid metabolic process
  Homolog annotation: Hit_ID=Q8SA97; Match level="QueryCoverage=52%, HitCoverage=21%, E-value=2e-15, Identity=43%"; Hit description =Ornithine carbamoyltransferase
MAPPVDVVGPRPRLGDVEAPPRSRSSPSSVVEVESEPLGRARRRPLAKAREESEPWGRAERSSPSSEAEPKSEPWVGRSGPESEPWVGRSGVRRLLGLSPSPSPRSGGAEFVVFRDLARVRALGRAERSSPSSGAEPKSEPWVGRSGVRRLLGLSPSPSPGSGGAEFAVFRGLARVRALGRAERSFLWCLRPGLTACQPHSVEWHRSRSGAGGAVFLSERSVERQSDGGHFGSVG

SEQ ID NO: 73399 - protein, 234 aa, Zea mays
  Coding DNA Sequence Number=SeqID_31620
  Gene Ontology: Mol. function=transferase activity, transferring glycosyl groups; Cellular component=integral to membrane; Biological process=metabolic process
  Homolog annotation: Hit_ID=Q6H8F6; Match level="QueryCoverage=84%, HitCoverage=37%, E-value=4e-58, Identity=59%"; Hit description =Putative flavonoid glucosyl-transferase
MAPTDESAADTPAPPPPPPHFVIVPLVAQGHTIPMVDLALLLAERGARASLVTTPLNGARLRGVAEQAARAKLPLEIVELPFPTDVDGLPPGIENMDQVTDNGHFVPLFDALQKLAGPLEAYLRAQAPRPSCIVSDWCNPCAAGAARSLGIHRLFFHGPPCFYSLCDLNATDHGLRELAAAAAAADVDDGQERFVVPGMPGARRGDQGHGAGLLQLAGFVSCYEAALGKPVTNL

SEQ ID NO: 73400 - protein, 182 aa, Zea mays
  Coding DNA Sequence Number=SeqID_31621
  Homolog annotation: Hit_ID=Q6H3Y7; Match level="QueryCoverage=33%, HitCoverage=15%, E-value=3e-24, Identity=85%"; Hit description =Putative ADH glutamate dehydrogenase
  Pfam annotation: Domain name=ELFV_dehydrog; Domain location=4-137; Score=-97.3; E_value=0.00085; Accession=PF00208.11; Description =GlutamateLeucinePhenylalanineValine
MTASVGMQARVLLNGRRISCYDIDLNRPCSWLGGAEVCRDIGIILAKKGVVVLPDIYANSGGVVVSYFEWVQNIQGFMWAEEKVNDELEKYMSSAFQHMKAMCKSLVLPKVAVPSGERAAVAVSSGVRAAAIPGASGCGAPRRATDDDAPMADWQAPTALLSRTSGNSGGFLGRASSGNLGG

SEQ ID NO: 73401 - protein, 104 aa, Zea mays
  Coding DNA Sequence Number=SeqID_31622
MMDHGGEEAVAINVDLFVVVEAKDHGSRRPWRTSTRCPAPRSGGGGRGEGARRGSEWGAATDGMSSMTGVGDSRCVVCGGAGAAVADAEGIARAAKDKELCPRA

SEQ ID NO: 73402 - protein, 101 aa, Zea mays
  Coding DNA Sequence Number=SeqID_31623
MMDHGGEETVAINVDLSVVVEVEDHGSRRPWRTSTRCPAPRSGGGDRGEGARRGSEWGAAAGDMSSMTGVGDSRCVVCGGASAAVADAEGIARGAKDRRPS

SEQ ID NO: 73403 - protein, 77 aa, Zea mays
  Coding DNA Sequence Number=SeqID_31624
MTCIELSPYFGNKVTRDTPGDLLIQSTLRSLPQGAGSRSYEDKMTLRHCGPSGPERGRLDSPQERHRFYRQVTDRLA

SEQ ID NO: 73404 - protein, 114 aa, Zea mays
  Coding DNA Sequence Number=SeqID_31625
MALAHYSTIRNSLHNLQAIVNRSGEISPEVLLHRLSSTAPAVPLLLSYDFGCEREGGGKEHPPRSTREISRRGQGCRAAPYFKGQRTWGRRLGRVTGIRLGPPRCAAFAKFDTS

SEQ ID NO: 73405 - protein, 566 aa, Zea mays
  Coding DNA Sequence Number=SeqID_31626
  Gene Ontology: Mol. function=protein binding; Cellular component =integral to membrane
  Homolog annotation: Hit_ID=Q10LN6; Match level="QueryCoverage=95%, HitCoverage=34%, E-value=1e-153, Identity=55%"; Hit description =Expressed protein
MASASQPSSQQPPPPPLTAEIVLRLASRDPSTAVPLLPELPPDDLADIVASLTATSPAGHLSLLPAILALLPSPSSASSAFAALLSAPSWPSSTLLAVATLLRDLPPAYRTRIPAFLGKIISLLPSADAQDLPALSYQLLLLASKPLYPRVVLAGLLRFFGGRRGARVRAPPSIARQVESTALMNVSFAVKQDPALAREVLAAIKADAAGALSGFAVAVMLFVARVPRFNEGAVSVLRDAVVVSRRDYRMSRWRMSLRRCKWLPDCMEGEYARATQCVEKGILKSVDESIVGREHVVPSIVQVAFRLLEVSEGDQGEEAGLGEGVMSTEEIGINMLKSLFEVHEMARTEIIEQCKFRILSAKPQQSVPVLRLIGCLILSHPFPMLEFIAHLKELLDYFSFMNDKISTALISCILPLTKFSRDLKDYVILVVRKAMFKREDMVRIAATNAIIELIIAENKKNEANPFEDSTSQPSSSQQPETHLEFGFTGFIMMYYHTTASSLASVKEVLYEGLIRTAISDPAVSDNILDFLWPHFQNYYSELASWVFVSDFFRMQNVLLKLVHASK

SEQ ID NO: 73406 - protein, 94 aa, Zea mays
  Coding DNA Sequence Number=SeqID_31627
  Gene Ontology: Mol. function=nucleic acid binding; Cellular component= nucleus; Biological process=mRNA processing
  Homolog annotation: Hit_ID=Q10KN7; Match level="QueryCoverage=76%, HitCoverage=22%, E-value=1e-22, Identity=75%"; Hit description =Polypyrimidine tract-binding protein, putative, expressed
MDGTLISSHAASALRSSRDYNNPYPTINYSAMDGTLQPAVGADRRKGEAQGNVLVASIENMQYAVTVDVLQTVFSSFGSVQKIAIYRRMGGHKL

SEQ ID NO: 73407 - protein, 76 aa, Zea mays
  Coding DNA Sequence Number=SeqID_31628
MAEPGRGGVVVWRCRARHDSCLGREAVRAIEFARPRSRQIAKLPRRTLINRVMRKTSQVDPKRGLIRMVMLMDEPA

SEQ ID NO: 73408 - protein, 488 aa, Zea mays
  Coding DNA Sequence Number=SeqID_31629
  Homolog annotation: Hit_ID=Q1RV57; Match level="QueryCoverage=95%, HitCoverage=100%, E-value=1e-122, Identity=48%"; Hit description =ENSANGP00000004406, related
MDATVVAIADDHDDSDCRRPLLAQNEEIHLYTEPPNRQHPPLDAAATQLEEQRKPERVASLDVFRGFTVAAWTLVACVDDDTRGRRRRGVAGHQPRAVVRGYGGGLRHACLPLHHRRLRRTRIQGNVRLQKMANKTAATKKAAIRASKLFILGVILQGGYIHGRHKLTYGVDLDHIRWLGVLQRIAIGYFVAAMSEIWLVNNNLVDSPVPFVKKYFIEWIAIGYFVAAMSEIWLVNNNLVDSPVPFVKKYFIEWFMAIAITVLYVALVFGLYVANWEFEIQTSNSTLSIPSNSIETKMIQCGVRGSLGPPCNAVGLVDRVLLGENHLYKNPVYKRTKECSINSPDYGPLPPNAPDWCLAPFDPEGLLSKPLYTVNYMLLTGGVSGFLLLLLYYIVDVIHIKKPFVLFQWMGMNALIVYVLAACELFPTLIQGFYWRSPENNLVDVTESLLQAIFQSKRWGTLVFVLLEIVFWCLAAGFLHMKGVYLKL

SEQ ID NO: 73409 - protein, 78 aa, Zea mays
  Coding DNA Sequence Number=SeqID_31630
  Subcellular localization annotation: CTP_CleavageSite=26; ConfidenceScore=5.25e-01
MWLKLPPSSSSSPSPSGSPPATGMPCAGAEASLAEVMGKDASQTPPPAEAKGKSLIAPALSVDAPTSCAGGDAVSTGG

SEQ ID NO: 73410 - protein, 137 aa, Zea mays
  Coding DNA Sequence Number=SeqID_31631
MGTTPAQRLQRVRSAAEQPNGGANHSGERLRGQQGITQEIKGVGELLTSRGDSGALEQRWGHMEAFGRRQRSSGCTGRRPVSVDWAKQRGWGQTRGCLALLARRRSSPRQQTRQKLDDGEGTVVRPQRSSTGARPVP

SEQ ID NO: 73411 - protein, 178 aa, Zea mays
  Coding DNA Sequence Number=SeqID_31632
  Gene Ontology: Mol. function=nucleotide binding; Biological process =translation
  Homolog annotation: Hit_ID=Q67YQ9; Match level="QueryCoverage=81%, HitCoverage=51%, E-value=8e-50, Identity=55%"; Hit description=MRNA, complete cds, clone: RAFL24-13-K22
MGASGRVGGCRNLGGRRRAVGGMRGAGVAASNWNGKGSFLFTSSTAVYDCSDNGFCSEDSPCVPIGQSTRTDVLLKAENVVLEAGGCVLRLDAASLVISIMKKRLRSCIFVGCDNEPLSRLEIMDRVNRSRKFDTQFHGFTGTDGPLGKRMDNSKTRAKLGWQPKYPSFTEFLGLSNL

SEQ ID NO: 73412 - protein, 313 aa, Zea mays
  Coding DNA Sequence Number=SeqID_31633
  Subcellular localization annotation: CTP_CleavageSite=88; ConfidenceScore=5.83e-01
MPGTFKDALLRTTAVDAPRRVRCGSFRSRPGLRSRPPFPPGVASGRPRATSARVMMGGRSSSPFGPPRLPGHRVAICPVVPSPVDSPMQVALPGPLFREGPLFRIKPPLPSVEESDGGALTIRARKHTSLRQPALEVEVGADLQCDPHPVDSSTTVPAAPGRRCVMEFYPAIAREEIRLRAALFVTVVGTRPSVTPSEVILEVAQIYDLPESSFTIHKAWPEDFMLVFQDEDTAVRVFDNGRVLHCPDFELKFKKWSRFAHSTGVSLPVLVDVELCGIPAHAWKTFASSTLPLSHCCQKGRALMVLLIFAPLA

SEQ ID NO: 73413 - protein, 125 aa, Zea mays
  Coding DNA Sequence Number=SeqID_31634
MHNGQGMSSFSKLALELLEGHYSNAHITRLDLFSPVGHNPDFVYISLLILPLGHMYFRFGTIDYIGRLYPMEGKMKPQFFRWVNEENHLVAVNLPMFCFAVVKPESVHAGATLEVPSEEILSKLK

SEQ ID NO: 73414 - protein, 83 aa, Zea mays
  Coding DNA Sequence Number=SeqID_31635
MGERWQWRPCAPALGGGVASDRASLLTVATWPERMLAYSRRWCGPILRRGQTHARLLAPVARPTAEAVARQAYVFLDRGVGAR

SEQ ID NO: 73415 - protein, 277 aa, Zea mays
  Coding DNA Sequence Number=SeqID_31636
  Homolog annotation: Hit_ID=Q2QRD1; Match level="QueryCoverage=30%, HitCoverage=8%, E-value=1e-23, Identity=63%"; Hit description=HAT family dimerisation domain containing protein
  Pfam annotation: Domain name=hATC; Domain location=211-277; Score =42.2; E_value=1.8e-09; Accession=PF05699.5; Description=hAT family dimerisation domain
MELVLWPSAKIVAMRDQVPAIERRYDPTSINHELVLMGQILDDVDDVHDGLEDLFGSTTPTPTINLGDDNVVVEGEALLDGSGVATATASTTTSTGRKRKCTSNVWEDMDKIFATENGVQTHYHPREEGATLLTEAHWYVAEKILEFLERFYDSTVVMSDDIGSSSSMALVAGLDAFGASASSSMAHKLSSRTSASALFHATITPGISGSELAAYLDIDTFQKFDDDFNLLDWWHDHKLTYPMLSILAKDIISVLVSTMSSESTFSLAGRAIEERRR

SEQ ID NO: 73416 - protein, 103 aa, Zea mays
  Coding DNA Sequence Number=SeqID_31637
  Pfam annotation: Domain name=Complex1_LYR; Domain location=2-69; Score=18.1; E_value=0.011; Accession=PF05347.5; Description=Complex 1 protein (LYR family)
MAAAAEGLAAYRAVLRAARRTFAGDQLMLKESAVEIRRRFEDHRGLTPGSDDAARALADAREAAHFITHMIVQATRAPSGSFGGRDDLERGSRRRWWTVETGG

SEQ ID NO: 73417 - protein, 204 aa, Zea mays
  Coding DNA Sequence Number=SeqID_31638
  Subcellular localization annotation: CTP_CleavageSite=26; ConfidenceScore=5.26e-01
TASAPYLPPRNGRTPHRPPRTHATPDAAAKPPLLHTRAAKQPLPHARVVKPPLPQRPRRRIPHARNGCSRRTTRCPSLPPIPQRPPAPAKTPSPTYPTAMAELQDDHRPEGYDPDSRAGAGAEPVGIEIRRSRAGLGAEEPVLAPTPARAPVEKPREVSKRERRQQEEMAAELRARKSTQWKGRRVVWDYRKAERALAQLEKRE

SEQ ID NO: 73418 - protein, 80 aa, Zea mays
  Coding DNA Sequence Number=SeqID_31639
MDLNGNKVFIQPKVADKAPLLAARSRWDATASTPRGALGMAMNGDGRLRAAISWDDGDNGMAVRPGAGDRLRVEQARRIK

SEQ ID NO: 73419 - protein, 160 aa, Zea mays
  Coding DNA Sequence Number=SeqID_31640
  Gene Ontology: Mol. function=binding; Cellular component=thylakoid; Biological process=photosynthesis
  Homolog annotation: Hit_ID=Q8W516; Match level="QueryCoverage=54%, HitCoverage=26%, E-value=1e-27, Identity=65%"; Hit description=SGT1
MGEMSALSQVSAACIKLEEYQTAKAALELGSSYASDDSRFARLLKECDERIAEESSQAPVKNVEATVAATIEDKEDFTNMENTPPVIEPPSKPKYRHDLLVFLLNFYLKQFVLQESSQAPVKNVEATVAATIEEKEDFTNMENTPPVIEPPSKPKYRYMC

SEQ ID NO: 73420 - protein, 191 aa, Zea mays
  Coding DNA Sequence Number=SeqID_31641
  Subcellular localization annotation: CTP_CleavageSite=22; ConfidenceScore=5.04e-01
MALSPSAQATSPLARQLLRHVSSGLVAAAFHRPAPAISLPSAPRGADDVALAASHHQRLRPAPSPKGRPRRPRSKGSGGQVHAAPAMATIASAVMPPTNAVTAAAATTHVVTRGPARPGLPAQGGGGGKTHGAPAAAKARAAMPGPAPPARPKEGSGGKVHVASPAAMSSASVLMRGPAPPGHPAEGAGGR

SEQ ID NO: 73421 - protein, 73 aa, Zea mays
  Coding DNA Sequence Number=SeqID_31642
MGVPDLCARWRAINALQHVLEVELITFVRVHLHLWGAIHEISGEDCPSSISHEVRHVCGQKVQGSPQAPKDSG

SEQ ID NO: 73422 - protein, 274 aa, Zea mays
  Coding DNA Sequence Number=SeqID_31643
  Homolog annotation: Hit_ID=Q9ZQZ0; Match level="QueryCoverage=82%, HitCoverage=90%, E-value=2e-47, Identity=48%"; Hit description =Anther-specific protein
  Pfam annotation: Domain name=BURP; Domain location=131-267; Score= -47.9; E_value=1.2e-05; Accession=PF03181.6; Description=BURP domain
MACLLVLVIAATVLTVQHEAIARSEHDSETQLGPPGKLTHAARTSPAEAFWHAALPGAPMPEAIRELLRPAGAAGTNAPDAARSRHHDADPPPMNFKYEDYRSSRRNEATATSAEALDRAGGAGNAAASPAVFFLEEAVRVGGVLPFRGMVPRGTASVAVASPPMRLYKVRAVRAIDGRRFMVCRRDREDGPDGDAVYGCRATGPARAYAVGVVGERGETVAATVVCRTDTSRWNRVRAAFRLLDVKPGGAAVCHAALGAQVIPVKNDSGSSLV

SEQ ID NO: 73423 - protein, 135 aa, Zea mays
  Coding DNA Sequence Number=SeqID_31644
  Homolog annotation: Hit_ID=Q6Z1D0; Match level="QueryCoverage=50%, HitCoverage=11%, E-value=1e-27, Identity=85%"; Hit description =Putative pentatricopeptide (PPR) repeat-containing protein
  Pfam annotation: Domain name=PPR; Domain location=73-107; Score=36.4; E_value=9.8e-08; Accession=PF01535.11; Description=PPR repeat
MGSDRERVDRTIKIKSGQVEIQARLLPQTNVVIVARPPEPLDTSVDAEIWMARGQGVAIEAKEALRMVEPDICSYTTMVLAYVSASDMNGAEKFFHRIKEDGLKPNVVVYGTLMKGYSKLDNVEKLMHAYERMRV

SEQ ID NO: 73424 - protein, 78 aa, Zea mays
  Coding DNA Sequence Number=SeqID_31645
  Homolog annotation: Hit_ID=Q10MT6; Match level="QueryCoverage=97%, HitCoverage=14%, E-value=3e-11, Identity=55%"; Hit description =Expressed protein
MPAFNHIDAAIEAAHPSISRNEFRHVRGGIVEMLCDAEDDDERAEHVCLGLDAVMLESLVSLMQVPVALGALASCDLI

SEQ ID NO: 73425 - protein, 111 aa, Zea mays
  Coding DNA Sequence Number=SeqID_31646
  Subcellular localization annotation: CTP_CleavageSite=64; ConfidenceScore=5.06e-01
MQGSCLTAIAAKSTKDLPTLTTPLLPLPLSGDGASAGLYRGEQSSPQRNSEACGERQQQPNMPSAEATGEKSIRRGGVRGVVALSQRRKTGKKIPTQGPHLSSNARKQACA

SEQ ID NO: 73426 - protein, 76 aa, Zea mays
  Coding DNA Sequence Number=SeqID_31647
  Gene Ontology: Mol. function=nuclease activity; Biological process =response to DNA damage stimulus
MEKVKGATSLLMRSQKYAMLKQQLALATQFEDYKEVARLRDLPRSFEEEPVLQHQMMKKAIEEERFAHILTELPTF

SEQ ID NO: 73427 - protein, 151 aa, Zea mays
  Coding DNA Sequence Number=SeqID_31648
  Gene Ontology: Cellular component=anchored to membrane
  Homolog annotation: Hit_ID=Q69TA3; Match level="QueryCoverage=61%, HitCoverage=53%, E-value=3e-40, Identity=76%"; Hit description =Putative GPI-anchored protein
MGLHGGVVVLRAAVLAAVLGFVAAAGFISNCPVSFEGANYTVITSRCKGPLYQPTLCCGALKDFACPYSTYINDVSTNCAATMFSYINLYGKYPPGLFANTCHEGDKGLTCPEDTPQIEPGQKASGAAAVAAPAAALAAAALAVSLLLMSC

SEQ ID NO: 73428 - protein, 115 aa, Zea mays
  Coding DNA Sequence Number=SeqID_31649
  Gene Ontology: Mol. function=sequence-specific DNA binding; Cellular component=nucleus; Biological process=regulation of transcription
  Homolog annotation: Hit_ID=Q2L3S4; Match level="QueryCoverage=75%, HitCoverage=25%, E-value=1e-14, Identity=67%"; Hit description=WRKY DNA binding protein
  Subcellular localization annotation: CTP_CleavageSite=27; ConfidenceScore=5.37e-01
MAGASNHGSLTDEWLPPPTPSPRSLVSSFLNEEFSPGPFSERRAARAGFSVPKIDTSRVGSSAVIRSPVSIPPGLSPTTLLGVSWFFFTIKWYVIFPLLGFLGPPDLSVPFWPKV

SEQ ID NO: 73429 - protein, 69 aa, Zea mays
  Coding DNA Sequence Number=SeqID_31650
MARVRRAASGPAGRGHLAGRAGRGRGVGLQGRAQLGRLRAWAPMVFGPPGGALLGEKGGRDDESQNVCA

SEQ ID NO: 73430 - protein, 87 aa, Zea mays
  Coding DNA Sequence Number=SeqID_31651
MENRPGKQCYHKGGDNEDDGFDYDYGYGFWYSFCLERLNGTIVEYVDVYSPLLYTPNSPACPRCNHCSGEDEVVEEDFQEFQEYDEF

SEQ ID NO: 73431 - protein, 132 aa, Zea mays
  Coding DNA Sequence Number=SeqID_31652
MADERNHQSKWDREEVRWRFVTCCCSELQYPRSAFFLGVLGMLGKRGGRKGLFYATATGFIEDSAAVGAVDAAGEHAAAEGADSAQQKQEDDLTRGAQAAVIVRAVPRKAVRDLARLGRMGRTDEGTRWTRS

SEQ ID NO: 73432 - protein, 95 aa, Zea mays
  Coding DNA Sequence Number=SeqID_31653
MEMASVILFIQLVEYKNGREKVHLLLSYKLYIARFVTVTMLFYSTYLYFLTYRASVARQVPLAGWRLRGRGRHRVIGEKLSDFFRIMLENGNTII

SEQ ID NO: 73433 - protein, 61 aa, Zea mays
  Coding DNA Sequence Number=SeqID_31654
MVLLLLLRELPLVLVLVLMLMLSFRHMVMTEVVSELLLGDGFRVGMGGEIKRKAELKGLPN

SEQ ID NO: 73434 - protein, 66 aa, Zea mays
  Coding DNA Sequence Number=SeqID_31655
ARKLRNGHSEPATSRLSRDAFAGCSPKPTKTPTEGRGGGCWSLCARKRPWSLAFATGSAKAGHGEH

SEQ ID NO: 73435 - protein, 81 aa, Zea mays
  Coding DNA Sequence Number=SeqID_31656
MALGEDEVGRNNKDIGDDSTSEVSHSTDDLITEVEELMTALASQDKLLILATLRGKFSNSSMRACLRSLSLLDLLSWCLMR

SEQ ID NO: 73436 - protein, 161 aa, Zea mays
  Coding DNA Sequence Number=SeqID_31657
MIPLGSQNVASAMVLLEKLPEVETPGEWRTHHEIRDLFNLVVQQQAESSMSRCHEPRVGQHTTSTPLENNASSGQVLEYKEEGTTWVSSHRRPRTSRNARSMPNPRPWEKDKRSQSSSIGTISTVEDALILMRIEHRERAKHDKEPNGGIDGHPNKRKNEG

SEQ ID NO: 73437 - protein, 59 aa, Zea mays
  Coding DNA Sequence Number=SeqID_31658
MRGIPREVIEHSLWAKPGSKLVKQQLHHFDKEKHRAIVEEVGKLPMISSMVRAGSMRER

SEQ ID NO: 73438 - protein, 1480 aa, Zea mays
  Coding DNA Sequence Number=SeqID_31659
  Gene Ontology: Mol. function=receptor activity
  Homolog annotation: Hit_ID=Q6Z027; Match level="QueryCoverage=92%, HitCoverage=75%, E-value=0.0, Identity=73%"; Hit description =Putative death receptor interacting protein
  Subcellular localization annotation: CTP_CleavageSite=65; ConfidenceScore=5.62e-01
MEAYVSATGRATCSSVPPASSSSPRYAGASLPAAALAATRRRAMPERETALLRAANGTAGAHRRSAAAAGGISKRRSPASPREARGRQARRANLKAQEGCADCGGLGHRHRYTYTSIVFPKHYLEALTLVPAEISSSNFFVRLSNLISLTSTYSQVVVVKDLASAYVQFLSTTGTPDEAVLAATKLYLEILFLENSLPLHRTLISVLAKCKKFSTVISGCFALLCEEYGGSGSKAKKRFMVSRAALSLIGYPKLGFLDEAVERCAEIMALDVVDGLDGVTKDIGEGSRPSPVVMEQCQEAMSCMYYLLQRYPYKFIGLDKASSVFKSAVRTILSVLKSSAFSRDCLVASGVSFCAAIQVFMSTEEISWFISQGLFGIYANHEDRKNQSVHNVFSDFDLCEQIRDLSVLSRLCLLRGILTSIPRTVLNMHQLHSSGPLWTVLYDGILPELCKHCENPVDSHFNFHALTVTQICLQQIKTSVSSDITDFSGDYKPFSRDVVNRILGIIWRNLEDPLSQTVKQVHLIFDLLLDIELCIASEDREHNNNLFLCNVANDLLRLGPRCKGRYVPLASLTKRLGAKSLLTLKSNLLSETAYAYIDDDVCCAVTTFLKSFLETLRGECWNDDGVELGYDAFRALCLPPFMRGLVSGNSKLRSNLNTYALPALIEVDAESIFTMLGFISIGPSTNETKLDVVLKNDQCIAALVSLLKVSRNLALVEGDIDLDPDELSQIQQMDSKGAAVISVKGIKVTVPFNWFALALTHSDESLRIDAAESLFLNPKTSSLPSSLELSLLKEAVPLNMRCSSTAFQMKWTSLFRKFFARVRTALDRQVKQGSWIPSLTSSVKGAGSIDTSKATVVKRAEDLFQFMKWLSSFLFNSCYPSGPYERKTIAMELILTLLDVWPICRSEGKIDLYPYNDSIILPDSTISFVGSIIDSWDRLRENSFRILLQFPTPLPGISLSTSINDVIRWAKKLVLSPRVRESDAGALTFRLIFRNLLFGTIIRKIPLPGCSHSASSQNGLPDSIEETSISEEILDVGQLKMMGDHFLQVLLKMKHNGAIDKTRAGFTALCNRLLCSNDSRLCKMTESWMVLLMDRTIAKGQTVDDLIRRSAGIPAAFIALFLAEPEGTPKKLLPRALEWLIEFAKNSLANFQKDSNQRSGVMKELLESQSETTSVYSNGNLSKGRDEGVVPTVHVFNVLKAAFNDANLATDTSGFSAEATIVAIRAFSSPYWEVRNAACLAYTALVRRMVGFLNVQKRESARRSLTGLEFFHRQVHNYVISDILDNLPRGSHKAMAHSVQHTDPAISANMGKANVLLLSKSFNSIHGLLLQLASLLDNNFRGLTDGSMKDQIIGLLLEVLSRCSWLGCTKLCSCPIVITSYLRVLDLMLDVARTGKSRHTEVIQALLLELTSQCLSNTASTQYAFHDPTRIELKQQATESFLSCVGLSKKTDETNDDDVQLQILGEPTLEMPRVDYSLQK

SEQ ID NO: 73439 - protein, 183 aa, Zea mays
  Coding DNA Sequence Number=SeqID_31660
  Gene Ontology: Mol. function=phosphoglycolate phosphatase activity; Biological process=metabolic process
  Homolog annotation: Hit_ID=Q6Z026; Match level="QueryCoverage=57%, HitCoverage=38%, E-value=2e-47, Identity=81%"; Hit description =Haloacid dehalogenase-like hydrolase-like protein
  Subcellular localization annotation: CTP_CleavageSite=35; ConfidenceScore=5.57e-01
MPPAAAALLRCAPAVPFAARSSAVSRSGMARRLVAASAAAGRLAPAYRGLLLDAGGTLLQVARPVAETYASIGRRYGVTKTKKRIMEGFKRAFSAPWPKTLRYQGDGRPFWRIVVAEATDCTDGDYFEEVYQYYAHGDAWRLPTGADAALRELKDAGGQMLLPLFSPSRFLNLDFQFSVVYCN

SEQ ID NO: 73440 - protein, 149 aa, Zea mays
  Coding DNA Sequence Number=SeqID_31661
  Gene Ontology: Mol. function=RNA-directed DNA polymerase activity; Cellular component=membrane; Biological process=RNA-dependent DNA replication
  Homolog annotation: Hit_ID=UPI00004C1733; Match level="QueryCoverage =99%, HitCoverage=10%, E-value=2e-47, Identity=62%"; Hit description =UPI00004C1733 related cluster
MPFNLNNAGAMYQRCMIKCFGDLIGRVMEAYVDDIMIKTRRSEGLVCDRGLMFDRMKSNGIKLNLKKCVFDVPAGMLLGFLVFERGIEENSEKTTTISNMGQIGDLKGAQRVTGYLSSLSLFISCLGEHGLPLYMLLPKADCFEWTVEA

SEQ ID NO: 73441 - protein, 178 aa, Zea mays
  Coding DNA Sequence Number=SeqID_31662
  Homolog annotation: Hit_ID=Q6Z026; Match level="QueryCoverage=41%, HitCoverage=27%, E-value=2e-30, Identity=86%"; Hit description =Haloacid dehalogenase-like hydrolase-like protein
MSGAPDDSNSNFQRHSRYNSPDCPVCTGHVRCSKEGRPQELASLGAFIARQRAQRSGTPMLAHRTLYSSCPVRHRTSRRAQKSELQRSISNGTDLELFRFDAIVVSSEVGYEKPSPEIFNIALDQIGVEASKAIHVGDDETADMAGANATGLECWLWGKDVTTFSEIQERILTTDGPQ

SEQ ID NO: 73442 - protein, 216 aa, Zea mays
  Coding DNA Sequence Number=SeqID_31663
  Gene Ontology: Cellular component=integral to membrane; Biological process=regulation of transcription
  Homolog annotation: Hit_ID=Q9SJH8; Match level="QueryCoverage=97%, HitCoverage=80%, E-value=2e-24, Identity=31%"; Hit description =Expressed protein
  Pfam annotation: Domain name=Elongin_A; Domain location=9-114; Score =2.2; E_value=0.00016; Accession=PF06881.2; Description=RNA polymerase II transcription facto
MEFGRKPLSLVELCVRKAIDNLRYMGSVDGVEMDLLKRILPHCTMEQLTRVENSTEMDLSLVTDPLWRRFYQRDSAKKEKQKEVEDKMLDKFTKKFQAERAEKQSKQIKLCTKVPPSSKRSFFGGCILAGSGPSSVSSSSYKSPILKKARIEVNSRARLQSAMQKNTFARSSQPIRTTSVSGQPVRTTTIHRPNSTVTITKPMGKSRQIQNSRPKF

SEQ ID NO: 73443 - protein, 339 aa, Zea mays
  Coding DNA Sequence Number=SeqID_31664
  Gene Ontology: Mol. function=RNA-directed DNA polymerase activity; Biological process=RNA-dependent DNA replication
  Homolog annotation: Hit_ID=UPI00004C1731; Match level="QueryCoverage =71%, HitCoverage=19%, E-value=6e-64, Identity=50%"; Hit description =UPI00004C1731 related cluster
  Subcellular localization annotation: CTP_CleavageSite=18; ConfidenceScore=5.37e-01
MTRSKDSWNALQSSRPSSASRLRKLALEHRAVPSRQEREARSIPSSQETKPPRFETAFSTTVRTMMSEPALKPDETLHEYIRRFSKQRTDLPNIINSDVIGAFVAGTTYRDLGEAKGGHPEATTQHNPRKNKKKALQGKHEALEADLVATTDRGNPRAPPEVPTCSTNMLKESCPYHKGPIKHTLEEYKTITFDRDDHQDYIPNPGKYPLVIDPVIGNTGLSRVLMDGGSSLNIIYAETLELMGFSWSQIQAGVEPFYGITPGKRVQPLGQIDFPICFGTPSNFMREILIFEVVGFRGTYHAVLGRPFYTKFMALPNYTYLKLKMSGPKGVITVGCNTP

SEQ ID NO: 73444 - protein, 97 aa, Zea mays
  Coding DNA Sequence Number=SeqID_31665
MDGRQRHWCGDKVGEHRRGARCASDTGATQKGAGDKVRVAKSLPGLYAPSPAKQEDMAYINLRPASRMLASGSCATAELKSNGCSIETWTFLCLENV

SEQ ID NO: 73445 - protein, 89 aa, Zea mays
  Coding DNA Sequence Number=SeqID_31666
MEARSPRRAKGIEENDAIEKKLRGGLDWLLTTCQKLTLADTLASRSHLLESRLEESCSKNADDVWEPTQINTSKETLERENKSNENQSE

SEQ ID NO: 73446 - protein, 65 aa, Zea mays
  Coding DNA Sequence Number=SeqID_31667
MAGAEGVFIELSVISYTKKMEASTRAGMMNEEEVEDLAGLESLMTWTGGAEEVGAEVLSALGWFW

SEQ ID NO: 73447 - protein, 74 aa, Zea mays
  Coding DNA Sequence Number=SeqID_31668
MGKLCLGQTKAQNKIPRNGSGEMARVACTLCGKRLDGGVSILSVKKRQTFVVSVPRWSQKKKTKSKAVGGRIPP

SEQ ID NO: 73448 - protein, 223 aa, Zea mays
  Coding DNA Sequence Number=SeqID_31669
GVGEAAELEAGEAAHELQEGQPQPAARRRPSWDSKAPWEMDVGRSSRRGGEARDARNSTVRHAQMSRTRGDTAMAGEGHSAWIQTGAGRKTRRHGSRGAEGARTHSVGRKNKQSSRATPSSTSSRRRWSIDREEHHLTPGNLTKARPGPTLARSARHLEPSSGMTLLEAVAGHDGPPWGLSPVPPVFQGQGSAQTYAVHYVGTLLGLASPRLNPLTAAQAPWR

SEQ ID NO: 73449 - protein, 81 aa, Zea mays
  Coding DNA Sequence Number=SeqID_31670
MGEERSVAAPEFRCCWRSDDERDLYGLVVKWESRAFTPLHAEDSGQRSEWSLEHQDHRGARTLAASARLRVTLVAINLDQD

SEQ ID NO: 73450 - protein, 115 aa, Zea mays
  Coding DNA Sequence Number=SeqID_31671
  Subcellular localization annotation: CTP_CleavageSite=64; ConfidenceScore=5.46e-01
MGSNSKIRPISRFSLSSMLGPTTRFCVDMWAPPRRSRTRKARPMPLTPWDPAVQDPKRLTFSMCADNTGVHTPTTPGYAGADSMGWGGPPWYPGPLQSLQPRGGLSWGALLLSQG

SEQ ID NO: 73451 - protein, 106 aa, Zea mays
  Coding DNA Sequence Number=SeqID_31672
MAGGATAAMLPIVSTMSKATCIGLQIGEIVHEVIVVGQRPSTGEADSSPQALCSMVCGFVTPTPGVTYSTYHWVSGSRNNKGYAFVNILSSWKSIGGIPWAVPGSA

SEQ ID NO: 73452 - protein, 128 aa, Zea mays
  Coding DNA Sequence Number=SeqID_31673
MSSPAFTGGYTMEKRERGTEKRKISRRLNSGAARPGWGFGRRWRSSGRDTGAALSWGSSAWAARWARVTGELGAFSSGRHIDFGRGLIFINKMGYLNKGSLPSVGVRSSSDFGATWMECVLGGLSLNV

SEQ ID NO: 73453 - protein, 125 aa, Zea mays
  Coding DNA Sequence Number=SeqID_31674
MGITLAREHQRALHTRGKLTATRINSDEQSREQKAVTTKLRARGKLLTSTANSGARGGRRRCGGTSGRRRRGSGCARTAPVSADRENSQSWARPRRGIVGGRLGMTDKWARRDRERAGAGKSEST

SEQ ID NO: 73454 - protein, 41 aa, Zea mays
  Coding DNA Sequence Number=SeqID_31675
MPVRALKLCISMAVHINACPRLEADFYHSTGHSGDCLMEAN

SEQ ID NO: 73455 - protein, 91 aa, Zea mays
  Coding DNA Sequence Number=SeqID_31676
MKVVARLRSERIAARGGGEDEDKEKEEEEEEACRSFESYLMEMLVEEGKARDLKDVEELLQCWERLRSPVFIELVWSFYGELCNDLFHARG

SEQ ID NO: 73456 - protein, 195 aa, Zea mays
  Coding DNA Sequence Number=SeqID_31677
MASTTLSTDELLRRVKGTVGKAYYTLPVPMRPNQGYVSLGYEDTKSPALRSQRTRSVERRVGWPPRKKEEGHKEEAGPREKGGLRRVGEAQPDAGERGVTLEPSPITEDDDDEEEEGMEVQLGFSLEVRLWSEPTSVGPSRNEDVPTPRATASLSAAWVSAEPGPNPVGEEEAEVVEKADVPLQVPTVGPKGLRS

SEQ ID NO: 73457 - protein, 95 aa, Zea mays
  Coding DNA Sequence Number=SeqID_31678
MCPPLKGGPRARRKSLEIFIDLFNNDLGGPYAFLEACVGLNGMMLGGRVHTVVHVFPNSPVEHEAGKKRVAESSVLKTPLSDKKAKVQVAFSTWP

SEQ ID NO: 73458 - protein, 124 aa, Zea mays
  Coding DNA Sequence Number=SeqID_31679
  Subcellular localization annotation: CTP_CleavageSite=51; ConfidenceScore=5.30e-01
MAWCGSAVVASQPAAVSAAPKPEQVQRSPPARAPRYGTEETTNEAPMMRIRGGSRRAAKWWTGSAHLWPPGNKETTQASTQARNSVHAQPPGKKTELTSVAHSTASVTEAADRALLSASGAQKR

SEQ ID NO: 73459 - protein, 141 aa, Zea mays
  Coding DNA Sequence Number=SeqID_31680
MEEMKMVYEFEMTKLRQLSAEVAINLSSAQVKMNDMKAKINPCNRCHKEMLKTFSAVEAECKHVKACTDPDFKARQAAEKAVDIIKSFRTINLKVMIDVKHTEVEAKDAAAEAKAIAARAVEKTEDDEILKIYEQIYDEAM

SEQ ID NO: 73460 - protein, 151 aa, Zea mays
  Coding DNA Sequence Number=SeqID_31681
MLPQGALSLVYLAVIGAQIGANTLFGDSAGEIEFKEHKEQLVKEAQVKFLANFKVGRNHKVVLQQATDLASLRPAAATPKAEVSSLNQSKDNVDYDFAEGSTVIRPTKPSHVDFRKSKIKEGHIEEVRSQGIEFDAEAFCEAFSHIHELHF

SEQ ID NO: 73461 - protein, 127 aa, Zea mays
  Coding DNA Sequence Number=SeqID_31682
  Subcellular localization annotation: CTP_CleavageSite=49; ConfidenceScore=5.27e-01
MAAQGAGRAVFSSLAKSLGLRKPKREAGSGAKNRHQTLSREKRATLRLRQNNRAKKGTGKGDTPKRILPREGTRLRASLLIRGSKAGPPKGSTAASDRVGPTPTTGVRRLAPKGFTAASDAERGMTM

SEQ ID NO: 73462 - protein, 96 aa, Zea mays
  Coding DNA Sequence Number=SeqID_31683
MVTAHGGTGPAKVLRRAIGALPEDIPARKVHEDVRVTQESIPNRKPRPERRPGRESPAADDRLSFSALFSRSREGGWLRGAFGFVVRGLEPWRGEA

SEQ ID NO: 73463 - protein, 105 aa, Zea mays
  Coding DNA Sequence Number=SeqID_31684
  Gene Ontology: Cellular component=protein complex
  Homolog annotation: Hit_ID=Q84ZC7; Match level="QueryCoverage=96%, HitCoverage=32%, E-value=8e-35, Identity=80%"; Hit description =Proteasome inhibitor-like protein
  Pfam annotation: Domain name=PI31_Prot_Reg; Domain location=25-69; Score=14.9; E_value=0.0026; Accession=PF08577.1; Description=PI31 proteasome regulator
  Subcellular localization annotation: CTP_CleavageSite=73; ConfidenceScore=5.18e-01
MISTLGLVQASTLTVALGAVAACMLPGLNGYFGATGPNDPRFFPSNPFSAPFGGLGSVPPGSRYDPIGPPDVPGFEPSSFVRRPRRPPGGSTHPDLEFFQQGPDF

SEQ ID NO: 73464 - protein, 379 aa, Zea mays
  Coding DNA Sequence Number=SeqID_31685
  Gene Ontology: Mol. function=hydrogen ion transporting ATP synthase activity, rotational mechanism; Cellular component=peripheral to membrane of membrane fraction; Biological process=ATP synthesis coupled proton transport
  Homolog annotation: Hit_ID=Q84T90; Match level="QueryCoverage=99%, HitCoverage=99%, E-value=1e-134, Identity=71%"; Hit description =Putative vacuolar ATPase subunit H protein
  Pfam annotation: Domain name=Arm; Domain location=123-167; Score =10.5; E_value=0.6; Accession=PF00514.13; Description=Armadillobeta -catenin-like repeat
  Pfam annotation: Domain name=Arm; Domain location=168-209; Score=5.7; E_value=2.4; Accession=PF00514.13; Description=Armadillobeta-catenin -like repeat
  Pfam annotation: Domain name=Arm; Domain location=329-369; Score=8.8; E_value=0.97; Accession=PF00514.13; Description=Armadillobeta-catenin- like repeat
  Pfam annotation: Domain name=V-ATPase_H; Domain location=1-334; Score= 28.9; E_value=2.2e-17; Accession=PF03224.5; Description=V-ATPase subunit H
  Pfam module annotation: Pfam domain module=Arm::Arm::Arm::V-ATPase_H; Domain location=123-167::168-209::329-369::1-334
MDRAELTTEQVLKRDIPWEHYMSTKLISGTCLQLLRRYDHKPESQRAPLLEEILLYFDYSARPKLQNGTLPNGDASNSKSKLTSTHDVLRGLVDWLCSQLRNPTHPSCSIPTSIHCLSTLLREPYVRTLFVQADGIKLLIPLISPASTQQSIQLLYETCLCIWLLSFYDAAVDYLSTTRVMPRLVEVVKGSTKEKVVRVVVLSFRNLLAKGAFAAQMIDLGLPQMVQNLKAQAWTDEDLLDALNQLEVGLKENLKKLSSFDKYKQQVLLGHLDWSPMHKDPSFWRENINNFEENDFQILRVLMTIIDTSSDTTALAVACYDLSQFLQYHPSGRIVVADLKAKDRVMKLMNHENTEVRKNALICVQRLFLGAKYASFLQA

SEQ ID NO: 73465 - protein, 144 aa, Zea mays
  Coding DNA Sequence Number=SeqID_31686
MDSMGNEMLGKRGEIALHHHQALGAVEHQGVRPLRRGSAHVWTHLEEIGEHVGTKTKVQLKTVLPTCRVNTFAIVDGGKEHVYGASNNAARSTTNRKAAKRLFTKELGRGDIADEARRQKEVEVRLLEEETTKRVEQAIRKKVE

SEQ ID NO: 73466 - protein, 248 aa, Zea mays
  Coding DNA Sequence Number=SeqID_31687
MPSQGTPYVVFENIIQGYDEAACEGYLGVEPNLTLWRYFFCVELLRKREEQRLPVIDRSTPSEAPFNWSSDATPKEKTRIQSHLSGVLFHREKGVIEVDVIGAYLQRRDGSSEGLIYALYKMGKDFSSLGVEVLPSDSDVARWMRQALEIWKEVQGAAWPSLPIALECPPMRPEPSFIEFALSGTAVPTVHPSLAAREPTVMGVVEVRPVGSEFGQPAWPEHLKVKTNDGLPTAHLGLEETRSPCGRV

SEQ ID NO: 73467 - protein, 109 aa, Zea mays
  Coding DNA Sequence Number=SeqID_31688
MGQKSSYLLLLVGLLAIAMLCAGPGHALSQLNDANDGGLEFSLGSKEAMAGAKTEPLDPSLSEDYEDGYGVALGLRVVVWGRLWFVQAGTRVGGGGTVDAYVLGLIGVV

SEQ ID NO: 73468 - protein, 155 aa, Zea mays
  Coding DNA Sequence Number=SeqID_31689
  Subcellular localization annotation: CTP_CleavageSite=8; ConfidenceScore=5.26e-01
MWGPPRSRTAALTPHPLIGRARSLADRIHTTTRGPFLSDARSLRGRHSHVTNKPPPRLAMVFGASTIGWPLPVWNRAAAERIATVQTPWVGEGRACRRSVDGRLRLAHAYPFDRVPSGRRIMIPRSRFDLGRFKSTPWISDLTDIILYRFGKALI

SEQ ID NO: 73469 - protein, 91 aa, Zea mays
  Coding DNA Sequence Number=SeqID_31690
MARLAPREDVCVNQARALISMSVAENLDVITRQDDDAPRKKLLAHTSALLQPLRHGRPLPRELGHTDDPSVLASALHGKPAGLGTSLLPVL

SEQ ID NO: 73470 - protein, 85 aa, Zea mays
  Coding DNA Sequence Number=SeqID_31691
MSGEHAKKEKAGDKQKEHKEESASSIKSHRKGDKKKKKMKKVVYYETDSSSPSTSGAESTSLKRQERKKYSKPPYFDGERLLYVE

SEQ ID NO: 73471 - protein, 520 aa, Zea mays
  Coding DNA Sequence Number=SeqID_31692
  Gene Ontology: Cellular component=clathrin vesicle coat; Biological process=intracellular protein transport
  Homolog annotation: Hit_ID=Q2QPI4; Match level="QueryCoverage=99%, HitCoverage=86%, E-value=0.0, Identity=71%"; Hit description=Adaptor complexes medium subunit family protein, expressed
  Pfam annotation: Domain name=Adap_comp_sub; Domain location=277-502; Score=85.0; E_value=2.4e-22; Accession=PF00928.11; Description =Adaptor complexes medium subunit family
MSGGGCSIRAIWILTPNDTVAFSRRFAVVEKRWRAAWEEEEGDGERHRWGTGAAKMPLPADHEVAAAFAERRRREGTARSSGIRTNVSSVGLDSWVDDPITRHIISLHMDKEEGDPFMLWPVVLQKRGGYYVLVLPLVDPQPFRAYENLLKRAFMVAQVVGDIITGDIAEPEVIVSSGPSVGGLLDSLTGSIGISARAKPIAAPVAAPTASVSSPVGAAQSDSLKGGVRPFDKDLLQNFIIGAMPFGTPQDLNYANVTSIRTTGFSGDPLPTDQKQPAWKPYLYKGRQRILFSSLETINAALYDRDDVPDFLSVSGQVTCRAELEGLPDVSLPLTGLKTAHIEVSSFHHCVQASEPTANKQTLVFQPPLGNFVLMHYQAPCNIAPPVKGFYQLSMVSENEGAFLFKLSLMEGYKSPFIMDFCMITMPFPRRRVASYDGNPSIGTVSMTEHSIEWRIVSSGRGLSGRSIDATFPGTVKFQPRTTQRINSSSRFISSTGYTEDSDSEQDNVKNGASLDDYYL

SEQ ID NO: 73472 - protein, 77 aa, Zea mays
  Coding DNA Sequence Number=SeqID_31693
MARREEEPHPAVPLTLLLRCCGTRYFIGDIQWTAGPRLPASASSGKDHHRSMGSSSEHGGIQGTHAPRHPIPTSGVL

SEQ ID NO: 73473 - protein, 220 aa, Zea mays
  Coding DNA Sequence Number=SeqID_31694
  Gene Ontology: Mol. function=transporter activity; Cellular component= integral to membrane; Biological process=transport
  Homolog annotation: Hit_ID=Q9ATM0; Match level="QueryCoverage=99%, HitCoverage=100%, E-value=1e-82, Identity=68%"; Hit description =Tonoplast membrane integral protein ZmTIP1-2
  Pfam annotation: Domain name=MIP; Domain location=13-200; Score =227.3; E_value=3.4e-65; Accession=PF00230.10; Description=Major intrinsic protein
MPVSRIAVGAPGELSHPDTAKAAVAEFISMLIFVFAGSGSGMAFSKLTDGGATTPAGLIAASLAHALALFVAVSVAPGLRRRPVFFLKIATGGAAIGAFSLSAGVGAMNAVVLEMVMTFGLVYTVYATAVDPKKGDLGVIAPIAIGFIVGANILAGGAFDGASMNPAVSFGPAVVTGVWENHWVYWVGPLAGAAIAALVYDIIFIGQRPHQQLPTTAADY

SEQ ID NO: 73474 - protein, 74 aa, Zea mays
  Coding DNA Sequence Number=SeqID_31695
MKGRLTVGRLHAIVRRFALLTAGCPEDEGARNRGAVARSFFRSATPWGLASFRHRSASRIFITQPGCNFPPVVI

SEQ ID NO: 73475 - protein, 112 aa, Zea mays
  Coding DNA Sequence Number=SeqID_31696
MVGYPYPTQGIRAYLVDCIQTPVEPANSELDDLPSGPGVQLKAVKEKESVRCRTRRTDGNSLVGCGEVMWAWRWAHLAYVPRNWLGPVTELKGITYSGASTQSGACSIGEDE

SEQ ID NO: 73476 - protein, 122 aa, Zea mays
  Coding DNA Sequence Number=SeqID_31697
MAVGEGCCRMAHQTVRCTIGHCPVRQPHHPTVRVRPLELLTCGPPDSPVVHRTCPVHCPMTVGAVAVTPLGTPDTPVNYSGVASQIPEGGKFAVDLPGAPDSPVTNYSTIGHCNHKLFSNDK

SEQ ID NO: 73477 - protein, 325 aa, Zea mays
  Coding DNA Sequence Number=SeqID_31698
  Gene Ontology: Mol. function=heparin binding; Cellular component =nucleus; Biological process=cell motility
  Homolog annotation: Hit_ID=Q10F11; Match level="QueryCoverage=91%, HitCoverage=87%, E-value=1e-148, Identity=49%"; Hit description =Vegetatible incompatibility protein HET-E-1, putative, expressed
  Pfam annotation: Domain name=WD40; Domain location=112-150; Score =43.9; E_value=5.5e-10; Accession=PF00400.22; Description=WD domain, G-beta repeat
  Pfam annotation: Domain name=WD40; Domain location=157-195; Score =14.7; E_value=0.33; Accession=PF00400.22; Description=WD domain, G -beta repeat
  Pfam annotation: Domain name=WD40; Domain location=199-237; Score =38.2; E_value=2.9e-08; Accession=PF00400.22; Description=WD domain, G-beta repeat
  Pfam annotation: Domain name=WD40; Domain location=240-278; Score =35.0; E_value=2.6e-07; Accession=PF00400.22; Description=WD domain, G-beta repeat
  Pfam annotation: Domain name=WD40; Domain location=28-66; Score=34.5; E_value=3.7e-07; Accession=PF00400.22; Description=WD domain, G-beta repeat
  Pfam annotation: Domain name=WD40; Domain location=282-320; Score =31.8; E_value=2.4e-06; Accession=PF00400.22; Description=WD domain, G-beta repeat
  Pfam annotation: Domain name=WD40; Domain location=70-108; Score =30.1; E_value=8e-06; Accession=PF00400.22; Description=WD domain, G -beta repeat
  Pfam module annotation: Pfam domain module=WD40::WD40::WD40::WD40::WD4 0::WD40::WD40; Domain location=112-150::157-195::199-237::240-278::28- 66::282-320::70-108
MGLGPVTAAYIGGSDFSISFKVGTKILWPLQDCEDRHKDTVGTVAFSSDGNLLACGSFDGQINVWNTAARALKGTLEGSGSGFEWLKWHPRGHLIIAGSEDCNVWMWNADHNAIINTFVGHSNTVTCGDFTPDGKLICTGSDDASLRIWDPRSAQSRHVIRGHGYHTDGLTCLSMTLDSQTVVSGSKDSSVHAVNVNSGQIVGSLVGHTTSIECVGISSSYGWVATGSMDQKLIIWDLTHQSSRCTCEHDEGVTSLAWLGSSRYVASGCIDGKVRIWDSLSGDCAREFSGHADVVQSMAITADGNAMVSVSSDGSARVFDISMFK

SEQ ID NO: 73478 - protein, 243 aa, Zea mays
  Coding DNA Sequence Number=SeqID_31699
  Gene Ontology: Mol. function=protein serine/threonine kinase activity; Cellular component=chloroplast; Biological process=protein amino acid phosphorylation
  Homolog annotation: Hit_ID=Q2EF50; Match level="QueryCoverage=81%, HitCoverage=53%, E-value=1e-84, Identity=77%"; Hit description =Protein kinase ABC1063
  Pfam annotation: Domain name=Pkinase; Domain location=3-196; Score =4.9; E_value=7.5e-09; Accession=PF00069.15; Description=Protein kinase domain
  Pfam annotation: Domain name=Pkinase_Tyr; Domain location=1-196; Score=-64.1; E_value=1.5e-08; Accession=PF07714.7; Description =Protein tyrosine kinase
  Pfam module annotation: Pfam domain module=Pkinase::Pkinase_Tyr; Domain location=3-196::1-196
MPRGSLENHLFRTSRFQPLSWNLRIKVALGAAKGLAFLHSDKARVIYRDFKTSNVLLDSNYNAKLSDFGLAKDGPTGDQSHVSTRVMGTYGYAAPEYLATGHLTPKSDVYSFGVVLLEMLSGRRAMDKNRPATEHNLVDWARPYLSSKRRVSRILDDRLAGHYPLPAVQRAAALALQCLSEDSRKRPTMDQVVASLQQLTAAQDHDDAHRSSRRYPKDHRQAAALNNRNLNAHRRLSALPLPE

SEQ ID NO: 73479 - protein, 148 aa, Zea mays
  Coding DNA Sequence Number=SeqID_31700
MPFDSSREELGTCFLGWWQEELASLPDREDRMWGLHGRFVVRERTGRAVEQVMDEEVEDFELLCTLETSGAEADMEQQPSWPGVADIEPGYAETTHCAGGDAWALAGPVSWVSLQEASGTEWDPRSLSCRGVESELRTLFEGEELELM

SEQ ID NO: 73480 - protein, 109 aa, Zea mays
  Coding DNA Sequence Number=SeqID_31701
MGWWPASSLSIRGIRAFACLVKEANFRFAGLGRLQVPPATACQKVVAAAGGAEVVAAAGEAAHCRGGCLRWRDHQCHLLPDLRLFGFNGLIVAPRRKAGARTLSQRHTC

SEQ ID NO: 73481 - protein, 438 aa, Zea mays
  Coding DNA Sequence Number=SeqID_31702
  Gene Ontology: Mol. function=methyltransferase activity; Biological process=intracellular signaling cascade
  Homolog annotation: Hit_ID=Q5ZC77; Match level="QueryCoverage=96%, HitCoverage=95%, E-value=1e-178, Identity=67%"; Hit description=ATP synthase beta subunit/transcription termination factor rho-like
  Pfam annotation: Domain name=DUF185; Domain location=150-361; Score =77.8; E_value=3.3e-20; Accession=PF02636.7; Description =Uncharacterized ACR, COG1565
  Subcellular localization annotation: CTP_CleavageSite=52; ConfidenceScore=5.31e-01
MLRGSAALLRRLAPRISGGGCGNTTHRRLLPPIAPFLRARFLSAPTTSSPPSSSSAACHEEDAEDRDLPEISNGDAGARLSISVDRSGLYNPTEHSHEPSSESELVKHIKSIIKEVLTNPQSGFYINRDVFGESGDFITSPEVSQMFGEMIGVWAMCLWEQMGKPAKVNLIELGPGRGTLLADLLRGSAKFANFTKALSINLVECSPTLQKIQYNTLKCEDEHVGDGKRTVSKICGAPVCWHASLEQVPSGSSLIYLAKRCGWASSEELEKIEHIEVCPKAMELTEQIADRISSDGGGALIIDYGKNGIVSDSLQAIRKHKFVDILDDPGSADLSAYVDFASIKRSAEEASDDISVHGPMTQSQFLGSLGINFRVEALLQNCTEEQAESLRTGYWRLVGDGEAPFWEGPEDQAAPVGMGTRYLAMAIVNKKQGTPIPF

SEQ ID NO: 73482 - protein, 63 aa, Zea mays
  Coding DNA Sequence Number=SeqID_31703
MAPGDDAVGGDGQDISDISTSEVSHSADDLTAEVEELNTALRGGLISVENNSRTRSPILSCPK

SEQ ID NO: 73483 - protein, 99 aa, Zea mays
  Coding DNA Sequence Number=SeqID_31704
MGRICSLITEKEQFHPGEDENDGCPALASSFTNSPIVHVIDDGQHDIVTAVEVLAFDLDWLLILEQSLIIHSVVNVIEVDALYKSFKKINNTFIDDGAD

SEQ ID NO: 73484 - protein, 124 aa, Zea mays
  Coding DNA Sequence Number=SeqID_31705
MATTKARPPSGSKCAGGGREVSDRAAGARRGADEEDGATPTASPAEGEAGGGIRGIRLRVDGGEQRGRRVGTAACHGGGPDLEARRGTARSSSLASPDAGDSIPLWRKPWQLTSAPSAPLVESG

SEQ ID NO: 73485 - protein, 801 aa, Zea mays
  Coding DNA Sequence Number=SeqID_31706
  Gene Ontology: Mol. function=RNA-directed DNA polymerase activity; Cellular component=mitochondrion; Biological process=RNA-dependent DNA replication
  Homolog annotation: Hit_ID=UPI00004C1731; Match level="QueryCoverage =94%, HitCoverage=52%, E-value=0.0, Identity=88%"; Hit description =UPI00004C1731 related cluster
  Pfam annotation: Domain name=RnaseH; Domain location=312-431; Score= -32.0; E_value=0.055; Accession=PF00075.14; Description=RNase H
  Pfam annotation: Domain name=rve; Domain location=513-672; Score =114.1; E_value=4e-31; Accession=PF00665.16; Description=Integrase core domain
  Pfam module annotation: Pfam domain module=RnaseH::rve; Domain location=312-431::513-672
MPFSLRNAGATYQRCMNHVFGEHIGRTVEAYVDDIVVKTRKASDLLSNLEVTFRCLKAKGVKLNPEKCVFGVPRGMLLGFIVSERGIEANPEKITAITSMGPIKDLKGVQRVMGCLAALSRFISRLGERGLPLYRLLRKAECFAWTPEAEEALGNLKALLTKAPILVPPADGEALLVYVAATTQVVSAAIVVERQEEGHALPVQRLVYFVSEVLSETKIRYPQVQKLLYAVILTRQKLRHYFKSHPVTVVSSFPLGEIIQCREASGRIAKWAVEIMGETISFAPRKAIKSHVLADFVAEWVDTQLPTAPIQPELWTMFFDGSLMKTGAGAGLLFISPLGKHLRYVLHLHFPASNNVAEYEALVNGLRIAIELGVRRLDARGDSQLVIDQVMKNSHCRDPKMEAYCDETPYLQYLRQGELPLDQAEARRVARRAKSSVLLGDEEELYHRSPSGILQRCISIAEAPRALVGNAFRQGFYWPTAVADATRIVRTCEGCQFYAKQTHLPAQALQTIPITWPFAVWGLDLVGPLQKALGGYTHLLVAIDKFSKWIEVRPLNSIRSEQAVAFFTNIIHRFGVPNSIITDNGTQFTGRKFLDFCEDHHIRVDWAAVAHPMSNGQVEHANSMILQGLKPRIYNDLNKFGKRWMKELPSVVWSLRTTPSRATGFTPFFLVYGAEAILPTDLEYGSPRTRAYNDQSNQASREESLDQLEEARDKALLHSARYQQSLRCYHARGVRPRDLQVGDLVLRLWQDARGRHKLTPPWEGPFVITKVLKPGTYKLANNQGEIYGNAWNIQQLRRFYP

SEQ ID NO: 73486 - protein, 129 aa, Zea mays
  Coding DNA Sequence Number=SeqID_31707
MVRALWLGGRAAAAARWCTCRRATVALCVANLVATLLVTRALYAPGSFAFAPKREEAAKAFAREEKTRKGLPLELKQKVSLETLQILHDLGEGSNTTEQQEAIEAWRVGKLRDMRSTSSKNLSNFGLFQ

SEQ ID NO: 73487 - protein, 385 aa, Zea mays
  Coding DNA Sequence Number=SeqID_31708
  Homolog annotation: Hit_ID=Q010B9; Match level="QueryCoverage=29%, HitCoverage=13%, E-value=2e-27, Identity=55%"; Hit description=[R] KOG0255 Synaptic vesicle transporter SVOP and related transporters
  Pfam annotation: Domain name=DUF572; Domain location=69-384; Score =127.0; E_value=5.3e-35; Accession=PF04502.3; Description=Family of unknown function (DUF572)
MDALALGRVGGRGKGGGEVTWFSLGYRGAVDWEPLVVAVALPRRLLAPAALRWRAAHLLGPGPFMVHWKGEESGRHARKVARAAPTYLGIQIFRFYFKCTKCSAEITFKTDPQNSDYTVESGASRNFEPWRAQDEAADKEKIKRDAEEMGDAMKALENRAMDSKQDMDILAALEEMRSMKSRHAGVSVDQMLEILKRSAHEKEEKAIAELDEEDEELIKSITFRNSGFYVKRIEDDDDDDDEDLAPGQSSRTIKDEGTVRAKKKQCTNFQIVTGGCIWITCSRLAGQEAGNAINESSESVTKPTDVLSKNNGSEVANKEGSKSWMPKFIVKPKSASADSHKRQKIESTAVQDTGKGQDDEQKSEPAKQTNVLQSLCQNYDSDDSE

SEQ ID NO: 73488 - protein, 221 aa, Zea mays
  Coding DNA Sequence Number=SeqID_31709
  Subcellular localization annotation: CTP_CleavageSite=29; ConfidenceScore=5.56e-01
MASSATYLMLASAHAPLAPLIRPPPMALVARTAATSITRRERASVPLLVNPAACRPGLRRRGWAHICRDSSLQGPSGADSPAQEQEDLKKSEAVSEAAARIAGGTGGTLSDWSTSVLIFGIWAGLMYYVFLLAPNQTPYRDTYFLQKLLNLKGDDGFRMNDVLVSLWYIMGLWPLVYSMLLLPTGRSCDDERKVAFPSSITQPNQEEKNKATRYPQYGGPF

SEQ ID NO: 73489 - protein, 599 aa, Zea mays
  Coding DNA Sequence Number=SeqID_31710
  Gene Ontology: Mol. function=DNA binding; Cellular component =intracellular; Biological process=DNA integration
  Homolog annotation: Hit_ID=O24587; Match level="QueryCoverage=99%, HitCoverage=91%, E-value=0.0, Identity=68%"; Hit description=Pol
  Pfam annotation: Domain name=rve; Domain location=137-293; Score =94.1; E_value=4.2e-25; Accession=PF00665.16; Description=Integrase core domain
MTGEKNMFTSYVKNKDSHDTIIFGDGNQDKVKGIGKIAITTEHSISNVFLVESLGYNLLSISQLCHMGYNCLFTNVDVTVFIRSDGPLAFKDVSDDKLYLVDFTKENDDLNACLLDKTNMGWLWHRCLAHVGIKNPHKLLKGEHVLGLTNVYFEKDRPCAACQAGLLLILALVEDKSETQETLKHFLRWAQNEFELKVKKIRSDNGSEFKNLQVEEYLEEKGTEHEFSAPYRPQQNGVVERKNMTLIDMARTVIAKYKTPKWFWLEAVNTTCHAINRLYLHRLLKKTTYELLTSNKPNVSYFRVFGSIFYILIKKGRHSKFAPKAVERFFLGYDSNIKASRVFNKSLGLVEVTSDVVFDETNGSPREQVDLDDIDENEVLMAAMRTMAIGDVRLQEQQVQDQPSTTTMVQPPTQDEEQVHQDDGMDQGEHKNKKEGRRKEYHRHLQPKSAPTFKGIIWWIKFLVTLARELQLVHVLQNFECHLVDVKRILQYLVHMPYIGLWYHKGSTFDLIDYSDFDYAGCKVDRKSTLGTCQFLGRSPSVLEFKERNICYPIHRRGRVCCRRPVLRATTLDEENPPGLWLQSEKSPHSYVIIRVQSA

SEQ ID NO: 73490 - protein, 61 aa, Zea mays
  Coding DNA Sequence Number=SeqID_31711
MPDYPMVNPDCPVVFATIETPRGSPGAAPDCPTRKAGRSEQRLGRSNHVQGRQSAKQGQRW

SEQ ID NO: 73491 - protein, 45 aa, Zea mays
  Coding DNA Sequence Number=SeqID_31712
MATNCNITAATAILRRRLIDLLFAGFLQVRCWIRGQGGCGVYDVL

SEQ ID NO: 73492 - protein, 155 aa, Zea mays
  Coding DNA Sequence Number=SeqID_31713
MQRRRVLITTTIITPWHRRQVLTDITAITLNLAITPRRQLLFTTASRPELLVPTTMAGTTLRHRYQFMLTIRATLRCLLLPARRARTSVASTLLQLRLLQARCPAPRARTNMAATTLERQRQLQFKATSQPALLVRTAMVIVVPTRAWKVTWLCA

SEQ ID NO: 73493 - protein, 75 aa, Zea mays
  Coding DNA Sequence Number=SeqID_31714
MEVRGGWNHTAGRKGRHAELGEGADHPWKKAETRHGRDRADAAGRGTAALGGRWVAERRDPPWVLISEDLDLGDV

SEQ ID NO: 73494 - protein, 138 aa, Zea mays
  Coding DNA Sequence Number=SeqID_31715
MAAKAPERAVLDEIHPRRCSGCGMAQGRGGFGPGRWAPPSHTWISARSAPCAGSMARLLTDARGKGMSEVFGVILSWTKDHEEIEVWGFMRNCQRNMETVCGFFTGFSNPLGPLRKIASAGAFRPVMGRPGLVSVQYC

SEQ ID NO: 73495 - protein, 52 aa, Zea mays
  Coding DNA Sequence Number=SeqID_31716
MARLWSTDTPAQALDRQATIANWSSCPSQGSQCSRKTILLNPTKMPSQSNEE

SEQ ID NO: 73496 - protein, 201 aa, Zea mays
  Coding DNA Sequence Number=SeqID_31717
VSAIQIRQLNQRFHSRMVQAHLTHSKQRPEMIRVETEGSKQLSSTLEKSTSARPETEIELLQLSSALTIDDSFLDTIPAAPSSSPAPQPPVQHHSLLTPVPFPVAHYGRPKRQCVIVRSGFGGVATIRDPERQTMGDSKRQTLGKLEIRRRFVTWTAAKTWRRLLASEEEGGLGGGAALASEEEEEGSSGAERVNRGVDSG

SEQ ID NO: 73497 - protein, 75 aa, Zea mays
  Coding DNA Sequence Number=SeqID_31718
MVNQTLPIWLCPNLDYTSTLYIGMVVRDCTHNYLTSNRWLKRFRVQSDVNEQGLNRWCNLYRFQRQLAVAVEKGY

SEQ ID NO: 73498 - protein, 140 aa, Zea mays
  Coding DNA Sequence Number=SeqID_31719
MSASHMGNYLVNNNQPSRGKYASWALPVDRCGGQGRSVQTLLSLTVKQTMDAAQASGDRSNFAINDVEVSTKLIHYYNGMRTALTLGSLSNALGRQPSARCRVSSKGKPALSLTRKMVPFLPLIDHDITNEIPSHLQRKQ

SEQ ID NO: 73499 - protein, 54 aa, Zea mays
  Coding DNA Sequence Number=SeqID_31720
MGSRSVLSSLGGFNSLSCCPDPCKVFVIMASGLLEYLPPAAKRVKIPRKDWQAE

SEQ ID NO: 73500 - protein, 310 aa, Zea mays
  Coding DNA Sequence Number=SeqID_31721
  Homolog annotation: Hit_ID=P33628; Match level="QueryCoverage=25%, HitCoverage=69%, E-value=6e-31, Identity=83%"; Hit description =Tubulin alpha chain
  Pfam annotation: Domain name=Tubulin; Domain location=113-260; Score=- 38.7; E_value=2.8e-05; Accession=PF00091.15; Description=TubulinFtsZ family, GTPase domain
MSSSPSSVNREHGPASVGAGVLGEEDQHRLVSVPGGILSISCRTYATPLGHGFFPRYTSQHHLAHLLPLLRAALAENSIRLGCFPANISHHPNSQPWPFACSDTSVGIARDAFNTFFSETGAGKHVPRALFVDLEPTVIDEVKTGAYRRLFHPEQLISHKEDAANNFARGHYTGVTCSPHPELFPGEQKMFLQLKMQYWFKLYSYQLVTVMQAQNVLGNKGTEIAKVAHRRTDAEAGVEALDAVQQSVVVAASATSFPHQHGRVNGSENSIWKCTTATTVDYRCNQDDAKASAGNAIVAATEYHPYILIS

SEQ ID NO: 73501 - protein, 122 aa, Zea mays
  Coding DNA Sequence Number=SeqID_31722
  Subcellular localization annotation: CTP_CleavageSite=81; ConfidenceScore=5.19e-01
MAKGGWSNSLPFILHSSLRGERNFSPVMVDAQHQAGCGTSFNFSPGALNGKRNRDGRRRNTQVVVDEISRSEAAFPSSLPQASSLPQGESRRVNRDREGSRRVNRRGEEGSSGCCLVVGVLQ

SEQ ID NO: 73502 - protein, 199 aa, Zea mays
  Coding DNA Sequence Number=SeqID_31723
  Gene Ontology: Mol. function=transcription regulator activity; Cellular component=nucleus; Biological process=regulation of transcription
  Homolog annotation: Hit_ID=Q6ZGM4; Match level="QueryCoverage=81%, HitCoverage=75%, E-value=7e-54, Identity=60%"; Hit description =Putative bHLH protein
MMDCAGGRDPVEDFLLGGAGAGDDGDLVAVFCDDGGGRDEPCSSGPTSKACREKMRRDKLNDRFLELSSIMNPARMVAQLRGEAEKLKESNEKLRENIKDLKEEKNELREEKVRLKVEKDRLEQQVKAMSVAPTGYVPHLPHPASYHPAAFTPFAPPQQAPANKSAPIPAPFPGMAMWQWLPPTIVDTTQDPKLWPPNA

SEQ ID NO: 73503 - protein, 49 aa, Zea mays
  Coding DNA Sequence Number=SeqID_31724
MASTGFGTELSEYPMAARRKSWLAVDRQKGVHSKILITSGGGGKSELPG

SEQ ID NO: 73504 - protein, 284 aa, Zea mays
  Coding DNA Sequence Number=SeqID_31725
  Gene Ontology: Mol. function=protein serine/threonine kinase activity; Cellular component=integral to membrane; Biological process=multicellular organismal development
  Homolog annotation: Hit_ID=Q6ZGM3; Match level="QueryCoverage=93%, HitCoverage=27%, E-value=1e-115, Identity=73%"; Hit description =Putative Phytosulfokine receptor
  Pfam annotation: Domain name=Pkinase; Domain location=13-258; Score =107.2; E_value=5e-29; Accession=PF00069.15; Description=Protein kinase domain
  Pfam annotation: Domain name=Pkinase_Tyr; Domain location=13-258; Score=46.9; E_value=2.4e-15; Accession=PF07714.7; Description =Protein tyrosine kinase
  Pfam module annotation: Pfam domain module=Pkinase::Pkinase_Tyr; Domain location=13-258::13-258
MTLEDVMKATRNFDASCIVGCGGFGMVYRATLADGSEVAVKRLSGDFWQMEREFRAEVETLSRVRHRNLVPLQGYCRGGALAWPARLGIARGAARGLAHLHASSEPRVLHRDIKSSNILLDARLEPKLADFGLARLVLPTDTHVTTDLVGTLGYIPPEYGSSSVATYRGDVYSLGVVLLELVTGRRPVDMARPVGGGRDVTSWAVRMRREARGDEVIDASVDERKHREEAAMVLDVACACVNDNPKSRPTARQVVEWLEAIAASASLAPRVTDTVHTVNTCNWR

SEQ ID NO: 73505 - protein, 602 aa, Zea mays
  Coding DNA Sequence Number=SeqID_31726
  Gene Ontology: Cellular component=mitochondrion; Biological process =response to cold
  Homolog annotation: Hit_ID=Q1SWR7; Match level="QueryCoverage=70%, HitCoverage=67%, E-value=5e-26, Identity=21%"; Hit description =Mitochodrial transcription termination factor-related
  Pfam annotation: Domain name=mTERF; Domain location=134-484; Score =251.5; E_value=1.8e-72; Accession=PF02536.5; Description=mTERF
MLADGVRELDELGLWASWSSGASARLGLSGVVEMEMGRLGFRRKVYLMGRSRPDHDVVPLLESLGVRLSSAKLIAPYVASAGLTVLIDRVKFLKEMLFSSSDYAILIGRNAKRMMTYLSIPADDALQSTLSFFEKMEARYGGVSMLGHGDMSFPYLIESFPMLLLCSEDNHLEPLVDFLEHIGIPKPKIASVLLLFPPIILSDVENDIKPRIREWEKAGIEHDYITRMLLKYPWILSTSVIENYSKMLLFFNQKGISSTVLAIAVKSWPHILGSSSKRMNSVLELFRVLGISKKMVVPVITSSPQLLLRKPDQFMQNVLFFREMGVDKKTTGKILCRSPEIFASNVDNTLKKKIDFLINFGVSKHHLPRIIRKYPELLLLDLNCTLLPRINYLLEMGLSKKDLCSMISRFSPLLGYSIELVMKPKLEFLLRTMKKPLKAVVEYPRYFSYSLEGKIKPRFWLLQSRNIDCTLTEMLAKNDELFAEEYLELGGLLEKPVQSSIGVHYAEAVQLYAWIGEAVFQMGGHFFFLKTKESCVSLYSNVVALITIAVESHVGKGINTLFWTDKWLLGSCIGDVAPAVLAMVPAKIIKTRAVADALSNNS

SEQ ID NO: 73506 - protein, 80 aa, Zea mays
  Coding DNA Sequence Number=SeqID_31727
MGGDHGGGHAGGDFRQKVWSMTGGPYCRPVHWRRNTAIAMFGVFLICIPIAMKSAELEIASKRDIEDQDRVGTQTSYRRL

SEQ ID NO: 73507 - protein, 260 aa, Zea mays
  Coding DNA Sequence Number=SeqID_31728
  Gene Ontology: Mol. function=structural constituent of ribosome; Cellular component=ribonucleoprotein complex; Biological process =translation
  Homolog annotation: Hit_ID=Q6ZJ04; Match level="QueryCoverage=73%, HitCoverage=91%, E-value=6e-79, Identity=79%"; Hit description =Putative 60S ribosomal protein L10A
  Pfam annotation: Domain name=Ribosomal_L1; Domain location=26-227; Score=143.4; E_value=6e-40; Accession=PF00687.11; Description =Ribosomal protein L1pL10e family
MARWAGRGRLARLGLFACAIKLESEVLKDVVSQIVQDAKKNRKFTETVELQISLKNYDQQKDKSFSGSVKLPRIPRPKMKVCMLGDAQHVEEAKKMGLDYMDVEALKKMNKNKKLVKKLAKKYHAFLASETIIKQIPRLLGPGKFPTLVTHQESLESKVNETKATVKFQLKKVLCMGVAVGNLSMEEKQIQQNIQMSVNFLVSLLTKNWQNEFWILKNKGALCMSISSKAMTITGIDDRRYWSHLVTEESRFCSIIVKSY

SEQ ID NO: 73508 - protein, 134 aa, Zea mays
  Coding DNA Sequence Number=SeqID_31729
  Gene Ontology: Mol. function=protein serine/threonine kinase activity; Cellular component=cytoplasm; Biological process=protein amino acid phosphorylation
  Homolog annotation: Hit_ID=Q5ZE73; Match level="QueryCoverage=93%, HitCoverage=18%, E-value=5e-58, Identity=87%"; Hit description =Putative calcium-dependent protein kinase
  Pfam annotation: Domain name=efhand; Domain location=110-134; Score =6.8; E_value=2.5; Accession=PF00036.22; Description=EF hand
  Pfam annotation: Domain name=efhand; Domain location=38-66; Score =34.4; E_value=3.9e-07; Accession=PF00036.22; Description=EF hand
  Pfam annotation: Domain name=efhand; Domain location=74-102; Score =33.4; E_value=8.1e-07; Accession=PF00036.22; Description=EF hand
  Pfam module annotation: Pfam domain module=efhand::efhand::efhand; Domain location=110-134::38-66::74-102
MRGPQIRHLDFTVIGRMKQVRAMNKLKKVALKMKEIMGLKEMFRSLDTDNSGTITLEELRSGLPKLGTKISESEIKQLMEAADVDGNGTIDYAEFISATMHLNRLEKEDHILKAFEYFDKDHSGYTTVDELEEA

SEQ ID NO: 73509 - protein, 461 aa, Zea mays
  Coding DNA Sequence Number=SeqID_31730
  Gene Ontology: Cellular component=integral to membrane
  Homolog annotation: Hit_ID=Q8L4G8; Match level="QueryCoverage=72%, HitCoverage=56%, E-value=2e-99, Identity=55%"; Hit description=C4 -dicarboxylate transporter-like protein
  Pfam annotation: Domain name=C4dic_mal_tran; Domain location=288-461; Score=101.0; E_value=3.5e-27; Accession=PF03595.8; Description=C4 -dicarboxylate transportermalic acid transport protein
MASIAVLDCRAVLWSNGWICLVPFLGVTMEFIGSGKDVVKKIQLVAAGGLSTELPSSSSSRGEGDALPALLVKAPSQTVAGFDCVGADDVAVSLHEMDDKVEELQGRPGSNKDTAIRAYDDAHVVPYSVSLSMPASPSGFHLSQFMPVAPTDHVHRPEPTARSPRLVKQTRFHSQPIVLNMNLHPSSSTNKNVDEARRWDSARDKRFDPFKTFSGRLERQLSNLRGRPQDPVDGVSSSPDSEEETDQVPAADRYFDALEGPELDTLRATEVPVLPKDEKWPFLLRFPISAFGMCLGVSSQAILWKTLASAPATAFLRVSPAVSHALWYVALALTALVSSTYLLKVVFYLEAVRREFYHPVRANFFFAPWIACLFLALGAPRLVVAEMHRGVWYALMAPILCLELKIYGQWMSGGQRRLSKVANPSNHLSVVGNFVGALLGARMGLREGPVFFFSVGLAHYL

SEQ ID NO: 73510 - protein, 106 aa, Zea mays
  Coding DNA Sequence Number=SeqID_31731
MGRAQACAQAAGAGLGQHRDGLQGRVGGGVTDLTPLTGISPLRFKKKLARKQAANPLNRSIDLHLMTLLLSLILTDANWIGAREKGETTLRPSKDKENDKTCKIGA

SEQ ID NO: 73511 - protein, 172 aa, Zea mays
  Coding DNA Sequence Number=SeqID_31732
MTLGPKAYKTGPFPLPLPPAHARGVAAIWAHSSAYLFAQAGYCVVGSAGQLLPRENRSVRETTGIDRNGAGSTARENLARIPIPQPFSSGVRSAVGSAFNHRDRLQRSLPWPPGSGLTVVSRAVDGERFSGKEMVALCFDSAGRTERERSTASAQDLGAPVLTKGRRWVPGR

SEQ ID NO: 73512 - protein, 74 aa, Zea mays
  Coding DNA Sequence Number=SeqID_31733
MWDDQVSVEQVCEAERPTKSSSSKSARRNERPSTCQARPATWDNQVPTEQVYKVKRSTKYPLSKACKAGRPSPR

SEQ ID NO: 73513 - protein, 93 aa, Zea mays
  Coding DNA Sequence Number=SeqID_31734
  Subcellular localization annotation: CTP_CleavageSite=56; ConfidenceScore=5.73e-01
MRLPLVVPPVSPPRTPTNPRQPPTTSSGMQQMRREVAGTCITLLTGPSTSRRVTCRDRPASSADIAQGGTGVGGPNPAADREGGGHPSPQAKV

SEQ ID NO: 73514 - protein, 234 aa, Zea mays
  Coding DNA Sequence Number=SeqID_31735
  Gene Ontology: Mol. function=diacylglycerol kinase activity; Biological process=protein kinase C activation
  Homolog annotation: Hit_ID=Q94HY9; Match level="QueryCoverage=97%, HitCoverage=34%, E-value=1e-84, Identity=78%"; Hit description =Putative sphingosine kinase
  Subcellular localization annotation: CTP_CleavageSite=32; ConfidenceScore=5.03e-01
MQKSDHHEQKLTSPRGLIHKILRRTNSRRSPTAADQQPSPVSPETSNSSIFSKQKDVDDAIKDSEKLSTHTIRIEDEKSDLLGSEIYSGKLTLDNKTKSSSNEQSGSGSSSNCFDARLSTEALIWGSNILKLEDIVSVSYNYGLRYFTVHACPLEKISSGLSCFMKPRRTQTDLKFVSSSPHEAFRWVNSFCGSAMLLSTKDTCHLEILDLDMVDLAKFFMEKWNPYLRNRLYK

SEQ ID NO: 73515 - protein, 120 aa, Zea mays
  Coding DNA Sequence Number=SeqID_31736
  Gene Ontology: Mol. function=ribonuclease H activity
  Homolog annotation: Hit_ID=Q7XI37; Match level="QueryCoverage=95%, HitCoverage=91%, E-value=4e-47, Identity=71%"; Hit description =Putative FH protein interacting protein FIP1
MGRIAQISKVISEGGYDKIFQQTFECSPDEKLNKAYIAFGSDSPVKYVTEDNKTESSFYKVVLPLHHLRSVTPTASQQNPAERYIQVVSVDNHEFWFMGFVNYDSAVKNLQESVRVVHGA

SEQ ID NO: 73516 - protein, 276 aa, Zea mays
  Coding DNA Sequence Number=SeqID_31737
  Homolog annotation: Hit_ID=Q6F379; Match level="QueryCoverage=48%, HitCoverage=25%, E-value=3e-18, Identity=49%"; Hit description =Expressed protein
MNTIASSKVGRLISWYRNVWLAGMVQYLRSGDNDGSPRGLCYLVRPTSMPSTPHLSGTGPAYRFSPPPTLSLLCGPPLALPRIVSREAETRRRLRPRNRCDVFGPCPHPPSSRPPLRQLFSSLISSTRAQMMQINGNRAEPRSSEGLPHTLTRSASVVGASMHAPTTRSTCSSTARPPSTPSSRSRSTTSTPSPPRAHHRLRIRRPPPMPARPRAYAYSTAFLGFVVAHRKEWNTLWAEVPTALKLCVDPNKFIMDVVTDVFPVDRHEVRSSADLA

SEQ ID NO: 73517 - protein, 44 aa, Zea mays
  Coding DNA Sequence Number=SeqID_31738
MAGICPSFLLELRMTSILTAVFSQLEQLDLATVETDVDEKVKDK

SEQ ID NO: 73518 - protein, 123 aa, Zea mays
  Coding DNA Sequence Number=SeqID_31739
MPLASFLIATRTTTTSLGNAIRGYEGQWCTFEAQPYKSTLYTPLNQNLSVVFDNDDYFATTASPHPVWGTVGEPAKEEDDVDDVVRASLQEVLKTLFEIMLFEDVGNQCRLRRPILSLIMTSE

SEQ ID NO: 73519 - protein, 94 aa, Zea mays
  Coding DNA Sequence Number=SeqID_31740
MTEPPRSPSAPGADVDAHHTAEEHARTEQEAQDPALARALKADRKATVVKKEIEAAFERLRAAQEHMQPTSGPRLHHFGLRISLPMERLMSRHF

SEQ ID NO: 73520 - protein, 816 aa, Zea mays
  Coding DNA Sequence Number=SeqID_31741
  Gene Ontology: Mol. function=structural constituent of ribosome; Cellular component=nucleus; Biological process=translation
  Homolog annotation: Hit_ID=Q2QVD9; Match level="QueryCoverage=86%, HitCoverage=28%, E-value=0.0, Identity=68%"; Hit description =Expressed protein
MQLEGVFCPLKDQRTFVSSPKIRISPQGKYIATLDLTGFVNFFSLDGDLRTVPLQTLGKARHLIDVKDISWWTDNVLMLVRKDGSISMYSITEDKIVSNDDPVLSTPILEKAKATEGHAFVLQSRRYGTNTPVNKRMDSDSEPCLLSGSGEHQQTEGDEMSWSLISFSKVTVAEMYSVLIREKRYKDALDFASRYNLDKDEVLKACWLHSDANTHEIDSYLAKIKDQVFVLSECVNKVGPTEADLRALLSFGLCITDCYRFSELDNSSKGSTWDSRTIRLRLLRHIDMLETFLGINMGRYAAGEYSKFRSMPLVETAIALAESGKIGALNLIFKRHPYTVSSDILRVLSAIPETLAVQTYSQLLPGKSLPSVVILRAGDWVECEQMASYINNCPAELDKVEEIKTEILVKHSKGFSWPSVAELCEWYKNRARDIDCLSGQLENSLAMIELACQKGIVELQPFFDDIKCLYQVVYSNELNEFTMNLLTWEDLPDYEKFKIILKGVKEDTVVQRLEENAIRFMKKLYEHKQESYLVSWLKEVAAKNELLICLAVIENGCGESPIYGLFKDLAEMIETSVHCIYMCSATNQWNTMSSILSKSLYKTKREKSLVASEEDCNLKDAKHALGSSMVSYEEMQCVCADILSGLGNAPEDFYHYDSVPDKPNDVKYLDILEKRLKVAEGHVEVGRLFAYYQSAITVRILMDFHSLWDIVNSVELQPDVDDQPENRSKNQSCCGGCWSVMVWKLAASLLILALRQRGMDGCRRDAPLTSPLARRIDDVGLRRLLWLVGRLRAWRCQGSSVHGPSHMLMAPVHEFW

SEQ ID NO: 73521 - protein, 73 aa, Zea mays
  Coding DNA Sequence Number=SeqID_31742
MGKRETMRARAQLAAVMEVGVGWKKDESKRVRASYLFLNAQKFEKRYKIRLRKIRVVPISFWFLKKLHSSGTQ

SEQ ID NO: 73522 - protein, 160 aa, Zea mays
  Coding DNA Sequence Number=SeqID_31743
  Homolog annotation: Hit_ID=Q109P8; Match level="QueryCoverage=43%, HitCoverage=26%, E-value=2e-13, Identity=54%"; Hit description =Exonuclease family protein, putative, expressed
MATLATYFGIGKQKHRGLDHARMNLEVLKHCATVLLLESSLPDVLCAQQSRRAAVTRRTSQAQTIKPPPKHAVHHHLRPGGVVMSQTKLPFTAVTATPAPAAATPCGKRNSLGKVVARAVTAATTAPLSSSSSTSTNTRRPVTATTPFHMILRHSRAILR

SEQ ID NO: 73523 - protein, 135 aa, Zea mays
  Coding DNA Sequence Number=SeqID_31744
  Gene Ontology: Mol. function=nucleic acid binding; Cellular component= intracellular; Biological process=translation
  Homolog annotation: Hit_ID=Q8H6I0; Match level="QueryCoverage=99%, HitCoverage=7%, E-value=4e-49, Identity=71%"; Hit description =Putative gag-pol polyprotein
  Subcellular localization annotation: CTP_CleavageSite=43; ConfidenceScore=5.34e-01
MKKVVYYETDSSSPSTSSSDTPSVTSKRHERKKFSKIPLRYPRISKRTPLLSVPLGKPPVFNGEDYCMWSDKMRHHLTSLHASIWDIVEFGAQEPSVDDEGYDSDEVAQIRHFNSQATTILLTSLSREEYNKVQG

SEQ ID NO: 73524 - protein, 289 aa, Zea mays
  Coding DNA Sequence Number=SeqID_31745
  Subcellular localization annotation: CTP_CleavageSite=52; ConfidenceScore=5.38e-01
MSWPTSPPSARAGAGDQPGAAAGGARAAVQPAAAVGQAGVALGASRASSQAVAALGGAGSQAVPALGTSRAGSQAVPALGASHTGSHALAAAGGSRAGGQLGVPAVGARPVFQPAAGQRAAGSGRAASTKKARDDDQEIPGVGKFKNRPLQNEDDMKVMFGSIINEETDHWNPMSSNPIMPPSPDQSPHIDLENGEDNVEENGEENGEENGGQDIGDDIFEVSPTPSNKPKTKATIILDKPKKKSKTSTGLVIQEHISKISKSADAFVSFWLGGISIDEVMGHVMHTNL

SEQ ID NO: 73525 - protein, 66 aa, Zea mays
  Coding DNA Sequence Number=SeqID_31746
MGLDELMHIEGKRKGGEQGDLLDHQGKRLASRAPWEDLLHVERRREHGERHGRDGEDAMAAYAGGR

SEQ ID NO: 73526 - protein, 54 aa, Zea mays
  Coding DNA Sequence Number=SeqID_31747
MGTVDVCGDGVPRHVVCLGLPCSLEDMVAGVTWLSILPTGLDSQVGPYLGKGGA

SEQ ID NO: 73527 - protein, 178 aa, Zea mays
  Coding DNA Sequence Number=SeqID_31748
  Subcellular localization annotation: CTP_CleavageSite=57; ConfidenceScore=5.35e-01
MRKRNHCARKTPLFSRKGSPRTLEKSSWCTPSARTTRSLTKGPGPTSHVTKALASVRGKGKPSHPLPRHLGATAGGYSQHRQGQQNTPCMRGATEPPCVGATRWSTTKTDVTVGVASSELDTGFGPTYRLAPSPEVGPGATVGTSKQGYPFCSMKTLHPYDTPRSRGEQHPTPPHGQG

SEQ ID NO: 73528 - protein, 98 aa, Zea mays
  Coding DNA Sequence Number=SeqID_31749
MSSIPHARTHQEEIRRRQALVDEVSNVMVFGAGWKAAQQHGYNDDVEQAQQLIDEQQEGASFSVEKLGEEAVMPGCFRQPRRTARADSGGDARREASR

SEQ ID NO: 73529 - protein, 1256 aa, Zea mays
  Coding DNA Sequence Number=SeqID_31750
  Gene Ontology: Mol. function=ATPase activity, coupled to transmembrane movement of substances; Cellular component=integral to membrane; Biological process=transport
  Homolog annotation: Hit_ID=Q9LHD1; Match level="QueryCoverage=97%, HitCoverage=97%, E-value=0.0, Identity=59%"; Hit description =Multidrug resistance protein 13
  Pfam annotation: Domain name=ABC_membrane; Domain location=32-313; Score=126.5; E_value=7.2e-35; Accession=PF00664.13; Description=ABC transporter transmembrane region
  Pfam annotation: Domain name=ABC_membrane; Domain location=688-965; Score=113.9; E_value=4.6e-31; Accession=PF00664.13; Description=ABC transporter transmembrane region
  Pfam annotation: Domain name=ABC_tran; Domain location=1039-1223; Score=217.4; E_value=3.2e-62; Accession=PF00005.17; Description=ABC transporter
  Pfam annotation: Domain name=ABC_tran; Domain location=388-581; Score= 212.3; E_value=1.1e-60; Accession=PF00005.17; Description=ABC transporter
  Pfam annotation: Domain name=SMC_N; Domain location=1020-1232; Score=- 134.8; E_value=0.097; Accession=PF02463.9; Description=RecFRecNSMC N terminal domain
  Pfam module annotation: Pfam domain module=ABC_membrane::ABC _membrane::ABC_tran::ABC_tran::SMC_N; Domain location=32-313::688 -965::1039-1223::388-581::1020-1232
MDTGRRRAKKDDAAAALVALGSSVFVHADTVDVALMVLGLVGAIGDGMATPLRLLVASRIANDLGSGPDHLHHFTSRINANVIRIILIACASWVMAFLEGYCWARTAERQASRMRARYLQAVLRQDVEFFDLKPGSTSEVVTSVSNDSLVVQDALSEKVPNFAMYVTTFAGSYAVGFALLWRLTLVTLPSALLLIIPGVSYGRVLTGLARRIRERYALPGAVAQQAVSSVRTVYSFGAERATMARFSSALEESARLGLRQGLAKGVALGTNGIAFAIYAFNIWYGGRLVMYHGYPGGTVFVVSSLIVIGGVSLGSALSNVKYFSEATAAADRILEMIRRVPKIDSESAAGEELPNVAGEVEFRNVDFCYPSRPESPVLVDFSLRVPAGHTVALVGPSGSGKSTAITLLERFYDPSAGEVALDGVDIRRLRLKWLRAQMGLVSQEPALFAMSLRENILFGEEDATEEEVVAAAMAANAHSFISQLPQGYDTLSCAKRKQKQVGERGAQMSGGQKQRIAIARAILRSPKILLLDEATSALDTESERVVQEALDVASVGRTTILVAHRLSTVRNADSIAVMQSGAVQELGSHSELIAKNGLYSSLVHLQQNRDSSEDTGEAAGTRRASPSAGQCSSDDSKMAPSASCRSSSARSIIGDDARDGENTDEKPRPPVPSFGRLLLLNAPEWKHALVGSSCAVLSGAIQPIFAYGMGCTFSIYYSRDHEEIKDKTEKYAFVFLALVGISFLLNIGQHYSFGAMGECLTKRIRKQMLAKILTFEIGWFDHDDNSTGNICSQLAKDANIVRSLVGDRMALLIQTASMVVIAFTVGLVISWRLALVMIAMQPFIIACSYARRVLLKNMSTKSIQAQSETSKLAADAVSNLRTVTAFSSQGRVLRLFGQAQDGPHRESVRQSWFAGLGLSASVSLTIFSWALNYWYSGKLMAERLITVEAVFQATMILVTTGRVIADACSMTTDIAKGAEAVSSVFAILDRQTKIDPDSPEGYKPEKLIGEVEAVGVDFAYPSRPDVIIFRGFSLSMVAGKSTALVGQSGSGKSTIIALIERFYDPLKGVVNIDGRDIKAYNLQALRRHIGLVSQEPTLFAGTIKENIMLEAEAASEAEVEEAARSANAHGFISNLKDGYDTWCGDRGVQLSGGQKQRVAIARAILKNPAILLLDEATSALDSQSEKAVQEALDRVMVGRTSVVVAHRLSTIQGCDTIAVLDRGVVVEKGTHTSLMASGRSGTYFGLVALQQGGKQH

SEQ ID NO: 73530 - protein, 151 aa, Zea mays
  Coding DNA Sequence Number=SeqID_31751
  Homolog annotation: Hit_ID=Q6QP51; Match level="QueryCoverage=32%, HitCoverage=22%, E-value=2e-13, Identity=69%"; Hit description =Putative growth-regulating factor 1
MQAACNRTKGARPFDFGASSMEAQAHTSCNRRAGCYVQKTAPPLAPLPCLLDCGTSVATRGNPAHDPTVPTRHIDHGDRERGYPKRDPSPRRKRALSPPSDQRFEGWPLGRVQQPPQSTRAPRPLLVRGSKVGPSKGFNGRLRPLGLRAHY

SEQ ID NO: 73531 - protein, 164 aa, Zea mays
  Coding DNA Sequence Number=SeqID_31752
  Gene Ontology: Mol. function=binding; Cellular component=integral to membrane; Biological process=phagocytosis
  Homolog annotation: Hit_ID=Q6ZI33; Match level="QueryCoverage=99%, HitCoverage=39%, E-value=3e-53, Identity=71%"; Hit description =Putative transmembrane protein TM9SF3
  Pfam annotation: Domain name=EMP70; Domain location=1-122; Score= -331.1; E_value=0.002; Accession=PF02990.7; Description=Endomembrane protein 70
MAMTASLFPFMCFGIGLVLNTIAIFYGSLAAIPFVSFIEMYFVFTSFWNFKVYYVYGFMLLVFLILIIVTICVTIVGTYFLLNAENYHWQWTSFFSAASTAVYVYLYSIYYYHMKTKMSGFFQTSFYFGYTLMFCLGLGTLCGAVGYLGSTLFVRRIYRNIKCD

SEQ ID NO: 73532 - protein, 385 aa, Zea mays
  Coding DNA Sequence Number=SeqID_31753
  Gene Ontology: Mol. function=diacylglycerol kinase activity; Cellular component=intracellular; Biological process=protein kinase C activation
  Homolog annotation: Hit_ID=Q6ZI32; Match level="QueryCoverage=99%, HitCoverage=80%, E-value=1e-175, Identity=65%"; Hit description =Putative pentatricopeptide (PPR) repeat-containing protein
  Pfam annotation: Domain name=PPR; Domain location=11-45; Score=7.5; E_ value=0.96; Accession=PF01535.11; Description=PPR repeat
  Pfam annotation: Domain name=PPR; Domain location=115-149; Score =27.4; E_value=5.1e-05; Accession=PF01535.11; Description=PPR repeat
  Pfam annotation: Domain name=PPR; Domain location=150-184; Score=9.0; E_value=0.65; Accession=PF01535.11; Description=PPR repeat
  Pfam annotation: Domain name=PPR; Domain location=216-250; Score=7.8; E_value=0.89; Accession=PF01535.11; Description=PPR repeat
  Pfam annotation: Domain name=PPR; Domain location=80-114; Score=47.7; E_value=3.9e-11; Accession=PF01535.11; Description=PPR repeat
  Pfam module annotation: Pfam domain module=PPR::PPR::PPR::PPR::PPR; Domain location=11-45::115-149::150-184::216-250::80-114
MMGNGFRPDAVVLSSVLKACAHLGALERGRWVHRFLKAEGLGRSPDNVMLETALVDMYCKCGCMDEAWWVFDGVQSQDVVLWNAMIGGLAMNGHGKRALELFRRMLDMGFVPNESTFVVVLCACTHTGRVDEGKEIFRSMCDHGIEPRREHYGCLADLLGRAGLLEEAEAVLLDMPMEPHASQWGALMSSCLMHNNVGVGERVGKKLIELEPDDGGRYVVLFNLYAVNGLWEDAKALRKMMEERGAKKETGLSFIEWNGLVHEFRSGDTRHPQTRQIYALLEDMEQRLQLIGYVKDTSQVLMDMDDEEDKGNTLSYHSERLALAFGILNTPRHMPIRIVKNLRVCRDCHVYAKLVSKLYQREIIMRDRHRFHLFRGGVCSCNDFW

SEQ ID NO: 73533 - protein, 87 aa, Zea mays
  Coding DNA Sequence Number=SeqID_31754
MSDLIKSRKDKIQARSSKTKSRITNQSLCVPFLTNLEDEISVKGDRLGHLPIARRSTSAALEPPCTVAIVTARFTTGKDTSNYTAIT

SEQ ID NO: 73534 - protein, 225 aa, Zea mays
  Coding DNA Sequence Number=SeqID_31755
  Gene Ontology: Mol. function=RNA-directed DNA polymerase activity; Cellular component=chromatin; Biological process=RNA-dependent DNA replication
  Homolog annotation: Hit_ID=UPI00004C1732; Match level="QueryCoverage =80%, HitCoverage=11%, E-value=7e-30, Identity=41%"; Hit description =UPI00004C1732 related cluster
MPVATGIGPTLHKEQGGEAMPQEACCHLKRRLNWLITAIKNSTPLYSIITSHQAYPLRWITLPVTFGDPSNFCTERLQFEVVDFLGSYNTILGMSCYTKFMAIPNYTYLKLKMSESHMVIMVSASFKRIGRALGSSPQGAPDAPKDSSNTFKSAKDMKDVPIDATHISKCIRIGASLSDKLESAVVGFLQANHDVFVWKPTNMPKIPREVVEHTLNIQPMARLVA

SEQ ID NO: 73535 - protein, 496 aa, Zea mays
  Coding DNA Sequence Number=SeqID_31756
  Gene Ontology: Mol. function=serine-type endopeptidase inhibitor activity; Cellular component=mitochondrion; Biological process =negative regulation of cell proliferation
  Homolog annotation: Hit_ID=Q5VMT5; Match level="QueryCoverage=84%, HitCoverage=26%, E-value=0.0, Identity=74%"; Hit description =Putative Spo76 protein
  Pfam annotation: Domain name=HEAT; Domain location=101-138; Score =4.0; E_value=14; Accession=PF02985.12; Description=HEAT repeat
  Pfam annotation: Domain name=HEAT; Domain location=311-347; Score =3.1; E_value=18; Accession=PF02985.12; Description=HEAT repeat
  Pfam annotation: Domain name=HEAT; Domain location=352-388; Score =10.5; E_value=2.2; Accession=PF02985.12; Description=HEAT repeat
  Pfam annotation: Domain name=HEAT; Domain location=392-427; Score =14.1; E_value=0.5; Accession=PF02985.12; Description=HEAT repeat
  Pfam annotation: Domain name=HEAT; Domain location=434-465; Score =1.5; E_value=28; Accession=PF02985.12; Description=HEAT repeat
  Pfam module annotation: Pfam domain module=HEAT::HEAT::HEAT::HEAT::HEA T; Domain location=101-138::311-347::352-388::392-427::434-465
MELPPCSSPPNLASPGSSVAEAAAAGDGDRREQQHAVGKEMSVRIMREGGWCCTCVSHEGGDAAVLRLCEGEVESPQANVLQKAVECLHGIEQSPVSSVMEAIQPSLKAVTREELLKHEDDNVKVLLATCFCEITRITAPDAPYNDDILRDIFYLIVGTFGGLNDVNSQSFGRKVAILETVARYRACVVMLDLECDDLITNMFQTFLVVVSESHEEYIVKSMQTIMTLIIDESEDVHESLLRVLLSALGQKKTGAAMSARKLACSVIEHSATKLEPYLKKFLMSSWAGNVSSSNDQIDHQGVVFDLYQCAPKVLKVIVPYITGELLADEVDNRSKSVELLGEIFSLPGSPIVECFETLFTEFLKRLTDRVVEIRISVVEYLKRCLISNPSRAEAPEIIKALCDRLLDYEENVRKGVVAALCDVATHSPDAIPIDTIKVVAERVRDKSLAVKCYTMERLADIYKLYCQRGFDSSTNSDDFEWIPGKILRCLYDKDFR

SEQ ID NO: 73536 - protein, 69 aa, Zea mays
  Coding DNA Sequence Number=SeqID_31757
MAAVEQLKELGEKLQAVAPAPADELAKLLEVRYPQASPFWLAANLSHGVDGLGSGFAWICGSGGTIRQV

SEQ ID NO: 73537 - protein, 161 aa, Zea mays
  Coding DNA Sequence Number=SeqID_31758
MKKPNEGETMVKNRGEKKKPTSKIFNTYTNKVDKKAATPYLIKKKSGKGLQHPNTLSRIDDETSPRIDNKAFAHNALREDEGSLAAEAKSVAGDNSAPPRRGVKGPILDPTVPRAREKVNRTEVPKVKEKKRFLQVVMVNQAEKRHGALKTTTYGHGIKAM

SEQ ID NO: 73538 - protein, 281 aa, Zea mays
  Coding DNA Sequence Number=SeqID_31759
  Homolog annotation: Hit_ID=Q75J71; Match level="QueryCoverage=23%, HitCoverage=12%, E-value=1e-26, Identity=83%"; Hit description =Putative L-ascorbate oxidase
  Subcellular localization annotation: CTP_CleavageSite=80; ConfidenceScore=5.78e-01
RVDAYQISVAIFQRFYVPPPPSSPPNSRSAPRPPRPSPARLSSPDSPLSRNPRGLAPDHRPGSPEIRLDRRPSSRSSPTLSMEGESVRDSPISMQGASSAPDCCPGWLVPSFRLPPSTKSTREGSEASIAADPDAPHSGPSGDIGGSGGMIRGDSADLPAMDAAARPAIVIDNGTGLPHLAGRRSLAGAQHNRAAGRLGDWAWSINQARSFRWNLTASVARPNLQGSYHYDQINITRTIKVMVSRGHIDGKLHYGFNDISHRDTETPPQVRRVLQRHSRGV

SEQ ID NO: 73539 - protein, 233 aa, Zea mays
  Coding DNA Sequence Number=SeqID_31760
  Gene Ontology: Mol. function=peptidase activity; Cellular component =extracellular region; Biological process=proteolysis
  Homolog annotation: Hit_ID=Q8RWB6; Match level="QueryCoverage=99%, HitCoverage=70%, E-value=5e-62, Identity=56%"; Hit description =Putative serine protease-like protein
MQSEAWNGYRKPPSEQKYSEDVGHIHQGLNFEPTREELDSLSKACSRLWELDMNRIVPGKDYIIDCGEGKKVYQKGDMASESLFSWLGDDVLRKPTYSRFCALLDNYNPHQDKHEEIVFVEEIARTSLIKYLHRYLVQKGVVPQDYEDFKKMLTSLWFDLYGRGGNSSCSTAFEACVCWYSMTNLQFYLEEAKGNVDYQGEDNRVDIGPYSVNVKCYRLGNNKIGSTFPIAEN

SEQ ID NO: 73540 - protein, 232 aa, Zea mays
  Coding DNA Sequence Number=SeqID_31761
  Gene Ontology: Mol. function=calcium ion binding; Cellular component =membrane; Biological process=homophilic cell adhesion
  Homolog annotation: Hit_ID=UPI0000DA43ED; Match level="QueryCoverage =96%, HitCoverage=99%, E-value=3e-21, Identity=33%"; Hit description =PREDICTED: similar to keratinocytes proline-rich protein
MAPPVDVVGPCPGLGDVEAPPRSRSSLSSEAEVESEPLGRVRRRPSAEARAESEPWGRAKRSSSSSGAEPELEPWGRAKRSSSSSGAEPESEPWGRAKRSSSSSGAEPESEPWGRAKRSSSSSGAEPESEPWGRAKRSSSSSGAEPESEPWGRAKWSSSSSGAEPESEPWGRAKRSFLWRLRLGLAAVSLTLSSGSAVGAAQAALSSCQTGQWSGEVTAVTSALSTGGRASG

SEQ ID NO: 73541 - protein, 388 aa, Zea mays
  Coding DNA Sequence Number=SeqID_31762
  Gene Ontology: Mol. function=protein serine/threonine kinase activity; Cellular component=membrane; Biological process=protein amino acid phosphorylation
  Homolog annotation: Hit_ID=Q2QXA8; Match level="QueryCoverage=82%, HitCoverage=60%, E-value=1e-140, Identity=77%"; Hit description =Protein kinase family protein, putative, expressed
  Pfam annotation: Domain name=Pkinase; Domain location=116-362; Score =181.6; E_value=1.9e-51; Accession=PF00069.15; Description=Protein kinase domain
  Pfam annotation: Domain name=Pkinase_Tyr; Domain location=116-362; Score=180.7; E_value=3.7e-51; Accession=PF07714.7; Description =Protein tyrosine kinase
  Pfam annotation: Domain name=RIO1; Domain location=129-273; Score= -93.6; E_value=0.045; Accession=PF01163.12; Description=RIO1 family
  Pfam module annotation: Pfam domain module=Pkinase::Pkinase _Tyr::RIO1; Domain location=116-362::116-362::129-273
  Subcellular localization annotation: CTP_CleavageSite=35; ConfidenceScore=5.05e-01
MASVARTAVAAAGRPAAGRPHWRGTRWGRPGRGAQQAAPGEVSECQSCINCSHVLFSLLMFWNRDSQDADGLHKALEASILRNEGSWSGSSHSSAAERTLPFQVKGGEWEIDKRLLKMGGMVASGSCGDLYHGTYLGEDVAVKVIRAEHLNKNVWNEFTQELSRIASNLLKIFLASLFNQYKNNSICGEYMSGGSLYDFVHKQHNVLNLRTLLKFAVDVCRGMCYLHERGIIHRDLKTANLLMDKDHVVKVADFGVARFQDQGGVMTAETGTYRWMAPEVINHQPYDNKADVFSFAIVIWELITSKIPYESMTPLQAAVGVRQGLRPGLPKKTHPKVLDLMQRCWEADPSARPAFPDILAELEDLLAQVQGTPGKTAHAPSNNSNTKD

SEQ ID NO: 73542 - protein, 63 aa, Zea mays
  Coding DNA Sequence Number=SeqID_31763
MSRAFDDYYIKDCDIISALEMTQRRTDNNDQLIIIAVVGVWNVLFNDGTMAYIEVCMILMVAM

SEQ ID NO: 73543 - protein, 380 aa, Zea mays
  Coding DNA Sequence Number=SeqID_31764
MTINLNGNLNPQSLEGPCDLLHLLDVKKSGRGNHVQGEGPNWVLVAGGVLLSTLSVKVVCKLKQLLDGKQQNNTSEGLMPSHAPICSCNLDFVSVFFVRCLLTVQIAAKGRPEACKLHSDLYRFSDQTGCYYWLANGGVEVKQTPASPVPKSVESSLPLVKIPTPESSKENSGVMWISSPDRLEDPRRPFQYSNSSGSPCVSESGSDIYSKREVIQKLRQHLKKRDEMIMEMQTQIADLKNSLNIQVTQSSNLQSQLDAANRDLFESEREIQHLRKIIADHCVTEALSHDKPLQAAHWQPDAANGHSNGYGDGCVDDADLHCISIEKRKVEVERVEMLKKEVVELKEVIEGKDFVLQSYKEQKVELFSKIRELQEKLSAQ

SEQ ID NO: 73544 - protein, 138 aa, Zea mays
  Coding DNA Sequence Number=SeqID_31765
MGKSNKRKREPTPPSEDFGDSEYSEEEFSSESEGSPAPVSPPASSDDSDDSQGIAAEVWTYIQAVERSGLEGSDESEYSSDEEDSSDSSEEGGSGDGGDDDDDRGDGDDGDSSRGGDGGGGRGDNGGGSSKGSNKASG

SEQ ID NO: 73545 - protein, 131 aa, Zea mays
  Coding DNA Sequence Number=SeqID_31766
MAQPSAFNDSKTFAPGSHITFGSLDFLTTTIEVGILDPLEAVPRHQQCTATYSFDATAREVLDEMQLMEVCLTEKIVGRCGGVERRMNARCDELHSHFIVCCYTIQQQAYVVIYDKSSDHDGCGEELFYVN

SEQ ID NO: 73546 - protein, 98 aa, Zea mays
  Coding DNA Sequence Number=SeqID_31767
  Homolog annotation: Hit_ID=Q2QX50; Match level="QueryCoverage=64%, HitCoverage=23%, E-value=6e-08, Identity=48%"; Hit description =Expressed protein
MDGQLMTRFLFHCQQTNYVLDAPLGGADHDEPSCRPDGKNEKQKLRQRSTMEVVDYLIAKKKDSGLEKDLKKEERCNKAFALQEERIKLDKEKFAFQR

SEQ ID NO: 73547 - protein, 41 aa, Zea mays
  Coding DNA Sequence Number=SeqID_31768
MASDGNAMPIYANVWAVTCGFGDQRCWDVGAHSIASHDHLL

SEQ ID NO: 73548 - protein, 105 aa, Zea mays
  Coding DNA Sequence Number=SeqID_31769
WRLEAAAGGGDAMQSALTMGRARGEGGEDGRLSAHARRRAGMVGCAGGHGSGAYLQELRRRRQDVWGADVAPQHWRQDVWGTDVAEWVGVETGAFKGVDAHTAVL

SEQ ID NO: 73549 - protein, 137 aa, Zea mays
  Coding DNA Sequence Number=SeqID_31770
MGFPKLELGLSAMTKDQLADNLAYNSLKEDNIVIVVHVILLKHTRSCFTKLFVKDTSSYRRATPLKEPETEPFSEESEPRGGPRIMAAWATTQGAGPNFFRRARVRLPPLESGWTVLKSYKPAFAAVVLRRLYQSAL

SEQ ID NO: 73550 - protein, 155 aa, Zea mays
  Coding DNA Sequence Number=SeqID_31771
  Homolog annotation: Hit_ID=Q6QP51; Match level="QueryCoverage=99%, HitCoverage=79%, E-value=1e-32, Identity=55%"; Hit description =Putative growth-regulating factor 1
MMTASKKASPSEGFNSRPRARRVRDDPGYVRYMAEARATLPSRQGRSDRSHFALSLTNLTGKQRCSPRFGYRANHQGKTESRSPTSSTSGATGSSVSPDLRPREKVCASLDPRPRPREESPSSPDLGLDLRRSLRLARPQPRTDYATGDTSLPYS

SEQ ID NO: 73551 - protein, 135 aa, Zea mays
  Coding DNA Sequence Number=SeqID_31772
  Homolog annotation: Hit_ID=Q1SCA8; Match level="QueryCoverage=34%, HitCoverage=17%, E-value=1e-07, Identity=59%"; Hit description=Zinc finger protein 2-related
  Pfam annotation: Domain name=zf-C2H2; Domain location=38-60; Score =23.5; E_value=0.00074; Accession=PF00096.16; Description=Zinc finger, C2H2 type
MNTKGKSDRGGEEGVLDLNLSLQRTLVAPEPEPLMGYFVCTYCDKKFYSSQALGGHQNAHKLERSVAKRARELAAARRAGQGGERASAAEEEARMGIARTTVSSPRSSSSSHQIRMSPVASWNNLTDDIDLTLKL

SEQ ID NO: 73552 - protein, 528 aa, Zea mays
  Coding DNA Sequence Number=SeqID_31773
  Gene Ontology: Mol. function=transferase activity, transferring glycosyl groups; Cellular component=membrane
  Homolog annotation: Hit_ID=Q8H038; Match level="QueryCoverage=70%, HitCoverage=62%, E-value=1e-116, Identity=55%"; Hit description =Xyloglucan galactosyltransferase KATAMARI1 homolog
  Pfam annotation: Domain name=Exostosin; Domain location=106-450; Score=337.7; E_value=2e-98; Accession=PF03016.6; Description =Exostosin family
LMKPTTTFEFEANLQNQKNAGEGSDNPDGGTWVVLQPSRIVYIVMISTAFWAFVLYYYMQNGDGGVASVLFKPSAFSLPLLPSITGAQSPRPVQPEQKHAGPGQAPPPPVLADRCHGRSGWICARTWSTAAWARRWATRGAPSPARGWFATDQFSLDIIFHGRMKRYDCLTDDPSRAAAVYVPFYASLDGGRYQWNSTSIRDALGLDLVDWLARRPEWRAMGGRDHFLVAGRTAVDFGRNSDLDHEWGTKLLNFPAVENMTALVLETNQWKPKKRRNLAVPYPTYFHPESAADVVAWQEKVRNTERNWLFSFAGGPRPGNTETVRADIIQQCAASTRCRLFHCGAGPDAGANCSSPGGVMRVFESSVFCLQPRGDTLTRRSTFDTMLAGCIPVFFHPGSAYRQYTAHLPKDPNSYSVLIMHTDVTGRNVSIEDTLSNISPAAVKAMREEVIRLIPRLVYADPRSRRVDFTDAFDLATEAVINRVAKRRRGRVTGKASRAHRAMGREAGPFLTGCKVRPHQAPKNKGLP

SEQ ID NO: 73553 - protein, 763 aa, Zea mays
  Coding DNA Sequence Number=SeqID_31774
  Gene Ontology: Mol. function=RNA-directed DNA polymerase activity; Cellular component=nucleus; Biological process=RNA-dependent DNA replication
  Homolog annotation: Hit_ID=Q8S472; Match level="QueryCoverage=99%, HitCoverage=73%, E-value=0.0, Identity=81%"; Hit description =Putative gypsy-type retrotransposon RIRE2
  Pfam annotation: Domain name=Retrotrans_gag; Domain location=251-342; Score=72.0; E_value=1.9e-18; Accession=PF03732.7; Description =Retrotransposon gag protein
MPEDGDFPRPVPRADIPRELAVVPAPAGGYDPQLEQVREAQARLNEGTGALEPIRRGVGQVWAGQPPAGEIRHLPQGLQHRVANDVRVRPPPASSGVGQNLAAAAMLLRAMPEPSTTEGRRIQGELKNLLEGAAARRAESTASRRQGYPSEPHAATSRFMREASVYTGRTRNTVPAAPGHLGNEHHRRDRQAHLDERAFSRAIRRAPFPTRFRPPTTITKYSGETRPELWLADYRLACQLGGTDDDNLIIRNLPLFLSDTARAWLEHLPPGQISNWDDLVQAFAGNFQGTYVRLGNSWDLRSCRQQPGESLRDYIRRFSKQRTELPNITDSDVIGAFLAGTTCRDLVSKLGRKTPTRASELMDIATKFASGQEAVEAIFRKDKQPQGRPSEEAPEASTPRGAKKKGKKKSQSKRDAADADLVAAAEYKNPRKPPGGANLFDKMLKEPCPYHQGPVKHTLKECVMLRRHFHRVGPPAEGGRAHNDDKKEDHQAGEYPEVRDCFMIYGGHAANASARHRKQERREVCSVKVAAPVYLDWSDKPITFDQADHPDHVPSPGKYPLVVDPVVGNVRLTKVLMDGGSCLNIIYAETLKLLRVDLSSVRAGAAPFHGIIPGKRVQPLGRLDLPVCFGTPSNFRRETLTFEVVGFRGTYHAVLGRPCYAKFMAVPNYTYLKLKMPGPNGVITVGPTYKHAFECDVECVEYAEALAESEALIADLENLSKEVPDVKRHAGNFEPAETVKAVPLDPSGDTSKQIRIGSGLDPK

SEQ ID NO: 73554 - protein, 177 aa, Zea mays
  Coding DNA Sequence Number=SeqID_31775
  Subcellular localization annotation: CTP_CleavageSite=33; ConfidenceScore=5.14e-01
MVVLGRARDGTTGASTATKKWGLGARNPRGTVSAAGTKGGRLEVGPEKMARLEVMWGALQSAGKEERSRRGRDGRRRWGQWLPPSGERQWSPGGQASPRGRRCWPPAGKRGQGRSRGVAVVRSSGSRCLGRMSVRRDVRTPGLGFRRPLDLHPSMAFPLPRIHPTRGFPLGRIKQEP

SEQ ID NO: 73555 - protein, 484 aa, Zea mays
  Coding DNA Sequence Number=SeqID_31776
  Gene Ontology: Mol. function=transferase activity, transferring glycosyl groups; Cellular component=membrane
  Homolog annotation: Hit_ID=Q8H038; Match level="QueryCoverage=86%, HitCoverage=73%, E-value=1e-115, Identity=49%"; Hit description =Xyloglucan galactosyltransferase KATAMARI1 homolog
  Pfam annotation: Domain name=Exostosin; Domain location=91-439; Score= 387.5; E_value=2e-113; Accession=PF03016.6; Description=Exostosin family
MKPMKPSFQKDGADKVDGGTGGVLWPSRICYLVVLATTLWAVASILFPPSAFPHPLVSSVTVSHHPAPHDSASEDNRTATETADRCAGRYIYVYRLPPRFNDDIARGCRTLRPWMDMCPYMPNCGLGRLLGDEGGVFPGRGWYATDQFMLDVIFRCRMRRYECLTGDPARAAAVFVPAYASLDGGRYLWNSTATRDALALDLVAWLARRPEWRATGGRDHFLVAGRTAWDFLRKTDGDDDWGTKLLSIPAVRNMTALVLEIDPWTRSNNLAVPYPTNFHPATAADLRAWQEKARALDRRWLFSFAGAARPGSNKTVRAQIFQQCGASSRCGMFRCKKGSECEASPGAMMRLFESSTFCLQPRGDTTTRRSTFDAVVAGCIPVFFHPDSAYTQYADHIPADPERWSVLIMHTDVTDRNVSIEEALAKIPPAAVKAMREEVIRLIPRLVYADARSARADFKDAFDIALDVVLDRVAKRRRRDVDGR

SEQ ID NO: 73556 - protein, 93 aa, Zea mays
  Coding DNA Sequence Number=SeqID_31777
  Subcellular localization annotation: CTP_CleavageSite=37; ConfidenceScore=5.03e-01
MTRSWSHGSASRPDSYDTTFSSHRGPYVVLPCVGICSSEQRAQIIRKGRTVVLSTIAWAPSDMLCCGQHLLSRELGHPPILVDLLGRGLGLLG

SEQ ID NO: 73557 - protein, 560 aa, Zea mays
  Coding DNA Sequence Number=SeqID_31778
  Gene Ontology: Mol. function=transferase activity, transferring glycosyl groups; Cellular component=membrane
  Homolog annotation: Hit_ID=Q8LMZ1; Match level="QueryCoverage=99%, HitCoverage=99%, E-value=1e-179, Identity=54%"; Hit description =Putative exostosin family protein
  Pfam annotation: Domain name=Exostosin; Domain location=129-481; Score=450.6; E_value=2e-132; Accession=PF03016.6; Description =Exostosin family
MKRHNAGELPLSSPPGDGRRLLPKEEAEDKMDKYDKGRVRCSRLCFLFALAATVSILARHCYDAGPGRRRWCRRGAHRDRASVAKTSSKQGSPSGAHAHAHTEQRAGHPFARALAAADDKADLCGGQYIYVHDLPARFNKDMVQNCDKLSPWTDMCRYTTNGGFGPLLPGGKGAFQGTIAGWYDTDEHALDIVFHERIKRYECLTDDPSLAAAVFVPFYAGLDVARHLWGNNASARDELALDLAGLLAKSPEWRAMGGRDHFFVAGRATWDFRRKDDAHAEWGSRLLNLPAAKNMTALVVEASPWHLNDVAIPYPTSFHPASDEDLFFWQDRVRALDRSYLFSFAGVPRPGDAKSIEGHLVDQCRASDSCSLMECSTTGPDNRCESTASVMKLFQSSTFCLLPRGGTDTRRSAFDAMLAGCIPVFFHPGSAYVQYTWHLPKAHADYSVYIPEDDVRKKNESVEERLRKIPPETVREMRDAVVDLIPSVTYGDATSRLETTVKDAFDIAVAAVISKVTKLRRGIVEGRAEAEKLEKYSWKYPLLAEGQKAEDHHEWDPLFN

SEQ ID NO: 73558 - protein, 89 aa, Zea mays
  Coding DNA Sequence Number=SeqID_31779
MWPKIYTGINIKSSYQYCSCRRMVNTRRLWSPKDEQAWVHDRFDEMDMHGFHGDNYTTIFVSVFYQTNVHKYCGIPLHSAGSPFPATIH

SEQ ID NO: 73559 - protein, 50 aa, Zea mays
  Coding DNA Sequence Number=SeqID_31780
MVVKWSGRGKSQAKSHQGRPHDNNGFYESAWARGAQRYFKKYRASIVQDD

SEQ ID NO: 73560 - protein, 310 aa, Zea mays
  Coding DNA Sequence Number=SeqID_31781
  Homolog annotation: Hit_ID=Q7XRU4; Match level="QueryCoverage=28%, HitCoverage=64%, E-value=7e-40, Identity=90%"; Hit description =Membrane-anchored ubiquitin-fold protein 4 precursor
  Subcellular localization annotation: CTP_CleavageSite=40; ConfidenceScore=5.45e-01
LVAAAEGKDNFLLTSWAQASGAQPSASLPLLASPHQTLTRAPSPSSRLLAPAFGALTLSGRDPQGSGCVQETSQLLARDQEMAEKEGAKVGAEEMEEREQEGEAEEVEVKFRLFDGSDIGPVRCNAAATTVAALKDRVVADWPKDKSIIPKTASDVKLISGGKILENDKNVAQCRAPFGDLPSSAIPMHVVVQPSHRCWSLSVRYVCAFEDDDGAITAPGCLVWAKDKTFAWNNAATLLSFRTRFPHLVGTAVDIVLVKVARRVFAALSCCCYYEPGATGMSDSDRDVHLDVTVVPPSTSPDPSPELYRR

SEQ ID NO: 73561 - protein, 87 aa, Zea mays
  Coding DNA Sequence Number=SeqID_31782
MARDFHAVNLVYETVPWGSRGCISGPRAVVSLMLKGLVNGKHLCKEYISYFGLYKRNTYPELAVARGKSIPASTGRIGGREDLEYIS

SEQ ID NO: 73562 - protein, 100 aa, Zea mays
  Coding DNA Sequence Number=SeqID_31783
  Homolog annotation: Hit_ID=Q682E0; Match level="QueryCoverage=67%, HitCoverage=12%, E-value=8e-08, Identity=42%"; Hit description=MRNA, complete cds, clone: RAFL21-86-C08
  Subcellular localization annotation: CTP_CleavageSite=29; ConfidenceScore=5.18e-01
MAASSSCKVIDSHLHVWATPQQVRKQATRASPVSASWGSWRPAGGVQPKEEYPYFPGQEPTMRGDADFLLEVFTPANPTRGSGDGFSSGDGEFRISVTLI

SEQ ID NO: 73563 - protein, 58 aa, Zea mays
  Coding DNA Sequence Number=SeqID_31784
MPRIRVFRRGNLTGDDETAIGSHADATGVPGYVAQGRAMAVHQRGYPHQPQSLYGEMT

SEQ ID NO: 73564 - protein, 176 aa, Zea mays
  Coding DNA Sequence Number=SeqID_31785
  Gene Ontology: Mol. function=aminocarboxymuconate-semialdehyde decarboxylase activity; Biological process=metabolic process
  Homolog annotation: Hit_ID=Q682E0; Match level="QueryCoverage=60%, HitCoverage=30%, E-value=7e-42, Identity=76%"; Hit description=MRNA, complete cds, clone: RAFL21-86-C08
MGLAKAELREPSTLQVEASAAGRIGPLVANASPVYDVPSFDVIISSASLSFSLFGIVANLLERYMLRHVLEKCMSEAGVDGAVIVQPINHMFDHSLVTSVLKKYPSKFVGCCLANPADDGTGIKQLEHLIVQEKYRAVRFNPNLWPSGQKMTNEVGRSLFSKAGELGVPLGIMTMK

SEQ ID NO: 73565 - protein, 260 aa, Zea mays
  Coding DNA Sequence Number=SeqID_31786
KPAVAGIRVVRFRRRWRDRALPNRWHLKNAWKALNPDFRTPFASVEDAVSRLLPYHVFAEYEENDDLEGFFEHFEKQVLTFQRHDSSTCGRTHRAEEQLILGMSMVEDERRQLERLRAAVSQHQQQEAARARLALVQAQAQAQAQAQAAGGWHAFVAVGRGEGASRGQAVAMQQQETMMTPGAWQALTAAASRGEGGSNEQALIQAVMVQNMQRQRQQEMMAAAPRGVGATCGQALPPAMVTQLMQQHNQQEEDMMTTNL

SEQ ID NO: 73566 - protein, 78 aa, Zea mays
  Coding DNA Sequence Number=SeqID_31787
MKARSAIIQWTVRCAIGLSGESAGNGYPAPMVDSAKCYSELQCRGRSQSRKSEGHQTVRCRKRTKLQRSTSLRTLTVG

SEQ ID NO: 73567 - protein, 171 aa, Zea mays
  Coding DNA Sequence Number=SeqID_31788
  Subcellular localization annotation: CTP_CleavageSite=61; ConfidenceScore=5.54e-01
MVDTQGLWHSSHGRVFPHGYHASATWMRARLNRSAQRSSRSQQAAQVVTGLGKSQQPAPSVAASESAFASGATVSSASPDLGPRPSRGGLRLARPQGLAPASASEGGLGLAQPQGSALASTSEGGLRPRLTPGLGLDLDHGRNRVLAQPRPRPQEESPPRPTLGSDRPCHG

SEQ ID NO: 73568 - protein, 125 aa, Zea mays
  Coding DNA Sequence Number=SeqID_31789
  Subcellular localization annotation: CTP_CleavageSite=22; ConfidenceScore=5.32e-01
MQAACNRAKWAHFSDFQHAHASCNRRAGRYVQATAMPLAPLSRLLDCGTSGQEQRSRRQPSLRPIRGQRENPLSRREDDAPGFRSSNGSRTRNGRPANHSPRRINSAAGQAAPLAGEASDASPSP

SEQ ID NO: 73569 - protein, 671 aa, Zea mays
  Coding DNA Sequence Number=SeqID_31790
  Gene Ontology: Mol. function=RNA-directed DNA polymerase activity; Cellular component=intracellular; Biological process=RNA-dependent DNA replication
  Homolog annotation: Hit_ID=UPI00004C1731; Match level="QueryCoverage =99%, HitCoverage=48%, E-value=0.0, Identity=83%"; Hit description =UPI00004C1731 related cluster
  Pfam annotation: Domain name=RnaseH; Domain location=312-439; Score =4.2; E_value=2.4e-05; Accession=PF00075.14; Description=RNase H
  Pfam annotation: Domain name=rve; Domain location=479-637; Score =91.5; E_value=2.6e-24; Accession=PF00665.16; Description=Integrase core domain
  Pfam module annotation: Pfam domain module=RnaseH::rve; Domain location=312-439::479-637
MPFGLRNAGATYQRCMNHVFGQHIGWTVEAYVDDIVVKTRKSSDLLSDLEVTFRCLKAKGVKLNPEKCVFGVPRGMLLGFIVSERGIEANPEKIAAITSMGPIKDLKGVQRVMGCLVALSRFISRLGERGLPLYRLLRKAECFTWTPEAEEALGNLKVLLTNAPILVPPAAGEALLIYVATTTQVVSAAIVVERREEGHALPVQRPVYFISEVLSETKIRYPQIQKLLYAVILTRRKLRHYFESHPVTVVSSFPLGEIIQCREALGRIAKWAVEIMGEAISFAPRKAIKSQVLADFVAEWVDTQLPTVPIQPELWTMFFDGSLMKTGAGAGLPFISPLGKHLRYVLRLHFPASNNVAEYEALVNGLRIAIELGVRRLDARGDSQLVIDQVMKNSHCRDPKMEAYCDEVRPLEDKFYGLELNHIARRYNETVDELAKIASGRTMVPPDVFSRDLHQPSVKIDDTPEPDAPSARPEEPSAQSEAPSARPEAPSVQPEKAPGGYTHLLVAIDKFSKWIEVRPLNNIRSEQAVAFFTNIIHRFGVLNSIITDNGTQFTGRKFLDFCEDHHIRVDWAAVAHPMTNGQVERANGMILQGLKPRIYNDLNKFGKRWMKELPSVVWSLRTTPSRATGFTSFFLVYGAEAILPTDLEYGSPRTRAYADQSNQASREDSLD

SEQ ID NO: 73570 - protein, 180 aa, Zea mays
  Coding DNA Sequence Number=SeqID_31791
MVDLAGKAAAVTDPAVEATKKGWAAGRVQPGRGLRQLAARVRDSWPRVSVWILAHGLAATEREPRTGRTKQHRQCWSEEGCCRGGGEASRVYDSGSRFEELDRCWRGRRPATGGWPAAGDLSHRGRGGARGGVGVLQMGKERRRLGGGAATAQACSCRPLGSCPAIGGGVPGGNESLERS

SEQ ID NO: 73571 - protein, 92 aa, Zea mays
  Coding DNA Sequence Number=SeqID_31792
  Homolog annotation: Hit_ID=Q6F390; Match level="QueryCoverage=77%, HitCoverage=26%, E-value=8e-08, Identity=50%"; Hit description =Expressed protein
MLAVFDPTVAKCPEGLRSPPVAGAAAGAGGAGAGALMKGFSDSHDGAVTVSLGPSGALAYSAANQSPLVPSLLGIANGLGFRPVLRMLSTPI

SEQ ID NO: 73572 - protein, 231 aa, Zea mays
  Coding DNA Sequence Number=SeqID_31793
  Gene Ontology: Mol. function=nucleic acid binding; Cellular component= oxygen evolving complex; Biological process=DNA integration
  Homolog annotation: Hit_ID=Q10I04; Match level="QueryCoverage=99%, HitCoverage=14%, E-value=6e-97, Identity=76%"; Hit description =Retrotransposon protein, putative, unclassified
  Pfam annotation: Domain name=RVT_2; Domain location=1-165; Score =177.0; E_value=4.8e-50; Accession=PF07727.4; Description=Reverse transcriptase (RNA-dependent
MDVKSAFLNRPIKEEVYVEQPPGFEDSEYPNHVYKPSKALYGLKQDPRAWYECLRDFLITNDFKVGKVDPTLFTKTLENDLFVCQIYVDDIIFGSTNESTCEEFSRIMTQKFEMSMMGELKYFLGFQVKQLEEGTFLSQTKYTQDILNKFGMKDAKPIKTPMGTNGHLDLDTEGKSVDQKKEHIGDLPVLGKILGVLGFKETKFHSSFYRQSRVHCRRTLLRATTLDEANP

SEQ ID NO: 73573 - protein, 103 aa, Zea mays
  Coding DNA Sequence Number=SeqID_31794
  Subcellular localization annotation: CTP_CleavageSite=76; ConfidenceScore=5.74e-01
MVTPLCPTPATTRTFRLSVARFLVPRVPSPPSPPDSLAWTALRNTGERAATSSQVKVSLPLPDPTRSVEHLVGVLVVMEVEPALERLSGGDTRGGNRSDPGQG

SEQ ID NO: 73574 - protein, 189 aa, Zea mays
  Coding DNA Sequence Number=SeqID_31795
  Gene Ontology: Mol. function=translation initiation factor activity; Cellular component=eukaryotic translation initiation factor 2 complex; Biological process=translation
  Homolog annotation: Hit_ID=Q2WEA7; Match level="QueryCoverage=91%, HitCoverage=51%, E-value=4e-79, Identity=85%"; Hit description =Eukaryotic translation initiation factor 2 alpha
  Pfam annotation: Domain name=EIF_2_alpha; Domain location=125-182; Score=-25.4; E_value=0.011; Accession=PF07541.2; Description =Eukaryotic translation initiation factor
  Pfam annotation: Domain name=S1; Domain location=13-88; Score=51.4; E_ value=3e-12; Accession=PF00575.13; Description=S1 RNA binding domain
  Pfam module annotation: Pfam domain module=EIF_2_alpha::S1; Domain location=125-182::13-88
MPNLECRMYEQRFPEVDAAVMIQVKHIADMGAYVSLLEYNNIEGMILFSELSRRRIRSISSLIKVGRQEPAIVLRVDRDKGYIDLSKRRVSEEEAHACEDRYNKSKLVHSIMRHVAETLEVDLEPLYQRIGWPLYRKYGHAFEAFKLIVADPDAILDVLTYEEKEVGPDGQENTILSLFIVRPLQSPLF

SEQ ID NO: 73575 - protein, 207 aa, Zea mays
  Coding DNA Sequence Number=SeqID_31796
  Gene Ontology: Mol. function=structural constituent of ribosome; Cellular component=ribonucleoprotein complex; Biological process =translation
  Homolog annotation: Hit_ID=Q9XET4; Match level="QueryCoverage=99%, HitCoverage=100%, E-value=1e-92, Identity=84%"; Hit description=40S ribosomal protein S7
  Pfam annotation: Domain name=Ribosomal_S7e; Domain location=4-206; Score=267.7; E_value=2.3e-77; Accession=PF01251.8; Description =Ribosomal protein S7e
MYTARKKIQKEKGLEPSEFEDSVAQAFFDLENGNQELKSDLKDLYINNAIQMDVTGSRKAVVIHVPYRLRKAFRKIHVRLVRELEKKFSGKSQVCKNAYHAFYLAQDVVIVATRRIVRPPKKGSAVLRPRTRTLTAVHDGILEDVVYPAEIVGKRVRYRLDGSKIIKIFLDPKERNNTEYKLETCTAVYRRLCGKDVVFEYPMTENA

SEQ ID NO: 73576 - protein, 301 aa, Zea mays
  Coding DNA Sequence Number=SeqID_31797
  Gene Ontology: Mol. function=binding; Cellular component =mitochondrial inner membrane; Biological process=transport
  Homolog annotation: Hit_ID=Q10MS8; Match level="QueryCoverage=88%, HitCoverage=96%, E-value=1e-108, Identity=57%"; Hit description =Mitochondrial carrier protein, expressed
  Pfam annotation: Domain name=Mito_carr; Domain location=141-229; Score=105.8; E_value=1.3e-28; Accession=PF00153.17; Description =Mitochondrial carrier protein
  Pfam annotation: Domain name=Mito_carr; Domain location=234-290; Score=8.4; E_value=0.00059; Accession=PF00153.17; Description =Mitochondrial carrier protein
  Pfam annotation: Domain name=Mito_carr; Domain location=45-137; Score= 87.6; E_value=3.8e-23; Accession=PF00153.17; Description =Mitochondrial carrier protein
  Pfam module annotation: Pfam domain module=Mito_carr::Mito_carr::Mito_ carr; Domain location=141-229::234-290::45-137
MAADFRTPDRLLPAATEEPTTPQGHPPNPVLSTPTVPDATHDGLRFWQYMLAGSVAGVVEHTAMFPVDTLKTHMQASTPPCRPTLSLRAALRNAVAGEGGALALYRGLPAMAFGAGPAHAVYFSVYEFAKSALTDRLGPNNPAAHAASGVVATVASDAVLTPMDTVKQRLQLTSSPYTGVGHCIRTVLRDEGPSAFFVSYRTTVVMNAPYTAVHFATYEAAKRMLGDMAAEEESLAVHATAGAAAGALAAAVTTPLDVVKTQLQCQAGPTVDGGVAGGLWWWRQQLERRGGGGNLPTEPMA

SEQ ID NO: 73577 - protein, 401 aa, Zea mays
  Coding DNA Sequence Number=SeqID_31798
  Gene Ontology: Mol. function=RNA-directed DNA polymerase activity; Cellular component=intracellular; Biological process=RNA-dependent DNA replication
  Homolog annotation: Hit_ID=UPI00004C1733; Match level="QueryCoverage =99%, HitCoverage=29%, E-value=0.0, Identity=94%"; Hit description =UPI00004C1733 related cluster
  Pfam annotation: Domain name=RVT_1; Domain location=55-224; Score =147.1; E_value=4.6e-41; Accession=PF00078.17; Description=Reverse transcriptase (RNA-dependent
MPGIPREVAEHSLDIRAGARPVRQPLRRFDEKRRVIGEEIHKLIAAGFIKEVFHPEWLANPVLVRKKGGKWRMCVDYTGLNKACPKVPYPLPRIDQIVDSTAGCKTLSFLDAYSGYHQIRMKESDQLATSFITPFGMYCYVTMPFGLRNAGATYQRCMNHVFGKHIGRTVKAYVDDIVVKTRKASDLLSDLEATFRCLKAKGVKLNPEKCVFGVPRGMLLGFIVSEQGIEANPEKIVAITSMGPIKDLKGVQRVMGCLAALSRFISRLGERGLPLYRLLRKAECFTCTPEAEEALGNLKALLTKVPILVPPAAGEALLVYVAATTQVVSAAIVVERQEEGHALPVQRPVYFVSEVLSETKIRYPQVQKLLYVVILTRRKLRHYFESHPITVVSSFPLGEII

SEQ ID NO: 73578 - protein, 93 aa, Zea mays
  Coding DNA Sequence Number=SeqID_31799
MGNRRTGEREREGRAGGASWWRKNAVTGAEEATGALVSTQGLSSSSSSREQEPREAATPGGSESAARKVREEDSEYYRGSRRRRRRHRVYRKP

SEQ ID NO: 73579 - protein, 187 aa, Zea mays
  Coding DNA Sequence Number=SeqID_31800
  Gene Ontology: Mol. function=translation initiation factor activity; Cellular component=eukaryotic translation initiation factor 2 complex; Biological process=translation
  Homolog annotation: Hit_ID=Q2WEA7; Match level="QueryCoverage=95%, HitCoverage=45%, E-value=2e-61, Identity=70%"; Hit description =Eukaryotic translation initiation factor 2 alpha
  Pfam annotation: Domain name=EIF_2_alpha; Domain location=2-79; Score= 87.1; E_value=5.3e-23; Accession=PF07541.2; Description=Eukaryotic translation initiation factor
MCLKLLVKDSLVKNIRRRMTPQPLKIRADIEMKCFQFDGVLHIKQAMKKAEAAGNDNCPVKIKLVAPPLYVLTTQTLDKVDIILVLNIFLTGKGSDYWLSFCWKDQGISVLTDAVKACTAEIEKYKGKLVVKEPPRAVSEREDKLFLDQIDSLMEQNAEVDGDVDSEEEEDTGMGNVDLTNSGVTAY

SEQ ID NO: 73580 - protein, 256 aa, Zea mays
  Coding DNA Sequence Number=SeqID_31801
  Homolog annotation: Hit_ID=Q10MS9; Match level="QueryCoverage=83%, HitCoverage=85%, E-value=1e-83, Identity=65%"; Hit description =Expressed protein
MPPPGPRLPLLLLILLLLGAACSCGLTVTGAGEGGSCEFSVARGSELYSFDLAAPTPAHRHGVLSEDGFYKVAVNDSILWFQLCDEMLFNFDPPMCLNCEDCGGPLRCGTQCSALVSNNIGGYDVCTTIGGLSKSHISLVDEGNPRKGIIVKMFSSKCSISVSVICDSNAIQATTLEHPSGCPRSVSASGSGWGWLSTLFITILCLLGGYILIGAVYRYYFLGIHSVEAIPNLEFWIGLPQRIKTVFVPATRSHMQ

SEQ ID NO: 73581 - protein, 161 aa, Zea mays
  Coding DNA Sequence Number=SeqID_31802
MERESCETTSIEFVVWQPCTRGNEARDVSAGSLIVKTTGSIQEEPEAKTTCMWRRDSMFTGMIDSTELRSHGSSSSLAGCGSSHSRCSSMEEAMREQQERFRKEGSGVLSHNTPPLVIPAPGQACGGEETTTEETPNQIDDFVNNFFASGGSGHNSNDPYM

SEQ ID NO: 73582 - protein, 204 aa, Zea mays
  Coding DNA Sequence Number=SeqID_31803
  Gene Ontology: Mol. function=oxidoreductase activity, acting on other nitrogenous compounds as donors, with NAD or NADP as acceptor; Biological process=nitrate assimilation
  Homolog annotation: Hit_ID=P16081; Match level="QueryCoverage=65%, HitCoverage=16%, E-value=2e-24, Identity=53%"; Hit description =Nitrate reductase [NADH] 1
MSQRRVPHCMDVEMALRPVQAHFLAHPVMLLVLVGHAYQRHGEFQGLELRHQLLHGQLGGASHESHEPHHHVCRLSMSSCAISHDTKGSKLKGCLPVSRTSAGWRRTHASDVASPRESQTTGSTSRHRRYDDRQSGGNVVFFHGIKIGAGATLASWATGAEHVEALGRHNGRPRVGGQVPLNRGRHYRHELRERFLIVMSRARG

SEQ ID NO: 73583 - protein, 87 aa, Zea mays
  Coding DNA Sequence Number=SeqID_31804
MVAGTYDMHGCEDMAEQIMLSAWLMAGRTHVYVLPNEPELVDTEMWRLTNVVEGLGSSLARHFEAEVVPPPPSLTAVVPPAGPPPTA

SEQ ID NO: 73584 - protein, 732 aa, Zea mays
  Coding DNA Sequence Number=SeqID_31805
  Gene Ontology: Mol. function=transferase activity, transferring glycosyl groups; Biological process=metabolic process
  Homolog annotation: Hit_ID=Q9AR73; Match level="QueryCoverage=39%, HitCoverage=61%, E-value=4e-69, Identity=45%"; Hit description =Hydroquinone glucosyltransferase
  Pfam annotation: Domain name=UDPGT; Domain location=32-509; Score= -86.8; E_value=3e-06; Accession=PF00201.9; Description=UDP -glucoronosyl and UDP-glucosyl transferase
GRIKVDDRRALEVSKKYTTAQALHFKLPPSPGHHRWRTGGGAHKPFLPCSSSPLSLHRSFRQPAHLTCARAMGPACKTAARPRVLLLCSPCMGHLIPFAELARRLVADHGLSTTLLFASATSPPSEQYLAVAAAVPDAVDLIALPAPPPDALPPATAARERAELAVASNVPRVREIARGAGRGGAARRARGGHARAGEHRDAAEPIRLPGCVPIHAHELPTSMLADRSSSAYAGFLSMAKGVAGVDGVLVNTFRELEPAVGGDGRLQLPVYPVGPLVWTRPAGVDTDHECMSWLDGQPRGSVAYVSFGSGGTITWQQTAELALGLELSQCRFIWAIKRPHQSSTIAAFFGTQRGDEHSPLDFLPEGFMERTRGMGLVAQSWAPQTAILGHPSIGCFVTHCGWNSVLESVINGVPMVAWPLYAEQNMNAAMMEVQVGVALRAKVGADRFIRKDEVANAIRRAIVGEEAERLRKRSSELRRQSAQALSKDGCSTRPLSSLDWLLSPPPAASLSTSRDLVSCSRHLGCSPSPCHRQGSSRFRPCCKYCRMMLQGASHRGPSPLRGGLGAGVIVASLTTTKSTHARTPSVASVVAAPVIGSGIIAFGLPLPVHRVNCSVQCDHPQQTSTCAKDTSANATAFVLGEKPTRISGTKIHRETNLSTNEAVAGTFEADSRQMMSTEQTIEVPSDTFTLLQAITSVEDVVLVEDASYDEEATLVMQTTFDGPIFITTIDYG

SEQ ID NO: 73585 - protein, 41 aa, Zea mays
  Coding DNA Sequence Number=SeqID_31806
MSLSLWCGGVEHRDGVNDEGEGHAGNQYWIVLHSASVFWSL

SEQ ID NO: 73586 - protein, 418 aa, Zea mays
  Coding DNA Sequence Number=SeqID_31807
  Gene Ontology: Mol. function=oxidoreductase activity; Biological process=response to red or far red light
  Homolog annotation: Hit_ID=Q673G2; Match level="QueryCoverage=86%, HitCoverage=99%, E-value=5e-82, Identity=49%"; Hit description=GA 2 -oxidase 5
  Pfam annotation: Domain name=2OG-FeII_Oxy; Domain location=271-365; Score=94.7; E_value=2.9e-25; Accession=PF03171.10; Description=2OG -Fe(II) oxygenase superfamily
RPPPSSLPPPSRFRPKSLSELDQKPPSQYVHSHHLPVQRQSVTHNHNHTMVVLTKGELEQIALPAVQRASPPPPAAVPEVDLAAGDAAAAARAVAKACEDHGFFKVTGHGVPPHLLARLEAAAAAFFALPQREKDRAAGCPFGYASKRIGANGDLGWVEYLLLAVTAAGAAAAPGSACEGAEPSCFRCPCSMSLMTRAYFLHPPPCVAPAKRGKETSSSWCPLNLCCTSAVLDEYVAAVRRMTCTVLQLMAQGLGLDDRDVFSRLVLDRDSDSMLRVNHYPPAAETRRLTGFGEHTDPQIISVLRSNDASGLEITLRDGTWVSVPSDTESFFVNVLTNGRFRSVRHRVMVSSARPRVSVIFFGGPPPRERLAPLPGLVDREGGRRRYREFTWREYKNSAYRTKLADNRLCSFETMATS

SEQ ID NO: 73587 - protein, 117 aa, Zea mays
  Coding DNA Sequence Number=SeqID_31808
  Subcellular localization annotation: CTP_CleavageSite=46; ConfidenceScore=5.04e-01
MAKWASRHGPARARPGTVRGLIVPCPCRPSVPDARPRHGTTYQAVPARARHQPCRAVLRAGPISPARLAIYSCGGDGRECRPLGWLLGLPFALLAVLVSVVGAIIWIIGQVPFLTAP

SEQ ID NO: 73588 - protein, 148 aa, Zea mays
  Coding DNA Sequence Number=SeqID_31809
  Gene Ontology: Mol. function=binding
  Homolog annotation: Hit_ID=Q2R3K8; Match level="QueryCoverage=75%, HitCoverage=21%, E-value=8e-10, Identity=40%"; Hit description =Armadillo/beta-catenin-like repeat family protein, expressed
MAAMRCSGSEWRRSRRGPLGDRSATRAEAALALAELCGNAGKAGLRQEAVVADAVSRLVWRLEAKPAGERDATARELAAVLGASGGCHKAFRKDECGVVKRGAAAGPLRARRGDVTRQGEDAWRVPTDVTLAGASTSAVCMCSYFYVL

SEQ ID NO: 73589 - protein, 406 aa, Zea mays
  Coding DNA Sequence Number=SeqID_31810
  Gene Ontology: Mol. function=protein serine/threonine kinase activity; Cellular component=membrane; Biological process=protein amino acid phosphorylation
  Homolog annotation: Hit_ID=Q60EZ1; Match level="QueryCoverage=97%, HitCoverage=98%, E-value=1e-146, Identity=67%"; Hit description =Putative serine/threonine-specific protein kinase
  Pfam annotation: Domain name=Pkinase; Domain location=121-382; Score =45.9; E_value=2.7e-11; Accession=PF00069.15; Description=Protein kinase domain
  Pfam annotation: Domain name=Pkinase_Tyr; Domain location=121-382; Score=31.4; E_value=2.1e-14; Accession=PF07714.7; Description =Protein tyrosine kinase
  Pfam module annotation: Pfam domain module=Pkinase::Pkinase_Tyr; Domain location=121-382::121-382
MTDGSDEYKRDESVILLVIVSLAALSLLSLIAAFAYYCYITRKVSRRLQSLHLPKRSSSPPPPPPPRALPPPQQQGKDSPFSSSASDGAAAAAAAMSVVVAGERGVQVFSYRQLHAAMGGFGRAHMVGQGSFGTVYRGVLPDGRKVAVKLMDRPGKQGEEEFEMEVELLSRLRSPYLLGLIGHCSEGGHRLLVYEFMANGGLHEHLYPTRGSCGGISKLDWDTRMRIALEAAKETSRVAIFSWTRTSMQEFSDFGLAKLGSDRAGGHVSTRVLGTQGYVAPEYALTGHLTTKSDVYSYGVVLLELLTGRVPVDMKRPPGEGVLVNWALPMLTDREKVVRILDPALEGQYSLKDAVQVAAIAAMCVQPEADYRPLMADVVQSLVPLVKNRSNQKACNPNVQSSKPLD

SEQ ID NO: 73590 - protein, 105 aa, Zea mays
  Coding DNA Sequence Number=SeqID_31811
  Subcellular localization annotation: CTP_CleavageSite=20; ConfidenceScore=5.38e-01
MATLQAQPQPSHVATAQPASADAPGTTGATSICPQRTLAPNAYHVRPACPHTLSLMQPRLLALLHLPHTLEEFHACLLCSHGRNGTTTRVVGSHQDVCYLPLLKE

SEQ ID NO: 73591 - protein, 133 aa, Zea mays
  Coding DNA Sequence Number=SeqID_31812
  Gene Ontology: Mol. function=aminoacyl-tRNA ligase activity; Biological process=tRNA aminoacylation for protein translation
  Homolog annotation: Hit_ID=O82108; Match level="QueryCoverage=86%, HitCoverage=25%, E-value=9e-49, Identity=89%"; Hit description=Seryl- tRNA synthetase
  Pfam annotation: Domain name=Seryl_tRNA_N; Domain location=1-72; Score=-11.1; E_value=0.021; Accession=PF02403.12; Description=Seryl -tRNA synthetase N-terminal domain
MAWQFELDKIRQELNATSKKIGKLKASKQEEEAKKLMDSTDEIKKRLAAKEVEVQEAKSTLDAKVMTICNIVHESVPFSDGEANNKIVRAFGEKRVEDNLKNHVDLCRMLDIVALEKAWCVVHLIEMKSNLWT

SEQ ID NO: 73592 - protein, 700 aa, Zea mays
  Coding DNA Sequence Number=SeqID_31813
  Homolog annotation: Hit_ID=Q5SN38; Match level="QueryCoverage=93%, HitCoverage=80%, E-value=9e-76, Identity=31%"; Hit description=TA9 protein-like
MKGRPSAVVTAILPSHQVTGLKQPLHIYRGKAYYVCSNVAQADAKNTFQPPSQVKHGWGGVPGRPSMAEIVKMGRPQAKVGSRSVASSIVMPAIGDSAIPNTPNLAPNEYNQTVFASEVGHGAADKLPNVADEVHSVSKDASSLDMLPSAEGTDVEAPSMSANMQGSSTPDANEDDVEKDTNLEEGNTESLTTPGQVSASGKDLNGDVSTTTTQFDHLTLLDGPKLSDENPAVIIPGHLQVSNADCAHLTFGSFVYGTLDASLTTKPLESHGDIVTIPDDDYDQSEGRHVPSFSFILCTLFLSCISYKPFIFRIHDDESKVTLAPAANEYVTSTSNSNVENLDITSVQQSEVTRSNFLDVTSNTEYNLSSPPDYATSSAALQDSTSQSYLQENRQFQSISPLPSFMQIQNGLMSPAIPPLREFDPAFSLLLTNPPIMHGTTSSSMSSATVSTQPQENANPVGLPNPQLTQSQPSTSIAPGPPLPQHLLHPYAQTTLPLGYASMIGYPSLPPSYAYLPPAAFQQPYMNSGMFLHQAAAAVPNSSVKYPLPQYKSNIALASLPQPGSLLSSYVGGFGTANNMPGNFPLNQSTTSATATLGFDGTVPSHLEDGNQFVCLQQNENPAMWMHGAGSRGMPPLAASTMYGYQGQSHQTGLRQGQLPSQYGSALGQSQPGLGPEHRNPSDSNLSGAAQANQMWPNSY

SEQ ID NO: 73593 - protein, 58 aa, Zea mays
  Coding DNA Sequence Number=SeqID_31814
MGEGLGEVDHGVEGDHGKETPAHRLERRRPWGNCRAADEHRFNIGINGLDQKEIDFSI

SEQ ID NO: 73594 - protein, 504 aa, Zea mays
  Coding DNA Sequence Number=SeqID_31815
  Gene Ontology: Mol. function=pyridoxal phosphate binding; Cellular component=chloroplast; Biological process=amino acid metabolic process
  Homolog annotation: Hit_ID=Q94I39; Match level="QueryCoverage=98%, HitCoverage=100%, E-value=1e-172, Identity=64%"; Hit description =Putative cystathionine gamma synthase (O-succinylhomoserine (Thiol)- lyase)
  Pfam annotation: Domain name=Aminotran_5; Domain location=108-439; Score=-193.4; E_value=0.017; Accession=PF00266.9; Description =Aminotransferase class-V
  Pfam annotation: Domain name=Beta_elim_lyase; Domain location=119 -442; Score=-126.6; E_value=0.036; Accession=PF01212.11; Description =Beta-eliminating lyase
  Pfam annotation: Domain name=Cys_Met_Meta_PP; Domain location=73-502; Score=492.1; E_value=6.4e-145; Accession=PF01053.10; Description =CysMet metabolism PLP-dependent enzyme
  Pfam module annotation: Pfam domain module=Aminotran_5::Beta_elim _lyase::Cys_Met_Meta_PP; Domain location=108-439::119-442::73-502
  Subcellular localization annotation: CTP_CleavageSite=55; ConfidenceScore=5.64e-01
MTSSVMAPSSKLVKTTSLPSHQRSLVQPLRSPRHKRISAMRRALESSMPQEELVTAAAGDADHQPRARRASDETLAVHAGEKLGKKDAGVGGSGTGIETDSMATPIVSGTTHWFKSSEDLIAFKEGRRHSFEYGRYSNPTVKVLEEKISALERAEATLVTSSGMNAITTTLLALVPPGGHVVTTTDCYGEARAFIRDRLSVMGAIRSTFVDLDDDMESLKAVLDENDDVALFYADSPTNPLLKCVDIRHVAELCHRKGALVCIDSTMASPINQKPLTLGADLVLHSATKYMAGHHDVIAGCISGSEALFSRIRAWHHQLGGAISPVCVHRRAAVRRRQMILYVQHAILTLSKQSCRTRHIRSSVGSKTMALRVEAHNSTALRMARMLERHPKIERVHYPGLESSPWHEVARTQMSGYGGVVRLELKADLRGTMSFVDALEIPFIATSLGGCESLVQQPAVMSFWGRSQEDKTKNGIKDNLVRFSFGIEKFEDLQDDILQALNRI

SEQ ID NO: 73595 - protein, 172 aa, Zea mays
  Coding DNA Sequence Number=SeqID_31816
MLHFMHTPRGDLQYPDSILSDSSSMINTGLLTVFSNDGALDDVVATDDNKEEDGIMHRLWWRAISFTLARSPARGQSEGPQHMKGAHRIPAHVSQGHKLSQTARSKSLQDEGGTTSRGQGCSVQVKVVLEGSGAQASPRHRLGPSVYLARLKLDSNRKLLTSNETARSIVLH

SEQ ID NO: 73596 - protein, 467 aa, Zea mays
  Coding DNA Sequence Number=SeqID_31817
  Gene Ontology: Mol. function=pyridoxal phosphate binding; Cellular component=chloroplast; Biological process=amino acid metabolic process
  Homolog annotation: Hit_ID=Q94I39; Match level="QueryCoverage=90%, HitCoverage=85%, E-value=0.0, Identity=76%"; Hit description =Putative cystathionine gamma synthase (O-succinylhomoserine (Thiol)- lyase)
  Pfam annotation: Domain name=Aminotran_1_2; Domain location=105-402; Score=-110.0; E_value=0.072; Accession=PF00155.11; Description =Aminotransferase class I and II
  Pfam annotation: Domain name=Aminotran_5; Domain location=102-453; Score=-189.1; E_value=0.01; Accession=PF00266.9; Description =Aminotransferase class-V
  Pfam annotation: Domain name=Beta_elim_lyase; Domain location=113 -405; Score=-125.5; E_value=0.03; Accession=PF01212.11; Description =Beta-eliminating lyase
  Pfam annotation: Domain name=Cys_Met_Meta_PP; Domain location=68-465; Score=557.4; E_value=1.4e-164; Accession=PF01053.10; Description =CysMet metabolism PLP-dependent enzyme
  Pfam module annotation: Pfam domain module=Aminotran_1_2::Aminotran _5::Beta_elim_lyase::Cys_Met_Meta_PP; Domain location=105-402::102 -453::113-405::68-465
  Subcellular localization annotation: CTP_CleavageSite=50; ConfidenceScore=5.45e-01
MAPSSKLVKTNSLPSHQRSLVQPLGSPRHKRVSALFRAPESSLLQEEFVTAASGEAHHQARARRASDETLAVHAGEKLAGKKDADVGGTGTETDSTATPIVSGTTHWFKSSEDLIAFKEGRRHSFEYGRYSNPTVKVLEEKISALERAEATLVTSSGMNAITTTLLALVPPGGHIVTTTDCYSEARVFIRDRLSMMGAIRSTFVDLDDGMKSLKAVLDENDDVALFYTDSPTNPMLKCVDIRHVAELCHRKGALVCIDSTMASPINQKPLTLGADLVLHSAIKYMAGHHDAIAGCVSGSEALITRIRAWHHHLGGVISPSAAYMVIRGLKTMALRVEAHNSTALRMARMLERHPKIERVHYPGLESSPWHELARTRMSGYGGVVSFELKADLRGTMRFVDALEIPFIATSLGGCESLVQQPAVMSFWGHSEEDKAKNGIKDNLVRFSFGIEKFEDLRDDILQALNKI

SEQ ID NO: 73597 - protein, 87 aa, Zea mays
  Coding DNA Sequence Number=SeqID_31818
  Subcellular localization annotation: CTP_CleavageSite=48; ConfidenceScore=5.08e-01
MGRGRRGSGWPSRADGKRKRSLRPPSKDFGDSKYSKEASSESDWSPARTSPRRHSRTRMTPWGCPPWPRHNFGGSMPNTNNGLTSLL

SEQ ID NO: 73598 - protein, 57 aa, Zea mays
  Coding DNA Sequence Number=SeqID_31819
MYPHTTSIHHTGPQEEVQVGIVEELPGILVEEGEPKAEAYEFPDHRPSSFEKGKGVD

SEQ ID NO: 73599 - protein, 81 aa, Zea mays
  Coding DNA Sequence Number=SeqID_31820
MANEMVSTAWRFANGDVRSTRAGENRRTMTSTVVLEAFSKLEQRLQVCALDVEEVATWFTDNGGLQTLVCQHYTKQWKLAV

SEQ ID NO: 73600 - protein, 697 aa, Zea mays
  Coding DNA Sequence Number=SeqID_31821
  Gene Ontology: Mol. function=RNA-directed DNA polymerase activity; Cellular component=mitochondrion; Biological process=RNA-dependent DNA replication
  Homolog annotation: Hit_ID=UPI00004C1731; Match level="QueryCoverage =97%, HitCoverage=45%, E-value=0.0, Identity=82%"; Hit description =UPI00004C1731 related cluster
  Pfam annotation: Domain name=RnaseH; Domain location=213-340; Score =3.6; E_value=2.7e-05; Accession=PF00075.14; Description=RNase H
  Pfam annotation: Domain name=rve; Domain location=434-593; Score =121.5; E_value=2.4e-33; Accession=PF00665.16; Description=Integrase core domain
  Pfam module annotation: Pfam domain module=RnaseH::rve; Domain location=213-340::434-593
MGPIKDLKGVQRVMGCLAALSHFISRHGERGLPLYRILRKTERFAWTPEAEEALGNLKALLTNAPILVPPTAGEALLIYVAATTQVVSAAIVVERREEGHALPVQRPVYFISEVLSETMICYPQIQKLLYAVILTRRKLRHYFESHLVTVVSSFPLGEIIQCREASGRIAKWAVEIMGEAISFAPQKTIKSQVLADFVAECVDTQLPAAPIQPELWTMFFDGSLMKTGVGAGLLFILPLGKHLCYVLCLHFRVSNNVAEYEALVNGLRIAIELGVRRLDARGDSQLVIDQVMKNSHCRDPKMEAYCDEVRRLEDKFYGLEVNHIARQYNETADELAKIASGRTTVPPDIFSRDLHQPSIKTDDTPEPEKASAQPEAPSAQPEAPSAQPEAPSAPEGFYWPTAVADATRIVRTCQGCQFYAKQTHLPAQALQTIPITWPFAVWGLDLVGPLQKAPGGYTHLLVAIDKFSKWIEVRPLNSIRSEQAVAFFTNIIHRFGVPKSIITDNGTQFTSRKFLDFCEDHHNRVDWAAVAHPMTNGQVERANDMILQRLKPRIYNDLNKFGRRWIKELPSVVWSLRTTPSRATGFTPFFLVYGAEAILPTDLEYGSPRTRAYNDQSNRTNREDSLDQLEEARDMALLHSARYQQSLRRYHARGVRSRDLQVGDLVLRLRQDARGWHKLTPPWEGTFVIAKVLKPGT

SEQ ID NO: 73601 - protein, 148 aa, Zea mays
  Coding DNA Sequence Number=SeqID_31822
  Homolog annotation: Hit_ID=Q3PEH7; Match level="QueryCoverage=46%, HitCoverage=95%, E-value=5e-15, Identity=69%"; Hit description =Hypothetical protein precursor
MAFSVENRSYGQTIRSKAPPPTYSSRWRRADIEVPNLPVDVDSWGRSTCYPYSNFYPLSDDPSTRHRRITKADFRLCSTGESCSQAHFCLCTRGPMSVWPEEQGSNRMKTLVWLLGATAPQLQQHCSRSGRSPMKTRPAGSFLWFILD

SEQ ID NO: 73602 - protein, 644 aa, Zea mays
  Coding DNA Sequence Number=SeqID_31823
  Gene Ontology: Mol. function=hydrolase activity, acting on glycosyl bonds; Biological process=negative regulation of protein biosynthetic process
  Homolog annotation: Hit_ID=Q53PQ0; Match level="QueryCoverage=93%, HitCoverage=91%, E-value=2e-27, Identity=38%"; Hit description=RRNA N-glycosidase (EC 3.2.2.22) (B-32.152)-maize, putative
  Pfam annotation: Domain name=RIP; Domain location=2-274; Score=24.0; E_value=9.6e-09; Accession=PF00161.9; Description=Ribosome inactivating protein
MERIVYDVVEGDYGEFIKVLRRVLAEYEPAGDRQSVLDYQHAPHPVLPRQRSPRRPARWILITLRVRDEGHETTLAVRDDNVYLIGFSNRRGKWFEFGFGGGDGGCRSAQVLPADWSSTFLECDVGYGGMMVGGAMRLVGLGLGMCFARDAVRRLSSYEQEPGVQVDDRTKRHLARLIVMVCEAARMIPHCETVLDDWDRSSAAITERQVHLLWNWGRMSHAVLIWDWWSRHGSWNGIPPPWPPELLAPQVDVRNVGQALQIVQLLLNWSEAGPTALPSWQPPPPPQETAGEGDDSSDNLGRYWNGGATIPHVLGQQAGQCRLEIFGVRAGFYMRGAATISVFDGKRGQVIYSNNDDDKLDGDDDIAGRRRTMLGSLDHENGDCDSHHGRHFSEWRMFAQLRSFYNRAGVGFGGWAISAYGSVSVEIDSSTTTDSSNSYIELGISTAEIDYVRIDVSKKDTRRSSDDDGRTTTTLLWDCYNEEGDDVAYDTVLTRTISTSHGPVDVTYAVLSNAVEATVQVRLILLAGQGDGIILVHGRITAGYQDLRARSVLFCQDAEEKVAIVTGGDGSHVVPLSRSVVAVPLTSLLLIEAALHTSVASSNHTAKAEGHPLPEPIVARFRPEPAGQDEVQRFGIDGGHVEIK

SEQ ID NO: 73603 - protein, 59 aa, Zea mays
  Coding DNA Sequence Number=SeqID_31824
MAPPWGASPRRRSPARGGKQISDIDRTFNGSDHYVNWNMERPPGKTVLPQGYNGTPLAD

SEQ ID NO: 73604 - protein, 77 aa, Zea mays
  Coding DNA Sequence Number=SeqID_31825
MAANFMAGTLSQVHGSTDPAQNSWSYQSAVHHPEGDEGHMQPFITRPSKAKPHLITVASIAMHSLGRVPEQFFVHFP

SEQ ID NO: 73605 - protein, 169 aa, Zea mays
  Coding DNA Sequence Number=SeqID_31826
MGKNKKDRGSSHRSDDKWKREPSPPSEDFGDSEYSEEEFSSESEGSPVYASPPVSSDDLDDSQGIAAEVWTYIWFVERSGLEGSDELEVSLDEENSSDSSEEGGGDSNDEGDGGNGGGGGDDSDDDGVGTRSSEQVDPTEEWRECLQSLTGNGNSSVNLPAQGYCTGYL

SEQ ID NO: 73606 - protein, 67 aa, Zea mays
  Coding DNA Sequence Number=SeqID_31827
MTHRLQPQPLRGLLCGVLLPAQAPPPAPRYGICSSFSTQTLHIKKQTPLGFIVGTDEQPPALSWAAL

SEQ ID NO: 73607 - protein, 99 aa, Zea mays
  Coding DNA Sequence Number=SeqID_31828
MEAAASSLSTLLSTLRVDGPWTPPGTWESAIPESGAARVTDLGGRLQPIYELASVTDDALIHLALHALYGVKSSLDEIEELSVLFSSNPADRTSNRVTN

SEQ ID NO: 73608 - protein, 504 aa, Zea mays
  Coding DNA Sequence Number=SeqID_31829
  Gene Ontology: Mol. function=electron carrier activity; Biological process=electron transport
  Homolog annotation: Hit_ID=Q6EPG5; Match level="QueryCoverage=99%, HitCoverage=99%, E-value=1e-148, Identity=57%"; Hit description =Aluminum-activated malate transporter-like
  Pfam annotation: Domain name=UPF0005; Domain location=63-462; Score =405.4; E_value=8.5e-119; Accession=PF01027.11; Description =Uncharacterised protein family UPF0005
MAAAAKGRPISAPPEWRVTVPEGASVAVEHEAAACRAARAWAWLVSCVLAFWDRGLGFGRRVWRIGADDPRRAVHGLKVGLALTLVSVFYYSRTLYDGVGGAAMWAVLTVVVVFEYTVGGCVYKGFNRAFATASAGAVALGVHWIASKSGDKLQPFITSGSVFLLAAMATFSRFIPTVKARFDYGVTIFILTYSLVAVSGYRVDALLAMAQQRMCTIAIGVSMCIAICALICPVWAGQELHRATVRNMDRLADAVEACVDDYFAAGAGAEASSKPNTKADEGYKCVLNSKASEDAQANLARWEPAHGRFAFRHPYDQYRSVGAAMRHCAYCVEALRGCVRSSAAAPCHASRRHLAGACTRVAGQCAAVLRAASTSVNTMAAPSRGLDLAVLEMGAAVEELQADLRTLPSSLLLAAEATAAAEPAAPTTMVMVGAAQLFTIASLLVEVSVRIEGVVDAVDTLANLAGFDLESAGDENEKPAEPAKNVTEQSEGNNNGSTTMKMPA

SEQ ID NO: 73609 - protein, 133 aa, Zea mays
  Coding DNA Sequence Number=SeqID_31830
  Subcellular localization annotation: CTP_CleavageSite=51; ConfidenceScore=5.12e-01
MAIGQRDRSLWQVLFNVKAQKAVWASVMASPRTVVSIPLARPTFSSHCFHHAQEISGPSDRGFAPFLEHLLLLHTRAGEAGGSPAAASTRTRTVTFLLSRDKCSFVADNNLATVALYHSYTLAFSDLYSMEWE

SEQ ID NO: 73610 - protein, 116 aa, Zea mays
  Coding DNA Sequence Number=SeqID_31831
  Homolog annotation: Hit_ID=Q6H831; Match level="QueryCoverage=65%, HitCoverage=33%, E-value=9e-17, Identity=59%"; Hit description =Kinesin motor protein-like
MDATGIGGGGKAKNGATRRKVGEPSKKSAWSLSYRDIFYNNLNKFSLFNPQAIKQKQQSLSLEAHDYCVNAIPDLSNMIKAVQGLVAQCEDLKLKCYEEMDKRKKLYNIVQETKGL

SEQ ID NO: 73611 - protein, 114 aa, Zea mays
  Coding DNA Sequence Number=SeqID_31832
  Gene Ontology: Mol. function=DNA binding; Biological process =regulation of transcription
MQAQLLQRRHSCTGDEQEEFLRPPPPLKRARMGYESMQGLGSHGVSDARTAAAAGGLYCIDDYMQAMAAMGWRIKEEGLTRWQWQRRDAAAPSDLQAMGCLVQEPDPFKACLDP

SEQ ID NO: 73612 - protein, 647 aa, Zea mays
  Coding DNA Sequence Number=SeqID_31833
  Gene Ontology: Mol. function=binding; Cellular component =intracellular; Biological process=metabolic process
  Homolog annotation: Hit_ID=Q6ETD1; Match level="QueryCoverage=96%, HitCoverage=94%, E-value=1e-130, Identity=32%"; Hit description =Putative pentatricopeptide (PPR) repeat-containing protein-like protein
  Pfam annotation: Domain name=PPR; Domain location=140-174; Score =33.9; E_value=5.7e-07; Accession=PF01535.11; Description=PPR repeat
  Pfam annotation: Domain name=PPR; Domain location=241-275; Score =25.4; E_value=0.0002; Accession=PF01535.11; Description=PPR repeat
  Pfam annotation: Domain name=PPR; Domain location=342-376; Score =36.5; E_value=9.2e-08; Accession=PF01535.11; Description=PPR repeat
  Pfam annotation: Domain name=PPR; Domain location=377-411; Score=9.8; E_value=0.52; Accession=PF01535.11; Description=PPR repeat
  Pfam annotation: Domain name=PPR; Domain location=413-447; Score=5.3; E_value=1.7; Accession=PF01535.11; Description=PPR repeat
  Pfam annotation: Domain name=PPR; Domain location=78-112; Score=8.2; E_value=0.8; Accession=PF01535.11; Description=PPR repeat
  Pfam module annotation: Pfam domain module=PPR::PPR::PPR::PPR::PPR::PP R; Domain location=140-174::241-275::342-376::377-411::413-447::78-112
MASSALKNLATGRPNGREDIIRLCSTGRVKEALHRRFREGLWSEPGLFSHIFRACQALPLLRQLHAFAATSGAAADRFTANHLLLAYADLGDFPTARGLFERIPKRNVMSWNILIGGYVKNGDLETARKLFDEMPARNVATWNAMVAGLTNSGLNEESLGFFFAMRREGMQPDEYGLGSLFRCCAGLRDVVSGRQVHAYVVRSGLDRDMCVGSSLAHMYMRCGFLRDGEAALRALPSLNIVSCNTTISGRTQNGDAEGALEFFCLMRGAGVEANAVTFVSAVTSCSDLAALAQGQQIHALAIKTGVDKVVPVMTSLVHMYSRCGCLGDSERVCLEYSGTDLVLCSAMISAYGFHGHGQKAVGLFKQMMAAGAEPNEVTFLTLLYACSHSGLKDEGMNCFELMTKTYGLQPSVKHYTCIVDLLGRSGCLNEAEDLILSMPVQPDGVIWKTLLSACKTQKKFDMAERIAERVIELDPHDSASYVLLSNIRATSSRWEDVSKVRETMREQNVRKEPGVSWVELKGQIHQFCTGDESHSRQREIVECLEEMMTRIRQCGYAPDMSMVFHDMEDEEKEVSLAHHSEKLAIAFAFLSLPEGVPIRVMKNLRVCDDCHVAIKLMSKVIGREIVVRDVSRFHHFKDGKCSCGDYW

SEQ ID NO: 73613 - protein, 149 aa, Zea mays
  Coding DNA Sequence Number=SeqID_31834
MAVTSADEVGGGAVASAHVVAAQAGNRVAAAAVAAQGRGVEEGPEARDVGGPTTASSGRGPGGDQRGDRDQGGTDRRQGGDACAQARSDARSWADSSACWQGRDSARALAGSQAGGDGDLAGRGGRALAPARWEMCAMAGARRGGGGGT

SEQ ID NO: 73614 - protein, 200 aa, Zea mays
  Coding DNA Sequence Number=SeqID_31835
  Gene Ontology: Mol. function=transferase activity, transferring hexosyl groups; Biological process=carbohydrate biosynthetic process
  Homolog annotation: Hit_ID=Q8LF94; Match level="QueryCoverage=91%, HitCoverage=54%, E-value=1e-68, Identity=65%"; Hit description =Avr9/Cf-9 rapidly elicited protein 231
  Pfam annotation: Domain name=Glyco_transf_8; Domain location=1-169; Score=102.7; E_value=1.1e-27; Accession=PF01501.10; Description =Glycosyl transferase family 8
PLNYARIYLADLLPRSVSRVLYLDSDLLVVDDVARLWATDLGPDAALAAPEYCHANFTSYFTDAFWSHPEYTAVFANRTRVPCYFNTGVMVIDLDRWRSGGSRRARIYELGSLPPFLLVFAGEVKAVEHRWNQHGLGGDNVAGQCRQLHPGPVSLLHWSGKGKPWLRLDAGRPCPLDALWMPYDLLRRRGARDDLLAAVS

SEQ ID NO: 73615 - protein, 146 aa, Zea mays
  Coding DNA Sequence Number=SeqID_31836
  Gene Ontology: Mol. function=protein disulfide oxidoreductase activity; Cellular component=chloroplast; Biological process =glycerol ether metabolic process
  Homolog annotation: Hit_ID=Q6H7E4; Match level="QueryCoverage=80%, HitCoverage=67%, E-value=2e-47, Identity=74%"; Hit description =Putative Thioredoxin M-type, chloroplast
  Pfam annotation: Domain name=Thioredoxin; Domain location=40-143; Score=134.7; E_value=2.5e-37; Accession=PF00085.10; Description =Thioredoxin
MTTFMLMYSFIAEKAPKHPVLLCASRDPCMCMGDYDLLYYVPDVTKSTWQSLVIESELPVLVEFSAAWCGPCKMIEPVVGKLSKDYEGKLKCYKLNTDESPDIASQYGVRSIPTTMIFKDGEKKDSVIGAVPESTLVTCIEKFVER

SEQ ID NO: 73616 - protein, 84 aa, Zea mays
  Coding DNA Sequence Number=SeqID_31837
  Homolog annotation: Hit_ID=Q6I569; Match level="QueryCoverage=72%, HitCoverage=11%, E-value=5e-13, Identity=61%"; Hit description =Putative microtubule-associated protein
MKNSLAFSSSESHFQTDTENEFKAIQSKIVRLRAEISGAIDHGDPTHVVDENDLSLKRLGELKEHLNDLQTEKNGRLQKIDIHK

SEQ ID NO: 73617 - protein, 81 aa, Zea mays
  Coding DNA Sequence Number=SeqID_31838
MWWSGSERADSALAHRETDHGRGASQRLNYGVVFTVKSLQGAQDLVKETYSPLQWNENYTYTRELVERTWTSAECKVQGQL

SEQ ID NO: 73618 - protein, 92 aa, Zea mays
  Coding DNA Sequence Number=SeqID_31839
MVHIVATKTQIKNKWDRLKEFKAWKKLMRKTCTGHSKLWELQNMEELEICFGSITSIGVDHWSPHMATAFTIAEQGAEAVGEFGKSTGRDKQ

SEQ ID NO: 73619 - protein, 234 aa, Zea mays
  Coding DNA Sequence Number=SeqID_31840
LQVQAFNKAKQPYVIRPWTWAANRPTAILQHEANNHWKSTPENRDKLSSESGFWRPYLQAGCWRRRAGDGGGAEGDDAAVSPVTGSAPPSPVPLGFLPRQLVAWFVSFVPGRCSVGSWLCCFCSRGGNWEKGTWTGPLESIAGLIWSSTNEEFQDECIGLLGLGSEYDVSEGPVRSSICEKMIHIIEMNDTKENAEDNVPYLFECEKLDGGSELDAKHSRRQLATLQLAKLVYI

SEQ ID NO: 73620 - protein, 183 aa, Zea mays
  Coding DNA Sequence Number=SeqID_31841
MESPIAVSRGAERRLDRGYRVGAELTYFSWAVFTGSRPGLQIRPCCRMSESPCRLIRLWSPASTQPNEFFAIIFRIRGWGANWKEFLELDALARETPVEKWDGTLLITTTGINDEAIYRYRINLQEEISSARLSKLATTYRNHARFSGTEVCLCLSNDADVDDFILWLVGFFRKVFCHIYLYA

SEQ ID NO: 73621 - protein, 172 aa, Zea mays
  Coding DNA Sequence Number=SeqID_31842
  Homolog annotation: Hit_ID=Q5QNA6; Match level="QueryCoverage=46%, HitCoverage=6%, E-value=9e-18, Identity=58%"; Hit description=SCAR -like protein 2
MYQECLDCCILTLFSSTYSRLSACFLGSGQPDSRVEAKAIAGMYKIVYVCHETILRLMDSLKKLAKKLGIALFAIDEVHSCVWYSRNVPHENGHGKSLGTKLHTLGSLPSRVLLNGTDGDDHSDHLKQGFVTGGMVARSSNVKCDEKAVIIMSTSFVYCDNVVMDKAEDEEP

SEQ ID NO: 73622 - protein, 560 aa, Zea mays
  Coding DNA Sequence Number=SeqID_31843
  Gene Ontology: Mol. function=protein serine/threonine kinase activity; Cellular component=nucleus; Biological process=protein amino acid phosphorylation
  Homolog annotation: Hit_ID=Q5Z9J0; Match level="QueryCoverage=70%, HitCoverage=78%, E-value=1e-169, Identity=71%"; Hit description =Mitogen-activated protein kinase 12
  Pfam annotation: Domain name=Pkinase; Domain location=27-262; Score =141.2; E_value=2.8e-39; Accession=PF00069.15; Description=Protein kinase domain
  Pfam annotation: Domain name=Pkinase_Tyr; Domain location=27-260; Score=-64.3; E_value=1.6e-08; Accession=PF07714.7; Description =Protein tyrosine kinase
  Pfam module annotation: Pfam domain module=Pkinase::Pkinase_Tyr; Domain location=27-262::27-260
MPLPVESHRKDSVEMEFFTEYGEASQYQIQEVIGKGSYGVVAAAVDTRTGERVAIKKINDVFEHVSDATRILREIKLLRLLRHPDIVEIKHIMLPPSRREFQDIYVVFELMESDLHQVIKANDDLTPEHHQFFLYQLLRALKYIHAGLCGNEVYTPAIDIWSIGCIFAELLTGRPLFPGKNVVHQLDIITDLLGTPSSETLSRIRNEKARRYLSCMRKKYPVPFTHKFRNADPLALRLLERLLAFDPKDRPTAEEALADPYFASLANVEREPSRHPISKLEFEFERRKLAKDDVRELIYREILEYHPQMLEEHMQGGEQISFLYPSGVDRFKRQFAHLEEHYSKGERGSPLQRKHASLPRERVVVSKDGDTDQHINDQERSADSVARTTVSPPRSEDDDMSDVKSTSLSSRSYLKSASISASKCVVATKKHPEVVPPPLLTFGFSARTMESLRKWKAPSMDCLKRSPGCTRKQDCPWQQQPCCKVSVSGTLYSDDSLGKANTVCHTAVQHTVLRGWVLLAYIHPQLVRLYLGGRGTHHRLMALSSSSAFPPCHASAAWHL

SEQ ID NO: 73623 - protein, 35 aa, Zea mays
  Coding DNA Sequence Number=SeqID_31844
MTKCTFGLIEGKSTSVTHERIQVNVKSMGALFIYL

SEQ ID NO: 73624 - protein, 76 aa, Zea mays
  Coding DNA Sequence Number=SeqID_31845
MVVFYLGLELVSGEDLDRGGLGQGRRAGGPGHGSGVDAKGWAWELGAGESWGAGVPCGGGATRGRRGRCQGEPHLP

SEQ ID NO: 73625 - protein, 35 aa, Zea mays
  Coding DNA Sequence Number=SeqID_31846
FHNADVEVKVVLRWRILSLGDNLFFFYDFFLVFYT

SEQ ID NO: 73626 - protein, 48 aa, Zea mays
  Coding DNA Sequence Number=SeqID_31847
MANSIRARTADGGQWRELATEKSGPAAEVEVRLNSNLNSKFVMSFTFE

SEQ ID NO: 73627 - protein, 239 aa, Zea mays
  Coding DNA Sequence Number=SeqID_31848
  Gene Ontology: Mol. function=oxidoreductase activity; Cellular component=intracellular; Biological process=electron transport
  Homolog annotation: Hit_ID=Q5JN40; Match level="QueryCoverage=51%, HitCoverage=17%, E-value=3e-60, Identity=94%"; Hit description =Putative glucose inhibited division protein A
  Pfam annotation: Domain name=GIDA; Domain location=34-204; Score= -73.5; E_value=4.2e-13; Accession=PF01134.12; Description=Glucose inhibited division protein A
  Subcellular localization annotation: CTP_CleavageSite=32; ConfidenceScore=5.47e-01
MARPSPPGHAATSWPRIPLQAPGSVPPPAHPRQRRGTSVACVEDLPPPLRLEEWQALLCLQHCRDVVDAAHLRQGRRTPVVEVEDLTPPPRLEAFTLSRYPSPSLPPSYFEFWGQGFSTGLPERLQLSLVRTIPGLENCLMLRPAYAVEYDYLPAYQCSRSLMTKKIEGLFFSGQINGTTGYEEAAAQGIISGINAARHSDGKSLIILERESSYIGTLIDDLVTKDLREPYRMCLIKYD

SEQ ID NO: 73628 - protein, 45 aa, Zea mays
  Coding DNA Sequence Number=SeqID_31849
MANVRIRGSKSVLALATKGELKIWRGRLYGLQILNRNKGTKFVEA

SEQ ID NO: 73629 - protein, 131 aa, Zea mays
  Coding DNA Sequence Number=SeqID_31850
  Subcellular localization annotation: CTP_CleavageSite=46; ConfidenceScore=5.61e-01
MSQWSNGSLRAKGRLQKSIVANSATQKSERRSRRSPDCPVWHRTVRCNKRTTSPTVKKLQTPTAALTWRAPDSEQRLSDHAKKEITTGDKSMGLGRTISKESDNKYKEESSSSIKSHRRGDKKKKMKDVVY

SEQ ID NO: 73630 - protein, 275 aa, Zea mays
  Coding DNA Sequence Number=SeqID_31851
VRDWVDRIAADWRFRRIIPCHFAAPINASRSDFLAAFAFLDEFLPERAAAAPGLSLLLASFMGKAASYFPPDDMKTLSSLDEFLVSVGAVKKTVSGRKRLQCSVHKTEGEGHRQGVMECLGCLHEQAHAKVCFTRQGVEQQAHYDHRHRSSTLHRPKRLLRRLLLSDTDRSSILHGRTSRNQPSLVDFVEARPPLAHVHPTRFTLAVARRAAGNGGDLTSAMTKTTVQCGQVLSQEEAERIYLRRGAAAPQQRRRDADHSEESNARMTPSAAAEL

SEQ ID NO: 73631 - protein, 207 aa, Zea mays
  Coding DNA Sequence Number=SeqID_31852
MAMSMATAFTQGGRDEQTGIFGFCRDAGRGSGHGHSTARHTTHGRTVCIEVEGRTQQRVERGISLSTWRASNWARGLGSTRALAIFQQSRVSSRLATGAMYGYACIYGERGWHACIALLTTQGEGGAARNGRVAHPIRTDAPQQPAALDRNNVPRKKGVSRQAGRNKLGCGAQRRPVAAFALLTPVRANAAGHGARGSGEARAKLRR

SEQ ID NO: 73632 - protein, 186 aa, Zea mays
  Coding DNA Sequence Number=SeqID_31853
MAPRILCDDGCSQPPLQKQEDAGSGELAALGNSSAAYGYNSPDCPVSQRSAGPTVSRAIRTRHVAEPTVGRGHRTVSGAPTAPRHQRSASPNKEGYPHRTVSGGAPDCPVRQATEGKISLPGMLSTAPSCLGAIKGTPRRMEEDTKHSLSTLDHLHSILAHLFDILLGAKICGAELRGRAATTSGP

SEQ ID NO: 73633 - protein, 92 aa, Zea mays
  Coding DNA Sequence Number=SeqID_31854
MASGGTFASPVNGLGLYNIDERTSDAANPSAETADNGMATKTTKLGPYILPLIQVNRKYKGHSSGHAATGLGFASSPRNDKPGRSKDPSLSL

SEQ ID NO: 73634 - protein, 116 aa, Zea mays
  Coding DNA Sequence Number=SeqID_31855
  Subcellular localization annotation: CTP_CleavageSite=46; ConfidenceScore=5.64e-01
MAAAAVASSSTPRPLRLAQRGAVSAHASHHVSAPPHRSRRPRLSVSASAGVEGTSGSERFYFNFTGFPFPLGPFLNRRTIRTEAVKGSIWLFEQEQALGFSSVSTNIRMTVIKLKS

SEQ ID NO: 73635 - protein, 85 aa, Zea mays
  Coding DNA Sequence Number=SeqID_31856
  Pfam annotation: Domain name=DUF803; Domain location=12-85; Score= -151.9; E_value=0.01; Accession=PF05653.4; Description=Protein of unknown function (DUF803)
MGGGGGSSGPELSTDNMKGIVLALLSSGFIGASFIIKKKGLRRAAVASGVRAGSVVIVIHAPQEQEITSVKEIWNMATQPGSGIS

SEQ ID NO: 73636 - protein, 128 aa, Zea mays
  Coding DNA Sequence Number=SeqID_31857
  Gene Ontology: Mol. function=hydrolase activity; Cellular component =anchored to membrane; Biological process=carbohydrate metabolic process
  Homolog annotation: Hit_ID=Q5JN21; Match level="QueryCoverage=68%, HitCoverage=42%, E-value=4e-23, Identity=55%"; Hit description =Glycosyl hydrolase family protein 17-like
  Pfam annotation: Domain name=X8; Domain location=20-104; Score=112.5; E_value=1.2e-30; Accession=PF07983.3; Description=X8 domain
MAVPLLLLLLLSVFTASYAAFCVCKPGMSDQMMQSAIDYACSKGADCASTTKGAPCYGNGNKVAVCSYICNSYYQSRSGMGATCDFNGVATLTGTDPSSGTCKFASGPRYIPTSHRIASHPSSVDVYS

SEQ ID NO: 73637 - protein, 77 aa, Zea mays
  Coding DNA Sequence Number=SeqID_31858
MASKQAAAGEALAAQINGMSRPEMYDMMSKMKTMIDHDQETVRRMLVDNPDVTRALFRAKIEAWAPLVGGEGRQHRT

SEQ ID NO: 73638 - protein, 84 aa, Zea mays
  Coding DNA Sequence Number=SeqID_31859
  Homolog annotation: Hit_ID=Q6ZCV7; Match level="QueryCoverage=69%, HitCoverage=7%, E-value=6e-11, Identity=63%"; Hit description =Putative heat-shock protein
MVRVRCNLAFAKKPAGEETAGKFEYQAKVSRLLDLIVHSLYSHNKVFLCELVRGCDPAVVVRIPRSRCGAAAPRLPPAVPRLQF

SEQ ID NO: 73639 - protein, 38 aa, Zea mays
  Coding DNA Sequence Number=SeqID_31860
MSHGTVYLWGSDGQLGSPPMTFVVIRADRRQDSRPVDL

SEQ ID NO: 73640 - protein, 277 aa, Zea mays
  Coding DNA Sequence Number=SeqID_31861
  Gene Ontology: Mol. function=oxidoreductase activity; Cellular component=chloroplast; Biological process=cell redox homeostasis
  Homolog annotation: Hit_ID=Q7F8S5; Match level="QueryCoverage=75%, HitCoverage=90%, E-value=9e-72, Identity=85%"; Hit description =Putative thioredoxin peroxidase
  Pfam annotation: Domain name=AhpC-TSA; Domain location=73-214; Score =54.2; E_value=4.2e-13; Accession=PF00578.11; Description=AhpCTSA family
  Pfam annotation: Domain name=Redoxin; Domain location=72-234; Score =156.7; E_value=6e-44; Accession=PF08534.1; Description=Redoxin
  Pfam module annotation: Pfam domain module=AhpC-TSA::Redoxin; Domain location=73-214::72-234
MQNCNGHHNHGGSVPHYPVPRRRQAVCPLVPVPLILLSPPDHRRPPPSIPHRRGVEDSEEAGGVHVPSGGELRTVTLPDAMLSYFDPADGELRTVTVAELTAGKKVILFAVPGAFTPTCSQKHLPGFMEKAGELKAKGVDTVACVSVNDAFVMKAWKELLGLADGSGVLLLSDGNLELTRALGVEMDLSDKPIGLGVRSRRYALLAEDGVVKVLNLEEDDAFTTSSAEEMLRLACSDAVAAERAITCGFCGLHAVAVAQVGDAKRLACSDPGACDVG

SEQ ID NO: 73641 - protein, 137 aa, Zea mays
  Coding DNA Sequence Number=SeqID_31862
  Subcellular localization annotation: CTP_CleavageSite=73; ConfidenceScore=5.07e-01
MEKDRQDAQQKRWAFARVGDPRREVKMARGSAKSTAPGSSKPPSGAKSTAPGSSKPVPDVPTQERRPPSPPHTAETEVGGVTEVSMDIFVEDYLVSGVAIFDAHTAWGPIRSEARQLAVVPAPAGSVAVVTGAKGSS

SEQ ID NO: 73642 - protein, 66 aa, Zea mays
  Coding DNA Sequence Number=SeqID_31863
MAGIAEQMGRRALMAVAHPLHALNTRAINALLPHDVDVVGDPWAGAEGARDPRGWKVHEDGSTCLR

SEQ ID NO: 73643 - protein, 311 aa, Zea mays
  Coding DNA Sequence Number=SeqID_31864
  Gene Ontology: Mol. function=pyruvate decarboxylase activity; Cellular component=cytosol; Biological process=branched chain family amino acid catabolic process
  Homolog annotation: Hit_ID=P51849; Match level="QueryCoverage=78%, HitCoverage=41%, E-value=1e-121, Identity=86%"; Hit description =Pyruvate decarboxylase isozyme 3
  Pfam annotation: Domain name=TPP_enzyme_C; Domain location=206-311; Score=-17.9; E_value=0.00011; Accession=PF02775.11; Description =Thiamine pyrophosphate enzyme, C-term
MEIIFGRRPSNRLSSKIYSKVGDYTHWKRGDGEPPSESRLMVERATIRVKVAPSVVLAARGEAVAGTRFLGTYWGTVSTAFCAEIVESADAYLLAGPIFNDYSSVGYSILLRKDKAVVVQPDRVTVGNGPTFGCAMMRDFLSVLAKRVRPNTTAYDNYRRIFVPGGQPPECEAGEPLRVNVLFKHIQRMLSGGSSVIAETGDSWFNYQKLRLPDGCGYEFQMQYGSMGWSVGALLGYAQGAPDKRVIACIGDGSFQVTAQDVSTMLRCEQRSIIFLINNGGYTIEVEIHDGPYNVIKNWDYTGLVDAIHNG

SEQ ID NO: 73644 - protein, 188 aa, Zea mays
  Coding DNA Sequence Number=SeqID_31865
  Gene Ontology: Mol. function=catalytic activity; Biological process =cellular metabolic process
  Homolog annotation: Hit_ID=Q8GTK8; Match level="QueryCoverage=50%, HitCoverage=24%, E-value=1e-24, Identity=67%"; Hit description =Putative mRNA binding protein
  Subcellular localization annotation: CTP_CleavageSite=67; ConfidenceScore=5.95e-01
MALCAAAASTATASASAHLSASTARPRGPSSTSLPSSFVGAFPCAVAARTRRRRAAAAAARATVTVRAEARKSVLIVNTNGGGHAVIGFYFAKELLAAGHAVTVLTVGDEASDKMKKPPFSRFSERTSAGGRTVRGDPADVGAAVGGASFDVLHDNNDKDLAAHKIVPYSSRPLCIRFAIARTKLILS

SEQ ID NO: 73645 - protein, 90 aa, Zea mays
  Coding DNA Sequence Number=SeqID_31866
MTSVVIRADRRQDSRPGSYATSEATRASNHPLELANFSFPPNWFSAAAMNTSPWASPTQTLLKLYDPPNGAKPPWVAVNARVLPRCPRSP

SEQ ID NO: 73646 - protein, 283 aa, Zea mays
  Coding DNA Sequence Number=SeqID_31867
  Gene Ontology: Mol. function=catalytic activity; Cellular component =plastoglobule; Biological process=cellular metabolic process
  Homolog annotation: Hit_ID=Q8GTK8; Match level="QueryCoverage=94%, HitCoverage=68%, E-value=1e-102, Identity=72%"; Hit description =Putative mRNA binding protein
  Pfam annotation: Domain name=Epimerase; Domain location=6-174; Score=- 62.7; E_value=0.048; Accession=PF01370.11; Description=NAD dependent epimerasedehydratase family
MEFNGTDELRQEDGVGWRTEKSARPWEARRLITSSKQRQGPRRRQPVADWAKTAGVGQFLFISSAGIYKPTEEPPHVEGDAVKESAGHVGVEKYIAEQFGSCWASFRPQYMIGSGNNKDCEEWFFDRIVRNRPVPIPGNGMQLTNVAHVRDLSSMLSLAVEKPGAAAGRVFNCVSDRAVTLAGMAKLCAAAAGADAVDIVLYDPAAVGVDAKKAFPFRNMHFYSEPRAAKEALGWTSTTNLPEDLKERYAEYAASGRGDKPMAFDLDDVILAAVGKAPASVAV

SEQ ID NO: 73647 - protein, 80 aa, Zea mays
  Coding DNA Sequence Number=SeqID_31868
  Gene Ontology: Mol. function=nucleoside-triphosphatase activity
  Homolog annotation: Hit_ID=Q9FTG6; Match level="QueryCoverage=85%, HitCoverage=11%, E-value=1e-20, Identity=75%"; Hit description=ABC transporter-like
MSQGGKDSGGRRRHRYRIETRALSYVLPPRARIPFPWAAARGKEERLLLRGVTCEAPPGELVAIVGPSGAGKTTLLSSYL

SEQ ID NO: 73648 - protein, 106 aa, Zea mays
  Coding DNA Sequence Number=SeqID_31869
  Gene Ontology: Mol. function=binding; Cellular component =mitochondrial inner membrane; Biological process=transport
  Homolog annotation: Hit_ID=Q10R11; Match level="QueryCoverage=55%, HitCoverage=14%, E-value=2e-10, Identity=65%"; Hit description =Mitochondrial carrier, putative, expressed
MGSPLTSTSPGRHPRRLRCRRHGGGERRGGGGRSGGGDPVAAGPVGTERSESCACLMAVQGASTALAGGTAALVTMPLDTVKTRLQVMEADAAARPTLASTVRGLL

SEQ ID NO: 73649 - protein, 126 aa, Zea mays
  Coding DNA Sequence Number=SeqID_31870
  Gene Ontology: Mol. function=nucleoside-triphosphatase activity; Cellular component=integral to membrane; Biological process=transport
  Homolog annotation: Hit_ID=Q9FTG6; Match level="QueryCoverage=98%, HitCoverage=20%, E-value=6e-51, Identity=85%"; Hit description=ABC transporter-like
  Pfam annotation: Domain name=ABC_tran; Domain location=2-126; Score =12.1; E_value=1.4e-08; Accession=PF00005.17; Description=ABC transporter
MFRRVSGHVPQDDALLPGLTVEESLVYSARLRLRSGGTSSGAEDRARELMAELGLGHVAASRVADVSGGERRRVSIGVELVHDPAVLLLDEPTSGLDSGSALHIVKMLRDMAAAHAKTVVLTIPQP

SEQ ID NO: 73650 - protein, 203 aa, Zea mays
  Coding DNA Sequence Number=SeqID_31871
  Gene Ontology: Mol. function=nucleoside-triphosphatase activity; Cellular component=integral to membrane; Biological process=transport
  Homolog annotation: Hit_ID=Q9FTG6; Match level="QueryCoverage=97%, HitCoverage=32%, E-value=5e-75, Identity=71%"; Hit description=ABC transporter-like
  Pfam annotation: Domain name=ABC2_membrane; Domain location=1-134; Score=8.2; E_value=0.00083; Accession=PF01061.14; Description=ABC-2 type transporter
GSTLEREISRGAYRVSSYVASNAGVFLPFLLAAAVLYAAPVYWLVGLAREPAAFAYFVLVVWLVMLTANSFVACLGALVPNYIVGNSVVAGLIGCFFLFSGYFVAGKNIPRYWVFMHYASLFKYPFEALVVNEYGGARGARECLASAGGAGGLCVLDGAGLLRQQGMREGMRWSNLGVMLGFVVGYRVLCFVFLSFRCHRTWR

SEQ ID NO: 73651 - protein, 83 aa, Zea mays
  Coding DNA Sequence Number=SeqID_31872
  Homolog annotation: Hit_ID=Q5ZDX5; Match level="QueryCoverage=65%, HitCoverage=5%, E-value=2e-09, Identity=58%"; Hit description =Ubiquitin-activating enzyme E1-like
MAGAGAMGFPRELMVQRIQSLVEEGFWDALRRHKLDVLGTDDSPIPITGPLAHNPLSSLFVGRIRDLWQGMKADPIHFRAPLT

SEQ ID NO: 73652 - protein, 188 aa, Zea mays
  Coding DNA Sequence Number=SeqID_31873
MGDEEDDPDWLRAFQAPTVAPVMLSSGSDTSPEASPTRTSTSRKQNKGEKHASPDHARDRDGASQNKNKISAATRRKNLVSKKEGSTMDEKQANTPRRLVWILSVVLDSLSPIHDILVTRLTPKKDMVTLSSGSDASPGNSLSRAHEDNHEEGSLSTAKRKNAQQTKTKKTKDAGTKTGADQAGSKAL

SEQ ID NO: 73653 - protein, 177 aa, Zea mays
  Coding DNA Sequence Number=SeqID_31874
  Gene Ontology: Cellular component=extracellular region; Biological process=sexual reproduction
  Homolog annotation: Hit_ID=Q7XCL0; Match level="QueryCoverage=59%, HitCoverage=38%, E-value=1e-25, Identity=60%"; Hit description =Expansin-like A2 precursor
  Pfam annotation: Domain name=DPBB_1; Domain location=53-120; Score =13.8; E_value=0.00077; Accession=PF03330.8; Description=Rare lipoprotein A (RlpA)-like double
EDLLVIAADQPFRFPSTFTFVVRAFSVLDGIRKGLDPRFHITEIAKPLHIFTYPIVSTIGYVRCRDNELCSAAGAKVVVTDQARMSNRTALVLSAAAYAAIASAGKAARLRDRRVVDVEYKRVPYEYAKDRNLSIRVEEKIRPPSNLSIRILYQGGQTDIVAVDVATGARKGAACSS

SEQ ID NO: 73654 - protein, 77 aa, Zea mays
  Coding DNA Sequence Number=SeqID_31875
MALVWDEAEVGDEVGLAAVVGAADGKAAVDAADELEELDRRDRDTRLSRALVSRVGGPRLRSAQYKALIACRMQQTS

SEQ ID NO: 73655 - protein, 47 aa, Zea mays
  Coding DNA Sequence Number=SeqID_31876
MRWSLACLAQREPPGKTVLPQGFNGTPLADYLGKLVEDYPYPKGQGQ

SEQ ID NO: 73656 - protein, 156 aa, Zea mays
  Coding DNA Sequence Number=SeqID_31877
  Subcellular localization annotation: CTP_CleavageSite=71; ConfidenceScore=5.57e-01
MPAPAASPCSPAVPWWLRPRRAPRWLCPAPRPGRPPSAAPLPAPVPGPTPWSPALGRAPARTRAPATRVPRACMEAPPRPTPELGLNLDSGRWTPPRPTPGLGLNLDSGRRTPPRPTPGLRLNLDSGRRSPPRPGLSLDLGGASASPDPRLGPTTS

SEQ ID NO: 73657 - protein, 235 aa, Zea mays
  Coding DNA Sequence Number=SeqID_31878
MATRTGGNKLTDIKHKSIRAKALTRLDGTTLIDARSRSRRRKDLSERVLDTSRYDRDTAIPTTSWTNGEKRHRRSDYQPKRYQPILAIRSAQDGGIFFIRPDANTKHERGACPGRRRPHRKKANATCKYSPAKSDVCYTNLERKANPVEGSLPKGGDEERVHHGEWWPMAGFDDSEEPPTPRRRSSLAEDTRMRDGIPRRARDTRRACEVGPKLPTVDGIRGTGHGIREVEIAFC

SEQ ID NO: 73658 - protein, 43 aa, Zea mays
  Coding DNA Sequence Number=SeqID_31879
MAVMSGYTGVSLVFARFRRGFRVGRSVAWDGRGGITVAYDPKS

SEQ ID NO: 73659 - protein, 182 aa, Zea mays
  Coding DNA Sequence Number=SeqID_31880
  Gene Ontology: Mol. function=peptidyl-prolyl cis-trans isomerase activity; Cellular component=membrane; Biological process=protein folding
  Homolog annotation: Hit_ID=Q69JF7; Match level="QueryCoverage=67%, HitCoverage=60%, E-value=1e-40, Identity=72%"; Hit description =Putative peptidylprolyl isomerase
  Pfam annotation: Domain name=Pro_isomerase; Domain location=41-150; Score=27.0; E_value=3.8e-09; Accession=PF00160.11; Description =Cyclophilin type peptidyl-prolyl cis-tr
MNVSRDSSQMGLRSSNYFYCKDRLHIFMMDSGESCPYFRLHIFMIPLIYAYRRADWYNGEKGVGSNGKPLHYKGTPFHRIIPGFMIQGGDIVRGDDKGSESIYGGIFPDENFTVKHTHPVLHNYYQDKLVSCVVHHVSPMIDLEAAAPEMGDPRNGYRVRHRRGRWDLQWQAKEEGGDHRRW

SEQ ID NO: 73660 - protein, 156 aa, Zea mays
  Coding DNA Sequence Number=SeqID_31881
MAHRSYSGPPEAFSSPLSPLCPGIHGPFPAIEFAVAPSSSLPNSGDPGTRLAHACLNSGDLTVAREWSPVERPPKNFNVSKLMRNMEEYARTEDDELREAQPPVASWGAEIVRRTPSTHRSIWRNLAWEWISGVLLSIPYLPSSPKGIHRAHAKFL

SEQ ID NO: 73661 - protein, 200 aa, Zea mays
  Coding DNA Sequence Number=SeqID_31882
  Subcellular localization annotation: CTP_CleavageSite=83; ConfidenceScore=5.43e-01
DSSDRGSNSAQLHVARALSPGLTNMPHSPDSISQQRGSGPSASTNAARAVSEGGLHWTDSFPFLRQRPTRKSGSQRAARNPREASHEPHDRLSHKTYVPRLLCPFALGCDCLGSHGIARAGNLEPSPSTVVGSSDFGRGCTGVAALDCRACAHCISEARTPGVRPIIAPVSFAAALLRSCSAPQLVTIGKPPKPLLTFAQ

SEQ ID NO: 73662 - protein, 159 aa, Zea mays
  Coding DNA Sequence Number=SeqID_31883
MSSRAGEVTEMTEEEFENMRKGVVRGTAAQRDRETEREKQRGEELTERERSRAQSLEVAGARWSPVREREDRQEGVEPESREGSGPLAQVPKVHNKPIKREEKGSNKRAKDNPEGTLVWRTGLSGVPPDSVRCTRALEAKLATFGNFQGHSAIIRRTVR

SEQ ID NO: 73663 - protein, 285 aa, Zea mays
  Coding DNA Sequence Number=SeqID_31884
  Gene Ontology: Mol. function=hydrolase activity, hydrolyzing O -glycosyl compounds; Cellular component=cellulose and pectin -containing cell wall; Biological process=polysaccharide catabolic process
  Homolog annotation: Hit_ID=Q67UW5; Match level="QueryCoverage=96%, HitCoverage=55%, E-value=7e-98, Identity=64%"; Hit description =Endoglucanase 5 precursor
  Pfam annotation: Domain name=Glyco_hydro_9; Domain location=27-284; Score=186.2; E_value=7.7e-53; Accession=PF00759.9; Description =Glycosyl hydrolase family 9
MSDVSVRFVALALAAISLAAAAAAAHDYGDALRKSLLYFEAQRSGRLPYNQRVRWRGHSGLTDGLEQGVDLVGGYYDAGDHVKFGLPMAFTVTLLSWGVLEYGGGVAGAGELAHALQAIKWGTRLLREGAHGARRARPEDMTTSRRAYKVDAEHPGSEVAAETAAAMAAASAVFRRAGDAHYAHLLLHHAQQLFEFADTHRGRYDESVDVVKSYYPSSSGYQDELLWAALWLHRATGRRDYLRYALDNAEAFGGTGWAVSEFSWDIKYAGLQVLASQRYPFYGVI

SEQ ID NO: 73664 - protein, 343 aa, Zea mays
  Coding DNA Sequence Number=SeqID_31885
  Gene Ontology: Mol. function=hydrolase activity, hydrolyzing O -glycosyl compounds; Cellular component=cellulose and pectin -containing cell wall; Biological process=polysaccharide catabolic process
  Homolog annotation: Hit_ID=Q67UW5; Match level="QueryCoverage=54%, HitCoverage=35%, E-value=2e-73, Identity=73%"; Hit description =Endoglucanase 5 precursor
  Pfam annotation: Domain name=Glyco_hydro_9; Domain location=1-218; Score=-189.7; E_value=2.5e-05; Accession=PF00759.9; Description =Glycosyl hydrolase family 9
LLISLCLQKKVKAKEERLRLSAEEVAVVEQLRSNAEYYVCSCMNRNPGGAKHNAGRTPAGLLFIRPWNNLQYVSGAAFLLTVYSDVLASLGQPLRCGSGDDGGEPAAGDAGDVLAFAKSQADYILGTNPMRTSYLVGYGAAYPRRVHHRAASSASYRHDRDFIGCLQGFDSWYSARHENPHDLFGAVVGGPNGEDVFNDHRGPGGAVATPGAGAGGGSLIGEVVFLERDGVEPWRARESRLCVWKPASGQPLRSTGQEFDGMPHHRRRRFPWPWAAALPELLDDGVGLVAQPAPPHRRQCASTFASLTPRAIEGRLPRPRYDLDHACRGPRGQCLAWRLTRGL

SEQ ID NO: 73665 - protein, 915 aa, Zea mays
  Coding DNA Sequence Number=SeqID_31886
  Gene Ontology: Mol. function=protein serine/threonine kinase activity; Cellular component=integral to membrane; Biological process=protein amino acid phosphorylation
  Homolog annotation: Hit_ID=Q67UW6; Match level="QueryCoverage=93%, HitCoverage=94%, E-value=0.0, Identity=63%"; Hit description =Putative light repressible receptor protein kinase
  Pfam annotation: Domain name=Pkinase; Domain location=604-859; Score =99.8; E_value=7.9e-27; Accession=PF00069.15; Description=Protein kinase domain
  Pfam annotation: Domain name=Pkinase_Tyr; Domain location=602-859; Score=98.3; E_value=2.3e-26; Accession=PF07714.7; Description =Protein tyrosine kinase
  Pfam module annotation: Pfam domain module=Pkinase::Pkinase_Tyr; Domain location=604-859::602-859
MKLSAAVLFFSILLQYCTSSGQPDSRGFISIDCGIPENSTYQDLTSTILYVSDRGFVTSGENRNISAGYISPSLAQRYYTVRAFASGVRNCYTLPSLVAGNKYLVRAAFYYADYDGLSTPPVFDLYLGASLWHEVRFRDAAAINWMDVVAVAPTDFLQVCLVNKGTGTPFISGLDLRPLRSTLYPEANASQSLVMVNANRCNVGPTDKSVVRPTKAHFSGPTSRYPLDPHDRIWLAYGAVPAWTEASATSVVRNYLADPYDAPSAVMQSAATPSDGSVLSFSWDTSDDRSVDASSATYLLVLYFAELQRVSASGELRRQFDIAVDGTAWNREPYSPPYLFADSFSGTVQGQARHSVSLTATRNATLPPLLNAMEVYLVRPVDEAATDPGDAKAMIAIQEAYVVSKNWMGDPCAPKAFAWEGLDCTTDPPTGTPRITAFLLFPELGHEIKLTNSTTETFELFLTRTVTYTRDLSHNNLSGSIPDCLGQLPFLVFLDLSSNDLRGPVPYTLLQKSHNGTLSLRLSNNPNLSGNGSGPKKLNGAALLSAIIIPTVAATALSVTFIALLLRALKEQARRRAVDPTPRDETALLENREFSYRELKHITKNFSLEIGRGGFGAVFLGYLGNGNPVAVKIRSESSSQGGKEFLAEAQHLTRVHHKNLVSLIGYCKDKDHFALVYEYMPEGNLQDHLRLRGLEYLHVACKPALIHRDVKSRNILLTTGLGAKIADFGLTKAFSDSETHITTEPAGTMGYLDPEYYRSYRASEKSDVYSFGVVLLELVTGQSPVVPVDDSVSVHVGEWVQQSLDRGGGVESVVDPSMGRCERGDYDVNSVWKVADLALRCRREASRERPTMTDVVAQIRESVELEAARRSSASGAAAAGGGGGLRSCAGERDAFEVVEGSVGETAGAAPGPAMI

SEQ ID NO: 73666 - protein, 81 aa, Zea mays
  Coding DNA Sequence Number=SeqID_31887
MPSSSSSAADTPPTDGSSEEMLSNVAAEELRPGDKVEFGASQMSSVRVQDMQQLGYFGGGVGRWAPNVGTCSPGQVDPTGK

SEQ ID NO: 73667 - protein, 112 aa, Zea mays
  Coding DNA Sequence Number=SeqID_31888
  Subcellular localization annotation: CTP_CleavageSite=51; ConfidenceScore=5.86e-01
MASLSRTAAAAVVALRSAVRSAPLTGRVLGAPLPSFASPSATRSARILRRSAAAASAGLETLMPLHSAVAAARLRSCIAVDSSCWCSLSQVMNNECIQRAFQSYTSVKDLKC

SEQ ID NO: 73668 - protein, 62 aa, Zea mays
  Coding DNA Sequence Number=SeqID_31889
MVDHSRKQGTQLMPFSNDAIMELQVVQTRSGRCSSPRCHKGKAYPISPNIRASQAMETRHAI

SEQ ID NO: 73669 - protein, 713 aa, Zea mays
  Coding DNA Sequence Number=SeqID_31890
  Gene Ontology: Mol. function=nucleic acid binding
  Homolog annotation: Hit_ID=Q9ZUM0; Match level="QueryCoverage=94%, HitCoverage=93%, E-value=4e-53, Identity=28%"; Hit description =Expressed protein
  Pfam annotation: Domain name=zf-CCCH; Domain location=135-160; Score =28.5; E_value=2.4e-05; Accession=PF00642.15; Description=Zinc finger C-x8-C-x5-C-x3-H type (and similar)
  Pfam annotation: Domain name=zf-CCCH; Domain location=85-109; Score =7.0; E_value=0.16; Accession=PF00642.15; Description=Zinc finger C -x8-C-x5-C-x3-H type (and similar)
  Pfam module annotation: Pfam domain module=zf-CCCH::zf-CCCH; Domain location=135-160::85-109
MEVAAAAAGKPLTPEEEALRRSTDCVYFLASPLTCKKVLCIEFFSNFSGRYNQPTFIRVRDPNWLIWTNQMGNECDFRHSEGARMNPRDCWYWLNGSCLNPKCAFRHPPIDGLFGAPTSGLPPVSAHYGAYNLGKQMVPCYYFQKGNCLKGDRCPFYHGPQTASNDLAEQAAKVSSFPLEPSQAQNNEEAVAPNNSTQQEARMTENRTSIHVSKSGVGATPADVASNALKPGTNFEQAPSNTLAAKKSSTTEDHPMHYQNQVPVEIDPVKDWNQNFEVSPTDYLPQDSREADDILGESSPGFDVLVDNDVDVAEDFARDMYPVEDYEYVTSDFDARAHHESEQFNDGMGVNGRIGQYDGYERKRRRSSSERNLDRHYHPDGRFLHRELDRGEIDGSDLRHQLRRRRINGPSTTISPERANGDRHGRDEPYRERAHGGHHTYRDRYQGPRGSNLSSRLQARIKLPRRSPDRVDTRFEDERDRRRFRDMFSPMRRMDFHGGRHQEAGHNQERGHRKLSELVSTVRHADGLSARRDAVGSTHFAARRNLGEPRKANGLVESEASLDFEGPKPLSVILQRKREAAQGNNYEKFAEVAVTQTGSLDETEKKSCDNVTRFADCKSGSGDEEYKEQDHILVDAHRQSSDHGDKFEAGYAAEVDAEGKQEADDYDQREGESDDYETFEGHDYKSEDENVYQDDEDFDDNDDFARKVGVLLP

SEQ ID NO: 73670 - protein, 159 aa, Zea mays
  Coding DNA Sequence Number=SeqID_31891
  Homolog annotation: Hit_ID=Q9ZUU1; Match level="QueryCoverage=35%, HitCoverage=19%, E-value=2e-17, Identity=78%"; Hit description =Probable adenylate kinase 1, chloroplast precursor
  Pfam annotation: Domain name=ADK; Domain location=60-147; Score= -84.4; E_value=0.069; Accession=PF00406.12; Description=Adenylate kinase
  Subcellular localization annotation: CTP_CleavageSite=39; ConfidenceScore=5.06e-01
MAGMSRAIRNFAAASRRTLTAASGPALPKEAAAAGARVRAAAPGRMGRDQEDGRRVQWVFLGCPGVGKGTYASRLSQLLGVPHIATGDLVRDALATPGPFSNKHVNELVTTATTISTDCTCMHSAIMAYASRLSLYIGRKHYSSRRCCLWLLCTTHCFR

SEQ ID NO: 73671 - protein, 329 aa, Zea mays
  Coding DNA Sequence Number=SeqID_31892
  Gene Ontology: Mol. function=metal ion binding
  Homolog annotation: Hit_ID=Q655C7; Match level="QueryCoverage=75%, HitCoverage=62%, E-value=1e-32, Identity=39%"; Hit description=Ring -H2 zinc finger protein-like
  Pfam annotation: Domain name=zf-C3HC4; Domain location=218-259; Score= 41.9; E_value=2.2e-09; Accession=PF00097.15; Description=Zinc finger, C3HC4 type (RING finger)
  Subcellular localization annotation: CTP_CleavageSite=74; ConfidenceScore=5.17e-01
MGSGKRGKVTFLFSLKQARTEAVTWLADASLPRSFAGRSVRADHAPALPVANRPVNVSRPFACPHTAYGRARPSDMGVSDGDGNGNGPKASEEAVSCEGSPEYRLPFSKPHVPSPPQVTDPTNYAMTGKILLAAAGAFAGVLLALVALHLYNSTRRRRLGGNQRRLFRSLAIAGGDEDRRDGDGEGAPPPHRGLDSAVLAAIPVVLIEAGADAGGGDCAVCLAELEPGEKARALPRCGHRFHIECIGAWFRGNATCPLCRADVVVVAPGAIVPAEGGALSEEVRIDVAGDAVAATPNGSTVVPVMGRLHSGRDLEKARRVFASTRFSSF

SEQ ID NO: 73672 - protein, 135 aa, Zea mays
  Coding DNA Sequence Number=SeqID_31893
MVALHAGSRRASSDGSHAGTTGSMAGDHRSKDELPGSGRRRAGAPPNVDEGEGERRAGWGGDGERRGGTSGRSRRSRLGSTATASRHCRRLRRHRPARASVEWTGGGAAWLPAPETPQAERREGVLYCEHFVYIL

SEQ ID NO: 73673 - protein, 259 aa, Zea mays
  Coding DNA Sequence Number=SeqID_31894
  Homolog annotation: Hit_ID=Q10LJ9; Match level="QueryCoverage=27%, HitCoverage=19%, E-value=5e-08, Identity=40%"; Hit description=Heavy metal-associated domain containing protein, expressed
  Pfam annotation: Domain name=HMA; Domain location=48-108; Score=37.0; E_value=6.6e-08; Accession=PF00403.16; Description=Heavy-metal -associated domain
MDEHDVKSQGAGQGWSEKPETNSNRQSFDNDCKIGGMPGASQTPRITELHVRVDCNGCENKIRKALRAIDGVSEVYIDQASHKITVVGMADPWRMVKAIRKAKRVPTIFSHTDPAAAAEADQPPPPAAEAEEAEAKGEAQAPAPAPPPPADPPAAGDRAEETAPADTSAPEEHKEAKPAETPAAVDATVVVRTVRDHPYGYGAGGHGHRMCSEANHPVDSFYSHHRPTSPYVAEYGAGGGYAGFPVQEGRGKEDAINIT

SEQ ID NO: 73674 - protein, 132 aa, Zea mays
  Coding DNA Sequence Number=SeqID_31895
  Subcellular localization annotation: CTP_CleavageSite=85; ConfidenceScore=5.02e-01
MDGSLKPLGDEASPVFGLLSFRCYLRRRYFLPFQKKVPTSLLGFLSHSILSATASEASSHHILVTAGESGRGGRFNKAEVEWWVLASERAATGCQRRALSVAAFGSTKSRIYGGALIIELPSGVDCILSGHL

SEQ ID NO: 73675 - protein, 237 aa, Zea mays
  Coding DNA Sequence Number=SeqID_31896
  Subcellular localization annotation: CTP_CleavageSite=87; ConfidenceScore=5.10e-01
QMMQYSCKRYFVLEDTTLRWFKFAPSSKREASTLSSAHGSASAAATPARALTSAAAMPSALATLRPPPRCPRLRPRDARAYPCDTARARLLPAMPAPVSSTAYNRLRNPRPRAPRVGAGDTMAVPATPLRNPRPRACSLELRWAPALAPDTMLCPTLNLATTPSTTPPSFLATTPSLDGRRDWDVALRSSPPRRWRSRDLLTIVSAREIPPDSPTSPSTAASITHLLHADEKGAPTS

SEQ ID NO: 73676 - protein, 407 aa, Zea mays
  Coding DNA Sequence Number=SeqID_31897
  Gene Ontology: Mol. function=oxidoreductase activity; Cellular component=integral to membrane; Biological process=potassium ion transport
  Homolog annotation: Hit_ID=Q2R0H4; Match level="QueryCoverage=75%, HitCoverage=92%, E-value=1e-128, Identity=71%"; Hit description =Oxidoreductase, aldo/keto reductase family protein, expressed
  Pfam annotation: Domain name=Aldo_ket_red; Domain location=5-306; Score=-11.6; E_value=1.4e-08; Accession=PF00248.11; Description =Aldoketo reductase family
MTMGEQSGAACSLRLLDAAYDAGVNFFDSAEMYPVPQRSETRGRSEELLGRWLRARRAPRDSVVVATKVSKSPQILPLLRLLVAGPSGQMTWIRGGPTSLDSQNIAEAIDGWYVPMFGETEYDPNCQYTSVPMEEQLEALGRAIDAGKLSKDSQLLPKLLTLQNSYNLLCRNFDSGLAECCHHERISLLAYSPMAMGILSGKYHLSDNCGPPDARMNLFKGRYSEGESRYKLQSPKVKAAVKEYTQISAKYGISPVTLAIAFVLRHPLVASAVFGATKLWQLDEVLQATTVHLCEEIVAEINDDHAACHSDASRAPCRRSLRAVSSRTQQIPARHTILPPEASARSTGTRPAPGTGSRRVVVARHRIPPPEASAQSTNTRPAPGTGSRRAVVARHRIPPPEASVPSS

SEQ ID NO: 73677 - protein, 57 aa, Zea mays
  Coding DNA Sequence Number=SeqID_31898
  Subcellular localization annotation: CTP_CleavageSite=49; ConfidenceScore=5.25e-01
MLAPLARGGAPRPLPPLRPLSRRFDPQATPLRSPYVVNAGPACNLSNLRARGLRGRG

SEQ ID NO: 73678 - protein, 308 aa, Zea mays
  Coding DNA Sequence Number=SeqID_31899
  Gene Ontology: Mol. function=nucleic acid binding; Cellular component= chloroplast; Biological process=mRNA processing
  Homolog annotation: Hit_ID=Q6ZJ16; Match level="QueryCoverage=86%, HitCoverage=86%, E-value=3e-90, Identity=65%"; Hit description =Putative nucleic acid-binding protein
  Pfam annotation: Domain name=RRM_1; Domain location=101-190; Score =59.1; E_value=1.5e-14; Accession=PF00076.12; Description=RNA recognition motif. (a.k.a. RRM, RBD, or
  Pfam annotation: Domain name=RRM_1; Domain location=213-284; Score =107.8; E_value=3.1e-29; Accession=PF00076.12; Description=RNA recognition motif. (a.k.a. RRM, RBD, or
  Pfam module annotation: Pfam domain module=RRM_1::RRM_1; Domain location=101-190::213-284
  Subcellular localization annotation: CTP_CleavageSite=44; ConfidenceScore=5.38e-01
MADTALPPSHKLLPTVSLPLLPSSTRAAPLLLCASRRLPPAPLVASSDAVETNIEWVDDDEEEAGEAFDEEGGDVEEEVLASGDEGEGEYAAVEPPEEAKVYVGNLPYDIESEGLAQLFDQAGVVEVAEVTVAVKKYSFSDICSIEVVIYNKETGQSRGFGFVTMSTIEEADKAIEMFNRYDISGRLLNVNRASPRGTRMERPPRQFAPAFRAYVGNLPWQADDSRLVQLFSEYGEVVNAAVVYDRETGRSRGFGFVTMVSKEELDDAISALDGQELDGRPLRVNVAAERPQGAFDAGGGTREMAACL

SEQ ID NO: 73679 - protein, 65 aa, Zea mays
  Coding DNA Sequence Number=SeqID_31900
MCIQKESALAEAAAAAEASRIEASQWKAQAEEFERGFHVSIETSKTLTRAVDEKSAEYDALSDVG

SEQ ID NO: 73680 - protein, 331 aa, Zea mays
  Coding DNA Sequence Number=SeqID_31901
  Gene Ontology: Mol. function=DNA binding; Biological process=RNA -dependent DNA replication
  Homolog annotation: Hit_ID=Q9LGH0; Match level="QueryCoverage=65%, HitCoverage=59%, E-value=5e-31, Identity=36%"; Hit description=NAM -like protein-like
MTTYHLDVESGGSTHASLVEVAKSAASEVSESIVGGAVGEQSRKVFVQMEVNGFYMTLLNDGDYPVALENLGAIPDISQQSPIMDNAPSSKPKHKHTGKNFNEDEDRLLATAWLNIETRNESGATIYDRVEQHEKLFKSQDANKKSFQFRHNWLQLRNQPKWHERLNQLASLKTKVDGSPQDLNVGGSPQDVNVGGSPRDNIPTNLDAPKRPMGKKKTKEVIRRGGSDACIQALDILWAKKSEADAEKQQKKEEWYAKTFALDQERLQLEQKRLAIEETKEINEQERLHRQRIAEEERIMNIDMSCMAEMQKKYYMSLQVEVMARRISNSG

SEQ ID NO: 73681 - protein, 63 aa, Zea mays
  Coding DNA Sequence Number=SeqID_31902
MAKIKPKALLAQSKVKKVPGQISVATIVTYMILGVLVVSSVYAAYSKWGSWDMDRLYVDTVTP

SEQ ID NO: 73682 - protein, 232 aa, Zea mays
  Coding DNA Sequence Number=SeqID_31903
  Gene Ontology: Mol. function=protein transporter activity; Cellular component=membrane; Biological process=intracellular protein transport
  Homolog annotation: Hit_ID=Q5S1U0; Match level="QueryCoverage=67%, HitCoverage=56%, E-value=6e-77, Identity=94%"; Hit description =Syntaxin related protein
  Pfam annotation: Domain name=SNARE; Domain location=135-197; Score =94.0; E_value=4.4e-25; Accession=PF05739.9; Description=SNARE domain
LKIRFHGESNLGLEECYSDHLPTQLEALSLFQLQKKGVIEQRHLATKKIADAKLAKDFQAVLKEFQKAQRLAVEREAAYAPFITQAGLPQSYNSSEVNNGADKLAEQRTQLLESRRQELVFLDNEIVFNEAIIEERDQGIQEIQHQITEVNEIFKDLAVLVHDQGAMIDDIDSHIENAVVATSQAKGQLSKAAKTQKSNSSLICLLLVIFGVVLLIVIIPGMDPGIRLDVSR

SEQ ID NO: 73683 - protein, 44 aa, Zea mays
  Coding DNA Sequence Number=SeqID_31904
MPHRARASLQNPYLPPIVHLGAIWCRTGRIVAVAEIVVVAACGR

SEQ ID NO: 73684 - protein, 66 aa, Zea mays
  Coding DNA Sequence Number=SeqID_31905
MNEWVIVTHCDAVKGSGHVTINAGGICLDDGRCATSSAQLYKFDVLTEGKILINLKVQGFKVDPIH

SEQ ID NO: 73685 - protein, 105 aa, Zea mays
  Coding DNA Sequence Number=SeqID_31906
  Gene Ontology: Mol. function=transferase activity
  Homolog annotation: Hit_ID=Q2QV89; Match level="QueryCoverage=97%, HitCoverage=17%, E-value=1e-42, Identity=77%"; Hit description=HGA6, putative, expressed
MVFLPPGATVVQIVPWGGLQWIARMDFGDPADAMGLRYIQYEIAVHESSLADKYPRDHEIFTNPTALHKKGFKFLRHTFLIGQDITLDVDRFRVVLLQALRNLTE

SEQ ID NO: 73686 - protein, 46 aa, Zea mays
  Coding DNA Sequence Number=SeqID_31907
MSCAFDDYYIKNYGIILATEVTQRSTDSNDHSPSSGIAATAMQLNS

SEQ ID NO: 73687 - protein, 226 aa, Zea mays
  Coding DNA Sequence Number=SeqID_31908
MEAFSFSVDGIMSHSPSTSRESLPTKNTYQRRPAAEKDDDATAAAMMAGWRGGSQGHIVKRNALAVVHGLSRTSTAVASVSYQTYITQSAHAEVLPNRQLLQQLISSAASQNELKAANKQKLLFTSLSDKLLFQQAAAVPNRALASLRPAAATPKHEGKTRENARHPSDAKWHDQLQPLYGMSIYTYLGQPQSPAQIRGKSTNLRTVGPSSPECGPFGPAVAGPVF

SEQ ID NO: 73688 - protein, 370 aa, Zea mays
  Coding DNA Sequence Number=SeqID_31909
  Gene Ontology: Mol. function=transferase activity
  Homolog annotation: Hit_ID=Q7XZU4; Match level="QueryCoverage=95%, HitCoverage=65%, E-value=2e-80, Identity=45%"; Hit description=HGA6
  Pfam annotation: Domain name=DUF563; Domain location=205-370; Score =75.2; E_value=2.1e-19; Accession=PF04577.5; Description=Protein of unknown function (DUF563)
MKGDKAGGRDRGGASRPLRLESQRFRLLSIVVGCFVICLVFLLSSRPDAAAAFGTVSVSPKASLVAARRPVAVKTVRASSSADGALGGDFHVDILPQHRQEQSLERTGDKTATEWVRDTVIVEERSGAETSEAETEETEPDRHDSATATAAASNTDDQPAVPGAEKAVQDTAAITGQPAAETTSATAPDGTESGGDQQQQQPRPPLCDFSDFRSDICDLAGDVRMDANVSAFVVVVDPATSGSDQEEHKVRPYPRKGDETCMGRITEVTVRATGDAAGAPRCTETHGAPAVVFSIGGYTGNIFHDFSDVLVPLYNTARRYRGDVQLVMANAAPWWLVKYDRLLRALSRHAPLDLARAGAARELHCFPRAV

SEQ ID NO: 73689 - protein, 110 aa, Zea mays
  Coding DNA Sequence Number=SeqID_31910
MELARPAKVDATRGGEDGEEQARVEAMRGLPATGGHHRRDQSKCSARGAATSGLAATGHRTTALGEPRRGAAVRGREGAVKRKTTQRHRGPSDSKRGQSGSVQERHCSCA

SEQ ID NO: 73690 - protein, 32 aa, Zea mays
  Coding DNA Sequence Number=SeqID_31911
RTDELVDGPNASHISALALDYWETRLVEGSGG

SEQ ID NO: 73691 - protein, 226 aa, Zea mays
  Coding DNA Sequence Number=SeqID_31912
MVTGGKIAQFGTCLFTLRTKKTSGEVVDLVPCAKNKWGNCARWEVGVVKLLLMSFLKNQKVLSLAFAVELRGQDAVAFVREVEAEAVKNVGKYSLKTDPVEGSADDVDVDERIKKRGVKHGATDEGCSKGKALYFKVFPYGRNIGIVITFVMDKDLQESSNKKRKALLRIVDPHRETKALRTSVAGGSKAEAAKAATSFTTMPPPVVPSAAAAMSPSPARLARARE

SEQ ID NO: 73692 - protein, 239 aa, Zea mays
  Coding DNA Sequence Number=SeqID_31913
  Homolog annotation: Hit_ID=Q8SA97; Match level="QueryCoverage=47%, HitCoverage=21%, E-value=3e-15, Identity=45%"; Hit description =Ornithine carbamoyltransferase
MAPPVDVADLRPRLGDVEAPPKPRLSLSSVAEVESEPLGRARRSSSSSRAEPKSEPWVRRSGVRRLLGPSPSPSPGSGGAEFAVFRDLARVRALGQAERSSPSSRAEPESRALGRAERSFTVFRVLARVRALGRAERSFLWCLWRGLTACQSHSVKWHHSRSGAGGVVLLSGWSVERQSDGGHFGSAGWGARVRIKLYADGGYQLRIRSLEGTPNYGPRQKASPEDQSRKESMWEFIRE

SEQ ID NO: 73693 - protein, 333 aa, Zea mays
  Coding DNA Sequence Number=SeqID_31914
  Gene Ontology: Mol. function=DNA binding; Cellular component=nucleus; Biological process=regulation of transcription, DNA-dependent
  Homolog annotation: Hit_ID=Q8S976; Match level="QueryCoverage=95%, HitCoverage=51%, E-value=2e-61, Identity=40%"; Hit description=Auxin response factor 10
  Pfam annotation: Domain name=Auxin_resp; Domain location=256-332; Score=25.5; E_value=4.6e-07; Accession=PF06507.4; Description=Auxin response factor
  Pfam annotation: Domain name=B3; Domain location=116-221; Score =108.5; E_value=2e-29; Accession=PF02362.12; Description=B3 DNA binding domain
  Pfam module annotation: Pfam domain module=Auxin_resp::B3; Domain location=256-332::116-221
MGPQPPLHLPAANGDSIVDRDVWLACAVPLSRLPAVGAEVYYFPHGHAEQCPAHLPAPLPAPHLFPCTVAGVSLGADDETNEVFAKISLSPGPHRGPAAACRTDPTSDCPPQELSYFTKELTQSDANNGGGFSVPRYCADHIFPTLDFDANPPVQKLFMRDTRGNPWQFRHIYRGTPRRHLLTTGWSRFVNAKLLVAGDIVVFMRRHNGDLIVGLRRTPRYPLVFPRVGSGAGVDPDQPPPRNARARVPPQDVIEAARLAAEGRSFAVTYFPRQAAGEFIVPRDEVEGVLATRWEPGAQVRMQVMEAEDTRRTVWADGHVKSLHQNIWRALEV

SEQ ID NO: 73694 - protein, 77 aa, Zea mays
  Coding DNA Sequence Number=SeqID_31915
MAPPWAFCAAMCRVGEERVEGDVGEEPWPWDLDPVIGTGYRFVGRSWALKFNRADRMDLTVEMCPYPFDLAKSLKRP

SEQ ID NO: 73695 - protein, 86 aa, Zea mays
  Coding DNA Sequence Number=SeqID_31916
MEPEANSASSHPSAEKEIADRVGVFTELVASDTPVHFATSRLHVERTELKNKFERLRTDNTEARRDKSASDLKSQRLGDKANTLEK

SEQ ID NO: 73696 - protein, 75 aa, Zea mays
  Coding DNA Sequence Number=SeqID_31917
  Subcellular localization annotation: CTP_CleavageSite=52; ConfidenceScore=5.45e-01
MVAVSSLPPPSLSSFCALLLLPELALRSDLPPMALGPARPSSPARELSVSLRASASLSSSLLLRVAGPLPSSPMA

SEQ ID NO: 73697 - protein, 592 aa, Zea mays
  Coding DNA Sequence Number=SeqID_31918
  Gene Ontology: Mol. function=structural molecule activity; Cellular component=clathrin coat of trans-Golgi network vesicle; Biological process=intracellular protein transport
  Homolog annotation: Hit_ID=Q10SS6; Match level="QueryCoverage=91%, HitCoverage=55%, E-value=0.0, Identity=77%"; Hit description=Adaptin N terminal region family protein, expressed
  Pfam annotation: Domain name=Alpha_adaptinC2; Domain location=324 -433; Score=8.2; E_value=0.00056; Accession=PF02883.10; Description =Adaptin C-terminal domain
  Pfam annotation: Domain name=Alpha_adaptin_C; Domain location=439 -561; Score=-0.3; E_value=1.3e-05; Accession=PF02296.7; Description =Alpha adaptin AP2, C-terminal domain
  Pfam module annotation: Pfam domain module=Alpha_adaptinC2::Alpha _adaptin_C; Domain location=324-433::439-561
MSTIQSGYVDVILQLIDKAGDFVSDDIWYRVVQFVTNNEDLQSYAAAKAREYLDKPALHETMVKVSAYLLGETSTVAILLSTYAKILIHTQPPDVGLQQQILTIFKKYESYIDVEIQQRAVEYFELSRKGPALADVLAEMPKFPERESALLKKAEDAEIDTAEQSAIKLRSQQQTSSALVVADHSPANGSAPPANHLTLVKMPSQIVSDTQESGVIHEEVPNPPVEAPKENGTPVEVESRDTNITGINNEVKTEPPSTSHSTSPADLLADLLGPLAIEGPPAVEQNPTQGLNSNQSPVGDLALATLDDQSNSVQPIVNVEEKFHILCTKDSGVLYEDPHIQIGMKAEWRAHHGRLVLFLGNKNTSALTSVRVLILPPSHLKMELSSVPDTIPPRAQVQVPLEVANLRASRDVAVLDLSYTFGTSLVDGKLRLPVVLNKFLQPITLTPEEFFLQWKALTVHLLKVQEVVKGVKPMPLSEMANLFMSLHLAVAPGLDNNPNNLVACTTFFSEATRAMLCLIRLETDPQDRTQLRLTVASGDQHLTFELKEFVKEHLIDIPRTQAAPPMAMVQPQLLTAAPATYNDPGAMLAGLL

SEQ ID NO: 73698 - protein, 514 aa, Zea mays
  Coding DNA Sequence Number=SeqID_31919
  Gene Ontology: Mol. function=zinc ion binding; Cellular component =nucleus
  Homolog annotation: Hit_ID=Q7XCX5; Match level="QueryCoverage=94%, HitCoverage=26%, E-value=1e-154, Identity=60%"; Hit description=Plus- 3 domain containing protein, expressed
  Pfam annotation: Domain name=Plus-3; Domain location=325-431; Score =150.6; E_value=4e-42; Accession=PF03126.8; Description=Plus-3 domain
  Pfam annotation: Domain name=SWIB; Domain location=187-262; Score =83.0; E_value=9.1e-22; Accession=PF02201.9; Description=SWIBMDM2 domain
  Pfam module annotation: Pfam domain module=Plus-3::SWIB; Domain location=325-431::187-262
MGKFFSVRGTKGFCDTCYGTILLIESKDESAIKVDFDDILSWEYLFKLYWLDLKGKLSLTLEELTIAKTRWNVPSTSARKEKDESSDDLYDANNDDDAGTDCSSGKRRRTNSRKKGQKCRKVNKDCSVPAKKVELPITNTESVPTEVTNERVPLPVDTKVPNGWVPLPVDTKVPNESVPLPANTKWASPELLEFVGHMRDGDQSFISQFDVQTLLLDYIKKNNLRDPQRKSQIICDLRLHRLFRKARVAHFEMLKLLEMHFLMNETSTVTDSRQVTIDLNSAYVDTNGYNDMAAKFSPDKRRKIHRKMERDTQVNLEDYAAIDMHNINLIFMRRSLMEDLVDDAKFSDKIHGGFVRIKISDVYQKQDIYRLVKVTGTHKVPEKYSIGKKMTNFALEILNLNKKEIITMDTISNHDFTEEECKRLRQSMKCGVISRLKVGDILEKAKILQSVKVNDWFENEKQRLGHLRDRASETGRRKEYPIRPYYDVLRQRSFNARGMLPIAHNPLLRNCEYS

SEQ ID NO: 73699 - protein, 120 aa, Zea mays
  Coding DNA Sequence Number=SeqID_31920
MDPRTYMLCIQFCPKNRDSSEEIVVTPTPSQEPHAFVAGASSSAPHVLVAQAPTPRVDDLDNSGDDEDNDDDEEDNQDDNNGDANNNNNKPDQNNDFVGLCPIAEHYTSMFEMGHFPNLL

SEQ ID NO: 73700 - protein, 115 aa, Zea mays
  Coding DNA Sequence Number=SeqID_31921
MDGDRGFRTLSSHESLTPLSTYAASVSNAARRALWSLIHTYRLQLHDMAYKHLPLRPRGESQTSVVPGEAGEDRLNTLVGVVAALNTDLYNATLDLSRIHEELENTHVRIATLEA

SEQ ID NO: 73701 - protein, 273 aa, Zea mays
  Coding DNA Sequence Number=SeqID_31922
  Gene Ontology: Mol. function=iron ion transporter activity; Cellular component=vacuolar membrane; Biological process=intracellular sequestering of iron ion
  Homolog annotation: Hit_ID=Q9ZUA5; Match level="QueryCoverage=85%, HitCoverage=82%, E-value=9e-63, Identity=54%"; Hit description =Putative membrane protein
  Pfam annotation: Domain name=DUF125; Domain location=29-269; Score =211.4; E_value=2.1e-60; Accession=PF01988.9; Description=Integral membrane protein DUF125
MDGDGATWGQPMLEKRPSHRERHFTAGEVVRDVIMGVSDGLTVPFALAAGLSGASAPSSLVLTAGLAEVAAGAISMGLGGYLAAQSEADHYKREMRREQEEIITVPDTEAAEIGEIMSRYGLEPQEYGPVVAGLRRNPQAWLDFMMSHKQPTDGRQMVLFSSANQQAGEKCVSRFELGLERPDPRRALQSAFTIALSYVVGGLVPLLPYVLVSAAQDAMLTSVGVTLAALLFFGYVKGRFTGNRPFASAVQTAVIGALASAAAYGMAKAVQAR

SEQ ID NO: 73702 - protein, 105 aa, Zea mays
  Coding DNA Sequence Number=SeqID_31923
  Gene Ontology: Mol. function=oxidoreductase activity; Cellular component=integral to membrane; Biological process=microtubule bundle formation
  Homolog annotation: Hit_ID=Q8GSQ1; Match level="QueryCoverage=82%, HitCoverage=18%, E-value=3e-19, Identity=55%"; Hit description =Cytochrome P450 85A1
MLDALLSGNEGTRAKLSDDQIIDLLITLIYSGYETVSTTSMKAEVPVRQPQSSRQIRKEHLDIRKAKSPEDPLDWNDYKSMTFTKAIELPLHSTDASGSSTMYMV

SEQ ID NO: 73703 - protein, 82 aa, Zea mays
  Coding DNA Sequence Number=SeqID_31924
MRHGSLTLGVVEALDATRATAVTAEEARTTAKEMEKKAATTAKLAAIAMDKVGFVVVVVASVVAEEANALDSVAHRYLAVNL

SEQ ID NO: 73704 - protein, 112 aa, Zea mays
  Coding DNA Sequence Number=SeqID_31925
MTVQQRWTFVVAASQIEPATPGTRQYAAGRVGEKNGMYLFEAWNQTELDRHAEDGSPPLRSPQPRDATNFLPPRCGLAAAAPCQQCQRRHHDERHQRQYQGCRRGRICLLLH

SEQ ID NO: 73705 - protein, 103 aa, Zea mays
  Coding DNA Sequence Number=SeqID_31926
MAEKEHGGGVRRGQTGAGGNRGIHQRSLRSSMAKPTAGAGEEGDGLRGRGRSAAGERKEWGGVGVWCDRRGAGVGAMRWSRSESSGTEERLPARGGELRTGGG

SEQ ID NO: 73706 - protein, 47 aa, Zea mays
  Coding DNA Sequence Number=SeqID_31927
MGTFSPSATITKIVRAFTAPLNICILSGLKGVFNTYYEQQIFKDGDS

SEQ ID NO: 73707 - protein, 98 aa, Zea mays
  Coding DNA Sequence Number=SeqID_31928
  Subcellular localization annotation: CTP_CleavageSite=64; ConfidenceScore=5.03e-01
MVLTPPPSHAAIPAVRIPGWWSEAITSDRGSCASLLSGISVALDQRISRRRPFLLWNPLTTVGRAAATPEAGSTLPASDSASASPAEPLATAQPRSAQ

SEQ ID NO: 73708 - protein, 96 aa, Zea mays
  Coding DNA Sequence Number=SeqID_31929
MAIALLIQPLKGTVRGYLYVPECLTSQSRLTKAGAKGSVFAFAPTLAVLHRRKGDSSRNWLLAPPSGVDFQIRPSRDDTNALITGGWIGGEATLCA

SEQ ID NO: 73709 - protein, 59 aa, Zea mays
  Coding DNA Sequence Number=SeqID_31930
  Subcellular localization annotation: CTP_CleavageSite=36; ConfidenceScore=5.19e-01
MVASANSWPRNLRVTRGTAPTPYSRAFFEIFIVRARGSNLWRFLTNGNNTLKEKLRYSS

SEQ ID NO: 73710 - protein, 250 aa, Zea mays
  Coding DNA Sequence Number=SeqID_31931
  Gene Ontology: Mol. function=DNA binding; Cellular component=beta -galactosidase complex; Biological process=DNA integration
  Homolog annotation: Hit_ID=O24587; Match level="QueryCoverage=99%, HitCoverage=27%, E-value=1e-118, Identity=76%"; Hit description=Pol
MSMMGELNYFLGFQVKQLKDGTFISQTKVHARLAKAVWDEGRQARKRLRWGPTDTLTSTKEECHLVAVKRILRYLVATPCFGIWYPKGSTFDLIGYSDSDYAGCKVDRKSTSGTCQFLGRSLVSWNSKKQTSVALSTAEAEYVAAGQCCAQLLWMRQTLRDFGYNLSKVPLLCDNESAIRMAENPVEHSRTKHIDIRHHFLRDHQQKGDIEVFHVSTENQLADIFTKPLDEKTFCRLRSELNVLDSRNLD

SEQ ID NO: 73711 - protein, 76 aa, Zea mays
  Coding DNA Sequence Number=SeqID_31932
MKAGLRAFFDLDDAKCCNSNVITGCGTSRPAPPTPLYEAYGLLNAAAPVDVDAFCALVDAPPGRHTKQRFVQAWSS

SEQ ID NO: 73712 - protein, 401 aa, Zea mays
  Coding DNA Sequence Number=SeqID_31933
  Gene Ontology: Mol. function=transferase activity; Biological process= flavonoid biosynthetic process
  Homolog annotation: Hit_ID=Q69P55; Match level="QueryCoverage=98%, HitCoverage=99%, E-value=1e-80, Identity=40%"; Hit description =Putative hydroxycinnamoyl transferase
  Pfam annotation: Domain name=Transferase; Domain location=2-399; Score=145.0; E_value=2e-40; Accession=PF02458.6; Description =Transferase family
MTKMEVVETAMVVTPSEEMRRQGLWLSNLDLQSPHIYTTVLNYYPAPAGRPEHGGGACDPERLKVALARALVPFYPLAGRLCLGEDGRRYVDCNGEGVRFFVARADVTGPELFKDYQPSPEVTETFVPDMPPEELPCMVALFQLTFLKCGGVVLSSSFHHAVVDGTSLFHFMQSWSRLARGLDAAEAVGPQAPFHDRTSLRARAPPLQQMGAPPAPAAHSLNFAATSCPRAFVARVYPFPHTLVHELTSRCCGSGATGVSSFFGNAALQAPALPRRVGDVIDGPPASVVGMIMDAVNSVDDTYVRAVVDYHELPKENLVLGAMEPPESDVAMVSWLGMPLYDADFGWGVPELVMPTTVSVFSGMVLVLPRGLDKESGIIVVVNLEPEYLPALKKLLYDVVL

SEQ ID NO: 73713 - protein, 59 aa, Zea mays
  Coding DNA Sequence Number=SeqID_31934
MATGLYRARVLTETAPPGAVHGDPMMAAMFRPLLGTEIPIGTGRKDTRWDHGERGKMFW

SEQ ID NO: 73714 - protein, 266 aa, Zea mays
  Coding DNA Sequence Number=SeqID_31935
  Gene Ontology: Mol. function=protein serine/threonine kinase activity; Cellular component=cytoplasm; Biological process=protein amino acid phosphorylation
  Homolog annotation: Hit_ID=Q8LR51; Match level="QueryCoverage=99%, HitCoverage=49%, E-value=6e-96, Identity=68%"; Hit description =Casein kinase I-like
ALCRGYPTEFASYFHYCRSLRFDDKPDYSYLKRLFRDLFIREGFQFDYVFDWTILKYQQAQIATAPPRAVVSFSNVPLLSYPPNMHICVTVCRDNFDVLPLLQGHGAGPSGLAPALQNDRQPGPEEARTSGWSSMDRRRAPLPITSVGTLSKQKAPVGNDATVSRDAVISGPNFLGRSSGSSRRPVISSSRDAVVTDSSEPSRARTTDASPGVFRRASGPQRSSPVHSAEQKRSSSGRHPSNAKNYDSALKGIEGLTLDGDERVQY

SEQ ID NO: 73715 - protein, 373 aa, Zea mays
  Coding DNA Sequence Number=SeqID_31936
  Gene Ontology: Cellular component=membrane
  Pfam annotation: Domain name=DUF81; Domain location=89-312; Score= -55.6; E_value=0.01; Accession=PF01925.9; Description=Domain of unknown function DUF81
MWESVALTLAGTAGNNIGKVLQKKGTLILPPLSLKLKVVKAYASNQLWISGFLMDMCGAALMLTALSQAPVRCLLPLIPVRGDWVVYGPLLTVAQVSVVQPIAGCGLAILCVFSHFYLKEVMNGLDWIAITLAGLGTIGVGVGGEEQKVDQIPLLNIPWLVLSIVILFVLLNTWLHMYKKQRREQELRHPMQTGPEVIEEIIYGLESGILFGISSVISKMGFVMSEMGFPKIVVPAAISCSVCCSAVGFVYQTRGLKHGRAIVVSTCTSVASIVSGVVAGMIALDEHLPKAPTARFFLLLGWFFIITGVILLVSSTRLIARLPRPVQKFLKSNIERTHSIRRPGSARGKDPIPTTTIHTSSLHLLASPTKEKA

SEQ ID NO: 73716 - protein, 116 aa, Zea mays
  Coding DNA Sequence Number=SeqID_31937
  Gene Ontology: Mol. function=methyltransferase activity; Biological process=cell division
  Homolog annotation: Hit_ID=Q9ATW6; Match level="QueryCoverage=76%, HitCoverage=45%, E-value=3e-32, Identity=76%"; Hit description=Cell division-like 1 protein
MYEGEAALDTASDVQAYIPTGHTNTPHGEQTGHSQITEADGWRDQTKVYIPFLACGDLSGYDSDRSYPLPNTDGGSYRSLDPVQPPIAPSYKTALQMKKASCHNACADAIKPSADS

SEQ ID NO: 73717 - protein, 416 aa, Zea mays
  Coding DNA Sequence Number=SeqID_31938
  Gene Ontology: Mol. function=hydrolase activity; Cellular component =membrane
  Homolog annotation: Hit_ID=Q69II6; Match level="QueryCoverage=90%, HitCoverage=74%, E-value=1e-130, Identity=60%"; Hit description =Putative beta-glucuronidase
  Pfam annotation: Domain name=Glyco_hydro_79n; Domain location=1-235; Score=104.4; E_value=3.4e-28; Accession=PF03662.4; Description =Glycosyl hydrolase family 79, N-terminal domain
MARVRETQPWRHRPQAQALAAARHQAPVPPAGVVLLGCLPLRRWDELNVFLQKTRPRIVFGLNALNGRVPMPDDSLGGPWNYTNAASFIRYTVSKGYDVHGWELGNELSGSGVRARIDADQYAADVIALKHIVDSAYQGKPSKPLVLASGGFFDAVWFTQLVSKTKPDQMDAITHHIYNLGPGVDDHLVQKILDPSYLDGKASTFSNFQQPSGDTQVRRHVRCRLGWRGWRHVSGSALVRHKELLQTDLGWRQLWPAQHNALLWHRLMGTKVLSTTFNSTNKIRAYAHCVKNSEGIALLLINLDGISTNRIYVTSQGAHAQSERKKGSGTSDVHIIPVGLGEAAAALTRQEYHLTPKDGNLQSQQLLLNGNVLATDADGEIPELEPVQVEGTQPITVGPYSTVFAHVPSFYAPTCL

SEQ ID NO: 73718 - protein, 439 aa, Zea mays
  Coding DNA Sequence Number=SeqID_31939
  Homolog annotation: Hit_ID=Q9ASF7; Match level="QueryCoverage=99%, HitCoverage=99%, E-value=1e-113, Identity=55%"; Hit description=SF16 protein-like
  Pfam annotation: Domain name=IQ; Domain location=107-127; Score=16.3; E_value=0.11; Accession=PF00612.17; Description=IQ calmodulin-binding motif
  Pfam annotation: Domain name=IQ; Domain location=85-105; Score=28.4; E_value=2.6e-05; Accession=PF00612.17; Description=IQ calmodulin -binding motif
  Pfam module annotation: Pfam domain module=IQ::IQ; Domain location =107-127::85-105
  Subcellular localization annotation: CTP_CleavageSite=68; ConfidenceScore=5.02e-01
MGASGKWIRTLVGLRPAAERERPGAVAKGRKWSRLWRSSSSQRGSSAPASEAPSEASSTADMLSSSVVAAVVRAQPRDFRVIRQEWAAVRIQSAFRAFLARRALRALRGIVRLQALVRGRHVRKQLSVTLKCMNALVRVQERARERRFRISADGRHSQDILDDRSGLADPVKEAEAGWCDSQGTVDDLRSKMHMRHEGAVKRERAIAYALSHQRSSSHSGRPSSPAASLRNHGTGRSNKDWSHLDGSMATKPWESRLMEQTHTEHSNNSRCSESIEEMNAASSKLSDASSVKVRRNNMTTRVAAARPPPSTISASSSDFVCDASCSPSTSSVTPAASGTSFLTSDRRSDYGPNYMNWTKSAKARLNGSGTAHRLPLQRQRSSDLHHRISRIALSSADAQSTAGSEVSVTSKRLNSLTLRGRGARRSLDRKNDDQPVALF

SEQ ID NO: 73719 - protein, 409 aa, Zea mays
  Coding DNA Sequence Number=SeqID_31940
  Gene Ontology: Mol. function=glycylpeptide N-tetradecanoyltransferase activity; Cellular component=cytoplasm; Biological process=N-terminal protein myristoylation
  Homolog annotation: Hit_ID=Q6JGT1; Match level="QueryCoverage=95%, HitCoverage=94%, E-value=0.0, Identity=85%"; Hit description=N -myristoyl transferase
  Pfam annotation: Domain name=NMT; Domain location=68-205; Score =283.1; E_value=5.3e-82; Accession=PF01233.10; Description=Myristoyl -CoA:protein N-myristoyltransferase, N-terminal domain
  Pfam annotation: Domain name=NMT_C; Domain location=219-408; Score =317.1; E_value=3e-92; Accession=PF02799.6; Description=Myristoyl -CoA:protein N-myristoyltransferase, C-terminal domain
  Pfam module annotation: Pfam domain module=NMT::NMT_C; Domain location=68-205::219-408
MAAPNSNDAASASGTGPAGEEDISIEALARRVQEHMTLSSNPAARRHKFWETQPVGQFRDVADTSLPDGPIEPPTPLSEVRADPYPLPAAFEWLTCDLDDDALLADLYSLLAHNYVEDDENMFRFNYSPAFLRWALKPPSFFRAWHIGVRAKESKKLVAFISGKLRSKRLAPVLIREVTRRVHQENIWQAAYTAGVVLPTPITTCRYWHRSLNPKKLIDVGFSRLGPRMTMSRTVRLYKLPDAPLTPGFRRMELRDVAAVTRLLRAYLARFVVAPDFDEVDVEHWLLPQEDVVDSYLVESPETHEVTDFCSFYTLPSSVLNNANYATLKAAYSYYNVSTKTALQQLMNDALIVAKQKNYDVFNALDVMENESFLKELKFGPGDGQLHYYLYNYRIRNGIKPSELGLVLL

SEQ ID NO: 73720 - protein, 383 aa, Zea mays
  Coding DNA Sequence Number=SeqID_31941
  Homolog annotation: Hit_ID=Q75J71; Match level="QueryCoverage=32%, HitCoverage=21%, E-value=2e-49, Identity=80%"; Hit description =Putative L-ascorbate oxidase
MARDVTGRQRLPDRPGLGRVVLAGQQYAVPPVACIGCGSAGAAETQAPPAQQPRPHCHVLPPAAAPPRSRVDAYQISVAIFQRFYVPPPPSSPPNSRSAPRPPRPSPARLSSPDSPLSRNPRGLAPDHRPGSPEIRLDRRPSSRSSPTLSMEGESVRDSPISMQGTSSAPDCCPGWLVPSFRLPPSTKSTREGSEASIAADPDAPHSGPSGDVGGSGGMIRGDSADLPAMDAATRPAIVIDNGTGLPHLAGRRSLADAQHDRAAGRLGDWAWSINQARSFRWNLTASVARPNLQGSYHYDQINITRTIKVMVSRGHIDGKLHYGFNDISHRDTETPLKFAEYFNVTHGVFSYNQMGNVPPAVNGPLHVIPNVITAELHLFDQF

SEQ ID NO: 73721 - protein, 71 aa, Zea mays
  Coding DNA Sequence Number=SeqID_31942
MAVRVGVGGRTVHHISVDVYTMFLIVLEIIPSTRDCVTQRYSVNVLAGRSNKMGRSGKQGRAQANKACCSN

SEQ ID NO: 73722 - protein, 84 aa, Zea mays
  Coding DNA Sequence Number=SeqID_31943
MPNMSDSTGTGSYLPVIAADLPVIAAAANISTLPSKLGGEKVVYDATKKIFSSSSGLAEDILFLFTDWLSLLREIVNIETRVHT

SEQ ID NO: 73723 - protein, 264 aa, Zea mays
  Coding DNA Sequence Number=SeqID_31944
  Homolog annotation: Hit_ID=Q7XZF9; Match level="QueryCoverage=19%, HitCoverage=52%, E-value=2e-07, Identity=66%"; Hit description =Putative ribosomal protein
  Pfam annotation: Domain name=Ribosomal_L36; Domain location=58-95; Score=22.3; E_value=0.0018; Accession=PF00444.9; Description =Ribosomal protein L36
  Subcellular localization annotation: CTP_CleavageSite=19; ConfidenceScore=5.08e-01
MEETDPQSPTSDKDGLTLRSSTATTPFMRVAERLTASAASLCPSTAATSFAYIVEKKMKVRASVKRMCRFCMVLKRWGIVFIHNTSNANTSNARDSPPSLKPPSRASPKFLEQRGVGSSAHSALVFVGAGRGEGTDVLLGSYMAYEVIQFKHAWVLSKPICVRTYYDDLQYRGSWPQNTINLTFMVEIIAKLVWATRDHYFLDPTLSLEFLYHLYLSFVCKLRAGSSLASDATHVSILLSLLKVVNIHASCEIFRTYYDEYLTA

SEQ ID NO: 73724 - protein, 107 aa, Zea mays
  Coding DNA Sequence Number=SeqID_31945
  Gene Ontology: Mol. function=catalytic activity
  Homolog annotation: Hit_ID=O49717; Match level="QueryCoverage=49%, HitCoverage=12%, E-value=3e-12, Identity=75%"; Hit description =Calcium-dependent protein kinase - like protein
MAQRLRRRQGSCEENAHQGPEVGGLAPDKPLDSAVLSRMKQFSAMNKLKNMALRDEVEMDGRVVEQKVQMTAVVVEIRKKESGELVAIGRQWMTASRPKVAAAHSKI

SEQ ID NO: 73725 - protein, 73 aa, Zea mays
  Coding DNA Sequence Number=SeqID_31946
MSFKSAGDKLKFGLFTMPNYDFIKSINLAFNMIKDAWQKKRLLDCIFARLSFDSYSFGGGSLGCCGIFGSWYF

SEQ ID NO: 73726 - protein, 51 aa, Zea mays
  Coding DNA Sequence Number=SeqID_31947
MPGNSVGGGADMWGLAVIEIGACDERMGTRRKRLASGPRLAATRRGHDIAP

SEQ ID NO: 73727 - protein, 98 aa, Zea mays
  Coding DNA Sequence Number=SeqID_31948
MAGRYTEGSGMASRGLRPALEEARHGSTARELRGEGELGWEEWKTTRLSEGEDQWLQTNNLSDGKRRQQITSSTNRTLDRSVIDDLLENQISIKNSRM

SEQ ID NO: 73728 - protein, 366 aa, Zea mays
  Coding DNA Sequence Number=SeqID_31949
  Gene Ontology: Mol. function=serine carboxypeptidase activity; Cellular component=cellulose and pectin-containing cell wall; Biological process=proteolysis
  Homolog annotation: Hit_ID=Q9FYP7; Match level="QueryCoverage=83%, HitCoverage=62%, E-value=1e-154, Identity=81%"; Hit description =Similar to Hordeum vulgare carboxypeptidase D
  Pfam annotation: Domain name=Peptidase_S10; Domain location=3-353; Score=366.6; E_value=4e-107; Accession=PF00450.12; Description =Serine carboxypeptidase
MEGGASGSAAVTDSAMAEASAVDPDLALDLLASLHNQGEVSLFLFLNSKRRRKTTHDSYAFLINWLERFPQYKHRDFYITGESYGGHYVPQLSWLVYQNNKGIKNPTLNFKGFMVGNAVIDDYHDYMGTFEYWWTHGLISDETYAKLWEDCKNDVSENPSEECQKIYEVAEAEQGNIDLYSIYTPTCKKTSLQKRRLIRGRMPWLPRGYDPCTELYITKYCNLPEVQDAFHANVTGIPYAWVGCSDPIYEYWKDSPRSMLPIYRELISAGLRIWVFSGDTDSVVPLTATRYSIDALSLPTITKWYPWYYDEEVGGWCQVYEGLTLVTVRGAGHEVPLHRPPQGLKLFEHFLRGEPMPKPVESVQSF

SEQ ID NO: 73729 - protein, 125 aa, Zea mays
  Coding DNA Sequence Number=SeqID_31950
MAGTEQKGEERWERMMLAVERLTGKMEAMEIGQKKAEEDRALLARHMEENERTIAQLRLDLQAKEQEGNDTNSERELRVPRGDDRGGGMERGRDRREQWGGGRENRTGPFPKWTFPKFQGSDPGV

SEQ ID NO: 73730 - protein, 271 aa, Zea mays
  Coding DNA Sequence Number=SeqID_31951
  Homolog annotation: Hit_ID=Q1RW37; Match level="QueryCoverage=40%, HitCoverage=41%, E-value=1e-15, Identity=40%"; Hit description=Tumor- related protein, putative
  Subcellular localization annotation: CTP_CleavageSite=8; ConfidenceScore=5.09e-01
MAATTPAPPSHGGGRNGTLPPPLPSNESFSKFFESWISEQSRDLEELRAAASADPPAPESELRRLVGQVLGHYAQYYRAKAAAAADDVLCMFTPSWTSTTENLYLWCGGWRPTAAIQLLYTKSGMQLQHQLPAFLDGGGLKDDLGDLGAAQLQAADQLQRRTIRREREIEDAAASAQEALTTATMVELAGGGGRDAGAMDREMQAKAAGMRRVLEMADALRLEDDARGVNLSHATISRYGANTYIWRDKGRHVSGMEVLSYRASDHADSLA

SEQ ID NO: 73731 - protein, 45 aa, Zea mays
  Coding DNA Sequence Number=SeqID_31952
MASASLSLSLSLSVYLPYLMVCSHRRWPPGTYLLTSTTVCSHAIM

SEQ ID NO: 73732 - protein, 385 aa, Zea mays
  Coding DNA Sequence Number=SeqID_31953
  Gene Ontology: Mol. function=oxidoreductase activity, acting on the CH-CH group of donors; Cellular component=glyoxysome; Biological process=electron transport
  Homolog annotation: Hit_ID=Q75IR2; Match level="QueryCoverage=98%, HitCoverage=88%, E-value=1e-170, Identity=78%"; Hit description =Putative glutaryl-CoA dehydrogenase
  Pfam annotation: Domain name=Acyl-CoA_dh_1; Domain location=236-382; Score=86.6; E_value=7.4e-23; Accession=PF00441.14; Description=Acyl -CoA dehydrogenase, C-terminal doma
  Pfam annotation: Domain name=Acyl-CoA_dh_2; Domain location=248-371; Score=-14.3; E_value=0.0036; Accession=PF08028.2; Description=Acyl -CoA dehydrogenase, C-terminal doma
  Pfam annotation: Domain name=Acyl-CoA_dh_M; Domain location=130-182; Score=87.6; E_value=3.9e-23; Accession=PF02770.9; Description=Acyl -CoA dehydrogenase, middle domain
  Pfam annotation: Domain name=Acyl-CoA_dh_N; Domain location=13-124; Score=-1.0; E_value=0.00045; Accession=PF02771.7; Description=Acyl -CoA dehydrogenase, N-terminal domain
  Pfam module annotation: Pfam domain module=Acyl-CoA_dh_1::Acyl-CoA_dh_ 2::Acyl-CoA_dh_M::Acyl-CoA_dh_N; Domain location=236-382::248 -371::130-182::13-124
MASDYYQSDDLLTSEERSIRMKVRGIMEKEIAPIMSAYWEKAEFPFNAIPKLASLGVAGGTIKFNINLSAPIFLKFDAGLAYCRVMGAQDFPLLPVLLLCQKLHGTALCGSEAQKQKYLPSLAQLTTVGCWALTEPNYGSDASSLRTIATKAPGGWHIDGQKRWIGNSTFADVLVVLARNADTQQLNGFIVRKGAPGLKATKIENKIGLRMVQNGDIVLNKVFVPDEDRLPGINSFQDISKVLAISRIMVAWQPVGISMGVFDMCHRYLKERKQFGVPLAAFQLNQEKLARMLGNVQSMVLVGWRLCKLYESGKMTPGHASLGKAWNSRTAREVVSLGRELLGGNGILADFLVAKAFCDLEPIYSYEGTYDINSLVTGREGTGGE

SEQ ID NO: 73733 - protein, 297 aa, Zea mays
  Coding DNA Sequence Number=SeqID_31954
  Gene Ontology: Mol. function=zinc ion binding
  Homolog annotation: Hit_ID=Q40221; Match level="QueryCoverage=39%, HitCoverage=21%, E-value=1e-25, Identity=49%"; Hit description =Protein containing C-terminal RING-finger
  Pfam annotation: Domain name=PHD; Domain location=251-295; Score= -2.0; E_value=0.09; Accession=PF00628.19; Description=PHD-finger
  Pfam annotation: Domain name=zf-C3HC4; Domain location=252-292; Score= 46.5; E_value=8.8e-11; Accession=PF00097.15; Description=Zinc finger, C3HC4 type (RING finger)
  Pfam module annotation: Pfam domain module=PHD::zf-C3HC4; Domain location=251-295::252-292
  Subcellular localization annotation: CTP_CleavageSite=18; ConfidenceScore=5.55e-01
APGMTSRVPTGRAYYPVVGSSSSSSSVGAVPTIHGSSGAAMFANGGYVPSSVHAGTVPIFPNPAPATSSGSRAMPHQMVIQSHPAATSAATSTSMRTAQPSLPARTAAASRHARHVSAGLANNGRYRRARSSYYRLHPLMVEAEVDSLFLPYCFNEVEFKSLSNLKLMLLLVVKRFMMDHLVFYESRAAAADPHRDMRLDIDNMSYEDLLALGEAMGNVNTGLADEKVSECVKEVVCCSSDHTQMDQDDGSCAICLEDYRDKEALGILKCRHDFHAGCIKKWLQTKNSCPVCKAAAA

SEQ ID NO: 73734 - protein, 243 aa, Zea mays
  Coding DNA Sequence Number=SeqID_31955
  Gene Ontology: Mol. function=GPI anchor binding; Cellular component =membrane; Biological process=cell adhesion
  Homolog annotation: Hit_ID=Q06I88; Match level="QueryCoverage=56%, HitCoverage=58%, E-value=3e-43, Identity=62%"; Hit description =Fasciclin-like protein FLA18
  Pfam annotation: Domain name=Fasciclin; Domain location=42-174; Score= 94.0; E_value=4.4e-25; Accession=PF02469.12; Description=Fasciclin domain
  Subcellular localization annotation: CTP_CleavageSite=62; ConfidenceScore=5.42e-01
MQRLVRVLVVLGVAAAASAQGPTAAPTTPTPATPAAPAPATASSNITGVLAKAGQSTTRSPTAGTGFTVFAPTDNAFQSLPSGTLNSLSDQDKNALVQYHVVSTAIPMSQFDTVSNPLRTQAGSASPGEFPLNVTSSEGQQVNVTTGVVTATVDNSLYSGDSLVVYQVNKVLLPMKLFGAAEAPAPAPLAPAKKKGKTPAAVADSPDAAEASPDATTTSLAPARLTRGGLATALALAGVWWGL

SEQ ID NO: 73735 - protein, 100 aa, Zea mays
  Coding DNA Sequence Number=SeqID_31956
MDGCSRDPNYATVVVDHPEPGEFVKNAQGPYLAPTVSVSNLRSDKLKWGSTVGGSLEKEPLYRGKTGCLTPARPLCPYVSCCLVVSVCAHYDGWCERHGP

SEQ ID NO: 73736 - protein, 49 aa, Zea mays
  Coding DNA Sequence Number=SeqID_31957
MANAGAGACASALLRKKNPKIVKPNFLDFLFSLEFNKNSFMNFSLNKEF

SEQ ID NO: 73737 - protein, 134 aa, Zea mays
  Coding DNA Sequence Number=SeqID_31958
MGKSKKGGRSSHHSGDKRKHEPTPPSEDFGDSEYSEEEFSESEGSLVPASPPAPYDDSDDSQGIAAEVWTYIRAVELAGLEGSDESEVSSDEENSSDSFEESGGDGDGEGDGDDEGGGEGGSKGSSKGSNKASG

SEQ ID NO: 73738 - protein, 491 aa, Zea mays
  Coding DNA Sequence Number=SeqID_31959
  Gene Ontology: Mol. function=protein binding; Cellular component =nucleus; Biological process=rRNA processing
  Homolog annotation: Hit_ID=Q6YW01; Match level="QueryCoverage=99%, HitCoverage=100%, E-value=1e-180, Identity=62%"; Hit description =Putative WD repeat protein
  Pfam annotation: Domain name=WD40; Domain location=310-347; Score =29.6; E_value=1.1e-05; Accession=PF00400.22; Description=WD domain, G-beta repeat
  Pfam annotation: Domain name=WD40; Domain location=353-390; Score =7.8; E_value=4.5; Accession=PF00400.22; Description=WD domain, G -beta repeat
  Pfam annotation: Domain name=WD40; Domain location=448-484; Score =3.7; E_value=13; Accession=PF00400.22; Description=WD domain, G-beta repeat
  Pfam module annotation: Pfam domain module=WD40::WD40::WD40; Domain location=310-347::353-390::448-484
MSLISQNAVQKRCLRKSEADNGNDEDIGSPTSIVAEVGKEAKLKNHNKERKKKKTKLLESQQNKEEEEMRQLESSLFGSLYAPLEFGTEVGAAVAPDRDAPLFFTDRSAGGGMDYFPTYEEDMAHEDEEDMVGIKRRKPVWVDEEEEMTEVDIVKVPRLRKLRKEEDEHLISGKEYEARLRGQHAKLNPFTGWADMDQKTSLPAASDGLDKHLRFFQIDGKRNPKIQSIFIGDCPVHKASFLPDGSEVILSGRRKFFYSFDLVNAAVSKIGPLTGREEKSLESFEISPDSRTIAFVGNEGYILLISAKTKQLITTLKMNGSVRSLAFADGGNQLLSSGGDGHVYHWDLGTRKCIHKATDDGSLAGLSLCTSRDSSLFATGSSSGIVNVYKRDDFLGGKRKPMKTIENLTTDIGEMKFNHDAQILAISSRKERNGMRLVHVPSFSVFQNWPGPRFSLHYPRCLDFSPGSGFLSVGHAGGKVLLYKLHHYENA

SEQ ID NO: 73739 - protein, 225 aa, Zea mays
  Coding DNA Sequence Number=SeqID_31960
AQAPHSPDDDDNDCGRGNGAAAEPDAVPAVCAQGSCAAKASSLESGGGGGGGSGSGSSISEYLTNICPGWRVDDLLFDDSAFSAASVSSSPCSVLVFLYPQPYHANVRIGLSRRFERKQKADSCDDGHEQVPSLDADLFDVVAGAGWPGKRGSAWSGVGALGFDKVPASVVVVPTAAKQQQGCVRERTWDSDSDSDVFAVPELPQPPQAKKARPAPAPAPTFWCF

SEQ ID NO: 73740 - protein, 59 aa, Zea mays
  Coding DNA Sequence Number=SeqID_31961
PGRPRLRFEVTFVNTEVDHALVVAALARRRHGIHLASIRDGQADEDDDRKDIINKLVDA

SEQ ID NO: 73741 - protein, 38 aa, Zea mays
  Coding DNA Sequence Number=SeqID_31962
MTREAGQESGSSERMGWFNYMSGSSVPQNLTSYIKCIY

SEQ ID NO: 73742 - protein, 42 aa, Zea mays
  Coding DNA Sequence Number=SeqID_31963
MAWSHGTSPLFPGFAGSVLVALRQAFSIPVLNLVIRYSLLLP

SEQ ID NO: 73743 - protein, 90 aa, Zea mays
  Coding DNA Sequence Number=SeqID_31964
MAARDAEFKSHGKTRRYAHLYRHNRIQETVIARRRQIERVSCRPVQWIFADGRYLASCDLVSIPIRRDKTTSSDDRIRGPFICDDPVWIL

SEQ ID NO: 73744 - protein, 173 aa, Zea mays
  Coding DNA Sequence Number=SeqID_31965
  Homolog annotation: Hit_ID=Q10CL8; Match level="QueryCoverage=43%, HitCoverage=66%, E-value=4e-34, Identity=92%"; Hit description =UPF0139 protein, putative, expressed
  Pfam annotation: Domain name=UPF0139; Domain location=12-116; Score =109.9; E_value=7.4e-30; Accession=PF03669.4; Description =Uncharacterised protein family (UPF0139)
MKDGTSSGGGAFAAGSDPRQPSTAKPYAPPKLSPQDLPIDYAGFLAVAFGVLGVMLRYKVCSWIAIIFCAQSLANMKNFENDLKQLSMAFIALKVQISLISVDPSVRLFDIYMTPEDATPVLMEILWLATLLFSRAPDSHRGKEKNVSFLSGGCCLILNFIIVPLEVHNFKYH

SEQ ID NO: 73745 - protein, 549 aa, Zea mays
  Coding DNA Sequence Number=SeqID_31966
  Gene Ontology: Mol. function=RNA-directed DNA polymerase activity; Cellular component=intracellular; Biological process=RNA-dependent DNA replication
  Homolog annotation: Hit_ID=UPI00004C1733; Match level="QueryCoverage =99%, HitCoverage=40%, E-value=0.0, Identity=92%"; Hit description =UPI00004C1733 related cluster
  Pfam annotation: Domain name=RVT_1; Domain location=12-181; Score =141.8; E_value=1.8e-39; Accession=PF00078.17; Description=Reverse transcriptase (RNA-dependent
  Pfam annotation: Domain name=RnaseH; Domain location=411-538; Score =5.0; E_value=2e-05; Accession=PF00075.14; Description=RNase H
  Pfam module annotation: Pfam domain module=RVT_1::RnaseH; Domain location=12-181::411-538
MAAGFIKEVFHPEWLANPVIVKKKGGKWQMCVDYTGLNKACPKVPYPLPRIDQIVDSTAGCETLSFLDAYSGYHQIRMKESDQLVTSFITPFGMYCYVTMPFGLRNAGATYQRCMNHVFGEHIGRTVEAYIDDIVVKTKKASDLLSDLETTFRCLKAKGVKLNPEKCVFGVPRGMLLGFVVSERGIEANPEKIAAITNMGPIKDLKGVQRVMGCLAALSRFISRLGERGLPQYRLLRKAECFTWTPEAEEALGNLKALLTNAPILVPPAAGEALLIYVTATTQVVSAAIVVERREEGHALPVQRPVYFISEVLSETKIRYPQIQKLLYAVILTRRKLRQYFESHPVTVVSSFPLGEIIQCRENSGRIAKWAVEIMGKTISFAPRKAIKSQVLADFVAEWVDTQLPATPIQLELWTMFFDGSRMKTGAGAGLLFISPLGKHLRYVLRLHFPASNNVAEYEALVNGLRIAIELGVRCLDARGDSQLVIDQVMKNSHCRDPKMEAYCDEVRCLEDKFYGLELNHVARRYNETVDELAKIASGRTTVPPDIFS

SEQ ID NO: 73746 - protein, 457 aa, Zea mays
  Coding DNA Sequence Number=SeqID_31967
  Gene Ontology: Mol. function=heat shock protein binding; Cellular component=intracellular; Biological process=protein folding
  Homolog annotation: Hit_ID=Q2QQ93; Match level="QueryCoverage=77%, HitCoverage=61%, E-value=1e-120, Identity=63%"; Hit description=DnaJ domain containing protein, expressed
  Pfam annotation: Domain name=DnaJ; Domain location=12-77; Score=95.3; E_value=1.9e-25; Accession=PF00226.21; Description=DnaJ domain
MASAAACAPKRCYYEVLGLSRDCSPTDIKLAFRRLALSLHPDKQPPGSDLALATAAFQELQHAHSVLSDPQERAYYDSHRSQIIFSHPASAGAKSASTVPDLFAFFSSSAFSGFSDTGRGFYKVYGDVFDRVFAQELAYVRRMGVPEPAAPPVIGNLDSPYAQVTAFYSYWLGFGSGMDFGWAAAWDAARGESRRVRRLMEEDNKKAMRKARREYNDAVRGLVAFCKKRDKRVVDMVLKKKLEEEKRKAEEKERRKEEDKRKKERAMAYQEHEWARAEEGLYDEDEEEEMRAKKSYRTARRAIKVQSDKQWKNHEQSKKHRNKIAELRKAFREEESLKKAEEGEGDWNEVDMGFDFKPTQESDDASAFSDAAEELAEEFESNYAGNGHHGKCEVQPEGSVHVNDVDDIMEGPSSFNVNNGAVIMCYNGCSISGVILRAGQSSLEQNCPDLVWKQWEH

SEQ ID NO: 73747 - protein, 116 aa, Zea mays
  Coding DNA Sequence Number=SeqID_31968
MPRAQERYHVAMNRNRKSVHRRKLCLSECHENEEVVVVEDEVAPRVEIPPVGDSFYFDICGTDPESPTTQGKPRPIPERRTRNGSGEMARVACTLHGKTLDGGVSMLSVGVNPVWS

SEQ ID NO: 73748 - protein, 378 aa, Zea mays
  Coding DNA Sequence Number=SeqID_31969
  Pfam annotation: Domain name=zf-CCHC; Domain location=185-202; Score =18.5; E_value=0.00088; Accession=PF00098.13; Description=Zinc knuckle
  Pfam annotation: Domain name=zf-CCHC; Domain location=204-221; Score =20.7; E_value=0.00039; Accession=PF00098.13; Description=Zinc knuckle
  Pfam module annotation: Pfam domain module=zf-CCHC::zf-CCHC; Domain location=185-202::204-221
MTIQIGEVLQMQIKVQRKLNEQHEGEMRESDSSAPVPTPGPAATSLPFPSPRAVTTTQTSVAAVFPPRRPSSSPLFRGDARLKSGGRTKFERWGGVSPGSVPSSGLPFRDDVFSSSPPATAAVRLQPESRPPPLVWGSTFRMTPRLPTGADAEGWELVESRRAKRLRLRALRVRRHGPSPSAFNGVCFNCLSPRHLARHCRLDSRCFNCLALGHKAASCPGDPATSPVPRVHSSTAVHPVWARLGGSVAAGSSVWSRLGGTKGPGRPISVWGRISPPMDRSDAGRQRLVHAPMRRLAPSFEEGNLVPHRLERTTQVSPSPGVAGSSGSSLVSWGWSHAMSSAEEDLKKAGGDLGDQRAYNCSREEVAALLAPWVKLRK

SEQ ID NO: 73749 - protein, 70 aa, Zea mays
  Coding DNA Sequence Number=SeqID_31970
  Subcellular localization annotation: CTP_CleavageSite=43; ConfidenceScore=5.23e-01
MAPQLAASLFFFLSSALCSLSGLPARSPLGFCLFQCRAWYVCRDDYSACSSDTYLVDACRNMGIHVACCI

SEQ ID NO: 73750 - protein, 384 aa, Zea mays
  Coding DNA Sequence Number=SeqID_31971
  Gene Ontology: Mol. function=heat shock protein binding; Cellular component=intracellular; Biological process=protein folding
  Homolog annotation: Hit_ID=Q2QQ93; Match level="QueryCoverage=78%, HitCoverage=61%, E-value=7e-62, Identity=58%"; Hit description=DnaJ domain containing protein, expressed
  Pfam annotation: Domain name=DnaJ; Domain location=12-77; Score=95.3; E_value=1.9e-25; Accession=PF00226.21; Description=DnaJ domain
MASAAAGAPKRCYYEVLGLSRDCSPTDIKLAFRRLALSLHPDKQPPGSDLALATAAFQELQHAHSVLSDPQERAYYDSHRSQIIFSHPASAGAKSASTVPDLFAFFSSSAFSGFSDTGRGFYKVYGDVFDRVFAQELAYARRMGVPEPAAPPVIGNLDSPYAQGPCCLSARRGIKRVVDMVLKKKLEEEKRKAEEKERRKEEDKRKKERAMAYQEHEWARAEEGLYDEDEEEEMRAKKELSYCAACNKKFKSDKQWKNHEQSKKHRNKIAELRKAFREEESLKKAEEGEGDWNEVDMGFDFKPTQESDDASAFSDAAEELAEEFESNYAGNGHHGKCEVQPEGSVHVNDVDDIMEGPSSFNVNNGAVIMRLIEDIEQVILLASD

SEQ ID NO: 73751 - protein, 316 aa, Zea mays
  Coding DNA Sequence Number=SeqID_31972
MDSRGRLRTGHPQHFFGEARLPPPDISVRVLSPAISALSYNPRPLSPDRRLTIPHHQSRLWHTSIRIYGTPASATRKSRVYGTPASATTRRVSYPTPASPTTSSSSSPHMPRDLASTPSMEGPHTISGKGAPRRAQPSSDSAPHPRIRWQNRHPQPCAPARRGHASAPRPHLTAASTFRIPPRMPEISVVPLPLSCSSLALALAVARYLCRYPLACLYLTQLSHDLVSLSSPVTPCTPSPSFPSYSATPSTLVATIRHAIIAVVHWRGKVPAIDAIIRWVRDLHHLHTHWVSNQSRGECGRQRLEEGVCFSSWHHL

SEQ ID NO: 73752 - protein, 149 aa, Zea mays
  Coding DNA Sequence Number=SeqID_31973
MGKNKKGGSSSHHSGDKRKREPSPPSEDFGDSEYSEEEFSSEFEGALGIAVEVWTYIRAIDRSGLEGSDESEVSSDEENSSDSSEEESGGDGDDEGDGDDGGDSGDDGDGDGKGDGGDSGKGDGDGGKGDDDGKGSGGSSKASGKAPLV

SEQ ID NO: 73753 - protein, 149 aa, Zea mays
  Coding DNA Sequence Number=SeqID_31974
MGKNKKGGSSSHHSGDKRKREPSPPSEDFGDFEYSEEEFSSEFECAPGITVEVWTYIRAIDRFGLEGSDESEVSSDEENSSDSSEEESGGDGDDEGDDDDGGDSGDDGDGDGKGDGGDSGKGDGDGGKGDDDGKGSGGSSKASGKAPLV

SEQ ID NO: 73754 - protein, 71 aa, Zea mays
  Coding DNA Sequence Number=SeqID_31975
MALQLELVTFGKIRGRSAIIHRTVRLVRKCNLHRVCHLKEMILRVFYRICDGKKKDLNMYPMGVLCTSNLD

SEQ ID NO: 73755 - protein, 45 aa, Zea mays
  Coding DNA Sequence Number=SeqID_31976
MAGSVARTLGLAVGCARAAVLAAVRKKMGAGAAVPGETHQLGLPI

SEQ ID NO: 73756 - protein, 225 aa, Zea mays
  Coding DNA Sequence Number=SeqID_31977
  Gene Ontology: Mol. function=DNA-directed RNA polymerase activity; Cellular component=nucleus; Biological process=transcription
  Homolog annotation: Hit_ID=Q00SN1; Match level="QueryCoverage=39%, HitCoverage=23%, E-value=1e-11, Identity=38%"; Hit description=[K] KOG3233 RNA polymerase III
MIRASDGVDAHGGVSIVEAGESSAIRSKTGSWFHNSIRSEKRDSCAPLPRGAAASLSCAMPPRKRPALPPDEPSPSSKHQPEAHPSEPSKPSPDSEQPIISAAILAQLPPQERLAYKLIFEAGNKGMWMLDIRKKLLMGPNIATKVVRTLVTRRLLKEVSDVRHRSRKIFMATDFPPSAEITGGNWYFDGRPWTLTPLLTCALAAASARSRGSMPSPVQMIHHGF

SEQ ID NO: 73757 - protein, 85 aa, Zea mays
  Coding DNA Sequence Number=SeqID_31978
MCLSLYNGLDTVSMDLEQVLIGLQPLLEDYEALGLYDDFQSDGDVHGDCNEQCVSDEDNSLDSEEINDRRLTHFSVSELFVSERV

SEQ ID NO: 73758 - protein, 162 aa, Zea mays
  Coding DNA Sequence Number=SeqID_31979
  Subcellular localization annotation: CTP_CleavageSite=35; ConfidenceScore=5.41e-01
MAGVDLSLAPGGHPPSGIKAGPSATFSLRAAQPKRVAARGGRELITTGGQQGERERADGSRHGRDRGTPPLELSRRIWATRWGYVDGVGGLDVLSLTVGVRGIARRRTIFVVLPHPAEGIIESFATACKIPPNRFACVSISSCTESWYTKITRSSNPCTLAG

SEQ ID NO: 73759 - protein, 58 aa, Zea mays
  Coding DNA Sequence Number=SeqID_31980
MAERGTDLKGKRLSSPRWIVHKSIVNIEGMNVCPSQPSSGDRYILREIMLQRMKDIDH

SEQ ID NO: 73760 - protein, 40 aa, Zea mays
  Coding DNA Sequence Number=SeqID_31981
MLFQFGCWLLAAIPCGFATELLEIKSKESSLHVLLLAGNP

SEQ ID NO: 73761 - protein, 99 aa, Zea mays
  Coding DNA Sequence Number=SeqID_31982
EHLWLSRVGGGLFIHGCLHSSSEGCSNVGLQVHSSSLKGCRGLAYLRLRRALSRAMVPRGIGVKAVEEEQGRGPEAREEEHNITVSEIPISQMISVCTY

SEQ ID NO: 73762 - protein, 111 aa, Zea mays
  Coding DNA Sequence Number=SeqID_31983
MDAIDMRGMVFLTWQKCYIKALKDSPGSYYTVWRLNSMPRREKVPSKLNTKISPRPYGGLEKLHKLSLSKVDQGLPCCGPNTKVGGVACIEWSHYPLSVEAVRKMDPGPFG

SEQ ID NO: 73763 - protein, 196 aa, Zea mays
  Coding DNA Sequence Number=SeqID_31984
  Gene Ontology: Mol. function=heat shock protein binding; Cellular component=integral to membrane
  Homolog annotation: Hit_ID=Q67J13; Match level="QueryCoverage=72%, HitCoverage=82%, E-value=4e-48, Identity=69%"; Hit description=DNAJ heat shock N-terminal domain-containing protein-like
  Pfam annotation: Domain name=DnaJ; Domain location=36-105; Score =66.1; E_value=1.2e-16; Accession=PF00226.21; Description=DnaJ domain
  Pfam annotation: Domain name=zf-CSL; Domain location=120-181; Score =4.8; E_value=0.064; Accession=PF05207.4; Description=CSL zinc finger
  Pfam module annotation: Pfam domain module=DnaJ::zf-CSL; Domain location=36-105::120-181
MDQIQIEGAFVGSNQDLFPGPAPTMVLTSNISVQKTLYEVLSVSEDATYDEIRAAYRSAALNTHPDKAQTTLESSSVPSTEQQEFSSVQKAWEVLRHPTSRAYYDKQLQSSRQSIEIIASEIQVGDMIVESAAGALELLYPCRCGDYFSITSGELSGMGIVVTGDGEELNECLLFLIAADEKEVLAAAVGVVLNNL

SEQ ID NO: 73764 - protein, 144 aa, Zea mays
  Coding DNA Sequence Number=SeqID_31985
  Homolog annotation: Hit_ID=Q5CCK3; Match level="QueryCoverage=36%, HitCoverage=10%, E-value=3e-15, Identity=87%"; Hit description =Cytochrome P450
MALALAIFFLEGCPKAVQELREEHLFIARRQAKRGVQIELGRLQGNGFHAVSIRVNTRCACNILKQSGDVKMYSRDSASLAYGVGLIAYGEYCKQKLKAPDSELHLQKGRRTSEDLRSESATDYFAIHNRCCWFAPIVERTAKA

SEQ ID NO: 73765 - protein, 393 aa, Zea mays
  Coding DNA Sequence Number=SeqID_31986
  Gene Ontology: Mol. function=oxidoreductase activity; Cellular component=membrane; Biological process=metabolic process
  Homolog annotation: Hit_ID=Q67J16; Match level="QueryCoverage=70%, HitCoverage=43%, E-value=1e-132, Identity=85%"; Hit description =Putative NADPH oxidoreductase homolog
  Pfam annotation: Domain name=ADH_N; Domain location=33-119; Score =76.1; E_value=1.1e-19; Accession=PF08240.2; Description=Alcohol dehydrogenase GroES-like domain
  Pfam annotation: Domain name=ADH_zinc_N; Domain location=148-300; Score=123.2; E_value=7.1e-34; Accession=PF00107.16; Description=Zinc- binding dehydrogenase
  Pfam module annotation: Pfam domain module=ADH_N::ADH_zinc_N; Domain location=33-119::148-300
MLEILCRVVHTLSHNFRNATRLERVQLRFPIKAHSALVKIIYAGVNASDVNFSSGRYFSGNPKETASRLPFDAGFEGVGIVAAVGDSVSHIKVGTPVALMTFGSYAEFTEVPAKHLLPVPRPDPEVVAMLTSGLTASISLEKAGQMTSGQVVLVTAAAGGTGQFAVQLAKLAGNKVVATCGGESKAELLASLGVDRVINYRNERVKDVLKKEFPRGVDIIYESVGGEMFDLCLNALAVHGHLIVIGMISQYQGEDGWKPKNYTGLCEKILAKSQTVMSPLFIDWLLETTCKKKWREYLLEDELSIFPYCDLYVHQQQHFGHPTILRRETECAISLGEGMQHVAEYYLTNCLAELYIEGSSVILWSSHCTPGLAWSKLVLALVMPLPAWQNELL

SEQ ID NO: 73766 - protein, 76 aa, Zea mays
  Coding DNA Sequence Number=SeqID_31987
MGRRNWVETQVKKQTEYRGGPEVTMNQVKSLLSPIERCRKRETGPGWPRRRCQVVEVAVETRTGGGDTPVDDARSV

SEQ ID NO: 73767 - protein, 698 aa, Zea mays
  Coding DNA Sequence Number=SeqID_31988
  Gene Ontology: Mol. function=RNA-directed DNA polymerase activity; Cellular component=mitochondrion; Biological process=RNA-dependent DNA replication
  Homolog annotation: Hit_ID=UPI00004C1731; Match level="QueryCoverage =94%, HitCoverage=61%, E-value=0.0, Identity=79%"; Hit description =UPI00004C1731 related cluster
  Pfam annotation: Domain name=RnaseH; Domain location=301-428; Score =11.6; E_value=4.8e-06; Accession=PF00075.14; Description=RNase H
  Pfam annotation: Domain name=rve; Domain location=468-628; Score =97.3; E_value=4.7e-26; Accession=PF00665.16; Description=Integrase core domain
  Pfam module annotation: Pfam domain module=RnaseH::rve; Domain location=301-428::468-628
MPGIPRDVAEHSLDIRAGARPVKQPLRRFDKEKRRVIGEELHKLKEAKGVNLNPEKCVFGVPRGMLLGFIVSERGIEANPEKIAAITSMGPIKDLKGVKRVVGCLAALSRFISRLGERGLPLYRLLRKTECFAWTPEAEEALRNLKALLTKAPILVPPADGEALLVYVATTTQVVSAAIVVERQEEGHALPVQRPVYFVSEVLSETKIRYPQVQKLLYAVILTRRKLRHYFESHPVTVVSSFPLGEIIQCREASGRIAKWAVEIMGETISFAPRKAIKSLVLADFVAEWVDTQLPTAPIQPELWTMFFDGSLMKTGAGAGLLFISPLGKHLRYVLHLHFPASNNVAEYEALVNGLRIAIELGVRRLDARGDSQLVIDQVMKNSHCRDPKMESYCDEVRRLEDKFYGLELNHIARRYNETADELAKIASGRTTVPPDVFSRDLHQPSVKIDDSPEPEAPSVQPEVPSAQPEAPSARPEAPSVQPKKAPGGYTHLLVAIDKFSKWIEVRPLNSIRSEQAVAFFTNIIHCFGVPNSIITDNGTQFTGRKFLDFCEDHHIRVDWAAVAHPMSNGQVERANGMILQGLKPRIYNDLNKFGKRWMKELPSVVWSLRTTPSRATGFTPSPCDATTPEGSDPETSRWATWCFGCGKTPEGGTSTPPWEGPFIIAKILKPGTYKLANSQGEVCSNAWNIQQLRRFYP

SEQ ID NO: 73768 - protein, 73 aa, Zea mays
  Coding DNA Sequence Number=SeqID_31989
  Subcellular localization annotation: CTP_CleavageSite=57; ConfidenceScore=5.36e-01
MELKPGLSALVTGGASGIVVPGSISPMSTWPRSLGRLARLRRLTARAWVSPWLDKTLCSAIGGAAAALDMRAS

SEQ ID NO: 73769 - protein, 285 aa, Zea mays
  Coding DNA Sequence Number=SeqID_31990
PQKKKSRRQQQHQLLQQEGEADRFGAARLGSLLPLPASPLAALARVADVLALTLADAGPALAGAEPCVAAHLDAGVWFFDSCNAISAGLDRLRRRLLLARLALHLVLSPSPSGGRARARAALADRGDHPAPSPLPSLPFEQPRGRLSAAARVLAAVDAISSLAAAAAAAVLVGGPVTFPRVSGGVGDLPWAEPFNAVSGQLAALGDGEVASLDEAVRRLASALDASGEGAADDEAAVRAAAQEAERRAEEVAPLLDHLSDAVGGVFRAALGLRNAEVDSFMVGPA

SEQ ID NO: 73770 - protein, 249 aa, Zea mays
  Coding DNA Sequence Number=SeqID_31991
  Gene Ontology: Mol. function=binding; Biological process=protein kinase C activation
  Homolog annotation: Hit_ID=Q75LD1; Match level="QueryCoverage=75%, HitCoverage=66%, E-value=2e-14, Identity=27%"; Hit description =Putative pentatricopeptide repeat domain contianing protein
  Pfam annotation: Domain name=PPR; Domain location=189-223; Score =22.8; E_value=0.0012; Accession=PF01535.11; Description=PPR repeat
  Subcellular localization annotation: CTP_CleavageSite=29; ConfidenceScore=5.23e-01
MSLRLGFHNLEPALAAAAEALFGTRSPPRAVLRRARALHALLVVSSLPSAPRPPTFLVNQLLALYCRLSAVPDALALLRSTPCPSVISYNTVLSALSRTPRHAQDAFGLFRGLHSSGLRPTAPSLCAVLRAAGALRDGRAGAAAHAHASALGFLASDIVPTALLQMYSGCGSPRDANQVFDEMMTPDVVAWNCVMHCNVRYDYLDRALRKFCRMVSTGLAPTESTLSSVLSGCGRSGDLHHGRALHTNL

SEQ ID NO: 73771 - protein, 139 aa, Zea mays
  Coding DNA Sequence Number=SeqID_31992
  Gene Ontology: Mol. function=DNA binding
MSILLMAPVVDSATQRLLEENNQLLNQISANNETFKTVENTDLFLRTSNNIKTILSRMSETPGIMSQMPPLPLSINEDHINSLIQLNRLPACPPILEAFGRSLQLWFESRKLFAAVSVSVIQHVDQSIRQWILVSANDL

SEQ ID NO: 73772 - protein, 67 aa, Zea mays; identical to SEQ ID NO: 57880
  Coding DNA Sequence Number=SeqID_31993

SEQ ID NO: 73773 - protein, 100 aa, Zea mays
  Coding DNA Sequence Number=SeqID_31994
  Homolog annotation: Hit_ID=Q852M1; Match level="QueryCoverage=68%, HitCoverage=5%, E-value=1e-14, Identity=60%"; Hit description =Probable aldehyde oxidase 2
MNETAKVNVINGSLTNRTTNISGRYSLKENLEVDRNYLPIHSRQEMVFGDEYKPVGKPIKKVGAELQASVLPLFQIIDVLVQNNKKMDIAPSEKMSGEWQ

SEQ ID NO: 73774 - protein, 77 aa, Zea mays
  Coding DNA Sequence Number=SeqID_31995
MTYASDTNSSELLRKLIGRRPSISVVLLSDYRATWCSQSQTPKRRATRSGDDEKGLLRLNLQSRVVELERACKEMKG

SEQ ID NO: 73775 - protein, 227 aa, Zea mays
  Coding DNA Sequence Number=SeqID_31996
  Gene Ontology: Mol. function=magnesium ion binding; Cellular component=membrane; Biological process=photosynthesis, light harvesting
  Homolog annotation: Hit_ID=Q41748; Match level="QueryCoverage=78%, HitCoverage=72%, E-value=2e-99, Identity=95%"; Hit description =Chlorophyll a/b-binding apoprotein CP24 precursor
  Pfam annotation: Domain name=Chloroa_b-bind; Domain location=41-216; Score=231.1; E_value=2.4e-66; Accession=PF00504.12; Description =Chlorophyll A-B binding protein
  Subcellular localization annotation: CTP_CleavageSite=37; ConfidenceScore=5.20e-01
MALAPTSAAVLKTPFLGARRALANAAAKPAPRRALVVAAAAAAKKLPGDFGFDPLGLGKDPAFLKWYREAELIHGRWAMAAVLGIFVGQAWSGIPWFEAGADPSAIAPFSFGSLLGTQLLLMGWVESKRWVDFFNPDSQAVEWATPWSRTAENFANFTGEQGYPGGKFFDPLGLAGTVKDGVYIPDVDKLERLKLAEIKHARIAMLAMLAFYFEAGQGKTPLGALGL

SEQ ID NO: 73776 - protein, 143 aa, Zea mays
  Coding DNA Sequence Number=SeqID_31997
MSPCPSSIHGQAAPAEAPSLPRSLAGRGVKDEGEERVAVAATTPTPTRGSTPGLFCSNEGIQLQLSGRQLAVLFEIQNPARSVLALLAGAALSTQAIDLQFHAFCNAGGGRGFRAIPEGEARIYGIIVTCWTSGASLMTVSHS

SEQ ID NO: 73777 - protein, 326 aa, Zea mays
  Coding DNA Sequence Number=SeqID_31998
  Gene Ontology: Mol. function=zinc ion binding
  Homolog annotation: Hit_ID=Q9LIH7; Match level="QueryCoverage=89%, HitCoverage=95%, E-value=6e-54, Identity=39%"; Hit description =Arabidopsis thaliana genomic DNA, chromosome 3, TAC clone:K24M9
  Pfam annotation: Domain name=zf-DHHC; Domain location=134-181; Score=- 15.1; E_value=0.017; Accession=PF01529.11; Description=DHHC zinc finger domain
MAEAEREQRPLPEVEQSVTSIPEDHEATCWGCGLRLVFASYSPIYKCGWCGAVTQSNNQTARKPDSIWFSHWRRLRDRLFVAVLVLFMLFVICGGVWAVYPVVFSVSKFCGVFHCTVAAVLAVCTVTSYCLASLKCAGAPTDISRLVYSSRPLSVQVQIGNCVGASNHQVFVVFLISVVISCSYVAGMTIYASYQIWPSIEFPDLASSSRHSMSSWKTVLEMITTVAGSAFFLSARGLVLVYLAFASSSVNAGIAVLLCQQLSYIYEGNTYLSRLSSPPNALQHGERGLQNIVRFFGCPYPVSRAVLRLRYSNAAKLQDDSGSKLL

SEQ ID NO: 73778 - protein, 94 aa, Zea mays
  Coding DNA Sequence Number=SeqID_31999
  Gene Ontology: Mol. function=nucleotidyltransferase activity; Biological process=aromatic amino acid family biosynthetic process
  Homolog annotation: Hit_ID=Q6H7J6; Match level="QueryCoverage=84%, HitCoverage=11%, E-value=8e-23, Identity=64%"; Hit description =Oligopeptide transporter OPT-like
MAMSIPFYLGPYFGSLVRLVWDRLDPARAKAFAPPVASGLICGDGIWTLPQSVLALAGAKPAVHLHEVPVPQHQRQGRRFPPQLAPSERATSTS

SEQ ID NO: 73779 - protein, 195 aa, Zea mays
  Coding DNA Sequence Number=SeqID_32000
  Gene Ontology: Mol. function=molecular_function; Cellular component =mitochondrial inner membrane; Biological process=ubiquinone biosynthetic process
  Homolog annotation: Hit_ID=Q9ZPR0; Match level="QueryCoverage=98%, HitCoverage=90%, E-value=5e-88, Identity=76%"; Hit description =Ubiquinone biosynthesis protein COQ4 homolog
  Pfam annotation: Domain name=Coq4; Domain location=3-195; Score =353.4; E_value=3.8e-103; Accession=PF05019.3; Description=Coenzyme Q (ubiquinone) biosynthesis protein Coq4
MLGARVQLKGWQQAAVAFGSAFGALLDPRRADLIAALGETTGKPAFERVLQRMKNSAEGRVSHAWDLPQNTFGAAYAQFMGSRNFSPDDRPPVRFMDTDELAYVATRAREVHDFWHVLFGLPTNLIGETALKVIEFEQMFLPMCMLSVVGGSARFSDKQRALFFQHYFPWATKAGLKCTDLMSVYYEKHFHEDLE

SEQ ID NO: 73780 - protein, 135 aa, Zea mays
  Coding DNA Sequence Number=SeqID_32001
  Subcellular localization annotation: CTP_CleavageSite=68; ConfidenceScore=5.09e-01
MAADSSMGFHQGITASLYNHHMLSFQSNSDVGIGGGDDATGGMVMAPGSVSGGSGNAGLFLSPNTGVVGNAPGVAPLMNSSGDAFRGTGTPKYKYVTGSPSDWSDREVDILNEGLVRLLWNGTCLLHEHFFVATF

SEQ ID NO: 73781 - protein, 82 aa, Zea mays
  Coding DNA Sequence Number=SeqID_32002
  Homolog annotation: Hit_ID=Q6QP51; Match level="QueryCoverage=61%, HitCoverage=22%, E-value=1e-12, Identity=70%"; Hit description =Putative growth-regulating factor 1
MAVAGGREQRSRRQPSLRPIPGQKQAPSLPTDQGFEGWPLGGFRQPPQSAWAPHPLLVRGSKAGPSEGFNGCLRPLGLRTHY

SEQ ID NO: 73782 - protein, 91 aa, Zea mays
  Coding DNA Sequence Number=SeqID_32003
MEVTEEPSALEVATAEDLAPEGGAGSYPAPEGVADSDPALVGSASYNLAPRVFRLFLLIFLRRAMTQLLLPWVYHCSSPIFRLLSMEYLPS

SEQ ID NO: 73783 - protein, 235 aa, Zea mays
  Coding DNA Sequence Number=SeqID_32004
MGLVKGIWAQPARQREREELGCEGCGPERRCYTKHSLNSRPSIVLVTNLPRRAVASNVRGEVISLSSSTLSEGLQARLAIMEAHAMSQETELVKLRWEVNLVTQSIQARGATHLQRPLDILSHVRNIMDLSIHRGAAIALAIARFHTRVDLRAIGDAFSGRPIRGLREPYLGVRRGRLRGRWCHVSGGPDLMGSLGPFSRVHLLGFVARATALVAVSGVRTEGGETIGLPTFLSR

SEQ ID NO: 73784 - protein, 108 aa, Zea mays
  Coding DNA Sequence Number=SeqID_32005
MDHSKCLALECSHQDRSKRRLSKESLWEEHLQESLVSQPSQENQHENLPACNSPTALAPFRENKGLCAKILGLKEQSNWIAGLNTSKEEGSYAKGLGEGVSVDMGRQI

SEQ ID NO: 73785 - protein, 162 aa, Zea mays
  Coding DNA Sequence Number=SeqID_32006
  Homolog annotation: Hit_ID=Q8H6I4; Match level="QueryCoverage=52%, HitCoverage=3%, E-value=9e-08, Identity=43%"; Hit description =Putative gag-pol polyprotein
MPILEKGEVTSTSSFNEEIDPKVLDLSMKIAERMFFMMKVDEAIKRLEEEEEAKKTTKEEQAKDKEKKKLEYNDDLVELFVSKVIQKPRDIELGNWKVNSQDHTKKTVVTKEESEVHTLKKVIESSSDDYQDNAATFIKRFKKLIRGGDKYQRRDHDMNVAK

SEQ ID NO: 73786 - protein, 134 aa, Zea mays
  Coding DNA Sequence Number=SeqID_32007
  Gene Ontology: Cellular component=nucleus
LRGWTMDPDLDLDLDMDMETLAGDSGGEAERNEAAEAEAEVERYEAAEAEADILRDRFRLAVISIATAEGKKAGMTVADPVVSCIADLAFKSAAHRNEHLMGLLRTFSQELKGKEPASERKRKKSSKKDETVIE

SEQ ID NO: 73787 - protein, 167 aa, Zea mays
  Coding DNA Sequence Number=SeqID_32008
MARVDSGGLRLHGEDAGEHGPGELERLGANQEVSRVACEGAKLTEATDTTDTRRQSRNGGDPSAEFHGCAQSEREGEGARLRAQLSEGTADVQGQTVRTRGTDHPWLAEQGQQLGSEHAKKELITREKPGSLGKKNESKTLSKETKISGEKHKEDKDESAGSIMKVA

SEQ ID NO: 73788 - protein, 84 aa, Zea mays
  Coding DNA Sequence Number=SeqID_32009
MRSIEKDQRAVKKQKKIQRSERIRLLRNAKVQDVPEKTVGTSSSSSVGVTEILKSKEKGVEKSAKEKKTALATEGSVEGVTTGF

SEQ ID NO: 73789 - protein, 218 aa, Zea mays
  Coding DNA Sequence Number=SeqID_32010
  Homolog annotation: Hit_ID=Q6A4M2; Match level="QueryCoverage=28%, HitCoverage=21%, E-value=9e-08, Identity=54%"; Hit description=Beta -ketoacyl reductase GL8B
MTSSHFLSSLDHAWQHNVLYSHDALDVDQDQDAHQLLAHLVERSSARMDKAVRRGPGRSLERLNAGHEPLEILAGGAGIEEEAKGECEGRDQGGSLTAGQGAEEAGATHGGRRGRGRSGGRRGWWVFGVAVDKARSARCATGAEPCGRVKGAARGVKGAEPHRLGQTGAPSVQHKLLQGASSLGCKPFPHDEGIRDEDRFKDDKNKRRSYRQIDSFGS

SEQ ID NO: 73790 - protein, 408 aa, Zea mays
  Coding DNA Sequence Number=SeqID_32011
  Gene Ontology: Cellular component=integral to membrane; Biological process=response to nematode
  Homolog annotation: Hit_ID=Q6K225; Match level="QueryCoverage=70%, HitCoverage=98%, E-value=8e-78, Identity=49%"; Hit description =Phosphate translocator-like
  Pfam annotation: Domain name=DUF6; Domain location=127-252; Score =6.0; E_value=0.03; Accession=PF00892.11; Description=Integral membrane protein DUF6
  Pfam annotation: Domain name=TPT; Domain location=11-252; Score =136.6; E_value=7e-38; Accession=PF03151.7; Description=Triose -phosphate Transporter family
  Pfam module annotation: Pfam domain module=DUF6::TPT; Domain location= 127-252::11-252
  Subcellular localization annotation: CTP_CleavageSite=74; ConfidenceScore=5.30e-01
MGVGGEKFQLGTVGALSLSVVSSVSIVICNKALMSSLGFNFATTLTSWHLLVTFCSLHVALWMKFFEHKPFDSRTVMGFGVLNGISIGLLNLSLGFNSVGFYQMTKLAIIPCTVILETLFLQEEVQMTNTIQKKFKVSSTQLLYQSCPYQSLTLFLIGPFLDGFLTNQNVFAFNYTSQVVFFIVLSCLISVSVNFSTFLVIGKTSPVTYQVLGHLKTCLVLTFGYVLLHDPFSWRNILGILIAVVGMVLYSYFCTVETQHKNTEVSPQQVKESEAAPLISDSLSKVENGGGVVDDEPLKRHDLLLVKGSVSWEDLTFKIARYTLKLDGRYCMIVSGHVPHRLTVTSNWYMACLYPKIDFFFFVSERSDRSLDLCNYVLWEATICNCFSHEPGKHMASMTSPRFIGVPE

SEQ ID NO: 73791 - protein, 1053 aa, Zea mays
  Coding DNA Sequence Number=SeqID_32012
  Gene Ontology: Mol. function=protein serine/threonine kinase activity; Cellular component=integral to membrane; Biological process=protein amino acid phosphorylation
  Homolog annotation: Hit_ID=Q2R0X3; Match level="QueryCoverage=96%, HitCoverage=96%, E-value=0.0, Identity=48%"; Hit description=Leucine Rich Repeat family protein
  Pfam annotation: Domain name=LRRNT_2; Domain location=34-77; Score =46.9; E_value=6.7e-11; Accession=PF08263.3; Description=Leucine rich repeat N-terminal domain
  Pfam annotation: Domain name=LRR_1; Domain location=107-129; Score =9.0; E_value=5.8; Accession=PF00560.23; Description=Leucine Rich Repeat
  Pfam annotation: Domain name=LRR_1; Domain location=131-154; Score =11.8; E_value=1.8; Accession=PF00560.23; Description=Leucine Rich Repeat
  Pfam annotation: Domain name=LRR_1; Domain location=156-178; Score =15.8; E_value=0.16; Accession=PF00560.23; Description=Leucine Rich Repeat
  Pfam annotation: Domain name=LRR_1; Domain location=181-203; Score =16.7; E_value=0.083; Accession=PF00560.23; Description=Leucine Rich Repeat
  Pfam annotation: Domain name=LRR_1; Domain location=205-227; Score =12.2; E_value=1.5; Accession=PF00560.23; Description=Leucine Rich Repeat
  Pfam annotation: Domain name=LRR_1; Domain location=229-251; Score =12.9; E_value=1.1; Accession=PF00560.23; Description=Leucine Rich Repeat
  Pfam annotation: Domain name=LRR_1; Domain location=253-274; Score =9.3; E_value=5.1; Accession=PF00560.23; Description=Leucine Rich Repeat
  Pfam annotation: Domain name=LRR_1; Domain location=282-304; Score =12.0; E_value=1.6; Accession=PF00560.23; Description=Leucine Rich Repeat
  Pfam annotation: Domain name=LRR_1; Domain location=306-328; Score =10.6; E_value=2.9; Accession=PF00560.23; Description=Leucine Rich Repeat
  Pfam annotation: Domain name=LRR_1; Domain location=330-352; Score =15.2; E_value=0.23; Accession=PF00560.23; Description=Leucine Rich Repeat
  Pfam annotation: Domain name=LRR_1; Domain location=354-377; Score =2.6; E_value=92; Accession=PF00560.23; Description=Leucine Rich Repeat
  Pfam annotation: Domain name=LRR_1; Domain location=379-401; Score =6.3; E_value=19; Accession=PF00560.23; Description=Leucine Rich Repeat
  Pfam annotation: Domain name=LRR_1; Domain location=403-424; Score =12.8; E_value=1.1; Accession=PF00560.23; Description=Leucine Rich Repeat
  Pfam annotation: Domain name=LRR_1; Domain location=426-452; Score =7.4; E_value=12; Accession=PF00560.23; Description=Leucine Rich Repeat
  Pfam annotation: Domain name=LRR_1; Domain location=454-476; Score =10.0; E_value=3.9; Accession=PF00560.23; Description=Leucine Rich Repeat
  Pfam annotation: Domain name=LRR_1; Domain location=479-501; Score =13.8; E_value=0.63; Accession=PF00560.23; Description=Leucine Rich Repeat
  Pfam annotation: Domain name=LRR_1; Domain location=503-525; Score =14.5; E_value=0.39; Accession=PF00560.23; Description=Leucine Rich Repeat
  Pfam annotation: Domain name=LRR_1; Domain location=527-549; Score =10.6; E_value=2.9; Accession=PF00560.23; Description=Leucine Rich Repeat
  Pfam annotation: Domain name=LRR_1; Domain location=551-573; Score =13.6; E_value=0.74; Accession=PF00560.23; Description=Leucine Rich Repeat
  Pfam annotation: Domain name=LRR_1; Domain location=575-597; Score =13.0; E_value=1.1; Accession=PF00560.23; Description=Leucine Rich Repeat
  Pfam annotation: Domain name=LRR_1; Domain location=600-622; Score =8.2; E_value=8.4; Accession=PF00560.23; Description=Leucine Rich Repeat
  Pfam annotation: Domain name=LRR_1; Domain location=624-646; Score =9.5; E_value=4.8; Accession=PF00560.23; Description=Leucine Rich Repeat
  Pfam annotation: Domain name=LRR_1; Domain location=648-670; Score =10.6; E_value=2.9; Accession=PF00560.23; Description=Leucine Rich Repeat
  Pfam annotation: Domain name=LRR_1; Domain location=672-694; Score =11.7; E_value=1.9; Accession=PF00560.23; Description=Leucine Rich Repeat
  Pfam annotation: Domain name=LRR_1; Domain location=696-716; Score =4.8; E_value=36; Accession=PF00560.23; Description=Leucine Rich Repeat
  Pfam annotation: Domain name=LRR_1; Domain location=83-105; Score =1.6; E_value=1.4e+02; Accession=PF00560.23; Description=Leucine Rich Repeat
  Pfam annotation: Domain name=Pkinase; Domain location=813-1041; Score= -14.0; E_value=1e-07; Accession=PF00069.15; Description=Protein kinase domain
  Pfam annotation: Domain name=Pkinase_Tyr; Domain location=813-1041; Score=-73.8; E_value=6.1e-08; Accession=PF07714.7; Description =Protein tyrosine kinase
  Pfam module annotation: Pfam domain module=LRRNT_2::LRR_1::LRR_1::LRR_ 1::LRR_1::LRR_1::LRR_1::LRR_1::LRR_1::LRR_1::LRR_1::LRR_1::LRR_1: LRR_
  Pfam module annotation: Pfam domain module=LRR_1::LRR_1::Pkinase::Pkin ase_Tyr; Domain location=34-77::107-129::131-154::156-178::181 -203::205-227::229-251::253-274::282-304::306-328::330-352::354
  Pfam module annotation: Domain location=426-452::454-476::479 -501::503-525::527-549::551-573::575-597::600-622::624-646::648 -670::672-694::696-716::83-105::813-1041::813-1041
MSQTTYMAPVGTLGFSLPLIILLASLSALLATTPNDDMEALLCLKHHLSASSDPTGTLPSWKNDSTQFCSWSGVTCSKRHSSRVVALDLESLDLHGQIPPCIGNLTFLTRIHMPNNQLQGQIPAELGQLNRLRYINLSSNNFISGEIPETVSSCLALQAIDLSRNSLSGSIPEGLGSLLGNLSDLRLSGNHLTGSIPASLGSSSSLVSVVLNNNSLTGPIPSLLANSSSLQRLGLRNNRLSGLIPQSLFNSTSLEMLVLAGNSFAGPIPAVSNTVVDSPPPPLQYLILDSNDLTGPLPSTLGNLTSLLWLTLGGNGFHGSIPTSLGALVNLQVLDMTNNALSGTVPASIYNMSALTHLGMGMNNLTGEIPANVGYSLPRIVNLIMARNKFTGQIPVSLTKATNLQIINLWDNALTGTVPLFGALPNLVELDLTKNQLEAGRDWSFLTSLTNCTQLVTLYLDRNTLGGVLPKSIGDLPSGLEVLFLSANGISGTIPNEIGRLKNLKLLYLDRNLLAGSIPYSLGHLPNMFALNLAQNKLSGQIPASLGNLSQLSELYLQENHLSGPIPGALGRCKNLDKLNLSCNSFGGGIPEELFTLSSLSNELDLSHNQLSGEIPLEIGSFVNLGLLNISNNMLAGRIPSTLGQCVHLESLHMEGNLLDGRIPQSLQGLRGLVEMDMSRNNLSGEIPEFFETFSSMKLLNLSFNDLEGPVPTGGIFQDARDVFVQGNKDLCSSTHLLQLPLCTTDTTSKRHRHTSSYVLKLVGFTALSLVLLLCFAVVLLKKRKKVQQVDHPSSMDLKKFTYAGLVKATNSFSSDNLVGSGKCGLVYKGRFWDEEHVVAIKVFKLDQLGAPNSFLAECEALRNTRHRNLVKVITACSTIDSEGHDFKAVILEYMSNGSLENWLYPKLNSYSITHSSSTSLIGPRGSIGYIAPEYGFGSKLSTQGDVYSYGITVLEMLTGKRPTDEMFSKGLTLHKFVKEAFPQKIHEILDPSIFPVTRDGDNHTTDEITRSIMNLLKIGISCSADAPTDRPTIDDVYAKVITIKETFLDLCH

SEQ ID NO: 73792 - protein, 54 aa, Zea mays
  Coding DNA Sequence Number=SeqID_32013
MAKAQEYDGATAVGLRLRKNRSDSDVICYIFGGIWPLYCIGLNKKNKNYNLWPH

SEQ ID NO: 73793 - protein, 68 aa, Zea mays
  Coding DNA Sequence Number=SeqID_32014
MEERVGKGLGWEIQPGAAVRSSSRAMGAARSAEQGAGAQGAPSRGTRPWRTDRRHGQESTEQKELRYF

SEQ ID NO: 73794 - protein, 63 aa, Zea mays
  Coding DNA Sequence Number=SeqID_32015
MVIVKCDRIARGGEVERSEARGVRGALAGLLKAELGAWVGVVGEKPGYVRECARAGFSNPNSN

SEQ ID NO: 73795 - protein, 48 aa, Zea mays
  Coding DNA Sequence Number=SeqID_32016
MAGTYHVRDDLRACRGQGHSRGRDRRWRAFLQFVSGTEEQLTKEFWVI

SEQ ID NO: 73796 - protein, 76 aa, Zea mays
  Coding DNA Sequence Number=SeqID_32017
MGFDTDCGVGLECRKTTAGCADHDISSLILEYTANIPNIMVEDMLVAFHKWHEKFEVAPSIDAYDKIVSICCDSSK

SEQ ID NO: 73797 - protein, 401 aa, Zea mays
  Coding DNA Sequence Number=SeqID_32018
  Subcellular localization annotation: CTP_CleavageSite=60; ConfidenceScore=5.41e-01
MWKRLLETTKQVVSSKQAIPYAAVTPKPATPAAAPSASKRGAPVAAPKLSTLKSPSYRRRAAAGPATTVTQASLLRLKQAAASKKTNLPSSPPLNDAHALDEDDPPEALTKALMFVIDAPEEVECTTSPEALPEGSEDVGEVARGNKILDFEWFQAEPSRDPLMLWRREVAREKKKHYIFKNVESHHYTNLMRICANKLGMESTIEFLGNLGRETGVKEFNSMIKVCLGKAKACRDIDSAVEYIYRAYHLFNTMKDKGFTIEKDIYDPFLLYLMDTGMFEEFEVFSAFFKEANPKSFSRIAYYEMLLCIRVQDEEKIQELCHSVEDYDEKVHYDLAESYMLAFAESGRKEDLVALLDLVDLSKVSGSKYITNIFKSLGKLELENYVEKLLERMMSKVYVER

SEQ ID NO: 73798 - protein, 337 aa, Zea mays
  Coding DNA Sequence Number=SeqID_32019
VESVFRRSEVESEPWGRARRSSSSPGPEAESEPWGQARRSSSSFGAEAESEPWGRTRRSFLWRPRPDLAAVSFTLSSGTAVGAAQAALSSCQAGQWSGEAIFALNAPAIRSVVVAIWPRLLLGEDRASGEPKLCADGGYQLRLGVLGGNDGPHCDVVGPSPGRGGGSSEVEVESEPRSRGRVRALGSGEAKFVVFRGRGRVRALGSDEAEFVVFQGRGRVRALGSGEAEFVVFRGQGRVRALGSGEAEFVVFWGRGQVRALGSDEAEFVVFRGRGRVRALGSGEAEFVVLRGRGRVRALGSGEAEFHMAPEAGLGCCQPLSVEWHSSRSGAGSAVFL

SEQ ID NO: 73799 - protein, 383 aa, Zea mays
  Coding DNA Sequence Number=SeqID_32020
  Homolog annotation: Hit_ID=Q10C31; Match level="QueryCoverage=96%, HitCoverage=97%, E-value=1e-82, Identity=50%"; Hit description =Uncharacterized plant-specific domain TIGR01615 family protein, expressed
  Pfam annotation: Domain name=DUF506; Domain location=66-294; Score =289.9; E_value=4.8e-84; Accession=PF04720.3; Description=Protein of unknown function (DUF506)
  Subcellular localization annotation: CTP_CleavageSite=21; ConfidenceScore=5.38e-01
MTFRFPVKNQQGTIDGSPFAPATARVSMFRRLMVRVTPAERLAAGDGKEREKDERGGEAEAGSVGLDKMVLSFMEESSAAVERPSRGRCGNCFNGNHQDGSDDEDFDFLPSASAPAAAPAAGGDALELLKGLVQCASTAERNLLADASRIAERCGRKKADARRAVADGLRALGYDAAVCTSRWDKAPSHPAGEHEYIDAVVAEAEPGATDGVRVRLVVEVDFRAEFEVARPTKAYRAALQALPPLFVGTPERLARVVAVVADAARQSLRKRGLHLPPWRKHEYMRAKWLSPHARSGGGGGPDETPALATPVPAFSGVFEPRFGEKPKAPGDDGIPDGGDDKKATVVVPPSPWRPEAASKLSPQPPQARRKVVTGLASLLLLAS

SEQ ID NO: 73800 - protein, 615 aa, Zea mays
  Coding DNA Sequence Number=SeqID_32021
  Gene Ontology: Mol. function=pyruvate kinase activity; Cellular component=chloroplast; Biological process=glycolysis
  Homolog annotation: Hit_ID=Q43117; Match level="QueryCoverage=90%, HitCoverage=87%, E-value=0.0, Identity=78%"; Hit description =Pyruvate kinase isozyme A, chloroplast precursor
  Pfam annotation: Domain name=DRTGG; Domain location=342-429; Score= -26.6; E_value=0.052; Accession=PF07085.2; Description=DRTGG domain
  Pfam annotation: Domain name=HpcH_HpaI; Domain location=287-449; Score=-83.5; E_value=0.034; Accession=PF03328.5; Description =HpcHHpaI aldolase family
  Pfam annotation: Domain name=PK; Domain location=88-490; Score=213.5; E_value=4.9e-61; Accession=PF00224.11; Description=Pyruvate kinase, barrel domain
  Pfam annotation: Domain name=PK_C; Domain location=507-615; Score =36.7; E_value=1.1e-08; Accession=PF02887.6; Description=Pyruvate kinase, alphabeta domain
  Pfam module annotation: Pfam domain module=DRTGG::HpcH_HpaI::PK::PK _C; Domain location=342-429::287-449::88-490::507-615
  Subcellular localization annotation: CTP_CleavageSite=49; ConfidenceScore=5.45e-01
MASAAHSLLHTPEAHRAATRSPFSPPAPTPFLHLRPHRLPLRLRSTSPTASDLTAFPPNPNGIFASDRPIDVDAATEAELRENGFRSTRRTKLVCTVGPATSRPDQLEALAVGGMNVARLNMCHGDREWHRAAIRAVRSLNEEKGFAVAVMMDTEGSEIHMGDLGGASSVKAETRVNAPHRRSLQRIPWNSFEGNCAMWMREKGERVKGLGAKILLKVTDSEDGEVWTFSVRSFELPLPERTINVNYDGFAEDVRVGDELLVDGGMARFEVIEKIGPDVKCRCTDPGLLLPRANLTFWRDGSIVRERNAMLPTISSKDWLDIDFGIAEGVDFIAVSFVKSAEVIRHLKSYIAARSRGSDMAVIAKIESIDSLKNLEEIIRASDGAMVARGDMGAQVPLEQVPSIQQKIVQLCRQLNKPVIVASQLLESMIEYPTPTRAEVADVSEAVRQRADALMLSGESAMGRYPDKALSVLRSVSLRIEKWWREEKRHEALELRSVSSSFSDKISEEICNSAAKMANGLGVDAVFVFTKTGHMASLLSRCRPDCPVFAFTTSTSVRRRLNLQWGLIPFRLAFSDDMESNLNRTFSLLKARGMIQSGDLVIALSDMLQSIQVMN

SEQ ID NO: 73801 - protein, 115 aa, Zea mays
  Coding DNA Sequence Number=SeqID_32022
MASRGRGGVWGELGESYGSTIYRATEGVTDGEEDQAAASVPLMEGGALVPVALVPGTASGVHGRAVLGARVEQRGEAGRRREKREKERDWMAAATGSRVGALLGPGQGSGGCQEK

SEQ ID NO: 73802 - protein, 255 aa, Zea mays
  Coding DNA Sequence Number=SeqID_32023
  Homolog annotation: Hit_ID=Q6QP51; Match level="QueryCoverage=12%, HitCoverage=14%, E-value=2e-07, Identity=78%"; Hit description =Putative growth-regulating factor 1
MAWLCLTAATKRRNGEQGERRGVGANWARAMVKRTWDVGVLGRSLARVEARVVWAVCALTLLPGRAWRGPARGRGLAARGSAGFCLGARSASGQAACRARTSGYARCAGALGRVQGHWSWWRWFLARLATSICARFWVRAWSIEERQGGGERNGRGREIGWRRPQGAGWARCWDQGRATVAARRSERRLRGSGKGIFRKGILSRRRKRASSPPTDQGFEGCVLRGSVTAPEHSGSEPITDQGFKGWPLGRVRQPP

SEQ ID NO: 73803 - protein, 556 aa, Zea mays
  Coding DNA Sequence Number=SeqID_32024
  Gene Ontology: Mol. function=GTPase activity; Biological process =immune response
  Homolog annotation: Hit_ID=Q10C30; Match level="QueryCoverage=99%, HitCoverage=83%, E-value=0.0, Identity=71%"; Hit description =Guanylate-binding family protein, putative, expressed
  Pfam annotation: Domain name=GBP; Domain location=1-245; Score=-78.8; E_value=0.012; Accession=PF02263.9; Description=Guanylate-binding protein, N-terminal domain
VYGYGVPPVEVDIGGSKVSVLYLDTEGFESVGKSNVYDDRIFALATVLSSVLIYNLPETIREADISRLSFAVEIAEEFYGSLSFANIFPFCPLACGKLESRSISKSCRGALQGQDVAFEPAKLLWLIQRDFLRTYIFESNFHDPEGKSVQQMVDEALQRVPNNNGDTNIDEFLLKKITLVLHQLNQIRDSLAVMGDNSTAFSLPQPHLQRTKLCDMEDQELDPLYVKKRDQLKEVVASMIKPKIVQGRTLNGTEFVSFLGQIVDALNKGEIPSAGSLVEIFNKAILERCLKVYSEIMGRAGLPVSVDELREFHDLAKDEARRLFNKQHFGKHHAARSILKLDEEIKKVYRNLGQANEYQSSKLCEARFSECEDKMERLQVLKLPSMAKFDAGFLLCNRSFETDCVGPAKESYRHRMSKMLARSRALFIKEYNNKLFNWLAIFSLAMVVVGRFLVKFFLLEVAAWVMFAFLETYTRLFWSSESLYYNPAWHAIVSSWETVVYSPVLDLDRWAFPICAVLLFLAFYWRCLGGRRGIARSLLPLYNGAYYRSSSRTRTD

SEQ ID NO: 73804 - protein, 53 aa, Zea mays
  Coding DNA Sequence Number=SeqID_32025
MGCAPVVWAAVWLLAAAVAGFADPGGLERALLAPIGRANLFFSTNFSPYHVTM

SEQ ID NO: 73805 - protein, 352 aa, Zea mays
  Coding DNA Sequence Number=SeqID_32026
  Gene Ontology: Mol. function=protein dimerization activity; Cellular component=nucleus; Biological process=regulation of transcription, DNA-dependent
  Homolog annotation: Hit_ID=Q5VRR0; Match level="QueryCoverage=58%, HitCoverage=99%, E-value=1e-33, Identity=46%"; Hit description=Auxin- responsive protein IAA20
  Pfam annotation: Domain name=AUX_IAA; Domain location=136-352; Score =40.3; E_value=2.6e-12; Accession=PF02309.7; Description=AUXIAA family
MGTDYVLVEPTYRRDAEERNSLARQATHTHVTGAAADPSRLSPSVIMAGSRRGKRSRRVCVPGSSLCGTARSSGAVTPELFDNREILSPATYKPGVRLRVGPCQLRGDHAAYDMSAGARGASAAAESDQVRRSDRMELELGLALPTRHRQPLAAGLLGGEAGARGTKRVFGEAFGSANDATLSAPSCATTTTATEGGGVDRDGVGQHDPNTKKTKRLLVGWPPVKCARRSGGGGGYVKVKMEGVAIGRKVDVSLHGSYQDLLRTLRRMFPSATQRGAGAGADHEEEEEEVVVEEVASHERRRLHRPYVVTYEDGEGDWLLVGDDVPWEVFVKSVKRLKILARTAAGDGLAHC

SEQ ID NO: 73806 - protein, 53 aa, Zea mays
  Coding DNA Sequence Number=SeqID_32027
MCSLWTTLPGSTQAYEDPDRQQASRRQQVPVAHVTYQGGWRCLAEVATRMPPG

SEQ ID NO: 73807 - protein, 236 aa, Zea mays
  Coding DNA Sequence Number=SeqID_32028
  Gene Ontology: Mol. function=caffeoyl-CoA O-methyltransferase activity; Cellular component=integral to membrane; Biological process=lignin biosynthetic process
  Homolog annotation: Hit_ID=Q9XGD5; Match level="QueryCoverage=96%, HitCoverage=78%, E-value=1e-100, Identity=81%"; Hit description =Caffeoyl-CoA O-methyltransferase 2
  Pfam annotation: Domain name=Methyltransf_3; Domain location=5-235; Score=370.1; E_value=3.5e-108; Accession=PF01596.8; Description=O -methyltransferase
CGGLLDVGQTEDLRTKRGVACRNLMPTSADEGQFLNMLIKLIGAKKTMEIGVYTGYSLLATALALPEDGTVDLPPTQTKDLYPSLSLSLLLVPPQILAMDINRENYELGLPCINKAGVGHKIDFREGPALPVLDDLVADKEQHGSFDFAFVDADKDNYLSYHERLLKLVRPGGLIGYDNTLWNGSVVLPDDAPMRKYIRFYRDFVLALNSALAADDRVEICQLPVGDGVTLCRRVK

SEQ ID NO: 73808 - protein, 176 aa, Zea mays
  Coding DNA Sequence Number=SeqID_32029
  Gene Ontology: Mol. function=protein serine/threonine kinase activity; Cellular component=membrane; Biological process=protein amino acid phosphorylation
  Homolog annotation: Hit_ID=Q5VRR9; Match level="QueryCoverage=96%, HitCoverage=21%, E-value=3e-58, Identity=65%"; Hit description =Putative S-domain receptor-like protein kinase
  Pfam annotation: Domain name=B_lectin; Domain location=77-169; Score =77.9; E_value=3.2e-20; Accession=PF01453.15; Description=D-mannose binding lectin
MAMRDLCILTTLVSFLVSLSSVSAAYDHSYLARGSSISTQDVTTPILVSPNGAFTCGFYKVATNAFTFSIWFSWASGKTVSWTANRDAPLNGRGSRLIFHKKGALILVDYNGMVIWSTNTTASGSDRAMLLDSGNLVVMDTDGRHLWRSFDSPTDTLLPWQPMTRDTRFLCLLLRH

SEQ ID NO: 73809 - protein, 44 aa, Zea mays
  Coding DNA Sequence Number=SeqID_32030
MESRDDELDREINNLEAIRRQVMKQKKMLRLSKLQKKIDDTNEQ

SEQ ID NO: 73810 - protein, 46 aa, Zea mays
  Coding DNA Sequence Number=SeqID_32031
MDSMEFEVAELDRVAMICHANSKRKCYLLVSNVSNCYEVLSHPVLK

SEQ ID NO: 73811 - protein, 78 aa, Zea mays
  Coding DNA Sequence Number=SeqID_32032
  Subcellular localization annotation: CTP_CleavageSite=32; ConfidenceScore=5.13e-01
MGAPWFSPLSDFPFNFPAFALFYLSNLLPPPTVATVSPPTLVDAGFRDPCGHYHYHRVLVLVFLALACIRSFLRPTLV

SEQ ID NO: 73812 - protein, 500 aa, Zea mays
  Coding DNA Sequence Number=SeqID_32033
  Gene Ontology: Mol. function=protein phosphatase type 2A regulator activity; Cellular component=protein phosphatase type 2A complex; Biological process=signal transduction
  Homolog annotation: Hit_ID=Q8L6I7; Match level="QueryCoverage=99%, HitCoverage=100%, E-value=0.0, Identity=72%"; Hit description =Protein phosphatase 2A B'kappa subunit
  Pfam annotation: Domain name=B56; Domain location=65-474; Score =818.5; E_value=3.5e-243; Accession=PF01603.10; Description=Protein phosphatase 2A regulatory B subunit (B56 family)
  Subcellular localization annotation: CTP_CleavageSite=73; ConfidenceScore=5.69e-01
MWKQFLSKLPRRSSASGDSGHCSSGAGIQRTSSCGSIPPGRPPASAIRRMSSAVFPSSVVAGIEPLVSFKDVPSSEKQSLFVSKLSLCCVVFDFSDPDRSSVEKDIKRQALLDLIEFVESTNARFSEAAVVACSRMCAVNLFRAFPASCRSGGSSGVGECDEDEPMFDTGWCHLHLVYELLLKFIGSSSLDAKIGKKHFDHSFIVKLLDLLHSEDPRERDCVKNILHRVYGKFMVHRPFIRRAASNVFYQFVFETDRHNGIAELLEVFGSVISGFALPLKEEHKTFLWRVLVPLHKPKSLGAYLQQLTYCVTQFIEKDPELASPVIIGLLRYWPITNCQKEVMFLSEIEEILEATSQAEFQKCMAPLFRRIAHCITSAHFQYPKCHMESDSFYITCSYRLHYKPNLIGALEQNIQNHWNQAVLNLAVNVKKMFSEMDGDHFSSCLARYKEEEERLVSLEAKRKLTWEKLESAAAFQPVTGQTAVLVGHQPSANMIANLIF

SEQ ID NO: 73813 - protein, 44 aa, Zea mays
  Coding DNA Sequence Number=SeqID_32034
MSRSFPAAFTGGTAAFPMRHCSRDEKGSVMSFTGLRRLPNTSDT

SEQ ID NO: 73814 - protein, 374 aa, Zea mays
  Coding DNA Sequence Number=SeqID_32035
  Homolog annotation: Hit_ID=Q10Q83; Match level="QueryCoverage=50%, HitCoverage=42%, E-value=4e-12, Identity=25%"; Hit description =Expressed protein
  Pfam annotation: Domain name=DUF566; Domain location=2-358; Score= -8.8; E_value=2.8e-07; Accession=PF04484.3; Description=Family of unknown function (DUF566)
  Subcellular localization annotation: CTP_CleavageSite=21; ConfidenceScore=5.64e-01
MESYGGGGGTRTSASSRRPCTAAAVPSRAGSGAFAYDGMRATPLSTSTANFTRSLRKAASFAHKKAPPSADAPPPRRALSSKENSSSATIGAASKEALLESPHRPSVPEPASAVNGRPWEPTRRRRSTGTVVNEAGALRETVAPRRKQEPEPEKEEAAHRARMLTARLLQWRFANARLEKAVGRATSAAENKLFYTWLRVAELRNIQAAKRIVAQRRRQKLELARLLRPQLPLLAAWEALAKAHTDATADFGRVLSAACTNLPLAAGARADVDALHETMRSCVGTVDEIEASITDVFYATAGAASGALGELARTIQQEMECLEEATRLSSIVTGLQMQEVSLRANLMQAKQRRIGLGLGLGPAAPALATSGWCF

SEQ ID NO: 73815 - protein, 220 aa, Zea mays
  Coding DNA Sequence Number=SeqID_32036
  Gene Ontology: Mol. function=DNA binding; Cellular component =chromatin; Biological process=DNA integration
  Homolog annotation: Hit_ID=O24587; Match level="QueryCoverage=71%, HitCoverage=14%, E-value=1e-82, Identity=96%"; Hit description=Pol
  Subcellular localization annotation: CTP_CleavageSite=31; ConfidenceScore=5.19e-01
MASFSTASLAACGSSPSALLPRNPRRAQLPRATDSVEIGGAVLTGTAPRYIYTEALYSSGPLDVATSDPVPSGCKVDRKSTSGTCQFLGRSLVSWNSKKQTSVALSTAEAEYVAAGQCCAQLLWMRQTLRDFGYNLSKVPLLCDNESAIRMAENPVEHSRTKHIDIRHHFLRDHQQKGDIEVFHVSTENQLADIFTKPLDEKTFCRLRSELNVLDSRNLD

SEQ ID NO: 73816 - protein, 111 aa, Zea mays
  Coding DNA Sequence Number=SeqID_32037
MELRVPRALPPWTGKVVEVAADNPGQCARETGATSSTGEPSLTRRDPRHSDIGLNQVAIVRALEKKSITEKNGTRDTVFLSVVRPRNTCLLPRCGVPMDRRVAFNPLSVIQ

SEQ ID NO: 73817 - protein, 457 aa, Zea mays
  Coding DNA Sequence Number=SeqID_32038
  Gene Ontology: Mol. function=monooxygenase activity; Cellular component=intrinsic to endoplasmic reticulum membrane; Biological process=electron transport
  Homolog annotation: Hit_ID=Q9AV12; Match level="QueryCoverage=77%, HitCoverage=97%, E-value=2e-72, Identity=42%"; Hit description =Putative flavin-containing monooxygenase
  Pfam annotation: Domain name=DAO; Domain location=4-285; Score=-61.0; E_value=0.069; Accession=PF01266.14; Description=FAD dependent oxidoreductase
  Pfam annotation: Domain name=FMO-like; Domain location=5-425; Score= -401.7; E_value=3e-05; Accession=PF00743.9; Description=Flavin -binding monooxygenase-like
  Pfam module annotation: Pfam domain module=DAO::FMO-like; Domain location=4-285::5-425
MPRTVAVVGAGAAGLVAAAPSCSARGLDVAVFEKSGRAGGTWAYDPRADADPLSRDPGSPSAVHGSLYASLRTNLTRDLMGFSDFPDGRLGVRGRRARVPGPPGGARVPRRLRGRVRRRRPRQAPLRGAARGGGAPRPAGAPLGQRERWAVSWRREDGEVAEEVFDAVVVCNGHCTVPRVPGIRGACHLLVSLFCFSSNTMEFRGARHPMLVSQELTIGAGSRFTATIIAPLNRFGISTPKDSSSVTLCHPLTNFPQEPQNVVVVGFSTSGIDIASEISRLAKEVHVADRYRYHFPFLDLDGLTVDDNRVGPLYKHVFPPKYAPNLSFVGLPVKTIVFQELEQEAKWVAAVLSGRATLPSEEDMMASVRSHYQLMEEAGRSNRHTLALAAQWAEHMNWLADQVGEPPVEPWKCEVFDKVLASILALDEAYRDRWEQEEDGGSSGHQEGIRIRASSIM

SEQ ID NO: 73818 - protein, 53 aa, Zea mays
  Coding DNA Sequence Number=SeqID_32039
  Gene Ontology: Mol. function=peptidase activity
  Homolog annotation: Hit_ID=Q655R7; Match level="QueryCoverage=83%, HitCoverage=19%, E-value=1e-09, Identity=59%"; Hit description=OTU -like cysteine protease-like
MCSRLRVLCRLNAYGLFEVRVSGDGNCQFRAFSDQLYRSPDYYERVRKEIVKQ

SEQ ID NO: 73819 - protein, 80 aa, Zea mays
  Coding DNA Sequence Number=SeqID_32040
MEVAPEARILYHRRNRTLKGGGDGHGGGGSTLQDTTAIAVVAMNNSKRYVYLIPLSGLTKCNPIEGSSRATPVVHSGLVH

SEQ ID NO: 73820 - protein, 205 aa, Zea mays
  Coding DNA Sequence Number=SeqID_32041
  Homolog annotation: Hit_ID=Q84LH6; Match level="QueryCoverage=46%, HitCoverage=73%, E-value=3e-26, Identity=51%"; Hit description =Putative Bowman-Birk serine protease inhibitor
  Pfam annotation: Domain name=Bowman-Birk_leg; Domain location=144 -170; Score=0.5; E_value=5.3; Accession=PF00228.10; Description =Bowman-Birk serine protease inhibitor family
  Pfam annotation: Domain name=Bowman-Birk_leg; Domain location=172 -199; Score=11.8; E_value=0.09; Accession=PF00228.10; Description =Bowman-Birk serine protease inhibitor family
  Pfam module annotation: Pfam domain module=Bowman-Birk_leg::Bowman -Birk_leg; Domain location=144-170::172-199
  Subcellular localization annotation: CTP_CleavageSite=79; ConfidenceScore=5.77e-01
MTPDSSPTSTSRASPPPPLASTSTHPHLTSRPGPDTTKRKGRRQAPTEMQKDRAPSLPQPPRRRSTPSGSLRLSDLQCAAFLPRSLRLSPHYGLSGSTRHLGTSNRHHHYHHAHVQSTGGQGAGGGGGGELASRAKAAARAWPCCDSCGGCTRPEPPWCQRLDAAPCGCHPACRDCVKSSLSIDPPVYQCMDRVPSFCIAAAAAH

SEQ ID NO: 73821 - protein, 52 aa, Zea mays
  Coding DNA Sequence Number=SeqID_32042
MSSPSMEMQVGALPAACAFRKPKEEEPPVPMTSGPKAMICSSSAPNGFKFIQ

SEQ ID NO: 73822 - protein, 509 aa, Zea mays
  Coding DNA Sequence Number=SeqID_32043
  Gene Ontology: Mol. function=nucleotide binding
  Homolog annotation: Hit_ID=Q1SL19; Match level="QueryCoverage=88%, HitCoverage=83%, E-value=7e-32, Identity=28%"; Hit description =Nonsense-mediated decay UPF3
  Pfam annotation: Domain name=Smg4_UPF3; Domain location=1-87; Score= -25.0; E_value=0.0026; Accession=PF03467.6; Description=Smg-4UPF3 family
AQFKAFVEYAPSQQVPKSTIKKDGREGTIMKDPEYLEFLEFISKPTEHLPSAEIQLERKEAERAAAGKEAPVVTPLMMYVRQQRAAKSMVHRPGSRLSRKLASVVSSSSPKRSSEKRRSSTYVVRDNTKEKPTYIMVPKREEHTQREKDVAGNSGVHYVKISALLVLPIQSNYGNDATSGGTSGSGQFYNFYYYGPMFDQFLPQTPNGATQHSSTPIKNVPPSRSRQDQRLEASGKIIKTILSNKEARSSNPSEHEQEGHMFNTEKDKRPPRAFNPRTIVKDQVVENAERSHFDEKANHLHGSVPIGEKVERHARNRDRPDRGVWAARRYDKSTSAGSSHPSSSEFPQMQSHSGDNILQLADVSKLELNTGHGDRKTDTRGQGGSRGVPVENGLYAKIRCVAFLDQFHDTVFNPGHRHANRRGLPRGPKETEISASVPDAKNSKRGSASYGAHEVRLWVHTQTTHVQVLIEENLETSMGSEVKFRLVSLFIDGMLCYSTLFIVFKPFYG

SEQ ID NO: 73823 - protein, 135 aa, Zea mays
  Coding DNA Sequence Number=SeqID_32044
MGKSRKGGSSSRHSGDKRKREPTPPSEDFGDSEYSEEEFSSESEGSPDDSQGITAEVWTYIRAVECSRLEGSDESEVSSDEENSSDPSEEGSGGDSDDEGDNDDGGDGDGDGDGSKGDGKGGSGSNKASGKAPLA

SEQ ID NO: 73824 - protein, 81 aa, Zea mays
  Coding DNA Sequence Number=SeqID_32045
MPCAMLVVSPASSWACTQSTAARARPGEWEPDNQGPPISPNPAPLFSPHWVANGRTPPARAISHLTAPCTGLVTDQRAPFR

SEQ ID NO: 73825 - protein, 88 aa, Zea mays
  Coding DNA Sequence Number=SeqID_32046
  Gene Ontology: Mol. function=nucleotide binding
  Homolog annotation: Hit_ID=Q1SL19; Match level="QueryCoverage=87%, HitCoverage=15%, E-value=9e-17, Identity=50%"; Hit description =Nonsense-mediated decay UPF3
  Pfam annotation: Domain name=RRM_2; Domain location=7-88; Score=5.2; E_value=0.032; Accession=PF04059.3; Description=RNA recognition motif 2
  Pfam annotation: Domain name=Smg4_UPF3; Domain location=1-88; Score= -24.1; E_value=0.0022; Accession=PF03467.6; Description=Smg-4UPF3 family
  Pfam module annotation: Pfam domain module=RRM_2::Smg4_UPF3; Domain location=7-88::1-88
MKDPAHRTKVVLRRLPPAIAQQAVVDQVDLRFAGRYDWACFRPGNASQKNHRHSRLYLNFKRPEDVVEFAEVFNGHVFVNEKVTSTDY

SEQ ID NO: 73826 - protein, 147 aa, Zea mays
  Coding DNA Sequence Number=SeqID_32047
MAEGVLLHSREKSWAQGGRGRAACMQGASARGKKGALLLLRKGDASGASSSWRRESSWPWGEKKGHRRGSFNSGVLGPGRASCVLGEGRLLSLLGEKVRRGACQEEEDKEGARLPWKGASPPRAAVSREEEGEPAGEERREVAAEKF

SEQ ID NO: 73827 - protein, 507 aa, Zea mays
  Coding DNA Sequence Number=SeqID_32048
  Gene Ontology: Mol. function=binding; Cellular component=thylakoid; Biological process=photosynthesis
  Homolog annotation: Hit_ID=Q6K464; Match level="QueryCoverage=99%, HitCoverage=93%, E-value=0.0, Identity=75%"; Hit description =Putative octicosapeptide/Phox/Bem1p (PB1) domain-containing protein
  Pfam annotation: Domain name=PB1; Domain location=25-119; Score=59.2; E_value=1.3e-14; Accession=PF00564.15; Description=PB1 domain
MTPPVASLLPERAAPLINKKVVTRWRPLKLVYDHDIRLGQVPEKCSFRTLREFVAKRFPSSKAVLIKYKDADGDLVTITSTEELRLAELFIDKVGHEVVENGREDDNKLPVLRLHLVEVSPEQEPTLPLEEEKLEEDEELLINGEDSTLHALAVVTDAEVVKQDVENRSADQSVETGKNDCGHAECKEAEIDDWLLQFADLFRNQVGIDADAHLDLHELGMELCSEALEETVTSMEAQVLFELAASKFQEVAALALFNWGNVHMCEARKRIPLDESAPKEVMAAQLRTAYYWVKERYALAGHKYEEALKIKPDFYEGLLALGQQHFETAKLHWSYALADKADLSTWDSLETFKLFDSAEQNMRAATEMWEKVEEQRMAELKEPGACDKDGVLRKRQHGAGGQPELTPEEAAEQAAVMRQQIHLFWGNMLFERSQVEFKLSVGDWKTNLDASVERFKLAGASESDILTVLKNHFSNVASECEEKKVMTSGTEISQTNDNVEDKCVVET

SEQ ID NO: 73828 - protein, 420 aa, Zea mays
  Coding DNA Sequence Number=SeqID_32049
  Gene Ontology: Mol. function=glutamyl-tRNA reductase activity; Biological process=tetrapyrrole biosynthetic process
  Homolog annotation: Hit_ID=Q2QLN3; Match level="QueryCoverage=77%, HitCoverage=74%, E-value=2e-51, Identity=38%"; Hit description =Expressed protein
  Pfam annotation: Domain name=DUF266; Domain location=165-292; Score= -7.3; E_value=3.4e-05; Accession=PF03267.4; Description=Arabidopsis protein of unknown function, DUF266
  Subcellular localization annotation: CTP_CleavageSite=9; ConfidenceScore=5.37e-01
MKDTKKPTRASSRLGGRVVGVASMLLFVSLGFVLGVTSSNAMFIRYYLPFMPPLRSSAAPSYSPPPLTTPLTPSQTPPPPPPLPQNPQLRSAGFLSPSGVMHNMTDEELYWRASMAPMVRRTPDSRVPKVAFLFLVRGELPLRPLWEKFFAGHEGRYSIYVHAHPSYTGSPPTDSPFYGRYIPSQVITKIIPEHAPRPTQLHINFIHLGGSIALQLHADNEMGATASPGGGGAAAPGKRAPGPGHERFALFSEACIPVYDFPTVHAFLTGSDTSFVDCYENGGSRSRYRPFFATRNITLGASVADGSCFPAFRDFCVGRRECLIDEHYLPTLVSLLGWGRRNANRTLTYADWKRPVNRHPHTHGPDEVTEERIREIREEGGRRCFYNGARRGICNLFARKFSPDTLEPLLRLAPKVMGFG

SEQ ID NO: 73829 - protein, 62 aa, Zea mays
  Coding DNA Sequence Number=SeqID_32050
MARALRVWGGVEEILDHMFFQCPFVSSSSGKYDSTIAKMKSYYTSVRGHSDDCKENGLGPFG

SEQ ID NO: 73830 - protein, 142 aa, Zea mays
  Coding DNA Sequence Number=SeqID_32051
  Gene Ontology: Mol. function=protein kinase activity; Cellular component=integral to membrane; Biological process=protein amino acid phosphorylation
  Homolog annotation: Hit_ID=Q2LJM2; Match level="QueryCoverage=89%, HitCoverage=21%, E-value=3e-24, Identity=49%"; Hit description =Putative receptor kinase
LGSSPAKVAARSAGYRAPEAPPPPRPWASHRGDVYAFGVVLLELLTGRFPGSELPNGGVVVELPRWVQSVVREEWTSEVFDLELMKDKGIEEEMRPKVGYVVKMVDEVRACGETASPSHESMDESSGVSDSPAVSEGGALSQ

SEQ ID NO: 73831 - protein, 302 aa, Zea mays
  Coding DNA Sequence Number=SeqID_32052
  Gene Ontology: Mol. function=protein kinase activity; Cellular component=integral to membrane; Biological process=protein amino acid phosphorylation
  Homolog annotation: Hit_ID=Q2LJM2; Match level="QueryCoverage=68%, HitCoverage=29%, E-value=7e-27, Identity=38%"; Hit description =Putative receptor kinase
  Pfam annotation: Domain name=LRRNT_2; Domain location=31-74; Score =32.2; E_value=1.8e-06; Accession=PF08263.3; Description=Leucine rich repeat N-terminal domain
  Pfam annotation: Domain name=LRR_1; Domain location=102-123; Score =14.1; E_value=0.51; Accession=PF00560.23; Description=Leucine Rich Repeat
  Pfam annotation: Domain name=LRR_1; Domain location=125-147; Score =14.1; E_value=0.51; Accession=PF00560.23; Description=Leucine Rich Repeat
  Pfam annotation: Domain name=LRR_1; Domain location=149-171; Score =14.6; E_value=0.35; Accession=PF00560.23; Description=Leucine Rich Repeat
  Pfam annotation: Domain name=LRR_1; Domain location=173-194; Score =4.2; E_value=47; Accession=PF00560.23; Description=Leucine Rich Repeat
  Pfam annotation: Domain name=LRR_1; Domain location=195-217; Score =10.5; E_value=3.1; Accession=PF00560.23; Description=Leucine Rich Repeat
  Pfam annotation: Domain name=LRR_1; Domain location=77-100; Score =2.9; E_value=81; Accession=PF00560.23; Description=Leucine Rich Repeat
  Pfam module annotation: Pfam domain module=LRRNT_2::LRR_1::LRR_1::LRR_ 1::LRR_1::LRR_1::LRR_1; Domain location=31-74::102-123::125-147::149 -171::173-194::195-217::77-100
MPPNGSTALLLLLPPLLLLLLLRSFANAGSLDADVAALSDFRLVADPSGAALATWNVSANPAPCAGAWRGVTCAGGRVTRLVLEGLGLSGAAALPALARLDGLRVLSLKGNGFSGEIPDLSPLAGLKLLFLAGNELSGAIPPSLGALYRLYRLDLSSNKLSGAVPPELSRLDRLLTLRLDSNRLSGGVDAIALPRLQELNVSNNLMSGRIPAAMASFPAAAFGGNVGLCSAPLPPCKDEAPQPNASAAVNASAAGDCPPASAMVASSPSGKPAGAEAASGVKGKMSRAAVLQLWRGTSPWWG

SEQ ID NO: 73832 - protein, 116 aa, Zea mays
  Coding DNA Sequence Number=SeqID_32053
MGEKQGKSRLGKMPGRGTRHHRRALGHAGRAGSAAAMGDGGQAGAERAQRRDQEELNIKHLGCYRLGSKYLRTRNKTIHDMESMIETKIDAVPKLRARVLRLNDKKRNRLKGEKTI

SEQ ID NO: 73833 - protein, 524 aa, Zea mays
  Coding DNA Sequence Number=SeqID_32054
  Gene Ontology: Mol. function=oligopeptide transporter activity; Cellular component=integral to membrane; Biological process =oligopeptide transport
  Homolog annotation: Hit_ID=Q8S2I4; Match level="QueryCoverage=91%, HitCoverage=68%, E-value=0.0, Identity=60%"; Hit description=Isp4 protein-like
  Pfam annotation: Domain name=OPT; Domain location=56-524; Score =303.3; E_value=4.6e-88; Accession=PF03169.6; Description=OPT oligopeptide transporter protein
MGEIGTDHRGLAEAEAGVGGKEEGIVLGGHEEEEETSPVEQVRLTVPSTDDPSLPVWTFRMWSIGLLSCALMSFLNQFFSYRTEPLIVTQITVQVASLPLGHFMARALPRARFRAPALLGGGEWSLNPGPFNVKEHVLISIFANAGFAFGNGSAYAVAIIDIIRAFYHRHISFFTAWLLVVTTQVLGYGWAGLLRKYVVQPAHMWWPGTLVQVSLFRALHEKDESAKASRQISRSKFFLVVLACSFAWYAVPGYLFPTLTSISWVCWVFSRSVTAQQLGSGMSGLGLGAFTLDWSTVSSFLFSPLISPFFATANIFFGYVFFVYVIMPAAYWGFDLYSAKTFPIFSSHLFMSNGSSYDVQSIVNNRFELDLDAYGKNGKVSLSVFFALSYGFSFATIAATITHVGLFYGKEIYYRFRSSQKEKPDIHTKLMERYSEIPAWWFYSLMALSIVVSLLLCTVLKRETPGLNVITEYAMGLIMPGSPIAVVCFKVYGYMSMAQAVAFLSDFKLGHYMKIPPKSMFLVQ

SEQ ID NO: 73834 - protein, 134 aa, Zea mays
  Coding DNA Sequence Number=SeqID_32055
  Homolog annotation: Hit_ID=Q84LH2; Match level="QueryCoverage=48%, HitCoverage=39%, E-value=5e-09, Identity=40%"; Hit description =Putative Septum-promoting GTP-binding protein 1
MTKEAGQGSGSSERMRGRTERLTERVLRLARDQLLACSSCGGGVAASARLPAPGGVERLADDGEEQNDLQMTGLNLMDKTMAVRGARIAYNICDVADTVDNVKAKIEDKEEGIPSDRQRLIFAGKQASSSQRAR

SEQ ID NO: 73835 - protein, 142 aa, Zea mays
  Coding DNA Sequence Number=SeqID_32056
  Gene Ontology: Mol. function=oligopeptide transporter activity; Cellular component=integral to membrane; Biological process =oligopeptide transport
  Homolog annotation: Hit_ID=Q8S2I4; Match level="QueryCoverage=82%, HitCoverage=15%, E-value=5e-55, Identity=78%"; Hit description=Isp4 protein-like
RELRRPTENINHRRGGHGLNKRPHKTFPGQRWIPLINLPVLFGATAYMPPATAVNYNSWLLVGTVFNFFVFRYRKKWWTRYNYILSAALDAGVAFMGVVLYFSLTMQNKSIDWWGTAGEHCPLARCPTAKGVDLGDGVCPVF

SEQ ID NO: 73836 - protein, 56 aa, Zea mays
  Coding DNA Sequence Number=SeqID_32057
MVAAVRVGGAVARMTAYRFVKLINAVRWGSDGCSSASVSLIQSVDRKSDGYFRALV

SEQ ID NO: 73837 - protein, 210 aa, Zea mays
  Coding DNA Sequence Number=SeqID_32058
MAVKARVSPTGLLAAATWAGLLSLVAASALDVPTVAFDERFSPLFGDGNLVRSPDDRSVRLLLDRRSGAPCGRTAPVFRSGLRSSVLGTAPCDLASPLRLCALRLRSSMVGSSRPELKAHVVAASSAMASSAKPSSAARNAERAREGQQRDGRPRRDDRRARAGTGFSVGRAFRASPARVGRLSAVLGWRDHPARPGTIDEPGYESSRTS

SEQ ID NO: 73838 - protein, 360 aa, Zea mays
  Coding DNA Sequence Number=SeqID_32059
  Homolog annotation: Hit_ID=Q1EPE0; Match level="QueryCoverage=66%, HitCoverage=61%, E-value=4e-30, Identity=34%"; Hit description=WD-40 repeat family protein
  Pfam annotation: Domain name=WD40; Domain location=130-179; Score =23.8; E_value=0.0006; Accession=PF00400.22; Description=WD domain, G- beta repeat
  Pfam annotation: Domain name=WD40; Domain location=18-60; Score=4.4; E_value=11; Accession=PF00400.22; Description=WD domain, G-beta repeat
  Pfam annotation: Domain name=WD40; Domain location=187-225; Score =27.7; E_value=4.2e-05; Accession=PF00400.22; Description=WD domain, G-beta repeat
  Pfam annotation: Domain name=WD40; Domain location=240-285; Score =33.7; E_value=6.4e-07; Accession=PF00400.22; Description=WD domain, G-beta repeat
  Pfam annotation: Domain name=WD40; Domain location=88-126; Score =21.7; E_value=0.0027; Accession=PF00400.22; Description=WD domain, G- beta repeat
  Pfam module annotation: Pfam domain module=WD40::WD40::WD40::WD40::WD4 0; Domain location=130-179::18-60::187-225::240-285::88-126
MQGRLATHVGGSRGMHVWLPVTRLYAGLRSIFCQCRSAQDWRATTLVTSHARDHHVRVWTVCAAVVCDHVRAKKAATLPARSSLLLHPFAKRRPHPHRDTVSCLVLHAVAGLLYTASHDHTVKAWRLSDGSCVDSFVVHDGPVNAMAVNEADGCIFTGVATRRCFLYAGSSDGYVNAWEKEATVGRPTHVGYLKGHRLAVLCLASGCGGRVVVSGSEDATMRVWRREGINSKGGGGSAAHTCLAVIEGHRGPVRCLAVGGGEAGEVEGSMVVYSAGLDKSVKVWRVRVVGKEDDEEDDDGEDCGDDPEAAAEILMAGEIGKAFDDGETHVRDDVEEDEFVAPTPVLSPVWVEKRRHTSRG

SEQ ID NO: 73839 - protein, 137 aa, Zea mays
  Coding DNA Sequence Number=SeqID_32060
MGGGKGTWRLTSTDGRTERRAQRRRGALEADAIRVFAQRKRQAVHLILQSAWWTQAAQTQALLGQVTVQQAQKIPWAVQQAEESQPNLTDRKVGPADLCAHCSGLSVTGSVTLSLFSDVINQTSCVGSTCEGGDIGR

SEQ ID NO: 73840 - protein, 172 aa, Zea mays
  Coding DNA Sequence Number=SeqID_32061
  Gene Ontology: Mol. function=structural constituent of ribosome; Cellular component=ribonucleoprotein complex; Biological process =translation
  Homolog annotation: Hit_ID=Q9LX88; Match level="QueryCoverage=61%, HitCoverage=82%, E-value=3e-52, Identity=95%"; Hit description=40S ribosomal protein S15a-4
  Pfam annotation: Domain name=Ribosomal_S8; Domain location=10-121; Score=147.5; E_value=3.5e-41; Accession=PF00410.9; Description =Ribosomal protein S8
MVKGQRAQMMLSKSMYNAEKIGKRQVMIRPSSKVIIKFLTVMQRHGYIGEFEYVDDHRAGKIVVELNGRLNKCGVISPRFDVGVKEIEGWTARLLPSRQFGYIVLTTSAGIMDHEEARHASKNSSDVLRNWDFYEMYLREPCLFRFSDIGFDLCDTNRSFSPYNFLMLTLLV

SEQ ID NO: 73841 - protein, 98 aa, Zea mays
  Coding DNA Sequence Number=SeqID_32062
MKFTKQPVLGRLGGWSKERQLKEYRRVNGLCFTCGETFEPGHQARCQRGNTIQLNVLAPEVMGKILTLEVLEQIEQEEKQEEEELKLSLNAINGADDS

SEQ ID NO: 73842 - protein, 74 aa, Zea mays
  Coding DNA Sequence Number=SeqID_32063
  Gene Ontology: Mol. function=catalytic activity
MPLFEAFVSQKQHRYCFLGNGDEVEMDGRVVEHKGRMTAVVVEIRKKKSGELVAIGRQWMTASRPKGAAAHSKI

SEQ ID NO: 73843 - protein, 126 aa, Zea mays
  Coding DNA Sequence Number=SeqID_32064
MTIEQMFLIQTQAVQAIGQTLAAMQQCWGEGEHASLRSTTLSSHRADEGHIHRTRQNKPKAPTGRRPVRSPSLSCCKTRALTKFAGLLHCHRQERPMWNLAHGDGLREDKHDKGHVCNKVILNDYM

SEQ ID NO: 73844 - protein, 209 aa, Zea mays
  Coding DNA Sequence Number=SeqID_32065
  Gene Ontology: Mol. function=protein dimerization activity; Cellular component=nucleus; Biological process=regulation of transcription, DNA-dependent
  Homolog annotation: Hit_ID=Q53M47; Match level="QueryCoverage=97%, HitCoverage=19%, E-value=2e-80, Identity=69%"; Hit description=HAT family dimerisation domain, putative
MVTGENAPGNNKMSCPNVQKDLVRACAEETSEAIKAEIGGRLFAVLVDEARDASIKEQMVVVVRYVNDKGHVIERFLGVQHVPDTTSSSLKVALDDMLARYGLSISRVRGQGYDGASNMRGQFHGLQRLVLDENPYAFYIHCFAHQLQLVVVSIAKCCGSVYDFSNYISLIVNTVSASCKRKDQLLQRHHDKIVEELDSGAIFPGRGKN

SEQ ID NO: 73845 - protein, 296 aa, Zea mays
  Coding DNA Sequence Number=SeqID_32066
  Homolog annotation: Hit_ID=Q947D1; Match level="QueryCoverage=89%, HitCoverage=26%, E-value=1e-25, Identity=33%"; Hit description =Embryonic flower 1-like protein
  Subcellular localization annotation: CTP_CleavageSite=49; ConfidenceScore=5.17e-01
MDVVAPRSCHHDGMQKGRHVPTSMRAQTTTRMSGEIVSVTKHRRWNCVKCLNRVKSPGPTTTSETVSIQQDGTNDGCSISIVRTLPNNSDSRRLFSWTQQSSQGNDQSTLSKSAQECNSKCSSPYGSRAVTTVNVPDTLTEANVPDTFTEGSVPATEGLWSSFNNIDVSANILNDVSMDISDLPDDVSRMISSIEENGTQNLHGPKPCVVSIEDDNRTAQDVPSDDCNEPNARKPKSGHNVSKQISAHKTNQVRNQVPLQASLKRNVGSVDKKKRDQSANLADISDLKFCQRKPKR

SEQ ID NO: 73846 - protein, 347 aa, Zea mays
  Coding DNA Sequence Number=SeqID_32067
  Gene Ontology: Mol. function=catalytic activity; Biological process =guanosine tetraphosphate metabolic process
  Homolog annotation: Hit_ID=Q6Z8E2; Match level="QueryCoverage=82%, HitCoverage=43%, E-value=1e-120, Identity=68%"; Hit description =Putative relA/spoT homologous protein RSH2
  Pfam annotation: Domain name=TGS; Domain location=233-288; Score =19.7; E_value=0.0015; Accession=PF02824.11; Description=TGS domain
SLHTAVQASDSSPLEVQIRTQDDIPSKYSSMKVGHPVLRIEGSHLLAAVVVSIDKGGKELIVAVSFSLEASEAVAELRSSFQLKRWEAYARLHKKVSEKWWCAPGHGDWSTNLERYTLCQDGIFHKQDQFGRLLPTFIQIIDLAEEEEEEYWMVVSAIFEGKETCSLPSESSYADKSSSEPPSSTPLSDPINNKVHLLRTMLQWEEQVRRGASLAEKSLSASICTKAILREVAIIFWPNGKIMRMSTGSTAADAARRMGVEGKLLWVNGQLVLPQTELKDGDIVEVRMIVNKLNNSVSMMLVNEPTWETLPADEQLQFEEHKEQLIQEAKAKFLANFKVDRNNKVVR

SEQ ID NO: 73847 - protein, 152 aa, Zea mays
  Coding DNA Sequence Number=SeqID_32068
  Gene Ontology: Mol. function=catalytic activity; Biological process =guanosine tetraphosphate metabolic process
  Homolog annotation: Hit_ID=Q6Z8E2; Match level="QueryCoverage=52%, HitCoverage=10%, E-value=6e-14, Identity=58%"; Hit description =Putative relA/spoT homologous protein RSH2
MGCVLLDHVAPRLAVASATLVGAREVIAAAAAAGAGGSGAVHGAVASTLAQVAVTAVAIASGACLSTKVDFLWPRIDQLPGVPFIAPRQLGAVGDQLGKAILVFCRVVHRNVRLRDLGDCVSHGAQPFSFSRESHIPTALAGFEVPWLRWHV

SEQ ID NO: 73848 - protein, 792 aa, Zea mays
  Coding DNA Sequence Number=SeqID_32069
MEAATAMDFHTLSRRELQALCKRNGVRANMTNAAMAEALQGLTSVDGVDEIGTTLCLPTATPGRSAMKSAAKMVAVEEQQHGSPLPRGRRVSVKSPEAIRMEVGGEDEMKENVKTPGVVLRSTRRGIRATPAPLPTPVPASSARATARRTAVRRTGEVAPTPATRRRAASRKAAGAVEVDRPAEDVSEDKTSKMTRALDQEAEVVAVASKEEKGQQDEPRAVVLDVKCDGPEQEEVVQFLEGDNKVEEVEEGEEVDSSDATTGSAAVLGKSCNDPKVEEVVVVMEEQFTEPHEGIVKEQEPISVERSASVEVMDDSPILGVIEKKQDASVEDCEDLAEFSPAREMTDEAIPVTEDKEVAISEESVTEDNEVAISEEAVTEDKEVAIMRRLLLKIRKWPSMRRLFTEDKEVAISEEAIEEDGFANTVETDPTPKEILLTEGEIILIEGKEGAANEMPQAGETSEEDEEDYLAELKEGAADQVLQAELADNETSKEDEDDLSEKREGTAAKMLQGELTDDETSEEDDLDEDEEWVSDDDENTEEDYLAELKEGVADQVLQAELANNETGEEDEDALSEEREGTAAKMLQGEPTDDETSEEDDLDEDEGWASDDDENTEEIGSTDETDEDPDETNEESYTSDAVQMMQGSGIAEDANEDASTEDDDFSGDLPPEFENIMIFSGAETESDIAPPVLEENKDAVVSATKTAKSLDDSALKTGQEEEGPEEVDNVVKSLDEEVESKEMQKQQPQDYNSMSLRKLKATHKKYLIAAKEEVTEGKRLPLEEVDENACIDH

SEQ ID NO: 73849 - protein, 418 aa, Zea mays
  Coding DNA Sequence Number=SeqID_32070
  Gene Ontology: Mol. function=hydrolase activity; Biological process =guanosine tetraphosphate metabolic process
  Homolog annotation: Hit_ID=Q1SB52; Match level="QueryCoverage=99%, HitCoverage=43%, E-value=3e-93, Identity=46%"; Hit description=ATP -dependent DNA ligase; Metal-dependent phosphohydrolase, HD region; TGS; DNA ...
  Homolog annotation: Hit description=polymerase III clamp loader subunit, C-terminal
  Pfam annotation: Domain name=HD; Domain location=4-115; Score=29.7; E_ value=1e-05; Accession=PF01966.12; Description=HD domain
DTLIFEGVEVTGYQIFEDPKAVNTIVAGILHDVVCDTSESLKSIEEQFGADVASLVSGVSKLSYINQLLRRHRQKNTGGSTLTSEEANNLRVMLLGMVDDPRVVLIKLADRLHNMRTIYALPVPKAEAVAQETLAVWCSLASRLGVWALKAELEDLCFAVLQVISILVAALMALAWSTMGQAEAKSQRKRNTTSSHLGPGAYSVVDIHLGALTFGVPEQSHMLHTNPQIFKKIQSELTLMWNRTGKSKNMRRSSIRNELLASMKDGNMVSINDLFSSCNQERPNMKDLLQAVLPFDIFLDRKRRSYFLSNLNSNSGESIPNPKIVDDAAVALASLASCEEELERELLISTSYIPGMEVTLSSRLKSLYSIYCKMKRKEVGIRQVYDARALRVIVGDKNGAMHGSAVRSCYSILDIVHR

SEQ ID NO: 73850 - protein, 225 aa, Zea mays
  Coding DNA Sequence Number=SeqID_32071
MAGSDHPLRLGTTNRFGSLEFMSLGIEYNMAQLHYNSPDCPVHQRSNGYQRATVDSDSEQGPVPTLLAPPALAWGSPLPHGVEQGASAAPALLLAGQEESDAPWRDMGGNGREPSVFNPIPFQPRFDTSYDAQMYVGLLFPSGCLESEEQDGPSFALDFSRLRDPESMLQVPSTVGDLEPLAHRTLSGAHQTVRCPLQTVGPATRHAQIARPTVGSPDRWLTGQS

SEQ ID NO: 73851 - protein, 240 aa, Zea mays
  Coding DNA Sequence Number=SeqID_32072
  Homolog annotation: Hit_ID=Q6L541; Match level="QueryCoverage=56%, HitCoverage=34%, E-value=1e-47, Identity=73%"; Hit description =Putative F-box protein family
  Pfam annotation: Domain name=F-box; Domain location=29-77; Score =23.2; E_value=0.00095; Accession=PF00646.23; Description=F-box domain
MSEDPAGSRRWRCDLGGDERWLSGAAGDDQFDRLPDALLLVIFNRIGNVKALGRCSLVSRRFHELVPLVDSVLVRVDCVIPDEPPSSSSSSSTPSSPTASVRARGVFSQIARIVLGGIVKPIQALGQILSPANSASGFPAWSREARRLKSRSSRAGRRGALPERGHGLLHGARRRRRAPSSSRSFPAGVADGLDDHERGAVDPGAVRELQQAAGSAASCCRRAPGFGWRRRRARRRADCP

SEQ ID NO: 73852 - protein, 402 aa, Zea mays
  Coding DNA Sequence Number=SeqID_32073
  Gene Ontology: Mol. function=binding; Cellular component=microtubule
  Homolog annotation: Hit_ID=Q9T041; Match level="QueryCoverage=85%, HitCoverage=34%, E-value=1e-66, Identity=41%"; Hit description =Microtubule-associated protein TORTIFOLIA1
  Pfam annotation: Domain name=HEAT; Domain location=136-174; Score =11.4; E_value=1.7; Accession=PF02985.12; Description=HEAT repeat
  Pfam annotation: Domain name=HEAT; Domain location=188-224; Score =4.1; E_value=14; Accession=PF02985.12; Description=HEAT repeat
  Pfam annotation: Domain name=HEAT; Domain location=311-347; Score =19.8; E_value=0.01; Accession=PF02985.12; Description=HEAT repeat
  Pfam module annotation: Pfam domain module=HEAT::HEAT::HEAT; Domain location=136-174::188-224::311-347
  Subcellular localization annotation: CTP_CleavageSite=58; ConfidenceScore=5.73e-01
MATAVSKSAVKSHPRLPTTAQPPPPNPGSNAASAGGGAAPPPPPSPAAGATPSKNAAMAELKSRVLAALAKLSDRDTHHIAVEELDRIIRAPPSTDAVPMLLNALAPDSPGLASPARRECLRLLATLCTSHPDAAASHLHKVLAHLARRLKDPASDTSVRDTCRDVAGQLAAVYLRPLSASGVCEAGNATVTLFVKPLFEVMGEQSKSVQGGAAACLAKAVEGAGPGPGAIGMFGKLGPRICKLLGGQGVQAKAGLLGIMGSLAQVRVSSGFIPALWYCGLCISQKSLGLTLISFLTAGETSLRMVGAISSQNMQQTLQSIRDCLENSDWATRKAAADTLSVFATHSVHLIGDGTAPTIAALEACRFDKVRPVRDSMIDAVQLWKKLTGEDANADGRNKDLC

SEQ ID NO: 73853 - protein, 131 aa, Zea mays
  Coding DNA Sequence Number=SeqID_32074
MTTSLVVERSEPGCGLPLSSASRMFIIRAGEEGEPSWGPAFRVDWWPASSSSIWGRRAFTSLAKEANFGYAGPANCGCRRPLRARFPGLDGLGAASDAAFCRLVGAWLSVHRTGDGRVVHSEDRSEDLFAR

SEQ ID NO: 73854 - protein, 75 aa, Zea mays
  Coding DNA Sequence Number=SeqID_32075
  Homolog annotation: Hit_ID=Q9LWW0; Match level="QueryCoverage=80%, HitCoverage=11%, E-value=7e-14, Identity=63%"; Hit description =Pentatricopeptide (PPR) repeat-containing protein-like
MANGTVMPGWEAAKGKKIIRKSAGYNVIELDGRMHKFLVEDKSHPRSEKVYDALDSITLAMKLVSSENPEVESRF

SEQ ID NO: 73855 - protein, 73 aa, Zea mays
  Coding DNA Sequence Number=SeqID_32076
MAVRVALGKSSHWVWQQEVGVPIYLEGTEAMEEAKIKNIERIHFSGSSLLDTMVKLTMIARVTDGRPLAEGVG

SEQ ID NO: 73856 - protein, 202 aa, Zea mays
  Coding DNA Sequence Number=SeqID_32077
NVLKREVAIGTGIPWTSLLAVLVIVRDCSSPNSCNSVGLQPTEHALRKKIKASAAGPRQAEDLALAGSGSLDAERRQRELAGIGSAHVYCHAYPDCRAPSVLRGAARRSWFVRSFWALGFWLWLSAGAGPATGARQRNCPAAANRPTNDEASKSLRLQDALGTGTTGAPDPRVGEGQRLRPNGRGMSVLSPRSEKSMQAFCY

SEQ ID NO: 73857 - protein, 487 aa, Zea mays
  Coding DNA Sequence Number=SeqID_32078
  Gene Ontology: Mol. function=protein kinase activity; Cellular component=integral to membrane; Biological process=protein amino acid phosphorylation
  Homolog annotation: Hit_ID=Q5GAP9; Match level="QueryCoverage=97%, HitCoverage=68%, E-value=0.0, Identity=93%"; Hit description=Leucine- rich repeat transmembrane protein kinase 1-like protein
  Pfam annotation: Domain name=LRR_1; Domain location=109-131; Score =6.0; E_value=21; Accession=PF00560.23; Description=Leucine Rich Repeat
  Pfam annotation: Domain name=LRR_1; Domain location=16-36; Score=7.0; E_value=14; Accession=PF00560.23; Description=Leucine Rich Repeat
  Pfam annotation: Domain name=LRR_1; Domain location=39-61; Score =10.9; E_value=2.6; Accession=PF00560.23; Description=Leucine Rich Repeat
  Pfam annotation: Domain name=LRR_1; Domain location=63-85; Score =16.8; E_value=0.081; Accession=PF00560.23; Description=Leucine Rich Repeat
  Pfam annotation: Domain name=LRR_1; Domain location=87-108; Score =13.4; E_value=0.82; Accession=PF00560.23; Description=Leucine Rich Repeat
  Pfam annotation: Domain name=Pkinase; Domain location=315-483; Score=- 66.0; E_value=0.00012; Accession=PF00069.15; Description=Protein kinase domain
  Pfam annotation: Domain name=Pkinase_Tyr; Domain location=315-483; Score=-104.0; E_value=4.3e-06; Accession=PF07714.7; Description =Protein tyrosine kinase
  Pfam module annotation: Pfam domain module=LRR_1::LRR_1::LRR_1::LRR _1::LRR_1::Pkinase::Pkinase_Tyr; Domain location=109-131::16-36::39 -61::63-85::87-108::315-483::315-483
MRLNGTLGYNMNQLTALVQLDMSNNNLGGSDIPYNLPPNLQSLNLAVNNFTGTVPYSISQMVALRDLDLSYNTFSGDIPHSFNSLTSLKTLYLQNNKFNGTIDVLTDLPLTDLNVENNQLTGWIPDKLKGINNLQTSGNSFNNGPAPPPPPSPLSPPSTNTPPPSRQHAVPSSAGKNTPSENGGKHSKLGGGAVAGIIICLLVVSAIVAFLVIKRKSWRLSQGQDPEQNEPLSPFASGLKQMKSIKSIKIVSTMGKEELQKTVSMSLKPPTKIDLHKSFDENDTTNKAISRNVSLSSITIPAYTVADLQMATGSFSPDSFIGEGSVGRVYKAKFGDQKVMAVKKINFSVFPSHPSDLFIELVANISMLNHPNLAELAGYCSEHGQCLLAYEFYRNGSLHDFLHLKDEHSKPLSWNNRVKIALGSARALEYLHETCSPSVVHKNFKSSNILLDGELTPHLSDSGFAGLLANQEFQKKRFSSLFLCGST

SEQ ID NO: 73858 - protein, 694 aa, Zea mays
  Coding DNA Sequence Number=SeqID_32079
  Gene Ontology: Mol. function=actin binding; Cellular component =membrane; Biological process=signal transduction
  Homolog annotation: Hit_ID=Q5GAP5; Match level="QueryCoverage=91%, HitCoverage=81%, E-value=0.0, Identity=89%"; Hit description =Putative paramyosin
  Pfam annotation: Domain name=DUF827; Domain location=167-684; Score =721.6; E_value=5.4e-214; Accession=PF05701.2; Description=Plant protein of unknown function (DUF827)
MESSYATEESNSKGSSANASSSPTGSSETSVDLQTPPAAKEIPGRIDHEGPSWHEVLEMRVPDLSEDIAESHAPSDTDPDILSNSGPTEAYISSTNDKADYPSSVGTSEVNGVPVNVSNGAGTTLKDEMKPKEDDTHHQIDRDTKLKMKQDSATTPESPYRGLIDTAAPFESVREAVTKFGGIVDWKAHKAQMMERRKLIQVELENIRTEIPLCKEELEAAEMTKSQVVDELEHTKRLIEELKHQLEKVQVEEAQAKQDSELAQLRAQEIEHGVADEASAIARTQMEVAKERHEKAVAELKSVKEELASVHEQYAALVDERDTAIKRAEEVISAGKDIEKRVEQLTLELIASKGSLELAHAAHHEAEERRIGAALAKEQDCNAWERELRQAQEELERLDSKLAFSNDMQHNIDANLHKLLSLNSELSAYVANKLTEEAEGVSKDHESEDSRHISNAVKEALASKQKELQELKADIEKAKAEANVLRFAAMTLRSELDNENASLVALQQGEAMASVAVSSLEAELNRTKQEIESVRSKEAEAQEKMVELPMVLQQATQEAEDARVAAHAAHEELRKAKEAFEQTKAAAAAAETRLSAVVKETEASVASERLAREALQALQESEQARETKDSQRGVVLPISEYYELSKRAHEAEEQASEKVAEALAQVVSAKESEAMSLESLKEASDEFGREEGSS

SEQ ID NO: 73859 - protein, 329 aa, Zea mays
  Coding DNA Sequence Number=SeqID_32080
  Homolog annotation: Hit_ID=Q7XHJ1; Match level="QueryCoverage=39%, HitCoverage=63%, E-value=8e-08, Identity=35%"; Hit description =Pheromone receptor-like protein
  Pfam annotation: Domain name=DUF1645; Domain location=63-275; Score =125.0; E_value=2.1e-34; Accession=PF07816.2; Description=Protein of unknown function (DUF1645)
  Subcellular localization annotation: CTP_CleavageSite=27; ConfidenceScore=5.19e-01
MAGGDHLPAYCYFFSSAPTSPSRASCNCNPASSPPGGDEASTFDFTLGFSGQLQEATPTLAAADELFEGGRIRPLNAPHPSILRVANDASSGSADGTRCSPRRAGGADRQAEAAPLERGRSGCRPSSAAAAAPSSSRSRSRRATRSLSPFRGGSGLDAAAADDVDDESPPPSPRASSMIRGCGSGSGSRKWRLKDLFLFRSASEGRATGKDPLLKYTALSSASFWHPHGQPQRLSSASMSMRKGRGSAASAGDTPYATINRAAAAEDVRRRTTTATTTPLPFHRNSLFGYLRSNPAIHSISRKLGGSGHSGSSSSSSRGGRQAAGRHDD

SEQ ID NO: 73860 - protein, 54 aa, Zea mays
  Coding DNA Sequence Number=SeqID_32081
MARAAARLPARLEWLVPSGKGKLKPFLFVAICPGSAGQASVVQGEGLSRKQVLI

SEQ ID NO: 73861 - protein, 216 aa, Zea mays
  Coding DNA Sequence Number=SeqID_32082
  Gene Ontology: Mol. function=transferase activity; Cellular component= nucleus; Biological process=protein kinase C activation
  Homolog annotation: Hit_ID=Q9LWW0; Match level="QueryCoverage=97%, HitCoverage=49%, E-value=1e-92, Identity=56%"; Hit description =Pentatricopeptide (PPR) repeat-containing protein-like
  Pfam annotation: Domain name=PPR; Domain location=134-168; Score=3.7; E_value=2.7; Accession=PF01535.11; Description=PPR repeat
  Pfam annotation: Domain name=PPR; Domain location=170-204; Score=6.0; E_value=1.5; Accession=PF01535.11; Description=PPR repeat
  Pfam annotation: Domain name=PPR; Domain location=99-133; Score=33.8; E_value=5.8e-07; Accession=PF01535.11; Description=PPR repeat
  Pfam module annotation: Pfam domain module=PPR::PPR::PPR; Domain location=134-168::170-204::99-133
MVSGYAQNGRHEEAVRTFLDMWDGAGVRPNELTVSSVLPACAALGALALGRKVERYARGRGMLRNVYVANALVEMYAKCGSIHRAWKVFRGMGTQRDLCSWNSMIMAFVVHGLWTEALTLFHKLRMTGAKPDGITFVGVILACTHGGLVDEGKLLFNSMRGEFGLKPRIEHYGCMVDLLGRVGLLKEANSLIASMPMEPDAVIWGALLGACTSMAT

SEQ ID NO: 73862 - protein, 55 aa, Zea mays
  Coding DNA Sequence Number=SeqID_32083
MEGDQAEEKLNSTGVKFNLAEEKLNSAKVKFNPTEENLNSAEVKFNPAKEKFNSA

SEQ ID NO: 73863 - protein, 442 aa, Zea mays
  Coding DNA Sequence Number=SeqID_32084
  Gene Ontology: Mol. function=heat shock protein binding; Cellular component=integral to membrane; Biological process=protein folding
  Homolog annotation: Hit_ID=Q5GAN9; Match level="QueryCoverage=99%, HitCoverage=100%, E-value=0.0, Identity=85%"; Hit description=AT hook-containing MAR binding 1-like protein
  Pfam annotation: Domain name=DnaJ; Domain location=75-135; Score= -14.1; E_value=0.1; Accession=PF00226.21; Description=DnaJ domain
MDFSGGGGGGRSRAEPARWLEIARKLLAARDLVGCKRLAERAVEADPYLPGADELLAVADVLLASQRLLPSGRPDPVGVLQLQPAPGLDPAAAKRSFHRLSQLVSSPRNPRPAADTALHFIQEAFADLSSNASADPPPAPAPAAAPVPVPAPAPAAPPAPVPAPAAAPSLIPAPAPVSGDALASADGNAFWTVCPYCCHVYQYQRALVGRALRCQSAGCRRAFEATEIPNAPPIVPGTDMYYCAWGFFPMGFPKAADLSTNWRPFCPMFPGNSESPLQPAPAVTVNVDVQNLENNGGTDVQNVENNGIDDNSTPASVQPPGKSGDIDRAAGPSRGRMKKTTARKKVGAVSKKHSSSGVDSGIEPSMLGADSLNGNAGSGQTVGTREININEVAMPTDSATMLNFGGDEDIRFDLDVDATDAILGNLHNLPFLREDGNNRRMF

SEQ ID NO: 73864 - protein, 198 aa, Zea mays
  Coding DNA Sequence Number=SeqID_32085
  Gene Ontology: Mol. function=calcium ion binding; Cellular component =chromatin; Biological process=chromatin assembly or disassembly
  Homolog annotation: Hit_ID=Q5GAP6; Match level="QueryCoverage=99%, HitCoverage=90%, E-value=1e-102, Identity=90%"; Hit description =Putative caltractin
  Pfam annotation: Domain name=Chromo; Domain location=17-66; Score =15.6; E_value=0.014; Accession=PF00385.14; Description='chromo' (CHRromatin Organisation MOd
  Pfam annotation: Domain name=efhand; Domain location=114-142; Score =39.1; E_value=1.5e-08; Accession=PF00036.22; Description=EF hand
  Pfam annotation: Domain name=efhand; Domain location=151-179; Score =24.7; E_value=0.00032; Accession=PF00036.22; Description=EF hand
  Pfam annotation: Domain name=efhand; Domain location=78-106; Score =4.6; E_value=4.6; Accession=PF00036.22; Description=EF hand
  Pfam module annotation: Pfam domain module=Chromo::efhand::efhand::efh and; Domain location=17-66::114-142::151-179::78-106
  Subcellular localization annotation: CTP_CleavageSite=41; ConfidenceScore=5.03e-01
MAYKLDLPTSSSIHPVFHVSRLKQAAPSDRQVLVKWSGWPVSMAMWEEEERLCQEFPGALSLAGDDWASGATQRQVFVKTIAGDEFQPDNSGTIDAKELNVAMRALGFEMTEEQIRQMIADVDKDGSGAIDYEEFEHMMTAKIGERDSKEELSKAFRIIDQDGNGKISNIDIQRIAKELGVNLTLDEIQDMVQEADRN

SEQ ID NO: 73865 - protein, 451 aa, Zea mays
  Coding DNA Sequence Number=SeqID_32086
  Gene Ontology: Mol. function=protein serine/threonine kinase activity; Cellular component=calcium- and calmodulin-dependent protein kinase complex; Biological process=protein amino acid phosphorylation
  Homolog annotation: Hit_ID=Q5GAP1; Match level="QueryCoverage=98%, HitCoverage=78%, E-value=0.0, Identity=81%"; Hit description =Putative CDPK-related protein kinase
  Pfam annotation: Domain name=Pkinase; Domain location=120-382; Score =309.9; E_value=4.5e-90; Accession=PF00069.15; Description=Protein kinase domain
  Pfam annotation: Domain name=Pkinase_Tyr; Domain location=120-380; Score=13.3; E_value=2.7e-13; Accession=PF07714.7; Description =Protein tyrosine kinase
  Pfam module annotation: Pfam domain module=Pkinase::Pkinase_Tyr; Domain location=120-382::120-380
MGGCHAKPLTHDADRSPPHAAPATPPPGSATPATPGPGKKHWGGVPVLRVLHAEPEPRAPPLRRLRGIAAQHIRAALARRHGPPRPSIPEEGGGEGEGGGGGGRGLDKGFGFNKGFAAKYDLGDEVGRGHFGYTCAATVKKGARKGESVAVKVIPKAKMTTSIAIEDVRREVKILKALAGNKNLVQFYDAYEDNDNVYIVMELCEGGELLDRILSRGGKYSEDDAKAVLVQILNVVAFCHIQGVVHRDLKPENFLFTSKDDDSHLKAIDFGLSDFVKPDERLNDIVGSAYYVAPEVLHRCYSTEADVWSIGVIAYILLCGSRPFWARTESGIFRSVLKADPSYNEAPWPSLTPEAMDFVKRLLCKDPRRRMTAAQALSHPWIRNYNDIKLPLDILIFRLIKAYIRSSSLRKAALRALSKTLTVDELFYLKSQFSLLEPDRNGCITLDISDG

SEQ ID NO: 73866 - protein, 877 aa, Zea mays
  Coding DNA Sequence Number=SeqID_32087
  Gene Ontology: Mol. function=calcium ion binding; Cellular component =nucleus; Biological process=regulation of transcription, DNA -dependent
  Homolog annotation: Hit_ID=Q9FYG2; Match level="QueryCoverage=98%, HitCoverage=85%, E-value=1e-119, Identity=41%"; Hit description =Calmodulin-binding transcription activator 4
  Pfam annotation: Domain name=Ank; Domain location=532-564; Score =39.6; E_value=1.1e-08; Accession=PF00023.20; Description=Ankyrin repeat
  Pfam annotation: Domain name=Ank; Domain location=571-608; Score=0.3; E_value=28; Accession=PF00023.20; Description=Ankyrin repeat
  Pfam annotation: Domain name=IQ; Domain location=654-674; Score=9.7; E_value=3.8; Accession=PF00612.17; Description=IQ calmodulin-binding motif
  Pfam annotation: Domain name=IQ; Domain location=712-732; Score=21.1; E_value=0.004; Accession=PF00612.17; Description=IQ calmodulin -binding motif
  Pfam annotation: Domain name=IQ; Domain location=735-755; Score=32.2; E_value=1.8e-06; Accession=PF00612.17; Description=IQ calmodulin -binding motif
  Pfam module annotation: Pfam domain module=Ank::Ank::IQ::IQ::IQ; Domain location=532-564::571-608::654-674::712-732::735-755
MGSKIHVSRDGVSGCWNLHMNTLCWYNTERLLRADIIHHNYQMAPQNLFHPWDIQMPSVETNTTDPLLALVRAEYNKNDGSLLSIPEVGHTCQQNQTGNGNSKNKSELNMALKKIAEQLSLGEDDDDDYIYSNQTHSMGGDNQIKQIRQEGTQKGLSRNIAPSWEDVLHSSSGLPTSSIYQQSDVKYQKKSEYQPPEILDSSDLRIQLSATKRFLLGPEASIDSPSLNSVLRNRVNSVTDTISAYDSRFESSLNPDWQTKTALTFQSNSQGSEITELFDHDHFEPYSREDTTISLGQTNKFNIREVSPEWAFSYEITKVIITGDFLCDPSNLCWAVMFGDNEVPVEIVQPGVLRCHTPLHSNGNLRICITSGNREVCSEFKDFEFRSKPTSSSFTDIAPSSRHLKSSEELLLLAKFARMLLSGNGNREVPDGDPQSGQCPKLKTNEELWDRLINELKVGCENPLSSVDWIVEQLLKSNLQQWLSVKLRGFNGTDFLSKQEQGIIHLISALGYEWALSPVLSAGVGLNFRDSNGWTALHWAAYFGREKMVAALLAAGASATAVTDPTAQDPVGKTAAFLASERGHTGLAGYLSEVSLTSYLASLTIEESDVSKGSAEVEAERAVEGISQRNAQRHGGTEDELSMKDSLAAVRNAAQAAARIQNAFRAFSFRKRQQKTARLRDVYGMTQEDIDELAAASRLYHQAHASSGQFYDRAAVSIQKKYKGWKGRKHFLNMRRNAVKIQAHVRGHQVRKKYRTIVSTVSVLEKVILRWRRKGHGLRGFRAEQQPMVEAIEEDDEEDDDFDDDEAVKVFRRQKVDQAVKEAVSRVLSMVDSTEARMQYRRMLEEFRQATAELEGSNEVTSIFDSDLELLGINNFM

SEQ ID NO: 73867 - protein, 264 aa, Zea mays
  Coding DNA Sequence Number=SeqID_32088
  Homolog annotation: Hit_ID=Q9FMV4; Match level="QueryCoverage=25%, HitCoverage=33%, E-value=5e-10, Identity=53%"; Hit description =Arabidopsis thaliana genomic DNA, chromosome 5, P1 clone:MLE2
MASEAARRRQEVAVEGQRHLEETIAAAFQILVSMNDELCNAGLWSSSSVSAAAAAAASAGSQHHQSATPPPPHSADSDAADAGGAPGPGGSLDEARHRYKSAVVALRDSISAVSSCPQKHDYCMPHGFRYCLNQDIFLKKHFGDAIDQSFKTCLGRTNMPKASGLKRSGRRLRKWTKGVIIKDKANWLLIPPTYDLSKIMHSPLRQDIGSTESEVDQAEIERLEEHASALRKEIESKNKQVKLLMDQLRDLITDVAMWQSPCSV

SEQ ID NO: 73868 - protein, 62 aa, Zea mays
  Coding DNA Sequence Number=SeqID_32089
  Homolog annotation: Hit_ID=Q69NN2; Match level="QueryCoverage=80%, HitCoverage=7%, E-value=6e-10, Identity=53%"; Hit description =Hydroxyproline-rich glycoprotein-like
  Pfam annotation: Domain name=DUF1296; Domain location=9-53; Score =58.8; E_value=1.8e-14; Accession=PF06972.2; Description=Protein of unknown function (DUF1296)
MAAGGRVSIPAGARRTIADIKEIAGGHTDEEVYAMLRECNMDPNETVQRLLLEGFLDIQVAA

SEQ ID NO: 73869 - protein, 224 aa, Zea mays
  Coding DNA Sequence Number=SeqID_32090
  Gene Ontology: Mol. function=nucleic acid binding; Cellular component= intracellular; Biological process=chromatin modification
  Homolog annotation: Hit_ID=Q6YUB0; Match level="QueryCoverage=82%, HitCoverage=63%, E-value=3e-30, Identity=46%"; Hit description =Putative zinc finger protein
MSERDARDDGNTTGRSAPAAGIDSFSQLPFIRPLAREKQKALGGHQNAHKRERQHAKRAQFQTAMAMHQHRSQYYYPHPVPDPAHLYPAFAAYRHHHRFAAATPPPHYPSWAGATSRHYSSGPGSISQPIDGSPVTPPSGLWLQVPTGGGILVGGAPSPLAAARRQEQPVQPLPVLGAEEPAVVGRGAAGSAPFSPSTSSSSSPAASPHKRPAPPENVSLDLSL

SEQ ID NO: 73870 - protein, 133 aa, Zea mays
  Coding DNA Sequence Number=SeqID_32091
MEDASDKEEATLVAQTTFEDPIFLTTNEDGPSHSMIEDNIEHVLVEDALDDVEATLVAQMTFEDPIFLTTIKDGPSLSMVEDNTEPRLLEDPSIETMSSSSTKAREDEDLACPPLAPPSPSTTTVRHQCLPLY

SEQ ID NO: 73871 - protein, 504 aa, Zea mays
  Coding DNA Sequence Number=SeqID_32092
  Homolog annotation: Hit_ID=Q6EP64; Match level="QueryCoverage=83%, HitCoverage=56%, E-value=2e-61, Identity=37%"; Hit description =Hydroxyproline-rich glycoprotein family protein-like
  Subcellular localization annotation: CTP_CleavageSite=50; ConfidenceScore=5.03e-01
NSLLSGLCNGPYQSVDPAAVLVSSSSAVGDKSGSTALADLTGGLPFKDVVATIDPNSLQPLKPAPPSDPVVVSFLNSHSLGDVGASRQTIGIKKTSVEHKVGRDVSTDKATEDATVHDNVPLAAADTITQSAPVPNSAGTEDSLKVDICLNDLQLSDKQHVIIPDHLQVSESEKYVLSFGSFDVSFQQTKGSSDPDYVKSSLPKFSSSHELDGNIDELQSMQRDQNSTSVVQEEAGHVPQPSAKLEKCAPSAMEISSIALMESKDCDDDSATSGDPQSTGTHSAPSYVTYGFAPQSHSYHPTTDADERLSPSLATQAAHKYGNIPVVPTQTGQDQEGNDSPVIISSVSASVATPAAGVLSASVAIPQQSVPVFRQPLGVHIPHLPMNYVPYNQYISPFFIPPPTLHPFMGNATFSQPPSTGVMYPTPGTARVLPPVKFPVPSFKPGANIGSQASIGVPGCYGTYGSSPSVYTNNAPVSSGNLAENDNVTSSQFKENNIYFAGLQ

SEQ ID NO: 73872 - protein, 54 aa, Zea mays
  Coding DNA Sequence Number=SeqID_32093
MENKAPQIALSERLKKMAMELVSTKFGCQSLRIPASTGSPEGTLTVVHVVDLTL

SEQ ID NO: 73873 - protein, 101 aa, Zea mays
  Coding DNA Sequence Number=SeqID_32094
HSLPSGTRRVLVSRRLKEMKEALSQAADFADCVASGALMAVVSAEVERLRAQHADAVREKLAADSKCRKLAVGDLRRPKESFGVTAKSGTDLKMKRLSRPR

SEQ ID NO: 73874 - protein, 100 aa, Zea mays
  Coding DNA Sequence Number=SeqID_32095
MNGLRTPSTGLMASDPRPARGQVQGCHVSWRKRCSGVALVSLDPYEWALDPFDRINGLGPATYTRIGPWLPRVPEEEMLSRCTCESRPPWMGLGPPFVSF

SEQ ID NO: 73875 - protein, 174 aa, Zea mays
  Coding DNA Sequence Number=SeqID_32096
MEFRCRDTEGDTRRDRAVGDMDRQVRAGRLARWSSKTRPRPGELEQGQAGEPAPTREEDPAQRATRERGAELKQGGAPAVKRPGELETRRPSAMAQGKAEQGAIRVGRAGRGAGGEMEGERSKGARHGKDRAGAGAKAGGGVLERGGRDLQRSFARAERRKKPREVAGGGLAGR

SEQ ID NO: 73876 - protein, 92 aa, Zea mays
  Coding DNA Sequence Number=SeqID_32097
MGGMFSKTKLIGGSIMAMMGSTSEKMYLCQVKKQEIFVASVPRWCLKKKIKTEAAGEVSSFKKNFLLFIGRGFCLPGYVIILLLHSYIRSGL

SEQ ID NO: 73877 - protein, 125 aa, Zea mays
  Coding DNA Sequence Number=SeqID_32098
  Subcellular localization annotation: CTP_CleavageSite=80; ConfidenceScore=5.40e-01
MAGAQQQPCAVSLLHSLSQLGLAIAQGRAGAQKFPQQAAHVLLSMASSRAPSLSSSSPGRATTQAAAAAPMDGAQIFAPSAMAPKPAHFPIHGVRVPCAQLFDPKIAALRSAPLRARPFASLSHD

SEQ ID NO: 73878 - protein, 74 aa, Zea mays
  Coding DNA Sequence Number=SeqID_32099
  Subcellular localization annotation: CTP_CleavageSite=36; ConfidenceScore=5.46e-01
MRQLCANSAPTVSQRCANSAATMCSPWLFLTHRTVLSANGAPTVCYSAPTVSHGATTVLNAVQPTDSPIQYQHQ

SEQ ID NO: 73879 - protein, 119 aa, Zea mays
  Coding DNA Sequence Number=SeqID_32100
MAEGAKIWVPSMGAAVAACVVARPGEEEDTEGARLLAMDSRTCAACCWNFWAPALPYAMARPSWEREWSSGAAHGCYWAPAMEFLLASREQGRHCEGRQLAPRKLLLLLQGAEGGGRHG

SEQ ID NO: 73880 - protein, 658 aa, Zea mays
  Coding DNA Sequence Number=SeqID_32101
  Gene Ontology: Mol. function=pyridoxal phosphate binding; Biological process=metabolic process
  Homolog annotation: Hit_ID=Q2QMU3; Match level="QueryCoverage=99%, HitCoverage=72%, E-value=0.0, Identity=86%"; Hit description =Expressed protein
MFDHESQSVNWMAQSARAKGAKTRTAWFRWPTLKLCSTELRKEIVGKKKGRRRDAAVGLFVFPAQSRVTGAKYSYQWMALAQQNGWHVMLDAGALGPKDMDSLGLSLFRPDFIITSFYRVFGADPTGFGCLLIKKSVIGTLQGRNGCNASGMVRIVPVFPQYLSDSVDGFDAFDGFEDDPGVDKDEKPSSNAQNGSQLPAFSGVYTSAQVRETFESDPGRDSSSDRDGASTIFEETESVSMGEIMRSPAFSEDCSSENSFWVDVGHSPLGSEKSGQFKKGKLGSPLPSSWFNGRKCNKRMSPNLSSRISRSPLYDGHVISFDAAVLSVSQDADCLKEDPEEENFENGRRAHFRQVSEIQEEPEAEEVACQRAMNGGAEHKESAIRRETEGEFRLLGGRDGNNRFTGGRLFGVEEIDGGLSMGRRVSFSTEANIIADRLNRASDAAEASGYTFPGDDGCASDGYDDAQDWGRREPEIICRHIDHVDMMGLNRTTLRLRYLINWLVTSLLQLKLSDSKGGDGVPLVHIYGPKIKYERGAAVAFNVKQNDGTFVNAEVVQKIAEKNGISVGIGFLSHIKVDMKQKQLNGTLDIPEASFYKNGRRDNKKVTIRVEVVTASLGFLTNFEDVYKMWAFVAKFLDPSFLESERLTIAADHSEGQT

SEQ ID NO: 73881 - protein, 149 aa, Zea mays
  Coding DNA Sequence Number=SeqID_32102
  Homolog annotation: Hit_ID=Q5Z6B1; Match level="QueryCoverage=41%, HitCoverage=21%, E-value=2e-12, Identity=63%"; Hit description =Probable tRNA-splicing endonuclease subunit Sen2
MATGLQRAGEEACATSSSNLSDFGGMDFLFTIAGFLTIISFGGGHERREESFEVDLDLTLNELGDGEDTQGSEEKEKELHALKCLAVESEQGTDGCDRAVGSLGLRLRAIRGDVQGVSTPQAEELVCKVRTAVQADFVAHCHRPTLVHS

SEQ ID NO: 73882 - protein, 361 aa, Zea mays
  Coding DNA Sequence Number=SeqID_32103
  Gene Ontology: Mol. function=DNA binding; Cellular component =mitochondrion; Biological process=DNA integration
  Homolog annotation: Hit_ID=UPI00004C1731; Match level="QueryCoverage =99%, HitCoverage=29%, E-value=1e-152, Identity=67%"; Hit description= UPI00004C1731 related cluster
  Pfam annotation: Domain name=rve; Domain location=103-285; Score =88.3; E_value=2.4e-23; Accession=PF00665.16; Description=Integrase core domain
MFFDGSLMKTGAGAGLLFVSPLRKHLRYVLRLHFQASNNVAKYEALLIIDQVMKNSHCRDPKMEAYCDEVRRLEDKFYGLELNHIARRYNETADELAKIASGRTTVPPDVFSRDLHQPSVKTEDTPEPEAPSAPPEAPSAQSKKAPGGYTHLLVAIDKFSKWIEVQPLNSIRSEQAVAFFTNIIHRFGVPNSIITDNGTQFTGRKFLDFCKDHHIRVDWAAVAHPMTNEQVERANGMILQGLKPQIYNDLNKFGKRWMKELLSVVWSLRTTPSRATGFTPFFLVYGAEAILPTDLEYGSPRARAYTDQSNRANREDSLDQLEEARDVALLHSARYQQSLRRYHARGVRSRDLQVGDLVLRL

SEQ ID NO: 73883 - protein, 209 aa, Zea mays
  Coding DNA Sequence Number=SeqID_32104
MTTLHPRSKNSGGTSKGLTKGFDDDEDGLRSKHEIDDTRRGEWRMNERAAAPMRTMRSDEGYAMQGRTTRSLLRFSSSRFNARLEGVLLLLFGATRCPGAWHKLAATRPPRRDLRVNSRTHDEHGWATPGHVGKHAASRIRRGGQGEESGDLGDEGELGEGAETYDHHGRRYRGLSVDGGKGATLGTRACRTSLALLEQRGGWPSRSEH

SEQ ID NO: 73884 - protein, 163 aa, Zea mays
  Coding DNA Sequence Number=SeqID_32105
  Gene Ontology: Mol. function=sequence-specific DNA binding; Cellular component=nucleus; Biological process=regulation of transcription, DNA-dependent
  Homolog annotation: Hit_ID=Q84V69; Match level="QueryCoverage=94%, HitCoverage=67%, E-value=2e-65, Identity=85%"; Hit description =Putative MADS-domain transcription factor
  Pfam annotation: Domain name=K-box; Domain location=78-159; Score =5.7; E_value=0.00015; Accession=PF01486.8; Description=K-box region
  Pfam annotation: Domain name=SRF-TF; Domain location=9-59; Score =103.6; E_value=5.8e-28; Accession=PF00319.9; Description=SRF-type transcription factor (DNA-binding and dimerisation domain)
  Pfam module annotation: Pfam domain module=K-box::SRF-TF; Domain location=78-159::9-59
MARERREIKRIESAAARQVTFSKRRRGLFKKAEELSVLCDADVALIVFSSTGKLSQFASSSMNEIIDKYSTHSKNLGKAEQPSLDLNLEHSKYANLNEQLVEASLRLRQMRGEELEGLSVEELQQLEKNLESGLHRVLQTKDQQFLEQISDLEQKLLDRDTLK

SEQ ID NO: 73885 - protein, 266 aa, Zea mays
  Coding DNA Sequence Number=SeqID_32106
  Homolog annotation: Hit_ID=Q6QP54; Match level="QueryCoverage=31%, HitCoverage=29%, E-value=8e-26, Identity=74%"; Hit description =Putative kinase
MGDMASGGRRAKRGKAPMARGGRGREVHDVGAKGAVVPVRKKNSGLGATDRRARRLGERRGRAPLLARPHAGWRLWRLGEERARALLEGDGRAQLLGRGWRARVWEVGCALQGGPERSWASAGGLGKDGRRARNGPGRGVGPSRPQGEGGVVGPRWAREGGGIVGLGSDLGSAPEDDELRSARPQGSGYAPTSADDLRLARPRGSDSTSATEDRLDLGFGGASTSPNLGRRPATSTGGAIITLPRADSGRREQDRRPIWLAPPDRE

SEQ ID NO: 73886 - protein, 149 aa, Zea mays
  Coding DNA Sequence Number=SeqID_32107
  Gene Ontology: Mol. function=kinase activity
  Homolog annotation: Hit_ID=Q6QP54; Match level="QueryCoverage=62%, HitCoverage=43%, E-value=2e-10, Identity=50%"; Hit description =Putative kinase
  Subcellular localization annotation: CTP_CleavageSite=51; ConfidenceScore=5.47e-01
MGSSASPDPGLGLSLDPGRRTPPRPTPGLRLSLGLGRQSPPRPTQGSDSASASEDGLHLARPRARTQPRPLKTDSASPAPVLGLSLDIGRRTRPRPIPGLGLSLDLGGASASPDLRLGPATSQGRPSLPYPQLAQVAGDKTSVPSSSPR

SEQ ID NO: 73887 - protein, 186 aa, Zea mays
  Coding DNA Sequence Number=SeqID_32108
MGRRVWVVPTRTRTRTRLPNGMTVSSADDDPRDVGVMTREELKLDFSKSDTRNTENAEITKRRRVLFRENIPVDSKLCAKTSLLYCYKRSTRASVFSLEQLQWDNFADSFEVTSQKMDVQVYDPFFILRFSIHTLHMGYIEPAQFARLGLLAITLVSIASPDHELRMLGYECLGTFKKSLEVPVVS

SEQ ID NO: 73888 - protein, 89 aa, Zea mays
  Coding DNA Sequence Number=SeqID_32109
MEELLARIMAHTTWPGGGDADRRRRSDKSESNEGESEYHYDYVWRKINFVHRAQDLESDGFLLLQRLNRLCVYVDFRWFLPPTNFIEAD

SEQ ID NO: 73889 - protein, 168 aa, Zea mays
  Coding DNA Sequence Number=SeqID_32110
LRYDNGPFAEPKRVAGEDPKHSYGCYEDGILATLTVKSGLGILFDKRYNGYDYGFNYGCPWCNPCSGEEVAIEADLQEFKTSTDMKTRPEISPSQSMQANVRCAIPRTAQATKSLISADRTDEASSHEYSPQKSDRPHTRASVALRTTISEAYSPTLSVLAEGGTRMG

SEQ ID NO: 73890 - protein, 139 aa, Zea mays
  Coding DNA Sequence Number=SeqID_32111
  Gene Ontology: Mol. function=RNA-directed DNA polymerase activity; Cellular component=chromatin; Biological process=RNA-dependent DNA replication
  Homolog annotation: Hit_ID=Q8S472; Match level="QueryCoverage=99%, HitCoverage=12%, E-value=2e-52, Identity=69%"; Hit description =Putative gypsy-type retrotransposon RIRE2
MPVCFRTPYNFRKETLTFEMVGFQGTYHAVLGRPCYAKFMVVPNYTYLKLKMSGPNGVITIGSTYRHAYECDVECMEYAEALAESEALIADLESLSKEVPDAKRHTGNFKPAEAVKSVPLDPSNNTSKQVRIGSELDPK

SEQ ID NO: 73891 - protein, 64 aa, Zea mays
  Coding DNA Sequence Number=SeqID_32112
RSVEESGRCAFEESGRGAGEEASRDTEDIPGHQAAEIRPQPASASSKNQAAAPVNKQAALAAED

SEQ ID NO: 73892 - protein, 57 aa, Zea mays
  Coding DNA Sequence Number=SeqID_32113
MAFATAPGSNYQEGSRHGGEFRGFFLGLTPPDDAESNRGVENKNGEEEKRSKRQELK

SEQ ID NO: 73893 - protein, 101 aa, Zea mays
  Coding DNA Sequence Number=SeqID_32114
MERYMRNHKTRPAHFGTFTEELAVVDWRADRVMSVVHRRLGMDAPAGGEECADESGLIVQVARQSVCLVVRVVREAAGGSGGRAPCAERDHGTWEMGMMRV

SEQ ID NO: 73894 - protein, 81 aa, Zea mays
  Coding DNA Sequence Number=SeqID_32115
MSIVGTRPYPHTTAKEPFRADGTTISLTGVDGSGVWGWRWRRAAAVEDQRRQDAGETSACPTGARHLAAVAGRWGEIVNTN

SEQ ID NO: 73895 - protein, 197 aa, Zea mays
  Coding DNA Sequence Number=SeqID_32116
  Gene Ontology: Mol. function=catalytic activity; Cellular component =protein complex
  Homolog annotation: Hit_ID=O60735; Match level="QueryCoverage=76%, HitCoverage=39%, E-value=1e-17, Identity=32%"; Hit description=GA17 protein
  Pfam annotation: Domain name=PCI; Domain location=44-146; Score=90.0; E_value=7.1e-24; Accession=PF01399.17; Description=PCI domain
MAKEYFNFLNKYLATFKGSDEESESCDLLNMPAVSQLEKDEKYQLVYELLKIFLTKKLDSYLEFQSANSDLLKDYGLVHDECVTKMRLMSLLDLSSRCSGEIPYSAITVELRINDDEVEQWIVKAIASKILDCKVDQLNQTVIVSRHTERIFGMEHWHALRTKLGAWRGNIARAINTIQANKVTEEGAQGMQGLAIH

SEQ ID NO: 73896 - protein, 229 aa, Zea mays
  Coding DNA Sequence Number=SeqID_32117
  Subcellular localization annotation: CTP_CleavageSite=3; ConfidenceScore=5.08e-01
MARARARATPTAACGPPTPLHGRGGSAPTSARRHDGTGRGHRCRLGRGLGPGLGVQAVIPAATHGLPTPLRGRGTRDGPAAALWGAAPSQRSPQRAGTASGPDGSGAVPVRDLPDACVNGDTGSGGEALPRRVYGSDAASLVGPGQTGSGTWARANSPYARGRGGLRRSAAQAQLRPFGRGGEPRRPTGEARAALGGGVVGSPIARQPPPTRRRSIRPWPKTPIEKKKF

SEQ ID NO: 73897 - protein, 155 aa, Zea mays
  Coding DNA Sequence Number=SeqID_32118
MGKNNKRKREPTPPSEDFGDSEYSEEEFSSESEGFALFTPPLYATITPAPVSPPASSDDSNDSQGIAVEVWTYIRAVERSGLEGSDESEYSSNEEDSPEEDGEGDDDDDDDGGDDSDDGDGGSRGGNGDSRGGDGGSSRGSGGGGSSKGSNKGSG

SEQ ID NO: 73898 - protein, 437 aa, Zea mays
  Coding DNA Sequence Number=SeqID_32119
MAQPSTPYPQESATREKLQKLASPCTPPDSYESYHRDHPLPHLLPQLSFPLPLHRFLPHFRESDEIEYPNSGVLLPHPADSSDRLEGSPSINLTAFHSVAGTEIDSGHQWMKFRFEHEYVTIHTTQILELFGFPKSSTRLHSLCYGNSDPPHRPHGGVAPNTAHVATLFRPPFIDNSRCSPVDFTLAVKFLYELMRRTLLPWMGYREATTHIQLWLLGALVSHSMFDVVDFLIYEIEDTLLDSLRARRQLPYAHYLCHIFAQLIRPPQFQAELDSTRLKFGFYRPAPEDTIPVNAPLDPLAPEHRNEDKVIRQLEDQATVVDTSLDSDDEDLGIPPPPLPPRTHDHEAGGSSAAPPSTPPAIYPALTAIIQSLTQQQAHLAVEQTLALVRKGGALGLHDSHPSAQRCSRASSVACSASSSPDFNGRRSYKCSTTRAT

SEQ ID NO: 73899 - protein, 243 aa, Zea mays
  Coding DNA Sequence Number=SeqID_32120
  Gene Ontology: Mol. function=RNA-directed DNA polymerase activity; Cellular component=intracellular; Biological process=RNA-dependent DNA replication
  Homolog annotation: Hit_ID=UPI00004C1733; Match level="QueryCoverage =97%, HitCoverage=20%, E-value=1e-122, Identity=83%"; Hit description= UPI00004C1733 related cluster
  Pfam annotation: Domain name=RVT_1; Domain location=18-192; Score= -21.4; E_value=0.0014; Accession=PF00078.17; Description=Reverse transcriptase (RNA-dependent
MPGIPRDVAEHSLDIRAGAQPMKQPLRRFDEEKRRAIGEEIHKLMAAGFIKEVFHLEWLANPVLVRKKGEKWRMCVDYTGLNKACPKVPYPLPRIDQIVDSTARCETLSFLDAYSGNAGATYQRCMNHVFGEHIGRMVEAYVDDIVVKTRKASDLLSDLETTFKCLKAKGVKLNPEKCVFGVPRGMLLGFIVSERGIEANPKKIAAITNMGPIKDLKGVQRVMGCLAALSRFISRLGERVKGN

SEQ ID NO: 73900 - protein, 412 aa, Zea mays
  Coding DNA Sequence Number=SeqID_32121
  Homolog annotation: Hit_ID=Q5VNV8; Match level="QueryCoverage=33%, HitCoverage=51%, E-value=3e-47, Identity=70%"; Hit description=TRNA 2'phosphotransferase-like
  Pfam annotation: Domain name=PTS_2-RNA; Domain location=240-389; Score=46.6; E_value=8.5e-11; Accession=PF01885.7; Description=RNA 2'- phosphotransferase, Tpt1  KptA family
MDLVAGAVGNIIRKLSPATDPRHLREVDDVAVASLRAADNAARYTRPKPYLRAEPPRLIPFPVSAPHTHRAARRLRLMRAVAAAASPPLRALLLLSRHPRRAGFTNWPSLPRGQNAGPTAPPAATAPKPAAPSRRQGRGLTASLPRQVARISTPHLRPPATPPRCPDRRHQSHGVRALAGCPRKTVRHLPAPTSHLRFTMNPSSSSSSSGGYHSRAAAFASPQPRGGGGRRRGGGRGQDGSDRIDALGRLLTRVLRHMAAELRLDMRTDGYVRVRDLLKLNLQTFAKVPLKSHTVDEIREAVRRDNKQRFSLLEEDGELLIRANQGHTVTMEMIFAITSTGTMVSGPLSFYCLLLESAYLLWVFIPVFSVAACCAAPIFLMKTSRPGIPDSPDLGYVARSRRPSSPVGVMPP

SEQ ID NO: 73901 - protein, 88 aa, Zea mays
  Coding DNA Sequence Number=SeqID_32122
  Subcellular localization annotation: CTP_CleavageSite=45; ConfidenceScore=5.21e-01
MAVWAVTDWKAAAGLKLLPVLLDGYCRRFETGGSLSRRVSVPRAPAQMGRARGRARRGESEVAGDGRERGGNPAAFVFVPRPGRVRLQ

SEQ ID NO: 73902 - protein, 123 aa, Zea mays
  Coding DNA Sequence Number=SeqID_32123
MASRRAWLKLRAELGAIRRQGTLVLPCSTNLGGGGRGKDTVREIAAWVTPRQSHWVTVAAGEVSGWTREMVPRMRYLTPALSVPYRAQIGMVATQIAGRVTDGEMHDTSDLLSLYHGEDHQPT

SEQ ID NO: 73903 - protein, 62 aa, Zea mays
  Coding DNA Sequence Number=SeqID_32124
MAKELFDIATDHAFGEDVVRVTDSRHKWRTGCDKGSDEDVDDHLNVKRDKGPTTTSRCVGGY

SEQ ID NO: 73904 - protein, 635 aa, Zea mays
  Coding DNA Sequence Number=SeqID_32125
  Homolog annotation: Hit_ID=Q1SNK3; Match level="QueryCoverage=86%, HitCoverage=87%, E-value=3e-69, Identity=34%"; Hit description =Calcium-binding EF-hand; UBA-like
  Pfam annotation: Domain name=UBA; Domain location=154-193; Score =28.4; E_value=2.5e-05; Accession=PF00627.21; Description=UBATS-N domain
  Pfam annotation: Domain name=UBA; Domain location=216-259; Score=4.3; E_value=1.3; Accession=PF00627.21; Description=UBATS-N domain
  Pfam module annotation: Pfam domain module=UBA::UBA; Domain location =154-193::216-259
  Subcellular localization annotation: CTP_CleavageSite=34; ConfidenceScore=5.06e-01
MPSASKSKAKERSAAKVAKEQPKVAAKPMGNATLASSYNNLSGKFHVLEPSSSLLGSQGIDKFRNTDEIDEHSRSSHGTGDFDCASNNGSCSGDSEDTKEKSTSTASRVDSVPGCDIDKREKIRQKNEKKHQRQKERRAQELHERCKGYIMSRKLEALAQKLVAMGFSADQATMALIQNEGCVEESVTWLCNFDASEEAKQQLVADQQSGVNLKIDIADELSKIVSLEAKYKCTKQEVERAVVSCEGDLERAEEALKTHKQESTAIPPKPEGSGYSSGLPNKPQVVLAQNPARPQTNGLSSVGSHQMRREEKDINYKLLMNGSGPKEPAIKGFQPLATPIKPDLVRQQFVQPEKRRLNPNSNPSVPSVASSPLPVAVPQVKPDMRHVAGTNEVKSLMPNGSLRESVIVMQRPQSAGTKQSLPSTSHSMFVSEPSARDWYLNGVSGVDMMLNGGLGHGLRNMSLDSASSARSFGHANHQQNLVSNPIELAANGWGGTWSSGGTSSSRSVVSSLGAFRGWNASESSALPHSDWRTNGAAPYDYTSVDWSVDTTLLNPAAKSELLSDTWSTMFMGGKSTRTPGNLSGAGIAGLYDSNRPMDPAPSARPYECATFCWDDLLSFPNPVGKRPLNKKIAVG

SEQ ID NO: 73905 - protein, 107 aa, Zea mays
  Coding DNA Sequence Number=SeqID_32126
  Subcellular localization annotation: CTP_CleavageSite=12; ConfidenceScore=5.18e-01
MAGALRPNDCAPQAMGQSKLHEQDSTVNQTRPFLPKMAVKVVFPTTMRGTAHPPNPDENFSMPGLASGTITALHRSQTSWRFSLFAPWSPSSVEGRASAAAALSFTV

SEQ ID NO: 73906 - protein, 162 aa, Zea mays
  Coding DNA Sequence Number=SeqID_32127
  Homolog annotation: Hit_ID=Q8H473; Match level="QueryCoverage=48%, HitCoverage=14%, E-value=5e-07, Identity=43%"; Hit description =Putative crp1(Chloroplast RNA processing 1) protein
MALAMSFTYLAVSPLPWGTPPHVAVSRFRERWPKAMGGGATYAGIIRQYLATPPMLYAFASLLNVQRFVAARFTFPSRLTPWLLAMSFTYLTASSFQCGTPPQVVATFHDIIFRTDVGVMCRAAEALDVALSRLDDLDPLSLMSSLLSLTRSVMRGALLKVA

SEQ ID NO: 73907 - protein, 88 aa, Zea mays
  Coding DNA Sequence Number=SeqID_32128
  Subcellular localization annotation: CTP_CleavageSite=32; ConfidenceScore=5.28e-01
MALTSRRPRPPPVLLPPPLRPLVRPPPPTTVVAPARADVGVTTLHVEDLAIRTPLARCDSTGPLYTLSPSSSVRLTYSSLVSHFIFSG

SEQ ID NO: 73908 - protein, 154 aa, Zea mays
  Coding DNA Sequence Number=SeqID_32129
MKANEIMDSMVDQKIACLANKVLEEPNDLVIAKDVSEKEDGRTTLEPVKTTHRPFSTPRRSPSASKARWISSPRTLLLRRSPSQIGAAVDPTAVCRSAGCLRARPHCCHRDPIGTLLCVPPLSHGTNPFACSSTRRHSRPHLAVGQHRTLHRRM

SEQ ID NO: 73909 - protein, 69 aa, Zea mays
  Coding DNA Sequence Number=SeqID_32130
MYLGVGAEGSPDSLVHHRTLFLYFSHVASPIPESTQLAPSEPGAPDTIRCITGQSGGDAVSPGDSMKVA

SEQ ID NO: 73910 - protein, 611 aa, Zea mays
  Coding DNA Sequence Number=SeqID_32131
  Gene Ontology: Mol. function=solute:hydrogen antiporter activity; Cellular component=integral to membrane; Biological process =regulation of pH
  Homolog annotation: Hit_ID=Q6ATD0; Match level="QueryCoverage=98%, HitCoverage=76%, E-value=0.0, Identity=82%"; Hit description =Putative sodium/hydrogen exchanger
  Pfam annotation: Domain name=Na_H_Exchanger; Domain location=37-423; Score=285.3; E_value=1.2e-82; Accession=PF00999.11; Description =Sodiumhydrogen exchanger family
MDNATAEALKPMKATSDGVFQGENPLHSALPLAILQICIVVVLTRVLAFILRPLRQPRVIAEIIGGILLGPSAVGRSTAFLNTVFPKQSLTVLDTIANIGLLYFLFLVGLELDLRAIRHTGSTALVIAVAGISLPFIMGIGTSFVLQHTVARGVPTAPFLVFMGVALSITAFPVLARILAELKLLTTDLGRMAMSAAAVNDVVAWILLALAIALSGTGSPLVSLWVLLAGTGFVLAAFLLLRPGLTWMARRSPEGEPVKELYICATLAIVLAAGFATDAIGIHALFGAFIVGIIVPKDGPFAGVLLEKVEDLISGLFLPLYFVSSGLKTNVMTIKGGDSWALLVLVVATACIGKIGGTVIASLIVRVPFREALTLGFLMNTKGLVELIVLNIGKDRHVLNDETFAILVLMALITTFITTPVVMTIYKPARRGAPYKNRTVQRANPHDEFRMMACFHSTRNIPTIINLMESSRGTRKRGITVYAMHLVELSERSSAICMVHKARRNGMPFWNRRRNGDGGGDQLVVAFETYQQLSRVSIRAMTAISDLETIHEDVVTSAHQKRAALIVLPFHKLHQIDGPEESLGDQYQHINFVFLHHAPCSVGIIVDRTIL

SEQ ID NO: 73911 - protein, 161 aa, Zea mays
  Coding DNA Sequence Number=SeqID_32132
MTTTRKSHCGRIHGNGGSRPNLFELFLSLPHSLSPHETDAAIIGVNGYRPPPSPGALSSSPSPSIKWQPSPSLTSPSPSPNRLAGAAIHRPRRSSSSPCRSPPSPVGPSTALARDPTAPTEPLPSVPRQAPAIRVPAELYRSRAELLSASASCPVPRRSSK

SEQ ID NO: 73912 - protein, 784 aa, Zea mays
  Coding DNA Sequence Number=SeqID_32133
  Gene Ontology: Mol. function=protein binding; Cellular component =membrane; Biological process=defense response
  Homolog annotation: Hit_ID=Q2QQB5; Match level="QueryCoverage=99%, HitCoverage=86%, E-value=0.0, Identity=56%"; Hit description=NB-ARC domain containing protein, expressed
  Pfam annotation: Domain name=LRR_1; Domain location=463-484; Score =4.8; E_value=35; Accession=PF00560.23; Description=Leucine Rich Repeat
  Pfam annotation: Domain name=LRR_1; Domain location=486-507; Score =7.1; E_value=14; Accession=PF00560.23; Description=Leucine Rich Repeat
  Pfam annotation: Domain name=LRR_1; Domain location=509-530; Score =7.5; E_value=11; Accession=PF00560.23; Description=Leucine Rich Repeat
  Pfam annotation: Domain name=LRR_1; Domain location=532-557; Score =0.7; E_value=2.1e+02; Accession=PF00560.23; Description=Leucine Rich Repeat
  Pfam annotation: Domain name=LRR_1; Domain location=654-676; Score =5.3; E_value=29; Accession=PF00560.23; Description=Leucine Rich Repeat
  Pfam annotation: Domain name=LRR_1; Domain location=726-748; Score =5.8; E_value=24; Accession=PF00560.23; Description=Leucine Rich Repeat
  Pfam annotation: Domain name=NB-ARC; Domain location=41-348; Score =308.1; E_value=1.6e-89; Accession=PF00931.13; Description=NB-ARC domain
  Pfam module annotation: Pfam domain module=LRR_1::LRR_1::LRR_1::LRR _1::LRR_1::LRR_1::NB-ARC; Domain location=463-484::486-507::509 -530::532-557::654-676::726-748::41-348
MVKNLKQVQARLQNLTVLKDRYGITVVGPGGGSSSHNNSRKNYLSESSYLNDDGDGVMVGNEDEVKKLTECIDGAGADRAVISIWGMGGSGKTILARGIYRKREVRKNFQCCAWITVSLNYQVEDLLNKLIKELHIQDVPDATDSTHLVARIQNHLKDKRYLVVLDDMWNRESWLFFDRVFVKNLYGSRVIVTTRTEAVASIAELNHTIRIGLLSQGESWKLFGRKAFSKIGKEEPTCPQGLVQWANKILERCQGLPLAIVAIGSLLSYREMEEQEWRLFYNQLNWQLTNNPELNFVSSVLKLSLNDLPSHLRNCFLYCGLFPKDYQIRRKCLIRLWVAEGFVEDRGTEITLEEVAEEYLKELTRRSLFQVMERNEFSRPRRFQVHDLVREMTLAISRNERFGHVSDQPDVTDIGDVGKRVSVHSGGQIYQPGPSSQHLRSFLLFDKHVPLSWISIASSDFKLLRVLCLRYSLLEDIPDAMTCLFNLHHLDCSRTKVRKVPRSVARLKKLETLHLRFARVRELPSEITMLTNLRHLSVSDDLYGTSICGTIRSLKHLQTLREVKVNKDLAKSLGYLTQLRSLGITGVIQSHNADLWASIRKMTVLNKLAVATPGESNEVLSFEELRPLKNLEKFYLTGKLAEGKLFPVSNGFQKLKVLTMRWSKLTHDPLSSLCQMENLVYLNLYCAYDGECLIFSSGWFPKLKQLYLGKLERLRSIQISDGAIENLTYLELHELWNLKSVPEGLVYLRSLQHLYARKMPADFVEELEGSCQGFVRHIANIECM

SEQ ID NO: 73913 - protein, 100 aa, Zea mays
  Coding DNA Sequence Number=SeqID_32134
  Subcellular localization annotation: CTP_CleavageSite=87; ConfidenceScore=5.20e-01
MELSLPSRASSPKFSLAPHIRALLLGLPRRNLASVNATAPEPAQHPVKNPCPRAQQHHRSPSCLVGVRPHRSPSMEPHRNSCPPSKRIARVTPFVVDAIA

SEQ ID NO: 73914 - protein, 345 aa, Zea mays
  Coding DNA Sequence Number=SeqID_32135
  Gene Ontology: Mol. function=kinase activity; Cellular component =intracellular; Biological process=nucleobase, nucleoside, nucleotide and nucleic acid metabolic process
  Homolog annotation: Hit_ID=Q2QPW1; Match level="QueryCoverage=86%, HitCoverage=79%, E-value=1e-139, Identity=81%"; Hit description =Guanylate kinase, putative, expressed
  Pfam annotation: Domain name=Guanylate_kin; Domain location=176-280; Score=170.3; E_value=4.9e-48; Accession=PF00625.11; Description =Guanylate kinase
MGRLEPQAEWESRLMGKGEEAVHFSVVDAKDCKQSAFEVGDKTYVICRSDDDLKTSAVKIHDKLTQTWLSPTILGEQPLLTKSQSVIPVSDEKILVIEKGVPLNESIWFLEIDTPFVKQQRKIKETEVVSWSKGVIGVGQKPVVISGPSGVGKGTLIAKLMKDYPSKFGFSVSHTTRSPREKEIDGVHYHFTERIKIEKDISEGKFLEFAHVHGNVYGTSIEAVESVTDEGKRCILDIDVQGARSVRASSLEAIFIFVCPPSFEELEKRLRARGTETEEQIQKRLRNAQAELDQSNEPGLFHHLLVNDDLETCYENLKAVRLDEQGALRLAQLTPFDKGLYWRFR

SEQ ID NO: 73915 - protein, 71 aa, Zea mays
  Coding DNA Sequence Number=SeqID_32136
  Subcellular localization annotation: CTP_CleavageSite=41; ConfidenceScore=5.23e-01
MPPRRLAPAAASAPLLLCFPRDEPCSNSLSFLNRALLPPAVSEARRRREEREGTRRESRGKIRIWNKNPDL

SEQ ID NO: 73916 - protein, 448 aa, Zea mays
  Coding DNA Sequence Number=SeqID_32137
  Gene Ontology: Mol. function=protein-tyrosine kinase activity; Cellular component=integral to membrane; Biological process=protein amino acid phosphorylation
  Homolog annotation: Hit_ID=Q10MU7; Match level="QueryCoverage=66%, HitCoverage=60%, E-value=6e-82, Identity=52%"; Hit description=Ser -thr protein kinase, putative, expressed
  Pfam annotation: Domain name=LRRNT_2; Domain location=27-68; Score =56.2; E_value=1.1e-13; Accession=PF08263.3; Description=Leucine rich repeat N-terminal domain
  Pfam annotation: Domain name=LRR_1; Domain location=120-142; Score =15.9; E_value=0.15; Accession=PF00560.23; Description=Leucine Rich Repeat
  Pfam annotation: Domain name=LRR_1; Domain location=96-118; Score =8.5; E_value=7.2; Accession=PF00560.23; Description=Leucine Rich Repeat
  Pfam annotation: Domain name=Pkinase; Domain location=187-420; Score=- 78.2; E_value=0.00066; Accession=PF00069.15; Description=Protein kinase domain
  Pfam annotation: Domain name=Pkinase_Tyr; Domain location=202-420; Score=-68.1; E_value=2.7e-08; Accession=PF07714.7; Description =Protein tyrosine kinase
  Pfam module annotation: Pfam domain module=LRRNT_2::LRR_1::LRR _1::Pkinase::Pkinase_Tyr; Domain location=27-68::120-142::96-118::187- 420::202-420
MGTCGRRVLGVWFFFWFLLTLEQCTSLNREGAALLRFKAAIEADPYGALLDWNQESLSPCTWFGVECSDDGLVMSLSLANLGLKGVLSPELGKLMQMKSLILHNNSFYGTIPREIGDLQDLKMLDLGYNNFSGSIPSELQHILSLEFLCRFLEGITLFRRSELETACEGFSNIIDTLPGFTLFKGTLPCGAEIAVASTSVAYAGGWSAIDEAHYMNKVGALSKVNHKNLLNLVGYCEDEKPFIRMMVFEYASNGSLFERLHVKEAEHLNWQSRLRIAMGVLYCLQYMHQQNTPVTLKNLNSSYIYLTEDDAAKVSDISFSVDKREDDEYDAPDEYSTVYKFALLLLETISGRRPYSEDDGLLVLWARRYLTCASPVMGMIDPTLNSVPEEHARALSELIRLCLSEDRRQRPTMAEVTKRMQEITGITQDQAIPRNSALWWAELEIMTS

SEQ ID NO: 73917 - protein, 67 aa, Zea mays
  Coding DNA Sequence Number=SeqID_32138
MGLMFGKLFSRLFTKKEMRILMVGLNATGQEEGHRWTASTVGSDEPTSSACHKTGDKIRERKLILAI

SEQ ID NO: 73918 - protein, 55 aa, Zea mays
  Coding DNA Sequence Number=SeqID_32139
MPKVAGRFHRAGAARVVENHNDELVELGQLPDDVDDMEDVVVVLFGVGRSDVPVD

SEQ ID NO: 73919 - protein, 382 aa, Zea mays
  Coding DNA Sequence Number=SeqID_32140
  Homolog annotation: Hit_ID=Q2QSN8; Match level="QueryCoverage=98%, HitCoverage=97%, E-value=2e-58, Identity=38%"; Hit description =Expressed protein
  Pfam annotation: Domain name=DUF295; Domain location=289-333; Score =17.0; E_value=0.0067; Accession=PF03478.8; Description=Protein of unknown function (DUF295)
MAVPLRWANLNINLVIEIVNRVPCAIDRERMAAVCQAWLAAVVQAKPLTYQLPSLFLPPANVSGVYCYLSGCRDHNMLPGPRYFGSYDGGWFFLAYGQTRGHRLFNIRTGGSHELPDVVADLFTTVGTYSMVVLAATLSLPPDHLACVAAGIVTYQPDLDAPRRRHVAFWRPGDKMAVCNVVPNESVGPGLEPEDVVYYRDSFYFLTQDGHILVSRPYYNRVGDILGALSKLTRFQFQEGGCSDEQFVRARYLVSSRGELLMVVRLAAHHHAPTSSFKVFRMTLYPRTWFEEDALCGRMLFVGRGCSRSYEVSQYPGFKDGIFFLDDRSFYDAEMMFRRVNERQYPCSDIGKWSPDRPSPHVDLYFPERVPSYNSPPAWLLP

SEQ ID NO: 73920 - protein, 394 aa, Zea mays
  Coding DNA Sequence Number=SeqID_32141
  Homolog annotation: Hit_ID=Q69UH7; Match level="QueryCoverage=39%, HitCoverage=23%, E-value=2e-41, Identity=59%"; Hit description =Putative SERK1 protein
  Pfam annotation: Domain name=LRR_1; Domain location=102-124; Score =13.7; E_value=0.66; Accession=PF00560.23; Description=Leucine Rich Repeat
  Pfam annotation: Domain name=LRR_1; Domain location=54-76; Score =11.8; E_value=1.8; Accession=PF00560.23; Description=Leucine Rich Repeat
  Pfam annotation: Domain name=LRR_1; Domain location=78-97; Score =10.5; E_value=3.2; Accession=PF00560.23; Description=Leucine Rich Repeat
  Pfam module annotation: Pfam domain module=LRR_1::LRR_1::LRR_1; Domain location=102-124::54-76::78-97
MGKKENLSKEVVARPMSSESDDEQLEFHSLPILLQLGYNQLTWSIPTQLGHLNKLTILALQFNQLSDAIPASLGDLSALARLDLSSNQLFGSIPSKLAEIPRLATLDLRNNTLSGSVPSCLKKLNEGFLYENNPEFCGAQFDSLKDCPNDDNDDDRTPRKPESTFVKPQQIQKTADLNRNCGTEAARSLRRSLEGLLLPEQSSSWQEQPPSSKQNLAPAGQGAAGPLGGVVAGTRSSPKIEEDLLLHTTADMVAPPRPPPRCAAADSVRGRRPRYSPLTAPDTIWPAGVRRVRPSSRGDPRWDGLRFGLGRGTPEVPCLEAWRRQKSGDGGTEERDVYRSGAGAGEAGNVHPDQHAGVVDEGWGEDRGTNGAWARGCRRQNHGAQVVDSYTVVL

SEQ ID NO: 73921 - protein, 59 aa, Zea mays
  Coding DNA Sequence Number=SeqID_32142
MTSHILMASIVRENVLSVRAFWWLQLPCYCSILVPSMGGHYHSCLGPIGRIGGVYLFLL

SEQ ID NO: 73922 - protein, 54 aa, Zea mays
  Coding DNA Sequence Number=SeqID_32143
MSAFFYLQAAVYIAGSVCAAFVANIDGHSDKLSPSMGGCSGFETEPICTTKTIS

SEQ ID NO: 73923 - protein, 647 aa, Zea mays
  Coding DNA Sequence Number=SeqID_32144
  Pfam annotation: Domain name=DUF674; Domain location=1-478; Score =61.2; E_value=1.9e-23; Accession=PF05056.3; Description=Protein of unknown function (DUF674)
MAKPEGPTIGVKLSVDKEKKKVLFAESNKEFVDVLFSFLTVLLDTIVRLLDKQSQLGCLDQLYKSVEDLNLEYFQTSACKAMLLKPLNAASGHCCRLKINVDGSVPRVVYVCKDTRCSALSDNAFSSFPGTICKCGKVMESIGQCPKYDGDTETAAATCSEDGVFVKGCLKFIVTDDLQVAPASTSLMMSVFEKFGVLDPAVLEQQVLQFSSEKITCLLKRLLTSKQPLTDHYFEAPVPQDDASLEALVQNLHPKQENEDQEMPGNLKIRVLLTKDNSALLYAEVGVDFVDSLFGLLSIPLGSAIKLYGQCSAKGCLGNVYMSIDGSVQVFVREECQSLLLDPKLPPFFGCCASKILQVDELAPRELTIKACFVCFKSLGFSGCSRCHDIPYKNSLRRYEAFCANTVKSIKLCEANPKEPNGGSEKGEVYVSGKTNFLVTDDLRVLPLSLTSTVKIVSDSKIQTSNLVVKEITLTKSKVMELQRVVLLLSRTTLSSVLLHPKKTKKLHHYHRVRTKATDVGVLLHPGTTISLHRQGHGLQHLPSEETEATPLWICLSMNRDTFIVATSSLLLPQWLSRSKRMRQTGGMCGCEMIGETLPHANIRDESPEKRHREKMGRMRVLLEAEKMEFPSNTFFQGLLAISWRCS

SEQ ID NO: 73924 - protein, 87 aa, Zea mays
  Coding DNA Sequence Number=SeqID_32145
MEPWPAPRPWLVLAGALFGGSSGAVWRSVPYCHGTQGVQKYAGPLHVHQHAGTHGERTAGRRRNDLGSARSGASVQAQDAEVLEMLC

SEQ ID NO: 73925 - protein, 62 aa, Zea mays
  Coding DNA Sequence Number=SeqID_32146
MTARSCVAGGTTVNCARDRGVKDDVKNHQTGTTATHEIDILAIEVNVLIYCVKKFMIAQSWE

SEQ ID NO: 73926 - protein, 118 aa, Zea mays
  Coding DNA Sequence Number=SeqID_32147
  Gene Ontology: Mol. function=protein translocase activity; Cellular component=chloroplast inner membrane; Biological process =intracellular protein transport
  Homolog annotation: Hit_ID=Q6K5Y0; Match level="QueryCoverage=71%, HitCoverage=33%, E-value=1e-35, Identity=78%"; Hit description =Putative Tic20
MALLPGWLFLAIFMTIYFFVVRRKWSPHFLRFHIILAILLDTGSQALATACNWNPSIAFQGKQMAHFWMAMAFIQIFTVAECLPCDKSPGPDLVSQVAFVVNVFNALFEIGAKEPSLG

SEQ ID NO: 73927 - protein, 98 aa, Zea mays
  Coding DNA Sequence Number=SeqID_32148
MGRSDLKPRIELKTVEVAKITLLKRIKYNKRDGLEYLNGLKEHLFKSYKCLRQKPKPQPYMLCNCYSSEVKPLRRFCVTRRAPELVESLKKFVKRLRS

SEQ ID NO: 73928 - protein, 90 aa, Zea mays
  Coding DNA Sequence Number=SeqID_32149
MAKGGGERGTLLPVSADDGKGNDGGGGGDDAVLFKGSAMTRRGGAAALSYMACSGWLTRALGLSSFGNTTELLGTYHFRSSVAMGYTQST

SEQ ID NO: 73929 - protein, 288 aa, Zea mays
  Coding DNA Sequence Number=SeqID_32150
  Gene Ontology: Mol. function=transcription factor activity; Cellular component=nucleus; Biological process=regulation of transcription, DNA-dependent
MASANNWLGFSLSGQDNPQPNQDSSPAAGIDISGASDFYGLPTQQGSDGHLGVPGLRDDHASYGIMEAYNRVPQETQDWNMRGLDYNGGGSELSMLVGSSGGGGGNGKRAVEDSEPKLEDFLGGNSFVSDQDQSGGYLFSGVPIASSANSNSGSNTMELSMIKTWLRNNQVAQPQPPAPHQPQPEEMSTDASGSSFGCSDSMGRNSMVAAGGSSQSLALSMSTGSHLPMVVPSGAASGAASESTSSENKRASGAMDSPGSAVEAVPRKSIDTFGQRTSIYRGVTRLEL

SEQ ID NO: 73930 - protein, 421 aa, Zea mays
  Coding DNA Sequence Number=SeqID_32151
  Gene Ontology: Mol. function=transcription factor activity; Cellular component=nucleus; Biological process=regulation of transcription, DNA-dependent
  Homolog annotation: Hit_ID=Q6K5Y1; Match level="QueryCoverage=91%, HitCoverage=100%, E-value=2e-79, Identity=70%"; Hit description =AP2/EREBP transcription factor-like protein
  Pfam annotation: Domain name=AP2; Domain location=55-186; Score=42.7; E_value=1.3e-09; Accession=PF00847.10; Description=AP2 domain
MRLIYGIIVVEGKGRVARVGKISNYEKELEEMKHMTRQEYIAYLRRNSSGFSRGASKYRGVTRHHQHGRWQARIGRVAGNKDLYLGTFIFVSKLSEKIGACGQRGRAENPSALNGTVCTRPAACMQYRRALGNDNPNHAPCAVKLIVVHIPSYVGTEEEAAEAYDIAAIKFRGLNAVTNFDMSRYDVKSILESSTLPVGGAARRLKDAVDHVEAGATIWRADMDGAVISQLAEAGMGGYASYGHHGWPTIAFQQPSPLSVHYPYGQPSRGWCKPEQDAAAAAAHSLQDLQQLHLGSAAHNFFQASSSSTVYNGGAGASGGYQGLGGGSSFLMPSSTVVAAADQGHSSTANQGSTCSYGDDHQEGKLIGYDAAMVATAAGGDPYAAARNGYQFSQGSGSTVSIARANGYANNWSSPFNNGMG

SEQ ID NO: 73931 - protein, 139 aa, Zea mays
  Coding DNA Sequence Number=SeqID_32152
  Homolog annotation: Hit_ID=Q6K5Y4; Match level="QueryCoverage=38%, HitCoverage=15%, E-value=3e-24, Identity=96%"; Hit description =Putative UDP-N-acetylglucosamine transporter
VVLLFSCILAFLLNYTIFWNTILNFALTQSMCGNLKDFFTVGIGWVLFGGLPFDLSLREVIFVLLTGGGKPCPKFLKAIKMDSTALSFWGLDPWKHRNRCVFDEAVLALLIWSRVSGKNRCQELEDYLIQVERHEFLLF

SEQ ID NO: 73932 - protein, 54 aa, Zea mays
  Coding DNA Sequence Number=SeqID_32153
MDTSSPEALVDAKNLNMFVGQRMRAVVQVQHNEGTSLAETSCFTNDKCRNRHRF

SEQ ID NO: 73933 - protein, 139 aa, Zea mays
  Coding DNA Sequence Number=SeqID_32154
  Gene Ontology: Mol. function=nucleoside-triphosphatase activity; Cellular component=membrane; Biological process=proteolysis
  Homolog annotation: Hit_ID=Q31QL2; Match level="QueryCoverage=51%, HitCoverage=11%, E-value=3e-11, Identity=51%"; Hit description =Single-stranded nucleic acid binding R3H
MILPRDLRDNLQNEPRKDQLLEVILDLGRRPEARFLGDSGGCYDLQDSEISQKELEDAQKAVGEFGGDNRAGIATGSEQTDKASMLDEAIVYLKAMSSKYRSGDESCLAAHVQQHAIPEPGRDPPPIAAIMDVPFNKLC

SEQ ID NO: 73934 - protein, 166 aa, Zea mays
  Coding DNA Sequence Number=SeqID_32155
  Gene Ontology: Mol. function=hydrolase activity; Cellular component =nucleus
  Homolog annotation: Hit_ID=Q6ER78; Match level="QueryCoverage=75%, HitCoverage=23%, E-value=3e-38, Identity=68%"; Hit description =Putative metallo beta subunit lactamase
  Subcellular localization annotation: CTP_CleavageSite=39; ConfidenceScore=5.49e-01
MVALASLSSLCPCGIARRRAAAASSPAAVSISCCAVATPSSSGKGPQESRTPRRRLRKTEGASKSLEDSVKRKMEQFYEGSDGPPLRVLPIGGLGEIGMNCMLVGNYDRYILIDAGVMFPEVHDLGDKVAELEGTIVVVEEAMLKVVVVEGGDAKVDIVRAIVDER

SEQ ID NO: 73935 - protein, 39 aa, Zea mays
  Coding DNA Sequence Number=SeqID_32156
MASSPGGSGCSTMSSSNVGRWWLSSGGLVHRVGGGLALT

SEQ ID NO: 73936 - protein, 89 aa, Zea mays
  Coding DNA Sequence Number=SeqID_32157
MAPVMGELVGREKGKRQPLTAQHQGADVVPGARGYPGAGSRPRGRASGETAAKAGARRVTGSWARSGCDWQHESRRQVPDVGAWPRHGT

SEQ ID NO: 73937 - protein, 55 aa, Zea mays
  Coding DNA Sequence Number=SeqID_32158
MGSHDPQAERESQLMGKVCDLYRGLETGCPHCNHFSGEDEGNVEDIQEFQDFEEF

SEQ ID NO: 73938 - protein, 136 aa, Zea mays
  Coding DNA Sequence Number=SeqID_32159
  Gene Ontology: Mol. function=kinase activity
  Homolog annotation: Hit_ID=Q6QP54; Match level="QueryCoverage=75%, HitCoverage=50%, E-value=2e-18, Identity=49%"; Hit description =Putative kinase
MTDSASPDPGLGHSLDLGSRSPPRPTQGSDSASTPGLRLDLDLGGASALPDLGLGPTTSQGGHHYPTPSSLRLWGTRPTSHLARPGKQIMMAPRVLHDGGGSQPLTKARRRQQGFDNPDSYPSTGPKRSSDDHDIT

SEQ ID NO: 73939 - protein, 163 aa, Zea mays
  Coding DNA Sequence Number=SeqID_32160
MEARRASRYQVHGRRSKRLRNPKPRVKKKTCKVKPTSARPGTPDCPVVHRTVSGAPGWLGDELPALGKQRGDMAIIHWTVRWGTGLSGEPTVVSTNGRPRDQRATRGQANDYLIATDCPVRQGEQRANGRLRQKRKEIEHRTGTVHVRWCTRLSGAPPDRRQG

SEQ ID NO: 73940 - protein, 82 aa, Zea mays
  Coding DNA Sequence Number=SeqID_32161
MPPLRAPIIRLVHSTRRAPFVNDFRYSSEWKVFFRTFGLRPLFTSDLQPWDEGVHDMKGTVWEMDDLVPKLPMEKLRLGGGK

SEQ ID NO: 73941 - protein, 277 aa, Zea mays
  Coding DNA Sequence Number=SeqID_32162
KRKRGTERRLLSKKQSCQDPGPFSAYHQEIASCNESRKSTHRRIENDPSTEVKLKVGDVRLANIDENINKPSGTEREGIEFFCGPDDGTKEQDMALRKAYFSARPSPHFWKRVSKMVPGRSAEDCFNRIYTDLSTPTPIAPRPRANSLGKHSGRSSARKKPFSRLRTKSSDPSPGVLKPIKNVILHERYIDKLARREGAKRPRRRAPAGSKAADSGKSLSEQQAGSLKAAKNALISEATDFISSFKTLQANSLAHAVENSEDEIECDASNCSHDDKE

SEQ ID NO: 73942 - protein, 123 aa, Zea mays
  Coding DNA Sequence Number=SeqID_32163
MEFISKRYPNAQPIFRPVVGDEHPPELLVEHVYTPMSPWKGRLRSHHATPQSFPKRRPPSQTKNPEEKEELQTCKKHTARKKTARGRHAGAAAQQPRALLRGSSRLAGRDHEHPIMIDDDVNE

SEQ ID NO: 73943 - protein, 48 aa, Zea mays
  Coding DNA Sequence Number=SeqID_32164
MVGWRGDLAKVASLRRLGLGRAEGIFGIGLRVYKSMVKTKLEWDGRRS

SEQ ID NO: 73944 - protein, 83 aa, Zea mays
  Coding DNA Sequence Number=SeqID_32165
MQRTFTITDELEYEIRLDNVYRSDILIDNVEGNMINDMEASRVDNMEAYKVDEAVVLTMMPDLEDNEFRRPAFSITDTRQRSG

SEQ ID NO: 73945 - protein, 108 aa, Zea mays
  Coding DNA Sequence Number=SeqID_32166
  Homolog annotation: Hit_ID=Q6Z3H8; Match level="QueryCoverage=67%, HitCoverage=7%, E-value=1e-17, Identity=63%"; Hit description =Putative bzip-related transcription factor
MRNMLSFYTDLYLLTHAQIGAKAGSDGEQSMRKALEAQNKKLVLISNQGSVSLSAQALHERGPGAEAGSLQIGLRNIFEAMENFTSASANTYRELHLCAEEAMENFLL

SEQ ID NO: 73946 - protein, 148 aa, Zea mays
  Coding DNA Sequence Number=SeqID_32167
MGKGRRGQGLPHHTGDKRKRDPSPPSEDFDDSEYSEEEVSSESEGSLALASPPTSSNDSDDSQGIAMEAWTYIRSVERAGLEGLDESEVSSDEEDSFGSSEERSGDDSDDGDGGGGDDDDGRGGEGDDGGNDDGGRGGGRASGKAPLV

SEQ ID NO: 73947 - protein, 377 aa, Zea mays
  Coding DNA Sequence Number=SeqID_32168
  Gene Ontology: Mol. function=protein binding; Cellular component =cytoplasm; Biological process=regulation of transcription
  Homolog annotation: Hit_ID=Q5QM27; Match level="QueryCoverage=99%, HitCoverage=100%, E-value=1e-154, Identity=74%"; Hit description =Chain A, C-Terminal Domain Of Mouse Brain Tubby Protein-like
  Pfam annotation: Domain name=F-box; Domain location=34-90; Score =17.8; E_value=0.038; Accession=PF00646.23; Description=F-box domain
  Pfam annotation: Domain name=Tub; Domain location=124-377; Score =344.6; E_value=1.6e-100; Accession=PF01167.8; Description=Tub family
  Pfam module annotation: Pfam domain module=F-box::Tub; Domain location=34-90::124-377
MPRDGAQAAPPPERGEMDEVVEADPDTEAEDQEERWARLLPELLSDVVRRVEASGGERWPARKDVVSCACVCRRWREAAVSVVRPPAESGKITFPSSLKQWQEPLETGGGQSGGARARRTTMRGMKGVVWRAVVEEEDQRTLSAAAEEAPVDKGKFLMAARRFRRGPHTEYIISLDAEDLSQGSNAYMGKLRSDFWGTNFKIYDSKPPYDGAKASSSRSSRRFGSRRISPQVSAGNYEVGQVSYKYNLLKSRGPRRMYCTLECPSAQETWENSLKTKFRRPLGPTTLRNKAPRWHEHLQCWCLNFHGRVTVASVKNFQLVAAADPSEPTTNVDDETVLLQFGKVDSDMFTMDYRQPLSAFQAFAISLSSFGTKLACE

SEQ ID NO: 73948 - protein, 84 aa, Zea mays
  Coding DNA Sequence Number=SeqID_32169
MSHHPLLTLLPSAGQAFVQAAFNAHVCACENFGRDWARVEMSMDEAARRRLDSMQRRLRLLEQQMETLEAEVGEATSSRMHTYA

SEQ ID NO: 73949 - protein, 963 aa, Zea mays
  Coding DNA Sequence Number=SeqID_32170
  Gene Ontology: Biological process=embryonic development ending in seed dormancy
  Homolog annotation: Hit_ID=Q1S6U5; Match level="QueryCoverage=54%, HitCoverage=58%, E-value=1e-103, Identity=38%"; Hit description =Pentatricopeptide repeat
  Pfam annotation: Domain name=PPR; Domain location=479-513; Score =13.8; E_value=0.17; Accession=PF01535.11; Description=PPR repeat
  Pfam annotation: Domain name=PPR; Domain location=565-599; Score =32.1; E_value=1.9e-06; Accession=PF01535.11; Description=PPR repeat
  Pfam annotation: Domain name=PPR; Domain location=634-668; Score =20.7; E_value=0.0053; Accession=PF01535.11; Description=PPR repeat
  Pfam annotation: Domain name=PPR; Domain location=704-737; Score =15.3; E_value=0.11; Accession=PF01535.11; Description=PPR repeat
  Pfam annotation: Domain name=PPR; Domain location=738-772; Score =27.5; E_value=4.7e-05; Accession=PF01535.11; Description=PPR repeat
  Pfam annotation: Domain name=PPR; Domain location=783-817; Score =19.3; E_value=0.014; Accession=PF01535.11; Description=PPR repeat
  Pfam module annotation: Pfam domain module=PPR::PPR::PPR::PPR::PPR::PP R; Domain location=479-513::565-599::634-668::704-737::738-772::783 -817
  Subcellular localization annotation: CTP_CleavageSite=68; ConfidenceScore=5.49e-01
MTAPPNASMGPLSLGGCGALLSTPQPNSWHCRGFSIPERSVFMLPLRRGLSRKRGWVLDSRSNGAVARDEVGAGSSELRHIEKELTFSPTFTDYVKIMESVKLDRSKNLHGADGQSLRRRFAGDGRQRNRRSGDARNKSFERNQGPQRDLAKDENQKDVTGFVDKRATGHVKSSNRRQGEVEDYAQRRIIRGGTRGNGDNGQFSSPVKAKDTRGSMSVHRLVTNKQTQSVAGNDLQGRATYTPSRTSALPNSSIPSKNAKVQMRKYDYTMTSSRIDLKYPRETFPNTEVNADSNVQRNQQRVETLGRNFVVRRFGEIGTDSKKSTVSKIYGSTQAMPEHDSHSSDNLESDERRTVQLHRGANVKMGKFVSRDAETTDFDDRAAFKTFEVFTDVRNRPRILRMEMEERIQKLASRLNATDVNTPEWKFSKMIHDAKIKFSDHSILRIVQMLGRYGNWKCVLQVVEWLQSHERFKSYKSRYIYTTVLDVLGKAKRPFEALNVFYTMQNQLSSYPDMAAYHCIAVTLGQAGLIKELFDVIDCMCSPPRKKFKLSPLQNWDPRLEPDLIVYNAVLNACVQQKQWEGAFWVLQQLKEKNICPTNSTYGLVMEVMLVCGKYNLVYEFFNKVDKSSIPGALNYKVLVNALWREGKIDEAVMAVKDMESRGIVGSASLYYDLARCLCSGGRCKEALLQVEKICKVANKPLVVTYTGLIQTCIDNGGMEDAKYIFNHMCNYCSPNSVTCNIMMKSYIKHGMLEDAKDLLHDILNCRIRSKADSNQVATADKFTFNTFMEACAAAKRWNDFEYAFREMLLNGYHFDERRHLRMVLDAFRHGKEQLLDDLWHYLCRHSRVPPSPVIMERFCLKLMQGDTLAAISCVSSFHEGKICNVSSMSWLNLLSRNADRLKEEHVTKLAHELNSLISLRSSSDSISLSLYQKIISSCTAFLSGATVVEKAPSGQSVVLQKL

SEQ ID NO: 73950 - protein, 365 aa, Zea mays
  Coding DNA Sequence Number=SeqID_32171
  Gene Ontology: Mol. function=protein disulfide oxidoreductase activity; Cellular component=cytoplasm; Biological process=cell redox homeostasis
  Homolog annotation: Hit_ID=UPI000065F576; Match level="QueryCoverage =88%, HitCoverage=82%, E-value=3e-66, Identity=50%"; Hit description =Homolog of Homo sapiens "Thioredoxin-like protein 2
  Pfam annotation: Domain name=Glutaredoxin; Domain location=173-237; Score=96.9; E_value=5.9e-26; Accession=PF00462.14; Description =Glutaredoxin
  Pfam annotation: Domain name=Glutaredoxin; Domain location=280-344; Score=96.0; E_value=1.1e-25; Accession=PF00462.14; Description =Glutaredoxin
  Pfam annotation: Domain name=Glutaredoxin; Domain location=42-101; Score=27.7; E_value=4.2e-05; Accession=PF00462.14; Description =Glutaredoxin
  Pfam module annotation: Pfam domain module=Glutaredoxin::Glutaredoxin: :Glutaredoxin; Domain location=173-237::280-344::42-101
MARFRDSNGGGLARDDGGATAGESNQREKGREGTNLAPEASREMARTQKNKATAHHLGLLKQEGVKFGSFDILTDNDVREGMKKFSNWPTVPQLYCKGELLGGCDIVIAMHDSGELKDVFEEHNIPLKPQGSKNEEAGQPESATEKGGAVAEPIGLTDAQKARLESLINSSPVMVFIKGTPEEPRCGFSGKLVHILKQENIPFSSFDILSDDEVRQGLKVLSNWPSYPQLYIKGELVGGSDIVMEMHKSGELKKVLSEKGVIPKESLEDRLKSLVSSAPVMLLMKGTPDAPRCGFSSKVVNALKKEGVSFGSFDILSDEEVRQGLKTYSNWPTFPQLYYKSELIGGCDIVLEMEKSGDLKSTLSE

SEQ ID NO: 73951 - protein, 136 aa, Zea mays
  Coding DNA Sequence Number=SeqID_32172
MATKSRTEVPQAIVVVDLLAAGGLTLSSYSDSPTSSKGIDSKSPPIGTTTGIGGKAPTFGTTGGIGGKAPLLASGGTVVDIGGSAAVFDTTWICGTASTARTVGGEHQWKGGHRHDRRLRHDRNAWDDNRSDGDRA

SEQ ID NO: 73952 - protein, 271 aa, Zea mays
  Coding DNA Sequence Number=SeqID_32173
  Gene Ontology: Mol. function=RNA-directed DNA polymerase activity; Cellular component=chromatin; Biological process=RNA-dependent DNA replication
  Homolog annotation: Hit_ID=UPI00004C1731; Match level="QueryCoverage =95%, HitCoverage=27%, E-value=2e-76, Identity=62%"; Hit description =UPI00004C1731 related cluster
  Pfam annotation: Domain name=rve; Domain location=81-245; Score=69.6; E_value=1e-17; Accession=PF00665.16; Description=Integrase core domain
MAEYEALVNGLRIAIELGVQRLDARGDSQLVIDQVMKNSHCRDRKMEVQRLEDKFYGLELNHIARRYNETADELAKIASGRTTVPPDVFSRDIHQPSVKTDDTPEPEEASAQPEKARGGFSRLLVAIDKFSKWIEVRPLTSIRSEQAVAFFTNIIHRFGVPNSIITDNGTQFTGKKFLDFCEDHHIRVDWAAIAHPMTNGQVESANGMILQGLKLRIYNDLNNSLCDATTPEGFGPEASRWETWYFGCGRTPEGATSLLLPRKGRSSSPRF

SEQ ID NO: 73953 - protein, 102 aa, Zea mays
  Coding DNA Sequence Number=SeqID_32174
  Pfam annotation: Domain name=LRR_1; Domain location=1-23; Score=15.5; E_value=0.19; Accession=PF00560.23; Description=Leucine Rich Repeat
  Pfam annotation: Domain name=LRR_1; Domain location=25-48; Score=3.9; E_value=52; Accession=PF00560.23; Description=Leucine Rich Repeat
  Pfam module annotation: Pfam domain module=LRR_1::LRR_1; Domain location=1-23::25-48
MLEILDLSNNNLSGEVPQEIAEMPSLRQLSLSNNCFQWPLIQHSYGNFDQENGFNIYDNLGRGNMNQRAENGLESGSSSHENKKDTSNLSGNPTDYTKLKSL

SEQ ID NO: 73954 - protein, 144 aa, Zea mays
  Coding DNA Sequence Number=SeqID_32175
  Gene Ontology: Mol. function=oxidoreductase activity; Cellular component=chloroplast; Biological process=ubiquitin cycle
  Homolog annotation: Hit_ID=Q9FR35; Match level="QueryCoverage=76%, HitCoverage=68%, E-value=3e-50, Identity=88%"; Hit description =Peroxiredoxin
  Pfam annotation: Domain name=AhpC-TSA; Domain location=9-124; Score= -9.2; E_value=0.0043; Accession=PF00578.11; Description=AhpCTSA family
  Pfam annotation: Domain name=Redoxin; Domain location=11-144; Score =97.1; E_value=5.2e-26; Accession=PF08534.1; Description=Redoxin
  Pfam module annotation: Pfam domain module=AhpC-TSA::Redoxin; Domain location=9-124::11-144
MGRESVAHVERSASSVETTAPSQLMDCDCDCVGSNQHVPGFITQAEQLKAKGVDEILLISVNDPFVMKAWAKTYPENKHVKFLADGSGAYTKALDLELDLTDKGLGVRSKRFALLADDLTVTVANIEEGGQFTISGAEEILKAL

SEQ ID NO: 73955 - protein, 185 aa, Zea mays
  Coding DNA Sequence Number=SeqID_32176
MVKNFSSRTVQIAMNAVVTSHLLVCLYSTAAFENKSPTWLENIFKTNHKDWIRLTTIVTASPEFSLGRNREFRLARPRPRPREESSPRPSTVSASGWISASLDPGHGLSLGLGRRSTPCSTQASASASGGDLRLARPRSRPQPRPREEIFASPDPGLGFGDITASPETASDRLRERGIRHCPPPS

SEQ ID NO: 73956 - protein, 64 aa, Zea mays
  Coding DNA Sequence Number=SeqID_32177
MTKRSHGMGGGAGVEQKSTKAKGHNRLGENVKSGNEAPRVWPDETTKRGGPWVSQPWGQIWQLA

SEQ ID NO: 73957 - protein, 111 aa, Zea mays
  Coding DNA Sequence Number=SeqID_32178
MQESLAGPPSQQNPPEGLPTLTTPLLPLPLSDTKANTWGKVLPKFMVVEMLDPERRRAGVPSASKSTTALDDYRRGPPIPQYGQNAGAIRDSTAAEIIQCNDGSLVVPPVG

SEQ ID NO: 73958 - protein, 43 aa, Zea mays
  Coding DNA Sequence Number=SeqID_32179
MREEMDLGDIVLSWSVQEITNDDLYKTKLLRHLCEEVDSWSHG

SEQ ID NO: 73959 - protein, 105 aa, Zea mays
  Coding DNA Sequence Number=SeqID_32180
  Subcellular localization annotation: CTP_CleavageSite=24; ConfidenceScore=5.41e-01
MSTEEVRRRFVSPLCSAAVASSPRASRATRRAAQSAKVDLATSSARFTLDTPSTELTTIELKEDARAVPTVVLSEDVLAKVVLARAASPALPGTAMAAALSTVLA

SEQ ID NO: 73960 - protein, 689 aa, Zea mays
  Coding DNA Sequence Number=SeqID_32181
  Gene Ontology: Mol. function=endonuclease activity; Cellular component=nucleus; Biological process=proteolysis
  Homolog annotation: Hit_ID=Q9FJ83; Match level="QueryCoverage=91%, HitCoverage=94%, E-value=1e-104, Identity=38%"; Hit description =Similarity to nonsense-mediated mRNA decay trans-acting factor
MVTEVCKNDGYQKGFKEKVSNSIGLEGDQSKLVHAASVDNIMANMRICKALCFDSSMNNNFTIIIVTVSPQKYELPPVNLNQSQLDAIESIISAVRCRHLNLTKLIWGPPGTGKTKTVSALLWALACLKCRTLTCTPTNVAVVGVCTRFLQNLKEFSKQIDICGLPLSLGDVLLLGNRDNMDISEEIQEVFLDYRVDELTECFSLLSGWRHIIVSMISFFEECGSRYDMLLECDGGSDSVCFLDFLKKQFDVAAKAVKKCMMTLWVHLPKKCFSHENVSNISMVLRLLEKINAFLCDGDLTDESAKRGFDFRSTENSIYEPISYIEKELGDARSLCLKLLKDLQSSLNLPVASSSYRLHNAEIAPLDMLIVDEAAQVKECELVIPLRLCWLKHVVLVGDDCQLRPLVCKEAGFGISLFERLVILNFEKHLLNIQYRMSPCISLFPNAKFYDKKILDGPNVHSSYNKDCTGLLFGSYAFINITDGREQKEGAGNSWQNLVEVAVVMHLIRTIFKSWRKRDQGISIGVVSPYSSQVAAIKDRLGKKYDTSDNFHVRVKSIDGFQGEEDDIIILSTVRSNERGNVGFLADIQRTNVALTRARCGFIFCFTVVEGIVSGFLGMLIHCIKVGQSGQTLFLMRRDVNVFPMPLLTLNCLSSFQQYQMEGCSIFSAYIVLVIEHIDIDLYWSDILC

SEQ ID NO: 73961 - protein, 493 aa, Zea mays
  Coding DNA Sequence Number=SeqID_32182
  Subcellular localization annotation: CTP_CleavageSite=60; ConfidenceScore=5.22e-01
MKEMVNPISLSNPPSPDHGADVCFVSSSASVTTRAFGATKVLYDNERQWDSLSSLISGLSAAAVMGQIGIDWQEMFRNSPSPDRGANVCFASPSSASVATRARTLGAAKAISDDERRWGSLSSLILGLSAAVMGQIEINWQEMFRNSPSPDRGADVCFASSSASVVARAWALSTMKALSENKRRWGSLSSLISRMSVVAAMGQIGIDWKEMFQNSPSPNRRADVCFASPSLASVAMRAQALGATKALSDNDRRWGSLSSLISGLSAMAAMGQIGIDWKEMFRNSPSPDCGADVCFASPSLASVATPARALGAAKALSDDERRRGSLSLILGLSAMATMGQIEIDWKEMFRSSPSPDHEADLCFASPSSVSAATRARTLGVAMTLSGDERRWCPLFSPIRGLSKVAAMGRIEIDWVEMFHSSPSPDHEAGVGFASPSSASAAMHARVLGVAKVLSGDKRRLSPLSSPISWLSGIGGDGVDQDQFGGDVSQLTLP

SEQ ID NO: 73962 - protein, 165 aa, Zea mays
  Coding DNA Sequence Number=SeqID_32183
MTRRIHYNGNYVSMNPIHISVASSTAMLTQNTLTEQACKYRGHPIELVTPNNAKWTCPINEQLAASDVTDTARLAGFEEILPLLDVTRDCSSKVTMDEKASRILERLEPPRAKKQRASFSKASTNAALAPASKQIKKPLLPREPSATQPLRSSFNRLKKKAPHLT

SEQ ID NO: 73963 - protein, 1066 aa, Zea mays
  Coding DNA Sequence Number=SeqID_32184
MDWSIDLDRGLRSRQPATRVRAVDAAGPRLRQLCTCATAPAPVASAYGVLPGEARVFAETMLLRLATEFRSADVAMRVRIIKTLLNSATGPGALAGARITEPDQLLRRVKVVYDTGNKRDRALALRMFGCFADIAKDSVHVRSLILSSLSASSALEVKAAIFAASCICHLSDDFSRIILEVFRRLICSQTSEPQVIMSAAKAFWKLGSTLAVIHKVHEVGKQMVLGTLEDVFKSEMLFSLSRLSSKSIILFSDQVDLLLLFMDHNSSSMKSVALKCMCFMFRRNICHFPVIRNVFGRLFPLIDDEDFPLDCKSDVLRILQKVQGTALEILVEIFCILKEVGSDNISVLKGSSFAHAEWQGITNNVPLTEDNSMNGPLCKIIAMIVNHIISLANEVASRDICISSAVDKAYKTPFRLMLKLVSCYPSAAAVTLHILKSLVKELFLINGSDYSEVSVTSVEPFQTSVALKELSTSDDNVQLLATCIKASCIGTLIGNGKLDFLKIDCKNRKSIMHDLICCMLKFANACHEVLCETSGARYNLHDSIKGLIKYVRQDAPQHWSTYESFHLIMCACVTRNTCKINRGNQESGDSKEHHNTLFTPSVWITQELCALRMTKMLIKKQKYWEAYRSSMYCCCKGLWFTASFVFRKLADAFEAGSFSFWLKSLLLFSAGEIEMKLLFFSSATIKLVGELKMEGDLSEDLYCNETDADSTLSRSSELHGFQAKISDICGRTLLANNALASSASSDHDFVFQRWFISLRSSFLEVLTKVLDILNAHSSYEARGDHLSLSGEFVKDQVLALDHCSLRLSDLAKSYDLLAASHMDLERHGSSSIARLAFMCSLLAFCTAYSVYFSKACNYVEYCKLPKRFSHASILQDLYGRVDGSDWQVVSQLRQFMSTSFDELDSLQSSTWISGSCNLEKDLYSLCHFAVASLLGVCDSAEAEKIQNGEDCLSALQGGLQVLSSILQKYLELPFVVPKYFFRVKPCLGAELYIFDSNHLNEKGMSIEPGFLLSLTLCMKWKCVLERSTIRIVKLYCILAASLETCLDTAGTRSKQFDQHRTAEMSY

SEQ ID NO: 73964 - protein, 101 aa, Zea mays
  Coding DNA Sequence Number=SeqID_32185
  Gene Ontology: Mol. function=zinc ion binding; Cellular component =integral to membrane
  Homolog annotation: Hit_ID=Q9M2V1; Match level="QueryCoverage=60%, HitCoverage=15%, E-value=2e-14, Identity=62%"; Hit description=RING finger-like protein
MALWNRASYAVFAVYSPELDNLQICLSGISSCNSIVVIDLATSLAKVADVDRNLGNESTAVEGFEEAIRCLEKLKLDSEQTTLEQRRLSVLDFLHNQLADK

SEQ ID NO: 73965 - protein, 125 aa, Zea mays
  Coding DNA Sequence Number=SeqID_32186
MGQIDSEEMFRNSPSPDREADVSFASPLLALGVAKALSGDERRRDRDQLAGDVSQLTLPRLWGRRLLRLPLFGIGSNTGVSVGCREGDIGRRAAVGLSLLPDLRTLGGGGDGSDRDRLAGDVSQL

SEQ ID NO: 73966 - protein, 136 aa, Zea mays
  Coding DNA Sequence Number=SeqID_32187
  Homolog annotation: Hit_ID=UPI00005A96A4; Match level="QueryCoverage =65%, HitCoverage=13%, E-value=2e-28, Identity=73%"; Hit description =PREDICTED: similar to solute carrier family 15, member 4
MAPASETELQAPPPPPASAKEIKSPEVLPEPGSLSALQRKKLGAHFMESDERRVSRARTPLGAAYEPPSAAAGGGGTTPVMHRPVRKLRKRRQQLPSESPKCPPCWVAFLADPYLGRFGTIALFTPRTWRGLFRLP

SEQ ID NO: 73967 - protein, 228 aa, Zea mays
  Coding DNA Sequence Number=SeqID_32188
  Homolog annotation: Hit_ID=Q8LIL5; Match level="QueryCoverage=20%, HitCoverage=10%, E-value=5e-12, Identity=82%"; Hit description =Putative Phosphatidylinositol N-acetylglucosaminyltransferase
MAGGNTLAGAKERWLAGEGAAQLFQILFQGSKTTTPIKKALLKPAQGLEDSIEAELFGTKYYNPFNFEILLSGCDLADPQSLLRQSISLLQFLERIGAGAGARLVRRRSWALLSLVLGPVIADWLELPGPTVFSARAPSRRQAGPVQSRRSSHPSLPRASSVTVELPRGRAELELSGYLSSLFSEFKRLGEGVNIAVSTALGTMKTFSRDIPDLKTVFYLLLSETHIA

SEQ ID NO: 73968 - protein, 82 aa, Zea mays
  Coding DNA Sequence Number=SeqID_32189
MGEGLGFLQSVVSSSAGYLRYYSNEEGYELGFCRSFVLYPSSDCFFCSTTNMLHMAGRGLEVKPGPTVKCVLGHDFILHFPV

SEQ ID NO: 73969 - protein, 212 aa, Zea mays
  Coding DNA Sequence Number=SeqID_32190
  Pfam annotation: Domain name=DUF616; Domain location=75-211; Score= -153.6; E_value=0.0019; Accession=PF04765.4; Description=Protein of unknown function (DUF616)
MEEPNQLLAIIRKEDEDASPGVETMLVFSDHVRSFVNPVWTSSGRPVDRKRTGPRLEQALALRPAKPSLSPVLQSLNYVLEDILIPKESKSGSLFGGFASLEERDKSYDIKDSMTVHYGFVRGKVPGLNTGFDIDEADHSEMQLCQSTVVASAIFGNYNFGFQSSLQIAFTLAYKYYVHLLTNFSAPLPKGAKILSGIVDRELKFFVVNKHF

SEQ ID NO: 73970 - protein, 253 aa, Zea mays
  Coding DNA Sequence Number=SeqID_32191
  Gene Ontology: Mol. function=sequence-specific DNA binding; Cellular component=nucleus; Biological process=regulation of transcription, DNA-dependent
  Homolog annotation: Hit_ID=P46605; Match level="QueryCoverage=68%, HitCoverage=24%, E-value=4e-86, Identity=91%"; Hit description =Homeobox protein HOX1A
  Pfam annotation: Domain name=Homeobox; Domain location=161-215; Score= 15.8; E_value=0.00011; Accession=PF00046.19; Description=Homeobox domain
MGGLGRALAFLLSKRVALAYWRAVVVYRLAVTVPTPAFALEAAAPGGGVGGPLAIAAGAMCDAHVGSGDGKKLKAKLRQEAYGEASSDSSDDEEWSGKNTPIIKSNEEGEANSPAGKGSRVVHHNDELTTQSTKKSLHSIHGSVDEKPGDLTSNGSNSTARKGHFGPVINQKLHEHFKTQPYPSRSVKESLAEELGLTFRQVNKWFETRRHSARVASSRKGISLDKHSPQNTNSQVTASMEPKEPEGTVVGRI

SEQ ID NO: 73971 - protein, 264 aa, Zea mays
  Coding DNA Sequence Number=SeqID_32192
  Subcellular localization annotation: CTP_CleavageSite=30; ConfidenceScore=5.65e-01
PTLPRPPRPTHERRAAGPGSFSAALRRQLAAVTVKRRARSFGFASCVSRFPGRFLGGLFCAGSSGSWCGTKGVLVDLALHTEEVDDHRKEILGICSSRCGPPTWAAVVAAVALARRHRSWRRARVLAGAVFFLLPTCFPTVPPSPKAPPCRQAAAARPALLPQPALASRPATPPSHHGSHRQATAPRRAFPPRSRAPPRRYGAVPRRAVALHRAQPTLHRRRRAKVRPARRAQPAEPRTAAELCSPRSTTSPTVEPPPRGALRL

SEQ ID NO: 73972 - protein, 109 aa, Zea mays
  Coding DNA Sequence Number=SeqID_32193
MELLADHRPQSCLGPPVLAKFSLSHAVGRLPAPHANVLCIAAGVRLAACASCIELVRPWRSLPSRSLAPRTVIAMFTSNRSFVVSQTVSWDSTVFGRRLARQGVFHIEA

SEQ ID NO: 73973 - protein, 280 aa, Zea mays
  Coding DNA Sequence Number=SeqID_32194
MVDRRVRATCFNLQGIGEKVPFGIIVRCPTCMIAVAVVQPQDGTQVVSCSKCRYQYELFSGDITSIESEEVSDYAAFIDFATLFISDNRLFECCPLSQCMDISALEKALRFINMRKDGIPAAVHSIVIRSPSGTARTYRFATQNVTLPAQEGERVTISLAAPVNVYRDMGPLKVAARSQGFKPGEPMCLTNHINGQVSKLLRAPSKNKGTFFLSPYLLVGALAFLASTDAASAFIDPSLPRLVTATAIASAAIGTTLNGVVLPKIQKASPILTRKCFSIM

SEQ ID NO: 73974 - protein, 111 aa, Zea mays
  Coding DNA Sequence Number=SeqID_32195
MGDNSAHWGWHGLGRRVGKGSLPRDGTRGSLARREGLRLAGRREIAVAANSGLRRGGVRRGLGRGVDERENHHGFLMRKALAKLTVAEAMAETRRGRRNGGATLGVALPVE

SEQ ID NO: 73975 - protein, 191 aa, Zea mays
  Coding DNA Sequence Number=SeqID_32196
  Subcellular localization annotation: CTP_CleavageSite=78; ConfidenceScore=5.78e-01
MALALLSPSTPSHRILLRPIPFPSLPVARATSAGSFGLAFFCPLSRGSSSLQRTGAAGGVIDSAGEGSSEEPVAGWLSADLLRRISGAADADRVLDIVAESVEGAGAALGAPECNAIVSAAFDRGNIALALSVFEAMRSGFAGGASSMDEVIFQVRTCVYLLVRFIQNTVSAILTLDVVASTILHSSSWFK

SEQ ID NO: 73976 - protein, 145 aa, Zea mays
  Coding DNA Sequence Number=SeqID_32197
  Subcellular localization annotation: CTP_CleavageSite=29; ConfidenceScore=5.24e-01
MSSMPQRGGRGRSHWPTCLYVLVRPGRVMASSRTPVPDCVTRVSEEPATSGDSSSAADGDNHFYCADVESQRPEIYNNDDRGRHAIGGCGVAGHSKRSSRGLSSHRSARSLRGLILTTCSEVATTGGERRVACGDGFCVWREFVS

SEQ ID NO: 73977 - protein, 155 aa, Zea mays
  Coding DNA Sequence Number=SeqID_32198
MGKNNKRKREPTPPSEEFGDSEYSEEEFSSEFEGSPAPIPLRESSDDSDDSQGLAAEVWTYIRAVECSGLEGSDESEFSSDEEDSDGGEDEDDDDDDGDDDDGGDGDGDGSNGGGGSGGKGDTRGGSSTGNTRGGSGASSSRGGGGKGSGSKASG

SEQ ID NO: 73978 - protein, 142 aa, Zea mays
  Coding DNA Sequence Number=SeqID_32199
  Gene Ontology: Mol. function=nucleoside-triphosphatase activity; Cellular component=membrane
  Homolog annotation: Hit_ID=Q6YVI6; Match level="QueryCoverage=79%, HitCoverage=15%, E-value=3e-14, Identity=42%"; Hit description =Putative DNA helicase
MTGAYTIVGVLKRDARSAEHRTTARRSTAPVLHTTLGVSLEKTRLMQARIDGFVQQMTGLLRLERDAELELAQDHEVSAAGTVMDGMPKKPVVAHGQAQEDGDTICNLRVISSSTGLTGQHLVSTPHSLPSKFSHFSTTYKS

SEQ ID NO: 73979 - protein, 133 aa, Zea mays
  Coding DNA Sequence Number=SeqID_32200
MNNSLSLGKGGFGEVHKGTLPDKTEVAVKASNEVTQGEGAVPVAAARWGGVRVVPLAARRGVTSPYTVRSRQSLVGQRTGGARPRATLDADYPRTCVGRRALPVLRSPKLVGCKRGVTGYLGALNRSDRRGSS

SEQ ID NO: 73980 - protein, 89 aa, Zea mays
  Coding DNA Sequence Number=SeqID_32201
MKRYPWTKFGTWLEVEGLALPVPAKLLLDAQLGNVSCGAAMLMDSLHEVQRNVVEASVHDNAIHATPGTNTNTNNGGEHTMREHILVEH

SEQ ID NO: 73981 - protein, 102 aa, Zea mays
  Coding DNA Sequence Number=SeqID_32202
MGLSTAVRAYWRAIERAGLGGSDESGVSSDEADSSEEWSGGDGDDKDDGSSGDDDGGDSSKGDDSKGDDGDGSSDGGKGDGGDNDGRGGGGNGKASGAMPLV

SEQ ID NO: 73982 - protein, 158 aa, Zea mays
  Coding DNA Sequence Number=SeqID_32203
MACLRAFSALLKSHAWPFGLWPWACSGGHSELNGSSGIYAKSCGSEKMMKDSHMRATISVSPYASTESVGEQASEIAVHRATLAQMCGRSGFCTATNVGTWRAVRAQQVALSRCKCKYAMRGGKVEEGMHGMGCRSLLARARHTRPMIEMKTIRYLKY

SEQ ID NO: 73983 - protein, 81 aa, Zea mays
  Coding DNA Sequence Number=SeqID_32204
MEAPGPHDSNRRPVCTGEQCPPHSGPYPGFLNGETSTVTRGTLGYDPTVPARDRERGYPERDPSPRRKRAPSPPTDQRFEG

SEQ ID NO: 73984 - protein, 200 aa, Zea mays
  Coding DNA Sequence Number=SeqID_32205
  Homolog annotation: Hit_ID=UPI0000DA43ED; Match level="QueryCoverage =71%, HitCoverage=95%, E-value=1e-09, Identity=32%"; Hit description =PREDICTED: similar to keratinocytes proline-rich protein
MGRRETEREEGKKPEGDRHTKGKPAAFEFVPRPGRGNHGASCDVVGPSPEFGEVEAPPRSRSSLSSKAEAESEPLGRARRRPSAEARAESEPWGRAKRSLSSSGAEPESEPWGREKRSSSSSGAKPESEPWGRAMRSSSSSEAEPESEPWGRAKRSSSSSGAEPESEPWGRAMRSFLWRLWPDLAAVSLTLSSGTAVGAA

SEQ ID NO: 73985 - protein, 328 aa, Zea mays
  Coding DNA Sequence Number=SeqID_32206
  Gene Ontology: Mol. function=RNA-directed DNA polymerase activity; Cellular component=intracellular; Biological process=RNA-dependent DNA replication
  Homolog annotation: Hit_ID=UPI00004C1733; Match level="QueryCoverage =100%, HitCoverage=24%, E-value=1e-174, Identity=92%"; Hit description=UPI00004C1733 related cluster
  Pfam annotation: Domain name=RVT_1; Domain location=57-225; Score =124.5; E_value=3e-34; Accession=PF00078.17; Description=Reverse transcriptase (RNA-dependent
MPGIPRDVAEHSLDIRAGARPVKQPLRRFDEEKCRAIGEEIHKLMAAGFIKEVFHPEWLANPVLVIKKGGKWRMCVDYTGLNKACLKVPYPLPRIDQIMDSTAGCETLSFLDAYSGYHQIRMKESDQLATSFITPFGMYCYVTMSFGLRNTGATYQRCMNHVFGEHIGRTVEAYVDDIVVKTRKASDLLSDLEAKFRCLKAKDVKLNAEKCVFGVPRGMLLGFIVSERGIEANPEKIVAITSMGPIKDLKGLQRVTRCLAALSRFISRLGERGVPLYRLLRKAECFTWTSEAEEALGNLKALLTNAPILVPPAAGEALLIYVVATTQV

SEQ ID NO: 73986 - protein, 128 aa, Zea mays
  Coding DNA Sequence Number=SeqID_32207
MSWASFPHVHSGGHTTITVDEVSQDDASLDVAYLMALELTSSSATRLVLRRLFTICDTLPLLDYDYDDDQCIYDFKMLLLRCDGGGGEEDRWLGEAVAGGDGGGALEGATTCRIMRSRWHMMGSRVEV

SEQ ID NO: 73987 - protein, 94 aa, Zea mays
  Coding DNA Sequence Number=SeqID_32208
MSRLVLDEYSEEAPAPTLFAENGVTEAETRGEREKKQDGERGGGRGFEPHVPSGPVPSRRLPSICGGVVWDVEVGCAEGTGAKEFVHDNGTLHL

SEQ ID NO: 73988 - protein, 228 aa, Zea mays
  Coding DNA Sequence Number=SeqID_32209
MARVARTLLAKDRLKGVVFSRVAQICPCSRGSVGMVDICKSYEKHMSLRVTLIVIGVKRRNSTAKMLVCDLCLLNLVILVPSEVFETRSGACGPNNLGASATASDDANGKGKVTGEKETINNEPKGDKPVDSGSNIKNKDGKKKKKCIKKIIYYDSDVSSSSSPKDDDSSSSNKNMLKCPSLALEATTHLNRNKLSIPRIRVKDAGKALLSRFGQIQAPNFKQLQLDF

SEQ ID NO: 73989 - protein, 210 aa, Zea mays
  Coding DNA Sequence Number=SeqID_32210
  Homolog annotation: Hit_ID=Q53MB3; Match level="QueryCoverage=75%, HitCoverage=28%, E-value=5e-20, Identity=41%"; Hit description=GRAS family transcription factor, putative
MATSPEQFFVKDVSSTQQGGGTLCSNPLLPFPLVGISEDVLQGGGSDAGAFLELEDDVLPGDDSGFMVGRESSVLSKKRYASRDDGSLEEEVVTRRSKADKDTCAHDMLEDMMLSGHETYIRDMEKLRIAMANEKSRSNGKGGGGSKKASFCNVVDIRSLLILCAHAVAANDGARARELLKQINQHASETGDATQRLAQCFARGLEARLL

SEQ ID NO: 73990 - protein, 36 aa, Zea mays
  Coding DNA Sequence Number=SeqID_32211
MAYQILPVWGSYLYASRFATRRASSVIDYSYSSEGK

SEQ ID NO: 73991 - protein, 1075 aa, Zea mays
  Coding DNA Sequence Number=SeqID_32212
  Gene Ontology: Mol. function=protein serine/threonine kinase activity; Cellular component=integral to membrane; Biological process=protein amino acid phosphorylation
  Homolog annotation: Hit_ID=Q1SKW0; Match level="QueryCoverage=90%, HitCoverage=91%, E-value=0.0, Identity=46%"; Hit description=Protein kinase
  Pfam annotation: Domain name=LRRNT_2; Domain location=36-77; Score =33.1; E_value=9.5e-07; Accession=PF08263.3; Description=Leucine rich repeat N-terminal domain
  Pfam annotation: Domain name=LRR_1; Domain location=106-126; Score =4.7; E_value=38; Accession=PF00560.23; Description=Leucine Rich Repeat
  Pfam annotation: Domain name=LRR_1; Domain location=128-151; Score =9.2; E_value=5.4; Accession=PF00560.23; Description=Leucine Rich Repeat
  Pfam annotation: Domain name=LRR_1; Domain location=153-175; Score =8.8; E_value=6.5; Accession=PF00560.23; Description=Leucine Rich Repeat
  Pfam annotation: Domain name=LRR_1; Domain location=177-199; Score =14.8; E_value=0.32; Accession=PF00560.23; Description=Leucine Rich Repeat
  Pfam annotation: Domain name=LRR_1; Domain location=201-223; Score =17.0; E_value=0.07; Accession=PF00560.23; Description=Leucine Rich Repeat
  Pfam annotation: Domain name=LRR_1; Domain location=225-248; Score =4.0; E_value=52; Accession=PF00560.23; Description=Leucine Rich Repeat
  Pfam annotation: Domain name=LRR_1; Domain location=250-272; Score =11.3; E_value=2.2; Accession=PF00560.23; Description=Leucine Rich Repeat
  Pfam annotation: Domain name=LRR_1; Domain location=274-296; Score =10.2; E_value=3.5; Accession=PF00560.23; Description=Leucine Rich Repeat
  Pfam annotation: Domain name=LRR_1; Domain location=298-320; Score =16.8; E_value=0.077; Accession=PF00560.23; Description=Leucine Rich Repeat
  Pfam annotation: Domain name=LRR_1; Domain location=322-344; Score =6.2; E_value=20; Accession=PF00560.23; Description=Leucine Rich Repeat
  Pfam annotation: Domain name=LRR_1; Domain location=346-368; Score =4.1; E_value=48; Accession=PF00560.23; Description=Leucine Rich Repeat
  Pfam annotation: Domain name=LRR_1; Domain location=370-392; Score =11.2; E_value=2.3; Accession=PF00560.23; Description=Leucine Rich Repeat
  Pfam annotation: Domain name=LRR_1; Domain location=394-416; Score =6.4; E_value=18; Accession=PF00560.23; Description=Leucine Rich Repeat
  Pfam annotation: Domain name=LRR_1; Domain location=418-440; Score =10.4; E_value=3.3; Accession=PF00560.23; Description=Leucine Rich Repeat
  Pfam annotation: Domain name=LRR_1; Domain location=442-465; Score =7.2; E_value=13; Accession=PF00560.23; Description=Leucine Rich Repeat
  Pfam annotation: Domain name=LRR_1; Domain location=469-491; Score =13.3; E_value=0.88; Accession=PF00560.23; Description=Leucine Rich Repeat
  Pfam annotation: Domain name=LRR_1; Domain location=493-515; Score =6.4; E_value=18; Accession=PF00560.23; Description=Leucine Rich Repeat
  Pfam annotation: Domain name=LRR_1; Domain location=517-539; Score =14.3; E_value=0.44; Accession=PF00560.23; Description=Leucine Rich Repeat
  Pfam annotation: Domain name=LRR_1; Domain location=541-563; Score =15.3; E_value=0.23; Accession=PF00560.23; Description=Leucine Rich Repeat
  Pfam annotation: Domain name=LRR_1; Domain location=565-587; Score =8.0; E_value=9; Accession=PF00560.23; Description=Leucine Rich Repeat
  Pfam annotation: Domain name=LRR_1; Domain location=589-610; Score =4.4; E_value=43; Accession=PF00560.23; Description=Leucine Rich Repeat
  Pfam annotation: Domain name=Pkinase; Domain location=706-1021; Score= 95.8; E_value=1.3e-25; Accession=PF00069.15; Description=Protein kinase domain
  Pfam annotation: Domain name=Pkinase_Tyr; Domain location=706-1021; Score=47.0; E_value=2.3e-15; Accession=PF07714.7; Description =Protein tyrosine kinase
  Pfam module annotation: Pfam domain module=LRRNT_2::LRR_1::LRR_1::LRR_ 1::LRR_1::LRR_1::LRR_1::LRR_1::LRR_1::LRR_1::LRR_1::LRR_1::LRR_1: LRR_ 1::LRR_1::LRR_1::LRR_1::LRR_1::LRR_1::LRR_1::LRR_1::LRR
  Pfam module annotation: Pfam domain module=Pkinase_Tyr; Domain location=36-77::106-126::128-151::153-175::177-199::201-223::225 -248::250-272::274-296::298-320::322-344::346-368::370-392::394 -416::418-440::442-465::...
  Pfam module annotation: Domain location=469-491::493-515::517 -539::541-563::565-587::589-610::706-1021::706-1021
MRPSPPLLLFVLLHFALLSTIAAADGNGNGNGNGDLRGDAMALLALKAALGCRPGALRSWSEGNAGSVCAWTGVRCAAGRVVAVDIANMNVSSGAPVSARVTGLSALETISLAGNGIVGAVAASSLPALRHVNVSGNQLGGGLDGWDFASLPGLEVLDAYDNNFSAPLPLGVAALPRLRYLDLGGNYFTGEIPAAYGAMPAVEYLSLNGNNLQGRIPPELGNLTTLRELYLGYYNVFDGGIPPALGRLRSLTVLDVSNRGLTGRVPAELASLASIETLLLHTNQLSAPIPPELGNLTSLTALDLSNNALTGEVPRSLASLTSLKLLNLFLNRLHGPVPDFIAALPRLETVQLFMNNLTGRVPAGLGANAALRLVDLSSNRLTGVIPEALCASGDLHTVILMNNFLFGPIPGSFGSCTSLTRVRLGQNYLNGSIPAGLLYLPRLSLLELHNNLLSGAVPSNPSPSASSSQLAQLNLSNNLLAGPLPSTLANLTALQTLLASNNRIGGAVPPEVGELRRLVKLDLSGNELSGPIPGAVGQCGELTYLDLSRNNLSGAIPEAIAGVRVLNYLNLSRNALEDAIPTAIGAMSSLTAADFSYNDLSGQLPDTGQLGYMNATAFAGNPRLCGSVVSRPCNYTGGGGVAGAATTRLGGLKLVLALGLLACSVVFAVAAVLRARSFRVDVGAGRWRLTAFHKVDFGVAEVIECMKDGNVVGRGGAGVVYAGRTRSGGAIAVKRLQAQGGAGAQQGDDRGFRAEVRTLGSIRHRNIVRLLAFCTNREANVLVYEYMGGGSLGVVLHGKGGAFLAWERRYRIALEAARGLCYLHHDCTPMIVHRDVKSNNILLGDNLEARVADFGLAKFLRCGATSESMSAVAGSYGYIAPVSCMVSCIVVRSRCEMSWPASGSKLELFSDPPKKKTKNIPEYAYTLRVDEKSDVYRYGVVLLELITGRRPVGDFGEGVDIVQWAKRATAGRREAVPGIVDRRLVGGAPADEVAHLFFVSMLCVQDNSVERPTMREVVQMLAELPRHESSPSTSSSSSSSSAVEPPPPQAGEESSPDDGKEPPANCYKLFPDLLA

SEQ ID NO: 73992 - protein, 101 aa, Zea mays
  Coding DNA Sequence Number=SeqID_32213
MARRRSQKNKKTTPKENKEAQLRYNSPDCPVCHRTVRCTSGATTICAQQSTLTDEQCNTVSRQKSEQQDDVAAHWTLSGGALDTVRWRTGLSGAPIVSSLL

SEQ ID NO: 73993 - protein, 48 aa, Zea mays
  Coding DNA Sequence Number=SeqID_32214
MTALVPTISGMGDTISEQVGRQGILMDPCPQAIILPLSKEIQPIPDLT

SEQ ID NO: 73994 - protein, 72 aa, Zea mays
  Coding DNA Sequence Number=SeqID_32215
MRSIEEDKKKKLPKKPKVSGETEISKLKSKPSVLKKRESVGSNRSEEEKSIPPKHTVETPSASSIGMTEILE

SEQ ID NO: 73995 - protein, 57 aa, Zea mays
  Coding DNA Sequence Number=SeqID_32216
MAPPHHDGCAAAPRVGLGSLTPDRWIPVDGPDHYVNGNMENHPGKQCYHKGLWDALG

SEQ ID NO: 73996 - protein, 499 aa, Zea mays
  Coding DNA Sequence Number=SeqID_32217
  Gene Ontology: Mol. function=helicase activity; Biological process =protein amino acid phosphorylation
  Homolog annotation: Hit_ID=Q6YTQ6; Match level="QueryCoverage=70%, HitCoverage=24%, E-value=1e-100, Identity=52%"; Hit description =Helicase-like protein
  Pfam annotation: Domain name=DUF889; Domain location=165-370; Score =202.7; E_value=8.3e-58; Accession=PF05970.5; Description=Eukaryotic protein of unknown function (DUF889)
MPNNIDNLLDESEFLISQLNIQQRNAFDTIVQTVFSNKSGFYFVSRYGGTGKTFLWNAIVSHLRAREKIVLTVASSGVASLLLPGGRTAHSRFKIPCELHETITCNIKRGTMLAELIKSTSLIIWDEALMTHRFAFEALDKTFSDLLAPHFEQAEKTPFGGKVVVLGGDARQILPVIEGGTRSQIIDATVSNSYLWGSVTVISLTQNMRLLSSSTSIETKKEIAEFSKWLLDIGEGNVPATKRNAETESSWIQLPKDILLLPQTGNIEYIVDSTYPDLQQRYTDIEYLKERAILSTTNETVDALNEFIVSSIPGNTHEYFSCDKIGKTPYSHESYDLLYPIEFLNSINGNNFPQHRLCLKKDLSPQDKDAALQVQVNRKWEFRGIKDDGPILHIDMVLTDAMVYIIRRFRVIYAKSSYKVVDAPFMICFTKFTIIELCREPPTTFPQYVYRLTPYNEIDPFGPKAWRLLKSTRYIMDPLNQPLRLEMYSSQISGAKVHT

SEQ ID NO: 73997 - protein, 170 aa, Zea mays
  Coding DNA Sequence Number=SeqID_32218
  Homolog annotation: Hit_ID=Q8DJH6; Match level="QueryCoverage=60%, HitCoverage=40%, E-value=7e-13, Identity=41%"; Hit description=Ycf23 protein
  Subcellular localization annotation: CTP_CleavageSite=40; ConfidenceScore=5.64e-01
MAAPGSLRLLQAPSFAAAKCQPVGGRASARRAPRPLFAVRASAADAANRDAVLKAFRENRALKIISGLQNFDRSSVASVVTAADKTSLRLYDVKKRGLCYTAFVCCFLLEGGATHVDIACDKDLVKLAMDLTNLPVEIGNYDSFYEMGIEFSSEQVLTNPSYSELLNLLF

SEQ ID NO: 73998 - protein, 168 aa, Zea mays
  Coding DNA Sequence Number=SeqID_32219
  Gene Ontology: Mol. function=phosphogluconate dehydrogenase (decarboxylating) activity; Biological process=valine metabolic process
  Homolog annotation: Hit_ID=Q1EPJ1; Match level="QueryCoverage=97%, HitCoverage=77%, E-value=5e-11, Identity=63%"; Hit description=6 -phosphogluconate dehydrogenase NAD-binding domain-containing protein
  Subcellular localization annotation: CTP_CleavageSite=48; ConfidenceScore=5.37e-01
MPFRRSTAVISPYKLKSPSPLATIAENICRYSAAPGSTLDSSPPSPTSSAMPRSLTMYGTLPPTSDTTNSPRPTAIWMAILLLCQLPHAGRPAEEGEERLEPSDYGLVAAWAKSVPSWAPTSPPDVGASMARPARAPYRHTVLQDHRTDVAGVTDHGEHHVGCCGHGA

SEQ ID NO: 73999 - protein, 187 aa, Zea mays
  Coding DNA Sequence Number=SeqID_32220
  Subcellular localization annotation: CTP_CleavageSite=59; ConfidenceScore=5.66e-01
MTPNSISTPTPNYLFADAPVSFQIPPRVSFRDTLSVSRHSSSRSSTVDPSPMEGRREPEADGGKAGGLPPSEPPHLQGQPPQEYGYGTFQGPRHPPVGFPQPAPPPGLGSGGYHNQQQPYAPAETYYAQGYQAVPGMLRSSRSLRLFAPALLLSLAVQWGKAAAGGAAALSSTYEAVKVESSDRFMI

SEQ ID NO: 74000 - protein, 290 aa, Zea mays
  Coding DNA Sequence Number=SeqID_32221
  Gene Ontology: Mol. function=transcription factor activity; Cellular component=nucleus; Biological process=regulation of transcription, DNA-dependent
  Homolog annotation: Hit_ID=Q949D2; Match level="QueryCoverage=44%, HitCoverage=37%, E-value=5e-14, Identity=35%"; Hit description =Putative ethylene responsive element binding factor
  Pfam annotation: Domain name=AP2; Domain location=127-192; Score =139.9; E_value=6.8e-39; Accession=PF00847.10; Description=AP2 domain
MAIGAPDDSRQRRPADHAANILENVWATIMTGSATPASSSTAASSSEVGEERPPDEAILERLPSLGRWISMGAEEWDELLLGGAARASDAAASGRELPAASPANQEADRLGHHRASSSKAASAAAACKSYRGVRRRPWGKFAAEIRDTRRRGARVWLGTFATADDAALAYDKAALRMRGPRACLNFPLDVVQRALADGGGRAETTPRVLRRKRRRANHDDAAGGDDTRSDGSVAAATARDPTTTMVSFACAKKDDQVMTPLMAQERSVSDPGAVIEFEDIGGEYWDYLFT

SEQ ID NO: 74001 - protein, 111 aa, Zea mays
  Coding DNA Sequence Number=SeqID_32222
MARQASKSTRRSEEGLFPAHVWTMQSRATERPMDSHRTRNPGRSISSMDTAMQRLLAVMTQMEERLTDVLTGRGREQATHGCTSSFNDDSGADCILINVGTDCTAEDDPPY

SEQ ID NO: 74002 - protein, 170 aa, Zea mays
  Coding DNA Sequence Number=SeqID_32223
  Homolog annotation: Hit_ID=Q67UT5; Match level="QueryCoverage=94%, HitCoverage=38%, E-value=9e-26, Identity=45%"; Hit description=F-box protein-like protein
HEHDFGVFLARFAHVQKFGLFSPAVDVKMPYTLPFTFYNLKKLQLCVDFNEIHSILSMFTMLRSCHNLQNLKIESRHDSYESFEADWEFLNALWTDGMCANLQIVRMIDIISLPNETSFMKLILSKATLLHTLYVGAHPYDFDDHIIDMLKCERASAQARVQFEGSEQQW

SEQ ID NO: 74003 - protein, 265 aa, Zea mays
  Coding DNA Sequence Number=SeqID_32224
  Gene Ontology: Cellular component=integral to membrane
  Homolog annotation: Hit_ID=Q1H8M6; Match level="QueryCoverage=76%, HitCoverage=73%, E-value=1e-31, Identity=33%"; Hit description =Cytochrome B561-related protein
  Pfam annotation: Domain name=Cytochrom_B561; Domain location=25-237; Score=-63.8; E_value=0.0056; Accession=PF03188.6; Description =Cytochrome b561
MSISKGQGPKTQEGKDDDDAKGCLPACAGCVALMLLITPTHGDSDSEQRSYKMARPLELTPKLSLQLKLHAILLWSSVAFLMPVGVLLIRVSANVKSASTVRLLFYCHVASQVVAVVLATAGAVLSISNFENAFDNTHQRVGLALYAFIWLQPLVGFLRPDRGARARGAWYLAHWLLGVGVCVVGVANVYVGLHTYQERTGRSARPWTLLLTVEVAALAFVYLVQDRWSYVLRQREEAAAAAALGDGRSQGSTMYPANDHKEVVV

SEQ ID NO: 74004 - protein, 294 aa, Zea mays
  Coding DNA Sequence Number=SeqID_32225
  Gene Ontology: Mol. function=structural constituent of ribosome; Cellular component=ribonucleoprotein complex; Biological process =translation
  Homolog annotation: Hit_ID=Q943F3; Match level="QueryCoverage=60%, HitCoverage=100%, E-value=3e-95, Identity=93%"; Hit description=60S ribosomal protein L18a
  Pfam annotation: Domain name=Ribosomal_L18ae; Domain location=121 -294; Score=420.8; E_value=1.9e-123; Accession=PF01775.7; Description= Ribosomal L18ae protein family
  Subcellular localization annotation: CTP_CleavageSite=27; ConfidenceScore=5.12e-01
MGSTLIHAPYLLIYSPGTTLTWSSSVRPTTSECCFVYLERRLVRNLTFAFDWLDGDAEPAVATDPIVFDAFGRTASTPAEATGGKRRWTYYKLLGVYLRKQQRRPAPPLRPRELAEMVAHRFHQYQVVGRALPTPTDEHPKIYRMKLWATNEVRAKSKFWYFLRKLKKVKKSNGQMLAINEIFERNPTTIKNYGIWLRYQSRTGYHNMYKEYRDTTLNGAVEQMYNEMASRHRVRSPCIQIIKTATVHFKLCKRDNTKQFHNSAIKFPLVYRKVRPPTRKLRTTFKSSRPNLFM

SEQ ID NO: 74005 - protein, 139 aa, Zea mays
  Coding DNA Sequence Number=SeqID_32226
MEGCKKERPGDTRSARAIMVVELKKMIEDVAKHYVLASARTSSGRADLQNNRRRVSDMAAQLLPLTALYLNYIDLPTTSLHRLLYCINQPNGYMKRHNQTEVIAAAAAGVAAEGLSPEEAKIQAKNAAHLSVALAENAQ

SEQ ID NO: 74006 - protein, 408 aa, Zea mays
  Coding DNA Sequence Number=SeqID_32227
  Gene Ontology: Mol. function=sequence-specific DNA binding; Cellular component=nucleus; Biological process=regulation of transcription
  Homolog annotation: Hit_ID=Q688X5; Match level="QueryCoverage=56%, HitCoverage=54%, E-value=4e-55, Identity=55%"; Hit description=WRKY transcription factor
  Pfam annotation: Domain name=FLYWCH; Domain location=175-243; Score =0.5; E_value=0.062; Accession=PF04500.7; Description=FLYWCH zinc finger domain
  Pfam annotation: Domain name=WRKY; Domain location=186-245; Score =146.4; E_value=7.7e-41; Accession=PF03106.6; Description=WRKY DNA -binding domain
  Pfam module annotation: Pfam domain module=FLYWCH::WRKY; Domain location=175-243::186-245
MSGARHDHHMLSGDFVSHDELAAMFEHQRADAAPPATQQPWFMDYLHAVASPLDCDAFVSGFDDVPPTVDEIVKRELLVDTAATGGAGATTTAPLTPNSMSMSSTSSEACGAGAGEELATAGKSKKEEGDGEGFESKDGDAAAAKGDAQGQEKSKKGAANKGKVKGEKRPRQPRFAFMTKSEVDHLEDGYRWRKYGQKAVKNSPFPRSYYRCTTQKCPVKKRVERSYQDAAVVITTYEGKHTHPIPATLRGSTHLLAASAHHPMSGLHHHHHLRVPAALGGANDAFDALGLLQQQAHHHGAVMQQLMAAVGGDGGAGLQQVNAAAMSGHVALAADDQHGWAAAIAGVGAAAGGSTTATATAAAATPAAAASAPLRMQHFMAQDYAGLLQDMFPPFVHSSDGGHHHHHH

SEQ ID NO: 74007 - protein, 468 aa, Zea mays
  Coding DNA Sequence Number=SeqID_32228
  Gene Ontology: Mol. function=zinc ion binding
  Homolog annotation: Hit_ID=Q67UT5; Match level="QueryCoverage=83%, HitCoverage=88%, E-value=3e-61, Identity=41%"; Hit description=F-box protein-like protein
  Pfam annotation: Domain name=F-box; Domain location=72-119; Score =39.6; E_value=1e-08; Accession=PF00646.23; Description=F-box domain
MTPFNRNVIHHNKYESLHEEGMFGSIPKVPKKSTYYMPHLSKFYNSFNQTTFSFFTSVSSQQHNLRAAAAVDRLSSLPAELQDEILVRLDLRDAVRTSALSRTWRDLWKSLSVLSLSFPVGTQPSVVDSILLPYIGPRVSLFDFCVNEASVGRIDDWLVALSRCRVESIHISNRLGSCDYFNLHSSIFSLGDLVSLRLEGCNIPPLPVGFAGFPALQELDLAFVNFPSNEDKQLEAIIRRSPLLHTLFMCNVCIPDGYPDSVIEAPNLRVLSFVSEYDYGCRFGELPCLEYADIDALFCPQHEHDYGFFLARFAHVQRLTIFCPAADVNMPYTLPFTFYNLKNLELCLNFGEMDSILFMFTLLRSCRNLQGIEIEDIDQSFEADWEFLNALWTHDMCSDLQTVHMMCISWLPNEISFMKLMLSKATVLRTLDVDRHPADFDDPIIDMLTCKRASAQARVLFGGLEQQW

SEQ ID NO: 74008 - protein, 99 aa, Zea mays
  Coding DNA Sequence Number=SeqID_32229
MASNKFWRSGEVWRKKRSVGKPANPVERGGVLQPSSPRDTRWPKEKIERRLRLSSDPRKQHRMMDSTRLVDVDEEEGDAGAYVGVEDAILLSMTEGCVP

SEQ ID NO: 74009 - protein, 109 aa, Zea mays
  Coding DNA Sequence Number=SeqID_32230
RKREEGQIWGSLLRIVGVDASVFFRMPVKKTGMGAAGEFTYASLEKTDVGLEGGIARSVGGRGGGHGGGMGGVRVRFAGEAGARGQGWGCGCGAGANGGSELWTPSLAS

SEQ ID NO: 74010 - protein, 115 aa, Zea mays
  Coding DNA Sequence Number=SeqID_32231
MGMGNWEMGPGRLDDPPDQDSRRLCINQSVSQSGSAGLALPVRERDASKTGDFSTELELTQSLLPFHAVRSCARYGARARAPRSPSRSPLRSPVGAGPGTRLPFLRTSTTAAAGM

SEQ ID NO: 74011 - protein, 120 aa, Zea mays
  Coding DNA Sequence Number=SeqID_32232
  Gene Ontology: Mol. function=protein-tyrosine kinase activity; Biological process=protein amino acid phosphorylation
  Homolog annotation: Hit_ID=Q7XI53; Match level="QueryCoverage=66%, HitCoverage=17%, E-value=2e-41, Identity=97%"; Hit description =Putative ankyrin-kinase
  Pfam annotation: Domain name=Ank; Domain location=74-106; Score=44.1; E_value=4.7e-10; Accession=PF00023.20; Description=Ankyrin repeat
MSAAAEDAAAAEGGSGGGSSGAGSSEGGARRRFDDKGLVARTSLILWHTHQNDVGAVRKLLEEDAALVNARDYDSRTPLHVAALHGWHDVAECLVANGADVNAQDRWQNTVVLVNGLQSF

SEQ ID NO: 74012 - protein, 273 aa, Zea mays
  Coding DNA Sequence Number=SeqID_32233
  Gene Ontology: Mol. function=3'-5'-exoribonuclease activity; Cellular component=exosome (RNase complex); Biological process=RNA processing
  Homolog annotation: Hit_ID=Q69UI6; Match level="QueryCoverage=98%, HitCoverage=98%, E-value=1e-123, Identity=83%"; Hit description =Putative ribonuclease PH
  Pfam annotation: Domain name=RNase_PH; Domain location=47-184; Score =30.3; E_value=6.9e-06; Accession=PF01138.11; Description=3' exoribonuclease family, domain 1
  Pfam annotation: Domain name=RNase_PH_C; Domain location=187-252; Score=12.9; E_value=0.1; Accession=PF03725.5; Description=3' exoribonuclease family, domain 2
  Pfam module annotation: Pfam domain module=RNase_PH::RNase_PH_C; Domain location=47-184::187-252
MSAQAGPGTYSPAAAAGDRRRERKEELRRHLAEDADWPRADGRSFHDCRPAFMQTGPTTAASRSAYAEFGKTKVIVSLYLQHSLIPPFSYFGPRESKKAMMYSDVGRLNCNVSYTTFATPVRGQGADNKEYSSMLHKALEGAVMLHTFPKTTVDVFALVLESGGSDLPIIISCASLALADAGIMMYDLVTSVSVSCFRKNIIIDPTSDEEAWQDGSLVVAFMPARKEITQLTLTGEWSDGRITNAVELCMDACSKLGDILRDRLKDTATLTCE

SEQ ID NO: 74013 - protein, 215 aa, Zea mays
  Coding DNA Sequence Number=SeqID_32234
  Pfam annotation: Domain name=efhand; Domain location=37-65; Score =30.5; E_value=5.9e-06; Accession=PF00036.22; Description=EF hand
MATIGLAAAGKGEGLAAAMGRDEVSALFDADEPSFAEVRGAFAVFDADRDGFIGAEDLQCALARLGVRQDAAACRAMVVAAGGGRDARMSLFQFVRSIHVGANLKLTIRSPPRAPGVSANFGQKSKRNGFNLQSIPPNSPNLARSVSSGSQLSCVPVVSWRRCRPDPDAAVAAPFPSTKFRRGLLHFRLQRHRELGWRWKLAGMTPTCPERSKPG

SEQ ID NO: 74014 - protein, 35 aa, Zea mays
  Coding DNA Sequence Number=SeqID_32235
MALALFDELGLVLVHLHRKSCRQADRGNGPQSLAF

SEQ ID NO: 74015 - protein, 74 aa, Zea mays
  Coding DNA Sequence Number=SeqID_32236
  Homolog annotation: Hit_ID=Q7XI54; Match level="QueryCoverage=46%, HitCoverage=15%, E-value=2e-09, Identity=82%"; Hit description =Putative transmembrane protein
MAMSCVQGRGNAGPEQANKLKDGLVRVPLPWRLLIGGRWARKSYEKHEAEAPAKGLTAQQWHRPLAGSAPSQGD

SEQ ID NO: 74016 - protein, 68 aa, Zea mays
  Coding DNA Sequence Number=SeqID_32237
MVVVFNIVFNFTTGKIFHFGSLSCVADRRGALHRIVDIQKDALGPRNISFKEKRSSPRSGIVVKHLGP

SEQ ID NO: 74017 - protein, 299 aa, Zea mays
  Coding DNA Sequence Number=SeqID_32238
  Gene Ontology: Mol. function=pseudouridylate synthase activity; Cellular component=nucleus; Biological process=tRNA processing
  Homolog annotation: Hit_ID=Q5ZBZ5; Match level="QueryCoverage=48%, HitCoverage=22%, E-value=5e-53, Identity=73%"; Hit description =Potential U2 snRNA pseudouridine synthase-like
  Pfam annotation: Domain name=TruD; Domain location=3-280; Score= -95.8; E_value=9.4e-05; Accession=PF01142.9; Description=tRNA pseudouridine synthase D (TruD)
MRSASGICQVLRNVIAESADDINAAVNGLSKNGFINYYGLQRFGSGSVPTHFVGAALLRGEWRHAVSLILGTRVHYKWHVDVDAALRGMPRHLTVERAILQRLKNYPGNYLQALMAIPKALRLMYVHSYQSYLWNHAASMRVEKYGISQVVEGDLVYKTGSSLGEAITTDTFDDDDSHVNSPEMEMSCETLTEEMIQSVKVVDSEDLLKAVYSFEDVVLPLPGSETLFPGNEVTMIYHEIAKKVMGFVMNFSVIQEGPDAMHFTIRLTSSDLMTITNQIFIKSNSWEYKTGAGVIGAGN

SEQ ID NO: 74018 - protein, 62 aa, Zea mays
  Coding DNA Sequence Number=SeqID_32239
  Subcellular localization annotation: CTP_CleavageSite=11; ConfidenceScore=5.05e-01
MASQLASVTVRSGASGSGEEFGSSPRGVENMRAFLSTGVFGYTPLKFSHCLTHRMFEPPFRV

SEQ ID NO: 74019 - protein, 626 aa, Zea mays
  Coding DNA Sequence Number=SeqID_32240
  Gene Ontology: Mol. function=nucleic acid binding
  Homolog annotation: Hit_ID=Q338D7; Match level="QueryCoverage=67%, HitCoverage=71%, E-value=1e-117, Identity=49%"; Hit description =Calmodulin-binding family protein, putative, expressed
  Pfam annotation: Domain name=IQ; Domain location=119-139; Score=16.6; E_value=0.089; Accession=PF00612.17; Description=IQ calmodulin -binding motif
MGVLFSCPVEEEEDVPAGAAAALPAPCNAAVEPPALKPSLQGSGKLRFERSLGSLIRREQQSPSARLHVDVDVDVDAAAKQVPATSTVAPVPPVMPRELARTRFADAAPAPAPESPKHEAAAVTVQKVYKSFRTRRRLADCAVVVEQSWWELLDFALLRRSSVSFFDIERQESAVSKWARARTRAAKFQFFPQEITDGIRNKSHRDQVGKGLSKDDKAQKLALQHWLEAIDPRHRYGHNLHYYYDCWLRCESKEPFFYWLDVGEGKEINLERCPRLKLLSQCIKYLGPKEREEYEVVIEDGKFMFKKSRQILDTSDGPRDSKWIFVLSTSKNLLFGPHSGHYRPTEENFQEFQSFLKDNNVDLTDVKMSPDETTRSFGAGSEASSSDCCAVADKPEEDQQPQLKKPSTVARHLKSLNRPHLTKSLPPRPQQEETSKSLSPTATVTRQDSSEDAETSTTSHRALFEDGQEEDHAAAATAADDNTAVPREKILQRISSKKETKSYQLGKQVSFKWTTGAGPRIVCVRDYPSELQLRALEQVHLSPRSGGAAAAAGAGRAASSRFASPQRCGSPVAARGRREPLASAGCGRAASSRFASPQRSSSPMARARCEQLTPREAFRTHLMARG

SEQ ID NO: 74020 - protein, 333 aa, Zea mays
  Coding DNA Sequence Number=SeqID_32241
  Homolog annotation: Hit_ID=Q7XI50; Match level="QueryCoverage=32%, HitCoverage=50%, E-value=3e-36, Identity=66%"; Hit description=Beta -1,3-glucanase-like protein
  Pfam annotation: Domain name=X8; Domain location=109-197; Score =136.7; E_value=6.3e-38; Accession=PF07983.3; Description=X8 domain
WPMIMLAVRGLNSKMLEKRLHGCLLLLVFLLADVSASVVHRHLFASKDVRGACMRVGGVVDENALGSSSVAASHRARFLQRAGSRAETAVDLGPDSEDGSKRRSLATTMFCVAKQGADATALQAGLNWACGQGRANCAPIQPGGPCYKQNDLEALASYAYNDYYQKNFATGGSCGFNGTATTTTSDPSRPAEPRQHLGSLLSDGVPPGSEIQAPPPTFAAPAYAWTVRPRAPPTVLVIVIGARKGVNILFGDSAGDRLGAVRLHRKVSVLSSMAGGGTPAASAPSGLSPPSSFTPGIGSPSNTLIPLDGAESLVSSVWSAICAPLLALPLFFL

SEQ ID NO: 74021 - protein, 245 aa, Zea mays
  Coding DNA Sequence Number=SeqID_32242
  Homolog annotation: Hit_ID=Q10R85; Match level="QueryCoverage=63%, HitCoverage=72%, E-value=3e-26, Identity=36%"; Hit description =Expressed protein
  Subcellular localization annotation: CTP_CleavageSite=62; ConfidenceScore=5.81e-01
MAAAANTPQCHRPWQLVVPARASASASRRTSRPAAAAGVGAGGAPNAWTGMPPPPAARRTVRAKAGAAEARPSSPPDAVTYSASISTDTPLHEPPGVSFDEYIQDRARVFRAMFPDESRSQRVGDTEWELRGLDASYAPSSFDLGVSGSLYADRSRSRGCRMRGHLEIAITCVLPPPLRLVPETVLRGVAESVLSTLAEKMKRDVDVGLVADFRRFRREKAAASRATPTLGATASDRDEASESES

SEQ ID NO: 74022 - protein, 250 aa, Zea mays
  Coding DNA Sequence Number=SeqID_32243
  Gene Ontology: Mol. function=nucleic acid binding; Cellular component= ribonucleoprotein complex; Biological process=mRNA processing
  Homolog annotation: Hit_ID=Q8LHN4; Match level="QueryCoverage=99%, HitCoverage=100%, E-value=2e-52, Identity=51%"; Hit description =Putative 29 kDa ribonucleoprotein A, chloroplast
  Pfam annotation: Domain name=RRM_1; Domain location=170-239; Score =86.8; E_value=6.5e-23; Accession=PF00076.12; Description=RNA recognition motif. (a.k.a. RRM, RBD, or
  Subcellular localization annotation: CTP_CleavageSite=53; ConfidenceScore=5.66e-01
MAAALFYTSLSPRFLALSSPKPAAPAASAFLPFTMPLRVVSAPAPARRVLEPVAVAVSSEYGTEGAEQQDGEFSEDLKLFVGNLPFSVDSAQLARALRAGWLRRDGRGFSDSGFASKFPLLNNLKSESKTSEGELRATATYRWIRTKSIKGWRGWRRRRQLCRFREQGDVGNLAWGVDNSTLENLFSEQGQVLDAKVIYDRDSGRSRGFGFVTYGSAEEVNNAISNLDGIDLDGRQIRVTVAESKPRREF

SEQ ID NO: 74023 - protein, 187 aa, Zea mays
  Coding DNA Sequence Number=SeqID_32244
MSATREAANKRPARRVTWRGRPHPLSVRIREAVRRGPPGTPSWFGGCVEAFLHTGSAAPDPHGQSPIRAPPAFLRVQQQDLLFSLYSSLSSCKMMINEHIVKFKENNMFPKIRIIAILSQPLVVATRGLHSKIKISGKDNKRNLELSSCSKPDGAANIYRIEVDDNDDISEAGSNIDLANDNLCAIV

SEQ ID NO: 74024 - protein, 90 aa, Zea mays
  Coding DNA Sequence Number=SeqID_32245
  Subcellular localization annotation: CTP_CleavageSite=25; ConfidenceScore=5.10e-01
MSTYMDNTTSYALHTIFVAFTALPSAAQPQGRRGHANLGWAGRADSRPDTGSAEQMPASIPEGTLLTGKRLAILVHILEHEGGALLRLVE

SEQ ID NO: 74025 - protein, 112 aa, Zea mays
  Coding DNA Sequence Number=SeqID_32246
MAPFVGVAYPKITISGTLIINESWMLKDVDGFGTQQQEEIPPTTLHIPIAFSPKTTHAAPHNCSLQLLDVEHCSPPKRARPPWLAGMVEARRANNIGTTRTTRVFFENAMEL

SEQ ID NO: 74026 - protein, 119 aa, Zea mays
  Coding DNA Sequence Number=SeqID_32247
MAFSKKTLVVLIVPILLALLASTMPASQGGRALLGGEQCSMSNNCNEQLCGATCAVLGENAIGICKIIVTSRNHTSVTRLDADSRSIIGNSFDLEGNVKMVCRIRSNKVGHGKLSDLSI

SEQ ID NO: 74027 - protein, 79 aa, Zea mays
  Coding DNA Sequence Number=SeqID_32248
MAAVPHSVMASNIRTAIYGNNSIPRISFFLALISISPCEFLGSGRSDYGGADYYVKWNMERPSRKTVLPQGWNGTPLAE

SEQ ID NO: 74028 - protein, 139 aa, Zea mays
  Coding DNA Sequence Number=SeqID_32249
  Homolog annotation: Hit_ID=Q6QP51; Match level="QueryCoverage=85%, HitCoverage=51%, E-value=3e-18, Identity=45%"; Hit description =Putative growth-regulating factor 1
  Subcellular localization annotation: CTP_CleavageSite=33; ConfidenceScore=5.68e-01
ENITARPAPTAVPPTRVRLTTAKFSLGRNRKLRLTRPQASGLGLGRRSPPRPTPGLGLNLGLGRWSPPRPTPGLGLNLGLGRNRVLARPQPWPQEKSPPRPTLGSDRPRHRGYIITLPLASSGYGGTRPASHLARPGNK

SEQ ID NO: 74029 - protein, 107 aa, Zea mays
  Coding DNA Sequence Number=SeqID_32250
MAMFLVIARCGRVSNYLNERSVTELRARTAAATMGPLRRLRLEGKIWSGSFGRSDWWCKSTGGGTLGRRFVALRRCVSMGVTGATVSGRGIGEETRGAIGWRLIGQD

SEQ ID NO: 74030 - protein, 45 aa, Zea mays
  Coding DNA Sequence Number=SeqID_32251
MVIVHVIWCQPQDAVVDDLKDGHNQWMLAKRELPETLVALPQDVL

SEQ ID NO: 74031 - protein, 206 aa, Zea mays
  Coding DNA Sequence Number=SeqID_32252
  Gene Ontology: Mol. function=protein serine/threonine kinase activity; Cellular component=integral to membrane; Biological process=protein amino acid phosphorylation
  Homolog annotation: Hit_ID=Q5VQL9; Match level="QueryCoverage=98%, HitCoverage=35%, E-value=2e-76, Identity=67%"; Hit description =Putative brassinosteroid insensitive 1-associated receptor kinase 1
  Pfam annotation: Domain name=LRRNT_2; Domain location=30-70; Score =53.5; E_value=6.9e-13; Accession=PF08263.3; Description=Leucine rich repeat N-terminal domain
  Pfam annotation: Domain name=LRR_1; Domain location=122-144; Score =18.2; E_value=0.029; Accession=PF00560.23; Description=Leucine Rich Repeat
  Pfam annotation: Domain name=LRR_1; Domain location=146-168; Score =13.2; E_value=0.95; Accession=PF00560.23; Description=Leucine Rich Repeat
  Pfam annotation: Domain name=LRR_1; Domain location=98-120; Score =10.5; E_value=3.1; Accession=PF00560.23; Description=Leucine Rich Repeat
  Pfam module annotation: Pfam domain module=LRRNT_2::LRR_1::LRR_1::LRR_ 1; Domain location=30-70::122-144::146-168::98-120
MGWWWWCLPVAALLAAILPSSDATLSPAGINYEVVALMAIKTELEDPYNVLDNWDINSVDPCSWRMVTCSSDGYVSALGLPSQTLSGKLSPGIGNLTRLQSVLLQNNGISGPIPGTIGRLGMLKTLDMSDNQLTGTIPSSLGKLKNLNYLKLNNNSLSGVLPDSLASIDGFALVIAGNPMICGNNSGDKCSSVSLDPLSYPPDDLK

SEQ ID NO: 74032 - protein, 129 aa, Zea mays
  Coding DNA Sequence Number=SeqID_32253
  Homolog annotation: Hit_ID=Q6QP51; Match level="QueryCoverage=91%, HitCoverage=42%, E-value=5e-10, Identity=43%"; Hit description =Putative growth-regulating factor 1
  Subcellular localization annotation: CTP_CleavageSite=7; ConfidenceScore=5.68e-01
MPPARVRLTATKCSLGRHRNLRLARPQGSDSTSPRTTISASPSPRARTQPQLRTTVSASLDPRARTRPRLRKKVSASPNPRARTQPQLRKTVSASPDPRARTQPRPRRSHHLAQADHATKGGHHYPTPS

SEQ ID NO: 74033 - protein, 320 aa, Zea mays
  Coding DNA Sequence Number=SeqID_32254
  Gene Ontology: Mol. function=protein serine/threonine kinase activity; Cellular component=integral to membrane; Biological process=protein amino acid phosphorylation
  Homolog annotation: Hit_ID=Q5VQL9; Match level="QueryCoverage=74%, HitCoverage=37%, E-value=1e-113, Identity=87%"; Hit description =Putative brassinosteroid insensitive 1-associated receptor kinase 1
  Pfam annotation: Domain name=Pkinase; Domain location=2-266; Score =8.0; E_value=4.9e-09; Accession=PF00069.15; Description=Protein kinase domain
  Pfam annotation: Domain name=Pkinase_Tyr; Domain location=28-266; Score=-54.8; E_value=4.2e-09; Accession=PF07714.7; Description =Protein tyrosine kinase
  Pfam module annotation: Pfam domain module=Pkinase::Pkinase_Tyr; Domain location=2-266::28-266
MSSAITLYVHVIYCFQVQFWTTQSLSVLNSSHELCHNVVCPCDILLSSPVLDYPISICPQLKPCGIRLIDSSKAPYKPRPQHINAKPALDWSRRKRVALGTARGLLYLHEQCDPKIIHRDVKASNVLLDEYFEAIVGDFGLAKLLDHRESHVTTAVRGTVGHIAPEYLSTGQSSEKTDVFGFGVLLVELVTGQKALDFGRVANQKGGVLDWVKKLHQEKQLGVMVDKDLGSSYDGVELEEMVQLALLCTQYHPSHRPRMSEVIRMLEGEPGLAERWEASQSNVDTPKSVSSELLPPKYVDFAAADESSLGLEAMELSGPR

SEQ ID NO: 74034 - protein, 82 aa, Zea mays
  Coding DNA Sequence Number=SeqID_32255
MRQPLLRSLPTSSLICGAGMSAPPRLGLHAHLRQLLRADWWAMEPYIPSRPVSPLPRRENPASWDSDVRRLGPVPVLSIGGH

SEQ ID NO: 74035 - protein, 82 aa, Zea mays
  Coding DNA Sequence Number=SeqID_32256
MGLPATGAPEEQEDAAAEEEEKKAGVEAVVSVAALRRSEAATASLASRRHAIIAQRKRMLSGFASWSRTIGDEEVGSRWAQG

SEQ ID NO: 74036 - protein, 190 aa, Zea mays
  Coding DNA Sequence Number=SeqID_32257
MAQSDVVKPPKAWRDQGNDGSHDDDHAAMSPGKWVRGWLPVSSTVKIFSPRVVIRAPMGMNRIADANLGAKGSTQTNKKIKVKGSKERSKRNRREPWSGAPDSVWCTKGDRLKLFTFGFLESRSAIIHRTVRCATGATTIERNGQLQRSTANENSALTVHAESEQRQKAHRTVNGDCPVRHRTIRCPKMS

SEQ ID NO: 74037 - protein, 142 aa, Zea mays
  Coding DNA Sequence Number=SeqID_32258
MVWWLLTGIENRTKPPATHDRDAATTRNPGRLGGRPSVILHANNPQAPMNEPDTSLATNRRYRAGSTVADLSLSANAAMEAVVVRFRGKGARARIRQGRDGSWEHITRSFIPWRGQSHQRHSWRRRRGLGGLSVAQSPRGGG

SEQ ID NO: 74038 - protein, 94 aa, Zea mays
  Coding DNA Sequence Number=SeqID_32259
  Subcellular localization annotation: CTP_CleavageSite=37; ConfidenceScore=5.32e-01
MGQATHPSGYCSSESSVLWPKLSPLSSPSGSPPGPPSVAEAPYGGAGCASCWGTGDGSGATSPGGLIDRTPCDEVEAPQGETVGKGSPTYEQCA

SEQ ID NO: 74039 - protein, 66 aa, Zea mays
  Coding DNA Sequence Number=SeqID_32260
MEQVPRGSGCDRGDGVAGGNGGGCVAKGKWGGGGAHGGGHACGGHEALAKVKKNFTTQCMERTGHD

SEQ ID NO: 74040 - protein, 414 aa, Zea mays
  Coding DNA Sequence Number=SeqID_32261
  Gene Ontology: Mol. function=RNA-directed DNA polymerase activity; Cellular component=intracellular; Biological process=RNA-dependent DNA replication
  Homolog annotation: Hit_ID=UPI00004C1734; Match level="QueryCoverage =76%, HitCoverage=87%, E-value=1e-133, Identity=78%"; Hit description= UPI00004C1734 related cluster
  Pfam annotation: Domain name=RnaseH; Domain location=218-335; Score= -12.8; E_value=0.00091; Accession=PF00075.14; Description=RNase H
MSFLDAYSGYHQIRMKESDQLATSFITPFGMYYYVTMPFGLRNAGATYQRCMNHVFGEHIGRTVEAYVDDIVVKTRKVSDLLSDLETTFRCLKAKGVKLNPEKCVFGVPRGMLLGFIVSEWGIEANPEKIAAITSMGPIKDLKGVQRVTGCLAALSRFISRLGERGLPLYRLLRKAECFTWTPEAEEALVNLKALLTNAPILVPPPPRCRRSPLDLRRRYHSGVGAGLLFISPLGKHLRYVLRLHFPASNNVAEYEALVNGLRIAIELGVRRLDARGDSQLVIDQVMKNSHCRDPKMEAYCDEVRRLEDKFYGLELNHIARRYNEAADELAKIASGRTTVPPDVFSRDLHQPSVKTDDTPEPEKASAQPEAPSAQPEVPSAPEGEALRVEEERSGVTPNRNWQTQCLLRAPRGG

SEQ ID NO: 74041 - protein, 72 aa, Zea mays
  Coding DNA Sequence Number=SeqID_32262
MAAAAAAPPIPAPNPTDDWVDGSWTLDYSCCVTFDDVEEMVSWPRASRPPSLAALAPTTATFRRAPPGPPHW

SEQ ID NO: 74042 - protein, 291 aa, Zea mays
  Coding DNA Sequence Number=SeqID_32263
MTVQRLIFLGAEQERWEFAAVLHNGHHRRRARGDLVRLTSNNATTSWNTRVTAAWEERRTHNGRDFELWPAGRKRDAAKEERRRAAMAEQRNARAARSRDWPPAERRRRAGSSGRGPRTQGLDDGRRDVRSVVGLGEEERRREGATRQRNPHPTSRRHGWELLQAGGSRGGAELKKHEEEEDHGAQQRSARRRDPKGAQAWRSARLRGATMERTLAGWDWDEPAGPEGDKGERSTRETTHWRRQPEHDDAKYQKSGSQKNQREGGYWIETKRFIFKYFQIFLFLKGKRRYF

SEQ ID NO: 74043 - protein, 212 aa, Zea mays
  Coding DNA Sequence Number=SeqID_32264
  Gene Ontology: Mol. function=nucleic acid binding
  Homolog annotation: Hit_ID=Q10M01; Match level="QueryCoverage=85%, HitCoverage=28%, E-value=2e-34, Identity=48%"; Hit description=Zinc finger C-x8-C-x5-C-x3-H type family protein, expressed
MLQHSNSANELLLRRKLEEQQQAAELHHAIELQSRRLMGLQLLDLKARAAATTAAASTLPTPVANAFASSHPLSTMAVESPLESGEQLKLSSGFALEGKLNGGDKEESACEASPDAADSDQSGDHNLPDSPFASPTKSAALVHDSFAATEPENTASLVGSKIDGGSNHLRPLALEIPSPSSYFFPMRGCVGKASTLLFRGADYVREHSVIHE

SEQ ID NO: 74044 - protein, 99 aa, Zea mays
  Coding DNA Sequence Number=SeqID_32265
MGKEKEKGFPFLVGRGGGFWPTWARARQAAQLAQLCGETTGDGVEARAHQPGRGEGADGVSDNGGGEGLDRGRPAVRIRGGSPPSVRFCDGEAVAEQEW

SEQ ID NO: 74045 - protein, 322 aa, Zea mays
  Coding DNA Sequence Number=SeqID_32266
  Gene Ontology: Mol. function=transferase activity; Cellular component= nucleus; Biological process=flavonoid biosynthetic process
  Homolog annotation: Hit_ID=Q6K638; Match level="QueryCoverage=91%, HitCoverage=67%, E-value=1e-147, Identity=85%"; Hit description =Putative hydroxyanthranilate hydroxycinnamoyltransferase 3
  Pfam annotation: Domain name=Transferase; Domain location=3-322; Score=66.5; E_value=8.6e-17; Accession=PF02458.6; Description =Transferase family
MALVSECSETRTAKLPMCGNQPMVTYFKCGGVSLGVGMQHHAADGMSGLHFINSWSDLCRGAQISVMPFIDRTLLRARDPPTPSFQHIEYQSAPAMLSSTTQFLASKSKPPATAVDIFKLTRSDLGRLRSQLPAGEGAPRFSTYAVLAAHVWKCVSLARSLPPEQPTKLYCATDGRQRLQPPLPDGYFGNVIFTATPLAEAGKVTSELAEGAAVIQGALDRMDNDYCRSALDYLELQPDLSALVRGAHTFRCPNLGLTSWVRLPIHDADFGWGRPVFMGPGGIAYEGLAFVLPSANGDGSLSIAISLQAEHMEKFRKLIGEA

SEQ ID NO: 74046 - protein, 125 aa, Zea mays
  Coding DNA Sequence Number=SeqID_32267
  Gene Ontology: Mol. function=peptidase activity; Cellular component =membrane
  Homolog annotation: Hit_ID=Q9M582; Match level="QueryCoverage=76%, HitCoverage=33%, E-value=2e-45, Identity=90%"; Hit description =Hypersensitive-induced response protein
MAGGTASRSDPLTSAMGNLCCCVQVDQLTVAIREQFGKFDSVLEPGCHCMPWFVGKRVAGHLTLRLQQQDVPCETKTKDNVFVNVVVSIQYCALADKASDAFYKLSNTRSHLHFNTERRPFSSSR

SEQ ID NO: 74047 - protein, 106 aa, Zea mays
  Coding DNA Sequence Number=SeqID_32268
  Gene Ontology: Mol. function=transcription factor activity; Cellular component=nucleus; Biological process=regulation of transcription, DNA-dependent
  Homolog annotation: Hit_ID=Q6J832; Match level="QueryCoverage=96%, HitCoverage=45%, E-value=3e-11, Identity=39%"; Hit description =Ethylene-responsive element binding factor
MPLPPSLELDMFHHAAAAGTGAAAVHFPFGSIPVTHSYYFFGQAAAAAEAGCHVLKLASAVTVAQSDSDYSSVVDRSPSPPAAVSARKPVVFDIDLNCSPPTEAGA

SEQ ID NO: 74048 - protein, 224 aa, Zea mays
  Coding DNA Sequence Number=SeqID_32269
  Gene Ontology: Mol. function=transferase activity; Biological process= flavonoid biosynthetic process
  Homolog annotation: Hit_ID=Q6K638; Match level="QueryCoverage=62%, HitCoverage=32%, E-value=2e-60, Identity=83%"; Hit description =Putative hydroxyanthranilate hydroxycinnamoyltransferase 3
AVTVECGPCPITFALPSPSLSHQPPRPNSTHRHCAETQSGEEERKRKGKWEERKQVRATSIVSPVGGEFRVGCLLAIRRNGIQMAITVRRSTMVRPARETPRQRLWNSNLDLVVPRFHTPSVYFYRRDGPVPDAEGFFDGERMRRALAEALVPFYPMAGRLARDEDGRVEIDCNGEGVLFVEADAPDASVDDYGDFAPTMELKRLIPTVDYTDDISAFSLLVLQ

SEQ ID NO: 74049 - protein, 154 aa, Zea mays
  Coding DNA Sequence Number=SeqID_32270
MGASNRTMAYRIVVAMRAIGRNNSGEGETTSLVRVRSVSYFGKLYGALGKLVDAPDQLEVVRERSGHGGRALAVLAGRGEVAGATSWLWGVGRGAEGGRLRLCCSYRRGRSVGSGVNRCGRAGRRAPTAPESGCAGSFVPPIGLFPPILKTSQL

SEQ ID NO: 74050 - protein, 116 aa, Zea mays
  Coding DNA Sequence Number=SeqID_32271
MASPTPANGGDTRFSFDYLSREGFPYILWEVLCTAGYPTPPLYTVQLYEEHRVPHCRVWLTLESHPLYPGWRSLDSETVGFGADDTTEAVAIKALTTFCGYHPLEMMMHPLGLFPR

SEQ ID NO: 74051 - protein, 130 aa, Zea mays
  Coding DNA Sequence Number=SeqID_32272
  Subcellular localization annotation: CTP_CleavageSite=43; ConfidenceScore=5.11e-01
MELAQPIVSIAGAVFPFPFLKFGPGRPSFCVIAARTLLPLPPWSAYLAGEALALPLSSPSSLESCCPPSHIDAAVGLRLSLSQYLATASFVAGAKSHVFGWRRRKELQCSKHPVFDEMFKSESLAYPQLV

SEQ ID NO: 74052 - protein, 71 aa, Zea mays
  Coding DNA Sequence Number=SeqID_32273
MAACPRLSVPPRIDALGPPRAAVIIVRPAFARSFSPRDAFPIRGGTPDKIKIRSLAHLILFTGRQYGANHK

SEQ ID NO: 74053 - protein, 319 aa, Zea mays
  Coding DNA Sequence Number=SeqID_32274
  Gene Ontology: Mol. function=transferase activity; Cellular component= nucleus; Biological process=positive regulation of transcription from RNA polymerase II promoter
  Homolog annotation: Hit_ID=Q7G609; Match level="QueryCoverage=78%, HitCoverage=94%, E-value=1e-52, Identity=48%"; Hit description =Putative CCR4-associated factor 1
  Pfam annotation: Domain name=CAF1; Domain location=47-297; Score =131.8; E_value=1.9e-36; Accession=PF04857.10; Description=CAF1 family ribonuclease
  Subcellular localization annotation: CTP_CleavageSite=39; ConfidenceScore=5.09e-01
MFSYAAPPITYSPVPPPPPYAAGLLYPPPYYGGPVVPTPAVHVVQLRSVTATNFAAELDLIGSLLQNYPYIVVDTEYPGTVHRPPAGRRDDDLSPDEWYAMLKANVDELPPVQLGITLCDSHGNLPVVLDYGYGYTEGCWEVELSDFDIRRHRHAAQSVAFLRSQGVDFDAVRARGVGSAAFGAKLAEILLASRGAGVGLTWVAFGGAYDLAYLVKMIGGIGQPLPETRQGFLERVRVLLGGRVFDARFMAENCGRADLRDVGLRSVAINLGAVMPAADLPWLAGPKSLIVSRIHTIMKLHVLSDDDTTAFQGIIDRLY

SEQ ID NO: 74054 - protein, 56 aa, Zea mays
  Coding DNA Sequence Number=SeqID_32275
MARSAPPFTGREPVSSGEWQHGGEGIWPLVSCLLPLPEVTVVKVEWKRKTNQEGKP

SEQ ID NO: 74055 - protein, 143 aa, Zea mays
  Coding DNA Sequence Number=SeqID_32276
  Subcellular localization annotation: CTP_CleavageSite=30; ConfidenceScore=5.37e-01
MKLWKETSRSSKITTSSRCGLAATPSRLPVKAALSTFLFRTLIYSEQPLQFPEAGEFLRPLFLGAPDSPELGVTLIPFHPRLCCKRTQRYSIDQGAPPAGAQESSPSQTLPPAKARKKSPVAPTPVADAPAPRAGGGAASPNS

SEQ ID NO: 74056 - protein, 114 aa, Zea mays
  Coding DNA Sequence Number=SeqID_32277
  Subcellular localization annotation: CTP_CleavageSite=62; ConfidenceScore=5.21e-01
MGLGVCGSLYQGWFAPWAGVVTRMMVMIMLMVMMARLRHTAWKSVIPFLPSRLTKRSLRRLEVESVRGCSPVPPLEAPPAPPIGVPTTGVAAGGDPDDGGDDSSSSHNTDLSEE

SEQ ID NO: 74057 - protein, 193 aa, Zea mays
  Coding DNA Sequence Number=SeqID_32278
HAKKEMETGEKPTTSHGSTSSEESRTKRKEKKKDSSKGKEKRSSSHHKEKKEKSSSHKPHRSGDKKRRMRKVVYYETDSSSASTSGSDATSVTSKRQERKKYTHARAATAAMSVRPSPTRLVHAAKSGAAVALRRCSLTSRSAFFLDQFAFVQALAELANLLLGGHRIECDSREPPPTRQSPYPAVPPPPPSI

SEQ ID NO: 74058 - protein, 222 aa, Zea mays
  Coding DNA Sequence Number=SeqID_32279
  Homolog annotation: Hit_ID=Q9AVP5; Match level="QueryCoverage=39%, HitCoverage=13%, E-value=5e-08, Identity=40%"; Hit description=BY-2 kinesin-like protein 5
MATPRLPALRLPSPPPARCTAAIRGRARATEDLEEKPTVEDLSVFSATTVPPRPAMQIRGFDPPPARVFAWHALELDAFKYLQIVASYGGCTGANNLDKNEEILSGRARQRHVDRRRWEAPDKLINLKELGQHLGSVGVFCRVWPLLNTESPVTVEQERITVKSVGIKKEFDADRVFGQEYAQGSLSDNFCAIIVLTEYGCLTAIIRKKEIVDVIVKAIKST

SEQ ID NO: 74059 - protein, 184 aa, Zea mays
  Coding DNA Sequence Number=SeqID_32280
MLFHGDLRAAGEPHPPPPPPNSLPLENPISSNTYYVAENPISSNTYSRRAARHEEPYPLPRCPCRSSCTSSGAQSTQASLPDELHAARIPISIPILLAFTTLLDSSKFHPIERRWTFHSLKHNQIKERKNRANKIYGVNKTTGSNCNKVNRAVCKFYSKEVVDTTPGRVGGRFFIKYGIPAMLS

SEQ ID NO: 74060 - protein, 78 aa, Zea mays
  Coding DNA Sequence Number=SeqID_32281
  Subcellular localization annotation: CTP_CleavageSite=46; ConfidenceScore=5.33e-01
MARRGLGGAVASVLGMGKTPLRHWSGNRRSSLDQAYRFRRSRLGRRSAIVWAPSCPMSGVGGESWAVDLRWVVGIARS

SEQ ID NO: 74061 - protein, 126 aa, Zea mays
  Coding DNA Sequence Number=SeqID_32282
MARRGRSGSLTWLACRNSSAWWTGRARALVTAGTRAARAWNGTHAGHPWHWKAGREYMQRRQPLKPGGAVCTACASYPGPGRARVWTRGRAVQKASEGSALQYNGYGVRAADARRCASVRKDGSGR

SEQ ID NO: 74062 - protein, 651 aa, Zea mays
  Coding DNA Sequence Number=SeqID_32283
  Gene Ontology: Mol. function=3-dehydroquinate dehydratase activity; Cellular component=integral to membrane; Biological process=aromatic amino acid family biosynthetic process
  Homolog annotation: Hit_ID=Q6R5L8; Match level="QueryCoverage=88%, HitCoverage=93%, E-value=0.0, Identity=68%"; Hit description=Iron transport protein 2
  Pfam annotation: Domain name=OPT; Domain location=76-635; Score =417.7; E_value=1.6e-122; Accession=PF03169.6; Description=OPT oligopeptide transporter protein
MNSHLRLHTAAAAAAAAVSELELLVPRGRGAGAMDQLRPEPAAGAHEIEKTAAPDVESEPAAAVPEPERVPPWREQVTARGMVAALLIGFVYTENTVVQTCVVACYTIGFGGGFGSFLLGLDKKTYELSGVSTPGNVPGSYREPAIGWMTGFLLAVSFVGLLTLLPLRKVLVIDYKLTYPSGTATAVLINGFHTPQGDKNAKIQVRGFLKYFGISFLWSFFQWFYTAGDHCGFAQFPTFGLQAFNQTLTYVGAGMICSHLVNLSLLFGAVVSWGVMWPLIGKQKGNWYPADASQNSMTGIYGYKAFLCIALLVGDGLYNFVKVIAITVKNIRERSRRKNLNRVADADTMALDDMQRDEVFNRDNIPTWLSYAGYAALSLIAVIAIPIMFREVRWYYVVVAYALAPALGFCNAYGTGLTDMNMGYNYGKVALFVLAAWAGKDSGVVAGLVGCGLVKQLVLVSADLMHDFKTGHLTLTSPRSMLVGQAVGTLMGCVLAPLTFMLFYRAFDVGEPDGYWKAPYALIYRNMAILGVEGFSALPRHCLQLCAGFFAFAVLANLARDLLPRRLARLVPLPMAMAVPFLVGASFAVDMCVGSLVVFAWHKLDGKKAALLVPAVASGLICGDGIWTFPSSLLALAKVKPPICMKFTPGS

SEQ ID NO: 74063 - protein, 99 aa, Zea mays
  Coding DNA Sequence Number=SeqID_32284
  Homolog annotation: Hit_ID=Q6R5L9; Match level="QueryCoverage=86%, HitCoverage=11%, E-value=3e-23, Identity=63%"; Hit description=Iron transport protein 1
  Subcellular localization annotation: CTP_CleavageSite=42; ConfidenceScore=5.18e-01
MPAGTVTAINKFLEVLARSGVATRPFTRQENTVVQTCVVACYSMSASPSENLGLAGGLGSFLLGLNKRTYEMAGEETEGNVPGSYKEPGIGWMTGFLFA

SEQ ID NO: 74064 - protein, 239 aa, Zea mays
  Coding DNA Sequence Number=SeqID_32285
  Gene Ontology: Mol. function=ubiquitin thiolesterase activity; Cellular component=intracellular; Biological process=ubiquitin -dependent protein catabolic process
  Homolog annotation: Hit_ID=Q1RWR6; Match level="QueryCoverage=75%, HitCoverage=42%, E-value=3e-29, Identity=39%"; Hit description =Pentaxin
MVAYTKIKFIEIHPPDTLTVSCWPIHGSWDDLTVQSGINDNCQLRCAPSFVSCGDISLISSYEKVENCVYTSTILRKCARWGSMTLNPWNRCSKWKLAHAERFAADFYVADAKSGRRALVKAGHHSKVVPLIDENLLVTTSRGTELSSTLEHWLEEKEPFFRRSPDYPSRGRVYQRRDAVERGWSAEQEERGCRDTSSAGASIDGLCVAVVSPPVIFRRDSAETGRRAELGRLMKSRYG

SEQ ID NO: 74065 - protein, 59 aa, Zea mays
  Coding DNA Sequence Number=SeqID_32286
MEPGGGRGRGRLPPCGGSKGRPPGLVVGSRPAAAAVVGGRGDCDKDALAIAKTGKHTKG

SEQ ID NO: 74066 - protein, 413 aa, Zea mays
  Coding DNA Sequence Number=SeqID_32287
  Gene Ontology: Mol. function=diacylglycerol kinase activity; Biological process=protein kinase C activation
  Homolog annotation: Hit_ID=Q94HY9; Match level="QueryCoverage=74%, HitCoverage=41%, E-value=1e-95, Identity=57%"; Hit description =Putative sphingosine kinase
  Pfam annotation: Domain name=DAGK_cat; Domain location=229-362; Score= 150.3; E_value=4.9e-42; Accession=PF00781.14; Description =Diacylglycerol kinase catalytic domai
  Subcellular localization annotation: CTP_CleavageSite=43; ConfidenceScore=5.41e-01
MDGSELENPTSRSSSQKSSRRSSSRRSQKSAGQHSLTGAQEKRSKSKSSRQKHLVIDDKEAKKGKKHDHKIDVADERSNFLGYEVYAGKLILQKKNRSASDNNQLPSNGKADAIDARLTSKALIWGSSVLLLEDVVSVSYNSGVKHFTLHAYSTKKSLFKKTCRVQKDFCFIASTLDEAILWVTCFAEQSIYVNLLPRLGASSINQDSENPLSESLFDQPPIKCKSPQRVLVILNPRSGHGRSSKVFHEKAEPIFKLAGFQMEVVKTTHAGHAKSLVSTFDFSACPDGIVCVGGDGIVNEVLNGLLIRSDRAEAVSIPVGIIPAGSDNSLVWTVLGVRDPISASLLIVKGGFTALDILAVEWVQSGQIHFGSTVSYYGFVSDGNLYVIYLVLSSVFSSESLIILMCVATVFTG

SEQ ID NO: 74067 - protein, 121 aa, Zea mays
  Coding DNA Sequence Number=SeqID_32288
MERLTEADDVVFLLVHIRLSQVGDFRLCSLQPRRRRRRRSVHNGCLLCGRIDATTHYGYLELAFKQMAETADASNALDHRLHYLRLTGNACAARALVWWVWENSNAHAANIHCSNHHGARL

SEQ ID NO: 74068 - protein, 124 aa, Zea mays
  Coding DNA Sequence Number=SeqID_32289
  Subcellular localization annotation: CTP_CleavageSite=29; ConfidenceScore=5.12e-01
MALACAIDAGHAAARAFGPPRQRRRRAVQSSHEAQGTTLTLDPRHSPAAMCSVPRGQASPSGQLNYWLGCLDGIVPPFCGCQINLFPLMYQVKRKQVSSQPLAFRLKEYHGQPVQKFAQILNIC

SEQ ID NO: 74069 - protein, 262 aa, Zea mays
  Coding DNA Sequence Number=SeqID_32290
  Gene Ontology: Mol. function=cysteine-type endopeptidase activity; Cellular component=vacuole; Biological process=proteolysis
  Homolog annotation: Hit_ID=Q9SBX3; Match level="QueryCoverage=91%, HitCoverage=51%, E-value=2e-69, Identity=55%"; Hit description =Legumain-like protease precursor
  Pfam annotation: Domain name=Peptidase_C13; Domain location=1-255; Score=202.1; E_value=1.3e-57; Accession=PF01650.8; Description =Peptidase C13 family
ACESGSIFEGLLPPDIAVYATTAANAEESSWGTYCPGDDPGPPPEFDTCLGDLYSVAWMEDSDARRDRRAETLRQQYLAMKDRTSAHGTYSPRLPRHGGLGAQSLYTFMGSDDATAASLSGRGRGQPAVSQRDADLVYFWRRYRRAAERTPEKAEARTRLLRAVSRRSRVDSIMELIGGLLFGSEGGPRVLGAVRPAGQPLADDWDCLKSLVRAYERSCGPLGQYGMKHMRGFANICNAGVGEDGMAKVASEACAAVARSDD

SEQ ID NO: 74070 - protein, 104 aa, Zea mays
  Coding DNA Sequence Number=SeqID_32291
  Subcellular localization annotation: CTP_CleavageSite=17; ConfidenceScore=5.08e-01
MGKPVPSLLMLLLSRVSLAARSRRFESSFYRCKENRIGNEMAFVQLSLLSLGSTGTVRVVHPENDRGSRLARVNWATPREIPPANYRVINSPETVRGGPQKWPG

SEQ ID NO: 74071 - protein, 455 aa, Zea mays
  Coding DNA Sequence Number=SeqID_32292
  Gene Ontology: Mol. function=ATP-dependent helicase activity; Cellular component=nucleus; Biological process=mRNA processing
  Homolog annotation: Hit_ID=Q56XG6; Match level="QueryCoverage=98%, HitCoverage=99%, E-value=0.0, Identity=79%"; Hit description=DEAD -box ATP-dependent RNA helicase 15
  Pfam annotation: Domain name=DEAD; Domain location=102-268; Score =176.7; E_value=6e-50; Accession=PF00270.19; Description=DEADDEAH box helicase
  Pfam annotation: Domain name=Helicase_C; Domain location=331-407; Score=121.6; E_value=2.2e-33; Accession=PF00271.21; Description =Helicase conserved C-terminal domain
  Pfam annotation: Domain name=ResIII; Domain location=98-266; Score= -38.0; E_value=0.07; Accession=PF04851.6; Description=Type III restriction enzyme, res subunit
  Pfam module annotation: Pfam domain module=DEAD::Helicase_C::ResIII; Domain location=102-268::331-407::98-266
MGEAKENDVYEEELLDYEEDDDKTVDGSAAKPTGEVAKKGYVGIHSSGFRDFLLKPELLRAIQDCGFEHPSEGKLLFIYCCQLTSVFPSVKTARYTFFFGAEHVQHECIPQAILGMDVICQAKSGMGKTAVFVLSSLQQIDPVAGQVAALVLCHTRELAYQICHEFERFSKYLTEVKVAVFYGGVHIRKHKDLLKNECPHIVVGTPGRILALARDKDLSLKNVRHFILDECDKMLESLDMRRDVQEIFKMTPHDKQVMMFSATLSKEIRPPMEIYVDDEAKLTLHGLVQHYIKLSEAEKNRKLNDLLDALDFNQVVIFVKSVSRAAELNKLLCECNFPSICIHSGMTQEERLTRYKNFKEGHKRILVATDLVGRGIDIERVNIVINYDMPDSADTYLHRVGRAGRFGTKGLAITFVSSASDSDVLNQVQERFEVDIKELPEQIDTSTYRFCFVEN

SEQ ID NO: 74072 - protein, 119 aa, Zea mays
  Coding DNA Sequence Number=SeqID_32293
  Homolog annotation: Hit_ID=Q5JK83; Match level="QueryCoverage=91%, HitCoverage=31%, E-value=1e-55, Identity=93%"; Hit description =Putative GDA2 protein
MEENLKRRLFGLPSRYRDSVRAIRPGLPLFLYNYSTHQLHGIFEAASFGGSNIDPAAWEDKKCPGESRFPAQVRVATRKICSPLEEDAFRPILHHYDGPKFRLELSVPEAAEYDWLIRI

SEQ ID NO: 74073 - protein, 170 aa, Zea mays
  Coding DNA Sequence Number=SeqID_32294
YEDPAINIKTREKRKRVAKGAGKTLKKTIEADTENDESGGDEEPSSRPKKKKAKTSKKSAARQDQGKGSVRTTSYMGCTWILEVMTQPLPFPPLSPLGLTLTQFMPTTKGTDEGDHPSKIKEISSKEEVDSPQISGLGGAAFGGSTSSEEDEMKTAEGGESSGHEKAKKS

SEQ ID NO: 74074 - protein, 364 aa, Zea mays
  Coding DNA Sequence Number=SeqID_32295
  Gene Ontology: Mol. function=RNA-directed DNA polymerase activity; Cellular component=mitochondrion; Biological process=RNA-dependent DNA replication
  Homolog annotation: Hit_ID=Q8S463; Match level="QueryCoverage=96%, HitCoverage=19%, E-value=0.0, Identity=89%"; Hit description =Putative prpol
  Pfam annotation: Domain name=RnaseH; Domain location=37-164; Score =2.9; E_value=3.1e-05; Accession=PF00075.14; Description=RNase H
MGETISFAPRKAIKSQVLADFVAEWVDTQLPTVLIQPELWTMFFDGSLMKTGAGAGLLFISPLGKHLRYVLSLHFSASNSVAEYEALVNGLRIAIELGVRRLDARGDSQLVIDQVMKNSHCRDLKMEAYCDEVRRLEDKFYGLELNHIARRYNETADELAKIASGRTTVPPDVFSRDLHQPSVKIDDMPKPEASSVQPEVPSDPECEALRVEEERSGVTPNQNWQTPYLQYLHRGELPLDRAEAQRLARRAKSFVLMGDGKELYHHSPSGILQRCISIAEGQELLQEIHSGACDRHAAPRAVVGNAFRQGFYWPTAVADATRIVRTCEGCQFYARQTHLPAQALQTIPITWPFVVWGLDLVGLL

SEQ ID NO: 74075 - protein, 37 aa, Zea mays
  Coding DNA Sequence Number=SeqID_32296
MPSYDFVELVNFPLNVFEDWAEKLRVKFQYFCFSFRQ

SEQ ID NO: 74076 - protein, 356 aa, Zea mays
  Coding DNA Sequence Number=SeqID_32297
  Gene Ontology: Mol. function=oxidoreductase activity; Cellular component=mitochondrion; Biological process=metabolic process
  Homolog annotation: Hit_ID=Q69XE0; Match level="QueryCoverage=86%, HitCoverage=59%, E-value=5e-99, Identity=61%"; Hit description =Putative cytosolic aldehyde dehydrogenase
  Pfam annotation: Domain name=Aldedh; Domain location=41-355; Score =148.7; E_value=1.6e-41; Accession=PF00171.12; Description=Aldehyde dehydrogenase family
MVSESNRGGADRTTAAGEERGQLLFDVPEIRFTKLFINGSFVDAVSGRTFETRDPRTGGVIASVAEADKEDVDLAERGRIMARLADLVEERADELAALESLDAGKHPAVTRAVDVGNAAGSLRYFAGAADKIHGETLKMPGQFQGHTLREPLGVAGVIIPWNFPSTMFAVKVAPALAAGCALVVKPAEQTPLSALYLAQLAKQAGVPDGVINVVPGFGPTAGAALASHMDVDMASNYRQISSHYTTGLAFVSFTGSTEVGRLIMKASAESNLKPVYLELGGKSPLIVFDDADLDMAVELAVGASFLSTRERPASPRAASTVQERVYDRFEERFGGEDEGAGSWATRSATLSPTRAR

SEQ ID NO: 74077 - protein, 156 aa, Zea mays
  Coding DNA Sequence Number=SeqID_32298
MTEVAGDRDKEVPTRADEHHVSIYWTYVHVHAALHKICIGYIALLSDLLRSGVQRLPHLGYQMDYISKTEPFYVCMILNEILGDRERIQSLYSEIPGRTTSNASTSRRTSNFSVDATGDESLSVEAHNCILDNTASILSMRSCADKLWKRRKGSKL

SEQ ID NO: 74078 - protein, 210 aa, Zea mays
  Coding DNA Sequence Number=SeqID_32299
  Gene Ontology: Mol. function=oxidoreductase activity; Cellular component=mitochondrion; Biological process=metabolic process
  Homolog annotation: Hit_ID=Q69XE0; Match level="QueryCoverage=69%, HitCoverage=27%, E-value=1e-55, Identity=72%"; Hit description =Putative cytosolic aldehyde dehydrogenase
  Pfam annotation: Domain name=Aldedh; Domain location=1-149; Score= -203.0; E_value=5.6e-07; Accession=PF00171.12; Description=Aldehyde dehydrogenase family
VDKAQYERVLSYIDHGKREGATLLTGGRPCGPEGKGYYIEPTVFTNVKEDMIIAKEEIFGPVMCLMKFKTVEEAIARANDTRYGLGAGVVTRDLDVANRVVRSVRAGVVWVNCYFAMGSDCPFGGRKMSGFGKDEGMHALDKYLAVKCLALLITLLPALFFVLPRMPQPAHDRRREAAARATTRIYWQAVDQMVACALVLTALLATYIYH

SEQ ID NO: 74079 - protein, 121 aa, Zea mays
  Coding DNA Sequence Number=SeqID_32300
  Homolog annotation: Hit_ID=Q6ZAA5; Match level="QueryCoverage=31%, HitCoverage=6%, E-value=7e-07, Identity=68%"; Hit description =Putative phosphoglycerate dehydrogenase
MVWRTECGERIQWRHINTLYEQLNERSCGANPTQASKGHCRRRTGVTVAKQISQPDRSTLLCESLLAALNIAQINGSATSMLENLLGEKLWLFLDFERLDLKLLAVLKAWEFLLAALIQPF

SEQ ID NO: 74080 - protein, 45 aa, Zea mays
  Coding DNA Sequence Number=SeqID_32301
MPGRQGMEPASAAARAPRPPSFASQTNALLRKNLIFQNYIPILFE

SEQ ID NO: 74081 - protein, 442 aa, Zea mays
  Coding DNA Sequence Number=SeqID_32302
  Gene Ontology: Mol. function=nucleoside-triphosphatase activity; Cellular component=membrane; Biological process=transport
  Homolog annotation: Hit_ID=Q69XA0; Match level="QueryCoverage=97%, HitCoverage=52%, E-value=1e-174, Identity=64%"; Hit description =Putative ABC family transporter
GTDVPGSSTGFVEPAFISARPIYVLQPQCKSGDSVTIPITVGSVNAQKAEIKCVQGLPLWRNSSITINEETFRGYRKGKTAKGINEIAMGYDFQDSNENHFNVLTLYNSTYENASFIPMPFALLRIPHSLNAVSNAYLQLIQGSGVKMLLDFTKEMPKQATRLTFDFSAVAGVNFFKINDYSIQFVFFFSFINLQIVLAFLASSFFSKVNTAQAIAYLYIFGSGLMAGYLIRNFIEGGKFPRHWITVLEIIPAFSLYRGLYELGQYAVRSSETGSPGMRWSDLNDHMNGMRDVLIIIILEWLVLLPVAYYFDYASSVGHRSSPLSIIKHLLKKDPTWRRITANEIDGKDVHIEMEKVDIIKEREAVDQVLQQQQTSGYAVVCDDLRKVYHGKDGNPDKFAVQGVSLALPYGECLGILGPNGAGKSSFISMVCHHVLYMTQFI

SEQ ID NO: 74082 - protein, 199 aa, Zea mays
  Coding DNA Sequence Number=SeqID_32303
  Gene Ontology: Mol. function=nucleoside-triphosphatase activity; Cellular component=integral to membrane; Biological process=transport
  Homolog annotation: Hit_ID=Q8S628; Match level="QueryCoverage=98%, HitCoverage=14%, E-value=1e-77, Identity=72%"; Hit description =Pleiotropic drug resistance protein 13
  Pfam annotation: Domain name=ABC2_membrane; Domain location=1-138; Score=28.9; E_value=1.8e-05; Accession=PF01061.14; Description=ABC-2 type transporter
MGPVVSTERTVYYRERAAKMYSSFPYAAAQGLVEIPYIAVQTLIFGLITLNIFVTGKLLLYLLFMFLTFTYFTFYGMVAVGLTPTQQVAAVVSSAFYSLWNLLSGFLIPQSRIPGWWIWFYYICPVAWTLRGIITSQLGDVQARIVGPGFDGTVQEFLEESLGFQQGMAGVTVAVLIGFSLFFFAVYATSIKVLNFQRR

SEQ ID NO: 74083 - protein, 403 aa, Zea mays
  Coding DNA Sequence Number=SeqID_32304
  Gene Ontology: Mol. function=nucleoside-triphosphatase activity; Cellular component=integral to membrane; Biological process=transport
  Homolog annotation: Hit_ID=Q8S628; Match level="QueryCoverage=91%, HitCoverage=73%, E-value=1e-146, Identity=57%"; Hit description =Pleiotropic drug resistance protein 13
  Pfam annotation: Domain name=ABC_tran; Domain location=158-363; Score= -20.0; E_value=1e-05; Accession=PF00005.17; Description=ABC transporter
MAASGAVQPHVALDVNVEEDANDDEAADRLWATIEQVASPQRRNLAIVALDPGSASQKKEEVMDVRRLDRRGAQRVLQRALATADCDNAKLLRGIRDRLDAAGLDVPRVEVRFRNLTVSTEVHYGRRALPTLLNYVHDIAERLLICCHLLRPKKTKLTILDDVSGLLQPGRKNDTVAGATIIWEIDALVGPCCQTDNHIGELTVRETLDFAAKCQGASENWQECLKELRDLEGKRGIRPNPEIDAFMKTASVGGQKHNLVTDYVLRVLGLDLCADTAVGTDMDRGVSGGQKKRVTTGEMVVGPRKTLLMDEISTGLDSSTTYQIVKCMRNFVHEMEATVLMSLLQPAPETFDLFDDIILLSEGQIVYQGPTVQVVDYFNSLGFSLPPRKGIADFLQEVLYGDC

SEQ ID NO: 74084 - protein, 447 aa, Zea mays
  Coding DNA Sequence Number=SeqID_32305
  Gene Ontology: Mol. function=carboxylic ester hydrolase activity; Cellular component=cellular_component; Biological process=lipid metabolic process
  Homolog annotation: Hit_ID=Q5QMD9; Match level="QueryCoverage=88%, HitCoverage=99%, E-value=0.0, Identity=83%"; Hit description=Lipase -like protein
  Pfam annotation: Domain name=Abhydro_lipase; Domain location=3-57; Score=64.7; E_value=2.9e-16; Accession=PF04083.6; Description=ab -hydrolase associated lipase region
  Pfam annotation: Domain name=Abhydrolase_1; Domain location=71-397; Score=-9.0; E_value=0.039; Accession=PF00561.10; Description =alphabeta hydrolase fold
  Pfam module annotation: Pfam domain module=Abhydro_lipase::Abhydrolase _1; Domain location=3-57::71-397
MPKYRTTYLRYPFEAIKVVTSDGYVVLLERIPRRDSQKVVLLQHGILDSSMGWVSNGVVGSPAFAAYDQGYDVFLGNLRGLVSREHIDKSISSYKYWKYSVNEHGTKDMPAIIEEIHKIKISELGKSQPQSAEGTGDQNDKLKSLEVQASQEDSIEDQPYKLCAVCHSLGGAVMLMYVVTSRITQKPHRLSRLVLLSPAGFHEDSNVVFSMVEKLILFVGPVLAPLIPGLYIPTRFFRMLLNKLARDFHNYPALGGLVQTLMGYVVGGDSSNWVGVLGLPHYNMDDMPGVSFHVALHLAQIKRAKKFQMYDYGSSAANIEAYGTPEPLDLGAHYGLIDIPVDLVAGQRDRVISPSMVKKHYKLMRKSGVEVSYNEFEYAHLDFTFSHREELLSYVMSRLLLVTDPGKGRIKQTTVRLRRQKKVQSEIEESIECRAKEESDELAGHLE

SEQ ID NO: 74085 - protein, 79 aa, Zea mays
  Coding DNA Sequence Number=SeqID_32306
  Subcellular localization annotation: CTP_CleavageSite=50; ConfidenceScore=5.17e-01
MALSATVVCNATVNSEQCNCARRNQSRRQKAHQTVNKTCPVHHRTVRWPRCQKLQRSKPNGLVTWLAHRTVSGGAPDCS

SEQ ID NO: 74086 - protein, 87 aa, Zea mays
  Coding DNA Sequence Number=SeqID_32307
MAEAVASAGRLAMDSSTSVSPNQLCGTPWGFPWFRDCWSGVGDMGGSIWGHGKQAAGEIERLGMGSCAVAMLNHTLVYEPLVIAEKR

SEQ ID NO: 74087 - protein, 204 aa, Zea mays
  Coding DNA Sequence Number=SeqID_32308
  Homolog annotation: Hit_ID=Q1SD04; Match level="QueryCoverage=33%, HitCoverage=10%, E-value=4e-10, Identity=51%"; Hit description =Esterase/lipase/thioesterase; AB-hydrolase associated lipase region
MAGNLSQHSVGRVFLVGWKGNIVLLCSDNFIPSFEHSGVSSFNEFIHELSVDSDADSIADSVAGDDDHEEFVCPPSPLSQSSRLSHASSFGRHDRRLRRHIRYAVSWILWPLRFFVSLIFILFNAIKFRMDLHLAIEIFIESVFDIVHKAAHYILSPSEVWQNLFCWIQGSGHDTSSVVDVLTANVGSDNPVPTERKTVVIVIL

SEQ ID NO: 74088 - protein, 50 aa, Zea mays
  Coding DNA Sequence Number=SeqID_32309
MASSHGLGGAAVARPWERRRISAYPFSPGRFSIEPLLCLQINPPFMRVWF

SEQ ID NO: 74089 - protein, 405 aa, Zea mays
  Coding DNA Sequence Number=SeqID_32310
MAEVVVQKVCNDMPHWDDDVACPNMVMFKDLRMAPTSSTKLFDELSSWDDVATLEEIYPTELAMELQHGSDPHVLLQQHDQALFKVPMTSMSDAHGVFDAISSHVLWDDELPQGLQLHNCLLKLVAQGECMVGETDMNAELCDVVSWDEEVATLSKCMQSRPLTGGEEYLDSNELILDTNQIAVHVLNLIHVHDVPVFYHVFFDKIFDEGSDQEYEERHVVVSNADVRRLMTSKANTAHIHNSRPLFLDHYMINKGPTKLFLFQLLAEFIETMESRLARHKRDNMNFKLTEMEHQQHDLLAQFCQLLRNMVGKSCIIWVVKQVFTATTQVFNSIPPWISDINSGMYRVEAGCLFLGAVSSCLQGGFSPWIQITKTMLEATLTWKHGALDHGVCENHPVLHITATG

SEQ ID NO: 74090 - protein, 90 aa, Zea mays
  Coding DNA Sequence Number=SeqID_32311
MIPKALELMTLSGATQDSLELAPPLQAQDSPPDASMAGGGRQLEVGAWVATKGGAGVGFTTLQRRGGDQRRAAIRGGARGGRSAMAQRWG

SEQ ID NO: 74091 - protein, 137 aa, Zea mays
  Coding DNA Sequence Number=SeqID_32312
MALRGAALNKGAVVAAICVALVVCMVGKPAEGSRTCGIHRCISECPSKCNKKAATSCSGAGGADEGKCKINCGMGCKASCPTCDCGSECDRHCSSTPGPTYTACMSMVFAGCKDSCVKGCKGEKLGVIYGCWLKLAI

SEQ ID NO: 74092 - protein, 291 aa, Zea mays
  Coding DNA Sequence Number=SeqID_32313
MGRRETERKGGKTRGRQGNDGPSCDVVGPSPGSGEAEAPPRSRSSLSSEVEVESEPLGRARRRPSAKARAEPWGRARRSSSSSGAVAESEPWGRARRSSSSSRAEAESEPWGRARRSSSSSGAEAESEPWGRARRSSSSYGGEAESEPWGRARRSSSSSGAEAESEPWGRARRSSSSSGAEAESEPWGRARRSFLWRPRPDLAAVSLTLSSGTAVGAAQAALSSCQAGQWSGEAILALNAPAIRSVGVAIWPSLLLGEGWASGEPKLCADGGYQLRLGVLWVPLIMVPDSS

SEQ ID NO: 74093 - protein, 209 aa, Zea mays
  Coding DNA Sequence Number=SeqID_32314
  Gene Ontology: Cellular component=chloroplast envelope
  Homolog annotation: Hit_ID=Q9SJX7; Match level="QueryCoverage=86%, HitCoverage=37%, E-value=6e-11, Identity=28%"; Hit description =Expressed protein
  Pfam annotation: Domain name=DUF647; Domain location=1-209; Score= -45.8; E_value=5.1e-10; Accession=PF04884.5; Description=Protein of unknown function, DUF647
MTFQVIAKGEAQGMVSKFVGIGLGIALANHIGSSVPLALISFAGITAVHMYCNLKSYQSIQLRTLNPYRASLVFSEYLLSGQVPSVKEVNDEEPLFFNLSLGASRQSKILSAEAKDAADRICRRLQMGSKLSEIIESKEDACALFDLYKNEQYLLMDYKGKFCIVLKEGSSPEDMLKSLFHVNYLYWLERGNSAMSNMMVLMVAGLWMV

SEQ ID NO: 74094 - protein, 83 aa, Zea mays
  Coding DNA Sequence Number=SeqID_32315
MAGAVAPPSSASQESRKVLRAALRAVEAEVELLQPRLVRSNGRVVVEHVDDVPHRARGTVSPGAHRGAATTLLIGELRTGCGL

SEQ ID NO: 74095 - protein, 69 aa, Zea mays
  Coding DNA Sequence Number=SeqID_32316
  Homolog annotation: Hit_ID=Q2HRV5; Match level="QueryCoverage=68%, HitCoverage=9%, E-value=7e-17, Identity=81%"; Hit description=DNA repair metallo-beta-lactamase
  Pfam annotation: Domain name=DRMBL; Domain location=3-48; Score=7.2; E_value=0.0011; Accession=PF07522.4; Description=DNA repair metallo -beta-lactamase
MWTCVFEKRKQLQLQLKSSVPYSEHSSFTELRDFVMFLKPQKIIPTVNVGNATSRDKMQAHFREWLKSP

SEQ ID NO: 74096 - protein, 739 aa, Zea mays
  Coding DNA Sequence Number=SeqID_32317
  Gene Ontology: Mol. function=potassium ion transporter activity; Cellular component=membrane; Biological process=potassium ion transport
  Homolog annotation: Hit_ID=Q9AYN6; Match level="QueryCoverage=99%, HitCoverage=100%, E-value=0.0, Identity=72%"; Hit description=High -affinity potassium transporter
  Pfam annotation: Domain name=K_trans; Domain location=45-739; Score =1298.6; E_value=0; Accession=PF02705.7; Description=K+ potassium transporter
MSLEVEKPPETTKQLKRQDSLYGDAEKVSGFKHHGSEGGWPRLLQLAFQSIGIIYGDVGTSPLYAISSTFPDGIKDQDDLLGVLSLILYTLILIPMVKYVFIVLYADDNGDGGTFALYSLISRHSKVRLIPNQQAEDAMVSNYGIEAPSPELRVAQWLKQKLESSKAAKISLFIITILGTSMVMGDGTLTPSISVSGIREKVPSLTETQVVWISVPILFALFSVQRYGTDKVGYSFAPIITLWFFLIAGIGMYNLIVHEIGVLRAFNPMYIVDYFRRNGKDGWVSLGGVILCVTGTEGMYADLSHFNIKAIQISFSTVLLPSVALCYIGQTAYLRKFPESVADTFFRSIPELMFWPTFIIAILSAIIASQAMLSGAFAILSKALSLGCFPSVQVIHTSKSYEGQVYIPEVNFLMGLASIIVTITFRTTTEIGNAYGICVVTVFSITTHLTTIVMLLVWRKNFIIVLLFYVVFSSIELVYLSSILTKFIQGGYLPFCFSLVLMALMITWHYVHVMKYWYELDHVVPANEVTTLLEKHEVRRIPGVGLLYSDLVQGITPVFPRLVQRIPSVHAVFLFMSIKHLPIPHVAPVERFLFRQVGPREHRMFRCVARYGYCDKLEESGLFKGFLMESLKTFIQDEAAFKTNSTAGDTKELTDPKVSGHDLARWVEKEKQMIDKEMERGVVYLMGEANVIAGPESSAAKKIVVDYVYAFLRKNLTEGEKVLSIPKDQLLKVGITYEI

SEQ ID NO: 74097 - protein, 72 aa, Zea mays
  Coding DNA Sequence Number=SeqID_32318
MTLEEVLGKYLSHEMMGEDKKVEKKFEKKKFFNNKKKGEAHIDKEDSSNNDEGITTLAFNKTPSSPRATTCA

SEQ ID NO: 74098 - protein, 250 aa, Zea mays
  Coding DNA Sequence Number=SeqID_32319
  Gene Ontology: Cellular component=nucleus; Biological process =response to DNA damage stimulus
  Homolog annotation: Hit_ID=Q38961; Match level="QueryCoverage=87%, HitCoverage=51%, E-value=3e-36, Identity=35%"; Hit description=DNA cross-link repair protein SNM1
MATVDCPLPSPADLDDNGFPALPSSPAACSSGFAEDFYRSGTDWSSLRAPPPLGPPRRAPGVKERGGGSAVQSSLFQAWGIEKPRRDGRGAGDSSLVQRSLFQAWGIERPQREGLGAGDSSPSSSLSGSLLARKRRRGSTEEERVAAKKPLACPFYKKIPATCIQINECSYICPLELDTEYVIEGVTVTLLEANHCPGAALIHFRLSDGKTCLHTGDFRASKTMQSHPLLQRGRVNLVYLDTTYCNPKYK

SEQ ID NO: 74099 - protein, 50 aa, Zea mays
  Coding DNA Sequence Number=SeqID_32320
MAVRTGTPHLYEHSPILAEERPVEDVVVEALGAKATVVQLGLETLTVALI

SEQ ID NO: 74100 - protein, 78 aa, Zea mays
  Coding DNA Sequence Number=SeqID_32321
MACFITLCEAFMGIDPHWGCSNTSLACKCLWATATSRMLDRSTFKSEPDGKISTSRCPFPPPFDMKTFRLALMSYISQ

SEQ ID NO: 74101 - protein, 217 aa, Zea mays
  Coding DNA Sequence Number=SeqID_32322
  Subcellular localization annotation: CTP_CleavageSite=36; ConfidenceScore=5.24e-01
MTIALLIQPLKGTVWGGRRVDPAGRFASVGVARSTKVEAKGSVFTFATTQCTSKYANDARIRSDASFPAGHAPLRQAMGVRPTNQLETERRWETKPPVRVSSSRDLVPALDGRLASGSRLHPHPRPCPRCRPSPTIVLASSLQHLLSFSLHDVDRDGLAAEATRDSRMPRHSPPPRPLDLTQVTGTHFAFVVVCLGVCVRCCHCPRLHVRVAPLAKL

SEQ ID NO: 74102 - protein, 58 aa, Zea mays
  Coding DNA Sequence Number=SeqID_32323
MAILSFQLSSCVKDMSLTVGNCIDSTLSAETLFAVEVGEAQSTSIQACLAGDVGALRA

SEQ ID NO: 74103 - protein, 189 aa, Zea mays
  Coding DNA Sequence Number=SeqID_32324
  Gene Ontology: Mol. function=oxidoreductase activity; Cellular component=endoplasmic reticulum; Biological process=metabolic process
  Homolog annotation: Hit_ID=Q69X86; Match level="QueryCoverage=85%, HitCoverage=58%, E-value=3e-74, Identity=77%"; Hit description =Putative short chain dehydrogenase/reductase
  Pfam annotation: Domain name=adh_short; Domain location=67-189; Score= -32.9; E_value=0.00081; Accession=PF00106.15; Description=short chain dehydrogenase
MAGGGSIGVAGTKFHAGFHCGCVNLGIPAWRTAAFGLYGFNHFTKSGFLEHAKKFREEDMQIRLDGKNCLVTGANSGIGFATAEGLASHGATVYMVCRNKERGEAALNQIRSKTGNANVHLEVNNAGLLEHKHEITAEGLELNFAVNVAATYTLTELVMPSLEKAAPDARVITVASGGMYTEPLNKDLQ

SEQ ID NO: 74104 - protein, 33 aa, Zea mays
  Coding DNA Sequence Number=SeqID_32325
MSELRLKVLLPWGLKALSLYENAFTGKDSLIQS

SEQ ID NO: 74105 - protein, 80 aa, Zea mays
  Coding DNA Sequence Number=SeqID_32326
MSIYEAMKAITKTGVAEEEDVSEESVLDVEEEDSDLRPTKLSYIDIRESTIKPSDFDVIKKLGYIDEKDGVRFDGNETTP

SEQ ID NO: 74106 - protein, 219 aa, Zea mays
  Coding DNA Sequence Number=SeqID_32327
MVVNDHNVVGGRQLNGVERNFGDTVDDNTLQMLPRDEMKPERCRDDGHGRGVPWTDDNVVRWRGDSCCLVADSAPGRPQHAAPGNPTALATRARGIADDWEGEEQLAAHLGVLPRVVDLPIEPPAVVKPRTRSPLSQNGMGSMRCGNRRAQIAGFHRRSRGREDRGAEVRMEGSWRGRENGGNNGEMQRREDPWEAGLRARQSRGRSHDEVVDAHIRAL

SEQ ID NO: 74107 - protein, 118 aa, Zea mays
  Coding DNA Sequence Number=SeqID_32328
  Gene Ontology: Mol. function=small conjugating protein ligase activity; Biological process=protein modification process
  Homolog annotation: Hit_ID=Q6I602; Match level="QueryCoverage=74%, HitCoverage=17%, E-value=3e-31, Identity=70%"; Hit description =Putative ubiquitin-conjugating enzyme
MGSSLAGRRACWLLQLQTCSRTELTCRRANFEDFVAGHFRQHGRNILVACRAYLDGAQVGCLSGDGVQDVDEGDTSCSVRFKQSLKKLVEELLTEFTVKGADCGKFLTEEKAKRSSGA

SEQ ID NO: 74108 - protein, 133 aa, Zea mays
  Coding DNA Sequence Number=SeqID_32329
MKPRRSASQAGVQGQANRGLREPKGISAENSKQMEAPDRGGGQMMHRAPKLFDDVVLEVDSMTEPARRGADPLPALADGPGRRSAARPGRLSYRPALYYQFIIHIAFLDGSTGLPEDLMLNLLLYLYIWNVGG

SEQ ID NO: 74109 - protein, 69 aa, Zea mays
  Coding DNA Sequence Number=SeqID_32330
MGVPALCARWRAFNALQSSPIHDEIELRAPVLLVAAPSPCGSVATLQTQAKTKCSNRKRPESIITYQVL

SEQ ID NO: 74110 - protein, 76 aa, Zea mays
  Coding DNA Sequence Number=SeqID_32331
  Subcellular localization annotation: CTP_CleavageSite=57; ConfidenceScore=5.03e-01
MAYKPAKSLLRRFPRNHLLPAQYVGIRWRSLPQRLVAISSATRRLALSKELLVTQGCAMYSEDQKFLGEQQIDVSS

SEQ ID NO: 74111 - protein, 275 aa, Zea mays
  Coding DNA Sequence Number=SeqID_32332
  Gene Ontology: Mol. function=protein binding; Cellular component =nucleus; Biological process=regulation of progression through cell cycle
  Homolog annotation: Hit_ID=P93411; Match level="QueryCoverage=99%, HitCoverage=100%, E-value=1e-121, Identity=79%"; Hit description =G1/S-specific cyclin C-type
  Pfam annotation: Domain name=Cyclin_N; Domain location=4-144; Score =47.9; E_value=3.5e-11; Accession=PF00134.13; Description=Cyclin, N -terminal domain
MAANFWTSSHCKQLLDPEDVDLVPAADRERGITPEEFRLIKIHMSFHIWRLAQQVKVRQRVVATAIAYFRRVYTRKSMSDYDPRLVAPTCLYLASKVEESTVQARLLVFYIKKMCGSDDKYRFEIKDILEMEMKLLEALDYYLVVFHPYRPLLHFHLFVLAELQVDRCPICRLLQDAGITDLTQFAWGLVNDTYKMDLILIYPPYMIALACIYIASVLKDKDTTAWFEELRVDMNIVKNISMEILDFYDTYKIDPQRGIPEDKISPVMNKLPAKA

SEQ ID NO: 74112 - protein, 66 aa, Zea mays
  Coding DNA Sequence Number=SeqID_32333
MEAMTGRLKEVERVQQQLLMQSELVAVVAEQAATERNDLYRKLEETGREAGICELAALGTSSVAYD

SEQ ID NO: 74113 - protein, 617 aa, Zea mays
  Coding DNA Sequence Number=SeqID_32334
  Gene Ontology: Mol. function=metal ion binding; Cellular component =nucleus; Biological process=regulation of transcription, DNA -dependent
  Homolog annotation: Hit_ID=Q6Z2D6; Match level="QueryCoverage=92%, HitCoverage=100%, E-value=0.0, Identity=62%"; Hit description =Putative coiled-coil protein
  Subcellular localization annotation: CTP_CleavageSite=39; ConfidenceScore=5.07e-01
MSSTAPFSAPPSSTATTLAVYLSTNPAEIDLHFVRERVTAGIVMDPEKQNEMSLMDKRQLVYEVARWPQGAVEILKCWTRRELLELICVELGKERKYTNVPKAKMIAYLLKLVSRKSGKNGQLKDDNANVMLLEQDNKDETQMKESEEQEQSRPLKTANSDSSIRREAHACCSVNKKAGIVNNGCNKLDCSFYCVSCGKINWLMRSLQKQLAIAREARRVDVLCERLSLSHKMVKGSERYKEITSIISSAAKTLEKEVGGALDQVSAITGRGIVNRLTCGAEVQKLCSSALEIVDSTVDSILEFESNNSPKLLGPQPQILFDEITPFSVVIVLNYQDSIGKEQVDGSKVWHRSAKVCNYSSEPTCHILRPNTRSLVSGLSPSTEYFFKVLPFSSVQGFTEWEAKCSTRSLDHGSSQCSTQNSESMCLKVDPMQHQKKDLNVQNHQRTIQYDSPKGSTNSSENNLLCDRYSKRAKVARLDGASDNDESQLPPTSEVLPFASSNYSPSEAPSKPDLLIGTPDSASKNYVEQQYEYCVKVVRWLEHEGHMDNDFRVKFLTWFSLKATAQDRRIVGALVDVLIGDPASLVAQLVDAFKDIIYTKEKPFQTQQKDARCKIWH

SEQ ID NO: 74114 - protein, 86 aa, Zea mays
  Coding DNA Sequence Number=SeqID_32335
MAPPHGLAAPLQRGSVGEDRSATEEESLFNEPREDKPTDSGSSHKKKDGKKKRRIKKIIYYDSDASSSSPRDDNDDDDSSSKKKTG

SEQ ID NO: 74115 - protein, 134 aa, Zea mays
  Coding DNA Sequence Number=SeqID_32336
MAFFYLELMCTRSSARERGERARRGRANDEARLGRGSGRRRGSTAFGAGMAPVDGPSKASVSGEERKSWASSDAGRSRGVAWSFIEREGERKGRQGRGRGADRFNSIDAIDGGGFSREKMGGEGGEEMAVFRRG

SEQ ID NO: 74116 - protein, 51 aa, Zea mays
  Coding DNA Sequence Number=SeqID_32337
MVKVTCQADDQALVAFGYTRSNGKYSVAKWATCPRGRACPRSAGPNSPQPS

SEQ ID NO: 74117 - protein, 471 aa, Zea mays
  Coding DNA Sequence Number=SeqID_32338
  Gene Ontology: Mol. function=transcription factor activity; Cellular component=nucleus; Biological process=regulation of transcription, DNA-dependent
  Homolog annotation: Hit_ID=Q8LGQ3; Match level="QueryCoverage=84%, HitCoverage=67%, E-value=1e-135, Identity=65%"; Hit description =Ovule development aintegumenta-like protein BNM3
  Pfam annotation: Domain name=AP2; Domain location=181-246; Score =124.7; E_value=2.7e-34; Accession=PF00847.10; Description=AP2 domain
  Pfam annotation: Domain name=AP2; Domain location=82-152; Score =112.6; E_value=1.1e-30; Accession=PF00847.10; Description=AP2 domain
  Pfam module annotation: Pfam domain module=AP2::AP2; Domain location =181-246::82-152
MAGTTQGAAGMPLLAGERARAPESVSTSAQGGAVVVTAPKEDSGGSGVAGALVAVSTDTGGSGGASADNTARKTVDTFGQRTSIYRGVTRHRWTGRYEAHLWDNSCRREGQTRKGRQGGYDKEEKAARAYDLAALKYWGATTTTNFPVSNYEKELEDMKHMTRQEFVASLRRKSSGFSRGASIYRGVTRHHQHGRWQARIGRVAGNKDLYLGTFSTQEEAAEAYDIAAIKFRGLNAVTNFDMSRYDVKSILDSSALPIGSAAKRLKEAEAAASAQHHHAGVVSYDVGRIASQLGDGGALAAAYGAHYHGAAWPTIAFQPGAATTGLYHPYAQQPMRGGGWCKQEQDHAVIAAAHSLQDLHHLNLGAAGAHDFFSAGQQAAAAAAMHGLASIDSASLEHSTGSNSVVYNGGVGDSNGASAVGSGGGYMMPMSAAGATTNIGNAAAAAASSNDNIAADVGHGGAQLFSVWNDT

SEQ ID NO: 74118 - protein, 90 aa, Zea mays
  Coding DNA Sequence Number=SeqID_32339
MDMERATAPRTACSETVLCLESPHVAFTDGALVWHVGRIFFVSHGHQHPEHDLFSLTTILQIKCRMTQPSAAEPQTPVVPWHKTSDFASV

SEQ ID NO: 74119 - protein, 112 aa, Zea mays
  Coding DNA Sequence Number=SeqID_32340
MCSSAEVVSSATATARHRSEVVGCGEAAVEISHGGHLDAGVPEHLEAIMVESTGRQVAAKVYVLLRCSATHLRPYGVETISIEHICGRKNSWMYFLEEIARNAARKEKWSST

SEQ ID NO: 74120 - protein, 206 aa, Zea mays
  Coding DNA Sequence Number=SeqID_32341
  Homolog annotation: Hit_ID=UPI0000DA43ED; Match level="QueryCoverage =45%, HitCoverage=94%, E-value=3e-11, Identity=36%"; Hit description =PREDICTED: similar to keratinocytes proline-rich protein
MADLRSRGSGGIRHRRGMALADAHPGEPTRTGHGSGRRAAGRFRHGQKGSTGSDSASAPEDDELRLARPQGSDSASASEDDELRLARPQGSDSASAPEDDELRLARPQGSDSASAPEDDELRLARPQGSDSASAPEDDELHLARPQGSDSALASDDGLCLARPEARTRPRPRKTDSTSTSEEPPPRPTQGSDRPRHRGGHHYPTPS

SEQ ID NO: 74121 - protein, 89 aa, Zea mays
  Coding DNA Sequence Number=SeqID_32342
  Subcellular localization annotation: CTP_CleavageSite=39; ConfidenceScore=5.12e-01
ATIGLNHSAVIPVVVSYRATIRKVWSGASPGGVGGVPPLAGAKAHVKRRELPLLRPSSTWPCRHHRRRGDVLGVSTGEDCHTGGEGVAN

SEQ ID NO: 74122 - protein, 57 aa, Zea mays
  Coding DNA Sequence Number=SeqID_32343
MLQQSKQLQQCRLAANRTRPEFPRSDFGIMMSVLRSLGRLLEITTKTSMDIVTVRKY

SEQ ID NO: 74123 - protein, 413 aa, Zea mays
  Coding DNA Sequence Number=SeqID_32344
  Gene Ontology: Mol. function=protein serine/threonine kinase activity; Cellular component=calcium- and calmodulin-dependent protein kinase complex; Biological process=protein amino acid phosphorylation
  Homolog annotation: Hit_ID=Q5GAP1; Match level="QueryCoverage=98%, HitCoverage=67%, E-value=1e-174, Identity=77%"; Hit description =Putative CDPK-related protein kinase
  Pfam annotation: Domain name=Pkinase; Domain location=148-408; Score =295.2; E_value=1.2e-85; Accession=PF00069.15; Description=Protein kinase domain
  Pfam annotation: Domain name=Pkinase_Tyr; Domain location=148-408; Score=22.9; E_value=7.1e-14; Accession=PF07714.7; Description =Protein tyrosine kinase
  Pfam module annotation: Pfam domain module=Pkinase::Pkinase_Tyr; Domain location=148-408::148-408
  Subcellular localization annotation: CTP_CleavageSite=19; ConfidenceScore=5.22e-01
MGGCHAKPLTHDADRSPPHAAPATPPPGSATPATPGPGKKHWAVSPFFAFSTPSPSPAHHLFGGSAASPRKSPAPPGSAPTTPARRLLRLPFPPPSPAKHIRAALARRHGPPRPSIPEEGGGEGEGGGGGGRGLDKGFGFNKGFAAKYDLGDEVGRGHFGYTCAATVKKGARKGESVAVKVIPKAKMTTSIAIEDVRREVKILKALAGNKNLVQFYDAYEDNDNVYIVMELCEGGELLDRILSRGGKYSEDDAKAVLVQILNVVAFCHIQGVVHRDLKPENFLFTSKDDDSHLKAIDFGLSDFVKPDERLNDIVGSAYYVAPEVLHRCYSTEADVWSIGVIAYILLCGSRPFWARTESGIFRSVLKADPSYNEAPWPSLTPEAMDFVKRLLCKDPRRRMTAAQALSMFPFILS

SEQ ID NO: 74124 - protein, 300 aa, Zea mays
  Coding DNA Sequence Number=SeqID_32345
  Gene Ontology: Mol. function=transcription regulator activity; Cellular component=nucleus; Biological process=regulation of transcription
  Homolog annotation: Hit_ID=Q10FD6; Match level="QueryCoverage=89%, HitCoverage=79%, E-value=6e-37, Identity=38%"; Hit description=Helix- loop-helix DNA-binding domain containing protein, expressed
  Pfam annotation: Domain name=HLH; Domain location=150-199; Score =53.5; E_value=7e-13; Accession=PF00010.16; Description=Helix-loop -helix DNA-binding domain
MDMEDSGQFMQWAMATLQHDEDQAVDYPIDDGRGGATFPSLRALREASSQAAEMIQEPLAAANSRCGGDGGTAAAGNNISGTAPRRSSSGSAVIQPLRWNFGAGAAAPPGRDGVPVPAEAAATGSLLPDLAYGPPPTRKQAVLKSVGSIYAQDHIIAERKRREKINQRFIELSTVIPGLKKMDKATILSDATRYVRDLQEKIKAHEDGGGSNDRGIVESWVLVKKPCVAAPDEDAGSSPSWDSSGTTAPSPATNPLPEIEARFLNKNVTVDEGFTVTAEEIVGRLKTSACINAPAKPLLQ

SEQ ID NO: 74125 - protein, 151 aa, Zea mays
  Coding DNA Sequence Number=SeqID_32346
MAGAGDLTRAKEGTRRWRLAGGPRHDGAVPMLMITGGDGTSFGSGGSCQGRRASLAGEKFGCRRPGNGEALAVEGGEALAARTRWAVAQPRGCATGKGADGWGHREEALPESELASQYMSGPLELRDPRLAVAFLILLNHSDILFGFEQNI

SEQ ID NO: 74126 - protein, 211 aa, Zea mays
  Coding DNA Sequence Number=SeqID_32347
  Homolog annotation: Hit_ID=Q9LWU9; Match level="QueryCoverage=29%, HitCoverage=10%, E-value=2e-12, Identity=56%"; Hit description =Putative gibberellin response modulator
RFERHETFAGWRWRMQEGRFQNTGIGDREALQGCMIARMFAPGNYSMQALLSYGTNAGAGVLILYCSFSVQCFKLSSSLTLWRFLDNSLLSDFQSRSPAASLLPECATAPSAARPPQHPDTAVGSHSPSHSSRRAPLTQGDGFTTDSGVQILSCPSPWGSATRRHDQAPSGGAAGVIGQLHRSIFLNDQQINADQQINAAPQTLRYSVVST

SEQ ID NO: 74127 - protein, 237 aa, Zea mays
  Coding DNA Sequence Number=SeqID_32348
  Gene Ontology: Mol. function=nucleic acid binding; Cellular component= nucleus; Biological process=chromatin modification
  Homolog annotation: Hit_ID=Q7G8Y3; Match level="QueryCoverage=81%, HitCoverage=18%, E-value=4e-87, Identity=78%"; Hit description =Probable chromatin remodelling complex ATPase chain
  Pfam annotation: Domain name=HAND; Domain location=2-93; Score=38.2; E_value=1.1e-09; Accession=PF09110.1; Description=HAND
  Pfam annotation: Domain name=Myb_DNA-binding; Domain location=94-140; Score=21.5; E_value=0.003; Accession=PF00249.21; Description=Myb-like DNA-binding domain
  Pfam annotation: Domain name=SLIDE; Domain location=135-227; Score =3.0; E_value=1.4e-05; Accession=PF09111.1; Description=SLIDE
  Pfam module annotation: Pfam domain module=HAND::Myb_DNA -binding::SLIDE; Domain location=2-93::94-140::135-227
YSESDYFKQALRQGAPAKPREPRIPRMPHLHDFQFFNNQRLNELYEKEVRYLMKILMQQANQKKDTIDGEDEDQLEPLTAEEQEEKEQLLEEGFASWTRRDFNTFIRACEKYGRNDIKSISSEMEGKTEEEVQRYARVFKERYKELSARISRKDEIMKAIGKKLDRYKNPWLELKIQYGQNKGKFYNEECDRFMNMTPTKRAALKNSEGENTPPSSFKRRRQSLMDDYVGSGKRKRG

SEQ ID NO: 74128 - protein, 297 aa, Zea mays
  Coding DNA Sequence Number=SeqID_32349
  Homolog annotation: Hit_ID=Q6NTV6; Match level="QueryCoverage=63%, HitCoverage=14%, E-value=1e-07, Identity=30%"; Hit description =Inverted formin 2
MQAACNCTKGMHLFDFDASSMEAQAHTSWTGKGDTPKGILLCEGSGPPSPPTDKRFEGWPLGRENNTACAAPTAVPPVTVRLTAAKSGLRRHRMLRLARPQGSDSTSTSDDGLRLARPQGSDSTSTSDDGLRLARPQGSDSTSTSDDGLRLARPQGSDSTSTSDDGLCLAQPQGSDSSSTSDDGLRLARPQGSDSTSTSDDGLRLARPQGSDSTSTSDDGLRLARPQGSDSTSTSDDGLRLARPQGSDSTSTLDDGLCLARPQGSDSTSTSDEPPPRPTLGSDRPRRRGVHHYPTPS

SEQ ID NO: 74129 - protein, 48 aa, Zea mays
  Coding DNA Sequence Number=SeqID_32350
MVAAEARRRPARVARYSWARSWPEEPEPQAHFAAATSRRANRSCSTDL

SEQ ID NO: 74130 - protein, 352 aa, Zea mays
  Coding DNA Sequence Number=SeqID_32351
  Gene Ontology: Mol. function=RNA-directed DNA polymerase activity; Cellular component=mitochondrion; Biological process=RNA-dependent DNA replication
  Homolog annotation: Hit_ID=UPI00004C1731; Match level="QueryCoverage =99%, HitCoverage=26%, E-value=1e-91, Identity=87%"; Hit description =UPI00004C1731 related cluster
  Pfam annotation: Domain name=RnaseH; Domain location=1-123; Score= -15.3; E_value=0.0015; Accession=PF00075.14; Description=RNase H
  Pfam annotation: Domain name=rve; Domain location=155-318; Score =78.5; E_value=2.1e-20; Accession=PF00665.16; Description=Integrase core domain
  Pfam module annotation: Pfam domain module=RnaseH::rve; Domain location=1-123::155-318
MFFDGSLMKTGADAGLLFISPLGKHLRYVPRLHFPASNNVAEYEALVNGLRIAIELGVRRHDTRGDSQLVIDQVMKNSHYRDPKMEAYCDEVRRLEDKFYGLELNHIARRYNETADELAKIASGRTTVPPDVFSRDLHQPSVKTDDTPEPEEALAQPEAPSALEGEALRAEEERNGKAPGGYTHLLVAIDKFSKWIEVRPLNNIRSKQAVAFFTNIIHRFGVLNSIITDNGTQFTGRKFLDFCEDHHIRVDWAAVAHPMTNGQVERANDMILHGLKPRIYNDLNKFGRRWMKELPSVVWSLRTTPSQATGFTLFFLVYGAEDILPTDLEYGSPRTRTYDDRSNQSSREDSLD

SEQ ID NO: 74131 - protein, 116 aa, Zea mays
  Coding DNA Sequence Number=SeqID_32352
  Subcellular localization annotation: CTP_CleavageSite=58; ConfidenceScore=5.52e-01
MELSLPSQASSLPPPSSPSLLTFASCSLDHAGLPRRNLASVNATAPEPAQHPVKNPCPCAAAPPLAVVPRRSSSTSFTIRGTSPEICPNTHRRSRRSLPVEPRSSTFIPAHERTQG

SEQ ID NO: 74132 - protein, 474 aa, Zea mays
  Coding DNA Sequence Number=SeqID_32353
  Gene Ontology: Mol. function=phosphoribosylamine-glycine ligase activity; Cellular component=chloroplast; Biological process=purine base biosynthetic process
  Homolog annotation: Hit_ID=Q6YZX5; Match level="QueryCoverage=98%, HitCoverage=88%, E-value=0.0, Identity=78%"; Hit description =Putative glycinamide ribonucleotide synthetase
  Pfam annotation: Domain name=ATP-grasp_3; Domain location=194-382; Score=-37.9; E_value=0.0045; Accession=PF02655.5; Description=ATP -grasp domain
  Pfam annotation: Domain name=Dala_Dala_lig_C; Domain location=191 -378; Score=-114.5; E_value=0.036; Accession=PF07478.3; Description=D- ala D-ala ligase C-terminus
  Pfam annotation: Domain name=GARS_A; Domain location=190-384; Score =430.2; E_value=2.8e-126; Accession=PF01071.10; Description =Phosphoribosylglycinamide synthetase,
  Pfam annotation: Domain name=GARS_C; Domain location=418-467; Score= -1.6; E_value=1.1e-05; Accession=PF02843.7; Description =Phosphoribosylglycinamide synthetase, C domain
  Pfam annotation: Domain name=GARS_N; Domain location=87-189; Score =180.6; E_value=3.9e-51; Accession=PF02844.6; Description =Phosphoribosylglycinamide synthetase, N domain
  Pfam module annotation: Pfam domain module=ATP-grasp_3::Dala_Dala_lig_ C::GARS_A::GARS_C::GARS_N; Domain location=194-382::191-378::190 -384::418-467::87-189
  Subcellular localization annotation: CTP_CleavageSite=78; ConfidenceScore=5.52e-01
MACAAYSIRSPLKLAVRHGSDVLSSNNLCNGFKSSVSYLNSQRWSSNCSAVTMRHVASHCHSIVKTPAMWPSKASATDAATASDERITVLVIGGGGREHALCYALNHSPSCAAVLCAPGNAGIAQSRDATCIPDLDISSSDDVISFCRKRGVGMVVVGPEAPLVAGLANDLVKVGIPTFGPSSEAAALEGSKDFMKKLCDKYNIPTAKYHTFTDAVEAKKYVKNEGAPIVVKADGLAAGKGVVVAMTLDEALEAIDSMLVEGSFGSAGSRVIIEEFLEGEEASFFALVDGENALPLESAQDHKRVGDGDVGPNTGGMGAYSPAPIVTDELKRIVMESIIIPTVKGMAAEGCKFVGVLYAGLMIEKKSGLPKLIEYNVRFGDPECQVLMMRLESDLAQVLLSACKGELSNVSLTWSPEMAMVVVMASQGYPGSYKKGTVIKNVDKAERVSPAVKIFHAGTAVDGDGNLCCPLGGE

SEQ ID NO: 74133 - protein, 54 aa, Zea mays
  Coding DNA Sequence Number=SeqID_32354
MEPYSFDHRSTPCTNQLKCNPGTAALGPLTAVLRRRYAKAAPKCTALAPDSGYA

SEQ ID NO: 74134 - protein, 166 aa, Zea mays
  Coding DNA Sequence Number=SeqID_32355
MQWLSTSSQESGRGRSYHHSMPTLPRLLPGIPPILAKKTQNETFFTIAVAFGGMESCHQCPEAHRHWITTKAKRIPPLAPEEDLESKDILIRQLQNELLGSYRSLELQTVESWEALIFLTVVLGKFHESCSFVDTAKLNMQHHCQEIEKEIGSAKRHLEEQSCIII

SEQ ID NO: 74135 - protein, 269 aa, Zea mays
  Coding DNA Sequence Number=SeqID_32356
MAKYFEKYERICEVISPARLHVSCPAWLGGGDDEDPPCPFRQVKGKIVYLEQQEGIKKRRLYRAARAALAAAANQAKQGGQLRISSDQIAYRVRRLASRTRSSTALSTSSDPVSTPPPTSTAPAALESSTTPTVSTTSTTPASTAPAFAPPIPPPRFREHDKTEVRPLATDPCLLDLQRAIVAQRDPTVAPLFSTRTQESFFRVQLSAQIALRAHRFLDLYAFLSVASVESEGHISYLPGLHSLLTFGGKYIEEWVRVFYATVWIYPNH

SEQ ID NO: 74136 - protein, 756 aa, Zea mays
  Coding DNA Sequence Number=SeqID_32357
  Gene Ontology: Mol. function=transferase activity
  Homolog annotation: Hit_ID=Q53WK1; Match level="QueryCoverage=99%, HitCoverage=99%, E-value=0.0, Identity=79%"; Hit description =Putative glycosyltransferase
  Pfam annotation: Domain name=EXTL2; Domain location=510-754; Score =411.9; E_value=9.1e-121; Accession=PF09258.1; Description=EXTL2, alpha-1,4-N-acetylhexosaminyltra
  Subcellular localization annotation: CTP_CleavageSite=9; ConfidenceScore=5.23e-01
MRPPSSGVRTAAARPPAASFLLATAATAALVGGFYFWLVVSSFRLPNAYAVGCRPDGEGSWAVGMFYGSSPLAFRPIELVRRRAALTAQLKNSSFRASLWCEGRSNGNSSAWPVANPVLTCGTATEAGYPSNFVADPFLYVEGDTLFIFFETKTTTSMQGDIGVARSFDQGATWEFLGIALDEAWHLSYPFVFKYENEIYMMPEGNKKKELRLYRATKFPLEWTLEKVLVNKPLIDASLVQFEGYWWLFASDFTRYGVEKNAELEIWYSNSPLGPWTEHKKNPIYKSDKSLGARNGGRLFIFEGSLYRPGQDCSGTYGRMVKLHKVEKLSKEEYKEVPVNLGIEEPKKGRNAWNGMRYHHMDAQQLASGGWIAVMDGDRVPSGDSTRRSLIGYLAFLLASALVVFVGFMKGAISCYVPPSLWVPLTRRTELSRIFYVHRFNQKVRRYSTSISRYISAAKTKLSEKTWSNVLFFCVVALFGAINVCIAVHFLCGGNGAEEAYTYQGQHSQFTMITMTYEARLWNLKVFIEHYSRCESVREIVVVWNKGNPPSSDAFDSTVPVRIRVEETNSLNNRFRVDPLIKTRAVLELDDDIMMTCTDLEKGFRVWREHPERMVGFYPRMIDGNPMQYRNERYARGKNGYNLILTGAAFMDKEFAFKTYWSEKAREGRDYVHKNFNCEDLLMNFLYANASSTTRTVEYVHPAWAIDTSKLSSVAISRDTQKHYDIRTHCLANFSSIYGPLPQKWEFGMREDRWDK

SEQ ID NO: 74137 - protein, 65 aa, Zea mays
  Coding DNA Sequence Number=SeqID_32358
MQHGFRFPNLSPSQNSRLYEDGGLPGSRDSLSGGKFDDRARPASEERVTTGTRCQLSTAGTKVEV

SEQ ID NO: 74138 - protein, 85 aa, Zea mays
  Coding DNA Sequence Number=SeqID_32359
  Subcellular localization annotation: CTP_CleavageSite=21; ConfidenceScore=5.40e-01
MVVRIATTAQEKMKSWKETSRSSKTTTSSRRGLAATPSRLPVKAAFIYVSFSHFDLLWLILGTLHGSMSSPSYPPALLSVRFAVL

SEQ ID NO: 74139 - protein, 59 aa, Zea mays
  Coding DNA Sequence Number=SeqID_32360
MERLRTREGVVPSSRRRNFPPPAPTLYLTAREGVVVTLIPEVRSYQPRLDSRSTSRRPM

SEQ ID NO: 74140 - protein, 60 aa, Zea mays
  Coding DNA Sequence Number=SeqID_32361
MEKMLPKVVLSVTLLTEIGSSVIAGLSQVRAPTITYLSRYEFAGARFSAVRRRGPQVVKN

SEQ ID NO: 74141 - protein, 322 aa, Zea mays
  Coding DNA Sequence Number=SeqID_32362
  Homolog annotation: Hit_ID=Q10G25; Match level="QueryCoverage=67%, HitCoverage=46%, E-value=2e-33, Identity=38%"; Hit description =Expressed protein
  Pfam annotation: Domain name=DUF860; Domain location=16-263; Score =139.3; E_value=1e-38; Accession=PF05898.4; Description=Plant specific of unknown function (DUF860)
  Subcellular localization annotation: CTP_CleavageSite=63; ConfidenceScore=5.08e-01
MQKVRLKWVKKGAGSPDRAHHLNPRVLPAARPPLAPPWSLPLASVLPLRFDLGLPFNFAAAFPASHPGVFAVANNRISLRSTSGLPEDIAVSSLQRRHAAAIDSATYRALSRPPSSSSAPLAFPMRFPRGYGGMKKVKAWMDEFHRLPYISPYDDASGIDPESDIYEKRNIGLLHELLGLTVHKMVRRNAIRLLREELGLPHKFTRLFTRYPGVFYLSLKCKTTTVVLREGYERGKLVEQHPLAAVRDKVHYVMRTGVLYRGKGLSKLVLDEDVTEEEGALNGEEFEGEGMDGDADVECFRMEIVDDDGSADDVDDEGYSDG

SEQ ID NO: 74142 - protein, 170 aa, Zea mays
  Coding DNA Sequence Number=SeqID_32363
  Gene Ontology: Cellular component=cytoskeleton; Biological process =phagocytosis
  Homolog annotation: Hit_ID=O80516; Match level="QueryCoverage=81%, HitCoverage=55%, E-value=8e-30, Identity=52%"; Hit description =Expressed protein
  Pfam annotation: Domain name=ELMO_CED12; Domain location=77-167; Score=22.8; E_value=5.3e-06; Accession=PF04727.4; Description =ELMOCED-12 family
MEQNAGSFLAVRRLSGGAIHHHRHHSSPEAHGGYGFFSPPFLVRPQLRSWACPLRGSEECLNRLQNRIEVQYDGSNLEHQKALEALWRSSFPGTELLGLVSDQWKEMGWQGKDPSTDFRGGGFISLENLLYFSRNYPVSTNYLTQLLAVIHRKNSVMLDCASDVALIDIH

SEQ ID NO: 74143 - protein, 224 aa, Zea mays
  Coding DNA Sequence Number=SeqID_32364
  Subcellular localization annotation: CTP_CleavageSite=37; ConfidenceScore=5.21e-01
MSGAPEDSNANSPPSGFSRSNSAIIHRTVRCTPDSVRCAKEERPQELAGFGNLQRLVRYNSPDMSGVHRTVRCNFGATAIRRQRLPATQLMRAQRAQKSGAPILAHRTRNSACPVCTGHPGGPTSQELQRSEFNGIDDVAGAPDMSGVHRTVRCAIEQTAPPTVKFGGARVLDHAVTPLGLQGTHLSTSLLGLGTLAPGALRPNVPVTQTNEHAYRVLDAVCNA

SEQ ID NO: 74144 - protein, 249 aa, Zea mays
  Coding DNA Sequence Number=SeqID_32365
  Homolog annotation: Hit_ID=Q6QP51; Match level="QueryCoverage=20%, HitCoverage=23%, E-value=3e-10, Identity=62%"; Hit description =Putative growth-regulating factor 1
  Subcellular localization annotation: CTP_CleavageSite=28; ConfidenceScore=5.04e-01
MQAACNRAKWARPSDFQRTRHGGPRPTRHATGTPVATCKQLHRHSHHCRASSTAEPVLQLEATLRTTQQCQPGATVNTAKNGPAVMAVAGGQEQRSRCQPISRPVRGQRENPLSRREDGAPAFRSSNGSRTRNGRPANYSPRRINSAAGQAAPLAGEGPGKGDTPKRILLHEGNRLRASLLIRGSKAGPSEGFNSRLRARGLHTHYWSEVRGPAPRKGSTAASGHSGSAPTTDQGFIGWPSKGSQPPQT

SEQ ID NO: 74145 - protein, 221 aa, Zea mays
  Coding DNA Sequence Number=SeqID_32366
  Subcellular localization annotation: CTP_CleavageSite=37; ConfidenceScore=5.38e-01
MALLQLLLSLLIVSCAAQSPRLHSRRQQSPRLGLRPRPQHQQKQPWRHRPLLRRQLQLPRRSWAATLAPVSSPPLAAAAPPASATPPTTPPSATQTQPPVASPPTAMPPAGGAPPGHAPSSDGSDATSRRPRHASRRPTGHGARAGPRVSGSNSKRRPDPVADRSPRPVAHNRGTGPDPVSRAGAAQLGVGEPVSVAWDPLSPQDESAAPGSRTAVDALVS

SEQ ID NO: 74146 - protein, 159 aa, Zea mays
  Coding DNA Sequence Number=SeqID_32367
  Gene Ontology: Mol. function=protein kinase activity; Biological process=protein amino acid phosphorylation
  Homolog annotation: Hit_ID=Q10NJ0; Match level="QueryCoverage=83%, HitCoverage=18%, E-value=2e-45, Identity=70%"; Hit description =Protein kinase domain containing protein, expressed
MRDSQGVYPEDFPIIDSLEFVDQEYVFVSGPHPEGSSSSTNASQQLNLPAKYDNLSVSPPKLTFLSAPKPINGLPINRQQSAGTGSFDSHYSPASVTSQGSADISDAMDQPPTDYLTRIRLLEQYASAIAGLVRDEVIFYLLGGTQILCFPYVIFSLSH

SEQ ID NO: 74147 - protein, 64 aa, Zea mays
  Coding DNA Sequence Number=SeqID_32368
  Gene Ontology: Cellular component=integral to membrane
  Homolog annotation: Hit_ID=Q5JMG2; Match level="QueryCoverage=76%, HitCoverage=16%, E-value=2e-13, Identity=74%"; Hit description =Rhomboid family protein-like
GASAAVNATMLLQIFLYPKGLVYIYFVIPVPAALMGAGLIGADLVRLKRTTNWQQQLTGPTAYL

SEQ ID NO: 74148 - protein, 254 aa, Zea mays
  Coding DNA Sequence Number=SeqID_32369
  Homolog annotation: Hit_ID=Q5JMG2; Match level="QueryCoverage=15%, HitCoverage=12%, E-value=2e-09, Identity=69%"; Hit description =Rhomboid family protein-like
  Subcellular localization annotation: CTP_CleavageSite=45; ConfidenceScore=5.27e-01
MTSLKPRLFKTLVTTHNGKESGGYRSRLVPTRSWKRNLHPGTPARAGGGGGRSRLTELFELARRIQHAEEAAAVPVPRRAARPPRGPNTQIPTPAPPPPLPALPLRAHIRIPFLLPVGPPHMESPLRLYRDLSLTEDRRGRRSGRADRRVPVVGHRARRPLSRSLLAAAVAQGLGAAVLAFPFPPRRDLVRFIIGAILLGNCCSHFVILCSGVCGRASWMESADGAVWMLIGANVAVFLLWRVADPGFMRKHFM

SEQ ID NO: 74149 - protein, 80 aa, Zea mays
  Coding DNA Sequence Number=SeqID_32370
MCTIREGVKARIVIDKGEKCNQGQGRCSRQNLQGVKEGGGVNDEIDEALSLNSDGKEGASKGRFKTRMYERIQMGIRRRI

SEQ ID NO: 74150 - protein, 182 aa, Zea mays
  Coding DNA Sequence Number=SeqID_32371
  Gene Ontology: Mol. function=phosphotransferase activity, phosphate group as acceptor; Cellular component=mitochondrial inner membrane; Biological process=nucleobase, nucleoside, nucleotide and nucleic acid metabolic process
  Homolog annotation: Hit_ID=Q08480; Match level="QueryCoverage=80%, HitCoverage=60%, E-value=3e-72, Identity=89%"; Hit description =Adenylate kinase B
  Pfam annotation: Domain name=ADK; Domain location=29-173; Score =217.5; E_value=2.9e-62; Accession=PF00406.12; Description=Adenylate kinase
  Pfam annotation: Domain name=ADK_lid; Domain location=151-182; Score =37.8; E_value=3.8e-08; Accession=PF05191.4; Description=Adenylate kinase, active site lid
  Pfam module annotation: Pfam domain module=ADK::ADK_lid; Domain location=29-173::151-182
MVDYRTGGKGRNPNFALDFGEFDTSSTNLVGPPGSGKGTQSPIIKDEYCLCHLATGDMLRAAVAAKTPLGIKAKEAMNRGELVSDDLVVGIIDEAMKKPSCQKGFILDGFPRIVTQAQKLDEMLAKQGANVDKVLNFAIDDVVLEERITGRWIHSASGRTYHSKFAPPKSPGVDDQYRHRCD

SEQ ID NO: 74151 - protein, 58 aa, Zea mays
  Coding DNA Sequence Number=SeqID_32372
  Subcellular localization annotation: CTP_CleavageSite=28; ConfidenceScore=5.03e-01
MEKSLGYRATAARRPDTYSSGGASTGATAAGGAASGTRCSWRYPATKSMSFLPDFVFV

SEQ ID NO: 74152 - protein, 51 aa, Zea mays
  Coding DNA Sequence Number=SeqID_32373
MESPTRATPLSTVTSSEVDCRLRGGAMGAYNVHPWAFKGNTKTCATHHFGH

SEQ ID NO: 74153 - protein, 309 aa, Zea mays
  Coding DNA Sequence Number=SeqID_32374
MDDGRRAPGTGLYSELPGAESLPAMVLAGLQLALSRALVPRPKFFSPARQLGSLQAAAPEILSLPQHVFFPIVPWPRAAGAPCSPRSGSVSGSSRAFRSPCVRSRAPPRPIAALQRLLAMAGLALAPCSAADLSVLVLILDATAPQPRHEPGCVCPLLWLAGGQCPRPAFSLPCLGLAHPCRSAMLCGGAPHRHRFNRSALFPGQRSTLSFYLPAPLFHLQLVEVDLGSVPIAVELPDTFLSARSSSVLTRSRARGFKAMHIRRAALSVDIKAAKSDPLLCVQFAVTSVRCGCQSSTLLGFYLTSSLQT

SEQ ID NO: 74154 - protein, 93 aa, Zea mays
  Coding DNA Sequence Number=SeqID_32375
MSGEHAKREMVTGEKLGSSGKKIEERTPSKEASDKHKEHKDESADSIKSHKKGDQEEKEDEECGLLRDRLFFALNLQCRVYFFKAPRAYIRSI

SEQ ID NO: 74155 - protein, 78 aa, Zea mays
  Coding DNA Sequence Number=SeqID_32376
MEAQAHTSCNRRAGCYVRATAPPLAPLPRLLDCGTSTATRGNPAYDPTAPARRDGTGKRGIPRKGSFSVKETGPEPPY

SEQ ID NO: 74156 - protein, 245 aa, Zea mays
  Coding DNA Sequence Number=SeqID_32377
ARPTRPPIDGPMPPWVPSIELFDNYSLGSDPRGTVLGLNPLLSAQAEIQWWHVAYGASQKLLGMAHDVPLFDKHNTPPQGGEAPSTEQVLCLDPIDGASTIATFETNQEKDKGISFVITIQEDEDRSQTKPEEEDGQVRRGFENYEWDSVVSDLGRMLVNGEQGGYRWDLVVGTIAFLSLSSVGTAPRGDGSDPLGVDMVGTSDVATASTEGVTWGDYAVKRSGLIYGIGVSARQRGACSNIEST

SEQ ID NO: 74157 - protein, 1097 aa, Zea mays
  Coding DNA Sequence Number=SeqID_32378
  Gene Ontology: Mol. function=protein serine/threonine kinase activity; Cellular component=integral to membrane; Biological process=protein amino acid phosphorylation
  Homolog annotation: Hit_ID=O49318; Match level="QueryCoverage=96%, HitCoverage=95%, E-value=0.0, Identity=60%"; Hit description =Putative receptor-like protein kinase
  Pfam annotation: Domain name=LRRNT_2; Domain location=23-63; Score =35.8; E_value=1.5e-07; Accession=PF08263.3; Description=Leucine rich repeat N-terminal domain
  Pfam annotation: Domain name=LRR_1; Domain location=117-139; Score =18.7; E_value=0.02; Accession=PF00560.23; Description=Leucine Rich Repeat
  Pfam annotation: Domain name=LRR_1; Domain location=141-163; Score =9.4; E_value=5.1; Accession=PF00560.23; Description=Leucine Rich Repeat
  Pfam annotation: Domain name=LRR_1; Domain location=165-187; Score =1.6; E_value=1.4e+02; Accession=PF00560.23; Description=Leucine Rich Repeat
  Pfam annotation: Domain name=LRR_1; Domain location=189-211; Score =11.7; E_value=1.9; Accession=PF00560.23; Description=Leucine Rich Repeat
  Pfam annotation: Domain name=LRR_1; Domain location=213-235; Score =8.1; E_value=8.6; Accession=PF00560.23; Description=Leucine Rich Repeat
  Pfam annotation: Domain name=LRR_1; Domain location=237-259; Score =6.0; E_value=21; Accession=PF00560.23; Description=Leucine Rich Repeat
  Pfam annotation: Domain name=LRR_1; Domain location=261-283; Score =5.3; E_value=30; Accession=PF00560.23; Description=Leucine Rich Repeat
  Pfam annotation: Domain name=LRR_1; Domain location=285-307; Score =17.7; E_value=0.041; Accession=PF00560.23; Description=Leucine Rich Repeat
  Pfam annotation: Domain name=LRR_1; Domain location=309-331; Score =4.7; E_value=38; Accession=PF00560.23; Description=Leucine Rich Repeat
  Pfam annotation: Domain name=LRR_1; Domain location=333-355; Score =10.9; E_value=2.6; Accession=PF00560.23; Description=Leucine Rich Repeat
  Pfam annotation: Domain name=LRR_1; Domain location=357-379; Score =15.7; E_value=0.16; Accession=PF00560.23; Description=Leucine Rich Repeat
  Pfam annotation: Domain name=LRR_1; Domain location=381-400; Score =8.5; E_value=7.4; Accession=PF00560.23; Description=Leucine Rich Repeat
  Pfam annotation: Domain name=LRR_1; Domain location=405-428; Score =9.5; E_value=4.7; Accession=PF00560.23; Description=Leucine Rich Repeat
  Pfam annotation: Domain name=LRR_1; Domain location=429-451; Score =14.2; E_value=0.49; Accession=PF00560.23; Description=Leucine Rich Repeat
  Pfam annotation: Domain name=LRR_1; Domain location=453-475; Score =15.6; E_value=0.18; Accession=PF00560.23; Description=Leucine Rich Repeat
  Pfam annotation: Domain name=LRR_1; Domain location=477-499; Score =12.6; E_value=1.3; Accession=PF00560.23; Description=Leucine Rich Repeat
  Pfam annotation: Domain name=LRR_1; Domain location=501-523; Score =14.7; E_value=0.33; Accession=PF00560.23; Description=Leucine Rich Repeat
  Pfam annotation: Domain name=LRR_1; Domain location=525-547; Score =8.2; E_value=8.2; Accession=PF00560.23; Description=Leucine Rich Repeat
  Pfam annotation: Domain name=LRR_1; Domain location=549-571; Score =12.6; E_value=1.2; Accession=PF00560.23; Description=Leucine Rich Repeat
  Pfam annotation: Domain name=LRR_1; Domain location=573-595; Score =13.6; E_value=0.75; Accession=PF00560.23; Description=Leucine Rich Repeat
  Pfam annotation: Domain name=LRR_1; Domain location=597-619; Score =14.4; E_value=0.43; Accession=PF00560.23; Description=Leucine Rich Repeat
  Pfam annotation: Domain name=LRR_1; Domain location=621-644; Score =4.4; E_value=42; Accession=PF00560.23; Description=Leucine Rich Repeat
  Pfam annotation: Domain name=LRR_1; Domain location=646-668; Score =10.9; E_value=2.6; Accession=PF00560.23; Description=Leucine Rich Repeat
  Pfam annotation: Domain name=LRR_1; Domain location=670-691; Score =12.0; E_value=1.6; Accession=PF00560.23; Description=Leucine Rich Repeat
  Pfam annotation: Domain name=LRR_1; Domain location=69-91; Score=7.8; E_value=10; Accession=PF00560.23; Description=Leucine Rich Repeat
  Pfam annotation: Domain name=LRR_1; Domain location=93-115; Score =14.5; E_value=0.38; Accession=PF00560.23; Description=Leucine Rich Repeat
  Pfam annotation: Domain name=Pkinase; Domain location=799-1071; Score= 150.8; E_value=3.6e-42; Accession=PF00069.15; Description=Protein kinase domain
  Pfam annotation: Domain name=Pkinase_Tyr; Domain location=799-1071; Score=116.1; E_value=9.8e-32; Accession=PF07714.7; Description =Protein tyrosine kinase
  Pfam module annotation: Pfam domain module=LRRNT_2::LRR_1::LRR_1::LRR_ 1::LRR_1::LRR_1::LRR_1::LRR_1::LRR_1::LRR_1::LRR_1::LRR_1::LRR_1: LRR_
  Pfam module annotation: Pfam domain module=LRR_1::LRR_1::Pkinase::Pkin ase_Tyr; Domain location=23-63::117-139::141-163::165-187::189 -211::213-235::237-259::261-283::285-307::309-331::333-355::357
  Pfam module annotation: Domain location=429-451::453-475::477 -499::501-523::525-547::549-571::573-595::597-619::621-644::646 -668::670-691::69-91::93-115::799-1071::799-1071
MEHRALLLGVALAFLLASGSQGLNHEGWLLLALKSQMNDTLHHLDNWDARDLTPCIWKGVSCSSTPNPVVVSLDLSNMNLSGTVAPSIGSLSELTLLDLSFNGFYGTIPPEIGNLSKLEVLNLYNNSFVGTIPPELGKLDRLVTFNLCNNKLHGPIPDEVGNMTALQELVGYSNNLTGSLPRSLGKLKNLKNIRLGQNLISGNIPVEIGACLNITVFGLAQNKLEGPLPKEIGRLTLMTDLILWGNQLSGVIPPEIGNCTSLSTIALYDNNLVGPIPATIVKITNLQKLYLYRNSLNGTIPSDIGNLSLAKEIDFSENFLTGGIPKELADIPGLNLLYLFQNQLTGPIPTELCGLKNLSKLDLSINSLNGTIPVGFQYMRNLIQLQLFNNMLSGNIPPRFGIYSRLWVVDFSNNSITGQIPKDLCRQSNLILLNLGSNMLTGNIPRGITNCKTLVQLRLSDNSLTGSFPTDLCNLVNLTTVELGRNKFSGPIPPQIGSCKSLQRLDLTNNYFTSELPREIGNLSKLVVFNISSNRLGGNIPLEIFNCTVLQRLDLSQNSFEGSLPNEVGRLPQLELLSFADNRLTGQIPPILGELSHLTALQIGGNQLSGEIPKELGLLSSLQIALNLSYNNLSGDIPSELGNLALLESLFLNNNKLMGEIPTTFANLSSLLELNVSYNYLSGALPPIPLFDNMSVTCFIGNKGLCGGQLGRCGSRPSSSSQSSKSVSPPLGKIIAIVAAVIGGISLILIAIIVHHIRKPMETVAPLQDKQPFPACSNVHVSAKDAYTFQELLTATNNFDESCVIGRGACGTVYRAILKAGQTIAVKKLASNREGSNTDNSFRAEIMTLGKIRHRNIVKLYGFVYHQGSNLLLYEYMSRGSLGELLHGQSSSSLDWETRFLIALGAAEGLSYLHHDCKPRIIHRDIKSNNILLDENFEAHVGDFGLAKVIDMPYSKSMSAIAGSYGYIAPEYAYTMKVTEKCDIYSYGVVLLELLTGRAPVQPLELGGDLVTWVKNYIKDNCLGPGILDKKMDLQDQSVVDHMIEVMKIALVCTSLTPYERPPMRHVVVMLSESKDRTRVSSASSPASDDSSKKDDS

SEQ ID NO: 74158 - protein, 99 aa, Zea mays
  Coding DNA Sequence Number=SeqID_32379
  Subcellular localization annotation: CTP_CleavageSite=41; ConfidenceScore=5.09e-01
MAPPRLVAHKPQVLTTQLDGLLPARSVYSRLAAWGGAGPCRRMRVNGVGAAMACLHELFLDRLLRVQGVDHVGWLWERDRAAAGSRSLAIALEGNDARH

SEQ ID NO: 74159 - protein, 202 aa, Zea mays
  Coding DNA Sequence Number=SeqID_32380
  Gene Ontology: Mol. function=protein phosphatase type 2C activity; Cellular component=nucleus
  Homolog annotation: Hit_ID=Q1S458; Match level="QueryCoverage=88%, HitCoverage=36%, E-value=4e-55, Identity=59%"; Hit description =Protein phosphatase 2C-like
GKKGVNQEAMIFWENFCSRDDTIFCGVFDGHGPYGHLVAKRVRDLLPLKLGADLGMEDGRVASTGNIKLNTNDVASSEHIVRGGTAVSSEAQQNGDYPEVFPALRTSFLKAFHVMDRDLKLHKNIDCFFSGTTAVAVIKQGHNLIIGNLGDSRAVLGTRDENNQLVAVQLTVDLKPDIPIGKSFLLAVITTIKEFPKKNLVI

SEQ ID NO: 74160 - protein, 254 aa, Zea mays
  Coding DNA Sequence Number=SeqID_32381
  Homolog annotation: Hit_ID=Q6K796; Match level="QueryCoverage=61%, HitCoverage=3%, E-value=5e-69, Identity=81%"; Hit description =Vacuolar protein sorting 13C protein-like
MALDGCIPAKLYTINIAFVNWNTTGLPSEEATHPESQLDEEEQLTKEEWQAINKLLSYQPDEDMSFPLEKVSPNVIQFMMDVSIGQAGARIINIDGTEVLCGRFHQLQVVTKLYPKSTCCDVTLKYCGLSSPEGSLAQSVVSEGKSHALDVSFVRAPIGMDLDWQLIAKISPCHVTGIVYRREGIRVQLVDEDAIGLANDVHSKLTLLLLFQLLAKFNLMTTCQVQTAALTYQGNKTADVAYLLERETDLYVTH

SEQ ID NO: 74161 - protein, 437 aa, Zea mays
  Coding DNA Sequence Number=SeqID_32382
  Gene Ontology: Mol. function=RNA-directed DNA polymerase activity; Cellular component=mitochondrion; Biological process=RNA-dependent DNA replication
  Homolog annotation: Hit_ID=Q8S463; Match level="QueryCoverage=97%, HitCoverage=21%, E-value=0.0, Identity=83%"; Hit description =Putative prpol
  Pfam annotation: Domain name=rve; Domain location=251-410; Score =110.8; E_value=3.9e-30; Accession=PF00665.16; Description=Integrase core domain
MEAYCDEVRRLEDKFYGLELNHIARRYNETADELAKIASGRTTVPPDVFSRDLHQPSVKTDDTPEPERALAQSEVPSAQSEVPSARPEAPLAQPEAPLARPEVPSAPEGEALRVEEERSGVTHNRNWQTPYLQYLHRGELPLDRAEARRLARRAKSFVLLGDGKELYHRSPSGILQRCISIAEGQELLQEIHSGACGHHATPRTLVGNAFRQGFYWPTAVADATRIVHTCEGCQFYTRHTHLPAQALQTIPITWPFAVWGLDLVGPLQKAPGGYTHLLVAIDKFSKWIEVRPLNSIRSEQAVAFFTNIIHRFGVPNSIITDNDTQFTGRKFLDFCEDHHIRVDWAAVAHPMTNGQEERANGMILQGLKPRIYNGLNKFGKRWMKELPSVVWSLRTMPSRATGFTPFFLVYGVEAILPTDLEYGSPRTRGLRRPKQSS

SEQ ID NO: 74162 - protein, 42 aa, Zea mays
  Coding DNA Sequence Number=SeqID_32383
MANEVAVTEVRTIIIVQSRPILAQFNVRGPCAGRSGHFVIAA

SEQ ID NO: 74163 - protein, 391 aa, Zea mays
  Coding DNA Sequence Number=SeqID_32384
  Gene Ontology: Mol. function=protein dimerization activity; Cellular component=nucleus; Biological process=regulation of transcription, DNA-dependent
  Homolog annotation: Hit_ID=Q5Z6N9; Match level="QueryCoverage=78%, HitCoverage=89%, E-value=1e-105, Identity=62%"; Hit description =Putative ocs-element binding factor
  Pfam annotation: Domain name=bZIP_1; Domain location=119-172; Score =32.0; E_value=2.1e-06; Accession=PF00170.11; Description=bZIP transcription factor
  Pfam annotation: Domain name=bZIP_2; Domain location=119-169; Score =14.1; E_value=0.026; Accession=PF07716.5; Description=Basic region leucine zipper
  Pfam module annotation: Pfam domain module=bZIP_1::bZIP_2; Domain location=119-172::119-169
GSWAEQGAGGYRHGRDGATFLLPELLQRSNNAALPLHGGGVAAPFGMAPLGVAAADEARFCMTPWSAAAHFENWGDSGIVVTSPLAETASTDVDMGGGGAMAQSVDGHDNSLPACKVEPRDHKAQRRLAQNREAARKSRMRKKAYIVELENSRSKLSHLEQELQRARQQGMFIASALAFDLEYARWLDEHQHHMNDLRVALSAQIGDDDLGVLVDGAMLHYDQMFRLKGVATRTDVFHVLSGMWMSPAERFFMWLGGFRSSELLKVLARHVEPLTEQQLVGICGLQQSLQQAEDALSQGMEALQQALGDTLAAAATPCAADSVTNYMGQMAVAMSKLATVENFLRQADLLRQQTLKQIPSSWAHAQLRAGRVPWNDGMRKLGPRQSCALPA

SEQ ID NO: 74164 - protein, 232 aa, Zea mays
  Coding DNA Sequence Number=SeqID_32385
  Homolog annotation: Hit_ID=Q41897; Match level="QueryCoverage=19%, HitCoverage=33%, E-value=3e-17, Identity=97%"; Hit description =Cysteine proteinase inhibitor precursor
MPKDYCYESGPRRWDPDPHVCRLGPRRWVYDLHVYRPDPAGRSRISVYVNWTLTRGVQDFKPAYTLGLCSGRTHAIQRDMLSQVHRLKPSAIELSSGRRVLRSGGLNHSKSSCTVVFHHLLRLTLDNLRVLSISRMLSATRLTLDNLLVLRISRMLSATRLEFTFESTDTVSMCVIGVVYPRTFTGLNALLGFEKLVKAKTQVVAGTMYYLTIEVKDGEVNKLYEAKVWEKP

SEQ ID NO: 74165 - protein, 170 aa, Zea mays
  Coding DNA Sequence Number=SeqID_32386
  Homolog annotation: Hit_ID=Q10QY8; Match level="QueryCoverage=36%, HitCoverage=20%, E-value=1e-09, Identity=67%"; Hit description =Hydrolase, alpha/beta fold family protein, expressed
PLPALVRWKDSELLLGCHVFIRGKGSIKDPGKVHPDGWRSKWQIKLCYVPTLPGCHVFIRGKGSIKDPGKILGYSLNEAHQLLQIPIGLTTAFLKAYVLPKRRLDHGRDTIYMKPFMQNREQLVHLLKGIAVETEKFQATPLSQVCCTGSADCMGRPRPTVPGGEGVCSS

SEQ ID NO: 74166 - protein, 392 aa, Zea mays
  Coding DNA Sequence Number=SeqID_32387
  Gene Ontology: Mol. function=carboxypeptidase activity; Cellular component=membrane; Biological process=auxin mediated signaling pathway
  Homolog annotation: Hit_ID=Q8LRB6; Match level="QueryCoverage=99%, HitCoverage=100%, E-value=1e-136, Identity=67%"; Hit description =Putative nodulin MtN21
  Pfam annotation: Domain name=DUF6; Domain location=193-313; Score =32.6; E_value=1.3e-06; Accession=PF00892.11; Description=Integral membrane protein DUF6
  Pfam annotation: Domain name=DUF6; Domain location=25-158; Score =64.3; E_value=3.9e-16; Accession=PF00892.11; Description=Integral membrane protein DUF6
  Pfam annotation: Domain name=TPT; Domain location=145-313; Score= -11.5; E_value=0.0026; Accession=PF03151.7; Description=Triose -phosphate Transporter family
  Pfam module annotation: Pfam domain module=DUF6::DUF6::TPT; Domain location=193-313::25-158::145-313
MAMGCCYGDFFDKAKPYLAMISLQFGYAGMNVITKVSLNHGMSHYVLVVYRHAFATVSIAPFALILERKVRPNMTWSVFLQIFVLALLGPVIDQNFYYAGLKFTGPTFACAMSNILPAMTFVMAVIFRMEKVDLKKVRCQAKVAGTLVTVAGAMMMTLYKGPLMKMAWTSSGHAHGGRRRRRGGRHRPQRQGVAHTLKQYAAPLSLTTLICFVGTLQAIVVTFAMEHRPSVWTIGFDMNLLAAAYAGIVTSSIAYYVQGLVIQKTGPVFASAFSPLMMIIVAVMGSFILAEKIFLGGVLGAVLIVIGLYSVLWGKHKETQDKEDDETTELPVVAIMASKTNGVVYDDDDDVVFVKEIAAAGAGAVGGDDSECRKATGVVKSSSRGHGAAGAV

SEQ ID NO: 74167 - protein, 103 aa, Zea mays
  Coding DNA Sequence Number=SeqID_32388
MAVAEVTVAVVASTLLDAAASTLRRPFFLHGLHTGLPLGVPHGQGPLALASLVCVHQRKHIRHSSSHKLCPRHYMLRLGTLRGLFTLSRLPLFNSKHIPMIGF

SEQ ID NO: 74168 - protein, 90 aa, Zea mays
  Coding DNA Sequence Number=SeqID_32389
MGVAGACVGELHGHVGAEAERCVVAEAEVGPPVTNRRGWGGMRTVAEMAGAEKTGEARTGMISIPDTAGSGMEECGKNFVGYGEANGKKD

SEQ ID NO: 74169 - protein, 270 aa, Zea mays
  Coding DNA Sequence Number=SeqID_32390
  Gene Ontology: Cellular component=extracellular region; Biological process=sexual reproduction
  Homolog annotation: Hit_ID=Q6H677; Match level="QueryCoverage=97%, HitCoverage=97%, E-value=1e-100, Identity=65%"; Hit description =Putative expansin-B14 precursor
  Pfam annotation: Domain name=DPBB_1; Domain location=69-156; Score =117.7; E_value=3.3e-32; Accession=PF03330.8; Description=Rare lipoprotein A (RlpA)-like double
  Pfam annotation: Domain name=Pollen_allerg_1; Domain location=168 -250; Score=129.9; E_value=6.8e-36; Accession=PF01357.11; Description= Pollen allergen
  Pfam module annotation: Pfam domain module=DPBB_1::Pollen_allerg_1; Domain location=69-156::168-250
MASKQIGVLTCFIAITALAFRPCASAVPMDGGWSNGGATWYGPAKGAGSDGGACGYQGAVDQPPFSSMITAGSQSIFQDGKGCGTCYQCKSSTVKCTGHESCSGSPVTVVITDLCPDATCQVEPVHFDLSGTAFGAMAKPGQADKLRNAGRLQVQYTRVACNWNGLDIAFRVDAGSNANYLAMAIEYESGDGDLRAVELKQSGAAAWAPMQRSWGAVWQYKSGSTNLQAPLSVRLTSGSGRVLVASNVIPAGWQPGRTYRSVVNFGGNHA

SEQ ID NO: 74170 - protein, 157 aa, Zea mays
  Coding DNA Sequence Number=SeqID_32391
MSHKTTFWVDHETIYLLTNFGTSHHCRYLADHIASENLEKSGLHTQWVRPKARLPVSALFTRSCLSALFFVYSFHSPKKAWPVAKGFSSEGYDSPPPALPTASSDDSDDSMGLSVAERAYIQCIEQAGLEGSDDSEEVDFEEDSSKVDSKEEDSSDG

SEQ ID NO: 74171 - protein, 129 aa, Zea mays
  Coding DNA Sequence Number=SeqID_32392
MAGGKSSKGKCDKKNQGGKRKHPSTLLSEDFGDSEFSEEQFSSKDEESPTLRGAYIWVIERVGLESLDDSKEDSEEEEEGGDKVDDGGYDGGDEGDDNDKIDSGGGGNKSSGGIDCKGSDNAGAKTQPA

SEQ ID NO: 74172 - protein, 138 aa, Zea mays
  Coding DNA Sequence Number=SeqID_32393
MWGPMGRDGLELTRAIARSGCGPGPTRQRKEVQGSAVAVVTAGLTVWPHKSVRVRTHACDKGFWLGGPTGQWPKATIAVYRDFPEEDKQTHIMIRPPTSDSEIEAVLVTAQAELKYGDDVVDAGLEDVVEGGSGVKTT

SEQ ID NO: 74173 - protein, 130 aa, Zea mays
  Coding DNA Sequence Number=SeqID_32394
MVEGLLDMNPGEILDPFGSLIGPLYVAQIVGGKWSFGARLDGSTGDGLRRWGRPPLVRDLLRSAIGGGRQPMNRRSRYQWPRLEDRANLTRAYLRHSIMIVRAGLHSVVLNPSHRPVILRFWLLTASVMG

SEQ ID NO: 74174 - protein, 74 aa, Zea mays
  Coding DNA Sequence Number=SeqID_32395
MAPRHQRSALLEKERNPHRIVSGVHRTVRCARRQKGCAQPYPGMAYRVIHPVYGSQQQMLRSLQRRLVGAIGQS

SEQ ID NO: 74175 - protein, 132 aa, Zea mays
  Coding DNA Sequence Number=SeqID_32396
MGKSKKGGSSSHHSGDKRKREPTPPSEDFGDSEYSEEEFSSESEGSPVWTYIRAVERAGIEGSDESGGSSDEEDSSDSSEEGGGDGDDEGDSEGGGGGDGNDDGGEGGGKGGSGDGGDDSKGNSKGSNKASG

SEQ ID NO: 74176 - protein, 789 aa, Zea mays
  Coding DNA Sequence Number=SeqID_32397
  Gene Ontology: Cellular component=integral to membrane
  Homolog annotation: Hit_ID=Q5ZA82; Match level="QueryCoverage=93%, HitCoverage=95%, E-value=1e-90, Identity=34%"; Hit description =Embryogenesis transmembrane protein-like
  Pfam annotation: Domain name=MFS_1; Domain location=151-702; Score= -43.4; E_value=0.031; Accession=PF07690.6; Description=Major Facilitator Superfamily
MASGGAQSHTQSQPGAGDGAKPASGSMEYQLRQYLLLLASLVATVTYGAGLNLPGGAWQVDDGQHHAGDSILQDAHRHRYLIFYYCNATAFAASLVVSLLLLVLDGKNTGWWEALLRVVMVLDLLGLMGAYAAGSCRDKFTTIYSALLVCAVFAYVVAAFCWYLGVLALPRKKHRDDHNTAKNNDTSAANVHGYEREELDEVLMLLATFAVTITYVAGLNPPGGFWGDTKDGHQMSDPVLQENYSRRYRAFYVCNTTAFVASLLIIILVVDKKLTDKLSVRFVALYGLTITALLGLMGAYAAGSCREVHESTYVICLNAGVLAYIFLQVAVAVTVKNRCRCFQTSRFLLKRHTLEAAMILDLFGLISAYAAGSCRDETTSIYVVALAGVVLVYVVIHIVFFTLDHKDNHRDKEKLETRREVLLLLAILAATLTYQAGLTPPGGFWPENDGARGHRAGYPVLHDNYRPRYSAFFYCNAASFMASVALIVLLVNPNLYRPGIRCYALYVCMVAGMFGLMGAYAAGSSRDVRTSIYVLTLVAAVFAFVAIEVFIFWIRPYFHLCVDDIGGSGVCNICSRRKNTTLEESPPSDSRSSREKNGGAGRCEKQATKTSVEKAQQQKEDSDKNKREYLMLLGVLAASVTYQTGLKPPGGLWQDNSGGHSAGSSILHHIDKRRYHAFFYCNSTSFMASVVVVILLLPWTLHGYPLPLWTMQTAIWFDMLGLLGAYAAGSTRDWETSRNVIYLVIPVLAYIAVYAAVSIFRKVRCGHRPTAHNSKSQGHKSSGNDEDQP

SEQ ID NO: 74177 - protein, 260 aa, Zea mays
  Coding DNA Sequence Number=SeqID_32398
  Homolog annotation: Hit_ID=Q10MB4; Match level="QueryCoverage=18%, HitCoverage=13%, E-value=1e-15, Identity=87%"; Hit description=Myb -like DNA-binding domain containing protein, expressed
MAHERSDASSEEEVMAGELRRGPWTVEEDLQLVNYVDAHGEGRWNSLARSAAGAAADDTPLSSSWQHGGGADDDGGLYASPELPTDACWPPADCYYYPAAADHQLLNNPAAAAVFPDLSSTTAGSSSPSSDSGAGTAQPWPAPLGGAEWLTTGACCDASSAAAALGGQQQQSCLVWETSWASSELPELGVADLEIVNSTFNASGACIQPVVHVGVWRVNSSHQLTLRVFILIFSLYFSFIVCGYVSFLFGLKFYLCRLYV

SEQ ID NO: 74178 - protein, 626 aa, Zea mays
  Coding DNA Sequence Number=SeqID_32399
  Gene Ontology: Mol. function=RNA-directed DNA polymerase activity; Cellular component=mitochondrion; Biological process=RNA-dependent DNA replication
  Homolog annotation: Hit_ID=UPI00004C1731; Match level="QueryCoverage =93%, HitCoverage=44%, E-value=0.0, Identity=81%"; Hit description =UPI00004C1731 related cluster
  Pfam annotation: Domain name=RnaseH; Domain location=200-327; Score =11.7; E_value=4.7e-06; Accession=PF00075.14; Description=RNase H
  Pfam annotation: Domain name=rve; Domain location=340-497; Score =87.7; E_value=3.6e-23; Accession=PF00665.16; Description=Integrase core domain
  Pfam module annotation: Pfam domain module=RnaseH::rve; Domain location=200-327::340-497
MGCLAALSRFISRLGERGLPLYRLLRKAECFAWTPEAEEALGNLKALLTKAPVLVPPADGEALLVYVAATTQVVSAAIVVERQEEGHALPVQRPVYFISEVLSETKIRYPQVQKLLYAVILTRRKLRHYFESHPVTVVSSFPLGEIIQCREALGRIAKWAVEIMGETISFAPRKAIKSQVLADFVAEWVDTQLPTTPIQPELWTMFFDGSLMKTGAGAGLLFISPLGKHLRYVLRLHFPASNNVAEYEALVNGLRIAIELGVRRLDARGDSQLVIDQVMKNSHCHDPKMEAYCDEVRRLEDKFFGLELNHIARRYNETADELAKIASGRTTVPPDVFSRDLHQPSVKLDDAPEPEKAPGGYTHLLVAIDKFSKWIEVRPLNSIRSEQAVAFFTNIIHRFGVPNSIITDNGTQFTGKKFLDFCEDHHIRVDWAAVAHPMSNEQVERANGMILQGLKPRIYNDLNKFGKRWMKELPSVVWSLRTTPSRATGFTPFFLVYGAEAILPTDLEYGSPRARAYTEQSNQASREESLDQLEEARDRALLHSARYQQSLRRYHARGVRSRELQVGDLVLRLRQDARGRHKLTPPWEGPFVIAKVLKPGTYKLANNQGEIYDNAWNIKQLRRFYP

SEQ ID NO: 74179 - protein, 116 aa, Zea mays
  Coding DNA Sequence Number=SeqID_32400
GLLATGDGDRRVRECMLQEPMLPGAAAPGEAVSVPVNAAMAPAASGVLECGRAGDSPAADGGRACEGDWARASEGRGLRQAATRRSGLPGAGIRVRRRSGIGGARMAGWAALGWTG

SEQ ID NO: 74180 - protein, 40 aa, Zea mays
  Coding DNA Sequence Number=SeqID_32401
MALWASPSMAYQGRGHSRKIIVEGMVSIEATSFPYVISLG

SEQ ID NO: 74181 - protein, 59 aa, Zea mays
  Coding DNA Sequence Number=SeqID_32402
MERVPGVEEQKSVDQVNQAGLADESTTVPWLKLGLDAPKSEEVKPQEALGGHQNAHKRG

SEQ ID NO: 74182 - protein, 94 aa, Zea mays
  Coding DNA Sequence Number=SeqID_32403
MKTVRRHNQTVRIRLHLTFDDTFNVVIAVVIDRCNLVVGLTGVDRLDQARGPYKCGRKVVLGAFFSAEGPLSKNTFGKMICKQIRHEDICRSYK

SEQ ID NO: 74183 - protein, 198 aa, Zea mays
  Coding DNA Sequence Number=SeqID_32404
MKLGLVTLGDQGCKYYARDMSIPLWLGGRLHMMLRLTRTISRGEFIRCRRRRGRLGADHPHHRWVAAANDRACAPPPPPSHRHRGIFASDTELGVEEVHVWMVRILIHMNTGGSHLHVISNPEPVCCLALSSCFRLPSPSTRHSGSSASTPCAYEFLGVNEGFVIEIILSDGMSVPKIISAVEGAVGLGDHGRAVKDY

SEQ ID NO: 74184 - protein, 66 aa, Zea mays
  Coding DNA Sequence Number=SeqID_32405
MAPKKVTTRANSSLYKATKAILAAEKGKVTFADNTLPLTTVNNGSDVENSKQRPTYTRGRHSHLQS

SEQ ID NO: 74185 - protein, 201 aa, Zea mays
  Coding DNA Sequence Number=SeqID_32406
  Gene Ontology: Mol. function=DNA binding; Biological process =regulation of transcription, DNA-dependent
  Homolog annotation: Hit_ID=Q851V5; Match level="QueryCoverage=76%, HitCoverage=69%, E-value=2e-33, Identity=42%"; Hit description =Putative auxin response factor
  Pfam annotation: Domain name=B3; Domain location=45-136; Score=69.6; E_value=9.9e-18; Accession=PF02362.12; Description=B3 DNA binding domain
MRLVSNFLACGILECGHYLLKSEETFVTNVRRMKMPSEARKIINNYKIILTSSDAKVIPVKFAKNFRGKIERSITLESLGGCTFDVQVAQNLGRIVFQSGWESFVSAHDLKMCDLLVFKYDGMSRMKVLVFDPSGCEKVPPFFVTKNAMSGGRKREGPLDISSSDANLPMKTPETKKKAWKQRDRSRISIRSSRSLSSSSG

SEQ ID NO: 74186 - protein, 423 aa, Zea mays
  Coding DNA Sequence Number=SeqID_32407
  Gene Ontology: Mol. function=DNA binding; Biological process =regulation of transcription, DNA-dependent
  Homolog annotation: Hit_ID=Q6AV22; Match level="QueryCoverage=70%, HitCoverage=60%, E-value=1e-53, Identity=42%"; Hit description =Putative transcirption factor
  Pfam annotation: Domain name=C1_3; Domain location=16-46; Score=11.5; E_value=0.023; Accession=PF07649.3; Description=C1-like domain
  Pfam annotation: Domain name=PHD; Domain location=17-66; Score=25.4; E_value=0.00016; Accession=PF00628.19; Description=PHD-finger
  Pfam module annotation: Pfam domain module=C1_3::PHD; Domain location= 16-46::17-66
MAISLEQFDYLRYINIVCEVCGDIGYRQLLLCCGDCKRYAVHQYCLDKVVFDATLLEWFCYECLQRRGEVTCVASLEQVSSESPLSHAHFGPLVHQRTTKRVESVTGPYSPSDDCEELFSYPGIESIPSVQEISVDPIKTSSISEHDTIEAAASSERFTECQKASSCREGITVKMAMAPSSYENSGEDIFSENVFLEYVLAYKCYLSKAQKKRVMELIQEIQPEFTVFISIMRRGNVRPPGPFLGINKEYANAHFPDKSTNVTLEMPDKSKKWHPKFYRRDEGDICLLLPTKDEIRCTFMVYVLHETTHSSRGEAGFQMGGPCPGASGVASEIHVEEEPTTGEHVSSESDMREIPHESLSRGDSDDQFEPPYFVPCKSPLSESQKRMVEERVRAIRSEIPICVAVMKNNNVGVAQRWMLVVAL

SEQ ID NO: 74187 - protein, 573 aa, Zea mays
  Coding DNA Sequence Number=SeqID_32408
  Gene Ontology: Mol. function=DNA binding; Biological process =regulation of transcription, DNA-dependent
  Homolog annotation: Hit_ID=Q6AV22; Match level="QueryCoverage=55%, HitCoverage=76%, E-value=7e-73, Identity=45%"; Hit description =Putative transcirption factor
  Pfam annotation: Domain name=B3; Domain location=358-461; Score=10.2; E_value=0.0053; Accession=PF02362.12; Description=B3 DNA binding domain
MAKVTTHTSAEASRSCETIGTESSKSNHGKNQQVDHANPVALNTEQSFPLIVNSLGTLGDNHQYHLLETTEGLACKFKKVPQSLAAPLKRLEKRDNVVLGSNNLGSSCFTADLGSSVLGKSGDKSNRMKDIGANLSSKHNDHGNQANQHTLVGSKNMEGKSVKAKHTVVDAHKNTSWTVDSLINVKDKSEVYGDSNRDILNDVTVQLDHRASNELLPRSTATNIPQLATLENDVVDTVMPYSPNGGCEESFSCPGIKNTPSVRERSVDPINISSDSHDTIEASESSERFMECQKASLCRRRKTVKMAMVSSSSEESGEDTISENVSLGYVLACRSSLSKAQKKRVTKLIQEIQPEFTVFISIMRMSNVKLPGPLLGITKEYAIAHFPDKTTNVTLETPGKSKKWHPKFYKRDESRKNLLMGQWLDFVRDNHVQEGDICLFLPTKDEIRHTFMVYILHETTHSRCGAGFQRVGPCLGGASSAKMASEVHIEDEPTAGEHVSSDSDMPENSHEPLESGDSDDPFEPPYFVPCRSPLSKSQKRMVEQRVRAIRSEVPICVAVMKNNNVGIAQRWML

SEQ ID NO: 74188 - protein, 107 aa, Zea mays
  Coding DNA Sequence Number=SeqID_32409
MSSSSSASSASSIGPSSEDTLSDLVATELQLGHTVEFGVSRIFSVCVQEMQQLGYFDDGVGRVPGAEEIPEPEGELVVFESFFLAGLRLPAHRFVVEVLRRFAEQIH

SEQ ID NO: 74189 - protein, 507 aa, Zea mays
  Coding DNA Sequence Number=SeqID_32410
  Gene Ontology: Mol. function=RNA-directed DNA polymerase activity; Cellular component=mitochondrion; Biological process=RNA-dependent DNA replication
  Homolog annotation: Hit_ID=UPI00004C1731; Match level="QueryCoverage =99%, HitCoverage=40%, E-value=0.0, Identity=73%"; Hit description =UPI00004C1731 related cluster
  Pfam annotation: Domain name=RnaseH; Domain location=200-305; Score= -21.2; E_value=0.0055; Accession=PF00075.14; Description=RNase H
  Pfam annotation: Domain name=rve; Domain location=307-482; Score =85.1; E_value=2.1e-22; Accession=PF00665.16; Description=Integrase core domain
  Pfam module annotation: Pfam domain module=RnaseH::rve; Domain location=200-305::307-482
MGCLAALSRFISRLGERGLPLYRLLRKAECFAWTPEAEEALGNLKALLTNAPILVPPAAGEALLIYVAATTQVVSAAIVVERREEGHALPVQRPVYFISEVLSETKIRYPQIQKLLYAVILPRRKSRHYFESHPVTVVSSFPLGEIIQSREASGRIAKWAVEIMGETISFAPRKAIKSQVLADFVAEWADTQLPTAPIQPELWTMFFDGSLMKTGAGAGLLFVSPLGKHLRYMLRLHFPASNNVAEYEALLIIDQVIKNSHCRDPKMEAYCDEVRRLEDKFYGLELNHIARRYNETADELAKIASGRTTVPPDVFSRDLHQPSVKTEDTPKPEAPSAPPEKAPGGYTHMLVAIDKFSKWIEVRPLNNIRSEQAVAFFTNIIHRFGVPNSIITDYGTQFTGRKFLDFCVDHHIRVDWAAVAHPMTNGQVERANGMILQGLKPRIYNDLNKFSKQWMKELPLVVWSLRTTPSRATGITPFSLVYGAEAILPTDLEYGSLRARAYTDQSN

SEQ ID NO: 74190 - protein, 155 aa, Zea mays
  Coding DNA Sequence Number=SeqID_32411
MGKNKKGSSSSHHLGDKRKREPTPPSEDFDDSEYSEEEFSSESEGSPAPASPPASSDDSDDSQGISAEVWTYIRDVERAGLEGSDESEYSSDEENPSNSSEEGSGGDGGDVDDDGGDGDGGGNSGKGGGDSGDGGNGNGGSGSKGSNKASNKASG

SEQ ID NO: 74191 - protein, 80 aa, Zea mays
  Coding DNA Sequence Number=SeqID_32412
MADQLAMVSRVLAPYLSLTLALARLVADFQEPAPSACRNIIVYSMGLIVDFVFRRVILEFNKNVREVRATSARSSTGCLN

SEQ ID NO: 74192 - protein, 101 aa, Zea mays
  Coding DNA Sequence Number=SeqID_32413
MATPFDGFPQENVRFDPGRGPEIFLDLLGLSPFNLKHDEIRMDQPRTDLALRGTNDSDLTTEDVCVRASQGDLHGDRLYGCNAAGIRLRSRHEASRAAWAP

SEQ ID NO: 74193 - protein, 141 aa, Zea mays
  Coding DNA Sequence Number=SeqID_32414
METPPRGKAKHRQSGTQAPEFPVEPMTRPPRQAYQAMGHCRVPVSVSRWQQKRALPAQPTQHLQFRLQADDRWAHDLSFALIPRSLALYVCRVGHICQNHPLRLRLSGIPLSAAEIVRRYLTAAAMPLCAVAVSPCRLQSM

SEQ ID NO: 74194 - protein, 573 aa, Zea mays
  Coding DNA Sequence Number=SeqID_32415
  Gene Ontology: Mol. function=sequence-specific DNA binding; Cellular component=nucleus; Biological process=regulation of transcription, DNA-dependent
  Homolog annotation: Hit_ID=Q60EM7; Match level="QueryCoverage=94%, HitCoverage=93%, E-value=1e-164, Identity=59%"; Hit description =Putative homeodomain protein
  Pfam annotation: Domain name=POX; Domain location=142-268; Score =172.4; E_value=1.1e-48; Accession=PF07526.2; Description=Associated with HOX
MSSAAGGGYGAGGAEHQHLLLGQAAGAGQLYHVPQHSRREKLRFPPDDAADSPPPTAWPAPPPFYSYASSSTSSYYSPHSPTLAHAQLVAHALPAGAGVQIPSQNFALSLSSAPSNPPPAPRRQLAAGVATGPYGPFTGYAAVLGRSRFLGPAQKLLEEICNVGGRPPHLDPLSDEGMFGMEHGMGGVDRATAEAVAVSGAEQQWRKTRLISLMEDVCRRYKQYYQQLQSVISSFETVSGLSNAVPFASMALRTMSKHFKFLKGMIMSQLRNTSKVAASDGIGKDDMANFALMGGGADHLRGNSVNTFSQAHNIWRPQRGLPERAVSVLRSWLFEHFLHPYPTDSDKQMLAKQTGLTRNQATSIVSNIHEDKFAVPLLIKLDEQVSNWFINARVRLWKPMVEEIHNLEMRQQLQKNTSAVDKTQLGMQQLIQHSSANSRQRGQSSGGTTRNQDELPPRMPHDMAGQGQQQQQQVSFAYAGLPAHHHGLALSHPQQQAEAVSAVGGGVSLTLGLHQNNNRTYVAEPLPAALPHRFGLEDVSDAYVMQGTTSFGGQDRHFGKGMGGHHFVHDLVG

SEQ ID NO: 74195 - protein, 213 aa, Zea mays
  Coding DNA Sequence Number=SeqID_32416
  Homolog annotation: Hit_ID=Q6QP51; Match level="QueryCoverage=78%, HitCoverage=73%, E-value=2e-17, Identity=38%"; Hit description =Putative growth-regulating factor 1
MTASKKAGPSEGFDRRLRACRARDDYGYIRYMAEARATLPRSDFVTKSHQREASSPRTLSNGSGSGKSPAASGTTGSSASPDLGPRPQEEVSASPDPRARPQPRPRKVVYASPDPRARPQPQPRKVVSASPDPRARTQPRPQKESRPRPTSAWASGEVSASPDLGLGPTAPWGYIITIPLASSGYGGTRPAFHLARPGLRRSSDGHVTAYTWL

SEQ ID NO: 74196 - protein, 72 aa, Zea mays
  Coding DNA Sequence Number=SeqID_32417
MEFSIISSSANSLSKLSKETGKTIMEKWVVYSQKAARSGCTGLSGGAPDSVRCARLALANWLPLGFVSGVRL

SEQ ID NO: 74197 - protein, 55 aa, Zea mays
  Coding DNA Sequence Number=SeqID_32418
MKKLAEGAIVVCYVCHKAISPMSARLKMGKEESTLDHIIAKWVSNDYGFKFPYPC

SEQ ID NO: 74198 - protein, 176 aa, Zea mays
  Coding DNA Sequence Number=SeqID_32419
  Gene Ontology: Mol. function=signal transducer activity; Cellular component=microtubule; Biological process=electron transport
  Homolog annotation: Hit_ID=Q6Z663; Match level="QueryCoverage=87%, HitCoverage=66%, E-value=4e-72, Identity=81%"; Hit description=WD-40 repeat protein-like
  Pfam annotation: Domain name=WD40; Domain location=38-76; Score=35.9; E_value=1.4e-07; Accession=PF00400.22; Description=WD domain, G-beta repeat
  Pfam annotation: Domain name=WD40; Domain location=81-119; Score =10.4; E_value=2.2; Accession=PF00400.22; Description=WD domain, G -beta repeat
  Pfam module annotation: Pfam domain module=WD40::WD40; Domain location=38-76::81-119
MVYKLNKFSMHTSLSPDGKLVIIVGDDTDALLIDANSGKTIHSMKGHLDFSFASAWSPDGLTFATGNQDKTCRIWDARNLTESVHVLRGNVGAIRSIRFTSDGHFLSMAEAADFVHIFDIKSDYNKRQELDFFGEVSGMSFSPDTDTLYVGISDRTYGSLLQFGRLYNYSYLDSLL

SEQ ID NO: 74199 - protein, 49 aa, Zea mays
  Coding DNA Sequence Number=SeqID_32420
MAIEFLVVSLPCCCIGDGGGGGEVLRRRCRLKAVAAWARDEGEFPTGIN

SEQ ID NO: 74200 - protein, 88 aa, Zea mays
  Coding DNA Sequence Number=SeqID_32421
  Subcellular localization annotation: CTP_CleavageSite=74; ConfidenceScore=5.79e-01
MTDNKSRSTTEFKPRAQQETPPRSTSRSGLGRRFPSRPTSGSSLGKRSLPRPTPGLGLDPGLGRNRVLARPRPRPQEKSPPRPTLGSD

SEQ ID NO: 74201 - protein, 417 aa, Zea mays
  Coding DNA Sequence Number=SeqID_32422
  Gene Ontology: Mol. function=histone-lysine N-methyltransferase activity; Cellular component=nucleus; Biological process=chromatin modification
  Homolog annotation: Hit_ID=Q6K9F7; Match level="QueryCoverage=74%, HitCoverage=45%, E-value=1e-117, Identity=58%"; Hit description =Putative SET domain protein SUVR2
  Pfam annotation: Domain name=Pre-SET; Domain location=94-243; Score =13.3; E_value=2.9e-05; Accession=PF05033.6; Description=Pre-SET motif
  Pfam annotation: Domain name=SET; Domain location=245-376; Score =120.8; E_value=3.9e-33; Accession=PF00856.18; Description=SET domain
  Pfam module annotation: Pfam domain module=Pre-SET::SET; Domain location=94-243::245-376
MQLGFFKFSISMEEVFKMVEEKCLHSYKMLPSDLSIGKLLSEPISCEAAVGISDDVAGGSSVLESSEPCLQNSLVAWNPELAHCNQKTTHDTTDISKGEERVRIPVVNEFGSETCPPSFYYIPRNLVFQNAYVNISISRICDEDCCADCSGNCLSAPVPCSCARITGGEFSYTLEGLLKTAFLDECTSVNHFLQEHHRFYCPVCPLERSKNEGSPGPCKGHIVRKFIKECWSKCGCGMQCGNRVIQRGITCKLQVFFTREGKGWGVRTVEDLPRGAFVCEYVGEILTSAELHERAIENARNGVVLRDEDACSLDGSFYGNVGRFINHRCYNANLVQIPVEVETPDHHYHHLAFFTNKKVEAFEELTWDYGIDFDDMEGPSKPFRCMCGSRYCRDPNNPSMLPFSVLPLDVNGEGMYV

SEQ ID NO: 74202 - protein, 145 aa, Zea mays
  Coding DNA Sequence Number=SeqID_32423
  Gene Ontology: Mol. function=nucleic acid binding
MDYSFILLMRHPYLRMIVAMLLISKHDSLMMERFVQDSGALLHTLMQQTHVIEQNDMSIDEYYSAFDRLMSALTSMVPACTADPCPAHKFIEKFFTYRFVMGVRAEFDSLRARLLQGSDTLTMAKALSDLLAEETRLKFSVFYWY

SEQ ID NO: 74203 - protein, 466 aa, Zea mays
  Coding DNA Sequence Number=SeqID_32424
  Homolog annotation: Hit_ID=Q6AK87; Match level="QueryCoverage=29%, HitCoverage=55%, E-value=4e-14, Identity=39%"; Hit description =Related to transcriptional regulator
MVTEKSRGSPGENLEEWGVDPTKEIPSSAATTKYTDFLLATAAGKVDGTKGSDKMVTPFEKTKIAAYIVGAITPCMRLYAYLGKELMAFLKQDENHPYKKWINTYASSDFENNALQIEELLDKLSVSLTGEELEIIGKLYQQAMKLEVEFFSAKLVDQPVVAPLSRYCDPKYKLLIFSDFDLTCTVVDSSAILAEIAILSFPKGKSSGIDNNLDRAKSGELRKFVETCSLSNTWKTKSLDYDKLYKGLEVLAEFEKAANSRVVDSGVLRGMNLEDIRKAGERLILQGGCKNFFQKIVKTREILNLDIHILSYCWCAELIRSAFSSAGCLDGLNIHANEFAFEESVSTGEIDRKIQSPLDKVEKFKSIRSDADSTVPFLSVYIGDSAGDLLCLLEADIGIVVGSSTSLRRVGRQFGVSFVPLFLGLVEKQRQLMDEDASVFKPRSGVLYTVSSWSEIHAFVLGSDFS

SEQ ID NO: 74204 - protein, 265 aa, Zea mays
  Coding DNA Sequence Number=SeqID_32425
  Gene Ontology: Mol. function=hydrolase activity, acting on ester bonds; Cellular component=cellular_component; Biological process =lipid metabolic process
  Homolog annotation: Hit_ID=Q84Z95; Match level="QueryCoverage=98%, HitCoverage=71%, E-value=4e-94, Identity=66%"; Hit description =Putative GDSL-motif lipase/hydrolase protein
  Pfam annotation: Domain name=Lipase_GDSL; Domain location=19-237; Score=74.3; E_value=3.9e-19; Accession=PF00657.12; Description=GDSL -like LipaseAcylhydrolase
YLSPAPWTGGSCWWAPNFASAGVGVLNDTGVQFANIIRVQKQLRYFRQYQDRLSRLVGEDAAARLVRGALVLVTLGGNDFIKQLLPGALLGAYAKVLRQLYSLGARRVLVTGSGPLGCAPAELALRGSRDGECDAELQRAAALYNPQLVDMIKGVNAELGADVFVAVNAYRMHMDFISDPAAYGFVTSKVACCGQGPYNGVGLCTAASSVCPDRSVYAFWDNFHPTEKANRIIVSQFMDGPQEYMHPLNLSTILAVDARAAATFN

SEQ ID NO: 74205 - protein, 54 aa, Zea mays
  Coding DNA Sequence Number=SeqID_32426
MPLKRENQVDVLVQLTANPFQELKDHNYKRWKTRWRLHSYIPMWHMMPIHPHVD

SEQ ID NO: 74206 - protein, 238 aa, Zea mays
  Coding DNA Sequence Number=SeqID_32427
  Gene Ontology: Mol. function=histone-lysine N-methyltransferase activity; Cellular component=nucleus; Biological process=chromatin modification
  Homolog annotation: Hit_ID=Q1S200; Match level="QueryCoverage=79%, HitCoverage=29%, E-value=2e-11, Identity=29%"; Hit description=SET -related region; Pre-SET; Histone H3-K9 methyltransferase
MGSNTERARKALGAMKLIGFSKKQAIPVLKELLKIFNNNWEPIEDESYRALADAILDRQDSKQTPPSQQGTQAAHADLEPLRSTRDDRQQYLSASLDDTCEDDNETPLVKRPRMGTANFRPELQPPQQSSVSTQGALPASPQTSRRQTRSLTVEPHAAGHEYPLAVNDALVVKEPKPEPQIDRAEDFVAGPNATQLNDGSSATRCIHIQMLTDVCHSVVPLRAIFPDVIRDSVSFPHE

SEQ ID NO: 74207 - protein, 138 aa, Zea mays
  Coding DNA Sequence Number=SeqID_32428
MTSRRHGVDAWLRARGLSGLGGAPGTGGASGAAAWRPAAVLRPYGGPASRLQASGAAGCGGPAAPLRGPDVGAWAAPRLVGDGWYRVGRMFMGLGAAVARRLELGCHVTMSLFALLGRDRGCSLGSPGWRSALICIWL

SEQ ID NO: 74208 - protein, 139 aa, Zea mays
  Coding DNA Sequence Number=SeqID_32429
  Homolog annotation: Hit_ID=Q2QM96; Match level="QueryCoverage=45%, HitCoverage=7%, E-value=2e-18, Identity=68%"; Hit description=Class III HD-Zip protein 4, putative, expressed
MWIEFFHLIKCKKRKAHDFLPEYFQFSPIYAAQKWCYWIALSGYLLCLQLETFVAFLVLKICGRSLTQSTGVVTAWRGRQPAVLRTFSQRLSRGFNDAVNGFPDDGWSLMSSDGAEVVTIAINSTSGKCVVDCFCSGRF

SEQ ID NO: 74209 - protein, 294 aa, Zea mays
  Coding DNA Sequence Number=SeqID_32430
MEVESARAEAQAAYNRAVELELEVKSMRTYREKMESTTRAGVDRAHTLFVDAYRDLGAQTAPFDKSGGEVGTHFLGWLQEELESLPSIMTGLMHFEAFDQSNEDFIAGVFQVEDDMLKCMVGRFTIGCGVLTVAASSRRGMTEHWHSLIVLSSDESDVDSWSSKGEQLMSPFARMEDESLKDDLNYFMALDLFVAESSPRVTLTTAETSSWVAPTVLQGRRKIRVLKQSVGMLGESLQGIRVPKGTAVWEWRGLIHRKECGRRRQLAGSSLCRRLGSVSKREICRLYLMAMSLD

SEQ ID NO: 74210 - protein, 68 aa, Zea mays
  Coding DNA Sequence Number=SeqID_32431
MARARAYKAPRGLDRTPLHALDLTGAQTHRRLPVHGVSAAARSPATVGRPADPLPTPSSPRRGLSTPR

SEQ ID NO: 74211 - protein, 68 aa, Zea mays
  Coding DNA Sequence Number=SeqID_32432
MARARAYKAPRGLDRTPPHALDLTGAQTHRCLPVHGMSAAARSPATVGRPADPFATPSSPRRGLSTPR

SEQ ID NO: 74212 - protein, 123 aa, Zea mays
  Coding DNA Sequence Number=SeqID_32433
MSTMSKVTCSLRAFGVVPNDSGSSILPIRKIPSFYSVVYHHCIGVGCTTEIDISGIEGNPWLGVLSLRHGKDNRTFAAVGLDLCPYFWLRYCRGLALEGIRDDERCPQFAAEWRCSAPGTVAG

SEQ ID NO: 74213 - protein, 220 aa, Zea mays
  Coding DNA Sequence Number=SeqID_32434
  Gene Ontology: Cellular component=integral to membrane; Biological process=defense response to bacterium
  Homolog annotation: Hit_ID=Q5JJY5; Match level="QueryCoverage=86%, HitCoverage=78%, E-value=7e-66, Identity=67%"; Hit description =Putative MtN3
  Pfam annotation: Domain name=MtN3_slv; Domain location=145-216; Score= 31.0; E_value=4.3e-06; Accession=PF03083.6; Description=MtN3saliva family
  Pfam annotation: Domain name=MtN3_slv; Domain location=26-112; Score =39.0; E_value=1.6e-08; Accession=PF03083.6; Description=MtN3saliva family
  Pfam module annotation: Pfam domain module=MtN3_slv::MtN3_slv; Domain location=145-216::26-112
MDWDAPALTSFVADLSFRHLCCYGAGIAGNAFAFVLFVSPLPTFKRIVRNGSTEQFSCTPYIYSLLNCLICMWYGLPFVSYGVVLVATVNSIGAVFQLAYTAVFIAFADAKQRLKVSALLAAVFLVFGLIVFVSLALLDHKARQVFVGYLSVASLVCMFASPMSIVNLVIRTKSVEYMPFYLSLSMFLMSASFVIYGVLLGDGFIYVRFTFPICLDWKSV

SEQ ID NO: 74214 - protein, 265 aa, Zea mays
  Coding DNA Sequence Number=SeqID_32435
  Pfam annotation: Domain name=zf-CCHC; Domain location=184-201; Score =19.2; E_value=0.00067; Accession=PF00098.13; Description=Zinc knuckle
MDEVQINKKNHRKEKKEKTWLEQPRLSAVWHTGLSGGAPDSVRCARLASGELATLENSSAVYDYNFRTVRWCTGLSGEPTTASATISRQIRGRRVAHSNGRQEAPDCPRLLDKAIALEYKRIELGEKRRATNQGQAGSSTRPRYAAPQGTLARGSSRQQTQQTQYPPQANTPAGLVAPNASTNRSCFKCRQAGHYANYYPKRAAYTTPAQIKQGLASGVKSQALSINRGQVNHVEAEAVCGEPENPEEEAVEGEEGSEEGNEQQD

SEQ ID NO: 74215 - protein, 122 aa, Zea mays
  Coding DNA Sequence Number=SeqID_32436
MENEQLRQEVAHLGKTLYDKKGKAKQNKHPQDNTTTGVNNPVEAEVVVCRLCHKKAISLTNMIAIKANKQANKRKGAKGDYLNYEKHQEGLDPEREVRSPRDFAKLGSVGGLRLPKVLKNMI

SEQ ID NO: 74216 - protein, 52 aa, Zea mays
  Coding DNA Sequence Number=SeqID_32437
MARVACTLRGKRLDGGVSVLSVKKQQTFVASVPWWYLKKRIKTKAAGGKVLR

SEQ ID NO: 74217 - protein, 116 aa, Zea mays
  Coding DNA Sequence Number=SeqID_32438
MTHDFAMTAKLPPYEDMDVIVTIMILVPVVVHVFMRFDVAHLFRCFANLSLKLRKMKHFLLALLDLQMDEFKVADLLIKLLFSGWWASDLLLLFPCFSNESFVPLIRIKGCEDRAS

SEQ ID NO: 74218 - protein, 123 aa, Zea mays
  Coding DNA Sequence Number=SeqID_32439
MGKDRKGRGSPRRTGDKQKREPSPPSEDFDDSEYSEEEFSSESEGSPMSRRSPRARRNSSGSSEEGSGGDSDDEGDDSGERGDGDSGNDDGKGGGGGSGGGRSDDDSKGGSGSSKASGKAPLA

SEQ ID NO: 74219 - protein, 129 aa, Zea mays
  Coding DNA Sequence Number=SeqID_32440
  Subcellular localization annotation: CTP_CleavageSite=76; ConfidenceScore=5.69e-01
MRAPSFSPSSDVLFVFPAFAPFFLPNLLPPPTVTTASRPMLVDTDLRYWTTKTRRAATIAYATELVVVVCRLGGSRAGKVVAVGDIYPPGPLEGENPARGHKLVALQGRRIVGRAKTTVEMGRPKKAMA

SEQ ID NO: 74220 - protein, 77 aa, Zea mays
  Coding DNA Sequence Number=SeqID_32441
  Homolog annotation: Hit_ID=Q5VR06; Match level="QueryCoverage=70%, HitCoverage=3%, E-value=2e-14, Identity=66%"; Hit description =Helicase-like protein
MEDEDRLDYIVRNQSKLRAEYVQGIFDAVEKGIYDASRIGKKVLLPSSHVGSKRCYAIYVQAEHYILLNFDLHISKE

SEQ ID NO: 74221 - protein, 57 aa, Zea mays
  Coding DNA Sequence Number=SeqID_32442
MSGNMVTEGANLAKGMLQDMVDGVTWPTTLPPGWTVEWDRMLFQQERSRRSSGLGLA

SEQ ID NO: 74222 - protein, 83 aa, Zea mays
  Coding DNA Sequence Number=SeqID_32443
MASTLQSLGFFVMKDGWGASSLGNTARHGCLAEVQGRRDCSSSFMLHRGATHLRGQWAASSNRPRPDVDRAARNAEYPFAVPI

SEQ ID NO: 74223 - protein, 96 aa, Zea mays
  Coding DNA Sequence Number=SeqID_32444
MDVDSKAVKDACVDMIKGGQRQMRYRLKRKYFTGVPANQVRTTSPVPCMTDDQWKDLVQMWSTPNHKNNCVKNKLNREKVNFHSAQDLNPTLQNPM

SEQ ID NO: 74224 - protein, 119 aa, Zea mays
  Coding DNA Sequence Number=SeqID_32445
MAGCTCSFSGKWSVLNQNQKVSNWWKRDAVYLGQAIQEGQFVAALNQLGGPRAKANQGADEGERPDKRRSEKPSSAPGDEDSLPLFVVTWICNMSDDAGGFFKIPLHNRKRPKQFVDLL

SEQ ID NO: 74225 - protein, 640 aa, Zea mays
  Coding DNA Sequence Number=SeqID_32446
  Gene Ontology: Mol. function=protein binding; Cellular component =spliceosome; Biological process=nuclear mRNA splicing, via spliceosome
  Homolog annotation: Hit_ID=Q6K476; Match level="QueryCoverage=73%, HitCoverage=100%, E-value=0.0, Identity=74%"; Hit description =Putative U4/U6-associated RNA splicing factor
  Pfam annotation: Domain name=PRP3; Domain location=257-634; Score =586.4; E_value=2.7e-173; Accession=PF08572.1; Description=pre-mRNA processing factor 3 (PRP3)
  Subcellular localization annotation: CTP_CleavageSite=53; ConfidenceScore=5.69e-01
AGSQQPLSAVSVPSSVPIPSKVSSISTNNANEGVSIRSDEVTVKSSTDGSAMSAASKSSNLSLDALAKAKKALQLKKELSEKLKKLPMLNNKLATAVTATQVSKEAAKTSVSAVDAQHFSKGEAKLTDVSSLPTSSISGTPAIGGVIGIPGLTHIPNLDSVKRAQELAAKMGFRQDPQFAPVINFFPGTSTEVTVAQRPAKAPVLRLDSHGREIDEQGNVISMTKPTNLSTLKVNINKQKKEAFQIIKPDLDSLAKSSVHFDERMGINQKKLLRPKRPGFQFVEEGKLSRQAELQKIKSQFGEAQAKELKVKQAQLAKAKAEVDINPNFIEVAPGVRAPKQKQNEDIPEIEPWDAKILLSATYEDISVEEINMDKITIYVEHPEPYDPPAEPAPPPPQPLKLTKKEQKKLRTQRRLAKEKDRQEMIRQGLLEPPKPKVKMSNLMKVLGSEAVQDPTRLEMEIRTAAAEREQAHVDRNIARKLTPSERREKKERKLFDDPTNTIETIVCVYKIRDLSHPQTRFKVDVNAQENKLTGAVVITDSISVVVVEGGKKSIKRYNKLMLNRIDWPAAVGGDEDTEMEADKPVNSCVLVWQGSVAKPTFHRFTVHNCRSEAAAKKVFVDVSVPHYWDLAVNFSENSS

SEQ ID NO: 74226 - protein, 754 aa, Zea mays
  Coding DNA Sequence Number=SeqID_32447
  Homolog annotation: Hit_ID=Q6K2T0; Match level="QueryCoverage=97%, HitCoverage=90%, E-value=0.0, Identity=67%"; Hit description=Extra -large G-protein-like
KKNSGSDTSSDKSDTAEHVKYLEVLESLPDKKGVASEASCAVREAETNKIEAGSEERFVPSCCTMKLEPALGDDSREVREAKYRRIRHEGKGEAKQPATARDRSPRPVVNSIPSNADPVEGPFECHMRPGFIYANGEKGHLSDRNFDDPSTRVSGLEKDRTELLRMLDELRDKVQRSCEIADKSSVNASTNRMVNPTSSCIPHERLSRLRYGSPQLQRNGSQHSPSLNGQTPGVPPAFPSLSVQQDLHGYGESVAHTGAPIYPAAPYPWRNFDNYFQGHYDPDPLISYHHDGFYHQPACSCLHCYHREFLPVRRAPYLMNNPSLYHAEGPVMFGAQNYNTRGMNGMMRRSHMRATLSKKPAQTCEPIVNGAPFTICYNCYEVLQLPKNSLLLGKDEYKLRCGSCSHAIVVRLDGSRLDVSAPTPVSHLSPGSKNYYNNGQANNGQNADERLLPSYSFSAGSHCSQEKDLPSNSSEPDKTQCISSASISEDDNSPARSNSQKNSSGSRDVPHDAEVVIRVPTLPLRDHFGYSPSDRVVDGPGKGSRSTRSEHEKGVLTESFKPNKVKCVPVASVLDPSDDEYDDPEHSQDPGGGAQYVDHLRATKSGDSFFSSLIKKSFKINGGMGNGRANVFINGYPISDRAVRKAEKIAGPVYPGEYWYDYRAGFWGVMGQPCLGIIPPYVAEFNYPMPKNCAGGNTGVFINGRELHQKDMDLLVGRGLPDSPDRSYRVEISGKVSDEVSGEELYCLGKLAPT

SEQ ID NO: 74227 - protein, 75 aa, Zea mays
  Coding DNA Sequence Number=SeqID_32448
MAAIERIIVESTQMVPEKVSGGQIRQLQHLGGIDLNVKELCELLEFAIAGGYGSDSILFGGVDEEILLMSKALRL

SEQ ID NO: 74228 - protein, 54 aa, Zea mays
  Coding DNA Sequence Number=SeqID_32449
MPHQGGDCEHRVDLSLVVWVDDKCGAQGRWSTTEVKMSYGTWLMDRSSRVTSGG

SEQ ID NO: 74229 - protein, 113 aa, Zea mays
  Coding DNA Sequence Number=SeqID_32450
  Homolog annotation: Hit_ID=Q6K2T0; Match level="QueryCoverage=23%, HitCoverage=3%, E-value=4e-09, Identity=92%"; Hit description=Extra -large G-protein-like
MVEKKKLFIKKKGCEAHIGKEWDSDEDSDDDEGIATRLQFNKSAIFPKANHTPQEPPALCMEGEEDGSGSAVQRPPPQQQQIRVVRCPKCDKLLPELPNYSVYVCGGCGATLQ

SEQ ID NO: 74230 - protein, 219 aa, Zea mays
  Coding DNA Sequence Number=SeqID_32451
  Subcellular localization annotation: CTP_CleavageSite=46; ConfidenceScore=5.59e-01
MGWGKGRGTTAQQRTSSTGSISRAPSRGPRAPGASPGRPPVWGSSEASAAAQAVPVHAPTVGGGAAEDLEHREHLQGALQPGVRLKRPQQPRHDFVSCNTRAGRVLPLKDESRSGERAVCKEIKTGGAKSFNKCPSLRKGGKGPTVTTDSKNLPLESTPCPMKLRRSKVPKLKHTTSTQDSFLRKRRLKNDRRKNVQNHEGVFSMHGELSRHTITIIKA

SEQ ID NO: 74231 - protein, 150 aa, Zea mays
  Coding DNA Sequence Number=SeqID_32452
  Gene Ontology: Mol. function=protein serine/threonine phosphatase activity; Cellular component=protein serine/threonine phosphatase complex; Biological process=protein amino acid dephosphorylation
  Homolog annotation: Hit_ID=Q1JR80; Match level="QueryCoverage=54%, HitCoverage=45%, E-value=3e-23, Identity=51%"; Hit description =Phosphoprotein phosphatase
KVLITCVICQVFLESSKRLQFTCCRKISLSSELLTGMVPYTHLRAEAQVMVYDDAYKSTDSEFLESDSSQNQSIVVSKDHKLDQTDERQTRHRIEDDGGFAMWEGTWHVGGVLAVSRAFGDKLLKQYIVVDPEIRESYNSRKCGHLGVWW

SEQ ID NO: 74232 - protein, 63 aa, Zea mays
  Coding DNA Sequence Number=SeqID_32453
MARTTVKSSAIEEAIAKEISSGRRETVGTNQNDVNNSILDCVRFDLKSNNFIRSLNTRFHGHR

SEQ ID NO: 74233 - protein, 75 aa, Zea mays
  Coding DNA Sequence Number=SeqID_32454
  Subcellular localization annotation: CTP_CleavageSite=56; ConfidenceScore=5.12e-01
MAAAVELPCTLVVPPSVRLRAAAPLLCSSGAQVPAGAQLQSTPRALLPALAWCSPLTSHGRNSQRRGTPSGLRFL

SEQ ID NO: 74234 - protein, 121 aa, Zea mays
  Coding DNA Sequence Number=SeqID_32455
MAGVGVVGRAASRGVPWLGLGTPELELHSREMGAGKISAGGDEHPNAAAVFEQRIGLRKKGNIPSVLKDKLGHILAHDFSQTVRVLDYFAPNISVVEFKINLFEMKSEDRTEFPNSYLRER

SEQ ID NO: 74235 - protein, 80 aa, Zea mays
  Coding DNA Sequence Number=SeqID_32456
MGKPIPSLLMLLLCRAINNFGQVFTFPLVTQCSSMDQADDSNRVFILASWGRQILDGRLWYWILGYLLSSSVLWNEEIHR

SEQ ID NO: 74236 - protein, 173 aa, Zea mays
  Coding DNA Sequence Number=SeqID_32457
MGEVQQKIGRGPGFSGGHVEAVGLISGACFGLLSGRAQSMCSGSFTGSQWCRGCKELESGSPCSSVHARWRSDGVRRWQSGTFGEMVFGLRAREALQGPREASRGAGLDGGGLEWPVHGGRTRAAAGTPCAGRTPANSCSGGAESEQGSTVAALGNFIGAGTGKGVGSGVAWR

SEQ ID NO: 74237 - protein, 320 aa, Zea mays
  Coding DNA Sequence Number=SeqID_32458
MTRSRPSRTRSMWPTPRASVAGNHVPPGRAEGSTDQRECHGAETTRAGVLRWGLSRPDDELAKHQRKPAAMLGVPAMGSQGRVPTECMKQRARGRLELSTGRDLRARRAEQGRGCAQADRGRDDQSVGEFDGGRHGAQGGQTPGRAAKGNFTPWERAERNGLREERAGRERVQGEKSSAREELATGTRRAGRGTAAMEMHCEGEKQGHAGAVDRALVRAGDGEGICKLQEELQLPGRTPGSLGHGDELGEMGKTGPPASRSTGGTTMAGAGAVGRAACRGVPWLGPGAWELELHGREMGAGKISAREMSTQMQLPYLSRG

SEQ ID NO: 74238 - protein, 221 aa, Zea mays
  Coding DNA Sequence Number=SeqID_32459
  Pfam annotation: Domain name=RRM_2; Domain location=17-110; Score =8.7; E_value=0.013; Accession=PF04059.3; Description=RNA recognition motif 2
  Subcellular localization annotation: CTP_CleavageSite=31; ConfidenceScore=5.02e-01
MNEVPASTIGGHGAGASRLLARFGSPSSPTSSSREKSHYDFLYLPMDFRREANKGYAFVNLITPKAACRSWGAHGGYHTHMWVFKGSAKTCITCCIGLLLGTTALRPNTSPTSRAPCLVTPTLINLVRLGQAACAIRKAWVALVTGALPRQIPLTNLHRSWANSIMTSIISTTEACDKDMWMGLDDTVHLLPTQDDEPAYIATYTAAFARTSTRHDEGVTG

SEQ ID NO: 74239 - protein, 165 aa, Zea mays
  Coding DNA Sequence Number=SeqID_32460
  Homolog annotation: Hit_ID=Q6QP51; Match level="QueryCoverage=97%, HitCoverage=57%, E-value=2e-10, Identity=41%"; Hit description =Putative growth-regulating factor 1
MAPPADEVGPRPRLGDVEAPSRSRSRSSLSSVAEVESEPLGLARRRPSAEARAESEPWGRAKQRAEPESEPWVGRSGVCRLPGLSPSPSPGSGGAKFTVFRGLARVRALGWAERSFLWCVRLGLTACQPHSVEWHSSRSSAGGAALLSGWSVERRSDCGHFGSVD

SEQ ID NO: 74240 - protein, 107 aa, Zea mays
  Coding DNA Sequence Number=SeqID_32461
METSPSDTLLPPPAFLSLTSAHKTRGAGVGESSGSVAGSEAVLIGEHQNNWARRGKSCPWRCRGTVPWLGDESGWWGRKGCRNPRGESGGQIYRGGGNRLALRGVRR

SEQ ID NO: 74241 - protein, 133 aa, Zea mays
  Coding DNA Sequence Number=SeqID_32462
  Pfam annotation: Domain name=VQ; Domain location=12-42; Score=26.2; E_ value=4e-05; Accession=PF05678.4; Description=VQ motif
MPPTRPKIKIIHIITPEIMKTDVAHFRAFMQRLTGKPACCSDVTSTPPPPVGERRRQRRPRRGEADTGSGDRRREERFHGARIGGDKERKIKCEVKVEDRKELGFDGYEYELGRSDLWMDMDLSPGGGFLSFL

SEQ ID NO: 74242 - protein, 81 aa, Zea mays
  Coding DNA Sequence Number=SeqID_32463
MSCAFDDYYIKDYGVILALEVTQRRTDSNDHSSSSGVYGGAYLMTDNVRGNFYRQARFGPRSQPMGGHEHGLFKAGTKWPI

SEQ ID NO: 74243 - protein, 184 aa, Zea mays
  Coding DNA Sequence Number=SeqID_32464
MAPMCSGIVVKIEVRCVIDEPPEIHGQNWRKKRISHGLMHHHNSPRPGCRDKAHIHTQRCNSSSQLRPHALTRDATRGGKKINPNCPGGYRDPSAPDPSKSSALSLAAETCFRGKATAAAWLGADYAISMRRDSWNRKLATESDDSDGDDAQAKARRARKRSSAVGTVAMEVGSSVNDSRFPWR

SEQ ID NO: 74244 - protein, 170 aa, Zea mays
  Coding DNA Sequence Number=SeqID_32465
  Gene Ontology: Mol. function=protein serine/threonine kinase activity
  Homolog annotation: Hit_ID=Q53PN4; Match level="QueryCoverage=43%, HitCoverage=14%, E-value=1e-10, Identity=46%"; Hit description=NB -ARC domain, putative
MPVKWEPPSSQMLEYSPNDEAMRGGPMKALRRSSTSSAPSPRDAGDGDATTVAASSAGKRSFALCRSFSRAKRSRVTSLIVGGDGGTERLAAVAEELEGLTRDYMREFILLVQGYPRKVHRPERTTMYMDRCVFGRHVEKERVVDFLLQRAPYLSALAVVGAKMWARRRW

SEQ ID NO: 74245 - protein, 305 aa, Zea mays
  Coding DNA Sequence Number=SeqID_32466
  Pfam annotation: Domain name=NC; Domain location=135-206; Score=30.3; E_value=6.8e-06; Accession=PF04970.4; Description=NC domain
MGLLSNRIGRESLKAGDHIYSWRAAWVYAHHGEGLHGKNEIVITDCISLGNLVGIGNVVGIYVGDDKVIHFTRGRGQEVGTGTVVDIILVSSTPKRSNTPCPVCTDETSDSSTETNGVVSSCLSCFLAGGALYRFEYAVNPALFLAKARGGTCTLAPSDPDDTVARRARYLLSNGFRCYNLFKSNCEDFAIYCKTGLLVAEQGVVGQSGQAISIIGGPLAAVVSTPFRLVTTNIYGMAVMAVGVYCASRYAADIGNRRDVVKMEVEDLTAGLASGRICAVENIAQLVAPEAEGPADATATATLAA

SEQ ID NO: 74246 - protein, 389 aa, Zea mays
  Coding DNA Sequence Number=SeqID_32467
  Gene Ontology: Mol. function=hydrolase activity; Cellular component =nucleus; Biological process=regulation of transcription, DNA -dependent
  Homolog annotation: Hit_ID=Q2HSH7; Match level="QueryCoverage=94%, HitCoverage=95%, E-value=1e-122, Identity=54%"; Hit description =Histone deacetylase superfamily
  Pfam annotation: Domain name=Hist_deacetyl; Domain location=20-348; Score=113.1; E_value=8.3e-31; Accession=PF00850.10; Description =Histone deacetylase family
MASESSPPPAGAPPPGLGDKLAVFWDEGMLAHDAGRGVFDSGRDPGFLDVLDQHPENADRVRNMVSILRRGPIAHFLSWHSGRPAHASELLSFHSSEYIEELVQTNATGAKKKLCEGTFLNPGSWGAALLAAGTTLSSAKHILDGQGNLAYALVAVVDIDVHYGNGTAEGFYRTDTVLTMSLHMMHGSWGPSHPQSGSVDEIGEGKGLGYNLNIPLPNGSGDAGYEYAMNELVVPSIDKFQPQLLFLVVGQDSSAVSATHLHSPCSEAGQRGKAHLRVSQKIIHPFYTKFDPNGRQCLTMEGYRKIGQIMRRLADRHCNGQILVVQEGGYHITYSAYCLHATLEGVLDLEAPLLDDPIAYYPEDDKYTMKVVDMIKSYWKESVPFLKEI

SEQ ID NO: 74247 - protein, 334 aa, Zea mays
  Coding DNA Sequence Number=SeqID_32468
  Gene Ontology: Mol. function=nucleic acid binding; Cellular component= intracellular; Biological process=DNA integration
  Homolog annotation: Hit_ID=Q7XBC6; Match level="QueryCoverage=99%, HitCoverage=18%, E-value=1e-123, Identity=68%"; Hit description =Putative copia-type pol polyprotein
  Pfam annotation: Domain name=zf-CCHC; Domain location=164-181; Score =30.5; E_value=5.9e-06; Accession=PF00098.13; Description=Zinc knuckle
METIEGELGRFMLNQGEEPQAMYNRLKTLVNQVRNLGSTKWDDHEMVKVILRSLVFLNPTKVQLIRGDPRYKLMSPEEVIGKFVSFELMIKGSKQVIERGATSTPEVQPVAFKATKEKKEESTPSRLPIDASKLDNEEMALIIKSFRQILKQRKGRDYKPCSKKVCYKCGKPGHFIAKCPISSDRGDDKRGKKKEKKRYYKKKGGDVHFCREWDSDKSSTDSSSDKDAANIAVNKGLLFPNVGHKCLMAKDGKRKVKSRASTKYARSSDDDNSSDDVDNLLALFANLNMQQKEKLNELIGAIHEKDELLDSQEDFLIKENKRHVKVKNAYAREV

SEQ ID NO: 74248 - protein, 926 aa, Zea mays
  Coding DNA Sequence Number=SeqID_32469
  Gene Ontology: Mol. function=ubiquitin-protein ligase activity; Cellular component=intracellular; Biological process=protein modification process
  Homolog annotation: Hit_ID=Q8GY23; Match level="QueryCoverage=99%, HitCoverage=27%, E-value=3e-30, Identity=28%"; Hit description=E3 ubiquitin protein ligase UPL1
MSFVPPTRPEDQADVVSGTALSSDMDIDCSSAKGKGKAVSVPPEESKHAIQESTASLAKASFFLKLMTDVLLTYTSSIQVVLRHDADLSNMHGPNRTNSGLISGGIFNHILQHFLPHATKQKKERKSDGDWMYKLATRANQFLVASSIRSAEARKKVFSEICNILLDFTDSSAAYKAPVARMNVYVDLLNDILSARSPTGSSLSAESAVTFVEVGLAPSLLKMLQNLDLDHPDSAKIVTAIVKALELVSKEHVHSADNAKGENSSKIASDSNNVNSSPNRFQALDMTSQPTEMITDHRETFNADQTSQSSDSVADEMDHDRDMDGGFARDGEDDFMHEMAGDGTGNESTMEIRFEISRNRDDMADDDDDDDNTDEDMSAEDDEEVNEDDEDEDEENNNLEEDDAHQMSHPDTDQEDREMDEEEFDEDLLEDDDDEDEEGVILRLEEGINGINVFDHIEVFGGSNNLSGDTLRVMPLDIFGTRRQGRSTSIYNLLGRASDHGVLDHPLLEEPSSTLNFSHQEQPENLVEMAFSDRNHEGSSSRLDAIFRSLRSGRNGHRFNMWLDDGPQRNGSAAPAVPEGIEELLISHLSRPTQQPGAQTVGGTQENDQPKHGSAAEAREGSPAQQNENSENTTNPVDLSESAGPAPPDSDALQRVVSNASIEHATEMQYERSDTITRDVEAVSQASSGSGATLGESLRSLEVEIGSVEGHDDGDRHGTSGASERLPLGDIQAAARSRRPSGNAVAVSSRDMSLESVSEVPQNPDQEPDHNASEGNQEPRGVGADTIDPTFLEALPEDLRAEVLSSRQNQVTQTSNDQPQNDGDIDPEFLAALPLDIREEVLAQQRSQRIQQQSQELEGQPVEMDAVSIIATFPSEIREEVLLTSPDTLLATLTPALVAEANMLRERFAHRYHSSSLFGMNSRNRR

SEQ ID NO: 74249 - protein, 76 aa, Zea mays
  Coding DNA Sequence Number=SeqID_32470
MAAAAAAHRASFPLRLQQILAGSRAVSPAIKVESEPSFSGWLENHLESKFLATLILLKKLFVMSVMTPSADDDLLG

SEQ ID NO: 74250 - protein, 885 aa, Zea mays
  Coding DNA Sequence Number=SeqID_32471
  Gene Ontology: Mol. function=ubiquitin-protein ligase activity; Cellular component=intracellular; Biological process=protein modification process
  Homolog annotation: Hit_ID=Q2QSH6; Match level="QueryCoverage=97%, HitCoverage=88%, E-value=0.0, Identity=83%"; Hit description=E3 ubiquitin protein ligase UPL1, putative, expressed
  Pfam annotation: Domain name=HECT; Domain location=592-885; Score =500.6; E_value=1.8e-147; Accession=PF00632.15; Description=HECT -domain (ubiquitin-transferase)
MAKALIRYFECSVIILFFCSLSLPLYKGQLQRLLVNLCTHRDNRQALVQILVDMLMLDLQGFSKKSVDASEPPFRLYGCHANITYSRPQSSNGVPPLVSRRVLETLTNLARSHPNVAKLLLFLEFPCPSRCRSEAHDHRHGKAVLEDGEERKAFAVVLLLTLLNQPLYMRSVAHLEQLLNLLEVVMHNAENEINQAKLEASSEKPSENAVKDVKDNTSISDSYGSKSNPEDGSKALAVDNKSNLRAVLRSLPQSELRLLCSLLAHDGLSDSAYLLVGEVLKKIVALAPFFCCHFINELARSMQSLTFCAMKELRLYENSEKALLSSTSANGTAILRVVQALSSLVSTLQDRKDPEQPAEKDHSDAVSQISEINTALDALWLELSNCISKIESSSEYASNLTPASASAATLTAGVAPPLPAGTQNILPYIESFFVTCEKLRPGQPDAVQEASTSDMEDASTSSGGQRSYSCQASLDEKQNAFVKFSEKHRRLLNAFIHQNPGLLEKSFSLMLKIPRLIDFDNKRAYFRSKIKHQYDHHHHNPVRISVRRSYILEDSYNQLRMRSPQDLKGRLTVHFQGEEGIDAGGLTREWYQSLSRVIFDKSALLFTTVGNDLTFQPNPNSVYQTEHLSYFKFAGRVVGKALFDGQLLDAHFTRSFYKHILGVRVTYHDIEAIDPAYYKNLKWMLENDISDVLDLTFSMDADEEKLILYEKAEVTDCELIPGGRNIRVTEENKHQYVDRVAEHRLTTAIRPQINAFLEGFNELIPRELISIFNDKELELLISGLPDIDLDDLKANTEYSGYSIASPVIQWFWEIVQGFSKEDKARFLQFVTGTSKVPLEGFSALQGISGPQSFNQLDLPEYTSKEQLQERLLLAIHEANEGFGFG

SEQ ID NO: 74251 - protein, 60 aa, Zea mays
  Coding DNA Sequence Number=SeqID_32472
  Subcellular localization annotation: CTP_CleavageSite=50; ConfidenceScore=5.22e-01
MLVDYTTGASLAKVQRKAASRTPPPAEVRGKSPVAPGPGPAPSVGAPSPRAGNDAVSPGD

SEQ ID NO: 74252 - protein, 758 aa, Zea mays
  Coding DNA Sequence Number=SeqID_32473
  Gene Ontology: Mol. function=ubiquitin-protein ligase activity; Cellular component=intracellular; Biological process=protein modification process
  Homolog annotation: Hit_ID=Q6K3Y7; Match level="QueryCoverage=71%, HitCoverage=15%, E-value=5e-83, Identity=35%"; Hit description =Putative ubiquitin-protein ligase 1
  Pfam annotation: Domain name=DUF908; Domain location=3-211; Score= -69.0; E_value=0.00028; Accession=PF06012.3; Description=Domain of Unknown Function (DUF908)
  Pfam annotation: Domain name=DUF913; Domain location=259-595; Score =102.4; E_value=1.3e-27; Accession=PF06025.3; Description=Domain of Unknown Function (DUF913)
  Pfam module annotation: Pfam domain module=DUF908::DUF913; Domain location=3-211::259-595
MKETQQGGLSLFPVDLESKYQHRLGSTLHFEYNLGSAQYPDQTSDKGKSSNLCVIHIPDMHLQKEDDLSILKQCVDKFNVPPEHRFALLTRIRYARAFNSTRTCSIYSRISLLSFIVLVQSSDAHDELTYFFTNEPEYINELIRLVRSEDSVPGPIRALAMLALGAQLAAYASSHERARILSGSSIISAGGNRMVLLSVLQKAIFSLNSPNDASSPLIVDALLQFFLLHVLSSSSSGTTVRGSGMVPPLLPLLRDNDSSHMHLVCLAVKTLQKLMEYSSPAVSLFKDLGGVDLLSRRLHVEVQRVIGTADGHNSMVTDAVKSKEDHLYSQKRLIKALLKALGSSTYSPGIPARSQSSQDNSLPVSLSLIFQNVEKFGGDIYFSAVTVMSEIIHKDPTCFPALKELGLPDAFLSSVTAGVIPSCKALICVPNGLGAICLNNQGLEAVRETSALRFLVYTFTSRKYLIPLNEGVVLLANAAEELLRHVQSLRSIGVDIIIEIINKLSSSLKDRNNETAILEEKTDMETDVEGRDLVGGMDSSVEGSNDEQFSHLSIFHVMVLVPPDKGKTLKPAGLFVEKGAASKDNRWMNALLSEFGDASREVLEDIGRVHREVLWKISLFEENKIDAEISLSSSTSEAQQPDLSASDIGDSRYTSFRQYLDPILRRRGSGWNIESQVSDLINMYRDIGSAASDSQRVGSDRYSSLGLPSSSQDQSSSSSDANVSTRSEEEKKNSEHSSCFDMMRSLSYHINLSFYGAW

SEQ ID NO: 74253 - protein, 44 aa, Zea mays
  Coding DNA Sequence Number=SeqID_32474
MAKMIAKIKSFMRKMSCVSGSDMDEITVANNNVRVRRKDSHHRA

SEQ ID NO: 74254 - protein, 112 aa, Zea mays
  Coding DNA Sequence Number=SeqID_32475
  Homolog annotation: Hit_ID=Q7F1D1; Match level="QueryCoverage=43%, HitCoverage=8%, E-value=3e-20, Identity=91%"; Hit description =Putative nucleolar protein
MKNGPGRNNCSGGRVEKSKGFCPNSFDRVLLDAPCSALGLRPRLFAGEQIPQVFTKQFFNSSNIYLALETLNLTRIKRCVKSSQRKSREITGARWQTGQNGDVTNKQPLIMM

SEQ ID NO: 74255 - protein, 70 aa, Zea mays
  Coding DNA Sequence Number=SeqID_32476
  Gene Ontology: Mol. function=RNA binding
  Homolog annotation: Hit_ID=Q7F1D1; Match level="QueryCoverage=98%, HitCoverage=14%, E-value=5e-23, Identity=63%"; Hit description =Putative nucleolar protein
CTINPGENEALYPKVGGPGIVGSCELFNKTYTEEWLREDEADLVQRFDPSSSVDTIGFFIAKFDVGEKDE

SEQ ID NO: 74256 - protein, 171 aa, Zea mays
  Coding DNA Sequence Number=SeqID_32477
  Homolog annotation: Hit_ID=Q60EX6; Match level="QueryCoverage=34%, HitCoverage=6%, E-value=2e-28, Identity=96%"; Hit description =Serine/threonine protein phosphatase BSL1 homolog
MATQGGIGPAGHSTDDLYVLDLTNDKFKWHRVVVQGAGPGPRYGHCMDLAAQQYLVTVSGNDVYVQNLLEVQVYAMSNSLTTKIGGTNKENYGDVSDMNSDSYYRSFGRDGSMGLIGLENLENTCFMNNSIHKGEMILADDTCRILEILADEYQSNHLARNDYVIVDTCHV

SEQ ID NO: 74257 - protein, 99 aa, Zea mays
  Coding DNA Sequence Number=SeqID_32478
MTTSFVVGESKPGCGLCPALSFKDVHHPGWGGGRTELGPASTWVGHPLLPPAFGGGGHPPALRRRRPPAMRGKVAAVTGLAEGANFDNAGPVSRKRRQL

SEQ ID NO: 74258 - protein, 90 aa, Zea mays
  Coding DNA Sequence Number=SeqID_32479
  Subcellular localization annotation: CTP_CleavageSite=26; ConfidenceScore=5.28e-01
MAWLRDVFSITSSSVIPLASPFIMRRCTSGMAYCLIPSGVWVTVETPMLRSLLPGSSGPTGQQGYVSDVVLDRDRTASTVWVSLGDVPSC

SEQ ID NO: 74259 - protein, 442 aa, Zea mays
  Coding DNA Sequence Number=SeqID_32480
  Gene Ontology: Mol. function=RNA binding
  Homolog annotation: Hit_ID=Q7F1D1; Match level="QueryCoverage=55%, HitCoverage=41%, E-value=1e-107, Identity=77%"; Hit description =Putative nucleolar protein
  Pfam annotation: Domain name=Nol1_Nop2_Fmu; Domain location=126-402; Score=-43.6; E_value=4e-05; Accession=PF01189.8; Description =NOL1NOP2sun family
  Pfam annotation: Domain name=PUA; Domain location=71-175; Score=15.6; E_value=0.0015; Accession=PF01472.10; Description=PUA domain
  Pfam module annotation: Pfam domain module=Nol1_Nop2_Fmu::PUA; Domain location=126-402::71-175
MHKLLDLVCKNELSAVINGLEVVELNGGDQSQEGCSLVHKCPYAGLENVLFVQGSGPHVLHYGSQPDQAVKEVVVSRKCAESVLRGAQVYVPGVLACSSHVEKGDKVAVSVAIEQPVKEDGWAWHIHGAVDIHNVADAHYEERKGLYIGQGTAAMSRSAIFRVPHGIAVEMTERVYKLPSFNDVLEGEIFLQNLPSVVTARVLDPQSGERILDMCAAPGGKTTAIAILMRDEGEVVALDRSHNKLEEDKWIRRIGVDREVDDSDVVIVDKGTSSGWAMELLEELLELARLCHPVGHNAILALDTRAGNHGLSLRPLGDEVVPKDHDIIGGGSTHVQASHPIGVSVDKEVHRITVTPVNEHRDIGLGLRETQQEQAGQNIQSQLECHGETHSLRPTDGLAKNGIVQGTTVWTMAYFTASLWGQWLKDLGNKHIQSCEGDRRRE

SEQ ID NO: 74260 - protein, 90 aa, Zea mays
  Coding DNA Sequence Number=SeqID_32481
  Homolog annotation: Hit_ID=Q7F1D1; Match level="QueryCoverage=58%, HitCoverage=9%, E-value=2e-12, Identity=69%"; Hit description =Putative nucleolar protein
MDILKLASEMDLSCIKAYKLDALKSVRKTDEARSLGMADNHSEAIETPTEDPCHATVGGRSTSVDEDSSTTTVVFSAYLSTPQFSARNYA

SEQ ID NO: 74261 - protein, 64 aa, Zea mays
  Coding DNA Sequence Number=SeqID_32482
MSPIWVFKYGSLILNPGIADNALVIDFIGDYHHVALLCTQFLLGYKTKMLEDEHVAIFDHPRSF

SEQ ID NO: 74262 - protein, 135 aa, Zea mays
  Coding DNA Sequence Number=SeqID_32483
MATTCCIVGYTSSDRAVQHVKIKGTLSAGYVRWNFCVQCLCVAYTINFCVRALAEVKIRLYTQLDRLSRVLVLEHCTRITSARLSITVPKIQLLRDRLGKGYTYSVIGENHQIFDLEGDSGRLIILTDQDSEKQF

SEQ ID NO: 74263 - protein, 70 aa, Zea mays
  Coding DNA Sequence Number=SeqID_32484
MTTTGSYGREVLNQTMEKGLTEERGSNYLLKIQKRLKYLPLIFTLLAMTNLGSNEDWDEVLAGVFRLVHP

SEQ ID NO: 74264 - protein, 274 aa, Zea mays
  Coding DNA Sequence Number=SeqID_32485
  Homolog annotation: Hit_ID=Q10R85; Match level="QueryCoverage=74%, HitCoverage=64%, E-value=8e-58, Identity=69%"; Hit description =Expressed protein
MVATSTCEERIDKVKPVISLLHRQALQSALHISDDLIPWRLCFLQASIDEYLQNSPMVVGAVFLDQRKRRKINDEEWSVQLLPIQFLFLSASPVIVMRFVSKSGGKESPCTPPASSSWKCNAMPSHLAFTVRGLMYPQRQREGRKSLKGHVEMTVGFDLPPVLALVPESIIRGVAETVGPCLLFSPRLVLQRKPSVFFLTGMTGRRFVCDEQRAGAEAGGGADEAGLGRRPGSRFQEVQEGEADRKAHIALNFEKHVHSPVWLYQCITADSSHD

SEQ ID NO: 74265 - protein, 75 aa, Zea mays
  Coding DNA Sequence Number=SeqID_32486
MGMDYGIPRTLGKFLRRVSVRAYGMQRHLMESFDSSPTSTTLKSTFCPPEVVADCQTPNFSVRFHDNRFGENRPN

SEQ ID NO: 74266 - protein, 113 aa, Zea mays
  Coding DNA Sequence Number=SeqID_32487
MTQSVAPTVRRDLRRRSFHLISYVRGRQAVPEMAGLVGDSLKVFAGPLFGNIAFQRRFEQELCVRWSYGAEVTQLGAIGYGAELGAKVYGAELGTTSAPRRPSCASATRTSAP

SEQ ID NO: 74267 - protein, 352 aa, Zea mays
  Coding DNA Sequence Number=SeqID_32488
  Homolog annotation: Hit_ID=Q8S7U3; Match level="QueryCoverage=54%, HitCoverage=40%, E-value=8e-31, Identity=44%"; Hit description =Putative embryo-specific protein
  Pfam annotation: Domain name=LEA_4; Domain location=144-187; Score =12.2; E_value=0.053; Accession=PF02987.7; Description=Late embryogenesis abundant protein
  Pfam annotation: Domain name=LEA_4; Domain location=213-256; Score =16.6; E_value=0.02; Accession=PF02987.7; Description=Late embryogenesis abundant protein
  Pfam annotation: Domain name=LEA_4; Domain location=264-307; Score =12.6; E_value=0.049; Accession=PF02987.7; Description=Late embryogenesis abundant protein
  Pfam module annotation: Pfam domain module=LEA_4::LEA_4::LEA_4; Domain location=144-187::213-256::264-307
MAFLSRSRSHAVPSALLVLLLLSVASAAAVGVAAKTDVHDVAEESNKDEESWTGWAKDKISEGLGLKHHADVDEEETARKAGHTVKSARESAQHTASGKNSTVPHHSFIRSSRSCYDRADAGQVHATEIGKKAGYAKETAGDAAAGASNKAGQAKDQAKDTVKDAAGEASNKAEYGKQKTKEAAEAASESGAEAHERSKKGKAMVEEKAREKAGQGYESAKDAAGKAQETLSQTADAAAEKAGTAKDAAWEKADKAGKKAQESKEAAKGKATEKAASAKDAAWETVEAAKEKAGEGYERVKEKARETADTAKERLEEVKERVAGPDVAAVDGKGKHRRADVDKYRSESEDEL

SEQ ID NO: 74268 - protein, 103 aa, Zea mays
  Coding DNA Sequence Number=SeqID_32489
  Gene Ontology: Mol. function=sugar porter activity
  Homolog annotation: Hit_ID=Q8S7U2; Match level="QueryCoverage=81%, HitCoverage=12%, E-value=8e-15, Identity=56%"; Hit description =Putative sugar transport protein
MVIGAANALVMVKRGRLASTPRCTSKSYRFRVLWLYITWAGLTTVGLESRLVGEDLNGCAFVYCSLSFLDKIFCGIALFALESYEGRQLIGRAQHRRLPLQIR

SEQ ID NO: 74269 - protein, 52 aa, Zea mays
  Coding DNA Sequence Number=SeqID_32490
MMSSLLLPLLARRILPIARSRRLLSTGYSRRRPAPCMLKKLATLAKSGVDTE

SEQ ID NO: 74270 - protein, 58 aa, Zea mays
  Coding DNA Sequence Number=SeqID_32491
MEEAWIVEGYFWRSICRCWWKRFLSYTGLLETCRSCSNRPHIEVQVRLGEASPRNESS

SEQ ID NO: 74271 - protein, 149 aa, Zea mays
  Coding DNA Sequence Number=SeqID_32492
MEGIHTLLPDADGRELFLLADTPRRNGPDGSTALPAEYLVDSKREENCAERVIALPEIFHGHLHATIPSRRATSFCAPPLALVRSLRSTPDGMPGGTGAQRAAFYAQVVPGSQQKSRNSSNSTTAGTRDEVVMARREFRADSVLACYNE

SEQ ID NO: 74272 - protein, 64 aa, Zea mays
  Coding DNA Sequence Number=SeqID_32493
MAQCSALTILFGKPYTSHRNLADEEYILVPKQEVAQEVAQDPAPEPAIEDLPASALEGKPRFYA

SEQ ID NO: 74273 - protein, 123 aa, Zea mays
  Coding DNA Sequence Number=SeqID_32494
  Homolog annotation: Hit_ID=Q5QLQ8; Match level="QueryCoverage=86%, HitCoverage=36%, E-value=2e-41, Identity=76%"; Hit description =Cytochrome B561-like
MPLLSLHFGHRDKLELKAMKDGSANYATLEKKAKLYEKLSRGELPDEEDKEKYCVDFFQKGFDRVYEPQIPECSHRATDGAEPVNDHEDSMPNAKPLDLGRAGTTIDRDEHKRFVRCWVIVYQ

SEQ ID NO: 74274 - protein, 78 aa, Zea mays
  Coding DNA Sequence Number=SeqID_32495
MAFPCRYGSVVVPLRLGRPGHASKGWHALRRGRNCCRHGPVVETGCLGVGLADSGWAPSCVPVAVAIRSGGLKMVFGP

SEQ ID NO: 74275 - protein, 94 aa, Zea mays
  Coding DNA Sequence Number=SeqID_32496
MAGSKDSSDVSPSNIIEPTMENLSTEDQQEIEEHKEQLIKEALAKFLANFKVNRNHRVVQQRATYLASLQPTTSNQNVKGLVGGAPRAPSRLII

SEQ ID NO: 74276 - protein, 86 aa, Zea mays
  Coding DNA Sequence Number=SeqID_32497
MATQKMIRAKVQVHVQHGPEAIGEECMLQLVEGVGGVKVLAVIIVDLARPQQLLVAKSCEKPKQTGAMSVEAKPSTMGVTGSRGCG

SEQ ID NO: 74277 - protein, 194 aa, Zea mays
  Coding DNA Sequence Number=SeqID_32498
  Homolog annotation: Hit_ID=Q2RAL5; Match level="QueryCoverage=97%, HitCoverage=98%, E-value=1e-75, Identity=63%"; Hit description =Expressed protein
MASADLLRREEEFYSSLFDSAKGDGARSRSQLIERKIEALEDMATRVSNRRSRKWFNDRLLIELVPRLYVEEIKGLFAPPPWGEQVPLSAFYRANVGEWDSFRSIDMDAEERVRAFIEDASDKDALVLNVQDPFQRLLLHGVCEFYNVSSTTTSSVREDGRPWKATTIKKRQGTGVPSRITLVSFLRMKKNGSQ

SEQ ID NO: 74278 - protein, 93 aa, Zea mays
  Coding DNA Sequence Number=SeqID_32499
MANATVCILLCKERLTLRLSKLDQCVQLKLTAALADLDSSNNWWATICGLRNKSGNGGLTASLLRGGGSHILATALICSRSAEKKAVGIGSTL

SEQ ID NO: 74279 - protein, 173 aa, Zea mays
  Coding DNA Sequence Number=SeqID_32500
MAVLVEVNAADAGDEVGDVSGCGFGDERGGGRLSFNRRIRDEDERGGGRLSFNHRVGDGEEGILGGRHRADLGDTEEDEETEDGEENARHDRGRGDGARGGDGARLEGGRERRADTRLAGIESRADADLPVRPSMNGAEADDFGPTMVQMGNGGGVADNERRRRHGGKKPYLA

SEQ ID NO: 74280 - protein, 70 aa, Zea mays
  Coding DNA Sequence Number=SeqID_32501
MGDHRNIKYKINLLPQWWCNPQLNMRNMYLNTAAWIKGEHKNKKKRRRNKYHMHLQPKSAQGGGEREMCP

SEQ ID NO: 74281 - protein, 55 aa, Zea mays
  Coding DNA Sequence Number=SeqID_32502
MGGGSTLPLLLILSLQRGSLLPKVSAAASSWRRRRWGYRDPIYRDEESPDFQYPT

SEQ ID NO: 74282 - protein, 156 aa, Zea mays
  Coding DNA Sequence Number=SeqID_32503
  Gene Ontology: Mol. function=serine-type peptidase activity; Cellular component=integral to membrane; Biological process=proteolysis
  Homolog annotation: Hit_ID=Q947Z4; Match level="QueryCoverage=51%, HitCoverage=52%, E-value=3e-23, Identity=60%"; Hit description =Putative signal peptidase
  Pfam annotation: Domain name=Peptidase_S24; Domain location=31-104; Score=28.9; E_value=1.8e-05; Accession=PF00717.13; Description =Peptidase family S24
MAPTRALPALWLSMAAAASYVVGEKYCRLCYLKGSSMVPTIQAQGDVGLLDRRCLAGYDFSHGDVVVFRLSTDHGMKMVQRLIALPGDWIQIPEKRDIRQVPSGHCWVEGDNAGNSWDSRHYGPFLSLTRTGKFHSLIISTAGCKGKELNPYTYPE

SEQ ID NO: 74283 - protein, 130 aa, Zea mays
  Coding DNA Sequence Number=SeqID_32504
MWGAFVVAAPGRTPPGAQEPVSAMEREGRRQYDNGQRWRGRGLGGSRAGSCRQRLEVGGKGAGGCREKGRRNLAFFSNAQESYASFILERRKVYLLVALNVPKWVIKPLTKLGEISCGMAEKRLEEETVL

SEQ ID NO: 74284 - protein, 82 aa, Zea mays
  Coding DNA Sequence Number=SeqID_32505
  Homolog annotation: Hit_ID=Q93YW0; Match level="QueryCoverage=73%, HitCoverage=8%, E-value=2e-10, Identity=52%"; Hit description =EXECUTER1 protein, chloroplast precursor
MGVLQLQASVYREDYRSAHKLRLAIATIVKNDTVGRAVSDLNMAIDEERYKDAAYIRDHAGTGLVSTVEFFYIVCPLLSKFL

SEQ ID NO: 74285 - protein, 288 aa, Zea mays
  Coding DNA Sequence Number=SeqID_32506
  Homolog annotation: Hit_ID=Q5GAP1; Match level="QueryCoverage=45%, HitCoverage=23%, E-value=4e-18, Identity=45%"; Hit description =Putative CDPK-related protein kinase
MTALSSLTEARRRQQGLDRSYSCPSARLRCSSDSHDITPARCQDLSGCHIGMAFLEKVGRAGPRTRQALSWGRSLPSPAWTLVTPLLQAHPTWARDEHEGRGTSTSLTPVSGHLASPPFALAHALDPSGLGHAAHSLVGLGTPLSRNADITGVAKVTPSDLIPQVILGHKPLVEPKPLAEAPALAPFPLVAAFLGDRQPWRAVAPCECRWMFLAGDDGRKGQPQEPPGRGGGLWAVGAKVDREVVHGARARRGEWEGQGHRPMLLRGPKRALGSGEWGLQEAKRTSGE

SEQ ID NO: 74286 - protein, 119 aa, Zea mays
  Coding DNA Sequence Number=SeqID_32507
  Subcellular localization annotation: CTP_CleavageSite=51; ConfidenceScore=5.54e-01
MVVERYPASSSPSPVGAGADPSTESSVRALGSARPCSDRRGAAGRGRACVRLRQVGSRSCPRASGWGCACTTRTGAVSRWGCALAEVAPTPGSPLVDGKRQARAVPVPLGRTVLCSCRG

SEQ ID NO: 74287 - protein, 85 aa, Zea mays
  Coding DNA Sequence Number=SeqID_32508
MWQRGSHTVHHRGERTTGGVASTDPSGSSKAVSMTSSGGEAWTRQPGRIRHHDSVWTRWSEVVFRAKVGVLYRLPHKGIIPRELE

SEQ ID NO: 74288 - protein, 105 aa, Zea mays
  Coding DNA Sequence Number=SeqID_32509
MLLPKEATQRQPSCLAKHRVMNNQRRCLGRVVRSRSVDQADNVRGGDDDVDGGASRSAVATSWRKWMCRRRGATQAVVPVTPQATPVVPSKKMKKSMLSKSMLRM

SEQ ID NO: 74289 - protein, 345 aa, Zea mays
  Coding DNA Sequence Number=SeqID_32510
  Gene Ontology: Mol. function=metal ion binding
  Homolog annotation: Hit_ID=Q6QP51; Match level="QueryCoverage=37%, HitCoverage=66%, E-value=1e-14, Identity=47%"; Hit description =Putative growth-regulating factor 1
  Pfam annotation: Domain name=AT_hook; Domain location=182-194; Score =8.5; E_value=0.77; Accession=PF02178.9; Description=AT hook motif
  Pfam annotation: Domain name=AT_hook; Domain location=201-213; Score =8.1; E_value=0.93; Accession=PF02178.9; Description=AT hook motif
  Pfam annotation: Domain name=AT_hook; Domain location=220-232; Score =8.2; E_value=0.88; Accession=PF02178.9; Description=AT hook motif
  Pfam annotation: Domain name=AT_hook; Domain location=239-251; Score =8.2; E_value=0.88; Accession=PF02178.9; Description=AT hook motif
  Pfam annotation: Domain name=AT_hook; Domain location=258-270; Score =8.2; E_value=0.88; Accession=PF02178.9; Description=AT hook motif
  Pfam annotation: Domain name=AT_hook; Domain location=277-289; Score =8.2; E_value=0.88; Accession=PF02178.9; Description=AT hook motif
  Pfam module annotation: Pfam domain module=AT_hook::AT_hook::AT _hook::AT_hook::AT_hook::AT_hook; Domain location=182-194::201 -213::220-232::239-251::258-270::277-289
MEAQAHTSCNRSAGYYVQETAPPLAPMSRLLDYGTGIGKGDTPKGILLREGSGPRAPLLIRGSKASPSEGFNSRLRALGLCAHYWSEVRRLAPRKGSTAASGHSGSAPTTNQGFVGWPPKGSTAASDAERGMTLGSSTSPDPRARTQPRLRKTADSASPDPKARTRAWPRKTTDSASPDPRVRTRARPRKTTNSALLDPRARTRARPRKMTNSASPDPRARTRARPRKTTNSASPDPMARTRARPRKTTNSASSDPMARTRARPRKTTNSASPNPRARTRARPRKTTNSASPDPRARTQPWPRTTVSASPDPRLRLDLDLGGASASPDLGLGPTTSQEGPSLPYP

SEQ ID NO: 74290 - protein, 251 aa, Zea mays
  Coding DNA Sequence Number=SeqID_32511
  Gene Ontology: Biological process=cell wall catabolic process
  Homolog annotation: Hit_ID=Q10SU7; Match level="QueryCoverage=47%, HitCoverage=33%, E-value=2e-22, Identity=51%"; Hit description=LysM domain containing protein, expressed
MAVHSKGKSAFLDVEPWLEPPNSDPFPLQNRKNRSLMIGSFLDGGTDENGDSERFIRRRQKADGELLPREENGGDFLASVGKGLALRPKSSNRPDMNKSQQNLFAMAEPLFGNGLQTVRKSSSTPEFQEPETNTSSSICRLRLLVKPMYEHRYDQDQQVLSVPLSSIEINSSTQTHPKFASSIKHARFRSMPNLVTTKKQDLYVVDYFRKITSVVSDLAAVDAPLSDDDVLTYLFNGLGSEYDFRLFRDDQ

SEQ ID NO: 74291 - protein, 191 aa, Zea mays
  Coding DNA Sequence Number=SeqID_32512
  Gene Ontology: Mol. function=DNA binding; Cellular component=nucleus; Biological process=regulation of transcription, DNA-dependent
  Homolog annotation: Hit_ID=Q9LLM9; Match level="QueryCoverage=60%, HitCoverage=45%, E-value=5e-54, Identity=83%"; Hit description=Myb -like protein
  Pfam annotation: Domain name=Myb_DNA-binding; Domain location=20-66; Score=47.6; E_value=4.3e-11; Accession=PF00249.21; Description=Myb -like DNA-binding domain
  Pfam annotation: Domain name=Myb_DNA-binding; Domain location=72-117; Score=57.8; E_value=3.6e-14; Accession=PF00249.21; Description=Myb -like DNA-binding domain
  Pfam module annotation: Pfam domain module=Myb_DNA-binding::Myb_DNA -binding; Domain location=20-66::72-117
MTSSSSTNTSDGAKPSSCRRGHWRPGEDEKLKQLVNKYGAQKWKSIAEKLEGRSGKSCRLRWFNQLDPRINKRPFTEQEEERLLNAHHAHGNKWALIARHLPGRTDNAVKNHWHVVMARRCRERSRHHARAASSSSPLSINLSPRETLDVDIGDRVRHKHRRKDYHAGDSADKPLKKDVPFIDFLGVGMSS

SEQ ID NO: 74292 - protein, 151 aa, Zea mays
  Coding DNA Sequence Number=SeqID_32513
MDEAPRRRMEEAHEPAPAPRSRRGCTSPEEPAARAAPWPLLPRDEAPCRAPPGRCPRRGRRGRAHARGHAHLRRAVGAGGCRAEARQPRPRRAARCRASGRGNPGREEEPPGVGGGSGGRRLLGGREPPAAALGREESSAGRKKAASGREG

SEQ ID NO: 74293 - protein, 129 aa, Zea mays
  Coding DNA Sequence Number=SeqID_32514
  Gene Ontology: Cellular component=integral to membrane
  Homolog annotation: Hit_ID=Q53M65; Match level="QueryCoverage=80%, HitCoverage=31%, E-value=2e-38, Identity=74%"; Hit description =Similar to SAC domain protein 7
MDMPNDTCSSPKLHTRLRLWEFADCYVFEPVGLNDLLLSVNRINGSMNLVEELPQHGPSINPKVQIVFGVIGVLKLAVGTYILVITDRDCAGSYLGHAVFKVRGMVMFNYFQLQCLYCTIYSIHRGYMN

SEQ ID NO: 74294 - protein, 128 aa, Zea mays
  Coding DNA Sequence Number=SeqID_32515
  Subcellular localization annotation: CTP_CleavageSite=17; ConfidenceScore=5.03e-01
MATQPRPTPRTESQRRRASLAAELRSPPRCPVSNCRGTGHRANLYPEVVRGIRYPLRKRRARSLRGIRGARCAPARFDGDDEQGSGLCRARATGKWAQAVNEGGERTVLIPIRVNHAIWSYPQMVKLL

SEQ ID NO: 74295 - protein, 61 aa, Zea mays
  Coding DNA Sequence Number=SeqID_32516
MPFGFQEEDMKICERMWGASTTLNSMGDVADRREFLVGASTPLRSRWRSMLGNLAARLKLH

SEQ ID NO: 74296 - protein, 177 aa, Zea mays
  Coding DNA Sequence Number=SeqID_32517
  Pfam annotation: Domain name=DUF1442; Domain location=1-177; Score =38.2; E_value=2.8e-10; Accession=PF07279.2; Description=Protein of unknown function (DUF1442)
MKLVWCPDTASKAYIDGVRAIAAAADYSDGGGSAELVAAMAGGWNAQLIVDAPADSAPPPPSAPSPNNNPPATSLALAAAARHTGGRYARLDAHPDEPAAAAKAAMARLEGVDLLVLDARRRDAAAVLRAARPGPRGMVVVLRHADNTAASASAAPLGRMAAGTRLVRAAYLPIGAR

SEQ ID NO: 74297 - protein, 120 aa, Zea mays
  Coding DNA Sequence Number=SeqID_32518
MTVAFGNRDKRRLKQVMDALEFDYLDYERFEEEAGGVKRKRVLSIMKIQAMRSVQEDKKKRIFPKKRKIADEGESSQSGPKSPAPKKRKSSKVGRAEKKILVPPKQVPEMRPLRHLLLAL

SEQ ID NO: 74298 - protein, 583 aa, Zea mays
  Coding DNA Sequence Number=SeqID_32519
  Homolog annotation: Hit_ID=Q2R4W1; Match level="QueryCoverage=44%, HitCoverage=56%, E-value=2e-17, Identity=29%"; Hit description =Expressed protein
  Pfam annotation: Domain name=DUF1719; Domain location=109-361; Score =318.7; E_value=1.1e-92; Accession=PF08224.2; Description=Domain of unknown function (DUF1719)
MAAEMVGSVVAQETVSQILSGLVQRYAESSDATRNLERLEMAHIRLEAALDASDRWQIADASLLRWRKKLRRVAQECHDVLHRCRQQQGVAQAQAQEPATPSSSLSPLAALPTRIARATKSLIFSAFVGDAGAPSRSTVQRFEWFADGAGEFLRYVEVGGGAAPRCHVPLRRSLTRHLFAGMELLLQHKIVWGGGRDECPSYLLWLVPSVTPDHGIEACLKFIHRDHSAPENNFFLGAMLQISESTDVVGTVVNCLRLFPPCFQPTIEAIKKELTQLPTQDFSWVPYVDLWHRKHWDNLHGFCTQWFRPDPLCCKKQQHQQQGPNGSSRPSWCSSGDDPDMVGIPDVSLDSVILMHLECQVSVPSEYNGAYRYSKQKATTASPPYRRRCSSRTSPTPTTQDSEYSPCRRLKAGLLFTPHGCTKHRLPEEKSSAVVTVYGEEQRCVHTDITLDQLNEIMLPKAADYFYRNPEATACQMLWKSRHGTEYIEFEKPRTEEEEEEPPCARRAICRGGSRKRKLQLQVQQDQVQVLGSWNRKVACFLNSWVAHAPVRLRGLILDWIRRGKESQLPAPPPVHQLEISTM

SEQ ID NO: 74299 - protein, 80 aa, Zea mays
  Coding DNA Sequence Number=SeqID_32520
MKGRASPALSRRRGATLDWDDDDDEKERERDETEQEETEWDSEPEEEPEVERDAKPRMEGEEATYRGLNLKKCREMGQSK

SEQ ID NO: 74300 - protein, 672 aa, Zea mays
  Coding DNA Sequence Number=SeqID_32521
  Homolog annotation: Hit_ID=Q2R4W1; Match level="QueryCoverage=36%, HitCoverage=56%, E-value=7e-19, Identity=29%"; Hit description =Expressed protein
  Pfam annotation: Domain name=DUF1719; Domain location=147-378; Score =379.1; E_value=6.7e-111; Accession=PF08224.2; Description=Domain of unknown function (DUF1719)
MMLPKAVDHFRENGEAAVHQMLWKGAVYVLDFLVEKGGDATNTYWILMTERVSSMVVQETVSQILSGLIHSYEGKGDSNPNDNLERLEMAHIKLEAALETCSKWHITDLSLLRWRKKLKRAAQECDDTLYKYKKMILEDEQMEQEVRNSYFPRRIAHATKSFIFSAFGHNNYESSRSAVRRFEWYADGASEFLRFVELGGAPCCHMPFNSFAKHLFAGKELQHKIVRGNEYPLFLLWLMPFVTEEHGIEACLIFIKKDGNTLEDDFFFSVILQLSESTDIVGITMKCLQLFPHHFQPTVDTIKKELTQLTTQDFSWVPYVDLWHRKHWDNLHRFSTQWFRPDPLCCKQHDQHKLQYSNLGTVDASLDSIIEVNMQCQISLPKYNNHRTALSECKYSLRDYQKLKAGFLFTPHCPSENMLPADTSSTMVPIFRRGQHCEDTDIALEQLKEIMMSKAIDYFRQYTEATVYQILWKAIHGTAYIHFEKPAMEAPGTSSRARSCGTESFAGMSAARFCYTGVAPFRYGRAWDRSLPGVYEERQRHTGGGGELLLQCDTAALREQRHGWSARGCSPLIFSTQLTPSGKNSHSAAYTGWDFSWVPYDCWSLAQKTIDPLCCKQHDILCAISDYQNLKAGLLFSPHGSSESMLPRDTASTMVAIHGGEQHREHTGVTLE

SEQ ID NO: 74301 - protein, 74 aa, Zea mays
  Coding DNA Sequence Number=SeqID_32522
  Homolog annotation: Hit_ID=Q9FMR7; Match level="QueryCoverage=97%, HitCoverage=14%, E-value=1e-13, Identity=57%"; Hit description =Arabidopsis thaliana genomic DNA, chromosome 5, P1 clone:MWD9
MRPIRLPEPPGVDGMETPEIFSGSGTGGAAVVRRAVLIGNGSPGAENQCLGLARALGLADNLTFYVSSLSSTSP

SEQ ID NO: 74302 - protein, 491 aa, Zea mays
  Coding DNA Sequence Number=SeqID_32523
  Gene Ontology: Mol. function=RNA-directed DNA polymerase activity; Cellular component=mitochondrion; Biological process=RNA-dependent DNA replication
  Homolog annotation: Hit_ID=Q8S463; Match level="QueryCoverage=84%, HitCoverage=30%, E-value=1e-103, Identity=79%"; Hit description =Putative prpol
  Pfam annotation: Domain name=RnaseH; Domain location=37-164; Score =2.6; E_value=3.3e-05; Accession=PF00075.14; Description=RNase H
  Pfam annotation: Domain name=rve; Domain location=204-332; Score =26.4; E_value=3.7e-05; Accession=PF00665.16; Description=Integrase core domain
  Pfam module annotation: Pfam domain module=RnaseH::rve; Domain location=37-164::204-332
MGETISFAPRKAIKSQVLADFVAEWVDTQLPTVSIQPELWTMFFDGSLMKTGAGAGLLFISPLGKHLRYVLRLHFLASNNVAEYEALVNGLRIAIELGVRRLDARCDSQLVIDQVMKSSHCRDPKMEAYCDEVRRLEDKFYGLELNHIAWRYNETADELAKIASGRTTVPPDVFSRDLHQPSVKIDDMPEPEAPSAQPEVPSAQSEAPSARPEASSVQPEKAPGGYTHLLVAIDKFSQWIEVRPLNSIRSEQAVAFFTNIIHRFGVPNSIITDNGTQFTGRKFLDFCEDHHIRVDWGRRGSPHDEWASRACQRHDSTRTQASDQQRPQQVRQAMDEGTPLGGLKSGDNTEPSHGLHAVLLVYGAEAILPIDLEYGSSRTRACADQSNQANREDSLDQLEEARDMALLHSVRYQQSLRRYRDRGVRSRDLQVGDLVLWLRQDARGRHKLTPPWEEPFVIAKVLKPGTYKLANSQGEVYSNAWNIQQLRRFYP

SEQ ID NO: 74303 - protein, 103 aa, Zea mays
  Coding DNA Sequence Number=SeqID_32524
MEVFFNLTAVRRTGGGVECSAMASTMEMKARRRGSTKEEQGNSEVCSRVAGTSWKAPTAATATVDAAMLRVIDSDRDDDKKGKKKMEKKRYYNKKKDGEAHMG

SEQ ID NO: 74304 - protein, 173 aa, Zea mays
  Coding DNA Sequence Number=SeqID_32525
AAYAAPIAVPLDRERLTAAKSDFGHHRKLRLARPQGSDSASASASEDDELRLARPQGSDSVSAPEDDELRLARPQGSDSASAPKADELRLARPQGSDSASAPEDDELRLARPQGSDSALASDDGLRLARPGARTRPRPRKIDSTSTSEEPPPRPTQGSDRPRHRGAHHYPTPS

SEQ ID NO: 74305 - protein, 90 aa, Zea mays
  Coding DNA Sequence Number=SeqID_32526
MVWPSGRNYAKPEVGLSLGTNSTSPEPDLGYLLPANPAEDHSSHCVLHVYEPQRRLGHGLDKISASPEHRFNQPQGLGILSLSRPACTPY

SEQ ID NO: 74306 - protein, 144 aa, Zea mays
  Coding DNA Sequence Number=SeqID_32527
MAEAQATITTYPKTYPRPPGEIRDGNPSEGGIEPLDPINRSGTRRFTRRGTWIMPLNTRNHKATVKHIPQGQEIVNHDSPEAPLDSLSKLCLARACPRTRDVLGKSSSHPRSPLHRGAVSASPKPVSGEEDNLELGLDQRPQGT

SEQ ID NO: 74307 - protein, 157 aa, Zea mays
  Coding DNA Sequence Number=SeqID_32528
MAPEAGLGCCQPHPGGWHSSRSKAGGAVFLSGVRAGLVWSGLFAAEERWWQLLHTPLLQLVIHGRRPVLDRLSSTPIARQERHTHCGRTICVDRGRQHSLCNGEAQRRRSSPSIAVVFILSRGSIRIGSGAPGPPVAWLSPPRRAARPASGRPAQGN

SEQ ID NO: 74308 - protein, 47 aa, Zea mays
  Coding DNA Sequence Number=SeqID_32529
MRDRAMFHLRALFSRAPSASLPSPGHALPQAYFQQLPCPLKYDKMEM

SEQ ID NO: 74309 - protein, 156 aa, Zea mays
  Coding DNA Sequence Number=SeqID_32530
MGKSKKGGNSSHHSGDKRKHEPSPPSEDFGDSEYSEEEFSFESEGLPVYASPPASSDDSDDSQGITIEVWTYIRAVEHSGLEGSDELEISSDEEISSDSSKEESGGDGDDEGDGGDGGDGGGDSDGDGNGGKGDSDGGSGKGGSDSSKDSGKVPLA

SEQ ID NO: 74310 - protein, 127 aa, Zea mays
  Coding DNA Sequence Number=SeqID_32531
MARAYWRFIECAGLGGSDESGVSSDEADSSDSSEEWSGSDGDDEGDGSSSGDDDKGDSGSSDGSKGDGGDDSSDDGKGDGGDDSSDGGKGNGGDNSNDGGKGNESGDGDGGRGDGSSGKASGIMPLV

SEQ ID NO: 74311 - protein, 226 aa, Zea mays
  Coding DNA Sequence Number=SeqID_32532
  Subcellular localization annotation: CTP_CleavageSite=9; ConfidenceScore=5.09e-01
MARPGGSIRGGARSRGGPSTTARNSPEFPVPADAIPLQKQPTHQGDPSQPLTSPGAAVQKRVLGSGELFVWVTAAQELARSGDGRKARGARADEFVGSMLIGKAGYLWLFNPFLDDVYSHVIVGIVNTHKDMGTFRKTTHDGESIMAMMDSSFRKSTSIRYVAWAPTPSNGRFGDVYIGPNSNLDVGEKLLPSMAHQTVRCPGFHIGQSSVTTDSLMAFLPSATRT

SEQ ID NO: 74312 - protein, 85 aa, Zea mays
  Coding DNA Sequence Number=SeqID_32533
MAYITCRRTRGSTGPRLVWGAVTEIALPRDSYGPSWLGVRMVFEEGPVSSSIGQHVAAPDLLKTEASGLTGQSQPLDRDGPPLTW

SEQ ID NO: 74313 - protein, 81 aa, Zea mays
  Coding DNA Sequence Number=SeqID_32534
  Gene Ontology: Mol. function=transcription factor activity; Cellular component=nucleus; Biological process=regulation of transcription, DNA-dependent
  Homolog annotation: Hit_ID=Q4G3H5; Match level="QueryCoverage=52%, HitCoverage=10%, E-value=3e-10, Identity=67%"; Hit description=RAV transcription factor
IYGFLGKNDFKGDGGANGEGPTMFESLPNEVKSGGDDIFLNFEDTSTGLVWRFRFCLWNNSKTYVLTKGWSVFIKEKNLKK

SEQ ID NO: 74314 - protein, 213 aa, Zea mays
  Coding DNA Sequence Number=SeqID_32535
  Subcellular localization annotation: CTP_CleavageSite=67; ConfidenceScore=5.09e-01
MGHVGVSGLERAVEVAWAVESQGLVARVAASVSQRTTVNGFERVSRRRVGRGSVTSPWLLGSGRGARSAKSGRGLPGVVLLGGVVGFSARCAGRVWVRCGGAAPGLRVSVLTTRHGDELLEALRLGRRDRVHGTGARLEKCARRAGGAARWAGRGGACAGPGRTALGSLQACEWARASGARWGGQGRPLAGARVGRVVRWARAAGAVQARVRS

SEQ ID NO: 74315 - protein, 75 aa, Zea mays
  Coding DNA Sequence Number=SeqID_32536
MSFTPEKASRSTLVDVRSYAQIGIIVVLANAVWRSYMSVIAFHFQVAFISQSWLKLENNSIAYAHKCFRSLSSQF

SEQ ID NO: 74316 - protein, 242 aa, Zea mays
  Coding DNA Sequence Number=SeqID_32537
MAPCDLVGPSPRSGEAEAPPRSRSSLSSEVEVESEPRVGRGEDYRLRPRLSPSPRVGRGGVRRLLEPRPSLSPGVGRGGVRRLPGPRPSPSPGVGRGGVCLFRGRGRVRALGRARRSLSSSRAEAESEPWVGARRSSSSEAETGAEPLGRARRSFLWRPKPDLAVVSLTLSSSTAVGATQAALSSCQAGQWSGEAILALNASAIRSVGVAIRPRLLLGEDWASGEPKLCADGGYQLRLGVSG

SEQ ID NO: 74317 - protein, 103 aa, Zea mays
  Coding DNA Sequence Number=SeqID_32538
MGVYIEAFDEVLAGRGDFCACVGVRGAVSLLENVGYEHVKAVIYLEFLSVDERWKKDSRRSYQTKVKNGTFFPHPPEPYDPDVDLALKGILDEFKMVNTTIDE

SEQ ID NO: 74318 - protein, 211 aa, Zea mays
  Coding DNA Sequence Number=SeqID_32539
RRLRVADEVLGPFIGGCVDVHLPKQLFRGGGSFLEDGLDKGQIVTPAIEIFDHGSLRDGRDAIPHGALLQRCISKGVWSDPGRWIRDSDRPQPSILDLRFRLGARRDIAIYSSWVVFNHRPGYPATPAPTAKPRWRAPRHSALASQFECRYVLCAEDRAKLMKTSLTEDGVAVRAAHGWVRIRNGGHSDEQLVADQGTPSPAKTTSSILEA

SEQ ID NO: 74319 - protein, 83 aa, Zea mays
  Coding DNA Sequence Number=SeqID_32540
MALGDDAVGHDGQDIGDGSAYEVSHFADDLVVEVEELMAALASQDKFLRLSTRERKDFKIQTRQDKDQKKTHTSICPEMGVMQ

SEQ ID NO: 74320 - protein, 159 aa, Zea mays
  Coding DNA Sequence Number=SeqID_32541
MGKPGPSLLMLLCRGYRASAVCGALVRQWLVGFLCGSGQWAAVLAVWAWGCAWARATEDWKWTVVANGRWVVVACWATCSYGPPMSSKSGLGRHRKLRLARPQRSDSASAPEDDELRLARPQGSDSASAPKDDELRLARPQGSDSASAPEDDELRLARP

SEQ ID NO: 74321 - protein, 491 aa, Zea mays
  Coding DNA Sequence Number=SeqID_32542
  Gene Ontology: Mol. function=protein serine/threonine kinase activity; Biological process=protein amino acid phosphorylation
  Homolog annotation: Hit_ID=Q9ASH1; Match level="QueryCoverage=75%, HitCoverage=98%, E-value=1e-115, Identity=58%"; Hit description =Membrane-associated salt-inducible protein-like
  Pfam annotation: Domain name=PPR; Domain location=154-188; Score =11.6; E_value=0.31; Accession=PF01535.11; Description=PPR repeat
  Pfam annotation: Domain name=PPR; Domain location=190-224; Score=3.5; E_value=2.9; Accession=PF01535.11; Description=PPR repeat
  Pfam annotation: Domain name=PPR; Domain location=226-259; Score =22.6; E_value=0.0014; Accession=PF01535.11; Description=PPR repeat
  Pfam annotation: Domain name=PPR; Domain location=264-298; Score =18.2; E_value=0.031; Accession=PF01535.11; Description=PPR repeat
  Pfam module annotation: Pfam domain module=PPR::PPR::PPR::PPR; Domain location=154-188::190-224::226-259::264-298
MAAATFSAAGRRLLSTAAAAAEKTELPVPIARLRQLARAGRLDDIDATLAPLFPSHPVAALSALSTLGLPDRASALLGTMTSPNTAHLNAVLGPLLRRRRLAGLVPSILAAHASVPRDAVTDSILAKSLCLTSGADSALHLLRKPSSGAPPSLQLFTTIIDSFYKQRLPHRAEEMWRAMVQDHGIAPDTAAYNALLTYKSTNGTVDEVKEVIRVMREEASLRPDVGSYNALMRAMARHKRLDEAVEVYRSLEAGKKADVVPDCATYSCVVGALCGAGRWSEAEDVFYAGVKRRKVADLGTVRVLVRGLKDAGKGRAARRVVVGLCKKFPEMFDGPWRELEVAAGLNSSGKEDGDVEDGADEKLAMTRATVAVVSHCNTWLVSGLVSHGPQLGDGYKSSIREMGRGEEKNRVLSPSVAGFRPKADSACDTDNLSAEPVFDDVVFEDIETNFDDLAELDKGPVFDTDSITDHITVSVTWSVILSSPSSTPTRT

SEQ ID NO: 74322 - protein, 150 aa, Zea mays
  Coding DNA Sequence Number=SeqID_32543
MGARKPYTNLANMLPEMPIINHMIKTAVAAIRSRSFTTGPTSLVLPKEKWRKKYEHFRGSHRPRRLGLDRARLGSRAWALALGGRQRTPATHVHCSVDRALLALRSPELKGGKSGATGYPGAHARSGHRGSSERGDTGVLRSVFVELASG

SEQ ID NO: 74323 - protein, 602 aa, Zea mays
  Coding DNA Sequence Number=SeqID_32544
  Gene Ontology: Mol. function=CTP synthase activity; Cellular component=cellular_component; Biological process=pyrimidine nucleotide biosynthetic process
  Homolog annotation: Hit_ID=Q65XK2; Match level="QueryCoverage=99%, HitCoverage=99%, E-value=0.0, Identity=67%"; Hit description =Putative CTP synthase
  Pfam annotation: Domain name=CTP_synth_N; Domain location=1-281; Score=580.6; E_value=1.5e-171; Accession=PF06418.4; Description=CTP synthase N-terminus
  Pfam annotation: Domain name=GATase; Domain location=305-542; Score =265.0; E_value=1.6e-76; Accession=PF00117.18; Description=Glutamine amidotransferase class-I
  Pfam module annotation: Pfam domain module=CTP_synth_N::GATase; Domain location=1-281::305-542
MKYVLVTGGVVSGLGKGVTASSIGVVLKACGFRITSIKIDPYLNTDAGTMSPFEHGEVFVLDDGGEVDLDLGNYERFLDIKLTRDNNITTGKIYQSVIDKERKGEYLGKTVQVVPHITNAIQEWIERVAMIPVDGMEGPADVCVIELGGTIGDIESMPFIEALGQFSYRVGEKLHTYYDAYKPSASPGNFCLVHVSLVPVLNVVGEQKTKPTQHSVRGLRGLGLTPNILACRSTKELEDSVKEKLSQFCHVPDQKAHEAILKVLNLERVDSIAREPKLDEWVARAAIFDTLHDTVRIAMVGKYTGLSDSYLSVLKALLHASVDCRRKLVVDWVASTDLEDSTAIEAPDAYKTSWNLLKGADGILVPGGFGDRGVEGKILAAKYAREKNVPYLGICLGMQIAVVEYARHVMNFTDANSTEFDPNTKTPCVIFMPEGSKTHMGATMRLGSRRTFFKIADCKSSKLYGNVTYVDERHRHRYEVNPDMVPEFEKAGLQFVGKDDTGRRMEMIEIPNHRYFVGAQFHPEFKSRPSKPSPLFVGLIAAASGQLDRVLQDRCNGHVGSAKHVLSNGSYTSAVHQNGNPKKLTNGLSNGTYYANGNGVHA

SEQ ID NO: 74324 - protein, 129 aa, Zea mays
  Coding DNA Sequence Number=SeqID_32545
MRLWGREHAAGHQEAGVVGGGHRGRRAGRGHGRRSGGWGHDIAAREGELDAGTLRLPRGREIAAGEGELAAGDAKIAAGDAEIAAGEGERRDCRGGGRGGAFAEGALLRCQAKAWWMPPLRTYGAAEIP

SEQ ID NO: 74325 - protein, 105 aa, Zea mays
  Coding DNA Sequence Number=SeqID_32546
  Homolog annotation: Hit_ID=Q94ED9; Match level="QueryCoverage=68%, HitCoverage=32%, E-value=2e-08, Identity=54%"; Hit description =Mitochondrial glycoprotein family protein-like
MPHCHELQSPPLAHGARPRGPQDDAAAQGQPAQAFSLDRLFGPMLRHGYGEDGVEISIPIAWLTNILSAAMGFPSPPLLVCHSLARKLRSAGGKVSKDPPPRISR

SEQ ID NO: 74326 - protein, 65 aa, Zea mays
  Coding DNA Sequence Number=SeqID_32547
MSLCQSSLDGSFGVYLRASVCFCADLAKVFLLKGPSATKQTPNSLFGNGVMVKDLWYRGETESLL

SEQ ID NO: 74327 - protein, 70 aa, Zea mays
  Coding DNA Sequence Number=SeqID_32548
  Homolog annotation: Hit_ID=Q5QLQ5; Match level="QueryCoverage=43%, HitCoverage=10%, E-value=2e-08, Identity=90%"; Hit description =Putative glyoxalase II
MASAYSAGYGAGRRLLFRQLFEKESSTYTYLLADVADPDRPAVGLFYHSHEYVAISENECNFVNLESAFI

SEQ ID NO: 74328 - protein, 82 aa, Zea mays
  Coding DNA Sequence Number=SeqID_32549
MGDVASSARAEEPPEEEGWRGREAKTRGGRSSVVWTPEILRKESARAEGDMCIVVKLRVGQITNHAVQKLVISDIMHRDIFA

SEQ ID NO: 74329 - protein, 264 aa, Zea mays
  Coding DNA Sequence Number=SeqID_32550
MGRRETEREGGKKPEGDRHKRGNPRPSCLSRAQVGCKERIQGNDGASCDVVGPSPGLGEAEAPPRSRSSLSSEAEVESEPLGRARWRPSAEARAESEPWGRARRSSSSSGAEPESEPWVGRSGVCRLPGPSLSPSPGVGRCGVRRLPGLSPSPSPRIGRSGVRRLPGLSPSPSPGATFALNAPAIRSVGVATWPRLLLGEVWASGEPKLCADGGYQLRLGVLRLHHRSFSPLYRQADEESIVHEQPQDGFQARAHTVLFAINLS

SEQ ID NO: 74330 - protein, 117 aa, Zea mays
  Coding DNA Sequence Number=SeqID_32551
  Gene Ontology: Mol. function=ATP binding; Cellular component=nucleus; Biological process=response to DNA damage stimulus
  Homolog annotation: Hit_ID=Q682V0; Match level="QueryCoverage=67%, HitCoverage=30%, E-value=2e-20, Identity=53%"; Hit description=DNA -repair protein XRCC4
  Subcellular localization annotation: CTP_CleavageSite=25; ConfidenceScore=5.11e-01
MAAASSAAPARHSCAKLSVPVEDPKAVTAGGGTVFVKATWLPSRFSLAVTDGAGAWVADASDHEVRLRAEQWDQPVADYIALAERYLAFQQPGSTYSFHDAGKGQRRVILPMLLDSE

SEQ ID NO: 74331 - protein, 227 aa, Zea mays
  Coding DNA Sequence Number=SeqID_32552
  Gene Ontology: Mol. function=ATP binding; Cellular component=nucleus; Biological process=response to DNA damage stimulus
  Homolog annotation: Hit_ID=Q0KJ39; Match level="QueryCoverage=77%, HitCoverage=58%, E-value=4e-36, Identity=47%"; Hit description=XRCC4 homolog
MKLMEASCPASTESWYDYYALLLLKLAWTFERQGTKLEWRWKLQPSPNTQQTISEILDFLMDANIRLSVCPFASPLHFFSLPVILKQEEVVRKTQSFDKLKQEAEKCLQQSERFNNEKAEFEQAAFSKFVAVLNSKKAKLRQLRDKVVELEPAVKPPKEEAGQEQEEEEENSTDRTELFEGENDKEASAKDEHSGETGSGNVPSSPGESAATSRGRGRGRGRKKARR

SEQ ID NO: 74332 - protein, 402 aa, Zea mays
  Coding DNA Sequence Number=SeqID_32553
  Pfam annotation: Domain name=AUX_IAA; Domain location=127-249; Score=- 102.7; E_value=0.04; Accession=PF02309.7; Description=AUXIAA family
MAHRFVIENSAKSEMGEALLRDSSGFFLGMESLPCPSWSVELEMGATLNKELRTRDCSWGWNVGPICSSTYLRHIGTVILPNSVTVYELWRAPPAGSPGSPCDLGHGRPPLLPWQALPSSGPSSSRLGYEDTTLALTLRLPGSDSGRSSSLAAPSAAPSPKARVVGWPPVRSYRKNALADSSKANRAANFVKVVVSRRSSASAPPAPGSHRRSLPQRVFFPSRAVPSCFLRTRRAELAPDLCSSLARRVLPCTCPWRPSSQPARPPGSLCRALLQLPRRAASLSAHRISQRRAQLLSPSAPAARAAPWRPASSVLSLDAHSVPSNSCAVPCSGSMAAPNSLRALAYNSTAHLPTCHGHRALLPDFCSPRALISLFASAHNSPSSMAGSLLAGDAPAPAQPRL

SEQ ID NO: 74333 - protein, 763 aa, Zea mays
  Coding DNA Sequence Number=SeqID_32554
  Gene Ontology: Mol. function=protein binding; Biological process =electron transport
  Homolog annotation: Hit_ID=Q010S1; Match level="QueryCoverage=79%, HitCoverage=86%, E-value=5e-78, Identity=31%"; Hit description=[S] KOG2477 Uncharacterized conserved protein
  Pfam annotation: Domain name=CwfJ_C_1; Domain location=527-652; Score= 187.0; E_value=4.4e-53; Accession=PF04677.5; Description=Protein similar to CwfJ C-terminus 1
  Pfam annotation: Domain name=CwfJ_C_2; Domain location=661-759; Score= 123.8; E_value=4.9e-34; Accession=PF04676.4; Description=Protein similar to CwfJ C-terminus 2
  Pfam module annotation: Pfam domain module=CwfJ_C_1::CwfJ_C_2; Domain location=527-652::661-759
MLSGVKLVPRDQIQSDQKRRGDQGSDSDSSDGKRPWKHSKRGRDKKEKKRRSSRRQRRRSKRYSSEDSLGSDTDDSIGEEEEDDVSRSKRRGKDRRRRRNFSDDDDSESGESDRGRASRRGKQRRDDEDEEEETEGDGLRASEVVRREMGLEWMLKPASSSQTEGTGVRKVDNVEKDESAHEEIMRPNPKELNPYLKDNGTGYPEESTPSNAGSQLLASSVVGDGGASWRLKALKRAKEQAAREGRKLEEVVEERWSSLGDLAVSVSASRAAHSHAHLHAIRGRKSGNADNSEERVKRNPEGQLDGSSGRREYLRDVSSQHHAMRKPKPDSVPWKKRRQNISSEDQALISSAVASLNKFSDDGSFMEKISNVESKNTNVSTASASADEQRDNGQKTPKESSNKVQLVSTQKLNANQMAAKILQLRMKGKHQEAEQLSREMEALLENQDTAHEKPGHGKERSSIRPTLKPTAADHRRREDDADLHLANKIMHNKQYNMSKSIEDEYDFGDAPTKKDKRKNKEARDERKSTDRRMLTQKERCMYCFENPSRPKHLVVAIGNFSYLMLPQFEPVVPGHCIILPLQHESGTRTVDQNVWGEIRNFKKCLLKMFAQQDKDVLFMETVISLARQRRHCMIECIPVPCEVSSNAPMYFKKAIDEAEEEWTQHEMKKVIPTSASRNLRQVIPENFAYFHVEFGLDRGFVHVIDDESKFSAGFGLNVIRGMLQLPEEDMHRRRRHESMDNQRQAVASFMKDWEPFDWTKQLD

SEQ ID NO: 74334 - protein, 105 aa, Zea mays
  Coding DNA Sequence Number=SeqID_32555
  Subcellular localization annotation: CTP_CleavageSite=32; ConfidenceScore=5.55e-01
MAPSDDSVAAPPLLPMSSGGGVAAFPSVVAPSSDMVSRVSGSGHLNYELARRELRDGGSTVRLCPVAATWAMENTKCECACVNKRTPLSNKNAYADGTYRLVEKR

SEQ ID NO: 74335 - protein, 236 aa, Zea mays
  Coding DNA Sequence Number=SeqID_32556
MGTAVEAGARRRRCRGTAVAVTGRSSGVGAARRAGGHDHGLGGGRARWAGAARGGRVVGRTTWARHRRGARHHCRLVLGLASQPGPGNGGTNRSACRSFSDLQANVVSSQTSRRSRSTSSRSSSRRAQLRLGTRACPAATAGAHGRGKQAPPPLPATRTQAWARERRYAGRCRHAGAAVTLPQPRGHRRADHHSLYRHAASRARGGEPVPQPPPSPRGKGTGKGKKGEGLGNPKRP

SEQ ID NO: 74336 - protein, 50 aa, Zea mays
  Coding DNA Sequence Number=SeqID_32557
  Subcellular localization annotation: CTP_CleavageSite=14; ConfidenceScore=5.13e-01
MGTPLADSLPSAVRQTLGKGLATASLSFSISFRAIKLLSVTSSILSIIRL

SEQ ID NO: 74337 - protein, 279 aa, Zea mays
  Coding DNA Sequence Number=SeqID_32558
  Gene Ontology: Mol. function=nutrient reservoir activity
  Homolog annotation: Hit_ID=P04698; Match level="QueryCoverage=57%, HitCoverage=60%, E-value=7e-52, Identity=69%"; Hit description=Zein -alpha PZ22.3 precursor
  Pfam annotation: Domain name=Zein; Domain location=1-164; Score =175.9; E_value=9.7e-50; Accession=PF01559.7; Description=Zein seed storage protein
  Subcellular localization annotation: CTP_CleavageSite=64; ConfidenceScore=5.23e-01
MVNPAAYLQQQLLASNPLALANVVANQPQQQLQQFLPALSQLAMVNPAAYLQQQQLLSSSPLAVANAPTYLQQQLLQQIVPALTQLVVANPAAYLQQLLPFNQLTMSNSAAYLQQRQQLLNPLAVANPLVAAFLQQQQLLPYNQFSLINPVLSRQQPIVGGTSPVEWSGRRLSSEWTGDIKCRDGTSPVSRADRRRVLSAINVEITWLKGLTSGSTLRLASRAIGRVAALGPRLSGERKYTRQDPDKSHPREHGGPGSYPEVRVMYAGVRHFPMGVRIH

SEQ ID NO: 74338 - protein, 391 aa, Zea mays
  Coding DNA Sequence Number=SeqID_32559
  Gene Ontology: Mol. function=hydrolase activity, hydrolyzing O -glycosyl compounds; Cellular component=chloroplast; Biological process=carbohydrate metabolic process
  Homolog annotation: Hit_ID=Q08047; Match level="QueryCoverage=97%, HitCoverage=47%, E-value=0.0, Identity=87%"; Hit description=1,4 -alpha-glucan branching enzyme IIB, chloroplast precursor
  Pfam annotation: Domain name=Isoamylase_N; Domain location=183-253; Score=58.7; E_value=1.9e-14; Accession=PF02922.8; Description =Isoamylase N-terminal domain
MAFRVSGAVLGGAVRAPRLTGGGEGSLVFRHTGLFLTRNDPATPPPSLIKCGPDSGGARVGCSGTHGAMRAAAAARKAVMVPEGENDGLASRADSAQFQSDELEVPDISEETTCGAGVADAQALNRVRVVPPPSDGQKIFQIDPMLQGYKYHLEYRYSLYRRIRSDIDEHEGGLEAFSRSYEKFGFNRSAEALVGDFNNWDPNADRMSKNEFGVWEIFLPNNADGTSPIPHGSRVKVRMDTPSGIKDSIPAWIKYSVQAPGEIPYDGIYYDPPEEVKYVFRHAQPKRPKSLRIYETHVGMSSPEPKINTYVNFRDEVLPRIKKLGYNAVQIMAIQEHSYYGSFGYHVTNFFAPSSRFGTPEELKSLIDRAHELGLLVLMDVVHSSKKKEIQ

SEQ ID NO: 74339 - protein, 457 aa, Zea mays
  Coding DNA Sequence Number=SeqID_32560
  Gene Ontology: Mol. function=hydrolase activity, hydrolyzing O -glycosyl compounds; Cellular component=chloroplast; Biological process=carbohydrate metabolic process
  Homolog annotation: Hit_ID=Q08047; Match level="QueryCoverage=91%, HitCoverage=52%, E-value=0.0, Identity=99%"; Hit description=1,4 -alpha-glucan branching enzyme IIB, chloroplast precursor
  Pfam annotation: Domain name=Alpha-amylase_C; Domain location=361 -456; Score=107.8; E_value=3.1e-29; Accession=PF02806.8; Description =Alpha amylase, C-terminal all-beta do
MEKGSMLIWNIRSHFLMFPYMWILIHVHQIDSFSKDINHASSNTLDGLNGFDGTDTHYFHSGPRGHHWMWDSRLFNYGNWEVLRFLLSNARWWLEEYKFDGFRFDGVTSMMYTHHGLQVTFTGNFNEYFGFATDVDAVVYLMLVNDLIHGLYPEAVTIGEDVSGMPTFALPVHDGGVGFDYRMHMAVADKWIDLLKQSDETWKMGDIVHTLTNRRWLEKCVTYAESHDQALVGDKTIAFWLMDKDMYDFMALDRPSTPTIDRGIALHKMIRLITMGLGGEGYLNFMGNEFGHPEWIDFPRGPQRLPSGKFIPGNNNSYDKCRRRFDLGDADYLRYHGMQEFDQAMQHLEQKYEFMTSDHQYISRKHEEDKVIVFEKGDLVFVFNFHCNNSYFDYRIGCRKPGVYKVVLDSDAGLFGGFSRIHHAAEHFTADCSHDNRPYSFSVYTPSRTCVVYAPVE

SEQ ID NO: 74340 - protein, 52 aa, Zea mays
  Coding DNA Sequence Number=SeqID_32561
MDRMFDSVNVNDDVEDAQDTSAKINDILSNTLKIMINQTREKGLMLKGTLPF

SEQ ID NO: 74341 - protein, 1001 aa, Zea mays
  Coding DNA Sequence Number=SeqID_32562
  Homolog annotation: Hit_ID=Q2R124; Match level="QueryCoverage=69%, HitCoverage=71%, E-value=0.0, Identity=58%"; Hit description=Pg1, putative, expressed
  Pfam annotation: Domain name=DUF1399; Domain location=69-214; Score =343.7; E_value=3.1e-100; Accession=PF07173.3; Description=Protein of unknown function (DUF1399)
YKACWLPLLDKHTKGVVVDGPLVVPLDCEWIWHCHRLNPVHTLLTMIICNSRTLGEPRDLIIRAHIFQVQYIRDCKKVYGRILNNNNVESSTQTKSTLESEKVWKELYPEEPFELLFTRTFDTAVDVNPAGAEEDITYDLVSAVKRQSSFYYQVGTPTMHDPRFLQEALARYKAFLYLIKMNQEKGLQRFRVPTYDVDLLWHTHQLHPITYRNDMVKLLGKVLEHDDTDADRSEGKKLDVGFTETTEQFESTFGVRYWKAGCMYRGNVPSPVTSTPQTFSAEVGTGSYICKAQKDLNALDVTVVELYLQIVDIKNLPSAVQKENVYVRFAKNQSDMFISDGGRLDISTVTGKNTGVCLQCEPTGELILAVMVDQLSKKPEPIGKVSFPLHDLTGPDSKLSFEKWFELKAHGGHAASPPVSLRVAASATVPSSAQKVFTMVRMEPFSLKSCLLPHSIKDQNTGSWTRFVNDCGTELIRLQIREHKAKNSMAVVRELVGVLKSTKKQIQLAEFKENKWTLKDSNLPISHGTDGSLLDLKGDNHLIKLYRGRKLEYERKCCSAHSEDVSAVTAVKFCAEHPYGKAVALLDTEAQLIMVNEDWLLLPWISISVLFMDGDGSMKLGGGAMVQKGTVFGSDTSMVLETQTVGAGSVASNLAQCGTCSAVFGGDDKEMANCKVEHASSGASRTVVASGENGHTETAGCGGGCGSNCGPMMAEDPKAGNAKSGGCGSGCGGGCGGAGGCGTMANEGQSRSGGVGTLLSSNAMGGEGQQAHSAGCGSGCGGGCGSGMVIEGSKANNAMSGGCGSGCGGGCGSGMLIEVSKANNAMSGGCGSGCGGGCGSGMVNEGSKANNAMSGGCGSGCGGGCGALFNASTAAGEGLHNKSAGCGGGGCGSGCGGGGGCGSGMAIEGFKANHAKSGGCGSGCGGGCGTLFSSSAAAGQGQSRSGGCGSGCGGGCGSGSMVAEGSNGGHAKSGGCGGGCGGGGGCGGGGCGGGCSTVFNA

SEQ ID NO: 74342 - protein, 498 aa, Zea mays
  Coding DNA Sequence Number=SeqID_32563
  Gene Ontology: Mol. function=oxidoreductase activity; Cellular component=integral to membrane; Biological process=electron transport
  Homolog annotation: Hit_ID=Q84LG7; Match level="QueryCoverage=91%, HitCoverage=92%, E-value=1e-151, Identity=57%"; Hit description =Putative taxane 10-beta-hydroxylase
  Pfam annotation: Domain name=p450; Domain location=41-495; Score =158.4; E_value=1.9e-44; Accession=PF00067.12; Description=Cytochrome P450
  Subcellular localization annotation: CTP_CleavageSite=23; ConfidenceScore=5.39e-01
MAFIVLLAAAAAAIAFVLLHLLSAQKKRSSRSAGSTSYSLPPGDLGVPVIGQTFSLLHALRSNTDDQWFRARIKRYGPVSKMSVLGSPTVLLAGTEANHFIFTNQGLILTQTRALRSLLRRSILTLTGDDLKQVRSALQGYLRPEMVRGYVGKMDAEVRRQLKLNWVGRSTVNVLPMARSLTLGVICSVVFGEEAAAIVDALATDFQQLGDAILSFPVNIPFTRFGKGMRSSAKIREAITKFARKREEEYSLLLSQDEGCTATATATTSAATDFVTYMLLLRSRGAHSLSLADIVDNVMGIVIGAHGTTSTLITFMVRHLANEPDVLAKITQEQDEIAGRNGRDGALTWEDVSSMKYTWRAALETLRTVPPVFGSFRTATKDIEYQGYLIPKGWKVFASQSITHMDPRFFAEPTKFDPSRFEKRSSIPPYSFLPFGGGPRMCPGTEFSRVETMVAMHYLVTRFRWKLRFEDEAYNKDPKPTPVFGCPVELELRKPPAI

SEQ ID NO: 74343 - protein, 97 aa, Zea mays
  Coding DNA Sequence Number=SeqID_32564
  Subcellular localization annotation: CTP_CleavageSite=30; ConfidenceScore=5.15e-01
MGATSTSPPRSTDRSTALGCCRLCATTRPRAVVRGVSRVDGGVDRGLGGKDRPIGAWNFTSEFIATTESVVRRGHLTLRCRSPCGSGESDLIVAVGF

SEQ ID NO: 74344 - protein, 179 aa, Zea mays
  Coding DNA Sequence Number=SeqID_32565
MCSAVAAAHARVPSRSCARLLLDRDDVDRLRRLHQPAVVACSSPVPEHSSVERGGCACACLCACLQGSGPVEVATVAVLLWRGVSGSQRRLARRQGLTLEDTRHRKTLGKDNFAEWQTLGKGGSRQRAVSGRSKADGRQPLLRAEGRHSVKRALPSASRLTLGKEGFAECHPLGTRQRN

SEQ ID NO: 74345 - protein, 91 aa, Zea mays
  Coding DNA Sequence Number=SeqID_32566
METLSAKQEGTVDVKLKPTSNQSNSMDVGWRPMTATRVDVERESRAHGDGLTGMSGVATGEAEITHGGGEEVEGVQHDMAPQREGFTIGEC

SEQ ID NO: 74346 - protein, 206 aa, Zea mays
  Coding DNA Sequence Number=SeqID_32567
  Gene Ontology: Mol. function=nucleotide binding; Cellular component =protein complex; Biological process=barrier septum formation
  Homolog annotation: Hit_ID=Q94F85; Match level="QueryCoverage=67%, HitCoverage=49%, E-value=5e-56, Identity=64%"; Hit description =Plastid division protein FtsZ
  Pfam annotation: Domain name=Tubulin; Domain location=1-95; Score= -21.7; E_value=1.6e-06; Accession=PF00091.15; Description=TubulinFtsZ family, GTPase domain
MGGGSRSGAAPVVPQISKEAGYLTVGVVTYPFSFEGPLEALEKLEKSVDTLIVIPNDKLLDVADENMPLQDAFLFADDVLRQGVQGISDIITAATGVVYNITGGKDITLQEVNKVSQIVTSLAGPSANIIFGAVVDDRYTEIQYSFHVCSHIYRNLEARMTDTLTTIAEINWYGRSKGEDGIEEPGSYQSHEVNQGSPGSSEVIDH

SEQ ID NO: 74347 - protein, 199 aa, Zea mays
  Coding DNA Sequence Number=SeqID_32568
  Gene Ontology: Mol. function=nutrient reservoir activity
  Homolog annotation: Hit_ID=Q41887; Match level="QueryCoverage=81%, HitCoverage=61%, E-value=2e-34, Identity=55%"; Hit description=22 kDa zein protein
  Pfam annotation: Domain name=Zein; Domain location=1-191; Score =230.1; E_value=4.8e-66; Accession=PF01559.7; Description=Zein seed storage protein
MATKILSLLALLALFQQQFLPALSQLAVVNPVAYLQQQLLASNPLALANVAAYQQQQQLQQFLPALSQQAMVNHAAYLQQQQLISSSPLDVVNAPTYLQQKLLQQIIQALTQLAVANPAAYLQQLLPFNQLTVSNSAAYLQQRQQLLNPLAVANPLVAAFLQQQQLLPYNQFSLMNPACRGSNPSLEVPSFRLHMRCTR

SEQ ID NO: 74348 - protein, 402 aa, Zea mays
  Coding DNA Sequence Number=SeqID_32569
  Gene Ontology: Mol. function=sugar porter activity; Cellular component=integral to membrane; Biological process=transport
  Homolog annotation: Hit_ID=Q8H6J2; Match level="QueryCoverage=99%, HitCoverage=100%, E-value=1e-100, Identity=80%"; Hit description =Putative sugar transporter protein
  Pfam annotation: Domain name=Sugar_tr; Domain location=7-393; Score= -115.8; E_value=0.003; Accession=PF00083.14; Description=Sugar (and other) transporter
MKSTVFSAAVVSIGYALLGWDFAALSEANNHMEKEFELLNGPSIEESPRWLASDGKISEARVSLQWLRGKKHDVSGEIAAIVEGVDIISDSTVGAARAQSFSGTSASHTWPRKHEHMNEHRDGNSDQQTRETYYAGEANNGDGLRASLLSQAANVEVNDTNTSFTSEGSSSYLRRHGTSVLAQEFMASIHDYDIEEEEEEIHRFALPHQSAPRDMESTGRHPFRHQIVRLSETADMKFKWRIMYSIQHGVQFTCALATMVLVLATTPVLILSLSVMSMSTLVNMGPFESAVLFHFALTICFWSYVIGLGPIPNILCSEIFPTKARATCASFCSLSFWFGGLLSAYCFPVMLSTIGLGGACGIYALVCCAPLFLVYYRIPETKMLNLELIAELFKLSRQEYVQ

SEQ ID NO: 74349 - protein, 243 aa, Zea mays
  Coding DNA Sequence Number=SeqID_32570
  Gene Ontology: Mol. function=nutrient reservoir activity
  Homolog annotation: Hit_ID=Q41887; Match level="QueryCoverage=91%, HitCoverage=84%, E-value=2e-43, Identity=49%"; Hit description=22 kDa zein protein
  Pfam annotation: Domain name=Zein; Domain location=1-243; Score =466.3; E_value=3.8e-137; Accession=PF01559.7; Description=Zein seed storage protein
MATKVLALLALLAPFFLPPVTSMGFEHLAVQAYMLQQALAASVLQQPIDQLQQQSLAHLTIQTIATQQQQQSLPALSQLAVVNPVAYLQQQLLASNPLALANVAAYQQQQLQQFLPALSQLAMVNPAAYLQQQQLLSSSPLAVVNAPTYLQQQMLEQIVPALTQLAVANPAAYLQQLLPFNQLTVSNSAAYLQQRQPLLNPLAVANPLVAAFLQQQQLLPYNQFSLMNPALSWQQPIVGGAIF

SEQ ID NO: 74350 - protein, 426 aa, Zea mays
  Coding DNA Sequence Number=SeqID_32571
  Homolog annotation: Hit_ID=Q2R127; Match level="QueryCoverage=65%, HitCoverage=92%, E-value=6e-78, Identity=54%"; Hit description=Plant viral-response family protein, expressed
  Pfam annotation: Domain name=DUF716; Domain location=242-395; Score =279.9; E_value=5e-81; Accession=PF04819.3; Description=Family of unknown function (DUF716)
MRYDGIELGVPRFTMQRGLLDQSHTHAEAAGLPPFGYRTTKQEGSDPGSRPPTHRRRSRRSCSGDAGLGAAGSPTLRPPSSPRRPTQPAIGHKQERPRRAPQAASSSSSSSPPRPRARRKKSTRIHPREEMGSFKGHVLPGTLFLAVGLWRVWSSAARHAAEPSSFRVRAWSPAPAPGPARLLELYVVAGGALADMCVEVLYSTHLRIFAGGEVNPAHLNDLEHGGMLLMFFLFGALALASQLWPRHFPLTDGALCLVAATAFTAELVLFYFHSTTHMGLEGYYHYLLVLLVGLCVAAAVLGALLPDSFPADLASGVLVALQGLWFYQTALALYGPMLPAGCARDADAHVECRSRAAQERAEQLAISQLFALVLLAFLYALGCYAVAAARYGRPPELPAVRHRRAAAVELECRQGDDAGAMEECAI

SEQ ID NO: 74351 - protein, 191 aa, Zea mays
  Coding DNA Sequence Number=SeqID_32572
  Gene Ontology: Mol. function=nutrient reservoir activity
  Homolog annotation: Hit_ID=Q41887; Match level="QueryCoverage=85%, HitCoverage=61%, E-value=3e-28, Identity=47%"; Hit description=22 kDa zein protein
  Pfam annotation: Domain name=Zein; Domain location=1-191; Score =281.9; E_value=1.3e-81; Accession=PF01559.7; Description=Zein seed storage protein
MATKILSLLALLALFQQQFLPALSQLAVVNPVAYLQQQLLASNPLALANVAAYQQQQQLQQFLPALSQQAMVNPAAYLQQQQLISSSPLDVVNAPTYLQQQLLQQIIPALTQLAVANPAAYLQQLLPFNQLTVSNSAAYLQQRQQLLNPLVVANPLVAAFLQQQQLLPYNQFSLMNPALSWQQPIVGGAIF

SEQ ID NO: 74352 - protein, 95 aa, Zea mays
  Coding DNA Sequence Number=SeqID_32573
  Subcellular localization annotation: CTP_CleavageSite=66; ConfidenceScore=5.23e-01
MAGAHDQGRCLHTGSGGWSSFQGCRKIPHHVVRFTDPSKFFLSTFKESVISTVLKLCLKSLQEFVRLQTFNRSGFQQIQLDMEFLKTSLKARLFR

SEQ ID NO: 74353 - protein, 256 aa, Zea mays
  Coding DNA Sequence Number=SeqID_32574
  Homolog annotation: Hit_ID=Q8S7W2; Match level="QueryCoverage=21%, HitCoverage=29%, E-value=3e-22, Identity=92%"; Hit description =Putative endonuclease
MTDRRRQGLERTQPNPQKDRAQEGGSVAGGAVHGARQGRCASASASRARACTGACSAACRWRTPHPARLALPRGNLGARSPQRQSRCPPPPHNTPVSHAIRPRPSRLDLIGLALVAGAKGKGEEEPGGVRSSKMLQLLMAAAFSAAPLTLYVPPVRSLILFVEAMEVVCRDCGPYSPRRRRPLPRRPLPRPRRPSPAHLRSATVDRSKGNKTEISKSELIQKSAYCRVSGRDMDLVELSAYGNVRRGPDSGGCKIQ

SEQ ID NO: 74354 - protein, 813 aa, Zea mays
  Coding DNA Sequence Number=SeqID_32575
  Gene Ontology: Mol. function=sequence-specific DNA binding; Cellular component=nucleus; Biological process=regulation of transcription, DNA-dependent
  Homolog annotation: Hit_ID=Q9SWE0; Match level="QueryCoverage=99%, HitCoverage=100%, E-value=0.0, Identity=76%"; Hit description =Flowering-time protein isoform alpha
MELVLVKPAAGALVEVGSGSVAGAGSIPAMVAAQQEILHEQVDQLQRLVVAQCRLTGVNPLAQEMALKKPQKDLICKQRISEILRDESWKSEVDITEEVLALTDGANESRKPEPRKTPMLLTASAIETNKRSSVQTNDIQKAKMRAMFMQEKRGKIDINKLSDKPQAMDTKKAAGLVNSNPSAMPISPHTSAAQPVDPSPSTSKQSTDPQPDNTEISGGLKLNIGSKNNVIKKLDCKKVLWQIPPAVWIDPSWSVGAGDNSKELEVQTQRNRREKETFYTSQKDVPMNPKDPWDLEMDFDDSLTPEVPIDQVPDVDAMETESVGAAPSAVAPVKDKQIESASSTSGAVADDEEANTDYELLTVLLRNPELVFALTSNKGENMPNEQTIALLDTLKQTGLSLSELVNRLGNGAGLPKEPEPEPEPIPASLPSPTPPDRTSRAVWIPEHAMQVRAAPTLHLPSRGSTPPVANAVQQGFSNVVSSLPSQPYAPPVSVLPAQIQANAPPSLPLLAVSVNPPVQHVSPVNNLLNRASVHQHGQQQYALLSDPVATPLHQQAAGSKPAVAAHPSLPEPNASSHTAFPWQSNAADMTHAGRNATADPWAAARAANSYSTASASTVPSANQNAYGDQGKQGAYSSYGFSAASSRPVVPGHGHDRNGYSRSALVEYPWDGHHQRHSRSPDPGVVRDYDTDYGGAQGYSQQPLTQWSAGKVQQQGYNPEPSRQWSSSQAHQGGYAPAEPSRQWSSSQAHQSYAPELPRQWSSERRGYDDAEPSRTWSSGQQNPEAPRQWSRGKQDPYYSPSHSRRSYDQHRRR

SEQ ID NO: 74355 - protein, 37 aa, Zea mays
  Coding DNA Sequence Number=SeqID_32576
TLALPRWPAAGDLTSDGYSLWPMGEASSYRPATAETP

SEQ ID NO: 74356 - protein, 141 aa, Zea mays
  Coding DNA Sequence Number=SeqID_32577
  Gene Ontology: Mol. function=nucleoside-triphosphatase activity; Cellular component=protein complex; Biological process=protein catabolic process
  Homolog annotation: Hit_ID=Q9SSB5; Match level="QueryCoverage=75%, HitCoverage=25%, E-value=1e-55, Identity=99%"; Hit description=26S protease regulatory subunit 7
  Pfam annotation: Domain name=AAA; Domain location=1-75; Score=-33.1; E_value=0.067; Accession=PF00004.19; Description=ATPase family associated with various cellular activities (AAA)
PDTLDPALLRPGRLDRKVEFGLPDLEGRTQIFKIHTRTMNCERDIRFELLARLCPNSTGADIRSVCTEAGMYAIRARRKTVTEKDFLDAVNKVIKGYQKFSATPKYMGRGLRELARNRKSLDCSSRGRRRRCPPEELEQPQ

SEQ ID NO: 74357 - protein, 471 aa, Zea mays
  Coding DNA Sequence Number=SeqID_32578
  Homolog annotation: Hit_ID=Q5N7G9; Match level="QueryCoverage=42%, HitCoverage=56%, E-value=2e-61, Identity=57%"; Hit description =Putative sorting nexin 1
  Pfam annotation: Domain name=Vps5; Domain location=269-470; Score= -66.2; E_value=0.00033; Accession=PF09325.1; Description=Vps5 C terminal like
  Subcellular localization annotation: CTP_CleavageSite=61; ConfidenceScore=5.63e-01
MALASQQPPLAQHHQQQPRLFSTTHSRRPPRSPLNHRLPPTSAVPLGMLMHAVERAGTSPSQMHLRVVAGEDNMTPTVVVPPGTLMRVVERGWTSPSPMNACARHAASPLFTSACCWAPATSPPSLRCCTCLYRGDMPKHVTEANLLVLFCEVATVEEVTIIKDKATKVSRGVDLPGPRSGLAALPSPRLLPLGSPQCCDLHCSLRRSFSLLGDGFGSNVTRRNLLCTGWSFWEIWAPWFGSELDHLQRLFQLSIKARQPPYSRVRKWKSDVLRTFLQADEEIMDRARSYETGIFKKPADFIQMFKTWCSGESCLTESPELGQSLADFGKAIKLLGSCEGDLMEKVFSEVGSKSEMLSIKLQREADNLLFNFEEPLKDYVCALQSIKATMLDRANAFRQRFDLDQERKYKELNLEKLKFMNPEKYAEAESEFREASCCNFPLRNFLRSLVDELKADSEEATKKFEHIYTIY

SEQ ID NO: 74358 - protein, 292 aa, Zea mays
  Coding DNA Sequence Number=SeqID_32579
  Gene Ontology: Mol. function=zinc ion binding; Cellular component =intracellular; Biological process=response to DNA damage stimulus
  Homolog annotation: Hit_ID=Q94EV8; Match level="QueryCoverage=97%, HitCoverage=81%, E-value=1e-158, Identity=97%"; Hit description =Hypothetical protein hypro4
  Pfam annotation: Domain name=WLM; Domain location=7-204; Score=328.0; E_value=1.6e-95; Accession=PF08325.1; Description=WLM domain
MEVGDLHKVWEVRALKTKPDATAARATLDRVARQVQPIMRRHKWRVKVLSEFSPRNPRLLGLNVGAGVEVKLRLRRAGRDHDFIPYEEVLDTMLHELCHNERGPHDAQFYKLWDELRKECEELVSKGITGTGQGFDGTGRRVGGFTVHPPPPSLRQATLAAAQKRARNGALLPSGPRKLGGNSEIMSALSPVQAAAMAAERRMYDDLWCGSHDQSAIDDSDDVIILQESPNLTTRDGKDKGSCSNTSAQPSTSSRIHIAARDDRTTSDALDSSKWECGACTLLNQASFIVPK

SEQ ID NO: 74359 - protein, 446 aa, Zea mays
  Coding DNA Sequence Number=SeqID_32580
  Gene Ontology: Mol. function=protein serine/threonine kinase activity; Cellular component=cytoplasm; Biological process=protein amino acid phosphorylation
  Homolog annotation: Hit_ID=Q94EV7; Match level="QueryCoverage=86%, HitCoverage=95%, E-value=1e-150, Identity=96%"; Hit description=MAP kinase kinase
  Pfam annotation: Domain name=APH; Domain location=177-366; Score= -13.9; E_value=0.056; Accession=PF01636.13; Description =Phosphotransferase enzyme family
  Pfam annotation: Domain name=Pkinase; Domain location=175-432; Score =270.2; E_value=4.2e-78; Accession=PF00069.15; Description=Protein kinase domain
  Pfam annotation: Domain name=Pkinase_Tyr; Domain location=175-432; Score=61.0; E_value=3.2e-16; Accession=PF07714.7; Description =Protein tyrosine kinase
  Pfam module annotation: Pfam domain module=APH::Pkinase::Pkinase_Tyr; Domain location=177-366::175-432::175-432
MPLGLCVIIGITKYSVFVSSSLKFCSLQPKSDECRRVATGWYRMALFSNKRAPHDKPRAAVGRRRIQTESRRRHHYYHPRPNELLPTPTPAQSDPRTTPCARAASRPSSPARRAARAAARISPSPCPSARSPPPSPSRSLSRQPPPPPGGPPRRASPRPPPRRSSSSSRPPLAELERVRRVGSGAGGTVWMVRHRGTGRPYALKVLYGNHDDAVRRQIAREIAILRTAEHPAVVRCHGMYERGGELQILLEYMDGGSLDGRRIAAEPFLADVGRQVLSGIAYLHRRHIVHRDIKPSNLLIDSARRVKIADFGVGRILNQTMDPCNSSVGTIAYMSPERINTDLNDGSYDGYAGDIWSFGLSILEFYLGRFPFGENLGRQGDWAALMCAICYNDPPEPPPTASREFRGFIACCLQKNPAKRLTAAQLLQHPFVAGPHPQPLAAPPPS

SEQ ID NO: 74360 - protein, 160 aa, Zea mays
  Coding DNA Sequence Number=SeqID_32581
  Homolog annotation: Hit_ID=Q8SA97; Match level="QueryCoverage=36%, HitCoverage=11%, E-value=6e-10, Identity=57%"; Hit description =Ornithine carbamoyltransferase
MEHCPGLERLLETAHLELDGKLFVNTQQAPTWRANCRRFETGGSLGPTSWVTWRLLRSRGRVCLPWLRPSPSPWVGRGGGRSAEARAESEPWGWAKRSSSSSGAEPESEPWVGRSGVRRLPGLSPSPSPGSGGAEFAVFRDLARVRALGQAERSSPSAGT

SEQ ID NO: 74361 - protein, 139 aa, Zea mays
  Coding DNA Sequence Number=SeqID_32582
MNDGNNGDENVSPQPILNRRDTRQQRRGAGSDKCQAGAPVQRIRTRAPEAQQQWVGSSPPIHCPPTHGRRSICRCPIQEEAGATTSGDVAITDNRKNSQPPQEHSLQYHLDLDARKRRAPPPPSFGGLDDGEEEVAARV

SEQ ID NO: 74362 - protein, 174 aa, Zea mays
  Coding DNA Sequence Number=SeqID_32583
  Gene Ontology: Biological process=cell division
  Homolog annotation: Hit_ID=Q9ATW6; Match level="QueryCoverage=60%, HitCoverage=53%, E-value=2e-57, Identity=99%"; Hit description=Cell division-like 1 protein
MRMRWRPGVLAGHGVHADEDAHKAPPGGWLPTTPSTFAHGSSLLAQRGRQPAVTPTQGARGQLAVEAKRYNKDDAHIIPPARESGTPSGAGDLDCRSGWLEGPNKVYIPFLPCGDLSGYDSDRSYPLPSTDGGSYRSLDPVQPPIAPSYKTALQMKKASSHSAGADAIKPSADS

SEQ ID NO: 74363 - protein, 224 aa, Zea mays
  Coding DNA Sequence Number=SeqID_32584
  Gene Ontology: Mol. function=hydrolase activity; Cellular component =membrane
  Homolog annotation: Hit_ID=Q9ATW5; Match level="QueryCoverage=75%, HitCoverage=97%, E-value=4e-76, Identity=86%"; Hit description =Hypothetical protein hypro2
MLIYDTGDIRQPPCAPFVKNASAMFSFSQGCLCWRQEVPADIWLRYNTKSYCRQTLVGGNYGLLNTMLYCGTASCMGTKVLSTAFNGTNKIRAYAHCAKNSEEIALLLINLDGISTNRIYVTSQGAHARSGRKKESRTSDVHIIPAGLGEAAAALTRQEYHLTPKDGNLQSQQLLLNGNVLATDADGEIPELEPVQVEGTQPITVGPYSIVFAHVPSFYAPACL

SEQ ID NO: 74364 - protein, 711 aa, Zea mays
  Coding DNA Sequence Number=SeqID_32585
  Gene Ontology: Mol. function=magnesium ion binding; Cellular component=chloroplast; Biological process=metabolic process
  Homolog annotation: Hit_ID=Q5GAS4; Match level="QueryCoverage=99%, HitCoverage=100%, E-value=0.0, Identity=81%"; Hit description=Stc
  Pfam annotation: Domain name=Terpene_synth; Domain location=137-336; Score=251.3; E_value=2e-72; Accession=PF01397.11; Description =Terpene synthase, N-terminal domain
  Pfam annotation: Domain name=Terpene_synth_C; Domain location=368 -655; Score=324.8; E_value=1.5e-94; Accession=PF03936.6; Description =Terpene synthase family, metal binding domain
  Pfam module annotation: Pfam domain module=Terpene_synth::Terpene _synth_C; Domain location=137-336::368-655
  Subcellular localization annotation: CTP_CleavageSite=75; ConfidenceScore=5.36e-01
MVVHKDRKMVVAAASRHIPTPQAHWQMTGSSYACTCTAFRSISTKLAARSSGGRRSAVAPSAGGPPLPPPPPVVMAGAVASPGKRIPPSPIGCTSRAASGVAVSASATVAAPASSSRQAKEDDGASRNVSGFEPSIWGDFFLTYSSPLATSSLHKAWMVHRAEQLKEQVAAKLVAASSSACSLHRRIHLIHVLERLCLDHLFEDEISDMLARMNDVDVSGCDLQTVAMWFYLLRKHGYSVSSDVFAEFRDEQGGGFTANSARDLLSLHCAACLATRGETILDEAISFTAKSLKSTAPYTGAASLACEIKRALEIPLPRRVRIYEAKSRIAEYGREAEADELRNYLFQIIAIVNYRKLPLYFNGRHRFIYFRIERIAVQLRTCRWWNGLELQSRLSFARDRVVECYFWIVGVYFEPSYSRARIILTKVIAIVSLLDDTYDVYGTPQECELFTECIESWDPAVAGGLPENMKFIFGKILDTYQSIEEELAPEEKYRMPYIKNFVRLIPAVYPYGRALFSRLHCLQRGGSGWIIDLVRAYNKEVRWREQGYVPATVEEHLQVSARSGACHLLSCASFVGMGDVAGEEAFEWVCSVPKLVQALCIILRLSDDLKSYEREKMAPHVASTIESCMREHEVPLEVARVKIQEMIDETWKDFNEEWLNMNKHQPAELLERIFNLTRTMVYMYKNDDAYTNCHVIKDTINSLFVEPVFIA

SEQ ID NO: 74365 - protein, 119 aa, Zea mays
  Coding DNA Sequence Number=SeqID_32586
  Gene Ontology: Mol. function=structural constituent of ribosome; Cellular component=intracellular; Biological process=translation
  Homolog annotation: Hit_ID=Q5GAS3; Match level="QueryCoverage=99%, HitCoverage=100%, E-value=2e-58, Identity=83%"; Hit description =Rpl35A
  Pfam annotation: Domain name=Ribosomal_L35Ae; Domain location=12-100; Score=142.2; E_value=1.4e-39; Accession=PF01247.8; Description =Ribosomal protein L35Ae
MVKGRTGQRVRLYVRGTILGYKRSKSNQYETTSLVQIEGVNTKEDVAWYAGKRMAYIYKAKTKSSETRYRCIWGKITRPHGNSGVVRAKFKSNLPPESMVSDALSTLCDVRCFPIDALS

SEQ ID NO: 74366 - protein, 445 aa, Zea mays
  Coding DNA Sequence Number=SeqID_32587
  Gene Ontology: Mol. function=DNA binding; Cellular component =mitochondrion; Biological process=DNA integration
  Homolog annotation: Hit_ID=Q9ATW2; Match level="QueryCoverage=65%, HitCoverage=100%, E-value=1e-170, Identity=100%"; Hit description =RIRE gag/pol protein
  Pfam annotation: Domain name=rve; Domain location=157-316; Score =115.1; E_value=2.1e-31; Accession=PF00665.16; Description=Integrase core domain
MEAYCDEVRRLEDKFYGLELNHIARRYNETADELAKIASGQTTESCPSTEPRLGDWRGAPSRSSCWGTRRSSTTAAPKASSNDAYPSPKARSSYKKYTRGLAVTTQRPEPLLETPSDKVSIGRPRWPTPLELSAPAKGVNSTQGRPTCPLRLCRRYPITWPFAVWGLDLVGPLQKAPRGYTHLLVAIDKFSKWIEVRPLNSIRSEQTVAFFTNIIHRFGVPNSIITDNGTQFTGRKFLDFCEDRHIRVDWATVAHPMTNGQVERANDMILQGLKPRIYNDLNKFGKRWMKELPSVVWSLRTTPSRATGFTPFFLVYGAEAILPTYLEYSSPRARAYDDQSNRTNREDSLDQLEEARDTTLLHSARYQQSLRRYHARGVRSRDLQVGDLVLRLRQDARGRHKLTPPWEGPFVIAKVLKPGTYKLANSQGEVYSNAWNIRQLRRFYP

SEQ ID NO: 74367 - protein, 728 aa, Zea mays
  Coding DNA Sequence Number=SeqID_32588
  Gene Ontology: Mol. function=RNA-directed DNA polymerase activity; Cellular component=nucleus; Biological process=RNA-dependent DNA replication
  Homolog annotation: Hit_ID=Q8S472; Match level="QueryCoverage=99%, HitCoverage=69%, E-value=0.0, Identity=66%"; Hit description =Putative gypsy-type retrotransposon RIRE2
  Pfam annotation: Domain name=Retrotrans_gag; Domain location=213-280; Score=2.2; E_value=0.092; Accession=PF03732.7; Description =Retrotransposon gag protein
MQARLDEGAGTLEPFRRDIGQEWAGQAPAGEARHLPQGIQHRIADDVRARPPPASSGVGQNLAAAAILLCAMPEPSTTEGRRIQGELKSLLEDAVVRRAESSSSRRQGYPSEHRAATSRFMREASVHTGRTRNTAPAAPSRLDNEHHHRNRRTHLDERVRRGYHPRHGRRYDSGEDRSPSPEPPGPQAFSRAIRRAPFLTRFRTPTTITKSPTGTTWSKPSPATSKGTYVRPGNSWDLRSCRQQPGESLRDYIRGFSKQRTELPNVTDSDFIGAFLAGTTCRDLVSKLGRKTPTRASELMDIATKFASGQEAVEAIFWKHKQPQGRPPEDVPEASTQRGTKKKGKKKSQAQRDAADADLVAAAEYKNPQKPPGGANLFDKMLKEPCPYHQGPVKHTLEECAMLRRHFHKAGPPAEGGRAHNNDKREDHKAEEFPEVHDCFMIYGGQVANASARHRKQERREVCSVKVAAPVYLDWSDTPITFDQGDHPDRVPSPGKYPLVVDPVIGNVRLTKVLMDGGSSLNIIYAETLGLLRIDLSLVRAGATPFHGIIPEKRIQPLGQLDLPVCFGTPSNFRRETLMFAAASTSSTPRPSGSCGSICPRRETLMFEVVGFRGTYHAVLGRPCYAKFMAVPNYTYLKLKMSGPNGVITIGPTYRHAYECDVECMEYAEALAESEALIADLESLSKEAPDMKRHAGNFEPAETVKSVPLDSSNDASKQIRIGSELDPK

SEQ ID NO: 74368 - protein, 567 aa, Zea mays
  Coding DNA Sequence Number=SeqID_32589
  Gene Ontology: Mol. function=RNA-directed DNA polymerase activity; Cellular component=mitochondrion; Biological process=RNA-dependent DNA replication
  Homolog annotation: Hit_ID=UPI00005A975E; Match level="QueryCoverage =99%, HitCoverage=33%, E-value=0.0, Identity=78%"; Hit description =PREDICTED: similar to Retrovirus-related Pol polyprotein from transposon 297
  Pfam annotation: Domain name=rve; Domain location=331-490; Score =105.3; E_value=1.7e-28; Accession=PF00665.16; Description=Integrase core domain
MGEAISFAPRKAIKSQVLADFVAEWVDNQLPTVPIQPELWTMFFNGSLMKTGAGAGLLFISPLGKHLRYVLRLHFPASNNVAEYEALVYELRIAIELGVRRLDARGDSQLVIDQVMKNSHCRDPKMEAYCDEIDDTLEPEAPSAQPEEPSAQSEAPSARPEAPSARPEAPSVWPEAPSARSEAPSAPEGEALRVEEERSGVTPNRNWQTPYLQYLHRGELPLDRAEARRLARRAKSFVLVGDGKELYHRSPSGILQRCISIAEGQELLREIHSGACGHHAAPRALVGNAFRQGFYWPTAMADATRIVRTCEGCQFYARQTHLPAQALQTIPITWPFAVWGLDLIGPLQKAPGGYTHLLVAIDKFSKWIEVRPLNSIRSEQAVAFFTNIIHHFGVPNSIITDNGTQFTGRKFLDFCEDHHIRVDWAAVAHPMMNGQVERASDMILQGLKPRIYNDLNKFGKRWMKELPSVVWSLRTTPSRATGFTPFFLVYGAEAILPIDLEYGSPRTRAYADQSNQASREDSLDQLEEARDMALLHSARYQQSLRRYHARGVRSRDLQAGDLVLRLQ

SEQ ID NO: 74369 - protein, 604 aa, Zea mays
  Coding DNA Sequence Number=SeqID_32590
  Gene Ontology: Mol. function=magnesium ion binding; Cellular component=chloroplast; Biological process=metabolic process
  Homolog annotation: Hit_ID=Q5GAS4; Match level="QueryCoverage=95%, HitCoverage=99%, E-value=0.0, Identity=78%"; Hit description=Stc
  Pfam annotation: Domain name=Terpene_synth; Domain location=143-341; Score=250.3; E_value=4.1e-72; Accession=PF01397.11; Description =Terpene synthase, N-terminal domain
  Pfam annotation: Domain name=Terpene_synth_C; Domain location=346 -548; Score=258.1; E_value=1.8e-74; Accession=PF03936.6; Description =Terpene synthase family, metal binding domain
  Pfam module annotation: Pfam domain module=Terpene_synth::Terpene _synth_C; Domain location=143-341::346-548
  Subcellular localization annotation: CTP_CleavageSite=94; ConfidenceScore=5.61e-01
MAFYSSTVAPSGTTALFGLLVPLRLRRQMVAAASTTQAHWQMTGSSYACTCTAFRSISTKLAARSSAGRRSRGRRSAVDPSAGGPPLPPPPVVIAGAVASPGKRMPPSPIGCTSRAATASSSRQAKEDDGASRNVSGFEPSIWGDFFLTYSSPLATSSLHKAWMVHRAEQLKEEVAAKLVAASSACSLHRRIHLIHVLERLCLDHLFEDEISDMLARMNDVDVSGCDLQTVAMWFYLLRKHGYSVSSDVFAEFRDEQGGGFTANSARDLLSLHCAACLATRGETILDEAISFTAKSLKSTAPYTGAASLACEIKRALEIPLPRRVRIYEAKSRIAEYGREAEADELVMELAKLNYNLVQLQYQQELKIITRSIAVQLRTCRWWNGLELQSRLSFARDRVVECYFWIVGVYFEPSYSRARIILTKVIAIVSLLDDTYDVYGTPQECELFTECIESWDPAVAGGLPENMKFIFGKILDTYQSIEEDVPKLVQALCIILRLSDDLKSYEREKMAPHVASTIESCMREHEVPLEVARVKIQEMIDETWKDFNEEWLNMNKHQPAELLERIFNLTRTMVYMYKNDDAYTNCHVIKDTINSLFVEPVSIA

SEQ ID NO: 74370 - protein, 337 aa, Zea mays
  Coding DNA Sequence Number=SeqID_32591
  Gene Ontology: Mol. function=galactosyltransferase activity; Cellular component=membrane; Biological process=protein amino acid glycosylation
  Homolog annotation: Hit_ID=Q5GAS2; Match level="QueryCoverage=99%, HitCoverage=100%, E-value=1e-165, Identity=86%"; Hit description =Hypro1
  Pfam annotation: Domain name=Galactosyl_T; Domain location=99-282; Score=-33.6; E_value=0.00019; Accession=PF01762.12; Description =Galactosyltransferase
  Subcellular localization annotation: CTP_CleavageSite=61; ConfidenceScore=5.18e-01
MSTYLKKPPPCSVSLIVLLPLTLILLCFTFLLPLSAYISNPLASTAVATRACVGATAGVVRAAPATTTVGDVDGVVGSQRPAELMSVLVGVHTMPGKHSRRHLIRMAYALQQQTPALRAAARVDVRFVLCARPMPPEHRVFVALEARAYGDVLVLDCAENAEEGKTYTYFASLPTMLGSGSGGGGGRPYDYVMKVDDDTFLQLDALVDTLRSAPREDMYCGVGLPFHDRQFPPFMLGMGYLLSWDLVEWIATSDMVRREAMGVEDLTTGKWLNMGHKAKNRVNIFPRMYDYKSAKGEDFLENTIGVHQLKQDLRWAHTLEHFNVTRLEPSSMLLHNF

SEQ ID NO: 74371 - protein, 457 aa, Zea mays
  Coding DNA Sequence Number=SeqID_32592
  Gene Ontology: Mol. function=hydrolase activity; Biological process =metabolic process
  Homolog annotation: Hit_ID=Q9FUN1; Match level="QueryCoverage=71%, HitCoverage=95%, E-value=0.0, Identity=95%"; Hit description=Genetic modifier
  Pfam annotation: Domain name=Hydrolase; Domain location=202-383; Score=47.5; E_value=4.5e-11; Accession=PF00702.16; Description =haloacid dehalogenase-like hydrolase
MPPKELEKWRDSAAAHTSCSCCRRAASLSNSWVPTTPVPTWHCNQAAAARSGHQCGAAACVPSPIRMGLIATIQSKLWNLLHSQLPPTLASAAAFLPILQQPSFKFYRKCLTNCPYFALTMHSTTKPLGSSMPVKRAHLKPHAADIKRNPHVHELYKLVYRLPENLSWLLAPPEIPKRPASKKKKQKDEIVAGNSFGVILEWEGVVVDDDDPDLEPRVWYVLSLEEGKSFPPDALLKKIEGMRTDQAIAEVLCWSEDPAEIQRLATHKEVIYQKLQGGYYQLRPHVLDFLNTLVGFDIPIAIAAPRSRKSLEEGIKTVGLQGYFDAIVALEDFCLGKPDGEMFEVAAEQLGLEPDACVVFGNSNLTTESAHNAGMRCVAVAGRHPAYELQSANHVVRWLDQLSIVDLQRLANGEVIGRRGRESDMDMEIAKQCKFRTKDTPEFALPSWFACDELEFA

SEQ ID NO: 74372 - protein, 78 aa, Zea mays
  Coding DNA Sequence Number=SeqID_32593
MGGGNGHNSSLLERPRGSGGHERAGIASVDLGGWRGLREEKADFAEPESREVGRHGEQHGRRDDRDRYSFVFNLGDGT

SEQ ID NO: 74373 - protein, 108 aa, Zea mays
  Coding DNA Sequence Number=SeqID_32594
  Subcellular localization annotation: CTP_CleavageSite=6; ConfidenceScore=5.04e-01
MSTPATASIVQDSGLPSTAHTARQDQSRKEAVPSVIPFQLKDAQTQGQKESLAAPIRAIRPSVKIDIPTQVKEASASASSELPSSATDNAAAMECSTSSKMFLAIMLP

SEQ ID NO: 74374 - protein, 203 aa, Zea mays
  Coding DNA Sequence Number=SeqID_32595
  Gene Ontology: Mol. function=oxidoreductase activity; Cellular component=cytosol; Biological process=carbohydrate transport
  Homolog annotation: Hit_ID=Q7FS90; Match level="QueryCoverage=72%, HitCoverage=24%, E-value=2e-71, Identity=88%"; Hit description =Putative aldose reductase-related protein
  Pfam annotation: Domain name=Aldo_ket_red; Domain location=3-203; Score=33.5; E_value=3.4e-11; Accession=PF00248.11; Description =Aldoketo reductase family
MKANQTPQIDAPALDPRSQGKHDLQVIITRKNIYNVSIGATHKSVSNNLAWCTELAPDRVRPALQKTLKDLQLDYLDLYLERTQIHWPFRLKDGAHMPPEAGEVLEFDMEEVWREMEGLVKDGLVKDIGVCFTTVTKLNRLMRSANVPPAVCQMEMHPGWKNDRIFEACKKHGIHVTAYSPLGSSEKNLAHDPLVEKVPYYFS

SEQ ID NO: 74375 - protein, 591 aa, Zea mays
  Coding DNA Sequence Number=SeqID_32596
  Pfam annotation: Domain name=SPT2; Domain location=480-585; Score =41.9; E_value=2.2e-09; Accession=PF08243.2; Description=SPT2 chromatin protein
MAGSCIIALPSRFAMATSYGFCIGYVPKWFNWGYHQEVEDEYGDEYYDQDEYEEEGSGAGDGYAEEEEPTEGQKEILELRERLKEQIRRKAKAAAACTAGRSSSSQIPQARDKFGSFFGPSKPVISRRVIEERKSLKELHSTVAREPRPSGVHKDIPSSSKVQSRVNGHQHKQKIVNQVKKKAEALKDNRDYSFLLSDDADLSSSPKEKPAARSSLTQRADREVTQSTVKRKAPTSQPARLSNGYGPKNTMSTQRHAEGKVNSMRREDFSNTERVVSRDNERMYERVVSRDNERMHSIARNGSNQASTSKTTIQKHPSRGPIANKQPSKDSNDATLRKSSVASKHHPLEIDRPKSSQSQRMQSAGQRPQHSSHGQTPHQSMQHRTQQSLQSRRPQQMTQGQKPQQSLQSQRTQQSLQNRRPQQSSHIQKSQSSQAHRPQSLSNRSQALQGQRPLSSQGQYPEQRRVHASDRVKQAERQIRPPSKSMPSRPVSSNGIRDDHAKRKQVAKRRFDEDDEDPLAMIRNMFGYDPSRYAGRDEDVSDMEADFATIEMEEKRSARIARQEDEEQLRLIEEEERREQERKRRKMARGR

SEQ ID NO: 74376 - protein, 162 aa, Zea mays
  Coding DNA Sequence Number=SeqID_32597
  Gene Ontology: Mol. function=hydrolase activity, acting on ester bonds; Biological process=lipid metabolic process
  Homolog annotation: Hit_ID=Q5VP32; Match level="QueryCoverage=56%, HitCoverage=17%, E-value=6e-15, Identity=53%"; Hit description =Lipase-like
MADQTGTSLAVLFTLTTMIIWRQIKGKRQEYEATVAALSQMEKRDVMAKTMLEATKQYQAGQNSVYGTCCSDIMIESLFMVGEIGGNDYNLPLVSKVPIEKICSFTPSVIVKVSSTNTVNVYVILYVVAAAELTYYIDSNVTDWSLQELIRLGAKTLVVPGG

SEQ ID NO: 74377 - protein, 602 aa, Zea mays
  Coding DNA Sequence Number=SeqID_32598
  Gene Ontology: Mol. function=RNA-directed DNA polymerase activity; Cellular component=integral to membrane; Biological process=RNA -dependent DNA replication
  Homolog annotation: Hit_ID=Q7FS87; Match level="QueryCoverage=92%, HitCoverage=43%, E-value=0.0, Identity=95%"; Hit description =Putative glycerol 3-phosphate permease
  Pfam annotation: Domain name=MFS_1; Domain location=111-545; Score =147.7; E_value=3.1e-41; Accession=PF07690.6; Description=Major Facilitator Superfamily
  Pfam annotation: Domain name=Sugar_tr; Domain location=108-579; Score= -141.4; E_value=0.019; Accession=PF00083.14; Description=Sugar (and other) transporter
  Pfam annotation: Domain name=YibE_F; Domain location=396-574; Score= -152.4; E_value=0.1; Accession=PF07907.2; Description=YibEF-like protein
  Pfam module annotation: Pfam domain module=MFS_1::Sugar_tr::YibE_F; Domain location=111-545::108-579::396-574
MARTQCVRSPTGGNKEQSSIASPLQLRLCLIASRQASTDCLKLRRGCTDRLYLSYISAGKLSSDPFTSLMGSSSGHQRSKTRSRNRKPLGIQLLERVRGSPISFRSCQALVLVLTFLSYASYHATRKTTSVVKSVLDPKTKTNLGTSSAHYWPPSHLFYLHNLKDADNSSAGGSLSSGGGGGWVPFNEAEDGTALLGEIDLAFLGAYAAGMFFAGHLGDRVDLRVLLTVGMVGTGLFTAAFGAGYWLDVHSFYYFLAVQMVAGLFQSSGWPSVVAVVGNWFGKSKRGLIMGVWNAHTSVGNISGSLVAAAMLRYGWCWSFVVPGVVIALVGLAVFLLLPVAPDVIGVQEDLCLKDAPLLERRRADVEEKAVGFIEAWRIPGVAPFALCLFFCKLVAYTFLYWLPFYISHTAIGGEYLSDSAAGVLSTLFDVGGVVGGILAGHISDHLDARALTAASFTFSAIPALFFYRVYGNVSLAWNIALMFVTGMLVNGPYALITTAVSADLGTHSSLNGNSRALATVTAIIDGTGSIGAAVGPLLTGYISARSWSAVFTMLMASALVAGLLLSRLVAAEVVAKMESRRTPAPAASDLLPVSSSSMDEP

SEQ ID NO: 74378 - protein, 201 aa, Zea mays
  Coding DNA Sequence Number=SeqID_32599
PEHGRAPVNDGGAIAGVRRSMALVHYSPIRNTLHKSQAKANRREEVSPEVKMGTRSDTVWCGTLASKSHGGGDLTRQAGRELAARGETREGSARRRALRREMARLAAAARLVIWLSGRGSDTHGAGRWRPSGRPPGGLHEEEEKAGWERRQEEAQHTAYSPARVSSGCKQRTPSSLEGYILDEIMDAAAKGRRHITSKAGM

SEQ ID NO: 74379 - protein, 116 aa, Zea mays
  Coding DNA Sequence Number=SeqID_32600
  Homolog annotation: Hit_ID=Q6EU03; Match level="QueryCoverage=48%, HitCoverage=20%, E-value=1e-20, Identity=78%"; Hit description =Tobamovirus multiplication protein 3-like
  Pfam annotation: Domain name=DUF1084; Domain location=1-114; Score= -113.4; E_value=0.0012; Accession=PF06454.2; Description=Protein of unknown function (DUF1084)
MEDMEFDSLFYSTSWSLMLYLKNLLDIQRSIFGMVKVGMQLLCCEVVENTDAVVYRGKMCFNAFDEEADLDVLDHPVLNLFYYLLVEILPSSLVLYILRRIPAKLRLSQYHPVSSS

SEQ ID NO: 74380 - protein, 93 aa, Zea mays
  Coding DNA Sequence Number=SeqID_32601
MDKIYRFGPLRRDIYPPHARTRARAQRRITGGGCWRDGSGAGQSARTADSVGGAPTKLGAVCYERWKTSAMRVPLGPPVGAITRSWAAREVKG

SEQ ID NO: 74381 - protein, 124 aa, Zea mays
  Coding DNA Sequence Number=SeqID_32602
  Gene Ontology: Mol. function=transcription factor binding; Cellular component=intracellular; Biological process=regulation of transcription, DNA-dependent
  Homolog annotation: Hit_ID=Q3S835; Match level="QueryCoverage=77%, HitCoverage=57%, E-value=8e-45, Identity=85%"; Hit description=RAB7
  Pfam annotation: Domain name=Miro; Domain location=11-106; Score=3.0; E_value=0.0028; Accession=PF08477.3; Description=Miro-like protein
  Pfam annotation: Domain name=Ras; Domain location=11-124; Score=68.4; E_value=2.3e-17; Accession=PF00071.12; Description=Ras family
  Pfam module annotation: Pfam domain module=Miro::Ras; Domain location= 11-106::11-124
MESWRRRTLLKVIVLGDSGYVSKKFSQQYKATIGADFLTKEVLIGDRLVTLQIWDTAGQERFQSLGVAFYRGADCCVLVYDVNVKRSFNTLDTWHDEFLNQVSHISHDHVSFWMSGYNSSYSCG

SEQ ID NO: 74382 - protein, 538 aa, Zea mays
  Coding DNA Sequence Number=SeqID_32603
  Gene Ontology: Mol. function=aldehyde dehydrogenase (NAD) activity; Cellular component=mitochondrion; Biological process=metabolic process
  Homolog annotation: Hit_ID=Q40255; Match level="QueryCoverage=99%, HitCoverage=98%, E-value=0.0, Identity=73%"; Hit description =Probable aldehyde dehydrogenase
  Pfam annotation: Domain name=Aldedh; Domain location=50-433; Score= -190.1; E_value=1.6e-07; Accession=PF00171.12; Description=Aldehyde dehydrogenase family
  Subcellular localization annotation: CTP_CleavageSite=51; ConfidenceScore=5.09e-01
MGQSGRDSQACTWKDKVAAHAVIRDGFSARGFRFQPSGSAEFCCSVQGSWTASANWNWIVDPLNGDKFIKVAEVQGTEIKPFVESLSKCPKHGLHNPLKAPERYLMYGDISAKAAHMLGQPAVLDFFAKLIQRVSPKSYQQALAEVQVSQKFLENFCGDQVRFLARSFAVPGNHLGQRSNGYRWPYGPVAIITPFNFPLEIPLLQLMGALYMGNKPVLKVDSKVSIVMEQMIRLLHDCGLPAEDMDFINSDGAVMNKLLLEANPKMTLFTGSSRVAEKLAADLKGRVKLEDAGFDWKILGPDVQEVDYVAWVCDQDAYACSGQKCSAQSVLFMHKNWSSSGLLEKMKKLSERRKLEDLTIGPVLTFYSEDLVENTDDPDKIFASFATAVTTEAMIEHMNNLLKIRGSKVLFGGEPLANHSIPKIYGAMKPTAVFVPLEEILKSGNFELVTKEIFGPFQVEFLDTWMYLGDPLTGQPTPEFERGPRALHRTTGLARPVIREAQGSGLRKPSNLSGPATGKSYMTSGPCPRAGRFLPRPD

SEQ ID NO: 74383 - protein, 81 aa, Zea mays
  Coding DNA Sequence Number=SeqID_32604
MAGARVRGRLLARARMGGGGGGDGGAHGGGSKIYWRLRKIFYLSTKPVWFVANYVILCLRLSHVLSVSGKDLKSHNLNQSI

SEQ ID NO: 74384 - protein, 224 aa, Zea mays
  Coding DNA Sequence Number=SeqID_32605
  Gene Ontology: Mol. function=serine-type peptidase activity; Cellular component=integral to membrane; Biological process=proteolysis
  Homolog annotation: Hit_ID=Q2R135; Match level="QueryCoverage=82%, HitCoverage=82%, E-value=8e-60, Identity=63%"; Hit description =Signal peptidase I family protein, expressed
  Pfam annotation: Domain name=Peptidase_S24; Domain location=46-125; Score=38.1; E_value=3.1e-08; Accession=PF00717.13; Description =Peptidase family S24
MPGFAQRLAGIPWRSIARQGLSRVFLVAKAYCLIHVVNDHLCSVTLVRGASMLPSLNLAGDAVAVDRVSVRLGRVAPGDIVLMISPEDPRKSVVKRVVGMQGDSVTYLVDPGKSDSSRTVVILNELELCAGKTLHYATLGIFTPPDQKVPQDHVWVQGDNIFASNDSRQFGAVPYGLITGKIFCRLRRVLTVALLDVRFGRQRVLAQLMTQRSSLNAEEEPRRY

SEQ ID NO: 74385 - protein, 119 aa, Zea mays
  Coding DNA Sequence Number=SeqID_32606
  Subcellular localization annotation: CTP_CleavageSite=39; ConfidenceScore=5.23e-01
MAQQSSASPDQRNRGQHLKTAASAWPLDVRKGSSACSVDATEAAAHLCFHRPMGRFLFLSISSSTVYGMGAWEEASSSCALAVRTCKEKKEKVFRTNQINPKNVERYVSTFSIVATVTR

SEQ ID NO: 74386 - protein, 131 aa, Zea mays
  Coding DNA Sequence Number=SeqID_32607
MAKVTAAPREVRHGWSHVGDGGNGVYAPRCRPWRVGDVGRGRRLTGPLWLSVADEDITPIHTMNGLITRLHARQLNLQYRRSSVCETPTHNQHNFGCVLPVLACVLDCVCKDKPSWRGHSCDMGDNQQSSV

SEQ ID NO: 74387 - protein, 280 aa, Zea mays
  Coding DNA Sequence Number=SeqID_32608
  Homolog annotation: Hit_ID=Q6QP54; Match level="QueryCoverage=47%, HitCoverage=44%, E-value=4e-30, Identity=63%"; Hit description =Putative kinase
MTASKKGPGKGDTPKRILPREGTRLRASLLIRGSKAGPPEGFDSRLRSRGPYTHYWSEVRRPAPRKGSTAASGYSGSAPITDQGFEGWPPKALEDGELRSARPRARTRAKSRKTANSAPPDPGLGLGLSPGRRRTPLCPTQGSDLGSAPEDGELRSARPRARTWAQPQKTANSAPPDPGLGLGLSPRRRRTPLRPTQGSDLGSAPEDGELRSARPQGSDSALTSAGGLRLARPRGSDSTSAMEDKLDLGFGGASTSPNLGRRPVTSTGGNKTGVPSGSLR

SEQ ID NO: 74388 - protein, 34 aa, Zea mays
  Coding DNA Sequence Number=SeqID_32609
MKCINRDIIELQVYLQLEGDDSTSVTQKANAKSA

SEQ ID NO: 74389 - protein, 195 aa, Zea mays
  Coding DNA Sequence Number=SeqID_32610
MEDGGGDVSRSINHDLRLLGEPRHLESRVAATIDIGSGSCSSAAAPINLTVGDSGAGGGNGVEAHAAADQGSSNRKIPALSVAASPSLALSDSLSAWPWRRKPHVAMPPPLLLHISVFISGSSSSALISPPFLSCGIDPHLALDLGVFLLPRFFCGPSPTESVLRGSSAAAPINLTVGDSGAGGGNGVEAHAAAD

SEQ ID NO: 74390 - protein, 215 aa, Zea mays
  Coding DNA Sequence Number=SeqID_32611
  Homolog annotation: Hit_ID=Q84L70; Match level="QueryCoverage=26%, HitCoverage=24%, E-value=2e-10, Identity=54%"; Hit description=Zinc finger transcription factor ZFP2
  Pfam annotation: Domain name=zf-C2H2; Domain location=104-126; Score =18.8; E_value=0.019; Accession=PF00096.16; Description=Zinc finger, C2H2 type
MAVLDAAVTPSPSGRADAAAADQVATTSGCGGRAAEEAEAVLLQQEHDGQGRAKRKRSRRRRDRDGQQPKEPTTQEEYLALCLVMLATGRRDADADAAVPPQDHACSVCGKAFPSYQALGGHKASHRAKPSPSPSPAAALAPEPGAEDGDRHDEKKPAQPSSSSAGSRPAAAAHECNAVAFDLNLPALPDRCAGVDEDEVLSPLAFKKPRFMIPA

SEQ ID NO: 74391 - protein, 80 aa, Zea mays
  Coding DNA Sequence Number=SeqID_32612
  Subcellular localization annotation: CTP_CleavageSite=27; ConfidenceScore=5.10e-01
MGWLLCTNPTRQSGSGWHGPSTGPTKRASGPWAFSTSLGGGEGFHLPPGCHHRFPLIGSTFTGADQVQVRLDADAYEPKL

SEQ ID NO: 74392 - protein, 84 aa, Zea mays
  Coding DNA Sequence Number=SeqID_32613
MAPPWALCAAMSGVGEGRVEGDVEEERWPQDLDPLIGTGYQFVGGSWALKFNRADRMAEGAIWIVVVGSWMKSAIRSQVNHSTF

SEQ ID NO: 74393 - protein, 184 aa, Zea mays
  Coding DNA Sequence Number=SeqID_32614
MKSQWRIFRSSKTMMSSRHGLAANPQLAACEGPRYRLCFARGDEAVEDEAGVAFGGFGVAEVGWGSANLMAGFRSQEQGWRRENGGGVIRAGRGYSDEQSRPRGEGIGCAEARTSSGEGGGTLRTKAWAQGEAESIGRRAGVANRRGRASASANSLRQGKIRVTRAREQVSHLETVLREAQCGV

SEQ ID NO: 74394 - protein, 1018 aa, Zea mays
  Coding DNA Sequence Number=SeqID_32615
  Gene Ontology: Mol. function=RNA-directed DNA polymerase activity; Cellular component=intracellular; Biological process=RNA-dependent DNA replication
  Homolog annotation: Hit_ID=UPI00004C1733; Match level="QueryCoverage =85%, HitCoverage=59%, E-value=0.0, Identity=87%"; Hit description =UPI00004C1733 related cluster
  Pfam annotation: Domain name=RVT_1; Domain location=56-225; Score =129.8; E_value=7.4e-36; Accession=PF00078.17; Description=Reverse transcriptase (RNA-dependent
  Pfam annotation: Domain name=RnaseH; Domain location=436-563; Score =9.9; E_value=7e-06; Accession=PF00075.14; Description=RNase H
  Pfam annotation: Domain name=rve; Domain location=731-889; Score =101.7; E_value=2.2e-27; Accession=PF00665.16; Description=Integrase core domain
  Pfam module annotation: Pfam domain module=RVT_1::RnaseH::rve; Domain location=56-225::436-563::731-889
MPGIPRDVAEHSLDIRAGARPMKQPLRRFDEEKRRAIGEEIHKLMAAGFIKEVFHPEWLANPMLVRKKGGKWWMCVDYTGLNKACPKVPYPLPRIDQIVDSTAGCETLSFLNAYSGYHQIRMKESDQLATSFITPFDMYCYVTMPFGLRNAGATYQRCMNHMFGEHIGRTVEAYVDDIVVKTRKASDLLSDLEVTFRCLKAKGVKLNPEKCVFGVPRGMLLGFIVSERGIEANPEKVAAITSMGPIKDLKGVQRVTGCLAALSRFISRLGERGLPLYRLLRKAECFTWTPEAEEALGNLKALLTNAPILVPPAAGEALLIYVAATTQVRPVYFISEVLSETKIRYPQIQKLLYAVILTRWKLRHYFESHPVTVVSSFPLGEIIQCREALGRIAKWAVEIMGETISFAPRKAIKSQVLADFVAEWVDTQLPTALIQPELWTMFFDGSLMQTGAGAGLLFISPLGKHIRYVLRLHFPASNNVAEYEALVNGLRIAIELGVRCLDARGDSQLAIDQVMKNSHCRDPKMEAYCDEVRRLEDKFYGLELNHVAQRYNETADELAKIASGRRFPRTSSSETCINPPSRPTTRPSPRRPRASPRHPWLSPRHPRLGPRHTRLGPRHPRLGPRYPRPPRVRHCASRRSGAGSRLIETSRPRTSNISSKESYPSTKPKLGGDGKELYHRSPSGILQRCISIAEGQELLQEIHSGACGHHAAPRALVGNAFRQGFYWPTVVADATRIVRTCEGCQFYKAPGGYTHLLVAIDKFSKWIEVRPLNSIRSEQAVAFFTNIIHRFGVPNSINTDNGTQFTGRKFLDFCEDHHIRVDWAAVAHPMTNGQVERANGMILQGLKPRIYNDLNKFDKRWMKELPSVVWSLRTTPSRATGFTPFFLVYGAEAILPTDLEYGSPRTRAYADKSNRANREDSLDQLEEARDMALLHSVWYQQSLRCYHARGVRSRDLQVGDLVLRLRQDARGRHKLTPPWEGSFIVAKVLKPGTYKLVNSQGEVYSNAWNIRQLRRFYP

SEQ ID NO: 74395 - protein, 210 aa, Zea mays
  Coding DNA Sequence Number=SeqID_32616
  Gene Ontology: Mol. function=nutrient reservoir activity
  Homolog annotation: Hit_ID=Q41884; Match level="QueryCoverage=99%, HitCoverage=100%, E-value=4e-74, Identity=66%"; Hit description=Zein
  Pfam annotation: Domain name=Zein; Domain location=1-210; Score=75.1; E_value=2.2e-19; Accession=PF01559.7; Description=Zein seed storage protein
MAAKIFSILMLLALSACVANATIFPQYSQAPIAALLPPYLPSMTASVCENPALQPYRLQQAIAKSNLPLSPLFFQQSPALSLVQSLVQTIRAQQLQQLVLPVISQQQQLLPFSQLATAYSQQQQFLPFNQLAALNPSAYFQQQILLPFGQLATTSPASFLTQQQLLPFYQQFVANPATLLQLQQLLPFVQLALTNPAAFYQQHIIGGAIF

SEQ ID NO: 74396 - protein, 138 aa, Zea mays
  Coding DNA Sequence Number=SeqID_32617
MDAGDKGFRALSAHKSLTLLSTYAASLHDTRYRHLPLCLCGEIQTSVVPGEAGEDRINTLVGVLAGLNTNLDSATLDVSRDALSNQPDGERRSGPRNTRNKRVGQQLPPPPPNQNMEQFIAAQMQLLQGLTALVQQIQ

SEQ ID NO: 74397 - protein, 1017 aa, Zea mays
  Coding DNA Sequence Number=SeqID_32618
  Gene Ontology: Mol. function=DNA-directed RNA polymerase activity; Cellular component=chloroplast; Biological process=transcription
  Homolog annotation: Hit_ID=Q9SYW4; Match level="QueryCoverage=97%, HitCoverage=98%, E-value=0.0, Identity=80%"; Hit description=T7-like RNA polymerase
  Pfam annotation: Domain name=RNA_pol; Domain location=557-998; Score =492.4; E_value=5.4e-145; Accession=PF00940.10; Description=DNA -dependent RNA polymerase
  Subcellular localization annotation: CTP_CleavageSite=31; ConfidenceScore=5.15e-01
MPLLLYPFSACVPPPRALLRRLSPPPPMAVVAPLPSAVRIIPSVGTLDLPALPPPPTDDFHWLDLFAFLNSPADTYHQIPAQGEEELEAGLELELELELEKHAEVERQRGRARRAQLRRLRQRQVKAETEAWARAAEEYREIEREMLDRRLAPALPYVKALFVGWFEPLRDAIARDQDVQRRKRVKHVYAKYLLLLPADKVAVIVMHKMMGLLMSSKDGTGSVRVVQAAHCIGEAVEREFKVQSFFQKSRKKKIQGENDPALEKEQAKCRKRVKSLVKRRKMSEAQRLVQQELELEEWGTEAQVKLGSRLIELLLDSAFVQPPADQTPDSSPDIRPAFKHVLRQPIIENGRLKKKHWVIECDHLVHEGFESTARHVDIPYLPMLVPPKKWKGYDKGGHLFLPSYIMRTHGVKDQKDAINSVPRKQLRKALDILGSTKWRVNRRVHDVVETIWSQGGGIAGLVDKANIPLPERPESEDPDEMQKWKWSLKKAKKTNRELHAERCDTELKLSVARKMREEDGFYYPHNLDFRGRAYPMHPHLSHLGSDLCRGVLEYAEGRPLGKSGLCWLKIHLANKYGGGIEKLSHEGKLAFVENQLFDIFDSAANPVDGNCWWTNAEDPFQCLAACMDLSDALRSPSPYHAVSHLPIHQDGSCNGLQHYAALGRDYMGAVAVNLVPGEKPADIYSEIASRVLNVVCEDSMKDPATNPTASLARVLVDQVSLLSHPSSVFLNSSKKYPCTHSISSNKTVEDMGIGSLQVDRKLVKQTVMTSVYGVTYIGARQQITKRLQEKGLITDDKLLYDVSCYATRVTLDALGQMFQSARGIMAWLGDCAKMIASKNQPVKWTSPVGLPVVQPYKKYKNYMIRTSLQCLALRREGDAIAIQRQKAAFPPNFVHSLDSSHMMMTAIACKESGLHFADFPRPRTVREAPASAYYAGVHDSFWVHACDVDQMNQILRQQFVELYSMPILENLLEEFQTSFPTLEFPPCPPQESAWMFRSLIGCHDNSWYTPPWSAKDL

SEQ ID NO: 74398 - protein, 430 aa, Zea mays
  Coding DNA Sequence Number=SeqID_32619
  Gene Ontology: Mol. function=sequence-specific DNA binding; Cellular component=nucleus; Biological process=regulation of transcription, DNA-dependent
  Homolog annotation: Hit_ID=P46605; Match level="QueryCoverage=52%, HitCoverage=31%, E-value=9e-75, Identity=66%"; Hit description =Homeobox protein HOX1A
MGDEGWLCPACDCKIDCIDLINELHGSNISIEDSWEKVFPDAAAMANDSKQDDAFDLPSDDSDDNDFDPNMPEEHVVGKDEESSEEDEDGGSDSDDSDFLTCSDDSEPLIDKKVDDLRLPSEDSEDDDYDPAGPDSDKDVEKKSSSDESDFTSDSDDFCKEISKSGHDEVSSPLLPDAKVGDMEKITAQAKTTSSADDPMETEIDQGVVLPDSRRRQAERLDYKKLYDNIEERNSAKRLDPICEKDTILNQQGVNDIIDGEKHVFGFTVLRQSLGARHTELNVVGVEDSVGDVFVESVTIIALDALNGNVELCGSRGKGGKCVRFQSQVECPKLMQKIKDGQIKIDPYLDAIIIGTEITRLGVNINGVEISVPETLSWRELVEDGVDDPRSHDAILVDPVGGRNVEEDMALKGVPVDGEEERLGQWGLEV

SEQ ID NO: 74399 - protein, 742 aa, Zea mays; identical to SEQ ID NO: 42622
  Coding DNA Sequence Number=SeqID_32620
  Gene Ontology: Mol. function=mismatched DNA binding; Cellular component=MutSalpha complex; Biological process=response to DNA damage stimulus
  Homolog annotation: Hit_ID=Q9XGC9; Match level="QueryCoverage=99%, HitCoverage=100%, E-value=0.0, Identity=99%"; Hit description=DNA mismatch repair protein MSH2
  Pfam annotation: Domain name=MutS_I; Domain location=24-131; Score =75.2; E_value=2e-19; Accession=PF01624.10; Description=MutS domain I
  Pfam annotation: Domain name=MutS_II; Domain location=144-286; Score =103.5; E_value=6.2e-28; Accession=PF05188.8; Description=MutS domain II
  Pfam annotation: Domain name=MutS_III; Domain location=293-612; Score= 311.1; E_value=2.1e-90; Accession=PF05192.9; Description=MutS domain III
  Pfam annotation: Domain name=MutS_IV; Domain location=470-567; Score =88.5; E_value=2e-23; Accession=PF05190.8; Description=MutS family domain IV
  Pfam annotation: Domain name=MutS_V; Domain location=529-663; Score= -164.2; E_value=0.0042; Accession=PF00488.12; Description=MutS domain V
  Pfam annotation: Domain name=Nnf1; Domain location=409-513; Score= -16.8; E_value=0.091; Accession=PF03980.4; Description=Nnf1
  Pfam module annotation: Pfam domain module=MutS_I::MutS_II::MutS _III::MutS_IV::MutS_V::Nnf1; Domain location=24-131::144-286::293 -612::470-567::529-663::409-513

SEQ ID NO: 74400 - protein, 1233 aa, Zea mays
  Coding DNA Sequence Number=SeqID_32621
  Gene Ontology: Mol. function=mismatched DNA binding; Cellular component=MutSalpha complex; Biological process=mismatch repair
  Homolog annotation: Hit_ID=Q9XGD0; Match level="QueryCoverage=99%, HitCoverage=100%, E-value=0.0, Identity=95%"; Hit description=MUS2 protein
  Pfam annotation: Domain name=MutS_I; Domain location=366-520; Score =135.9; E_value=1.1e-37; Accession=PF01624.10; Description=MutS domain I
  Pfam annotation: Domain name=MutS_II; Domain location=525-686; Score =43.0; E_value=1e-09; Accession=PF05188.8; Description=MutS domain II
  Pfam annotation: Domain name=MutS_III; Domain location=694-922; Score= 94.7; E_value=2.7e-25; Accession=PF05192.9; Description=MutS domain III
  Pfam annotation: Domain name=MutS_V; Domain location=927-1174; Score =467.4; E_value=1.7e-137; Accession=PF00488.12; Description=MutS domain V
  Pfam module annotation: Pfam domain module=MutS_I::MutS_II::MutS _III::MutS_V; Domain location=366-520::525-686::694-922::927-1174
MPLTPRQTKHLLNYLSLAPYFAILNMLDSLLCRNQYDSQVRHSEGKNLPVENQVLSNECLGALFSRPIYGEHSRTILSPEGGADMSPSQEPQKHSLRSSTDESTRATKEVILEHPKKLFSESHTNCIHATALNENFGVQTPSQVASKKIFPGLAHGADTPLTGYGSEQTLLQHSSKKFSLVSANGKYTRAAVTPFEQNSNNTRAEELSKMRSGSSDMLYLKPTNLSAELETNGTPLKNHSKNSSLLMDGKYNITSAALFPELDSSPLKPETPAMQAAIPRLKRVQEDQGVDANNQCPPLWAMNKKMKSAHCSIEKKDHDEMAGSARSKFEWLNSFAIRDANKRRPNDPLYDKSTLFIPPDALRKMSTSQKQYWNIKCKYMDVVLFFKVGKFYELYELDAEIGQKELDWKMTVSGVGKCRQVRNTIICLQALHLPLDLGFVGRGQCLDKSGTRVVGVWEAMVGISESGIDDAVDKLIARGYKVGRIEQMESANQAKARGVHSVIERKLVHVSTPSTAVDNIGTDAVHLLALKEVTLASSGFQVFGFAFLDYAALKIWVGSVQDDDSSAALGALLMQVSPRELIYETSGANSYSLLSGISKETQRTIRKYASAGSVKMQLTPLSGIDFSDAAQIRNLIHSKGFFNASTESWLSALDCTMNQDVVICALGGLIGHLTRLMLHDALKNGEVLPYHVYKTCLRMDGQTLVNLEIFINNFNGGSSGTLYKHLNHCVTASGKRMLRRWICHPLKDIDAINKRLDVVEGFIQNCGLGPTTLGYLQKIPDLERLLGQVRSTVGLSSLLQLPFIGEKIIKKRIKTFIMLINGLRNGIDLLNDLQRADHGILALYKIVDIPSLSYLPELIHKFEERMQNEFPCGQVSDVNANGANDLAALMDVFIGKASEWSLVINAVSTIDVLRSFAAMTLSSFGAMCRPQVLLKDDVPVLRMKGLWHPYAFAGNANSLVPNDLTLGQDLSGLNRFALLLTGPNMGGKSTIMRATCLAVVLAQLGCYVPCTSCELTLADSIFTRLGATDRIMTGESTFLVECTETASVLQKATVDSLVLLDELGRGTSTFDGYAIAYAVFRHLVERVRCRQLFATHYHSLTKEFASHPHVSLQHMACMFKPRSDGNGQKELTFLYRLTSGACPESYGLQVAAMAGIPKSIVEKASVAGQVMRAKIAGNFKSSEQRAEFSTLHEEWLRAALAVSAMDGQPDDDDVMDTLFCIQQELKSHFRKAR

SEQ ID NO: 74401 - protein, 193 aa, Zea mays
  Coding DNA Sequence Number=SeqID_32622
  Gene Ontology: Mol. function=methionine-tRNA ligase activity; Cellular component=extracellular space; Biological process=tRNA aminoacylation for protein translation
  Homolog annotation: Hit_ID=Q9ZTS1; Match level="QueryCoverage=88%, HitCoverage=20%, E-value=2e-76, Identity=83%"; Hit description =Probable methionyl-tRNA synthetase
  Pfam annotation: Domain name=tRNA_bind; Domain location=34-132; Score= 127.3; E_value=4.2e-35; Accession=PF01588.10; Description=Putative tRNA binding domain
MGQDGGTKKGPKKQSGGSKSKTADADITVAKLDIRVGLIRKAEKHPDADSLYVEEIDVGEDTPRTVILSFDALYHLTSTMDQQNRKVCVLCNLKPVAMRGIKSHAMVLAASNEDHTKVELVEPPESAAVGERVTFAGYSGEPEASLSGKSKTWEKLAAELHSNGELVACYKDVPFTTSAGICKVKTIANGEIR

SEQ ID NO: 74402 - protein, 89 aa, Zea mays
  Coding DNA Sequence Number=SeqID_32623
  Gene Ontology: Mol. function=sequence-specific DNA binding; Cellular component=nucleus; Biological process=regulation of transcription, DNA-dependent
  Homolog annotation: Hit_ID=Q9M4P8; Match level="QueryCoverage=87%, HitCoverage=35%, E-value=5e-37, Identity=100%"; Hit description=M14 protein
  Pfam annotation: Domain name=K-box; Domain location=24-89; Score =37.6; E_value=4.2e-08; Accession=PF01486.8; Description=K-box region
MMRRLKRREKSMYKTLERYRSSNYSQEVKTPLDTEIKYQDYLKLRTRVEFLQTTQRNILGEDLGPLSMKELEQLEDQIEISLKHISSRK

SEQ ID NO: 74403 - protein, 647 aa, Zea mays
  Coding DNA Sequence Number=SeqID_32624
  Homolog annotation: Hit_ID=P81760; Match level="QueryCoverage=33%, HitCoverage=92%, E-value=1e-100, Identity=86%"; Hit description =Thylakoid lumenal 17.4 kDa protein, chloroplast precursor
  Pfam annotation: Domain name=Pentapeptide; Domain location=535-574; Score=30.6; E_value=5.6e-06; Accession=PF00805.12; Description =Pentapeptide repeats (8 copies)
  Pfam annotation: Domain name=Pentapeptide; Domain location=580-619; Score=39.7; E_value=9.8e-09; Accession=PF00805.12; Description =Pentapeptide repeats (8 copies)
  Pfam annotation: Domain name=WD40; Domain location=211-249; Score =36.4; E_value=9.7e-08; Accession=PF00400.22; Description=WD domain, G-beta repeat
  Pfam annotation: Domain name=WD40; Domain location=318-355; Score =49.5; E_value=1.1e-11; Accession=PF00400.22; Description=WD domain, G-beta repeat
  Pfam annotation: Domain name=WD40; Domain location=359-414; Score =12.6; E_value=1.2; Accession=PF00400.22; Description=WD domain, G -beta repeat
  Pfam module annotation: Pfam domain module=Pentapeptide::Pentapeptide: :WD40::WD40::WD40; Domain location=535-574::580-619::211-249::318 -355::359-414
MDYLSQEEDLQFFDANEEMMALNPSGFGFDVWNDSPGSVVERRRKFLEWMGVEEEGRVETKDSVSGSSVESCFDGGEENSVEAEERSGECSSSSSEVSLSGSSVEVSEELSLRVDRNVGGCDVTRRQSSSMASCSSSRYCQVKETEKQRNIAGLVTSFKKGWLSRLRSMGCTADTNIESGGRMRASSGYGDVISRVKVKHCKKQAKELSALYQSQDIKAHDGAILAMKFSNDGKFLASSGEDGIVRVWKVVEDKKSRLRRDCLNEIDPSCMYFEVNDLSQLKPVLVNEEKPKKTTESFRKTSDSACVVFPPKVFRIMEKPLYEFRGHTGEVLDISWSKDNYLLSASMDKTVRLWKVGSNDCLGVFAHNSYVTSVQFNPVNENYFMSGSIDGKFLPQEPTKVLVVSADSKVRILQGNNVVRKYKGVCKTRSLTSASLTSDGKHIVSASGENRENGEGVKKSLFPLKELGSIACAALCACTLTIASPVIAANQRLPPLSTEPDRCEKAFVGNTIGQANGVYDKPLDLRFCDYTNDQTNLKGKTLSAALMVGAKFDGADMTEVVMSKAYAVEASFKGVNFTNAVIDRVNFGKSNLKGAVFRNTVLSGSTFEEANLEDVVFEDTIIGYIDLQKICRNESINEEGRLVLGCR

SEQ ID NO: 74404 - protein, 667 aa, Zea mays
  Coding DNA Sequence Number=SeqID_32625
  Gene Ontology: Mol. function=nucleoside-triphosphatase activity; Cellular component=protein complex; Biological process=proteolysis
  Homolog annotation: Hit_ID=Q9FJC9; Match level="QueryCoverage=54%, HitCoverage=90%, E-value=0.0, Identity=100%"; Hit description=26S proteasome regulatory particle chain RPT6-like protein
  Pfam annotation: Domain name=AAA; Domain location=124-308; Score =243.2; E_value=5.5e-70; Accession=PF00004.19; Description=ATPase family associated with various cellular activities (AAA)
  Pfam annotation: Domain name=AAA_3; Domain location=124-249; Score= -8.6; E_value=0.0028; Accession=PF07726.2; Description=ATPase family associated with various
  Pfam annotation: Domain name=AAA_5; Domain location=124-255; Score =5.7; E_value=0.00065; Accession=PF07728.4; Description=ATPase family associated with various cel
  Pfam annotation: Domain name=Bac_DnaA; Domain location=107-316; Score= -126.8; E_value=0.039; Accession=PF00308.9; Description=Bacterial dnaA protein
  Pfam annotation: Domain name=ResIII; Domain location=104-218; Score= -38.9; E_value=0.084; Accession=PF04851.6; Description=Type III restriction enzyme, res subunit
  Pfam annotation: Domain name=Vps26; Domain location=373-648; Score =668.0; E_value=7.2e-198; Accession=PF03643.6; Description=Vacuolar protein sorting-associated protein 26
  Pfam module annotation: Pfam domain module=AAA::AAA_3::AAA_5::Bac _DnaA::ResIII::Vps26; Domain location=124-308::124-249::124-255::107 -316::104-218::373-648
MKRSSGRKDSNFIEQLILYVASAALSSLVLYVGLRQLDPNRDAAKKSLEHKREIAKRLGRPLIQTNQYEDVIACDVINPLHIDVEFGSIGGLESIKQALYELVILPLKRPELFAYGKLLGPQKGVLLYGPPGTGKTMLAKAIARESEAVFINVKVSNLMSKWFGDAQKLVSAVFSLAYKLQPAIIFIDEVDSFLGQRRSTDNEAMSNMKTEFMALWDGFTTDQNARVMVLAATNRPSELDEAILRRFPQSFEIGMPDCQERAQILKVVLKGESVESDINYDRIARLCEDYTGSDIFELCKKAAYFPIREILEAEKEGKRVSVPRPLTQLDLEKVLATSKKTQVAASEYTGLSSQSSVWGSPSNADENYLLGAFKPACNISITFTDGKNRKQVPTKKDNGQIVMNPLFQSQETIAGKINIEPYQGKKVEHNGVKVELLGQIEMYFDRGNFYDFTSLVREIDVPGEIYERKTYPFEFSSVEMPYETYNGVNVRLRYVLKVTVTRGYAGSIVEYQDFVVRNYVPLPPINNSIKMEVGIEDCLHIEFEYNKSKYHLKDVILGKIYFLLVRIKIKNMDLEIRRRESTGAGANTHVETETLAKFELMDGAPVRGESIPVRVFLTPYDLTPTHKNINNKFSVKYYLNLVLVDEEDRRYFKQQEITLYRLKEETS

SEQ ID NO: 74405 - protein, 672 aa, Zea mays
  Coding DNA Sequence Number=SeqID_32626
  Gene Ontology: Mol. function=oligopeptide transporter activity; Cellular component=integral to membrane; Biological process =oligopeptide transport
  Homolog annotation: Hit_ID=Q9FJD1; Match level="QueryCoverage=99%, HitCoverage=100%, E-value=0.0, Identity=79%"; Hit description =Probable oligopeptide transporter 8
  Pfam annotation: Domain name=C4dic_mal_tran; Domain location=250-548; Score=-88.9; E_value=0.075; Accession=PF03595.8; Description=C4 -dicarboxylate transportermalic acid transport protein
  Pfam annotation: Domain name=OPT; Domain location=37-636; Score =571.5; E_value=8.4e-169; Accession=PF03169.6; Description=OPT oligopeptide transporter protein
  Pfam module annotation: Pfam domain module=C4dic_mal_tran::OPT; Domain location=250-548::37-636
MKDFTDTISESECDDEISIVPQVELTVPKTDDPTSPTVTFRMWVLGITACVLLSFLNQFFWYRTNPLTISSVSAQIAVVPIGHLMAKVLPTRRFFEGTRWSFTMNPGPFSTKEHVLITVFANSGSGAVYATHILSAVKLYYKRRLDFLPALLVMITTQVLGFGWAGLYRKHLVEPGEMWWPSNLVQVSLFRALHEKENKSKWGISRNQFFVITLITSFSYYLLPGYLFTVLTTVSWLCWISPKSILVNQLGSGSAGLGIGSFGLDWSTIASYLGSPLASPFFASANIAAGFFLVMYVITPLCYYLDLYNAKTFPIYSGKLFVASGKEYKVTSIIDANFRLDRQAYAETGPVHMSTFFAVTYGLGFATLSASIFHVLIFNGKDLWTQTRGAFGKNKKMDIHTKIMKRNYKEVPLWWFLSIFAVNLAVIVFICIYYKTQIQLPWWGAFLACLIAIFFTPLVGVIMATTNQVVGTLVAVIAYAGTAWWLMAEIPNLCDTNLLPPGSQWTCPSDRVFFDASVIWGLVGPRRMFGDLGEYSNINWFFVGGAIAPALVYLASRLFPNKKWISDIHIPVLIGATAIMPPASAVNFTSWLVMAFVFGHFVFKYRREWWQRYNYVLSGGMDAGTGFMSVLLFLALQRSEIAIDWWGNSGEGCPVAKCPTAKGVVVHGCPVF

SEQ ID NO: 74406 - protein, 615 aa, Zea mays
  Coding DNA Sequence Number=SeqID_32627
  Homolog annotation: Hit_ID=Q9FJC2; Match level="QueryCoverage=99%, HitCoverage=97%, E-value=0.0, Identity=81%"; Hit description =Arabidopsis thaliana genomic DNA, chromosome 5, P1 clone:MNC6
MKKCDSGIEVSSVSFFTNGDRRFERSYNSWRFPSESVADGSVKKRVARRFGFTRHHRLCGNDLEQLKLNRTDERTIYENGREQDGYSNSEMLQQQILNVSRKKGELQQLEIELRAQMIARHEIMEIQSNYESQFTEYANAAARMQEQLHENERSIREAERKLEEKDRELHAIKLDNEAAWAKEGILREQNKELATFRRERDHSEAERSQNIHKISELQEHIQEKESQLSELQEQAELRERTEQYNQLWHGCQRQFAEMERLHVHTVQQLQQELANVREAGGSKTNSGGASQTIQNSGNQFDAHGNSAESANISVHSNGKSADNISSFTSTDDKATQNNRVDGISASNLATHGFLQAGQMTPLHSFVMHQQEISQLVQPQAQAVPDSSQMPMQNHVHPSQGVHGLAVESGNGDYNGSNQSENNFQDISSQFRDALRLDSHSQNQKPEELNGQVSPDEHSGAKSIVPETLVSSGKPERNSECALLDERSLLTCILRTIPAGGRIRISSTLPNRLGKMLAPLHWHDYRKKYGKLDDFVASHLELFSIEDDYIQVRDGAQKMVAASAAAAKVAAAAAASSSPNSIYVAMTPMAQSQGLKKNDNRVRQSSDFMVKQQRKL

SEQ ID NO: 74407 - protein, 961 aa, Zea mays
  Coding DNA Sequence Number=SeqID_32628
  Gene Ontology: Mol. function=receptor activity; Cellular component =myosin complex; Biological process=ventricular cardiac muscle morphogenesis
  Homolog annotation: Hit_ID=Q9FLL5; Match level="QueryCoverage=97%, HitCoverage=97%, E-value=0.0, Identity=92%"; Hit description =Similarity to myosin heavy chain
  Pfam annotation: Domain name=K-box; Domain location=256-342; Score= -27.2; E_value=0.085; Accession=PF01486.8; Description=K-box region
MAEREEQQNQNRFQVAVSCDSDLGDVTQLKAEGLTISVVPGDVGKSTGKAEKAMVLDGHCRWESPVYETVKFLQDVKTGKGSTKSGVVGETSIDFADYVDAIKTCNVSLPLQNSNSKAMLHVAIQRQLENADPQRVVKESDSLVKRSRGQDLKSHLSIEADESHKSDSQEEGPFGKASRITELRRRASIESDSTLSSFDSVSELDTLGEVEIRGDHIQQNHSTMHHHSVRNVYEEPHISESEWSGSSDQGISTDDSMNSSNDTIPRDTTRTSSDNEVDKLKAELGALARRTDLSELELQSLRKQIVKETKRSQDLLREVTSLKQERDLLKADNESNKASDKRKEEAKIRNKLQLEGRDPHVLLEETREELDYEKDLNSNLRLQLQKTQESNTELILAVQDLEAMEGQRTKKTVDLPGPRTCERNTEESRRMSCTSETDDDEDQKALDELVKGHMDAKEAHVLERRITDLYNEIEIYKRDKEDLEIQVEQLSLDYEILKQENHDISYKLEQSQVQEQLKMQYECSSSLVNVNELENHVESLEAKLKKQYKECSESLYRIKELETQIKGMEEELEKQAQIFEGDIEAVTRAKVEQEQRAIEAEEALRKTRWKNASVAGKIQDEFKRISEQMSSTLAANEKVTMKAMTETRELRMQKRQLEELLMNANDELRVNRVEYEAKLNELSGKTDLKTKEMKRMSADLEYQKRQKEDVNADLTHEITRRKDEIEILRLDLEETRKSSMETEASLSEELQRIIDEKEAVITALKSQLETAIAPCDNLKHSLSNNESEIENLRKQVVQVRSELEKKEEEMANLENREASADNITKTEQRSNEDRIKQLEGQIKLKENALEASSKIFIEKEKDLKNRIEELQTKLNETDETLQGPEAIAMQYTEVLPLSKSDNLQDLVNEVASLREQNGLMETELKEMQERYSEISLRFAEVEGERQQLVMTVRYLKNAKKR

SEQ ID NO: 74408 - protein, 919 aa, Zea mays
  Coding DNA Sequence Number=SeqID_32629
  Gene Ontology: Mol. function=endonuclease activity; Cellular component=nucleus; Biological process=response to DNA damage stimulus
  Homolog annotation: Hit_ID=Q9LKI5; Match level="QueryCoverage=99%, HitCoverage=100%, E-value=0.0, Identity=85%"; Hit description=DNA repair endonuclease UVH1
  Pfam annotation: Domain name=ERCC4; Domain location=688-768; Score =132.2; E_value=1.5e-36; Accession=PF02732.6; Description=ERCC4 domain
MALKYHQQIISDLLEDSNGGLLILSSGLSLAKLIASLLILHSPSQGTLLLLLSPAAQSLKSRIIHYISSLDSPTPTEITADLPANQRYSLYTSGSPFFITPRILIVDLLTQRIPVSSLAGIFILNAHSISETSTEAFIIRIVKSLNSSAYIRAFSDRPQAMVSGFAKTERTMRALFLRKIHLWPRFQLDVSQELEREPPEVVDIRVSMSNYMVGIQKAIIEVMDACLKEMKKTNKVDVDDLTVESGLFKSFDEIVRRQLDPIWHTLGKRTKQLVSDLKTLRKLLDYLVRYDAVSFLKFLDTLRVSESYRSVWLFAESSYKIFDFAKKRVYRLVKASDVKSKEHVKNKSGKKRNSKGETDSVEAVGGETATNVATGVVVEEVLEEAPKWKVLREILEETQEERLKQAFSEEDNSDNNGIVLVACKDERSCMQLEDCITNNPQKVMREEWEMYLLSKIELRSMQTPQKKKQKTPKGFGILDGVVPVTTIQNSEGSSVGRQEHEALMAAASSIRKLGKTTDMASGNNNPEPHVDKASCTKGKAKKDPTSLRRSLRSCNKKTTNSKPEILPGPENEEKANEASTSAPQEANAVRPSGAKKLPPVHFYALESDQPILDILKPSVIIVYHPDMGFVRELEVYKAENPLRKLKVYFIFYDESTEVQKFEASIRRENEAFESLIRQKSSMIIPVDQVIVDMREFMSSLPNVLHQKGMKIIPVTLEVGDYILSPSICVERKSIQDLFQSFTSGRLFHQVEMMSRYYRIPVLLIEFSQDKSFSFQSSSDISDDVTPYNIISKLSLLVLHFPRLRLLWSRSLHATAEIFTTLKSNQDEPDETRAIRVGVPSEEGIIENDIRAENYNTSAVEFLRRLPGVSDANYRSIMEKCKSLAELASLPVETLAELMGGHKVAKSLREFLDAKYPTLL

SEQ ID NO: 74409 - protein, 574 aa, Zea mays
  Coding DNA Sequence Number=SeqID_32630
  Gene Ontology: Mol. function=protein-tyrosine kinase activity; Cellular component=integral to membrane; Biological process=protein amino acid phosphorylation
  Homolog annotation: Hit_ID=Q9FLL2; Match level="QueryCoverage=99%, HitCoverage=98%, E-value=0.0, Identity=68%"; Hit description =Receptor kinase-like protein
  Pfam annotation: Domain name=LRRNT_2; Domain location=21-62; Score =30.1; E_value=7.9e-06; Accession=PF08263.3; Description=Leucine rich repeat N-terminal domain
  Pfam annotation: Domain name=LRR_1; Domain location=115-137; Score =18.9; E_value=0.018; Accession=PF00560.23; Description=Leucine Rich Repeat
  Pfam annotation: Domain name=LRR_1; Domain location=139-161; Score =12.0; E_value=1.6; Accession=PF00560.23; Description=Leucine Rich Repeat
  Pfam annotation: Domain name=LRR_1; Domain location=163-185; Score =5.5; E_value=27; Accession=PF00560.23; Description=Leucine Rich Repeat
  Pfam annotation: Domain name=LRR_1; Domain location=91-113; Score =11.9; E_value=1.7; Accession=PF00560.23; Description=Leucine Rich Repeat
  Pfam annotation: Domain name=Pkinase; Domain location=275-537; Score=- 51.1; E_value=1.6e-05; Accession=PF00069.15; Description=Protein kinase domain
  Pfam annotation: Domain name=Pkinase_Tyr; Domain location=288-549; Score=-111.3; E_value=1.2e-05; Accession=PF07714.7; Description =Protein tyrosine kinase
  Pfam module annotation: Pfam domain module=LRRNT_2::LRR_1::LRR_1::LRR_ 1::LRR_1::Pkinase::Pkinase_Tyr; Domain location=21-62::115-137::139
MQLSLMSLVLGFLFVSCDAFASKEVEAVRRFKEAIYKDPLLVMSNWNVPNLSPCDWNGIKCSPSKDHIIKINISGTSMRGFLVPELGQITYLQELILRGNILMGTIPKEIGKLKKLKILDLGNNHLTGPIPAEIGKLSRIKTINLQSNGLIGKLPPEIGNLKHLKELLIGRNRLRGSIPIAAKTSKKYASNPSANISGLCKSSLFKVADFSYNFFEGRVPSCLDYLPILCKIKRSLIVPWKKSASEKEKFTVYVDSEMLKDVSRYTRQELEVACEDFSNIIDSSAESQIYKGTIKGGTEIAVISLCVKEENWTGYLELNFQREVAALARLNHENAGKLLGYCKESTPFTRMLVFEYASNGTLYDHLHYADGSLVSWAKRMKIVIGIARGLKYLHTELHPPFTVSELSSTAVYLTEDFTPKLVDFECWKIIQVRSEKNLKNICNEGAICVLPNAMEHRDMDLQGNIYSFGILLLEIVREKNLGAPDVMASLVDPELKHFKQKELEAVCEVASQCLNLDQNEKDKDKLSCSIQALCETLESRITVSISAEFKSSSLAWAELALASPSNEDDDDRSK

SEQ ID NO: 74410 - protein, 602 aa, Zea mays
  Coding DNA Sequence Number=SeqID_32631
  Gene Ontology: Mol. function=protein binding; Cellular component =nucleus; Biological process=ribosomal small subunit biogenesis and assembly
  Homolog annotation: Hit_ID=Q9FLL1; Match level="QueryCoverage=99%, HitCoverage=100%, E-value=0.0, Identity=93%"; Hit description =Arabidopsis thaliana genomic DNA, chromosome 5, P1 clone:MEE6
  Pfam annotation: Domain name=NOB1_Zn_bind; Domain location=451-522; Score=153.3; E_value=6.6e-43; Accession=PF08772.1; Description=Nin one binding (NOB1) Zn-ribbon like
  Pfam annotation: Domain name=PIN; Domain location=47-156; Score=8.1; E_value=0.015; Accession=PF01850.12; Description=PIN domain
  Pfam module annotation: Pfam domain module=NOB1_Zn_bind::PIN; Domain location=451-522::47-156
MDPKPTSMWSSIVKKDPPSKPPVNDGAPAAILGMVGNCKSTKGISIAVVDANAIIEGRQSLTNFADKFVTVPEVLSEIRDPASRRRLAFIPFTIDTMEPSPESLSKVIKFARATGDLQSLSDVDLKLIALSYTLEAQVYGTKNLRDVPPPIQTVRVKRLPEKDLPGWGSNVANLEEWEALENETEEKSNANSKILPLKDLNMNIIASDNVSEVGSVVSHTENHEEDVQEGGKKHRRYPPKKTEIKLEGKMVVEGVDASQGQYDDDDDASDWRPAVSRSTHSKYLRRKARWEHYNALAEQEIQKDQEADKARHTKEANETHAKDSGKNGEDISSILKDMRLEEESLRALQEETEETNAEATLINGEDDIDHDIEVEAEGIDVANQALENLEIASEAEDTFEASSIGDDGSSEQSWSLRALSESSVACITGDYAMQNVILQMGLRLLAPGGMQIRQLHRWILKCHACYTVTPEIGRIFCPKCGNGGTLRKVAVTIGANGAIIAACKPRITLRGTQYSIPMPKGGREAITKNLILREDQLPQKLLHPRTKKKASKPGDEYFVSDDVFLNHHSDRKAPLQPPVRKAMSVFSQKRNPNDNHYSRSMH

SEQ ID NO: 74411 - protein, 833 aa, Zea mays
  Coding DNA Sequence Number=SeqID_32632
  Homolog annotation: Hit_ID=Q94CD1; Match level="QueryCoverage=43%, HitCoverage=79%, E-value=0.0, Identity=98%"; Hit description =Putative N-hydroxycinnamoyl/benzoyltransferase
  Pfam annotation: Domain name=TCP; Domain location=50-225; Score =235.9; E_value=8.9e-68; Accession=PF03634.4; Description=TCP family transcription factor
  Pfam annotation: Domain name=Transferase; Domain location=298-730; Score=274.3; E_value=2.3e-79; Accession=PF02458.6; Description =Transferase family
  Pfam module annotation: Pfam domain module=TCP::Transferase; Domain location=50-225::298-730
MEPKKNQNLPSFLNPSRQNQDNDKKRKQTEVKGFDIVVGEKRKKKENEEEDQEIQILYEKEKKKPNKDRHLKVEGRGRRVRLPPLCAARIYQLTKELGHKSDGETLEWLLQHAEPSILSATVNGIKPTESVVSQPPLTADLMICHSVEEASRTQMEANGLWRNETGQTIGGFDLNYGIGFDFNGVPEIGFGDNQTPGLELRLSQVGVLNPQVFQQMGKEQFRVLHHHSHEDQQQSAEENEAGLLIEFGLRYVFLGEKQSASFHENSETVAENNKNKDVTLSASMDNNNNNIKGTNIHLEVHQKEPALVKPESETRKGLYFLSNLDQNIAVIVRTIYCFKSEERGNEEAVQVIKKALSQVLVHYYPLAGRLTISPEGKLTVDCTEEGVVFVEAEANCKMDEIGDITKPDPETLGKLVYDVVDAKNILEIPPVTAQVTKFKCGGFVLGLCMNHCMFDGIGAMEFVNSWGQVARGLPLTTPPFSDRTILNARNPPKIENLHQEFEEIEDKSNINSLYTKEPTLYRSFCFDPEKIKKLKLQATENSESLLGNSCTSFEALSAFVWRARTKSLKMLSDQKTKLLFAVDGRAKFEPQLPKGYFGNGIVLTNSICEAGELIEKPLSFAVGLVREAIKMDLILLMLTSGRDPGIIPRNSHPPEPEVVDGNTGSGTSQTPRLPRVKEVEVNGKVFKTTYENFRYSYDRHSNPHNKGVVDNFKEIFFSPIPPSKNNFRAMVPRENPMPSRSVVGGFMSPNMGKANDDIEMGRKGVWAMAEHGDGKDGNNNERFHVNDNELNELSPDMGNIVNGDEQINRPNNHPRNANWEMSPEVMALSARRA

SEQ ID NO: 74412 - protein, 713 aa, Zea mays
  Coding DNA Sequence Number=SeqID_32633
  Gene Ontology: Mol. function=nucleotidyltransferase activity; Cellular component=integral to membrane; Biological process=aromatic amino acid family biosynthetic process
  Homolog annotation: Hit_ID=Q6R3K8; Match level="QueryCoverage=90%, HitCoverage=96%, E-value=0.0, Identity=96%"; Hit description=Metal -nicotianamine transporter YSL4
  Pfam annotation: Domain name=DNA_RNApol_7kD; Domain location=645-676; Score=85.5; E_value=1.6e-22; Accession=PF03604.4; Description=DNA directed RNA polymerase, 7 kDa subunit
  Pfam annotation: Domain name=OPT; Domain location=34-636; Score =446.8; E_value=2.8e-131; Accession=PF03169.6; Description=OPT oligopeptide transporter protein
  Pfam annotation: Domain name=PhnA_Zn_Ribbon; Domain location=644-672; Score=10.7; E_value=0.036; Accession=PF08274.2; Description=PhnA Zinc- Ribbon
  Pfam module annotation: Pfam domain module=DNA_RNApol_7kD::OPT::PhnA _Zn_Ribbon; Domain location=645-676::34-636::644-672
METEIPRSTEISETLLLPETNLDHGEYVPEWKEQITIRGLISSALLGILFCIITHKLNLTIGIIPSLNVAAGLLGFFFIKSWTGFLSKLGFLSKPFTKQENTVIQTCVVSCYGLAYSGGFGSYLIAMDERTYKLIGSDYPGNNPEDVINPGLWWMTGFLFVVSFLGLFCLVPLRKVMILDYKLTYPSGTATAMLINSFHNNTGAELAGKQVKCLGKYLSLSLVWSCFKWFFSGIGGACGFDHFPTLGLTLFKNTFYFDFSPTFIGCGMICPHLVNCSVLLGAIISWGFLWPFISQHAGDWYPADLKANDFKGLYGYKVFIAISIILGDGLYNLIKIIVVTVKEICNKSSRQHNLPVFTDILDKSKTSVLMREKKKRDIIFLKDRIPLEFAVSGYVGLAAISTAIIPLIFPPLKWYFVLCSYLVAPGLAFCNSYGAGLTDMSMPSTYGKTGLFIVASIVGNNGGVIAGLAACGIMMSIVSTAADLMQDFKTGYLTLSSAKSMFVTQLLGTAMGCIIAPLTFWLFWTAFDIGDPDGLYKAPYAVIYREMAILGVEGFAKLPKHCLALCCGFFIAALIVNLIRDMTPPKISKLIPLPMAMAGPFYIGAYFAIDMFVGTVIMLVWERMNKKDADDYSGAVASAPEPVTYVCGDCGQENTLKSGDVIQCRECGYRILYKKRTRRDVVNLFPANLFDGLFSCSCSIRSSLRTTTPEGGS

SEQ ID NO: 74413 - protein, 1338 aa, Zea mays
  Coding DNA Sequence Number=SeqID_32634
  Homolog annotation: Hit_ID=Q9FLL8; Match level="QueryCoverage=43%, HitCoverage=94%, E-value=0.0, Identity=96%"; Hit description =Arabidopsis thaliana genomic DNA, chromosome 5, P1 clone:MEE6
  Pfam annotation: Domain name=NAM; Domain location=150-279; Score= -54.0; E_value=0.018; Accession=PF02365.6; Description=No apical meristem (NAM) protein
MALRTVLVSDVPSLPDSVYGLSEGLELSKPTSFRLPGFSVIGHRGIGMNVTKDDCPVIFHDDFIYSEENGIVNESRVTDLSLSEFLLYGPQKETEKIGKTLMRKSKEGKVLKWDVDLDDSLCTLQEAFEQVEQTLGFNIELKFDDQTVYEREFLVHILRSVLQKALGLPMKALTVPDECNDIFSTHPRDLPGYGSEEHWYFYCKKPKNQVTRTKSYNLWIPTGEKTDVLDPKKNGGELVGIKHSFTFIENEEEEESDNKNGDEEEPPQCNWFLDEISLPLTVVDTDWTLCHIFYEKVKPEFVLSGDMMKASFGRLRRFALPKADAIDIGELFPTAQIEGLARAAKDMQDMREGYDRLLEVAAAMANSAYEFSESLGEMGSCLEQIAPHNDQESGGILLMLGKVQFELKKLVDTYRSQIFKTITRPSESLLSDLRTVEDMKQQCEEKRDVVKHMLMEHVKDKVQVKGTKGERLIRRQLETARDELQDEATLCIFRLKSLKEGQARSLLTQAARHHTAQMHMFFAGLKSLEAVEQHVRIAADRQHIDCVLSDPGNEMDCSEDNDDDDRLVNRDGELSFDYITSEQRVEVISTPHGSMKVNADPREEHSVSNRDRRTSSHSAPLFPDKKADLADRSMRQMTPSANAYILPTPVDSKSSPIFTKPVTQTNHSANLWHSSPLEPIKTAHKDAESNLYSRLPRPSEHAFSGPLKPSSTRLPVPVAVQAQSSSPRISPTASPPLASSPRINELHELPRPPDGINRGNEGSFRFSIGESDRKTAVESLEFRDDLWRFHDTRSVTSLPAHEPTYAMDKVNLSRTEVRRIVGFESNEVSSVSNEYTSITVNRTGGSNEVDIIGGSLVRKRVSSPLNKLFPEKFRGDSLDISHSNQPMTSAGLPKGFHIPVGQDHKKANISGRLRLFTTSNCSEWGNDTSHTGKLSSTVFTDGPLLDSNDLQPSQDVHCLYSPVHETFQVPNKPLPCHRNISVSPPLSLSPLGPRFSERMKALQGGLNGNIFEDDVCLKNTGEEAELRTGHRSFDDTNGIQRAFSMDRAIESVPTSPCKRFSRSLSGRPIQRSLVGSFEESLFSGRLSYGQANQKIDGFLAILSIAGGNISPKSQKLPFSVTSVGDDCFLLYYASIDLSGGSLPSKLWGQKLKTNQNKSDAQTINKRLRIPMKGRIQLVLSNPEKTPLHTFLCNYDLTDMPHGTKTFLRQKVTLASSVPTKAKKSANKGSEGSELVDELHSPNECGNKNCRETYRETGQRCSKSGVLRYALHLKFICPLRKKASKLGQKKSLDAGDDGERRFYLYNELRVVFPQRHTDSDEGKLNVEYHYPENPRYFDV

SEQ ID NO: 74414 - protein, 414 aa, Zea mays
  Coding DNA Sequence Number=SeqID_32635
  Gene Ontology: Mol. function=acyltransferase activity; Cellular component=plastoglobule; Biological process=metabolic process
  Homolog annotation: Hit_ID=UPI000004878C; Match level="QueryCoverage =99%, HitCoverage=84%, E-value=3e-47, Identity=53%"; Hit description =catalytic
MVVHLGGSLPWNVAHALQNLLFFSTYLGSFASIRGLENLVKLIERTVRSEYFRLPKRPIYIVGESIGACLALDVAASNPDIDLVLILANPVTRVNNFMLQPLSSLLEILPDGVPSFLEENFRFEQAMFETMLNETDAAQIGGGLLGDLFATSVNLPYLEFFKTLLKNGIDSQVVFDYNDQMKIPFLKNLIKELSQDSTYLRNGEEGEVGNQDLHMPGIVPKMPGRFYVYFGKPIYTEGREDELNDKEKAHEVYLQVKSEVERYIGKLIEKTVRSEHYRFPNRPIYIVGESIGASLALDVAASNPDIDLVLILANPASANSQMDTVNAQTLILLSGRDQWLMNKEDIERLRGALPRCEVRELENNGQFLFLEDGVDLVSIIKRAYYYRRGKSLDYISDYILPTPFEFKEYEESQR

SEQ ID NO: 74415 - protein, 79 aa, Zea mays
  Coding DNA Sequence Number=SeqID_32636
  Subcellular localization annotation: CTP_CleavageSite=24; ConfidenceScore=5.36e-01
ALLLLSDDWWAAAAAAAALRQVLRLSSVSSSVSLPASSTRQAIHDFCLQKLLGFMGCELAAMEVIQAKGPLAELVRWSE

SEQ ID NO: 74416 - protein, 507 aa, Zea mays
  Coding DNA Sequence Number=SeqID_32637
  Gene Ontology: Mol. function=cysteine-type endopeptidase activity; Cellular component=intracellular; Biological process=proteolysis
  Homolog annotation: Hit_ID=Q8RYA5; Match level="QueryCoverage=99%, HitCoverage=27%, E-value=1e-168, Identity=84%"; Hit description=Dek1- calpain-like protein
MTGVALLLSFYSIMLWWRTQWQSSKAVAYLLLLAVGLLCAYDFCAIYVTAGASASELNSPSGFFFGVSVISLAINMLFICKILFNVSGFDVDEYVRRSYKFAYSDCVEVAPVSCSPEPPDPSELYMTKSSSYAFVASVLLSAAVSSWLSISNPSVARIDALRSTVIKLREGFRRKGQNSSSNSSEGCGSSVKRSSGSVEAGQNGNATDSMYRSNSQSDGVNWSSIPFDRSNSCQEGRSSDKNIDSARASLAHRSNSCLSAVQDSETAVVSVDRHGDPTTSLVCSSSGLESHGCEPSGSATTSGNQQLLDLNLAAIFQDRLNDPRISSMLKKNGGLGDVELANLLQDKGLDPNFSYMLKDKVMDPRILALLQRSSLDADREHQDDVDVTATDSDRLDTTIANQISLSEELRRSGLEKWLNISRLIFHHLAGSPIRAFIVFTVMFIIETATVAIYRPETIKVINATHEQFEFGFSILLLSPVVCSIMAFIWSLRAEEMLMTSKPQKVMH

SEQ ID NO: 74417 - protein, 828 aa, Zea mays
  Coding DNA Sequence Number=SeqID_32638
  Gene Ontology: Mol. function=cysteine-type endopeptidase activity; Cellular component=intracellular; Biological process=proteolysis
  Homolog annotation: Hit_ID=Q8RYA5; Match level="QueryCoverage=82%, HitCoverage=31%, E-value=0.0, Identity=76%"; Hit description=Dek1 -calpain-like protein
  Pfam annotation: Domain name=MFS_1; Domain location=105-498; Score= -47.5; E_value=0.047; Accession=PF07690.6; Description=Major Facilitator Superfamily
MPNEEGDKGLEGQPQEGVLVKEHGEGCREVADALHRSNDMMRNSENLFKSSVILGLSLTVPLMVACLSFAVPIWIRNGYSFWIPGREFANRENVSQAPGEKERALFVITIAVFTASIIGLGAIVSAKPLDALGYKGWDADKNSSYSPYATSMYLGWALSSTIAVITTGLIPIVAWFATYRFSPSSAICVGLFATVLVSFCGASYWGVVNSREDGAPLKADFLAALLPLLCIPAFFSLFTGLYKWKDDDWKISRGVYLFVGMGMLLLFGAVAAVIVTIRPWTVGVACLVAILFLVFVIGVIHYWTSNNFYLTRTQMLLVCSIAFLLALAAFLMGLFHGKPFVGASIGYFSFIFLLTGRALTVLLSPPIVVYSPRVLPVYVYDAHADSAKNVSYAFLILYGIALATEVWGVIASLIMNPPFVGAGVSATTLVIAFSFAVSRPCLTLKMMEDAVHFLSKDTVVQAMSRSANKTRNAISGTYSAPQRSASSAALLVGDPALTLDRAGNFVLPRADVMKLRDRLRNEEIAAGSFLCGVKDCLLICPQSLSNIDYRRNMCAHARILALEEAIDTEWVYMWDKFGGYLLLLLGLTAKAEQIQDEVRLRLFLDSIGLSDLSAKEIKKWMPEDRRQFELIQESYIREKEMEEEALMQRREEEGKGRERRRALLEREERKWKELEISLLSSIPNTGSRDAAAMAAAVRAVGGDSALEDSFARDRVSSIANHIRKAQLARRAEQMELIPVAASTTTLHRWCGLAVHRLPPGTRQSGTPNEVLSTDMVSEFDVLPTWMCHAGASTRAVVAPWSWVEYVDRKGEGDSSSSRLSASRNDGST

SEQ ID NO: 74418 - protein, 358 aa, Zea mays
  Coding DNA Sequence Number=SeqID_32639
  Gene Ontology: Mol. function=protein binding; Cellular component =nucleus; Biological process=regulation of transcription, DNA -dependent
  Homolog annotation: Hit_ID=Q6J9V6; Match level="QueryCoverage=99%, HitCoverage=100%, E-value=0.0, Identity=99%"; Hit description=FIE2
  Pfam annotation: Domain name=WD40; Domain location=123-162; Score =27.8; E_value=3.9e-05; Accession=PF00400.22; Description=WD domain, G-beta repeat
  Pfam annotation: Domain name=WD40; Domain location=168-208; Score =35.3; E_value=2.1e-07; Accession=PF00400.22; Description=WD domain, G-beta repeat
  Pfam annotation: Domain name=WD40; Domain location=77-119; Score=4.6; E_value=11; Accession=PF00400.22; Description=WD domain, G-beta repeat
  Pfam module annotation: Pfam domain module=WD40::WD40::WD40; Domain location=123-162::168-208::77-119
MAKLGPGQGLGCEAAEGSLVPSRKREYKPCGKHTEGKRPLYAIGFNFMDARYYDVFATVGGNRVTTYRCLENGSFALLQAYVDEDKDESFYTLSWARDHVDGSPLLVAAGSNGIIRVINCATEKLAKSFVGHGDSINVIRTQPLKPSLIISASKDESVRLWNVHTGICILIFAGAGGHRNEVLSVDFHPSDIERFASCGMDNTVKIWSMKEFWLYVDKSYSWTDLPSKFPTKYGQFPVLIAAVHSNYVDCTRWLGDFILSKSVVNEIVLWEPKTKEQSPGEGSIDILQKYPVPECDIWFIKFSCDFHFNQLAIAQSLELVKTAPSGGGMKWTIRAPETEEVLPLNAGLMVTLGWGCDG

SEQ ID NO: 74419 - protein, 583 aa, Zea mays
  Coding DNA Sequence Number=SeqID_32640
  Gene Ontology: Mol. function=protein dimerization activity; Cellular component=nucleus; Biological process=regulation of transcription, DNA-dependent
  Homolog annotation: Hit_ID=Q84UA5; Match level="QueryCoverage=99%, HitCoverage=90%, E-value=1e-178, Identity=73%"; Hit description =Liguleless2-like protein
  Pfam annotation: Domain name=bZIP_1; Domain location=179-230; Score =22.3; E_value=0.00055; Accession=PF00170.11; Description=bZIP transcription factor
  Pfam annotation: Domain name=bZIP_2; Domain location=177-232; Score =21.0; E_value=0.0042; Accession=PF07716.5; Description=Basic region leucine zipper
  Pfam module annotation: Pfam domain module=bZIP_1::bZIP_2; Domain location=179-230::177-232
DFQPAAASAAYFGFGELEEALIHGGGAASAGGGVDPGVIIKNDVAQAKSAAGYLAGAGTGRPPTLEIFPSWPMRHQQQLHSGNSQSVGSTGTDSSSAQNTMSQMELVSPASSAPRQEVMMVTTDDYSYKPGLAAAPAAAAPPSFQQHHPLPLQLHGGEGGGDHDKRKHGSTRKDGKLVDAKTERRLAQNREAARKSRLRKKAYVQQLETSRIRLQQVEHELQRARSQSFDMSWAYRGPGPVRWRVQRRRGHELCCGLQLQLSCRSRSRPQRGAAMFDMEYARWLDDDTKRLAELRGGLQAHLLDGNLGLIVEECMQHYDELFQLKAALARSDVFHLLTGSWATPAERCFFWMGGFRPSELLKILIPQLDPLTEQQLLGICNLQQSSEQAEEALAQGLHQLHQSLADTVAAGTLNDGAAAPNYMNIMAVALEKLASLENFYQQVTIFLPSISCIVDRHPQDLILTVDHELHSNVTVAMELVLVLRATGSGPAFSMAGAAQPFVRKLALRAPSADNLRHQTLHQMRRILTTRQAARCFLSIGEYYSRLRALSNLWASRPRDNFIGTESLSPTATELQALHHQQQN

SEQ ID NO: 74420 - protein, 496 aa, Zea mays
  Coding DNA Sequence Number=SeqID_32641
  Gene Ontology: Mol. function=protein dimerization activity; Cellular component=nucleus; Biological process=regulation of transcription, DNA-dependent
  Homolog annotation: Hit_ID=Q84UA5; Match level="QueryCoverage=96%, HitCoverage=86%, E-value=0.0, Identity=77%"; Hit description =Liguleless2-like protein
MTDGLRVRYCLGRDFHQPAAAAAAYFGFGELEEALIHGGGGGVDPGVITKNDVAQAKSAAAAAGYLAGAAARPPTLEIFPSLPMRHQQQLHSGNSQSVGSTTDSSSAQNAMSQMELASPAASSAPRQEAMMVTADGYSYKPGLAAAAAGAAPPSFQFQQQHQHHHPLPLHGDGGGDHDKCHSHVQRKHGSTGKDGKLVDAKVGIYSMDPLAPLNFITTLPCIADGTAAGAEQRGCEEEQAEEEGLRAAARDYQDQASARRARVPESTVTLTGAAMFDMEYARWLDDDSKRLAELRGGLQAHLLLDANLGLIVEECMQHHDELFQLKAALARSDVFHLLTGSWTTPAERCFFWMGGFRPSELLKVLIPQLDPLTEQQLLGICSLQQSSEQAEEALAQGLHQLHQALADTVAAGTLNEGSAAPNCMNIMAVALDKIASLENFYQQADNLRQQTLHQMRRILTTRQAARCFLSIGEYYSRLRALSNLWASRPGEYVSQA

SEQ ID NO: 74421 - protein, 343 aa, Zea mays
  Coding DNA Sequence Number=SeqID_32642
  Gene Ontology: Mol. function=protein dimerization activity; Cellular component=nucleus; Biological process=regulation of transcription, DNA-dependent
  Homolog annotation: Hit_ID=Q84UA5; Match level="QueryCoverage=93%, HitCoverage=59%, E-value=1e-131, Identity=77%"; Hit description =Liguleless2-like protein
  Pfam annotation: Domain name=bZIP_1; Domain location=82-136; Score =25.5; E_value=0.00019; Accession=PF00170.11; Description=bZIP transcription factor
  Pfam annotation: Domain name=bZIP_2; Domain location=83-133; Score =13.8; E_value=0.028; Accession=PF07716.5; Description=Basic region leucine zipper
  Pfam module annotation: Pfam domain module=bZIP_1::bZIP_2; Domain location=82-136::83-133
MSQMELASPAASSAPRQEAMMVTADGYSYKPGLAAAAAGAAPPSFQFQQQHQHHHPLPLHGDGGGDHDKCHSHVQRKHGSTGKDGKLTERRLAQNREAARKSRLRKKAYVQQLETTRIRLQHVEHEFQRARSHSQGVGVGGCGAAGDMSCGAAMFDMEYARWLDDDSKRLAELRGGLQAHLLLDANLGLIVEECMQHHDELFQLKAALARSDVFHLLTGSWTTPAERCFFWMGGFRPSELLKVLIPQLDPLTEQQLLGICSLQQSSEQAEEALAQGLHQLHQALADTVAAGTLNEGSAAPNCMNIMAVALDKIASLENFYQQGPKRAKLLIPFLSEDLAMHCS

SEQ ID NO: 74422 - protein, 169 aa, Zea mays
  Coding DNA Sequence Number=SeqID_32643
MASPVDVAGLRPRLGEVEAPPKLRSSLSSVAEAESEPLVGRGGGRRLRPGRSPSPGVGQSGPESEPWVGRSGVRRLPGLSPSPSPGSGGAEFPVVPSAGPDCLSASLCRVALQSARRRRRCPSVRPLGAKICGAELRGRVATTSVSVKAGSGPPAAGFALSARHADTAR

SEQ ID NO: 74423 - protein, 169 aa, Zea mays
  Coding DNA Sequence Number=SeqID_32644
MGRLGEGRCGGAAGGQGGGGLWGWMVEWAAGSQSQSQSQGRILRDKRAGGEVEPRSPKVSCIGKVLSDRERHGRRRGWWHGVAAMFRCDGCARVARGASRNMAALEDDGVEQQQQQQAGVAGMRRFKSGRRAASWGDEALATAAVGDVDEGMEMPDSQDAEQWSRRPVI

SEQ ID NO: 74424 - protein, 230 aa, Zea mays
  Coding DNA Sequence Number=SeqID_32645
MKPAVWARVSCSSTAQQLHAGVGKFAAAACWSWKKKREELPCFRARLAGKPPRASPAKGGIVPASDDDDGVSLGTVKLPGNIDTARLESLLFQWGNSLCQGANLPLPVPLKISSPDAIDQVDKVEGGIRLGFVAVEDGATRTLVYIDCLVSPAPDGSGPVFRAIRNGPMKDKEPPGEPRIMRSLLQALEKSIQIAPVVSIDLRRDDGYRLKQQEIMSTESNSWYISNPQF

SEQ ID NO: 74425 - protein, 555 aa, Zea mays
  Coding DNA Sequence Number=SeqID_32646
  Gene Ontology: Mol. function=protein dimerization activity; Cellular component=nucleus; Biological process=regulation of transcription, DNA-dependent
  Homolog annotation: Hit_ID=Q84UA5; Match level="QueryCoverage=83%, HitCoverage=77%, E-value=1e-158, Identity=67%"; Hit description =Liguleless2-like protein
  Pfam annotation: Domain name=bZIP_1; Domain location=245-303; Score =25.1; E_value=0.00025; Accession=PF00170.11; Description=bZIP transcription factor
  Pfam annotation: Domain name=bZIP_2; Domain location=243-293; Score =16.4; E_value=0.016; Accession=PF07716.5; Description=Basic region leucine zipper
  Pfam module annotation: Pfam domain module=bZIP_1::bZIP_2; Domain location=245-303::243-293
MVSVRYCLGRDFQPAAASAAYFGFGELEEALIHGGGAASAGGGVDPGVIIKNDVAQAKCKCFFFCLLRLPSVSGVRPDWATCQKGSRSILARLRTGTAPHRARHASPFVFLPVSIPMQTQCAYSSSVPWRERERREMHEQGRHRRHSGNSQSVGSTGTDSSSAQNTMSQMELVSPASSAPRQEVMMVTTDDYSYKPGLAAAPAAAAPPSFQQHHPLPLQLHGGEGGGDHDKRKHGSTRKDGKLVDAKTERRLAQNREAARKSRLRKKAYVQQLETSRIRLQQVEHELQRARSQGLFVGGCSAAGDMSSGAAMFDMEYARWLDDDTKRLAELRGGLQAHLLDGNLGLIVEECMQHYDELFQLKAALARSDVFHLLTGSWATPAERCFFWMGGFRPSELLKILIPQLDPLTEQQLLGICNLQQSSEQAEEALAQGLHQLHQSLADTVAAGTLNDGAAAPNYMNIMAVALEKLASLENFYQQVTIFLPSISCIVDRHPQDLILTVDHELHSNVTVAMELVLVLRATGSGPAFSMAGAAQPFVRKLALRAPSVNLQING

SEQ ID NO: 74426 - protein, 123 aa, Zea mays
  Coding DNA Sequence Number=SeqID_32647
MAEPAPGHAVMQGGGRGNGSPGLPLVWEAPVRLATDAQPVIACNFQGHNLTTMFPVSTKEIDASSRQGSKRIRYIRSEGNLLLNDSKQHAADAPEPDAAGEEPWDFESSSTMPMYYRKCSRPC

SEQ ID NO: 74427 - protein, 104 aa, Zea mays
  Coding DNA Sequence Number=SeqID_32648
MPVPPQQHCDVVPATLQQLAERKAIARASAYKVFASAQLQAATCGLLVRRRLREVRRHMLEAALVAVDLGTRGRDLVLSDSHQQSHWPVVSKRKHGACPAGDEL

SEQ ID NO: 74428 - protein, 47 aa, Zea mays
  Coding DNA Sequence Number=SeqID_32649
  Homolog annotation: Hit_ID=O24587; Match level="QueryCoverage=97%, HitCoverage=7%, E-value=4e-10, Identity=47%"; Hit description=Pol
MKDAKLAKTPMGTDGHLDLNAGDPKECHLVVVKRILRYLVRTPYIGL

SEQ ID NO: 74429 - protein, 583 aa, Zea mays
  Coding DNA Sequence Number=SeqID_32650
  Gene Ontology: Mol. function=ATP binding; Cellular component =ubiquitin ligase complex; Biological process=electron transport
  Homolog annotation: Hit_ID=Q10D64; Match level="QueryCoverage=83%, HitCoverage=100%, E-value=0.0, Identity=77%"; Hit description =Transducin family protein, putative, expressed
  Pfam annotation: Domain name=WD40; Domain location=201-237; Score =15.6; E_value=0.18; Accession=PF00400.22; Description=WD domain, G -beta repeat
  Pfam annotation: Domain name=WD40; Domain location=239-275; Score =15.1; E_value=0.25; Accession=PF00400.22; Description=WD domain, G -beta repeat
  Pfam annotation: Domain name=WD40; Domain location=310-349; Score =22.5; E_value=0.0015; Accession=PF00400.22; Description=WD domain, G- beta repeat
  Pfam annotation: Domain name=WD40; Domain location=353-390; Score =35.4; E_value=2e-07; Accession=PF00400.22; Description=WD domain, G -beta repeat
  Pfam annotation: Domain name=WD40; Domain location=400-438; Score =21.3; E_value=0.0034; Accession=PF00400.22; Description=WD domain, G- beta repeat
  Pfam annotation: Domain name=WD40; Domain location=443-479; Score =30.6; E_value=5.6e-06; Accession=PF00400.22; Description=WD domain, G-beta repeat
  Pfam annotation: Domain name=WD40; Domain location=485-545; Score =46.7; E_value=7.6e-11; Accession=PF00400.22; Description=WD domain, G-beta repeat
  Pfam module annotation: Pfam domain module=WD40::WD40::WD40::WD40::WD4 0::WD40::WD40; Domain location=201-237::239-275::310-349::353 -390::400-438::443-479::485-545
MVWGLGGCFGGVAVAAVSPVAAGRKQSASEGGAEAKQQQQQRVAPREEEQQAAASVAGGRKERKKKDGLRFPFLSRFSHPLYRSSTTSSGKKQMKDSDDEGAGDGVNRPHTSNNLPLPAPHSDPNLQFSGGTDDESSNRDSSSSATGGASPGYYSDYPSSFSGECSPYNMSPWNQTMASPWSHHSEPAGLGGGPPTMAPGTSLISSLVREEGHIYSLAAKGDTLYTGSDSKNIRVWRKQKDSGGFKSSSGLVKAIVMSGERIFTGHQDGKIRVWKVSAKNGMHKRVGSLPRLRDFLRGSLNPSNYVEVRKNRSALWIRHSDAVSCLSPTDPAQGLLYSGSWDRTFKVWRISDSKCLESVVAHDDNVNSVVAAFDGLVFTGSADGTVKVWRREQQGKGTKHTAVQTLLKQEHAVNALAVSAVAPVLYCGSSDGLVNFWEGDRHLVHGGVMRGHKKAVFCLAAAGALLLSGSADNTIFVWRRDCGVHSCLSVLTGHTEPIRCIAVVEDNGENSSESNAGDSAGGGGSSASRWIVYTGSLDKSIKVWRVTDEAPDPLFHGSGDAPQIFDRYPGDAFGASGSTTSFR

SEQ ID NO: 74430 - protein, 191 aa, Zea mays
  Coding DNA Sequence Number=SeqID_32651
MEKKRIKQNCAIGPNNTILAQLAISAPPHAPGDPLTRGPSASANPLQVALALTATVFMGPCISRSLALILFFRPLSRGSKMSANERAGSSTTSERRGLGGHAELRVCALVARSWGLRGPPGQALATSEPSRGIPGSIGVQFLVGSKIHDGAAVRRGPGSLPHPRSSRVSSTAGRACHRGWVFGWGRRAISR

SEQ ID NO: 74431 - protein, 561 aa, Zea mays
  Coding DNA Sequence Number=SeqID_32652
  Gene Ontology: Mol. function=RNA polymerase II transcription factor activity; Cellular component=transcription factor TFIID complex; Biological process=transcription initiation from RNA polymerase II promoter
  Homolog annotation: Hit_ID=Q6JAE2; Match level="QueryCoverage=51%, HitCoverage=86%, E-value=1e-147, Identity=81%"; Hit description=TATA sequence-binding protein 2
  Pfam annotation: Domain name=NusB; Domain location=84-256; Score= -17.4; E_value=0.035; Accession=PF01029.9; Description=NusB family
  Pfam annotation: Domain name=TBP; Domain location=404-472; Score =61.3; E_value=3.2e-15; Accession=PF00352.12; Description =Transcription factor TFIID (or TATA-binding protein, TBP)
  Pfam annotation: Domain name=TBP; Domain location=473-532; Score=8.4; E_value=0.00022; Accession=PF00352.12; Description=Transcription factor TFIID (or TATA-binding protein, TBP)
  Pfam module annotation: Pfam domain module=NusB::TBP::TBP; Domain location=84-256::404-472::473-532
  Subcellular localization annotation: CTP_CleavageSite=84; ConfidenceScore=5.79e-01
MEAAPSARAFSPSSSPSAGARPSLPLAGLASRRARVLAAPPPPRAVASSRAPLVVSSPPPPEDSGTHNPAHAKVDRSGRFCSPRAARELALMISYAACLEGTDVVRLFDRRISARREPGFVFNKACLLNYNHMSFGGGPLEVGTEQEAEKLASQNDKDSANEADVLSAPPKLVYNNYVLRELLVAVASGWDKHVVIIDKIIPQAWKDEPVARILELCILHIAMAEMASKGTPHKVVINEAVDLAKRFCDGGAPRANTFCLQGLAFNLRESKSSVPLNRGMKPFLAAISVSPGASAFKRRGTWGSFELKESGGNEMDGEYARHWMSADVKSRVSSSVGRSGSDDLFRPYEISGWAGYASLVAAILKLHETVRMDWPNSWAAVVPSSSVMLRDCGTMLKIRLCSHEEGNKDRNIVSTVNLDCKLDLKAIALQARNAEYNPKRFAAVIMRIREPKTTALIFASGKMYARIIQKLGFPAKFKNIVGSCDVKFPIRLEGLAYSHGAFSSKIVLTGAKVREETYTAFENIYPVLSEFRKIQQWVDGYSVQLTYVMYSFMEHVWDWAP

SEQ ID NO: 74432 - protein, 516 aa, Zea mays
  Coding DNA Sequence Number=SeqID_32653
  Gene Ontology: Mol. function=lithium ion binding; Cellular component =integral to membrane; Biological process=calcium ion transport
  Homolog annotation: Hit_ID=Q6JAE1; Match level="QueryCoverage=99%, HitCoverage=100%, E-value=0.0, Identity=68%"; Hit description =Putative K-exchanger-like protein
  Pfam annotation: Domain name=Na_Ca_ex; Domain location=125-304; Score= 18.1; E_value=0.00091; Accession=PF01699.14; Description =Sodiumcalcium exchanger protein
  Pfam annotation: Domain name=Na_Ca_ex; Domain location=364-507; Score= 86.6; E_value=7.8e-23; Accession=PF01699.14; Description =Sodiumcalcium exchanger protein
  Pfam module annotation: Pfam domain module=Na_Ca_ex::Na_Ca_ex; Domain location=125-304::364-507
  Subcellular localization annotation: CTP_CleavageSite=40; ConfidenceScore=5.27e-01
MALTRGRARTAPAVPSACFLLLLLLLLTSSSLLAAPTSGRAESGGGSVLGDASSSSGKARGDSCEELQSISGGEARCAYLRAQNSPCSPAGYVDYLRLFYCAFAGAPAAAACAALALWLAVLFYLLGDTASEYFCASLEGLSAALRLPPAVAGVTLLSLGNGAPDVFASVVSFASGDDGGGGVTVWVAASFVSLYVGYVVLVWTSHCCTEKGKPAADSLSAPLLLDDDDDVGDVVPSLPSHTKTEASSTATSRVIATLHCLAAALCMPLYLPRRLTIPDIAGHRWSRPYAVASAALAPVLIAVTWSSQRHNPTSWHGLAVLVGGALLGLLLAALAAATTDASSPPRGRRRRVPWLAAGFVMSVLWAYTLARELVALLVAIGYVAGIKPSVLGVTVLAWGDSLGDLVSNVAMAVHGGPGGAQTAVSGCYAGPLFNTVVGLGLSLALAAGAQHPAPFAVPVDAAAYEAVGFLGAALAWALFVVPVRGMRIDRVYGVGLIAIYLCFFAVRVSETLGLWS

SEQ ID NO: 74433 - protein, 474 aa, Zea mays
  Coding DNA Sequence Number=SeqID_32654
  Gene Ontology: Mol. function=nucleic acid binding; Cellular component= protein complex; Biological process=microtubule-based process
  Homolog annotation: Hit_ID=Q6JAE0; Match level="QueryCoverage=93%, HitCoverage=98%, E-value=0.0, Identity=91%"; Hit description =Putative tubulin gamma-2 chain
  Pfam annotation: Domain name=Tubulin_C; Domain location=60-180; Score= 63.8; E_value=5.7e-16; Accession=PF03953.7; Description=TubulinFtsZ family, C-terminal domain
  Pfam annotation: Domain name=zf-CCHC; Domain location=364-383; Score =10.2; E_value=0.02; Accession=PF00098.13; Description=Zinc knuckle
  Pfam module annotation: Pfam domain module=Tubulin_C::zf-CCHC; Domain location=60-180::364-383
MACAAVWFKLRNQSVFHGVVLRRDPPLAIPREQTHSSKKFRPCLTVISASTTTLRHPGYMNNDLVGLLASLIPTPRCHFLMTGYTPLTVERQVNMIRKTTVLDVMRRLLQTKNVMVSSYARTKEASQAKYISILNIIQGEVDPTQTFPPHGRRPGLPHRDVVVVLDFATTMSVAMNGDEQVEMDWSLNQGNTIDSSVTLPEQAPPLVDWDLIQIQEEKEEEGITELCSEEQVYALLGLSREDEREEEMATDSKSRADGPNASIVLDIEGVEDVPMVVNDYILQETVTEYDKDNPSLDVGTIYPCMEDFRLAVRQYAINKEFELGIRATSKSRYRGYCKGGDCPWSVSGFKKKGEVAVMVLTSKVRCPNCGELGHRKTSYKCPLNGTKKILFGYQGFRAIFTAPVTSSKLSQNADVSFLFSDFGCPVKKIPICSNNPQDKSVRRRIDNMHQRLRLLEQHMETLLRPKLAKLLTMC

SEQ ID NO: 74434 - protein, 255 aa, Zea mays
  Coding DNA Sequence Number=SeqID_32655
MDPKLLRHGNLRSIVLPPVPRLARASAAATASPRKIFLYERMEVSAGLRLPPVAAAASLLGCRSASVPPRAAASHSVRSVSRAVKVGLLSLSPLVAPPREIRAAAINGLQRNRSNLESLFCYDKSVPEQDIGEPSGLNLEKKNVGDKPPCSSCEAKGALLCATCAGSGLYVDSILESQGIIVKVRCLVLVDMGFRSPPQITMLVHTEFPDGPRSRRSSPPPHIALDKILVADKLIVDSTRFQFYRELNYHLSSVC

SEQ ID NO: 74435 - protein, 206 aa, Zea mays
  Coding DNA Sequence Number=SeqID_32656
  Gene Ontology: Mol. function=RNA polymerase II transcription factor activity; Cellular component=transcription factor TFIID complex; Biological process=transcription initiation from RNA polymerase II promoter
  Homolog annotation: Hit_ID=Q6JAD5; Match level="QueryCoverage=89%, HitCoverage=64%, E-value=2e-99, Identity=100%"; Hit description=TATA sequence-binding protein 1
  Pfam annotation: Domain name=TBP; Domain location=106-192; Score =153.8; E_value=4.4e-43; Accession=PF00352.12; Description =Transcription factor TFIID (or TATA-binding protein, TBP)
  Pfam annotation: Domain name=TBP; Domain location=22-101; Score =128.2; E_value=2.3e-35; Accession=PF00352.12; Description =Transcription factor TFIID (or TATA-binding protein, TBP)
  Pfam module annotation: Pfam domain module=TBP::TBP; Domain location =106-192::22-101
MAVQNLGNRALALCSPEEDKNRNIVSTVNLDCKLDLKAIALQARNAEYNPKRFAAVIMRIREPKTTALIFASGKMVCTGAKSEQQSKLAARKYARIIQKLGFPAKFKDFKIQNIVGSCDVKFPIRLEGLAYSHGAFSSYEPELFPGLIYRMKQPKIVLLIFVSGKIVLTGAKVREETYTAFENIYPVLAEFRKVQQCVNLSANKSR

SEQ ID NO: 74436 - protein, 99 aa, Zea mays
  Coding DNA Sequence Number=SeqID_32657
MDEGTPLGGLEPEDNAEPSHGLLKGKCALGPFLSILVIECQHKCLNVNLCQWMNKVQIKSKAPTTNLTVGGGRLFDGAPDSPVPPATSSLPLDSDRWSF

SEQ ID NO: 74437 - protein, 68 aa, Zea mays
  Coding DNA Sequence Number=SeqID_32658
MGVCYRCVMIDYNLLTARLDRLMRSMVNHSGYEPRDILSPLLSVYFSDCTYLTVISPITFNVIEGSLI

SEQ ID NO: 74438 - protein, 489 aa, Zea mays
  Coding DNA Sequence Number=SeqID_32659
  Gene Ontology: Mol. function=nucleic acid binding
  Homolog annotation: Hit_ID=Q850T7; Match level="QueryCoverage=81%, HitCoverage=79%, E-value=3e-60, Identity=44%"; Hit description =Putative DNA-binding protein
MGEPTAVPGRILSSSMPTAAKNMQMKEHPYLRTQLCWRKVTEEFSVPCKSVVTDSSSKSCSSTVVQDEDAAIAAVIDAAELKSEQLPSKKGQGSGRKTRYLHLDTFATDAEFQGILSIVAQALVIPKSKCICGVKTLADDLIPNQTLRSTISNMLGTQTISGGSGTTRHRSSSGSNPDPKIQSHTASTREVKQSRDHQLPAASALDDVLQVATEGALVNQPREKLVPSAKILGKDGGNFAQVSAEKTVANAEALKVKDGTESTSKATTVSGAREHNVTRTDQPKKWKKAVLTKNFQPNNVGYGYNVPFDPAYCNPFINGYPWATEPYMYSSMGVPVLLAICDANSLYGGFFRPETEPMHRGGTAAAPSKRPERSDRPKDTRHQPQSREHERQLGSSHVSESRTRNRTRSSSEGRDRGHSDRASVDHHEDHSTRKRTRDSSPKYGDRQSDRRSSHGSRSMMTPEEDASDDECNFKRRWGRRSSGGVDTRH

SEQ ID NO: 74439 - protein, 143 aa, Zea mays
  Coding DNA Sequence Number=SeqID_32660
  Gene Ontology: Mol. function=oxidoreductase activity, acting on single donors with incorporation of molecular oxygen, incorporation of two atoms of oxygen
  Homolog annotation: Hit_ID=Q1S7W2; Match level="QueryCoverage=88%, HitCoverage=91%, E-value=2e-26, Identity=47%"; Hit description =Glyoxalase/bleomycin resistance protein/dioxygenase
  Pfam annotation: Domain name=Glyoxalase; Domain location=5-134; Score= 34.8; E_value=3.1e-07; Accession=PF00903.15; Description =GlyoxalaseBleomycin resistance proteinDioxygenase superfamily
MATLQLNHIARETSDVARLAAFYEAVLGFERIPSPTYSGFQVAWLRLPSSPDVALHLIERDPAAAPVAVGPGAEGAPPSQLPRRHHLAFSVADYDGFVTGLKARGTDVFEKSQPDGRTRQVFFFDPDDEEDLVFTKLGLDVPS

SEQ ID NO: 74440 - protein, 340 aa, Zea mays
  Coding DNA Sequence Number=SeqID_32661
  Gene Ontology: Mol. function=monooxygenase activity; Cellular component=integral to membrane; Biological process=electron transport
  Homolog annotation: Hit_ID=Q8W0R4; Match level="QueryCoverage=88%, HitCoverage=85%, E-value=9e-61, Identity=76%"; Hit description =Putative cytochrome P450-like protein
  Pfam annotation: Domain name=p450; Domain location=39-340; Score= -107.2; E_value=4.3e-06; Accession=PF00067.12; Description=Cytochrome P450
MAMDYVLVAVLFVTLLLATLLIRLVLAWGLGERFDQRLPPGSRGLPLVGETLEFFTASPTLELLPFFKRRLERYGPIFRTSVVGEDLIVSLDPELSRRALQEEERAFQIWYPPSFLRVLGADSTVSALGPLHRHIRALVLRLFGPESLRLVLLRDVPRSARAELRSWLRRPGPGVEVRAATSRGRKRVMGTLRQQLGARRSRNEPEHEEEHENIQKRRADPDSDDEVTWEEYKSMKFTSHVIHEALRLANIAPVVFRKTTQDVQMKEYTVPQGSKVMICSAAAHLNPKVYKNPTVFNPWRWKDRTVESAGGSRISWPGLRLCVGADFAKLQMAIFLHYIV

SEQ ID NO: 74441 - protein, 240 aa, Zea mays
  Coding DNA Sequence Number=SeqID_32662
  Subcellular localization annotation: CTP_CleavageSite=61; ConfidenceScore=5.38e-01
MATAPSLPESQALPSAGGFAETHSATTRLPRVKHSAKVALGKAPLAAVPQLTAVSLCREPTAGTRQRGFFAECHKLLSSTRPAPPLPPPPDTAARPMPARDRRPPLAAAPTVACPSPQLPPPPANAARPTPAPRPPAPRRPPLAAHPSPPPLARPSPPANAARSHRPPHTLGSTPAPPVKPPGLPTHRYGRRAAMPRHRRRAAAIADPYIKKILVFLATAGLPAQRRVATAPTCHNTVTL

SEQ ID NO: 74442 - protein, 179 aa, Zea mays
  Coding DNA Sequence Number=SeqID_32663
GGARPRAAHRDGGWDASHDHRLPRDDGRAGGPARGCSHARAQSVGCGRGSKDIRSVGPPSCRAPRASARGSSGGATRVRSRATPREKSGADGGGTTGSGAARTIPSEKPSPADRRTQPAQRRRTPHAGARRGGERREDAHAAPPPGPTAATPSAESASRHPGDLIRGLRPPVPAPPPGR

SEQ ID NO: 74443 - protein, 571 aa, Zea mays
  Coding DNA Sequence Number=SeqID_32664
  Gene Ontology: Mol. function=protein binding; Cellular component =integral to membrane; Biological process=protein amino acid phosphorylation
  Homolog annotation: Hit_ID=Q6J9V8; Match level="QueryCoverage=99%, HitCoverage=100%, E-value=0.0, Identity=92%"; Hit description=Cf2 -like protein
  Pfam annotation: Domain name=LRRNT_2; Domain location=39-80; Score =36.5; E_value=9.4e-08; Accession=PF08263.3; Description=Leucine rich repeat N-terminal domain
  Pfam annotation: Domain name=LRR_1; Domain location=110-145; Score =5.9; E_value=22; Accession=PF00560.23; Description=Leucine Rich Repeat
  Pfam annotation: Domain name=LRR_1; Domain location=147-169; Score =7.5; E_value=11; Accession=PF00560.23; Description=Leucine Rich Repeat
  Pfam annotation: Domain name=LRR_1; Domain location=171-199; Score =2.0; E_value=1.2e+02; Accession=PF00560.23; Description=Leucine Rich Repeat
  Pfam annotation: Domain name=LRR_1; Domain location=217-239; Score =4.4; E_value=43; Accession=PF00560.23; Description=Leucine Rich Repeat
  Pfam annotation: Domain name=LRR_1; Domain location=245-267; Score =11.1; E_value=2.3; Accession=PF00560.23; Description=Leucine Rich Repeat
  Pfam annotation: Domain name=LRR_1; Domain location=269-293; Score =4.6; E_value=40; Accession=PF00560.23; Description=Leucine Rich Repeat
  Pfam annotation: Domain name=LRR_1; Domain location=295-318; Score =2.5; E_value=99; Accession=PF00560.23; Description=Leucine Rich Repeat
  Pfam annotation: Domain name=LRR_1; Domain location=319-341; Score =16.0; E_value=0.14; Accession=PF00560.23; Description=Leucine Rich Repeat
  Pfam annotation: Domain name=LRR_1; Domain location=367-389; Score =9.2; E_value=5.4; Accession=PF00560.23; Description=Leucine Rich Repeat
  Pfam annotation: Domain name=LRR_1; Domain location=417-439; Score =1.5; E_value=1.5e+02; Accession=PF00560.23; Description=Leucine Rich Repeat
  Pfam annotation: Domain name=LRR_1; Domain location=442-464; Score =0.2; E_value=2.6e+02; Accession=PF00560.23; Description=Leucine Rich Repeat
  Pfam annotation: Domain name=LRR_1; Domain location=466-490; Score =9.2; E_value=5.3; Accession=PF00560.23; Description=Leucine Rich Repeat
  Pfam annotation: Domain name=LRR_1; Domain location=492-514; Score =8.3; E_value=8.1; Accession=PF00560.23; Description=Leucine Rich Repeat
  Pfam annotation: Domain name=LRR_1; Domain location=516-538; Score =5.5; E_value=26; Accession=PF00560.23; Description=Leucine Rich Repeat
  Pfam annotation: Domain name=LRR_1; Domain location=540-561; Score =0.6; E_value=2.2e+02; Accession=PF00560.23; Description=Leucine Rich Repeat
  Pfam annotation: Domain name=LRR_1; Domain location=85-108; Score =2.9; E_value=83; Accession=PF00560.23; Description=Leucine Rich Repeat
  Pfam module annotation: Pfam domain module=LRRNT_2::LRR_1::LRR_1::LRR_ 1::LRR_1::LRR_1::LRR_1::LRR_1::LRR_1::LRR_1::LRR_1::LRR_1::LRR_1: LRR_ 1::LRR_1::LRR_1::LRR_1; Domain
  Pfam module annotation: Domain location=217-239::245-267::269 -293::295-318::319-341::367-389::417-439::442-464::466-490::492 -514::516-538::540-561::85-108
MASVTRALLILFFLALLPQLRTPILLSSAHHLPVPFLCHPDQAKQLLQLKRSFSFVDSTTTLSSWQDGTDCCLWEGIGCDASSGNVTVLDLNNRGLFSHGLDPAVFSLTSLRRLDLSMNDFSGDPVDDGRLWLPDNIPATGFDRFTLLTHLNLSYLGLRGPIPDGIGKLVNLLSLDLSSSIVSDGYDVPDVPDDSYIDYSYPLWVLNFDTLVANLSNLRELYLDGVDLSYSGHGWCTTLATYVPRLEILSMANCALTGPISKSLSRLSSLLVLNLQENYNITAGPFPEFLMDFINLTMLRLSNINLQGWFPSRPFQSKNLRVLDLSFNQNLTGHVPNFSNASSLGSLMLHGTSLLPVELKASTSFVSLKELSLDGNLVSVDFLSSFGTLGSLCKLDLAFDTASELGPVLSWIGHHKNITRLVIIYANFTEIAPALISNYFKTLRSLIICACTLPRHVLHAVGNLTGLQTLQLFNCRMTGSSTLPSSIGNLTNLRDLYIVQCGFSGPMPAAIGRLTNLRNMYVYSAQFSGPIPATIGKLTNLENLYIEDGISGPIPATIGNLTHLNSVKFFG

SEQ ID NO: 74444 - protein, 509 aa, Zea mays
  Coding DNA Sequence Number=SeqID_32665
  Gene Ontology: Mol. function=protein binding; Cellular component =integral to membrane; Biological process=protein amino acid phosphorylation
  Homolog annotation: Hit_ID=Q6J9V7; Match level="QueryCoverage=86%, HitCoverage=77%, E-value=0.0, Identity=72%"; Hit description=Cf2 -like protein
  Pfam annotation: Domain name=LRRNT_2; Domain location=11-53; Score =31.1; E_value=3.8e-06; Accession=PF08263.3; Description=Leucine rich repeat N-terminal domain
  Pfam annotation: Domain name=LRR_1; Domain location=136-158; Score =7.6; E_value=11; Accession=PF00560.23; Description=Leucine Rich Repeat
  Pfam annotation: Domain name=LRR_1; Domain location=202-224; Score =6.5; E_value=17; Accession=PF00560.23; Description=Leucine Rich Repeat
  Pfam annotation: Domain name=LRR_1; Domain location=230-252; Score =9.5; E_value=4.8; Accession=PF00560.23; Description=Leucine Rich Repeat
  Pfam annotation: Domain name=LRR_1; Domain location=254-277; Score =8.3; E_value=8.1; Accession=PF00560.23; Description=Leucine Rich Repeat
  Pfam annotation: Domain name=LRR_1; Domain location=279-302; Score =10.5; E_value=3; Accession=PF00560.23; Description=Leucine Rich Repeat
  Pfam annotation: Domain name=LRR_1; Domain location=303-325; Score =17.5; E_value=0.047; Accession=PF00560.23; Description=Leucine Rich Repeat
  Pfam annotation: Domain name=LRR_1; Domain location=327-347; Score =1.8; E_value=1.3e+02; Accession=PF00560.23; Description=Leucine Rich Repeat
  Pfam annotation: Domain name=LRR_1; Domain location=354-377; Score =8.7; E_value=6.7; Accession=PF00560.23; Description=Leucine Rich Repeat
  Pfam annotation: Domain name=LRR_1; Domain location=379-403; Score =3.8; E_value=56; Accession=PF00560.23; Description=Leucine Rich Repeat
  Pfam annotation: Domain name=LRR_1; Domain location=59-82; Score=2.0; E_value=1.2e+02; Accession=PF00560.23; Description=Leucine Rich Repeat
  Pfam annotation: Domain name=LRR_1; Domain location=84-108; Score =4.8; E_value=35; Accession=PF00560.23; Description=Leucine Rich Repeat
  Pfam module annotation: Pfam domain module=LRRNT_2::LRR_1::LRR_1::LRR_ 1::LRR_1::LRR_1::LRR_1::LRR_1::LRR_1::LRR_1::LRR_1::LRR_1; Domain location=11-53::136-158::202-224::230-252::254-277::279-302::303
  Pfam module annotation: Domain location=354-377::379-403::59-82::84 -108
MDDLKRRLKTDRDQAKQLLKLKDSFSFSYSTTTTLSSWRDGTDCCLWEGVGCDDPSSGNVTILDLHNRGLVSYGLDPAVFSLTSLRRLDLSMNDFSGAAVDDGDLSMNQFSGDPFNEGIHWLAENIPATGFERFTLLTHLNLSYMGLRGPIPAGIGRLVNLLSLDLSSSFPTDGYDVSNSYFDNVYLLWVPSFDTLMANLSNLRELYLDGVDLSSSEEGWCTTLATYVPHLEILSMANCFLNGPICKSLSRLSSLTVLNLQNNYIIGGPFPRFLMDFLNLTMLQLSNTNLQGQFPSRPFQSKNLRVLDLSDNQNLTGHVPKFSNASSLESLMLDGTNLLPVDKVKPTSTTNFMSLKELRLSGNLVSVDFLSSFVGNLIGLQTLELFHCDIMWDSTMPSSIGNLTNLRNMHIDEWPIQATIGNLTNLESLHIEDGFSGPIPATIGKLTNLRTMGLELPCGPWAHGTSLQIEASSPTCIKCWRLSAECVGGTIMSNHWLRQSIHYNDCQRQ

SEQ ID NO: 74445 - protein, 370 aa, Zea mays
  Coding DNA Sequence Number=SeqID_32666
  Gene Ontology: Mol. function=protein binding; Cellular component =integral to membrane; Biological process=defense response to fungus
  Homolog annotation: Hit_ID=Q6J9V5; Match level="QueryCoverage=91%, HitCoverage=83%, E-value=0.0, Identity=46%"; Hit description=Cf2 -like protein
  Pfam annotation: Domain name=LRR_1; Domain location=107-128; Score =5.4; E_value=28; Accession=PF00560.23; Description=Leucine Rich Repeat
  Pfam annotation: Domain name=LRR_1; Domain location=136-154; Score =0.5; E_value=2.3e+02; Accession=PF00560.23; Description=Leucine Rich Repeat
  Pfam annotation: Domain name=LRR_1; Domain location=159-182; Score =10.3; E_value=3.4; Accession=PF00560.23; Description=Leucine Rich Repeat
  Pfam annotation: Domain name=LRR_1; Domain location=212-237; Score =9.2; E_value=5.4; Accession=PF00560.23; Description=Leucine Rich Repeat
  Pfam annotation: Domain name=LRR_1; Domain location=257-279; Score =1.9; E_value=1.2e+02; Accession=PF00560.23; Description=Leucine Rich Repeat
  Pfam annotation: Domain name=LRR_1; Domain location=280-303; Score =7.1; E_value=14; Accession=PF00560.23; Description=Leucine Rich Repeat
  Pfam annotation: Domain name=LRR_1; Domain location=304-327; Score =0.1; E_value=2.7e+02; Accession=PF00560.23; Description=Leucine Rich Repeat
  Pfam annotation: Domain name=LRR_1; Domain location=328-350; Score =16.5; E_value=0.095; Accession=PF00560.23; Description=Leucine Rich Repeat
  Pfam annotation: Domain name=LRR_1; Domain location=34-55; Score =11.4; E_value=2.1; Accession=PF00560.23; Description=Leucine Rich Repeat
  Pfam annotation: Domain name=LRR_1; Domain location=352-369; Score =3.6; E_value=60; Accession=PF00560.23; Description=Leucine Rich Repeat
  Pfam annotation: Domain name=LRR_1; Domain location=58-80; Score =15.2; E_value=0.24; Accession=PF00560.23; Description=Leucine Rich Repeat
  Pfam annotation: Domain name=LRR_1; Domain location=82-105; Score =9.4; E_value=4.9; Accession=PF00560.23; Description=Leucine Rich Repeat
  Pfam module annotation: Pfam domain module=LRR_1::LRR_1::LRR_1::LRR _1::LRR_1::LRR_1::LRR_1::LRR_1::LRR_1::LRR_1::LRR_1::LRR_1; Domain
  Pfam module annotation: Domain location=34-55::352-369::58-80::82-105
MDIGTYESSSDMAWSPNDNIEEGEIPPFIFTLPALCYLDLSNNQLSGHVQDFDTTTSRLKSLFLSNNALSGFIPKAFFELTSLGALDVSSNNFTGSLDLSHFWRLHELTMLDLSNNWLHVMDADDDNLVDISYLSELQDIRLASCNVIRFPRFLRQVKSISYLDLSRNKIDGNVPNWLWDKLWSFAPYLNLSHNMFTGMQLINSYILPFSTSMEVLDLSFNRFSGRVPMPSSSGEVLEYSNNMFSSLVPNWTLYLRDTIYFSISKNNINDQLPPSICDAILDVLDLSNNNFYGPIPSCIIENMTHTILNLRGNNFNGTLPTDIMTTCDLQVLDLHGNKIEGRLPRGLSKCFHLEILDISSNRMLILFLLG

SEQ ID NO: 74446 - protein, 177 aa, Zea mays
  Coding DNA Sequence Number=SeqID_32667
  Gene Ontology: Mol. function=protein binding; Cellular component =integral to membrane; Biological process=protein amino acid phosphorylation
  Homolog annotation: Hit_ID=Q6J9V3; Match level="QueryCoverage=99%, HitCoverage=100%, E-value=1e-79, Identity=81%"; Hit description=Cf2 -like protein
  Pfam annotation: Domain name=LRR_1; Domain location=21-43; Score =11.7; E_value=1.8; Accession=PF00560.23; Description=Leucine Rich Repeat
  Pfam annotation: Domain name=LRR_1; Domain location=45-67; Score =15.9; E_value=0.14; Accession=PF00560.23; Description=Leucine Rich Repeat
  Pfam annotation: Domain name=LRR_1; Domain location=69-90; Score=9.4; E_value=4.9; Accession=PF00560.23; Description=Leucine Rich Repeat
  Pfam module annotation: Pfam domain module=LRR_1::LRR_1::LRR_1; Domain location=21-43::45-67::69-90
MASPPIDGRAPFQQARGNLVSLRILNLSRNAFPGKIPPHLGSMPDLEALDLSCNQLFGEIPQELPDLTFLEILNLSNTHLVGRIPQSHQFSTFGSSSFGGNPGLCGPPLSELPCGASPYTPSAQRVPRSSPHCVDVVLFLFTGLGFGVGFAAAILVKWNRVGRWFCKSFVWLIPIGR

SEQ ID NO: 74447 - protein, 476 aa, Zea mays
  Coding DNA Sequence Number=SeqID_32668
  Gene Ontology: Mol. function=protein binding; Cellular component =nucleus; Biological process=regulation of transcription, DNA -dependent
  Homolog annotation: Hit_ID=Q8VZY6; Match level="QueryCoverage=73%, HitCoverage=100%, E-value=0.0, Identity=86%"; Hit description =Polycomb group protein FIE2
  Pfam annotation: Domain name=WD40; Domain location=202-244; Score =4.6; E_value=11; Accession=PF00400.22; Description=WD domain, G-beta repeat
  Pfam annotation: Domain name=WD40; Domain location=248-287; Score =26.4; E_value=0.0001; Accession=PF00400.22; Description=WD domain, G- beta repeat
  Pfam annotation: Domain name=WD40; Domain location=293-333; Score =35.3; E_value=2.1e-07; Accession=PF00400.22; Description=WD domain, G-beta repeat
  Pfam annotation: Domain name=WD40; Domain location=360-396; Score =11.9; E_value=1.5; Accession=PF00400.22; Description=WD domain, G -beta repeat
  Pfam annotation: Domain name=WD40; Domain location=429-467; Score =11.9; E_value=1.5; Accession=PF00400.22; Description=WD domain, G -beta repeat
  Pfam module annotation: Pfam domain module=WD40::WD40::WD40::WD40::WD4 0; Domain location=202-244::248-287::293-333::360-396::429-467
MESDREKQQSHGKKQGDHGSKMHDSDGNKNVSDEKSQESGGKEHKSNIKKHESRRKSAAPAQPRRKKSPREVSVPVAAASNPKPRPLPVHNKENQAEGKVAEEGAATEEGEKYRAEPEILPLPPAMAKLGPGQGLGCEAAEGSLVPSRKREYKPCGKHTEGKRPLYAIGFNFMDARYYDVFATVGGNRVTTYRCLENGSFALLQAYVDEDKDESFYTLSWARDHVDGSPLLVAAGSNGIIRVINCATEKLAKSFVGHGDSINEIRTQPLKPSLIISASKDESVRLWNVHTGICILIFAGAGGHRNEVLSVDFHPSDIERFASCGMDNTVKIWSMKEFWLYVDKSYSWTDLPSKFPTKYVQFPVLIAAVHSNYVDCTRWLGDFILSKSVDNEIVLWEPKTKEQSPGEEKLSALIPTINYFKQATVKAKSTCGKLYNQQCKSPIRQTAVSFDGSTILGAGEDGTIWRWDEVDHPSSRN

SEQ ID NO: 74448 - protein, 349 aa, Zea mays
  Coding DNA Sequence Number=SeqID_32669
  Pfam annotation: Domain name=DUF1761; Domain location=147-286; Score=- 56.2; E_value=0.091; Accession=PF08570.1; Description=Protein of unknown function (DUF1761)
  Subcellular localization annotation: CTP_CleavageSite=85; ConfidenceScore=5.52e-01
MRWMCQGMWRKAVKRLSPVNSSEATVTSSERGRGSGKVAEVSGFGRSAVKSRSSGGTERGRRSSGETERERKLERSEARARSRTRRMRVRARAKRDRGSGLRGSGETGATKSSRLGQDGARPRSAGLGEGEMVAEDMEPGFLYPHGHAMSTVMPLAIGVGSSDNMASSPLEGMATLIGETRSMTSFIGDVVTSTTDTSTEAALTTSSANIGNVSTSIAKGATVGVEDGVSTSTSMFGVVANPWHDRGSNLEDEGRGVETFSTCIAIRVRVTEWVGTSGIKTTIGTRAVVHARASSTRVVVKVGVFAWVNTSGIKDIEGGVGHLDLGVVMRSCLDAIEEAPKRSHLRTVV

SEQ ID NO: 74449 - protein, 284 aa, Zea mays
  Coding DNA Sequence Number=SeqID_32670
  Gene Ontology: Mol. function=protein binding; Cellular component =integral to membrane; Biological process=protein amino acid phosphorylation
  Homolog annotation: Hit_ID=Q6J9V4; Match level="QueryCoverage=88%, HitCoverage=93%, E-value=5e-95, Identity=62%"; Hit description=Cf2 -like protein
  Pfam annotation: Domain name=LRRNT_2; Domain location=54-95; Score =37.5; E_value=4.7e-08; Accession=PF08263.3; Description=Leucine rich repeat N-terminal domain
MASIRRALLLFLALLAQLLHIPPPIPLSSAHHTHADNYLKSADGHLPVVPFLCRPDQAKSLLQLKKSLSFVDSTTTLSSWRDGTDCCLWEGVGCDASSSGDVTVLDLNNRRLFSHYGLDPAVFSLTSLRRLDLSMNDFSRGDDDVQPLPDNITATTPAGFERFSLLTHLNLSYAGLRGPIPAGIGKLVNLVSLDLSSYFSTDEDGVPDDLWTVGPIPAAIGKLTSLEILDIEDGFSGPIPATIGNLSHLNRSNFSGRIPGSMANLTQLTEMILPYNSLNGNSTY

SEQ ID NO: 74450 - protein, 151 aa, Zea mays
  Coding DNA Sequence Number=SeqID_32671
  Gene Ontology: Mol. function=hydrogen ion transporting ATP synthase activity, rotational mechanism; Cellular component=proton -transporting ATP synthase complex, catalytic core F(1); Biological process=ATP synthesis coupled proton
  Homolog annotation: Hit_ID=Q9MRJ6; Match level="QueryCoverage=97%, HitCoverage=58%, E-value=1e-42, Identity=76%"; Hit description=ATP synthase beta subunit
  Pfam annotation: Domain name=ATP-synt_ab; Domain location=1-151; Score=25.7; E_value=1.6e-09; Accession=PF00006.15; Description=ATP synthase alphabeta family, nucleotide-binding domain
MEVIDTGTPLSVPVGGATLGRIFNVLGEPIDNLGPVDTSATFPIHRSAPAFIELDTKLSIFETGSEVSALLGRMPSAVGYQPTLSTEMGSLQERITSTKKGSITSIQAVYVPADDLTDPAPATTFAHLDATTVLSRGLASKGIYPAVDPLD

SEQ ID NO: 74451 - protein, 108 aa, Zea mays
  Coding DNA Sequence Number=SeqID_32672
  Homolog annotation: Hit_ID=Q5MA12; Match level="QueryCoverage=29%, HitCoverage=21%, E-value=4e-08, Identity=87%"; Hit description=NADH -ubiquinone oxidoreductase chain 1
MQCSEHESLQFSPLLPCRVAGSASDKSTDEPHAGKLARVVLAGDPAAPEPATAASTPPTSCADFASLAGYRFPPALSVNPGNAYRLANEHGDELPEPWNDMYLKKYYA

SEQ ID NO: 74452 - protein, 121 aa, Zea mays
  Coding DNA Sequence Number=SeqID_32673
MKKKSKRDLEMKHKTAALKLTQRFLSKDLKWERQEMCVREREAWQPVCQSDWQTDAQTDRRLVKVDQNQLNRPGGAVEPSLIAPGDLFASLTGRLQIRGQRGQRPAELPLRTSSTGLDQRV

SEQ ID NO: 74453 - protein, 119 aa, Zea mays
  Coding DNA Sequence Number=SeqID_32674
MKKKSKRDLEMKHKTAALKLTQRFLSKDLKWERQEMCERGREAWQPVCQSDWQTDAQTDRRLVKVDQNRLNRPGGAVEPPLTAPGDLFASLTGRLQIRGQRGQRPAELPLRTSSTGLDQ

SEQ ID NO: 74454 - protein, 121 aa, Zea mays
  Coding DNA Sequence Number=SeqID_32675
MKKKSKRDLEMKHKTAALKLTQRFLSKDLKWERQEMCEREREAWQPVCQSDWQTDAQTDRRLVKVDQNQLNRPGGAVEPPLTAPGDLFASLTGRLQIRGQRGQRPAELPLRTSSTGLDQRV

SEQ ID NO: 74455 - protein, 121 aa, Zea mays
  Coding DNA Sequence Number=SeqID_32676
MKKKSKRDLEMKHKTVALKLTQRFLSKDLKWERQEMCEREREAWQPVCQSDWQTDAQTDRRLVKVDQNQLNRPGGAVEPPLTAPGDLFASLTGRLQIRGQRGQRPAELPLRTSSTGLDQRV

SEQ ID NO: 74456 - protein, 121 aa, Zea mays; identical to SEQ ID NO: 74454
  Coding DNA Sequence Number=SeqID_32677

SEQ ID NO: 74457 - protein, 119 aa, Zea mays
  Coding DNA Sequence Number=SeqID_32678
MKKKSKRDLEMKHKTAALKLTQRFLSKDLKWERQEMCEREREAWQPVCQSDWQTDAQTDRRLVKVDQNRLNRPGGAVEPPLTAPGDLFASLTGRLQIRGQRGQRPAELPLRTSSTGLDQ

SEQ ID NO: 74458 - protein, 143 aa, Zea mays
  Coding DNA Sequence Number=SeqID_32679
MVRERRTRISTMNKNTKDTRFIPRFGHTTKVPYFLVEAPTKSRVSFNPNPPFADHKGRLNLPWQAWQPVCQSDWQTDAQTDRRLVKVDQNRLNRLGGAVEPPLTAPGDLFASLTGRLQIRGQRGQRPAELPLRTSSTGLDQRV

SEQ ID NO: 74459 - protein, 119 aa, Zea mays
  Coding DNA Sequence Number=SeqID_32680
MKKKSKRDLEMKHKTAALKLTQRFLSKDLKWERQEMCVREREAWQPVCQSDWQTDAQTDRRLVKVDQNRLNRPGGAVEPPLTAPGDLFASLTGRLQIRGQRGQRPAELPLRTSSTGLDQ

SEQ ID NO: 74460 - protein, 119 aa, Zea mays; identical to SEQ ID NO: 74459
  Coding DNA Sequence Number=SeqID_32681

SEQ ID NO: 74461 - protein, 165 aa, Zea mays
  Coding DNA Sequence Number=SeqID_32682
MSKNIRDTRFIPRFGHTTKVPYFLVEAPTKSRVSFNPNPPFADHKGRLNRPWQAWQPVCQSDWQTDAQTDRRLVKVDQNRLNRPGGAVEPPLTAPDDLFASLTGRLQIRGQRGQRPAELPLRTSSTGLDHSAQLQLKKLNSAEVKFSWKAQLQLKKFSCFSARTL

SEQ ID NO: 74462 - protein, 152 aa, Zea mays
  Coding DNA Sequence Number=SeqID_32683
MKKKSKRDLEMKHKTAALKLTQRFLSKDLKWERQEMCERESEVFLGLEMEFKSCSLLWGRLNLPPGRLNLPWQAWQPVCQSDWQTDAQTDRRLVKVDQNRLNRPGGAVEPPLTAPGDLFASLTGRLQIRGQRGQRPAELPLRTSSTGLDQRV

SEQ ID NO: 74463 - protein, 108 aa, Zea mays
  Coding DNA Sequence Number=SeqID_32684
MGEARDVCEREGGVSWVRNGVQIVLTTLGREAWQPVCQSDWQTDAQTDRRLVKVDQNRLNRPGGAVEPPLTAPGDLFASLTGRMQIRGQRGQRPAELPLRTSSTGLDQ

SEQ ID NO: 74464 - protein, 110 aa, Zea mays
  Coding DNA Sequence Number=SeqID_32685
MGEARDVCEREGGVSWVRNGVQIVLTTMGREAWQPVCQSDWQTDAQTDRRLVKVDQNRLNRPGGAVEPPLTAPGDLFASLTGRLQIRGQRGQRPAELPLRTSSTGLDQRV

SEQ ID NO: 74465 - protein, 140 aa, Zea mays
  Coding DNA Sequence Number=SeqID_32686
MKKKSKRDLEMKHKNRSSQAHSKIPLQRFEMGEARDVCEREGGVSWVRNGVQIVLTALGREAWQPVCQSDWQTDAQTDRRLVKVDQNRLNRPGGAVEPPLTAPGDLFASLTGRLQIRGQRGQRPAELPLRTSSTGLDQRV

SEQ ID NO: 74466 - protein, 86 aa, Zea mays
  Coding DNA Sequence Number=SeqID_32687
MEHKNRSSQAHSKIPLQRFEMGEARDVCEGEGGVSWVRNGVQIVLTPLGREAWQPVCQSDWQTDAQTDRRLVKVDQNQLNRPGGGG

SEQ ID NO: 74467 - protein, 128 aa, Zea mays
  Coding DNA Sequence Number=SeqID_32688
MEHKNRSSQAHSKIPLQRFEMGEARDVCEGEGGVSWVRNGVQIVLTALGREAWQPVCQSDWQTDAQTDRRLVKVDQHRLNRPGGAVEPPLTAPGDLFASLTGRLQIRGQRGQRPAELPLRTSSTGLDQ

SEQ ID NO: 74468 - protein, 111 aa, Zea mays
  Coding DNA Sequence Number=SeqID_32689
MEHKNRSSQAHSKIPLQRFEMGEARDVCEGEGGVSWVRNGVQIVLTAVGSEVRGVRDQLNCPSGPVQLVLTREFRRENPSSTARRQVQLVYGQRGSQLKLSSAEVEKAQLS

SEQ ID NO: 74469 - protein, 200 aa, Zea mays
  Coding DNA Sequence Number=SeqID_32690
MVRERRTRISTMNKNTKDTRFIPRFGHTTKVPYFLVEAPTKSRVSFNPNPPFADHKVPKARMKKSKRDLEMEHKNRSSQAHSKIPLQRFEMGEARDVCEGEGGVSWVRNGVQIVLTALGREAWQPVCQSDWQTDAQTDRRLVKVDQNRLNRPGGAVEPPLTAPGDLFASLTGRLRIRGQRGQRPAELPLRTSSTGLDQRV

SEQ ID NO: 74470 - protein, 89 aa, Zea mays
  Coding DNA Sequence Number=SeqID_32691
MEHKNRSSQAHSKIPLQRFEMGEARDVCEGEGGVSWVRNGVQIVLTAVGREAWQPVCQSDWHTDAQTDLQTGQVDQDRLNRPGGRLNRP

SEQ ID NO: 74471 - protein, 81 aa, Zea mays
  Coding DNA Sequence Number=SeqID_32692
MEHKNRSSQAHSKIPLQRFEMGEARDVCEGEGGVSWVRNGVQIVLTAVGRELKKINSAEVKFSWKAQLQLKKFSCFSARTL

SEQ ID NO: 74472 - protein, 130 aa, Zea mays
  Coding DNA Sequence Number=SeqID_32693
MEHKNCSSQAHSKIPLQRFEMGEARDVCEGEGGVSWVRNGVQIVLTTLGREAWQPVCQSDWQTDAQTDRRLVKVDQNRLNRPGGAVEPPLTAPGDLFASLTGRLQIRGQRGQRPAELPLRTSSTGLDQRV

SEQ ID NO: 74473 - protein, 130 aa, Zea mays
  Coding DNA Sequence Number=SeqID_32694
MEHKNRSSQAHSKIPLQRFEMGEARDVCEGEGGVSWVRNGVQIVLSALGREAWQPVCQSDWQTDAQTDRRLVKVDQNQLNRPGGAVEPPLTAPGDLFASLTGRLQIRGQRGQRPAELPLRTSSTGLDQRV

SEQ ID NO: 74474 - protein, 130 aa, Zea mays
  Coding DNA Sequence Number=SeqID_32695
MEHKNRSSQAHSKIPLQRFEMGEARDVCEGEGGVSWVRNGVQIVLTTLGREAWQPVCQSDWQTDAQTDRRLVKVDQNQLNRPGGAVEPPLTAPDDLFASLTGRLQIRGQRGQRPAELPLRTSSTGLDQRV

SEQ ID NO: 74475 - protein, 86 aa, Zea mays
  Coding DNA Sequence Number=SeqID_32696
MEHKNRSSQAHSKIPLQRFEMGEARDVCEGEGGVSWVRNGVQIVLTTLGREAWQPVCQSDWQTDAQTDRRLVKVDQNQLNRPGGGG

SEQ ID NO: 74476 - protein, 130 aa, Zea mays
  Coding DNA Sequence Number=SeqID_32697
MEHKNRSSQAHSKIPLQRFEMGEARDVCEREGGVSWVRNGVQIVLTALGREAWQPVCQSDWQTDAQTDRRLVKVDQNRLNRPGGAVEPPLTAPGDLFASLTGRLQIRGQRGQRPAELPLRTSSTGLDQRV

SEQ ID NO: 74477 - protein, 130 aa, Zea mays
  Coding DNA Sequence Number=SeqID_32698
MEHKNRSSQAHSKISLQRFEMGEARDVCEREGGVSWVGNGVQIVLTALGREAWQPVCQSDWQTDAQTDRRLVKVDQNRLNRPGGAVEPPLTAPGDLFASLTGRLQIRGQRGQRPAELPLRTSSTGLDQRV

SEQ ID NO: 74478 - protein, 74 aa, Zea mays
  Coding DNA Sequence Number=SeqID_32699
  Subcellular localization annotation: CTP_CleavageSite=41; ConfidenceScore=5.36e-01
MANGAKNGFSGHGRENGHVGWGTGPSRGPPRNSPKSWEGVSSAEPRTPSRPSRGRSAPYRAQLRLALLAAWPAM

SEQ ID NO: 74479 - protein, 86 aa, Zea mays
  Coding DNA Sequence Number=SeqID_32700
  Subcellular localization annotation: CTP_CleavageSite=22; ConfidenceScore=5.08e-01
MANGPKTDFRPWPRKPARGRARDSPVVPPHETWKFGSTREGKRNSPKSWEGVSSAEPRTPSRPSRGRSAPYRAQLRLALLAAWPVV

SEQ ID NO: 74480 - protein, 86 aa, Zea mays
  Coding DNA Sequence Number=SeqID_32701
MANGPKTDFRARPRKRARGWARDPPVVPPLETWKFGSTREGKRNSPKSWEGVSSAEPRTPSRPSRGRSAPYRAQLRLALLAAWPAM

SEQ ID NO: 74481 - protein, 89 aa, Zea mays
  Coding DNA Sequence Number=SeqID_32702
  Subcellular localization annotation: CTP_CleavageSite=10; ConfidenceScore=5.03e-01
MANGPKTDFRARPRKRARGWARDPPVVPPRETWKFGSTREGKRNSPKSWEGVSSAEPRTPSRPSRGRSAPYRAQLRLALLAAWPAMVRP

SEQ ID NO: 74482 - protein, 130 aa, Zea mays
  Coding DNA Sequence Number=SeqID_32703
  Subcellular localization annotation: CTP_CleavageSite=61; ConfidenceScore=5.13e-01
MANGPKTDFRPRPRKRARGRARDPPVVPPRETWKFGCTRPPLPCGRLPAPVSHRSCGHPVPAALRSACVLLPVPREAVLDTRCLRRAHPPGCGSSARERPRRLPRAAVSLWAGGTEDTSLALFGLGCGSR

SEQ ID NO: 74483 - protein, 189 aa, Zea mays
  Coding DNA Sequence Number=SeqID_32704
  Subcellular localization annotation: CTP_CleavageSite=43; ConfidenceScore=5.33e-01
ENATDFLKAELPRSPERGVSSAKPRTPSRPSRGRSAPYRAQLRLALLAAWPAVRLRWRMSCLGPVTAWRTPAAVRPTPGARVPSLVRASRACCVEKCLRAATRPTGSRARYTLPSSSSPPGVRLVGSRAPAAFASCRRQPMAGGTEDTSLALLVSDVAHAEGRRRVGVTRPRIGPPERTTASPARRLRA

SEQ ID NO: 74484 - protein, 179 aa, Zea mays
  Coding DNA Sequence Number=SeqID_32705
  Subcellular localization annotation: CTP_CleavageSite=10; ConfidenceScore=5.29e-01
NSPKSWEGVSSAEPRTPSRPSRGRSAPYRAQLRLALLAAWPAVRLRWRMSCLGPVTAWRTPAAVRPTPGARVPSLVRASRACCVEKCLRAATRPTGSRARYTLPSSSSPPGVRLVGSRAPAAFASCRRQPMAGGTEDTSLALLVSDVAHAEGRRRVGVTRPRIGPPERTTASPARRLRA

SEQ ID NO: 74485 - protein, 213 aa, Zea mays
  Coding DNA Sequence Number=SeqID_32706
  Subcellular localization annotation: CTP_CleavageSite=44; ConfidenceScore=5.80e-01
MANGPKTDFSATAAKTGTWKGTGPSRGPPATPRSPGRGYAPQVSSAEPRTPSRPSRGRSAPYRAQLRLALLAAWPAVRLRWRMSCLGPVTAWRTPAAVRPTPGARVPSLVRASRACCVEKCLRAATRPTGSRARYTLPSSSSPPGVRLVGSRAPAAFASCRRQPMAGGTEDTSLALLVSDVAHAEGRRRVGVTRPRIGPPERTTASPARRLRA

SEQ ID NO: 74486 - protein, 222 aa, Zea mays
  Coding DNA Sequence Number=SeqID_32707
MANGPKTDFRPRPRKRARGRARDPPVVPPRETWKFGCTREGKRNSPKSWEGVSSAEPRTPSRPSRGRSAPYRAQLRLALLAAWPAVRLRWRMSCLGPVTAWRTPAAVRPTPGARVPSLVRASRACCVEKCLRAATRPTGSRARYTLPSSSSPPGVRLVGSRAPAAFASCRRQPMAGGTEDTSLALLVSDVAHAEGRRRVGVTRPRIGPPERTTASPARRLRA

SEQ ID NO: 74487 - protein, 63 aa, Zea mays
  Coding DNA Sequence Number=SeqID_32708
MTLGNGYLGSRIDEERSKMRYLYNGSSSLISCEKQTIRIEFYPCKWPHLYPPYLEWETQSQVA

SEQ ID NO: 74488 - protein, 116 aa, Zea mays
  Coding DNA Sequence Number=SeqID_32709
  Gene Ontology: Mol. function=unspecific monooxygenase activity
  Homolog annotation: Hit_ID=Q6I666; Match level="QueryCoverage=37%, HitCoverage=55%, E-value=3e-14, Identity=84%"; Hit description =Cytochrome P450 like_TBP
MAGRAPGRCTENNNLMSPTTCCARRGSPAAPASAHLAVRRGGPDAMSIDPRRGVGSEVLVFHLRPEAPTYPTPLKSFHKVGLESSSTGSSFPADSANPFPWLWIRWIVDRDSGESR

SEQ ID NO: 74489 - protein, 233 aa, Zea mays
  Coding DNA Sequence Number=SeqID_32710
MKNVAKCDTWCELQNPANHRVFERKLRPKPSGGGHVCLGVTPKDTPNTPPRGEGRGVWPPAPHGEVGRSRGCRRTAPGAARGGRHQVVVLGAASRRAAGHSALRTHRATELALGPRPQGSGWGLATRTGRMRNGSCWSADRLGAWTVVARAGGQSPGALGAPGSRRRRGRYPRASGAPLGALRCNGLRAPHPTRLETRTKESDMRASRRVQKPEMRKEADEREALTGRTAGRP

SEQ ID NO: 74490 - protein, 484 aa, Zea mays
  Coding DNA Sequence Number=SeqID_32711
  Homolog annotation: Hit_ID=Q8TGM6; Match level="QueryCoverage=16%, HitCoverage=62%, E-value=3e-12, Identity=57%"; Hit description =Protein TAR1
  Subcellular localization annotation: CTP_CleavageSite=15; ConfidenceScore=5.12e-01
RAPTRTLHRRSGSASGAAREGLPLVSFLAHLRPLQRSAPRGAPEARGYRPRRRRLPGAPRAPGLWPPARATTVHAPSRSADQQEPFRIRPVRVASPHPLPSRQFQALFDSLFKVLFIFPSRYLFAIGLSPVFSLGRSLPPDLGCIPKQPDSLTAPRGATGSGPDGALTLPGVPFQRTWARSVAEDASPDYNSGGEAARFSSWAAPGSLAVTRGILGRMAGRAPGRCTENNNLMSPTTCCARRGSPAAPASAHLAVRRGGPDATSLAPRGGVGSVFWRDAQADVPSARRLRAQLAFKNSMVRGILQFTPGIAFCYVLHRCESRDIRCRESCRLRCNRCPGSGRRADRSAGQEVVLVFLGARGAVGSFSRHPPSPREVRGGSVPGRSPAARVTRSRSVLFKGHGNDPSADGPAPGLRAEASCRAGRRSFGRTDSWARDANASPAFSVSHIRDQKRQRGVLGAAGHRLTAARGKRRGRSRADEPHPG

SEQ ID NO: 74491 - protein, 431 aa, Zea mays
  Coding DNA Sequence Number=SeqID_32712
  Homolog annotation: Hit_ID=Q6CQE5; Match level="QueryCoverage=15%, HitCoverage=59%, E-value=2e-11, Identity=55%"; Hit description =Protein TAR1
  Subcellular localization annotation: CTP_CleavageSite=39; ConfidenceScore=5.31e-01
MAHLELPIPWHGSPKQPRRPTYLKRAPTRTLHRRSGSASGAAREGLPLVSFLAHLRPLQRSAPRGAPEARGYRPRRRRLPGAPRAPGLWPPARATTVHAPSRSADQQEPFRIRPVRVASPHPLPSRQFQALFDSLFKVLFIFPSRYLFAIGLSPVFSLGRSLPPDLGCIPKQPDSLTAPRGATGSGPDGALTLPGVPFQRTWARSVAEDASPDYNSGGEAARFSSWAAPGSLAVTRGILGRMAGRAPGRCTENNNLMSPTTCCARRGSPAAPASAHLAVRRGGPDATSLAPRGGVGSVFWRDAQADVPSARRLRAQLAFKNSMVRGILQFTPGIAFCYVLHRCESRDIRCRESCRLRCNRCPGSGRRADRSAGQEVVLVFLGARGAVGSFSRHPPSPREVRGGSVPGRSPAARVTRSRSVLFKGHGNDPSA

SEQ ID NO: 74492 - protein, 286 aa, Zea mays
  Coding DNA Sequence Number=SeqID_32713
  Homolog annotation: Hit_ID=Q6CQE5; Match level="QueryCoverage=22%, HitCoverage=59%, E-value=1e-11, Identity=55%"; Hit description =Protein TAR1
  Subcellular localization annotation: CTP_CleavageSite=39; ConfidenceScore=5.31e-01
MAHLELPIPWHGSPKQPRRPTYLKRAPTRTLHRRSGSASGAAREGLPLVSFLAHLRPLQRSAPRGAPEARGYRPRRRRLPGAPRAPGLWPPARATTVHAPSRSADQQEPFRIRPVRVASPHPLPSRQFQALFDSLFKVLFIFPSRYLFAIGLSPVFSLGRSLPPDLGCIPKQPDSLTAPRGATGSGPDGALTLPGVPFQRTWARSVAEDASPDYNSGGEAARFSSWAAPGPNGRPRAGTLHREQQLDVAHHVLRPARQTCPPPEGFGRYLRSKNSMVRGDSGNFTP

SEQ ID NO: 74493 - protein, 88 aa, Zea mays
  Coding DNA Sequence Number=SeqID_32714
MTGKKTTASSDGGTPKKAKVVVEDEEECKNGHSGCAKCCILMDGSYCSALSIVAYPGHRIAWDASLNVPYLGWMVYEKRHVVELVKIL

SEQ ID NO: 74494 - protein, 107 aa, Zea mays
  Coding DNA Sequence Number=SeqID_32715
MTGKKTMASSDGGTPKKAKVVVEDEEEAGLQDEEEATVTLSVEKDALKNGHSGCAKCCIRTVGSYCSALSIVVYPGHRIAWDASLNVPYLGWMVYEKRHVIELVKIL

SEQ ID NO: 74495 - protein, 107 aa, Zea mays
  Coding DNA Sequence Number=SeqID_32716
MTGKKTTTSSNGGTPKKAKVVVEDEEEAGLEDEEEATVTLSMEKDALKDGHSGCAKCCIRTDGSYCSALSIMAYPGHRIAWDASLNVPYLGWMVYEKRHVVELVKIL

SEQ ID NO: 74496 - protein, 107 aa, Zea mays
  Coding DNA Sequence Number=SeqID_32717
MTRKKTTASSDVGTPKKAKVVVEDEEEAGLEDEEEATVTLSVEKDALKNGHSGCAKCCIRTDGSYCSALSIVAYPGHRIAWDASLNVPYLGWMVYEKKHVVELVKNL

SEQ ID NO: 74497 - protein, 107 aa, Zea mays
  Coding DNA Sequence Number=SeqID_32718
MTGKKTTASSDGGTPKKAKVVVEDEEEAGLEDEEEATVTLSVEKDALKNGHSGCAKCCIRTNGSYCSALSIVAYPGHRIAWDASLNVPYLGWMVYEKRHVVELVKIL

SEQ ID NO: 74498 - protein, 107 aa, Zea mays
  Coding DNA Sequence Number=SeqID_32719
MIGKKTTTSSDGGTPKKAKVVVEDEEEAGLEDEEEATVTLSVEKDTLKNEHSGCAKCCIRTDGSYCSALSIVAYPGHRIAWDASLNVPYLGWMVYEKRHVVELVKIL

SEQ ID NO: 74499 - protein, 107 aa, Zea mays
  Coding DNA Sequence Number=SeqID_32720
MTGKKTTASSDGDTPKKAKVVVEDEEEAGLEDEEEATVTLSVEKDALKNGHSGCAKCCIRTDGSYCSALSIVAYPGHRIAWDASLNVPYLGWMVYEKRHVVELVKIL

SEQ ID NO: 74500 - protein, 156 aa, Zea mays
  Coding DNA Sequence Number=SeqID_32721
MERSLGTAHRRSKSTAPWRGRSGFVRYPDGGRGRGALLYSQGSADFGDPIPPAGSDSICGVPVTTRYWRILLKRVLSKEMVMTAWPHLPVSRDNTGTRRRRMEPPNCGPHATVSRAERAWWAGVYVDVIVDITPQPITINQRSKSDKYHKNKHSST

SEQ ID NO: 74501 - protein, 109 aa, Zea mays
  Coding DNA Sequence Number=SeqID_32722
MRITVESVQVDLFLLELWCLHPGLGQEVKIDLQVNLLIGSDLGTIGRGVRCHYLSWDNNCGYMGSWLLHYNEISKVVGIDVIVDITSQPITLNQRSKSDKYHKNKHSSA

SEQ ID NO: 74502 - protein, 204 aa, Zea mays
  Coding DNA Sequence Number=SeqID_32723
MGKKPKAEKRLLAGKYVGKESDSDKRGGKRARRVHLDTNISSKPNTEKKPNGEGNKEKAALEILTGMFVTYCEVKRTKCVAEEVEGKARTRVSTGPLHTPGSFSFRDPAGVRTYPEALDLYVYRGPVSFCGGPDLLGCGVFPCHVAPFGLPIRWGQARSSAWLGDVAWALCLHVVGEGGGAVSLHTVTGVPVTWRVGLGPELDR

SEQ ID NO: 74503 - protein, 242 aa, Zea mays
  Coding DNA Sequence Number=SeqID_32724
  Subcellular localization annotation: CTP_CleavageSite=29; ConfidenceScore=5.44e-01
MGARPHMSYRPTLRRSVQLPCGYVPLHFRGNQRSGRRTTAHRACNYPTVRRPFVFAAPSGQRGESPCKKRTTVPRLCAPSAPPQLAVQLRAQAHTPCNWHAGYRVQRNCTAACANATSSRDCHGILKRLASSPEAGPGATVGTLNQGYPLLQHEDTAPMRRLLATRRTAPDPTGWAGQRAPRGKERHHTPIHQIGMALFSWGNSLCAIENYTHPLCGTGPTCNTHTKSLYVTQWHTSDEYKF

SEQ ID NO: 74504 - protein, 85 aa, Zea mays
  Coding DNA Sequence Number=SeqID_32725
  Subcellular localization annotation: CTP_CleavageSite=40; ConfidenceScore=5.68e-01
MRAARPRLGPGRPRPGPGCTAPVVPPAPPVRRARPPAPVCLARVVTAPARPRARPSVPMARGLELGQHAAPTCARELNLEIGYVR

SEQ ID NO: 74505 - protein, 258 aa, Zea mays
  Coding DNA Sequence Number=SeqID_32726
MAPARPRARPSVPMARGLELGQRAAPDEIESVRSCSPVLPLEAPPAPPLGAPASGVAAGGDPDDGGGDDSSSHDTDFSADQEPEGWVARPITRDAARGCHFHDALDTLLRRALDRQHYSISERDSAEVTMQDVARRALLHYCSVLGGVADGLNLKYYPRRPSGSTGGVIVSPVGEDNPRLSSTVNLATVLNTELDHALDELSRARAEIALLRAERAERRHLDDNSPAPVGTQHPYRSPRRGHQSYGNPDCKTKINLEP

SEQ ID NO: 74506 - protein, 249 aa, Zea mays
  Coding DNA Sequence Number=SeqID_32727
MSGHWMGIVSSSDEDDKNDDGSSDEDSDGSGDNDGNDDGGASQCDEMPPSKRRRLQHGTACVNHFYGRLDFGTACENHLVEALPSVAELPQPTEVRFRVTSRIRHDPPSSPTLTRRSGVSAVTLDSPAPPSSTHRHDIREKSSFIFGLKIHCKKANSIADKAIGRMQEIADKIFSVARETIHPGRGLTSFEATKLRVALEDIACKMEQDSLVLQEHLDKVNNETNHVHTDYEPSDLSSPIPTEDDLDED

SEQ ID NO: 74507 - protein, 267 aa, Zea mays
  Coding DNA Sequence Number=SeqID_32728
MEQDSLVLQEHLDKVNNVTNHVHADYEPSDLSSPIPAEDDLGEDWDFAEHFKKFWGVEYELDQMPSFSDNEAMPGCIMFKTAPLENVDNLKIMFGPIVCTNETTLVPGVEDANSSSDGHEEDIFGAGENSTPNPSSTVKGKRKVLHDSPKPKKKKDMRDEYMKQIVDAFESRGSYKSITSSENDPVRKEVAAQLEQVIKDGAEEGSDLHFFATHLLMEKHYRDMFQPDTDHSDDDDRDHKELLVATLTLDIWGSSSSRVPRRNMVET

SEQ ID NO: 74508 - protein, 273 aa, Zea mays
  Coding DNA Sequence Number=SeqID_32729
EEFSLECPGAPDTVRWHTGQSGSTAASEHSGSAPTTDQRLDPEGFDSRLRARRARDDSRYVRYMAEARATLPRDALANPTPAKPLTASTYQPENLEPDYAPGLRPDNSAACPAPTAVPLDRVRLTAAKSSLGRHRKLRLTRPRARTQPRPRKTDSASLDPGLGLSLDPKRRTPPRPTQGSDSASTPEDGLRLARPRARTQPRPRKMDSASPDPRARTQPRPRKTVSASPDPGFGLNLDIGRRTPPRSTLGPRLDLDLGGASASPNLGLGPATS

SEQ ID NO: 74509 - protein, 418 aa, Zea mays
  Coding DNA Sequence Number=SeqID_32730
MEVRCQTNFCQNEDGFPKLLRACTVRLGIRSQPYPHHVEWSVTVAGHRFKDTCQVIARKALRALCQIYEEEVADTLLRFFPPFQRNRPVWMARMRALEGQQFLEDDPTVLYLTAYLLTLDAQYDFLARHHRQMIARAEDAEKRNRQLHVDLTTAQAHVAALESREVIVVEALKQAKDEHVQKLMEAYLVTHDQRRALQIQEPASSNPIQPIRAEDPQILEGHPVSIRGEKKAWELPEGAIVLEGIPVFPQAMNKQEHPESSQDSLPELFEPLTMKKIPAPSREVKEEAASTPPAPSPSEELQEPVQLEEEFDRVLPSQSPPEEVINISSLLTHPACSSSNNRRRPRNTLVMRYFKEFKSPRFKSTTLIHFKWGSVPVRFLLWRKRRPIASLWRTRSPKLISFWMRSGHPSFVDEAPED

SEQ ID NO: 74510 - protein, 78 aa, Zea mays
  Coding DNA Sequence Number=SeqID_32731
MRSGHPSFVDEAPEEQSRKESMWEFARESETRVRSSETTDQAKDGGKKSFEVPSAREKVKKAEEPKAKGEEEGLQSQG

SEQ ID NO: 74511 - protein, 71 aa, Zea mays
  Coding DNA Sequence Number=SeqID_32732
MEKKKKACSKLVEDQIIEAYKFLDEEVVTQVLLMKHQKTSQGRNPCGSSQEEDAPQGPDFVEVPSPRRVAK

SEQ ID NO: 74512 - protein, 71 aa, Zea mays
  Coding DNA Sequence Number=SeqID_32733
MEKKKKAYSKLVEDQIIEAYKFLDEEVVTQVLLMKHQKTSQGRNPCGSSQEEDAPQGPDFVEVPSPRRVAK

SEQ ID NO: 74513 - protein, 209 aa, Zea mays
  Coding DNA Sequence Number=SeqID_32734
  Subcellular localization annotation: CTP_CleavageSite=38; ConfidenceScore=5.14e-01
MARARAYKAHLGVDYTLPRMLQPHRSSVHHRLPVRDVSAATRPTATVNRASLALPNHVQPSEASVHAPVKLPEQGIEAYFAGEASPRVAGSSQPRRNCNLANGEYVLVPEQGAAQEVAPDPAPEPPPEDLHATALEGKPRSSFGEYWSGIRQSMSARARIPSHRHGAATKGDGEVEIEDEHMNGNNDAVADSAKANDNDMDSARRNQIR

SEQ ID NO: 74514 - protein, 97 aa, Zea mays
  Coding DNA Sequence Number=SeqID_32735
MEQSGLGYLSSWFESCLNASCNVLRYRNVSNCLSMCKLASEAKIRFLNETRVRSSETTDQAKDGGKKSFEVPSAREKVKEAEEPKAKGEEGGLQSQG

SEQ ID NO: 74515 - protein, 102 aa, Zea mays
  Coding DNA Sequence Number=SeqID_32736
MPAIPRDVAKHSLDIRAGARSVRQPLRLGHQGRVGLALAEPDPPSGAKKGETLCVKIGHTPPCQKFSIKKGASCALPATFSRLCQKQGLEERTRVHVNGKAD

SEQ ID NO: 74516 - protein, 102 aa, Zea mays
  Coding DNA Sequence Number=SeqID_32737
MPSIPRDVAKHSLDIRAGARSVRQPLRLGHQGRVGLALAEPNPPSGAKKGEPLCVKIGHTSPCQKFSIKKGASCVLPATFSRLCQKQGLEERTRVHVNGKAD

SEQ ID NO: 74517 - protein, 218 aa, Zea mays
  Coding DNA Sequence Number=SeqID_32738
  Homolog annotation: Hit_ID=Q9LU39; Match level="QueryCoverage=57%, HitCoverage=34%, E-value=2e-28, Identity=48%"; Hit description =Arabidopsis thaliana genomic DNA, chromosome 3, P1 clone: MXL8
MYTYRLSCRCRHGQTRGHCAEPPRPRGRAFRQSGARTPQCTMLGALTKPSDESVLKKLSTRWQKKFGEEIDQDLLYLISVDRILHMEDFNEAGHSTYNYLVIMSGLLMDGMWVVPSDYTSAEPDPLRNFAENIVEEFNNKNAEDVRRIYNIYVESDLQHLFVFGVITILLIVLHLAQPLDIGLKHILFATLRVDISTLLVSVIRPYMELLAGQMSAHR

SEQ ID NO: 74518 - protein, 293 aa, Zea mays
  Coding DNA Sequence Number=SeqID_32739
  Homolog annotation: Hit_ID=Q9LU39; Match level="QueryCoverage=67%, HitCoverage=57%, E-value=7e-56, Identity=53%"; Hit description =Arabidopsis thaliana genomic DNA, chromosome 3, P1 clone: MXL8
MYTYRLSCRCRHGQTRGHCAEPPRPRGRAFRQSGARTPQCTMLGALTKPSDESVLKKLSTRWQKKFGEEIDQDLLYLISVDRILHMEDFNEAGHSTYNYLVIMSGLLMDGMWVVPSDYTSAEPDPLRNFAENIVEEFNNKNAEDVRRIYNIYVESDLQVADVKMIWVDRLGFDLHAHSAEGVLAVRVPFPREVSDEKGVKSSFNMMSHHAWEVEKSYASPEFEKVQFLKKDNEWVDNQNETVREGDDLAWAHVDDAIGASSSLQGRNFPRRARYESVYSRRCQAAATQERVME

SEQ ID NO: 74519 - protein, 89 aa, Zea mays
  Coding DNA Sequence Number=SeqID_32740
  Gene Ontology: Mol. function=structural constituent of ribosome; Cellular component=ribonucleoprotein complex; Biological process =translation
  Homolog annotation: Hit_ID=Q7EYE3; Match level="QueryCoverage=73%, HitCoverage=28%, E-value=3e-30, Identity=90%"; Hit description =Putative ribosomal protein I
  Pfam annotation: Domain name=Ribosomal_L13; Domain location=1-81; Score=-4.8; E_value=8.4e-05; Accession=PF00572.8; Description =Ribosomal protein L13
MCIVLNAKDISVTGRKMTDKIYYWHTGYVGHLKERRLKDQMEKDPTEVIRKAVLRMLPRNKLRDQQLDNALNKQTHIGLFLGSCDLEVN

SEQ ID NO: 74520 - protein, 138 aa, Zea mays
  Coding DNA Sequence Number=SeqID_32741
MAKGLNSLIILVLWEKVEAAPCWVDSQNETIREGDDLAWAHVDDAIGASSSLQGRNFPRRARYESVYSRRCQAAATQEERVMEEEEQGNEGNEQDDEEYMSNYDEEVDDFGESPHNSPTQAGAGGEENAMDDLDLGDI

SEQ ID NO: 74521 - protein, 142 aa, Zea mays
  Coding DNA Sequence Number=SeqID_32742
MTTVPDTVWLAVPLMLRRAICRVSIAHELRIPSRDARRAPMKPPRNNASPDILRLYDSTMAAIIVSLSLLSAKGFWGDWTLKQGSRDVCSYRQGSSGSCNGPNSRPVRAVSPPCTEFVHGARESAEEDDQWVPPRGEIVGGG

SEQ ID NO: 74522 - protein, 75 aa, Zea mays
  Coding DNA Sequence Number=SeqID_32743
MEHASRLRKMTSGSRLEVRLWGEGDDWQPGPTVQRCEHMSAGGSTRQYASVEDGASCVFTRFSFYFYMVELPPVD

SEQ ID NO: 74523 - protein, 171 aa, Zea mays
  Coding DNA Sequence Number=SeqID_32744
  Homolog annotation: Hit_ID=Q69JG4; Match level="QueryCoverage=46%, HitCoverage=15%, E-value=1e-18, Identity=57%"; Hit description =Putative nodulin-like protein
  Pfam annotation: Domain name=Nodulin-like; Domain location=34-147; Score=-110.7; E_value=0.00018; Accession=PF06813.4; Description =Nodulin-like
MAGLTGGSREDTDYSTHPPLIVTPRSRASATDPCRDSPPRRITCIRNFRWSRGPISGLLKGYVGLSTAIFIDTCFALFADDPASFLVMLVVVPAAVCALAMVFLREGTAAADEEDDGRCFARTAPSRRDRQRTVEGSDARLKWAAGPRRGRSGGWRAPRREPPPRSLVALA

SEQ ID NO: 74524 - protein, 246 aa, Zea mays
  Coding DNA Sequence Number=SeqID_32745
  Homolog annotation: Hit_ID=Q69JG4; Match level="QueryCoverage=32%, HitCoverage=15%, E-value=4e-17, Identity=73%"; Hit description =Putative nodulin-like protein
MDVDVPGLDEGQWLERLAKEAQGVVESGTCSRRPRHSCGSLRDSAHVDQRGGSTPSRRFIWWSQKSEEGRRDKLSIATTPMLEAKAAAAVRRAKPYRAGLKPGPPGSGVGALSGAFANLQISRGAAPPPTLAARPSPPPSAACPALKERCERSSARRPPRPQRRCPRGGKHHGERADGGRHDGEHDEERGRVVGEERGAGVDEDGGAEADVALEQAGDGAPAPAEVADAGDSPRRGIAAGVGCACA

SEQ ID NO: 74525 - protein, 106 aa, Zea mays
  Coding DNA Sequence Number=SeqID_32746
MEIIVWTAHQAGSLPLVQGLLQQLGCLVVVQGAPLAKAQGRSASQTPPLAEARGKSPIAPAPGIGTPAPRAGGGAVSPGDSTVLSTCDAVDAPQGERARKGSPTYV

SEQ ID NO: 74526 - protein, 189 aa, Zea mays
  Coding DNA Sequence Number=SeqID_32747
MHMVPVEVVSELLPGDGFNVSMGGELSLHHAQPVFGVHGVEVAAAVVAWLSGPIVRGAISMMTTGRQVDVVQLSVEHGDQVDHAAQSRISLTNGILHGFLDSVPLSDRNNALSRPLHHGDHRLDGAPKQGLLQQLGCLVVVQGAPLAKAQGRSASQTPPLAEARGKSPIAPAPGIGTPAPRAGGGAVSP

SEQ ID NO: 74527 - protein, 207 aa, Zea mays
  Coding DNA Sequence Number=SeqID_32748
  Gene Ontology: Mol. function=transcription factor activity; Cellular component=transcription factor complex; Biological process =regulation of progression through cell cycle
  Homolog annotation: Hit_ID=Q6QP49; Match level="QueryCoverage=52%, HitCoverage=31%, E-value=7e-44, Identity=82%"; Hit description =Putative casein kinase I
  Pfam annotation: Domain name=E2F_TDP; Domain location=132-201; Score =31.8; E_value=1.3e-06; Accession=PF02319.11; Description =Transcription factor E2Fdimerisation partner (TDP)
  Subcellular localization annotation: CTP_CleavageSite=81; ConfidenceScore=5.51e-01
MDVDSRMATESDSDSDARGGSGFGSETPTASSSPSVVSLAPTASSSPSPSTHPTPRRTTARSRPSSRRWRAPRPGDRPLARGEALPCPSLNHVLPPPPSTLPPHIPRTPRDEFVHARVWIRGWSPRCSRMMVSVMSLLKTELTSFMVLYNRDNVESIGLDEAAKCLGVERRRIYDIVNVLEGVGIQQEVTSVNCEYILLIFVSCNCE

SEQ ID NO: 74528 - protein, 419 aa, Zea mays
  Coding DNA Sequence Number=SeqID_32749
  Gene Ontology: Mol. function=transcription factor activity; Cellular component=transcription factor complex; Biological process =regulation of progression through cell cycle
  Homolog annotation: Hit_ID=Q6QP49; Match level="QueryCoverage=80%, HitCoverage=76%, E-value=1e-114, Identity=67%"; Hit description =Putative casein kinase I
  Pfam annotation: Domain name=E2F_TDP; Domain location=132-203; Score =19.3; E_value=4e-05; Accession=PF02319.11; Description=Transcription factor E2Fdimerisation partner (TDP)
  Subcellular localization annotation: CTP_CleavageSite=81; ConfidenceScore=5.53e-01
MDVDSRMATESDSDSDARGGSGSGSETPTASSSPSVVSLAPTASSSPSPSTHPTPRRTTARSRPSSRRRRAPRPGDRPLARGEALPCPSLNHVLPPPPSTLPPHIPRTPRDESVHARVWIRGWSPRCSRMMVSVMSLLKTELTSFMVLYNRDNVESIGLDEAAKCLGVERRRIYDIVNVLEGVGCSSPSPPSSSLPKARALRGRSSPASPWPTCPSPSTVCLGSSASHPSNPSIRRCSPLTAAIPQPSVACGAPLRICLYDNCHPRIPNRRCPPLTRFLTSLTGDFSKGYNKWWSRNPNGVPQESLGYKQAGIPHLKWFGVEGQYNVMVIDLLGPSLKGLFNYCSRKFSLKTVLMLADQMCLSNQEQIVELLEREKLEKKPQDPAAEPICLPIEFLKAITCNFSTERELGRCFGVDMVG

SEQ ID NO: 74529 - protein, 85 aa, Zea mays
  Coding DNA Sequence Number=SeqID_32750
  Subcellular localization annotation: CTP_CleavageSite=40; ConfidenceScore=5.12e-01
MRMVVSRYSLSGSFLQSDNSGHHSRTGGLASVPNGCVLIVVEASWMFNIAVQEQSRRDDLKSLCYVLMYFLRGRVTDDQGVSMTF

SEQ ID NO: 74530 - protein, 450 aa, Zea mays
  Coding DNA Sequence Number=SeqID_32751
  Gene Ontology: Mol. function=protein serine/threonine kinase activity; Cellular component=nucleus; Biological process=protein amino acid phosphorylation
  Homolog annotation: Hit_ID=Q70YQ4; Match level="QueryCoverage=99%, HitCoverage=100%, E-value=1e-163, Identity=62%"; Hit description =Putative casein kinase I
  Pfam annotation: Domain name=Pkinase; Domain location=9-287; Score =78.4; E_value=2.3e-20; Accession=PF00069.15; Description=Protein kinase domain
  Pfam annotation: Domain name=Pkinase_Tyr; Domain location=9-282; Score=-151.4; E_value=0.0035; Accession=PF07714.7; Description =Protein tyrosine kinase
  Pfam module annotation: Pfam domain module=Pkinase::Pkinase_Tyr; Domain location=9-287::9-282
MEHVVGGKFKLGKKIGSGSFGELYLAVNVQNGEEVAVKLGGTGIPHLKWFGVEGQYNVMVIDLLGPSLEDLFNYCSRKFSLKTVLMLADQMISRVEYMHTRGFLHRDIKPDNFLMGLGRKANQLNDVTDYEMPINLLAKLPSDDLKTVEHTPQVFVIDYGLAKKYRDLQTHKHIPYRENKNLTGTARYASVNTHLGVEQSRRDDLESLGYVLMYFLRGSLPWQGLKAGTKKQKYDRISEKKMLTPVEVLCKSYPSEFTAYFHYCRSLRFEDKPDYSYLKRLFRDLFIREGYQLDYVFDWTIMKYPQFRDKSKIQWHSYISDRLVSAAEALFRRTGSGSGHNREHTKHRSLLESLMPSKVAVDSDKARPQSSSRNGSTSRRAVISSSKPSSSGDLSDPNRLGGRLAPSSSSRPPTAQREIRSSSLSKIGRSSHDDAIRNLELLSLGADKRK

SEQ ID NO: 74531 - protein, 179 aa, Zea mays
  Coding DNA Sequence Number=SeqID_32752
MSRRGKYAKPRKGPLTGTAFDPLPLPSGVPVPMCFCGDPYKVDKSEDHDTYRQRYWMRANFAFEPTIVQRRMNLMTPPPLCDFEQWINTEISEKDKKWLENLQKWDAEDKERMEKRREELAAEQQREDEEKMRRVAECREDKEKKLERARRAKEAMEENPDAFRKGKWPRCTHKNWCFI

SEQ ID NO: 74532 - protein, 269 aa, Zea mays
  Coding DNA Sequence Number=SeqID_32753
MTPRALQAATRAGVLGPDRALPGVLAPGRAWPWPRRPWPTPSAAPSLGRNDEDDGFDYDYAGGVTWDLRGMYLGAIDLGAKVGARSTTPTSAPRSMALRRGKYAKPRKGPLTGTAFDPLPLPSGVLVPMCFCGDPCKVDKSEDHDTYRQRYWMCANFAFEPTIVQRRMNLMTPPPLCDFEQWIDTEISEKDKKWLENLQKWDAEDKERMEKRREELAAEQQREDKEKMRRVAECREDKEKKLERARRAKEAMEENPDAFRKGKWPRCTQ

SEQ ID NO: 74533 - protein, 173 aa, Zea mays
  Coding DNA Sequence Number=SeqID_32754
MSRRGKYAKPRKGPLTGTAFDPLPLPSGVPVPMCFCGDPCKVDKSEDHDTYRQRYWMCANFAFEPTIVQRRMNLMTPPPLCDFEQWIDTEISEKDKKWLENLQKWDAEDKERMEKRREELAAEQQREDEEKMRRVAECREDKEKKLERARRAKEAMEENPDAFRKGKWPRCTQ

SEQ ID NO: 74534 - protein, 173 aa, Zea mays; identical to SEQ ID NO: 74533
  Coding DNA Sequence Number=SeqID_32755

SEQ ID NO: 74535 - protein, 148 aa, Zea mays
  Coding DNA Sequence Number=SeqID_32756
MVSLMEGDCRERGFVKESGAHARMEGAPRCEIAEGERRDAGLRRRAGGKAREGACRGEETAARRGGEGRSRQGGDLAGLRGQGTGLREGERGTREDGGGAGRGRAGGGIGMAAGAAGARRESRAEESGWRRGIARWQNQALWTPTLKT

SEQ ID NO: 74536 - protein, 137 aa, Zea mays
  Coding DNA Sequence Number=SeqID_32757
MAGGKELAGAKEGWLAGDAPPNTAKLMFFHVTGYLQIDVGSTNEHSTKSGEDYEGLAMRDVMATGPTMSSKLRAKPRTRLPCRATSIGVRQNGWYHHNMDLFLKMSKEVVASTIMSCASLCHLPATRCAGTSGCCVS

SEQ ID NO: 74537 - protein, 118 aa, Zea mays
  Coding DNA Sequence Number=SeqID_32758
PRNTAKLMFFHVTGYLQIDVGSTNEHSTKSGEDYEGLAMRDVMATGPTMSSKLRAKPRTRLPCRATSIGVRQNGWYHHNMDLFLKMSKEVVASTIMSCASLCHLPATRCAGTSGCCVS

SEQ ID NO: 74538 - protein, 116 aa, Zea mays
  Coding DNA Sequence Number=SeqID_32759
MAGTSRMVLGGKHAVARENEEAIEVTEEKTPPPSESQAGNCFYFDICGSEPDSPTNEGKPRLSFAILASSGVILRKDGFYLQEYIFIGSMVGSYCKVPCDALFILRNTNNPKGGNT

SEQ ID NO: 74539 - protein, 73 aa, Zea mays
  Coding DNA Sequence Number=SeqID_32760
MASTCKNIFIESVVGSYCKVPCDALFILRNTNNPKCESFNFVLLLMVLSAGGLGLLISLSNSSILLIEDDHLS

SEQ ID NO: 74540 - protein, 608 aa, Zea mays
  Coding DNA Sequence Number=SeqID_32761
  Gene Ontology: Mol. function=protein kinase activity; Cellular component=integral to membrane; Biological process=protein amino acid phosphorylation
  Homolog annotation: Hit_ID=Q53PD0; Match level="QueryCoverage=74%, HitCoverage=97%, E-value=6e-73, Identity=41%"; Hit description =Leucine Rich Repeat, putative
  Pfam annotation: Domain name=LRRNT_2; Domain location=122-162; Score =55.0; E_value=2.5e-13; Accession=PF08263.3; Description=Leucine rich repeat N-terminal domain
  Pfam annotation: Domain name=LRR_1; Domain location=168-190; Score =16.6; E_value=0.087; Accession=PF00560.23; Description=Leucine Rich Repeat
  Pfam annotation: Domain name=LRR_1; Domain location=192-213; Score =4.6; E_value=39; Accession=PF00560.23; Description=Leucine Rich Repeat
  Pfam annotation: Domain name=LRR_1; Domain location=215-237; Score =6.6; E_value=17; Accession=PF00560.23; Description=Leucine Rich Repeat
  Pfam annotation: Domain name=Pkinase; Domain location=263-559; Score =112.0; E_value=1.7e-30; Accession=PF00069.15; Description=Protein kinase domain
  Pfam annotation: Domain name=Pkinase_Tyr; Domain location=263-559; Score=63.1; E_value=2.4e-16; Accession=PF07714.7; Description =Protein tyrosine kinase
  Pfam module annotation: Pfam domain module=LRRNT_2::LRR_1::LRR_1::LRR_ 1::Pkinase::Pkinase_Tyr; Domain location=122-162::168-190::192 -213::215-237::263-559::263-559
  Subcellular localization annotation: CTP_CleavageSite=66; ConfidenceScore=5.20e-01
METAEGAFAGTLTPFGDGALGLRPSSSLTTVTPLAALPFAWSSWAGRAKGSIVDTGASNLKLQLPLASKTKQFKRTSGRAEVPIKSIMRNSKPPSKLAMLMVLLFLLCYGVEKVHCSTVHENNQDFHSLLDFKKGITHDPNGAMNDWINNTHFCRWKGVKCTLTPPYRVTELNLSHNNLAGQISSSLGNLTNLNLLALPNNRFGGPIPLLDRLQNLNYLSLDNNSLNVLEKKTSRRAHQSQLSFGEHFEKVTYNDLAQATRDFSESNLIGKGSYGTVYSGKLKESKTEVAVKVFDLEMQGAERSFLAECEALRSIQHRNLLPIITACSTVDTAGNVFKALIYELMPNGNLDKWIHHKGDEAVPKRRLSLTQRIAVVVSVADALDYLHHDCGRPTVHCDLKPSNILLDDDMNALLADFGIARLYADPQLTFAGSISSIGIKGTIGYIPPEYGGGGHVSTSGDVYSFGIVLLEILTGKRPTDPMFTGGLDIISFVENSFPDQIFQVIDPHLVEDRQKINQPNEVANNEMYQCLVALLQVALSCTRSLPSERSNMKQVASKLQAIKAAQLGGKSKEHLICFLIYPKVGKVLVLDSLNYNPSTYAKFLSILE

SEQ ID NO: 74541 - protein, 94 aa, Zea mays
  Coding DNA Sequence Number=SeqID_32762
MEQLKAPSSTTFGRYCVEPDAQEHADGVLEKNAKKVRKDAFSNARLQVVNEYMKRRGHSINNFRQYSDVYLTVDQYMEMQETYGQKMVRKYGDD

SEQ ID NO: 74542 - protein, 81 aa, Zea mays
  Coding DNA Sequence Number=SeqID_32763
RYCVEPDAQELADGVLEKNAKKVRKDAFSNARLQVLNEYMKRRGHSINNFRQYSDVYLTVDQYMEMQETYGQKMVRKYGDD

SEQ ID NO: 74543 - protein, 145 aa, Zea mays
  Coding DNA Sequence Number=SeqID_32764
  Gene Ontology: Mol. function=protein phosphatase type 2C activity; Cellular component=nucleus
  Homolog annotation: Hit_ID=Q8LD08; Match level="QueryCoverage=90%, HitCoverage=34%, E-value=1e-18, Identity=40%"; Hit description =Protein phosphatase-like
MASGHCCRSTSAHLRCRDDATILDIIVVERARYGEYRSLLAGLPNEVHPGLISEVVHLVVAPPDVLLLYIHLVRGHSHNNNNGRHSSAQEFMAGCDAQNNPRVVDIGDDHEVPMFDDGQRGAAALDHVQAAAAPELAVPFRAWAM

SEQ ID NO: 74544 - protein, 276 aa, Zea mays
  Coding DNA Sequence Number=SeqID_32765
  Gene Ontology: Mol. function=protein phosphatase type 2C activity
  Homolog annotation: Hit_ID=Q8LD08; Match level="QueryCoverage=47%, HitCoverage=34%, E-value=2e-19, Identity=42%"; Hit description =Protein phosphatase-like
MASGHCCRSTSAHLRCRDDATILDIIVVERARYGEYRSLLAGLPNEVHPGLISEVVHLVVAPPDVLLLYIHVVRGHSHNKNNGRHSSAQEFMAGCDAQNNPRVVDIGDDHEVPMFDDGQRGAAALDHVQATAAPELAVHSGAWAINKLCIGQQASNTALVELGEQEGQQQVSNHPLHAVQRRKGSGGSRRDLQMMCSSRHCEDGMGMAEHGMGQPTPYRLNSEAKLATARVQEKAAQHGKEDGAATKNRVDLLAKAVATAKATADPVPVSLLQTKP

SEQ ID NO: 74545 - protein, 97 aa, Zea mays
  Coding DNA Sequence Number=SeqID_32766
MGIGFVGGRMRKTRDSREWKCEWALQGGGMRKTDSWEWEWSLHEAKLATARVQEKAAQHGKEDGAATKNRVDLLAKAVATAKATADPVPVSLLQTKP

SEQ ID NO: 74546 - protein, 151 aa, Zea mays
  Coding DNA Sequence Number=SeqID_32767
  Homolog annotation: Hit_ID=Q6YUT0; Match level="QueryCoverage=34%, HitCoverage=12%, E-value=3e-09, Identity=64%"; Hit description =Putative pentatricopeptide (PPR) repeat-containing protein
MPLLPPRSRRRPPLLPSPARTPTGAPVVAVHEERKPIWTPANLAAAIRAAADVNIDATAALALSAPPDLPLPTHSLALLLRRLFTTRSIAAARGLLDKLHPSDEDGCPRPNPAPRGALLALTDAVCRRGEPREISRRLQVSLCTFVPLEDV

SEQ ID NO: 74547 - protein, 148 aa, Zea mays
  Coding DNA Sequence Number=SeqID_32768
  Homolog annotation: Hit_ID=Q6YUT0; Match level="QueryCoverage=39%, HitCoverage=16%, E-value=9e-14, Identity=67%"; Hit description =Putative pentatricopeptide (PPR) repeat-containing protein
  Subcellular localization annotation: CTP_CleavageSite=62; ConfidenceScore=5.26e-01
VRSRCARLLSTLPRESRCPASGLRFPRTQWAPWTLRSPRRLSGSPSEPAPARVQAPPPPLPRGRPASSSRPAANSPPRYIEALGETWVGALLALADAVCHRGEPREISRVLPVLRDHGVCADAHLYNALMKASVAAYDPGPSSGCFGR

SEQ ID NO: 74548 - protein, 185 aa, Zea mays
  Coding DNA Sequence Number=SeqID_32769
  Homolog annotation: Hit_ID=Q1SW45; Match level="QueryCoverage=25%, HitCoverage=25%, E-value=1e-09, Identity=64%"; Hit description=Sec20
MAGAVVDGVRWMAGEVVGGLGTRIAGSDDRRYTAGTTGGGWGGRLRERSFTMLQYFFRVSISSWKLLGRLLQQRQGKAPEGVSVVLEQDLPLSAEPHPAHDNGVAADAVTPVTRSGSTPLLLIYRNTLRTAQGRTPRRSPSSARCRDESTSVLQKSEGEYQGHRSLLMRTRGLLSTMQQQDVFDR

SEQ ID NO: 74549 - protein, 121 aa, Zea mays
  Coding DNA Sequence Number=SeqID_32770
MAGAVVDGVRWMAGEVVGGLGTRIAGSDDRRYTAGTTGGGWGGRLRERSFTMLQYFFRVSISSWKLLGRLLQQRQGKAPEGVSVVLEQDLPLSAEPHPAHDNGVAADAVTPVNECSPQTVH

SEQ ID NO: 74550 - protein, 160 aa, Zea mays
  Coding DNA Sequence Number=SeqID_32771
  Gene Ontology: Mol. function=DNA-dependent ATPase activity; Cellular component=nucleus; Biological process=DNA replication initiation
  Homolog annotation: Hit_ID=Q5I285; Match level="QueryCoverage=54%, HitCoverage=10%, E-value=2e-42, Identity=98%"; Hit description =Minichromosome maintenance protein
MSTWKAHTRGENPGRTADGSRAGMVTKMTEEARKMEFGHSARKRSLKTENLVKLKPVIRHLSLLLIGPRGDAGDGLAGMKQGDLIIWYVEQQNAKGAYSSTAEVKEEVKCIKAIIERLIQREGHLIVIDDGTAAAAEDGSGARRTSESRILAVNPNYVID

SEQ ID NO: 74551 - protein, 382 aa, Zea mays
  Coding DNA Sequence Number=SeqID_32772
MSRLLSCLDFHLSCELYSCQVRMPCTKNVSAPGGGDDEDPPRPFRQVKGNTVYLEQQEGRKKRRLDRAARATAAAAAAEQAEQGAQLQIPSDQIAYRVRRLASRPRSSAPTTPTTATTPPPTSPAPVTPAPSTTSAIPTTSTTPASTAPPPASAPPIPPARFRERDETEVRPLAADPRLFDLQRATTARVRRFRYVPVESWLPAHRDPAAADPFSIRIQESFYRAQLSAQIVLRAHRLLDLPAFLLAAGADSEVHLSYLPGLLTLLTTSGKYVEEWGTLEASRLIFGSYRPAPEDPVPAPAPVIDTQAEDTTFHQFETQGVAVHDYDDDDDFGVPPPPPPPMPPRTHDHEDGSSSCAAPAALLPLTLLLRRSSRLLLSSRLT

SEQ ID NO: 74552 - protein, 199 aa, Zea mays
  Coding DNA Sequence Number=SeqID_32773
MNALSREGCRHFEVFDQVEEDFERDIFKVEDPVVKESAGAIFDRLWGEHSREVVQDFGPAHTTATTKIWRLRPRKMFLDCADSGSSVEWTEESSEEDLDYFAALDEATAEASAHAADAGDVPGPSTGRRRRRAVAKRRVSGTEGARLRVSGTGRHELLSLPTAVNTGEGELRSLFAGEELRIMLFNYREMGIIPKVEPM

SEQ ID NO: 74553 - protein, 493 aa, Zea mays
  Coding DNA Sequence Number=SeqID_32774
  Gene Ontology: Mol. function=cysteine-type peptidase activity; Biological process=proteolysis
  Homolog annotation: Hit_ID=Q109R5; Match level="QueryCoverage=40%, HitCoverage=19%, E-value=5e-27, Identity=36%"; Hit description=Ulp1 protease family, C-terminal catalytic domain containing protein
MDIVVEEGNADVGNTAEPSYEVVARSGCSAQLSTNDTDEHELAIESEDSKVSVGNAAKQSHDVVGVGIDCIFNHAKVSTEADLGPQPDVIHLTSLDVPNESSQISSDADMVEQNKQDALDTLIRISQHKKPKKLNVARVVSEDYKCTPEDVQLIEYIKTLPGKQVVVNIDSAWLNRNDMECLFHGDIELFGEALSAYIHCIRDEEHLLHREGGKVFLENTFISSLLKRDGDPKVFIPMNIENFHWYLAVLNAKKVRVSCGLWMINYMEYWTGSSLSDNVTQDDITMFRFKLPAILWDSRLNTKKRHQNLDHNVDEDGESSSDVQIIDTPLTSTNTQELMFVLCTYIMGIDNATYLKKHWIQSTKPYPISLSLQKLKDILDVNKPMDTNCFNMAVRMIACNDALFLLEDKYHYMDLQLCSITKFGRDPRLRAKPDINMLAKLLECWPDMEYDVSDYKQGFIWLSVGTMLRRRRSCRKKQLRLKLFVRDTEGCSS

SEQ ID NO: 74554 - protein, 125 aa, Zea mays
  Coding DNA Sequence Number=SeqID_32775
MEEERAARRGWRRAACGVGGGGGRHGGAGGEGGMAWVGKEVGARRDGGAAEESGTGRKGGGGVESEMERMIQPGRYNGSPDLPIVKGSPGRSPLQPGSTQRTDWTRLSVAPLASTSVRAKKEMHA

SEQ ID NO: 74555 - protein, 220 aa, Zea mays
  Coding DNA Sequence Number=SeqID_32776
  Subcellular localization annotation: CTP_CleavageSite=68; ConfidenceScore=5.40e-01
MAHGLIGSSRRLAASGSGGRYNGSPGLPIVKGSPGRPPLQPSSTQRATQAGRRALGKGYFTLDKGFAECNTRQRTLGELYIGSGLFAEYFLSGTRQRKVTVTAPSDGDGSFCRVSSLALCKEANFAECLLSWPSAKTGPVGPTTSPCAESSRRHSAKEDSLLSVWWTGTRQRVLQWAPLPVPLPSALTTALGKDGFAGSQVSFFAECHGQHSAKMALPVP

SEQ ID NO: 74556 - protein, 50 aa, Zea mays
  Coding DNA Sequence Number=SeqID_32777
MGEGKIAAASAMRPSLLQFGHPERGSLSLLPERATNCLCERELLLTEGDE

SEQ ID NO: 74557 - protein, 48 aa, Zea mays
  Coding DNA Sequence Number=SeqID_32778
MRSKPHAAAALPFVLHFPRRVSSLSCSLRSPIRDAVEKPWGRKIPAVL

SEQ ID NO: 74558 - protein, 143 aa, Zea mays
  Coding DNA Sequence Number=SeqID_32779
MGLRSEHESDETRRGKWRTNGRAAAACGLLRILSSTYDASIWWGCRENLVAGRCAAWRGSRAEALRRAPDHGETHHWELRGGGFPTGFSMEENGDMLERKGLGAMGCCTRPWEGDGREVLHGCVSSDQRSAMHAKSRGARDQW

SEQ ID NO: 74559 - protein, 116 aa, Zea mays
  Coding DNA Sequence Number=SeqID_32780
  Subcellular localization annotation: CTP_CleavageSite=41; ConfidenceScore=5.16e-01
MPVDAAVAGLGQGAGFCQHIGFHVFGFLRLGTTGPGGIACRSAADSSPPEDSALRRAIGSRLLCGRTTGMMPVPILGITRRCVAPTRFGDCRPGRLDIFANELHGGWRRRCLAGKG

SEQ ID NO: 74560 - protein, 96 aa, Zea mays
  Coding DNA Sequence Number=SeqID_32781
MDPPRKAVQHHRAPDCASSPCLMISAAPLEAGFYAVEPLHLLDLGIVGLGTLTFSPTSSTEVGGAAVLGAYFAVERPEEEDECQPLDLCYPARIRS

SEQ ID NO: 74561 - protein, 221 aa, Zea mays
  Coding DNA Sequence Number=SeqID_32782
MRLILRYLFSTCGGCETARVSSHTFIAQQVVGNNVHELAKGGSSREVGCASLPTSHVTHLPRDRDFPYTSTEEARQASTDEKRSHPDQSSSVRYYANVPDPPPSEQIQRLALILFLGSLHGEVSSQDGGAANLRGARWRKCQGAQADNPQIELRQVVRVGRYRCEESGKKIHRARGGIYGKSSGEKNARHLTRRARVPDSRREKRAHAVPFPARNREGRKT

SEQ ID NO: 74562 - protein, 85 aa, Zea mays
  Coding DNA Sequence Number=SeqID_32783
  Subcellular localization annotation: CTP_CleavageSite=69; ConfidenceScore=5.53e-01
MPCFSPTRDILSHPSSLRPFAFKVSALRCRSLPWPSSSKRLILRYLFLTCGGCETTRVSSHTFIAQQVVGNNVHELAKGGSSREV

SEQ ID NO: 74563 - protein, 1066 aa, Zea mays
  Coding DNA Sequence Number=SeqID_32784
  Gene Ontology: Mol. function=helicase activity; Biological process =viral genome replication
  Homolog annotation: Hit_ID=Q1EPC6; Match level="QueryCoverage=95%, HitCoverage=77%, E-value=0.0, Identity=57%"; Hit description=DNA helicase homolog, putative
  Pfam annotation: Domain name=DUF889; Domain location=956-1065; Score =20.6; E_value=6.7e-13; Accession=PF05970.5; Description=Eukaryotic protein of unknown function (DUF889)
MTEGVDVGMQQQITPNVTTNENHDEDVLFEDDDEEDGYLFAGQDVPDPYDKVYSNIPEETHSLDIVADCVYCKSNKFQYEPPGFCCRNGQIDLAPFETPPQLRRLWECSDADARHFRDNIQFFNGHFSFTSLYCCLDSMTTNMNCGIYTFCAHGMMYHNVRSFGREAGAEHKHLELYFYDDDPSLEHRYRKCRQDQLDKDKAVIKQLVEILKGNPYSEHLRSMGHVDNIEDYHIALNLDQTLNQNLYNAPITSEVAAVWIKGSERRGELGWHANIPKSSVSMDEVDAYLEQHRTRDANDDDTVLHGKRLFQQFTVDTYIKIESSRLDFIRKNQDRLRADLYKGLVDSLHEGENRADKIGKRTVLSTSFIGGPRDMRRRYMDAMALDRPDLVVRIFRAKLEELKKRLTKHHILGKSGLMSMSWSSKSERKYKLNCPDQYDLLISAEIPDKKKYPELYKMVIKHMMHGPCGLLNPKCPCTKGRASCKNHYPRAFSNATSQGKDSYPIYSCRDDGRKETVRGCELDNRWVVPYNPYLLRLFNYHINVEACGSIKAVKYLFKYIYKGHDRASVAVTDANKADGDVDEIKQYRDARWVTPLEALWRIFSFDRSADRSMLTAYFEANRLHEEARGILYRDFPEWYTLQQGKVWQRRKRNTGGQVGRIVSAHPAEGEHFYLRLLLNHVMGATSYADLRTVDDDTIDECLNEAAIYQMPSALRRLFATILVYCEPNDVAELWQRHLDSMSEDYHRSTQSKTHVQQMVLIDIRNILQSMGKDIKTFPLPAIIDKYDDSHGTDREIYKEESIEPIVEDVAMKENLNEEQRSAYDKILSVVDTNNGGVFFVDGPSGTGKTYLYKALLAALRSQDKNAVATATSGVAASILPRGGLPHSRFKIPLTIDDGDVCSFTKQSGTAKLLQKASLIIWDEASMTKRQAIEALDNSMCDIMGQPGLPFGWRTVVFGGDFRQVLPVVRKGSRAQIVAASLQSSYLWESMYHLKLVQNMRAQSDPWFAEYLLRVGGGTEVANNDGDVRLPDEMMYHSFDTAVDDPNNYYPSEFLNTLTPNGLPRTF

SEQ ID NO: 74564 - protein, 1012 aa, Zea mays
  Coding DNA Sequence Number=SeqID_32785
  Gene Ontology: Mol. function=helicase activity; Biological process =viral genome replication
  Homolog annotation: Hit_ID=Q1EPC6; Match level="QueryCoverage=95%, HitCoverage=77%, E-value=0.0, Identity=53%"; Hit description=DNA helicase homolog, putative
  Pfam annotation: Domain name=DUF889; Domain location=902-1011; Score =20.6; E_value=6.7e-13; Accession=PF05970.5; Description=Eukaryotic protein of unknown function (DUF889)
MTEGVDVGMQQQITPNVTTNENHDEDVLFEDDDEEDGYLFAGQDVPDPYDKVYSNIPEETHSLDIVADCVYCKSNKFQYEPPGFCCRNGQIDLAPFETPPQLRRLWECSDADARHFRDNIQFFNGHFSFTSLYCCLDSMTTNMNCGIYTFCAHGMMYHNVRSFGREAGAEHKHLELYFYDDDPSLEHRYRKCRQDQLDKDKAVIKQLVEILKGNPYSEHLRSMGHVDNIEDYHIALNLDQTLNQNLYNAPITSEVAAVWIKGSERRGELGWHANIPKSSVSMDEVDAYLEQHRTRDANDDDTVLHGKRLFQQFTVDTYIKIESSRLDFIRKNQDRLRADLYKGLVDSLHEGENRADKIGKRTVLSTSFIGGPRDMRRRYMDAMALDRPDLVVRIFRAKLEELKKRLTKHHILGKSGLMSMSWSSKSERKYKLNCPDQYDLLISAEIPDKKKYPELYKMVIKHMMHGPCGLLNPKCPCTKGRASCKNHYPRAFSNATSQGKDSYPIYSCRDDGRKETVRGCELDNRWVVPYNPYLLRLFNYHINVEACGSIKAVKYLFKYIYKGHDRASVAVTDANKADGDVDEIKQYRDARWVTPLEALWRIFSFDRSADRSMLTAYFEANRLHEEARGILYRDFPEWYTLQQGKVWQRRKRNTGGQVGRIVSAHPAEGEHFYLRLLLNHVMGATSYADLRTVDDDTIDECLNEAAIYQMPSALRRLFATILVYCEPNDVAELWQRHLDSMSEDYHRSTQSKTHVQQMVLIDIRNILQSMGKDIKTFPLPAIIDKYDDSHGTDREIYKEESIEPIVEDVAMKENLNEEQRSAYDKILSVVDTNNGGVFFVDGPSGTGKTYLYKALLAALRSQDKNAVATATSGVAASILPRGGLPIHASRYHLLLMMVMTVVFGGDFRQVLPVVRKGSRAQIVAASLQSSYLWESMYHLKLVQNMRAQSDPWFAEYLLRVGGGTEVANNDGDVRLPDEMMYHSFDTAVDDPNNYYPSEFLNTLTPNGLPRTF

SEQ ID NO: 74565 - protein, 302 aa, Zea mays
  Coding DNA Sequence Number=SeqID_32786
  Gene Ontology: Mol. function=GTP binding; Cellular component=nucleolus
  Homolog annotation: Hit_ID=UPI0000E7FFD8; Match level="QueryCoverage =66%, HitCoverage=29%, E-value=2e-19, Identity=32%"; Hit description =PREDICTED: similar to testis intracellular mediator protein
  Pfam annotation: Domain name=Coatomer_E; Domain location=3-283; Score= -115.5; E_value=0.019; Accession=PF04733.4; Description=Coatomer epsilon subunit
  Pfam annotation: Domain name=DUF947; Domain location=97-292; Score =80.6; E_value=4.9e-21; Accession=PF06102.2; Description=Domain of unknown function (DUF947)
  Pfam module annotation: Pfam domain module=Coatomer_E::DUF947; Domain location=3-283::97-292
MASPDLLFNLWNFFYLGAYQAAINIDIPGLDADAVAERDAIVFRSYIALGSYQLEKKTRRASKRRFGDAQGPVVVAPLWVLLFPVAIVPNGFAWVFNRPMEISTKVRPPKLREVIQVPKKVGRDPRFEPVYGSIDKEGCKLDEFLKLIDLVGMQRLQKMIKKSKDLDAIGEMKSRVTWIFSPSRQKGNVGHTASLETRKSIFIVKLLDIYVYPLKDKQLKSHPPKNVESEILCEHIKKERETAKAGKRPYYLKKPELRERKLMNKYNELKEAGKLDAFMEKRRRKNASKDHRFMPYRRSGDA

SEQ ID NO: 74566 - protein, 148 aa, Zea mays
  Coding DNA Sequence Number=SeqID_32787
  Gene Ontology: Mol. function=GTP binding
  Homolog annotation: Hit_ID=UPI0000E7FFD8; Match level="QueryCoverage =57%, HitCoverage=14%, E-value=9e-12, Identity=40%"; Hit description =PREDICTED: similar to testis intracellular mediator protein
  Pfam annotation: Domain name=DUF947; Domain location=8-138; Score =0.5; E_value=5.8e-06; Accession=PF06102.2; Description=Domain of unknown function (DUF947)
RLQKMIKKSKDLDAIGEMKSRVTWIFSPSRQKGNVGHTASLETRKSIFIVKLLDIYVYPLKDKQLKSHPPKNVESEILCEHIKKERETAKAGKRPYYLKKPELRERKLMNKYNELKEAGKLDAFMEKRRRKNASKDHRFMPYRRSGDA

SEQ ID NO: 74567 - protein, 70 aa, Zea mays
  Coding DNA Sequence Number=SeqID_32788
MQQGGNNRGQPHAQYGKVNHLEADTVQETPGVVLDFPDVFPEELPGMPPVRGVTTRDNSATMRVEWDALS

SEQ ID NO: 74568 - protein, 99 aa, Zea mays
  Coding DNA Sequence Number=SeqID_32789
  Subcellular localization annotation: CTP_CleavageSite=25; ConfidenceScore=5.20e-01
MCPDPIDGPTAKPTTPLFPLINQLRASHSTLMVALLSRAVTPQTGPYGEVNDEDEWSFGSARSAATCSVAPARKNPMYTYWERIVLRETECGILDPTGH

SEQ ID NO: 74569 - protein, 63 aa, Zea mays
  Coding DNA Sequence Number=SeqID_32790
  Gene Ontology: Mol. function=threonine endopeptidase activity; Cellular component=proteasome core complex (sensu Eukaryota); Biological process=ubiquitin-dependent protein catabolic process
  Homolog annotation: Hit_ID=Q93X33; Match level="QueryCoverage=95%, HitCoverage=42%, E-value=4e-17, Identity=59%"; Hit description =Putative beta 3 proteasome subunit
MGKSFFAIASDRQLGVRLQTIAADFEQVFRIHDRYHRLFFRHNMYQLRQERDMKPETFAILSL

SEQ ID NO: 74570 - protein, 422 aa, Zea mays
  Coding DNA Sequence Number=SeqID_32791
  Homolog annotation: Hit_ID=Q9AYP4; Match level="QueryCoverage=21%, HitCoverage=51%, E-value=3e-31, Identity=74%"; Hit description=40S ribosomal protein S10
  Pfam annotation: Domain name=S10_plectin; Domain location=12-105; Score=141.1; E_value=3e-39; Accession=PF03501.5; Description =PlectinS10 domain
MAARASDYLTIIPKKNRNEICKGRVVCQEGLQPGEASADRCAQPPGLQVIKLMQSFKSKEYVRETFSWQYYYWYLTNDGIEHLRNYLNLRSEIVPATLKKSAKPPGRPFGSGPPGDRPRYHWLFFRHNMYQLRQERDMKHETFAILSLGRFQGQPLYKLRPSKFRAAIEEAFLAERGFFYLQTDEEEAASNNEQECQSESQVVGKGKDHSLLNPSIVPAMPVSRILIVVAGLWILSVHGSCCNFLTLSYIVLSSYGFLHAVFVVLYTVLVLYEHLLLSRNCRPPPHLEDRRAVRRGGPSQATTTTSVVASKTSRHRCDLKPSSMPIKVIDKSFGFHAAVEEAQRALNAAHVEAESVDNGIGVVKLMGHNCCFTASHPSTSKGRDDSSSSFRDDVRTRVMWFIVLAEGADQDLIVRSMNFMDT

SEQ ID NO: 74571 - protein, 236 aa, Zea mays
  Coding DNA Sequence Number=SeqID_32792
MARRRFETQGATVPDDDDDDDDDDDDDDDFGVPPPPPMPPRTHDHEAGSSSGAAPPAIDPALAAILQTLTQQQAHLAAVQQQMSERMLSMFQMIQDRQDTLQQQLLQDRAKNRAFMTLMLQHTGVPVPPVQSAPPPPLQAAVVPAIQAGHPLPTVGPSSSPLWPVTLVFSSPVISSQPPVPPAPAVTTAVVAVSMTSSASTADLGSETDSDPQLAFALLPRPRPDAPPPPPPSSDV

SEQ ID NO: 74572 - protein, 463 aa, Zea mays
  Coding DNA Sequence Number=SeqID_32793
MARQASQSNQSAQTKERGASGGREFGRDTRRLEERKLYWRKGFVAPTVAVIPAINGEARGSHGDAVARLRHAVDNSDGTTTVSSFTRGRVFQGSKWGFWYPRDGSRRSPADFTTAAKFLYQLMRWTLLPRMGYREAATHIQLWLLGALVSHSDFDVVDFLICEIEDTVLDGLRAHRQLSFAHYLCHIFAQLIRPPQFKGTLEASRLLFGSYRPAPEDPVPAPALAEDTVFHQFETQGATVPDDDDDDDDDDDDDDDFGVPPPPPMPPRTHDHEAGSSSGAAPPAIDPALAAILQTLTQQQAHLAAVQQQMSERMLSMFQMIQDRQDTLQQQLLQDRAKNRAFMTLMLQHTGVPVPPVQSAPPPPLQAAVVPAIQAGHPLPTVGPSSSPLWPVTLVFSSPVISSQPPVPPAPAVTTAVVAVSMTSSASTADLGSETDSDPQLAFALLPRPRPDAPPPPPPSSDV

SEQ ID NO: 74573 - protein, 71 aa, Zea mays
  Coding DNA Sequence Number=SeqID_32794
AILALNAPAIRSVSEAIWPRLLLREAYPSWASGESKLCADGDYQPSLGVLGNQDLPLPVAHVVGQPARPLE

SEQ ID NO: 74574 - protein, 272 aa, Zea mays
  Coding DNA Sequence Number=SeqID_32795
  Homolog annotation: Hit_ID=Q6QP51; Match level="QueryCoverage=52%, HitCoverage=51%, E-value=8e-08, Identity=35%"; Hit description =Putative growth-regulating factor 1
MWLLERCWRPVHVMSWPSEERLNPVEAQLSGLSGSLLTSPCFRKGLRTVVVMEHAGVMTYPLRRGRSEPKVGQGGDSSEVEAESEPWGRARQRPSSEVEVESEPWGRARRRPSSEVEVESEPWGRARRRPSSEVEVESEPWGRARRRPSSEVEVESEPWGRARRSFLWRLRLDSAAVSLTLAGGTAVGAVQAALFSCQTILALNAPAIRSVGEAIWPRLLLREACPSWASDESKLCADGGYQPSLGVLGGAEHGVSSELLTGDPSGRPCPVR

SEQ ID NO: 74575 - protein, 187 aa, Zea mays
  Coding DNA Sequence Number=SeqID_32796
  Homolog annotation: Hit_ID=Q6QP51; Match level="QueryCoverage=28%, HitCoverage=24%, E-value=2e-17, Identity=81%"; Hit description =Putative growth-regulating factor 1
MMTASKKERGYSEKDPSQRKKRARALLLIRGSKVAPSVVRRPPQSIRAPSPLLIRGLKAGPSEGFDSRPRAHRVRDDPGYVRYMAEAQATLPRYPRTFPRPRASGTLADPYRTGPGRPLGSPASNSLETPCSVPSEEAWGLLSHQATAKLLTMSTNQRENSEPDRAPGLRPGRMRKQQGRLRHREKN

SEQ ID NO: 74576 - protein, 87 aa, Zea mays
  Coding DNA Sequence Number=SeqID_32797
  Subcellular localization annotation: CTP_CleavageSite=59; ConfidenceScore=5.29e-01
MEARAHVSCNRRNCYYVQGNRTATHANVASTRLQNQCRDSRASDTSGRRSERRFTSVMMAASKKGPGKGIFRKGSFPAKETGPKPSY

SEQ ID NO: 74577 - protein, 185 aa, Zea mays
  Coding DNA Sequence Number=SeqID_32798
  Homolog annotation: Hit_ID=Q655H8; Match level="QueryCoverage=39%, HitCoverage=4%, E-value=4e-34, Identity=91%"; Hit description=LvsC -like
  Pfam annotation: Domain name=Beach; Domain location=1-147; Score= -89.7; E_value=4.1e-11; Accession=PF02138.8; Description=BeigeBEACH domain
MARSVYHHFSPRRRSYLVAAMHMASETISEGGKFDHADRLFQSIESAYINSLSNTSDVKELIPEFFYMPEFLENSNSYHLGVKQDGEPIGDVALPPWAKGSPMSPYSIYLFMVFTLLYVWIPNKYPYYRDDNSSDEFDKDSIESDDRSLEELSWETQNFLWYLIYSGIWTYMFCTHLYYLLRLQG

SEQ ID NO: 74578 - protein, 195 aa, Zea mays
  Coding DNA Sequence Number=SeqID_32799
  Gene Ontology: Mol. function=protein binding; Cellular component =nucleus; Biological process=endosome to lysosome transport
  Homolog annotation: Hit_ID=Q655H8; Match level="QueryCoverage=46%, HitCoverage=6%, E-value=2e-41, Identity=86%"; Hit description=LvsC -like
  Pfam annotation: Domain name=Beach; Domain location=2-134; Score= -44.8; E_value=4e-14; Accession=PF02138.8; Description=BeigeBEACH domain
  Pfam annotation: Domain name=Glycolytic; Domain location=62-194; Score=-182.0; E_value=0.0016; Accession=PF00274.9; Description =Fructose-bisphosphate aldolase class-I
  Pfam module annotation: Pfam domain module=Beach::Glycolytic; Domain location=2-134::62-194
MGIVLHYMLRLEPFTSLYLNFQGGKFDHADHLFQSIESAYINSLSNTSDVKELIPEFFYMPEFLENSNSYHLGVKQDGEPIGDVALPPWAKIHRVYLAFTYMLHFLSHLSTTDGKKFVDCLKDQNIMPGIKVDKGLVPLPGSNNESWCQGLDGLASRRTVASIPCGPSSLAVKEAAWGLARYAAIAQIYTMSIIV

SEQ ID NO: 74579 - protein, 246 aa, Zea mays
  Coding DNA Sequence Number=SeqID_32800
  Homolog annotation: Hit_ID=Q8TGM6; Match level="QueryCoverage=31%, HitCoverage=62%, E-value=3e-12, Identity=56%"; Hit description =Protein TAR1
  Subcellular localization annotation: CTP_CleavageSite=46; ConfidenceScore=5.52e-01
MAAPPGLAPRVLRRPPRPPTHRGMSLAQMAGRAPTRTLHRRSGSASGAAREGLPLVSFLAHLRPLRRSAPRGAPEARGYRPRRRRLPGAPRAPGLWPPARATTVHAPSRSADQQEPFRIRPVRVASPHPLPSRQFQALFDSLFKVLFIFPSRYLFAIGLSPVFSLGRSLPPDLGCIPKQPDSLTAPRGATGSGPDGALTLPGVPFQRTWARFVAEDASPDYNSGGEAARFSSWAAPGSLAVTRGIL

SEQ ID NO: 74580 - protein, 284 aa, Zea mays
  Coding DNA Sequence Number=SeqID_32801
  Homolog annotation: Hit_ID=Q8TGM6; Match level="QueryCoverage=27%, HitCoverage=62%, E-value=3e-12, Identity=57%"; Hit description =Protein TAR1
  Subcellular localization annotation: CTP_CleavageSite=15; ConfidenceScore=5.19e-01
RAPTRTLHRRSGSASGAAREGLPLVSFLAHLRPLRRSAPRGAPEARGYRPRRRRLPGAPRAPGLWPPARATTVHAPSRSADQQEPFRIRPVRVASPHPLPSRQFQALFDSLFKVLFIFPSRYLFAIGLSPVFSLGRSLPPDLGCIPKQPDSLTAPRGATGSGPDGALTLPGVPFQRTWARSVAEDASPDYNSGGEAARFSSWAAPAGSPDWTWGSRSEGKARSLDGSLGPNGRPRAGTLHREQQLDVAHHVLRPARQTCPPPEGFGRNLRSKTRWFAGFCNSHQ

SEQ ID NO: 74581 - protein, 80 aa, Zea mays
  Coding DNA Sequence Number=SeqID_32802
  Subcellular localization annotation: CTP_CleavageSite=57; ConfidenceScore=5.60e-01
MASRCATRSTTAPPRLRNRYPRFEATPAPRPSSASLAQWSNAVKSGPGSSDGGRRARAAVTPSAKLMSHPEAAREPPLTT

SEQ ID NO: 74582 - protein, 311 aa, Zea mays
  Coding DNA Sequence Number=SeqID_32803
MTVAGAREQRSRHLPSSCPIRRQQENPLSRREDDAPRYGRKRLATFRLRQNGRAKKGTGKGGTLKGILPREGTRLRASLLIRGSKAGPPRGSTAALDRVRPTPTTGQGFEGRPPKGSTTASGYSGSVPPTDQGFEGWPVEGFTVAPDAERGMTRDHPQLTGDTMFGAHRGLGGCSRKPGSGRTVDSVNIPARELGPRPCTWATPCSHEGTARPAEALRKALRPRRSETTPPRPRGLHPAGALARTHRNQVPLRKAGPLAKKCDASLQASVNTLFEARGLLSGTIIRGTLKTPNSQLVTPISIKLQRPDGFD

SEQ ID NO: 74583 - protein, 184 aa, Zea mays
  Coding DNA Sequence Number=SeqID_32804
  Gene Ontology: Mol. function=helicase activity
  Homolog annotation: Hit_ID=Q5JMT3; Match level="QueryCoverage=75%, HitCoverage=23%, E-value=2e-22, Identity=36%"; Hit description=DNA binding protein-like
MVPTDSKWWYNSCRKCACTAVTHRDSYKCINRDCANIAMPIQRYKILVTARDETTDTDFILFGRMAQRIVKRSCDMLIANTPSGFIPDAITKLLERTFIWNVSFSGHTINSGNVCFQETVDAGDAEHVTTQSSTTRKRSCSSPGKSIAKKLFVADDEEGSISQSSGGGVGGSRSGCLSSDYCNS

SEQ ID NO: 74584 - protein, 417 aa, Zea mays
  Coding DNA Sequence Number=SeqID_32805
  Gene Ontology: Mol. function=helicase activity
  Homolog annotation: Hit_ID=Q8SBB7; Match level="QueryCoverage=55%, HitCoverage=26%, E-value=9e-40, Identity=34%"; Hit description =Putative helicase
  Subcellular localization annotation: CTP_CleavageSite=71; ConfidenceScore=5.04e-01
INGHKTFFLPPVSTGGGAKTPTAATDEPPPRPASWSAILYPQKSLPEKEAMVNLRSLVLPYMAGQWSCPRRGATGGDSLTTMSISGHTQGKQQFGSGRIDEVVAVNRDLSAQYGILLRFSGVRFKEDDDPAKVAHQQQRDNDASELCGNLSVTICVRVSRFWDFSDPQDAARLLHCDMVLLDEEGNSIHATIYPPFIEKFRPLIKEGSVYNMTYFRVRASNNLYKPVPNDIMITFTNWTKLEQVIEIPPAFPTLTYSLTHIEQIHSRIDHKDYYTGDETADTDFILFGHMAQRIVKRPCDMLIANTPSGFIPDAITKLLERTFIWNVSFSGHTINSGNVCFQVNATVKELGNQNVDISTSTIGTHQSSLMFSQGASSSMEDTPHKTDTLPSPLTPLTPQGSVATTKYLVRVPNAYIN

SEQ ID NO: 74585 - protein, 107 aa, Zea mays
  Coding DNA Sequence Number=SeqID_32806
  Subcellular localization annotation: CTP_CleavageSite=42; ConfidenceScore=5.45e-01
MQAACNRAKWAHFSDFQHAQHGGPGPRVMQPARRMLRASNCTATHATATPPQLRNQYRDSRQPYARPSSASLARWSIWPKMGRRDRERGIPRKGSFSVKEPGSEPPY

SEQ ID NO: 74586 - protein, 306 aa, Zea mays
  Coding DNA Sequence Number=SeqID_32807
MAERYQLPRSCVPPTTRRKDCGCPLSGGSEGGKTRYIRERKDMVAFQGDHPPFKGDSPHLRPQPSRAESSPTRSKVLPLRQGGWVPRVMQAGLGQKKPNRCARCMQLPSGYKHSSTFAQTSGPTRHATGAPVATCEQLHRHYRASSTAEPAGRSSGHVVSQAYVPSRDNKGTLSHGVKMDRRHLWQEKRATLRLRHNDRIKKGTGKGDTPKGILPREGNGPRAPLLIKGSKAGPSEGFNSRLRALGLRAHYWSEVRGSAPRKGSTAASGHSGSAPTTDQGGNDFVTESHQREASSPRTPSKGDRVR

SEQ ID NO: 74587 - protein, 137 aa, Zea mays
  Coding DNA Sequence Number=SeqID_32808
MGGGSRLGRKNRTKARKTNGTSDDGENDAGYPLAFPEAGEFLRPTSLGAPDTVRCTPDSPVNYSRVALEIPEGGEFESESPGAPDREEAPATTPSVENVVVRRWRHEGREKRSRMVNEVVTTETRIIIIVRRYDLFI

SEQ ID NO: 74588 - protein, 44 aa, Zea mays
  Coding DNA Sequence Number=SeqID_32809
  Subcellular localization annotation: CTP_CleavageSite=34; ConfidenceScore=5.00e-01
MRAPSFSPSSDVPFVFLAFVLFFLPNLLPPPMVTAASRPTHVDT

SEQ ID NO: 74589 - protein, 178 aa, Zea mays
  Coding DNA Sequence Number=SeqID_32810
MTTVPIDSPFASRPHRLGIQCSTDPGCRRAVTALRDCSGEVVEDVGEVSGITTGGSRDAREDMSARNWAETHWIARSTRSGGRPKSGEVDLGPPVKSGRVRGLGKLHGLLAELAEALARLEGGWSGLATVAEALAAMAGGIELAGAKERGLAGEEIWSQEIRSVSLPKSEANPRFCRV

SEQ ID NO: 74590 - protein, 72 aa, Zea mays
  Coding DNA Sequence Number=SeqID_32811
MAAGVSGALYAKAVRPGRKRGIDGDGCHVWCRSTLTCRTIQEMVDGVTWPTTLPPGWTVEWDVAPAGEEHEE

SEQ ID NO: 74591 - protein, 254 aa, Zea mays
  Coding DNA Sequence Number=SeqID_32812
MGCTCVAFFLLLFEERDPVGLALFSHRSASRIFIMQPGCSPSPMVIRRDDHQPCGGEKQAGLRPLPRPQLQGCSSSGLGRRARRVGSYLPRGPVARFFLQHSGEKGILQPCGGDVLQLCKGRRTATAWSGWLLSPVLKWWPPLVRLPTAAVVASADETVSATCAPDLQLFGFNPPETEVVVALLVQWLPASHLEFVIPQAFQSGQPPRALPTSKSRYHCYPKITYPSMSYLSRKVTSEKTFPGKDLTQRGLPPF

SEQ ID NO: 74592 - protein, 114 aa, Zea mays
  Coding DNA Sequence Number=SeqID_32813
MATLVRPERFQTEEALDVVRRLLEWSTPAFAVKIWSAKKEVHLGQREEVIMELQTKLNAYNKMLEEQRDQQVAAVENLRKVQQGLDDRASSLALAEENLKEKDASLDKRAADLA

SEQ ID NO: 74593 - protein, 234 aa, Zea mays
  Coding DNA Sequence Number=SeqID_32814
  Homolog annotation: Hit_ID=Q7EY73; Match level="QueryCoverage=95%, HitCoverage=25%, E-value=3e-07, Identity=24%"; Hit description =Erythrocyte binding protein-like
MLEEQRDQQTTAVENLRKVQQGLDDRASSLALAKENLKEKNASLDKRAADLAWREKDLAFREEMLEEAEEKERTLGEQIRQFVAAQVAPGSQAVEAMRKTLEDLRVEHHAGVQRITAWAGEASSALVPLGVSPIPVSEQPASISNALPVLDSTANRLRRLDQILGARLEAKGNRLCRSVIEYILTCFRSHDPAVSLVPVIAGLVADTEDVAREGVQDVVDAVVERFQRDPAYDE

SEQ ID NO: 74594 - protein, 93 aa, Zea mays
  Coding DNA Sequence Number=SeqID_32815
MAVGVSEALYAKALVLLATKPHSQTAACLEVEGVDSSHRMTSHVSSDEGNAQSHTDGLAREGFPRILWEVLQGAGYTTPPQYAVQQFEKHRVP

SEQ ID NO: 74595 - protein, 146 aa, Zea mays
  Coding DNA Sequence Number=SeqID_32816
  Subcellular localization annotation: CTP_CleavageSite=80; ConfidenceScore=5.30e-01
MGKSSDGMRSSEGASSDQSYGAAPPKGKSRGRQMQWRKGAGSPGRHGQPTVWPSRRGCWPWKGCWRPWRSGASTCSQGAPAPAGGELGHGNGAHAMAGAAAAVGKTREADCVREKKVAGGGWEKNRGGSAKMPPLARRWLLFIERH

SEQ ID NO: 74596 - protein, 75 aa, Zea mays
  Coding DNA Sequence Number=SeqID_32817
MAGAAAAVGKTREVDCVGEKKVAGGGWEKNRGGSAKQPTARERSEKANRDILKSLSIRGFEFSPDMRYLAEWSKN

SEQ ID NO: 74597 - protein, 303 aa, Zea mays
  Coding DNA Sequence Number=SeqID_32818
  Gene Ontology: Mol. function=oxidoreductase activity, acting on single donors with incorporation of molecular oxygen, incorporation of two atoms of oxygen; Cellular component=beta-galactosidase complex; Biological ...
  Gene Ontology: Cellular component=process=hypusine biosynthetic process from peptidyl-lysine
  Homolog annotation: Hit_ID=Q94GR4; Match level="QueryCoverage=88%, HitCoverage=95%, E-value=1e-123, Identity=80%"; Hit description =Putative LN1 protein
  Pfam annotation: Domain name=PhyH; Domain location=13-251; Score =288.0; E_value=1.7e-83; Accession=PF05721.4; Description=Phytanoyl -CoA dioxygenase (PhyH)
MPPASSLTADQLSFFEANGYLVMDSFSSAEEVREMRDRMADLVAGFDGANSAVFSTKDHRQLKDDYFFKSAENISFFFEEKAYGDDGCLKQPKELSINKVGHALHELDPVFKKFSFSESVASLFSSLGYKRPAVIQSMYIFKQPGIGGEVVPHQDNTFLYTEPRTCTGLWLALEDATINNGCLWAIPGSHKKGLVRRMVRDENGTHFDRPSPVYDQKEFVPLEVKSGALVVIHGDLIHQSFENLSPASRHAFSLHVVDTEGCKWSEDNCRRVRPYRSDLYSCFESSKSLHDDPPLIVQSISCA

SEQ ID NO: 74598 - protein, 422 aa, Zea mays
  Coding DNA Sequence Number=SeqID_32819
  Homolog annotation: Hit_ID=O23628; Match level="QueryCoverage=23%, HitCoverage=72%, E-value=6e-42, Identity=85%"; Hit description =Histone H2A variant 1
  Pfam annotation: Domain name=Histone; Domain location=317-391; Score =78.7; E_value=1.8e-20; Accession=PF00125.14; Description=Core histone H2AH2BH3H4
MVRDENGTHFDRPSPVYDQKEFVPLEVKSGALVVIHGDLIHQSFENLSPASRHAFSLHVVDTEGCKWSEDNWRKQATPTKEASALYAAQSHLVQGESSFNAHTSLLARDKLYDGEQPLSAELGEELGKTQPLSGYYSSLLTDGKDRIEDGNRIEVPVTKDPIEIPSIKQTERNFELWQVLPPPGNGGLKYYGYLEEWSENHDSFRHEQNLVQWTEKKRPYVEALFIVVYIQYVHSHFCSYGPADLVVLKWFHLIRLVSNQIFARVVLEDGISLTEVGGLLQEWDGREEPAGQHALEDSLASEDLGSMLESIKVERAKYSLMCFQFPIGRIHRQLKQRTQANGRVGATTAVYSAAILEYLTAEVLELAGNASKDLKVKRITPRHLQLAIHGDEELDTLTKGTIAGGGIIPHIHKSLVNKSSKE

SEQ ID NO: 74599 - protein, 247 aa, Zea mays
  Coding DNA Sequence Number=SeqID_32820
  Subcellular localization annotation: CTP_CleavageSite=24; ConfidenceScore=5.30e-01
MAGRSAPTLPPLNNRTPTPHPNPLAPASPPHPRVPLPRLVRPYRTINVPPHRPCPPHARHSHPRWLAPLLLPVPSPASALNVAGQPWSKARGFAGFTKRALVAAGAAVVSSIPVNPLDVAKKPFVHRYVYQSLYIQLEKQLAKTWRSTRGRTTRDRGRTGRSNSPSFCQPKENHVPQQIAEHRRIMCGKKSLTAKGYEVVSNGIDNHLVSVNLKNKEAKGTRAGLMGTTILAMVNCIDDSPTNFEHN

SEQ ID NO: 74600 - protein, 107 aa, Zea mays
  Coding DNA Sequence Number=SeqID_32821
  Homolog annotation: Hit_ID=P92939; Match level="QueryCoverage=37%, HitCoverage=3%, E-value=3e-10, Identity=82%"; Hit description =Calcium-transporting ATPase 1, endoplasmic reticulum-type
MHRATHCSILSSPVKICSKMQSLTAKGYELVSNGIDNHLVSVNLKNKCGNRHLDCARRNPAEILGGKVAKKALDMVLADDNFSTIVAVVGEGRSIYNNIKAFNIKRL

SEQ ID NO: 74601 - protein, 610 aa, Zea mays
  Coding DNA Sequence Number=SeqID_32822
  Gene Ontology: Cellular component=plastid; Biological process =peroxisome organization and biogenesis
  Homolog annotation: Hit_ID=Q85V22; Match level="QueryCoverage=73%, HitCoverage=98%, E-value=0.0, Identity=69%"; Hit description =Histidine amino acid transporter
  Pfam annotation: Domain name=Aa_trans; Domain location=183-597; Score= 478.2; E_value=1e-140; Accession=PF01490.8; Description=Transmembrane amino acid transporter protein
  Pfam annotation: Domain name=Trp_Tyr_perm; Domain location=183-591; Score=-273.7; E_value=0.038; Accession=PF03222.4; Description =Tryptophantyrosine permease family
  Pfam module annotation: Pfam domain module=Aa_trans::Trp_Tyr_perm; Domain location=183-597::183-591
MGEEWSLAAFSGWMPLGNTHAMLGRMDDSITCYGKGLQGTTRSSERSVWDYYIVFGLDLEWFGVHNDDASELFQGLDDFHSPAANSTRLAVSAPPTLAPSSQWNLRRFIGRRGLMPNRQLVILRTASTLQLNPHVPSKRSSAKGANLARIVVILVSGLEKDERSGEGAEDQAIDDWLPITSSRNAKWWYSAFHNVTAMVGAGVLSLPYAMSKLGWGPGIAVLMLSWVVTLYTMWQMVEMHEMVPGKRFDRYHELGQHAFGERLGLWIVVPQQLIVEVGGDIVFMVTGGRSLKKLHDVVVCDAAGRCSEGGGDIRLTYFIMIFASCHLLLSQLPNFNSISGVSGLHRRRCHVTQVRTYSTIAWGASVHKGKLPDVDYEVLAAAATASEKALSYMAALGDVAFAYAGHNVVLEIQATIPSTPETPSKKPMWRGVVVAYAMVAACYFPVSLLGYWAFGNQVDDNVLVTLSKPRWLIALANAMVVVHVIGSYQIFAMPVFDMMETVLVKKLHFPPGLALRLIARSTYVAFTTFIAITIPFFGGLLGFFGGFAFAPTTYFLPCVMWLAICKPKRFSLSWFANWACIVLGVVLMVLAPIGALRQIILSAKTYRFYS

SEQ ID NO: 74602 - protein, 104 aa, Zea mays
  Coding DNA Sequence Number=SeqID_32823
  Homolog annotation: Hit_ID=Q6Z901; Match level="QueryCoverage=35%, HitCoverage=6%, E-value=2e-12, Identity=83%"; Hit description =Kinesin light chain-like protein
MGEEWSLAAFSGWMPLGNTHAMLGRMDDSITCYGKGLQGTTRSSERSVWDYYIVFGLDLEWFGVHNDDASELFQGLDDFHSPAANSTRLAVSAPPTWHQAANGT

SEQ ID NO: 74603 - protein, 102 aa, Zea mays
  Coding DNA Sequence Number=SeqID_32824
  Homolog annotation: Hit_ID=Q9LLI9; Match level="QueryCoverage=45%, HitCoverage=4%, E-value=3e-22, Identity=97%"; Hit description =Cellulose synthase-1
MSRFAPCSPRSDRDFDFPTDAGAVGLTGRDPSSHGRLLVWFADQNGDGAMLPLRRAKPTKSANGQVCQICGDSIGVSATGDVFVACNECAFPVCRPCYEYER

SEQ ID NO: 74604 - protein, 127 aa, Zea mays
  Coding DNA Sequence Number=SeqID_32825
  Gene Ontology: Mol. function=cellulose synthase (UDP-forming) activity; Cellular component=membrane; Biological process=cellulose biosynthetic process
  Homolog annotation: Hit_ID=Q9LLI9; Match level="QueryCoverage=63%, HitCoverage=7%, E-value=6e-27, Identity=70%"; Hit description =Cellulose synthase-1
  Pfam annotation: Domain name=PHD; Domain location=24-72; Score=-2.3; E_value=0.097; Accession=PF00628.19; Description=PHD-finger
MPGFAPCSPISDRDFDFLTDAGAVCQICGDSIGVSATGDVFVACNECAFPVCRPCYEYEHEGNQCCPQCKTRYKRQKCWFPGNFFEWDYKDKDGVKGIYAYENIIASCHWAYKGVEEDSTLEDPYFL

SEQ ID NO: 74605 - protein, 139 aa, Zea mays
  Coding DNA Sequence Number=SeqID_32826
MDHLPYCAPHNPIHYPNSGAPRAALATYKAKSRRREDDGEKFLEVQDIIQRDLLCSDEHPYSRAILPSLPPWSVSRRARIPWRAGRASVATFTGRWRRCRSAAEELAVSDWRVPPDSAKARGISMGRGGPTCAIGVGLA

SEQ ID NO: 74606 - protein, 560 aa, Zea mays
  Coding DNA Sequence Number=SeqID_32827
  Subcellular localization annotation: CTP_CleavageSite=20; ConfidenceScore=5.23e-01
MHRVFPPSEPPGGGRPESFRLVVGGTQLRGSRYLLAIVRLQGFSSCSPAASPRRWSPKTVTTSLMAGRSEPGCDLGPALSFKDVHHPRWGGGQTEPELYLPRGFVGQPPLQHPRERALTSPASGADFDNAGPIDGGCRQLQHVGLAGLAPGLSCLCNGTGPPRGGRCSARPGGSEWGSADGLMLHSKAPRWMRPEKSPSPTGSLPPSVLWASGSLYLSSPLERRRGRGQGCSGFRPRAIAAAVGTEPEFRLYWHLECRTETRLVDYLNRFTERELPRAKVTSESWLRKGGVVGQSLAGSSTGGTDAGVELPRPQADMMSLGSGGPPTASPSEARSDPAEGVVDAEGAAAPFGCRRPSLQDQYPDSFVGNRIVCAGESCFSRKAMSEIHHHSTQKKPRTAIAIELEPGGGHRSHPLHSTLVGHLGRSHAPPPSYRQRETESESDTSPRDAGTSAYGPRRKAGENRPRVWVLVGAKQICAAAWMLSTVVIQAFGTVPATSSGLRERGRGRATWEFLPELPELLAGATPLPFTRAAPWRDLHRGGTRLWRRYWGIDLVIDGVD

SEQ ID NO: 74607 - protein, 94 aa, Zea mays
  Coding DNA Sequence Number=SeqID_32828
MWQTLPFVSSPRYPANWETAGAAPPLLALPPPSEFVWSEDPVERCVVGVCSLSGVARSRWGRCKERRTVSVAVFAAAAATSPHAVDHRRFVVPA

SEQ ID NO: 74608 - protein, 117 aa, Zea mays
  Coding DNA Sequence Number=SeqID_32829
MRQTLPFVSSPWYPANWETAGAAPPLLALPPPPEFVWSEDPVERCVAGVCSLSGVARSRWGRCEGRVKGLSPWANFLSVLALVLQLWPGRIARAHGRHGDHQFVKYDVNAGVIPRRT

SEQ ID NO: 74609 - protein, 174 aa, Zea mays
  Coding DNA Sequence Number=SeqID_32830
  Homolog annotation: Hit_ID=Q5Z5B8; Match level="QueryCoverage=22%, HitCoverage=2%, E-value=1e-07, Identity=66%"; Hit description =Putative callose synthase 1 catalytic subunit
MAFPLAWVTANSSVAVRVCLGPVVLISKMIKPRQENIPIPATNLVDDPPVPPSAFNTGIDFKLKDEEELKERMDEICNWASYRGQTLTRKVRGMMYYRKALEIQCLQDMTDPALDKFRKEFGRFPGVACGLDAQRLSTASCLGVRSIQVANCFILTDNFTAMVDQTSRVYMNSK

SEQ ID NO: 74610 - protein, 240 aa, Zea mays
  Coding DNA Sequence Number=SeqID_32831
  Gene Ontology: Mol. function=1,3-beta-glucan synthase activity; Cellular component=1,3-beta-glucan synthase complex; Biological process=1,3-beta-glucan biosynthetic process
  Homolog annotation: Hit_ID=UPI000034F02F; Match level="QueryCoverage =45%, HitCoverage=5%, E-value=1e-23, Identity=52%"; Hit description =ATGSL11 (GLUCAN SYNTHASE-LIKE 11); 1,3-beta-glucan synthase/ transferase, transferring glycosyl
MAYRRAWSTRGGGRPKSGEGDLGLPVKFCRVRGLGKLHGLMANLTERLGTGSCSVTKVPVSECLVPRSSYAKTVSNEFGLSSKFSRACSRKFGTTLIFGLPGFEFRKTENAKDLWNFLQWIDFKLNDEEELKERMDEICNWASYRGQTLTRTVRGMMYYRKALEIQCLQDMTDPAKVDRDRSIGSYQELQSDIEMAQAIADIKFTYVVSCQVYGMQKTSKDLNEKRRYQNIIGLMIMYRS

SEQ ID NO: 74611 - protein, 471 aa, Zea mays
  Coding DNA Sequence Number=SeqID_32832
  Gene Ontology: Mol. function=protein serine/threonine kinase activity; Cellular component=cytoplasm; Biological process=protein amino acid phosphorylation
  Homolog annotation: Hit_ID=Q6ZLP5; Match level="QueryCoverage=99%, HitCoverage=98%, E-value=0.0, Identity=88%"; Hit description =Putative CBL-interacting protein kinase 23
  Pfam annotation: Domain name=NAF; Domain location=330-391; Score =112.8; E_value=9.7e-31; Accession=PF03822.5; Description=NAF domain
  Pfam annotation: Domain name=Pkinase; Domain location=5-290; Score =316.7; E_value=4e-92; Accession=PF00069.15; Description=Protein kinase domain
  Pfam annotation: Domain name=Pkinase_Tyr; Domain location=5-288; Score=42.0; E_value=4.8e-15; Accession=PF07714.7; Description =Protein tyrosine kinase
  Pfam module annotation: Pfam domain module=NAF::Pkinase::Pkinase_Tyr; Domain location=330-391::5-290::5-288
MVKKSQLGRTLGEGTFAKVKFARNVETGENVAIKILDKEKVLKHKMIAQIKREISTMKLIRHPNVIRMYEVMASKTKIYIVMELVTGGELFDKIASRGRLKEDDARKYFQQLINAVDYCHSRGVYHRDLKPENLLLDASGTLKVSDFGLSALSQQVREDGLLHTTCGTPNYVAPEVLTTATLLITFLFPLSEVSCSHCPVLLRLQVINNKGYDGAKADLWSCGVILFVLMAGYLPFEDSNLMSLYKKIFKADFSCPSWFSTSAKKLIKKILDPNANNRITIAELINNEWFKKGYQPPRFETADVNLDDVNSIFDESGEPAQLVVERREERPSVMNAFELISTSQGLNLGTLFEKQTGSVKRETRFASRLPANEILSKIEAAAGPMGFNVQKRNYKLKLQGENPGRKGQLAIATEVFEVTPSLYMVELRKSNGDTLEFHKFYHNISNGLKDVMWKPESGIVEGDEARQRRSP

SEQ ID NO: 74612 - protein, 314 aa, Zea mays
  Coding DNA Sequence Number=SeqID_32833
  Gene Ontology: Mol. function=protein serine/threonine kinase activity; Cellular component=cytoplasm; Biological process=protein amino acid phosphorylation
  Homolog annotation: Hit_ID=Q6ZLP5; Match level="QueryCoverage=99%, HitCoverage=63%, E-value=1e-149, Identity=85%"; Hit description =Putative CBL-interacting protein kinase 23
  Pfam annotation: Domain name=NAF; Domain location=173-234; Score =112.8; E_value=9.7e-31; Accession=PF03822.5; Description=NAF domain
  Pfam annotation: Domain name=Pkinase; Domain location=1-133; Score= -108.7; E_value=0.043; Accession=PF00069.15; Description=Protein kinase domain
  Pfam module annotation: Pfam domain module=NAF::Pkinase; Domain location=173-234::1-133
EDGLLHTTCGTPNYVAPEVLTTATLLITFLFPLSEVSCSHCPVLLRLQVINNKGYDGAKADLWSCGVILFVLMAGYLPFEDSNLMSLYKKIFKADFSCPSWFSTSAKKLIKKILDPNANNRITIAELINNEWFKKGYQPPRFETADVNLDDVNSIFDESGEPAQLVVERREERPSVMNAFELISTSQGLNLGTLFEKQTGSVKRETRFASRLPANEILSKIEAAAGPMGFNVQKRNYKLKLQGENPGRKGQLAIATEVFEVTPSLYMVELRKSNGDTLEFHKFYHNISNGLKDVMWKPESGIVEGDEARQRRSP

SEQ ID NO: 74613 - protein, 295 aa, Zea mays
  Coding DNA Sequence Number=SeqID_32834
  Homolog annotation: Hit_ID=Q6Z7A1; Match level="QueryCoverage=37%, HitCoverage=43%, E-value=7e-42, Identity=61%"; Hit description =Putative SEC14 cytosolic factor
  Pfam annotation: Domain name=CRAL_TRIO_N; Domain location=155-201; Score=14.6; E_value=0.001; Accession=PF03765.5; Description=CRALTRIO, N-terminus
MESKTEDCTPAGIAQRCNWPGTPDAEQDPVQTKSRGIITESLPATYTWMMQNYSILNEVDIKRRQEDDINRVSTVLSISKPEACVFSATITGTVLTCKKIAIKIRKGGPGAAVEPTVCNRKVPGSSPSLCILCGAHGAYLSFFVLLILVFDSNVHPIGVLNMHQGYPKETLVHFLKAREWNVAKAHKMIVECLNWRIQNEIDSVLERPIAPVDLYRSICDSQLIGLSGYTKEGLPIFGIGVGHSTYDKASATTTAKIIKVSGLKLSALSQIKKRVKNVGTHVLKVKNVGTVELIV

SEQ ID NO: 74614 - protein, 122 aa, Zea mays
  Coding DNA Sequence Number=SeqID_32835
MGTHVLKVKNVGTVELIVRVDLRRTHKFDGHVTPSNLTLRTWVPSNLWEKIRRPPSNLKTHVLNVKFDGTNVLNVKFDGTHVLKVKFDGAVELTSLSSSKNHRRLYSSVNPRSYGKFDGLLH

SEQ ID NO: 74615 - protein, 245 aa, Zea mays
  Coding DNA Sequence Number=SeqID_32836
  Subcellular localization annotation: CTP_CleavageSite=71; ConfidenceScore=5.15e-01
MGAMAELPVPLLQGRDAPCSYSLARQQLPWTPRNFSSASLFIFLPAGFPPLLLLAPFLLFPGVVARSLCSDCSHGVQVPAPSPPIQKQQPCAEPLPLLLSDERNPVFCEEKASRSTLVDVWSYAQIGIAIVLTNVDWLKCVWFWSRVKISSAHVVSKLKCELVGEKRFDIHARNDLNKICKSTVSPHLINLALTNEKSYGRVVDNMIILLALEFDSPKPDRLGVVLFTSPAPESVEFLNRFQKLP

SEQ ID NO: 74616 - protein, 177 aa, Zea mays
  Coding DNA Sequence Number=SeqID_32837
MAASLPLLGSIGVGEQQFLLSSRASHLQSALFLPPIRAPKPAPFPAPWASLLVFHPAGSLGSEQAQQEHSPMAPRAELHSWPCPGSPVRGLGPRLSLVGLAVSSTPDICARCRLAVLGSPVDNTTSTLTGCLLFLRSPIRDVVHPRRRQAAQRSSTFGAMHKSESPSFLQTPIEFVY

SEQ ID NO: 74617 - protein, 74 aa, Zea mays
  Coding DNA Sequence Number=SeqID_32838
MPCMPEPDGGEGGEGPPAAGQDLEDEGFRRPALLIADAPLRSGRRELKGGSAMKRGESEMGSGMIWRLAAGLLL

SEQ ID NO: 74618 - protein, 151 aa, Zea mays
  Coding DNA Sequence Number=SeqID_32839
  Homolog annotation: Hit_ID=Q84T10; Match level="QueryCoverage=51%, HitCoverage=2%, E-value=4e-08, Identity=42%"; Hit description=Unknow protein
MQEPKLNDVGPSSNLNMHVMYGHTEDSLLSIDLEGDWIIEEKPRTETTLLGDSSAEILDDAHMVMSAEPFNVPGYLNLEDLEDEGFRRPALLIADAPLRSGRRELKGGSAMKRGESELGAGDDLEAGCRAPFIGPSPRPPCLSAHENLAIS

SEQ ID NO: 74619 - protein, 392 aa, Zea mays
  Coding DNA Sequence Number=SeqID_32840
  Gene Ontology: Mol. function=3-isopropylmalate dehydratase activity; Cellular component=chloroplast; Biological process=leucine biosynthetic process
  Homolog annotation: Hit_ID=Q6Z702; Match level="QueryCoverage=70%, HitCoverage=69%, E-value=1e-108, Identity=60%"; Hit description =Putative 3-isopropylmalate dehydratase large subunit
  Pfam annotation: Domain name=Aconitase; Domain location=22-361; Score= -108.5; E_value=4.4e-09; Accession=PF00330.10; Description=Aconitase family (aconitate hydratase)
MDMIDDDQLWVDGGGVVRACVKVFGDRCFWFWLFIRPRGDDRSALIHSLDIFKKEFGARVWDREKLVVIPDHYIFTSDDRANRNVDILRDFCAEQNVKYFYDIKDLRQRFRSYKGVCHCRPGEVLLGTDSHTCNAGAFGQFATGIGNTDAYKLCYICSFLRIYHIIGEISVSGATYKSMEFVGSTVESLTMEERMTLCNMVIEAGGKNGVVPADETTFKYLEGKTSVDYEPVYSDAQARFFSDYRFDVSKLEPVVAKGKKVKVPTFLVPATQKVWLDVYSLPVPGSGGKTCSQVFEEAGCDTPASPNCGACLGGPRDTYARMNEPTDQLSRRCQKITSSRVKTLPKNLIRPLPVQDLEDEGFRRPALLIADAPLRSGRRELKGGSAMKRGES

SEQ ID NO: 74620 - protein, 51 aa, Zea mays
  Coding DNA Sequence Number=SeqID_32841
MAHQMLPLWVPIYTPNALQLGGPHLSLTFAILEKGRSLYPKRDNASKDEGL

SEQ ID NO: 74621 - protein, 85 aa, Zea mays
  Coding DNA Sequence Number=SeqID_32842
MAHQILPLWVPIYTPNALQLGGPRLSLTFAILAKGSHRDLRPRNEVVYDMKSMFGKKIEPVLKLRVGKLRLSGGKWNRLKEEKAI

SEQ ID NO: 74622 - protein, 275 aa, Zea mays
  Coding DNA Sequence Number=SeqID_32843
MGDHVSGRVRGYVHCQVHSGLNSTREKEKGGAAYRRRERSGEGRGWLREFLVVTTVYGSTAGVAGIARSTCAGGCSRRRRVCRPNHGDLVQSNGTESRNGAEDYPVYARQRSGGVQRPWTGLSGEANSNSSLGELHRGVLSLLQGSDGVGKGSVGRSTVAGGSGSRRHTVHGQTPVGLGSGEVERARRGTAEVPGGFIGAGAGNGAGWALARRRHARSGAGVLWRAQNASNTWRCSSARVQKLAEIANMRIVAKIRRRPLPGTYGYLLYVSSKGR

SEQ ID NO: 74623 - protein, 119 aa, Zea mays
  Coding DNA Sequence Number=SeqID_32844
MDWPLRRSKPRFFTRGASPRCAQSSPRAGRGWEGLGWPIYGGREIGQPRTHRARANAAQTSSWHLWLSLICEFQGKISPRSEDMRTPNLACPPARCATKVVPRHVKCQGLGPNFFQGVP

SEQ ID NO: 74624 - protein, 180 aa, Zea mays
  Coding DNA Sequence Number=SeqID_32845
  Homolog annotation: Hit_ID=Q6QP51; Match level="QueryCoverage=30%, HitCoverage=36%, E-value=8e-18, Identity=70%"; Hit description =Putative growth-regulating factor 1
MTEERQPPRSRAPPMAARRRQHRCTPSGGSEGSRKGGYFERILLSEGSGPRALLLIRGLKVAPCEVRQPPQSTRAPSPLLIRGSKAGPSEGFDSCPKACRVRDDPGYVCYMAKARATLLRYPRTFPRPAGMICNGIPPEGGAEPSDPIKWVQVQQINCRGSEAALAPDYGQIIDHVDKLA

SEQ ID NO: 74625 - protein, 203 aa, Zea mays
  Coding DNA Sequence Number=SeqID_32846
MMIVGLVVGKSESGRGFSLALSFKDVHHPCWGGGRAKLGPCLPHGLATRFFLQHLGEKGILQPYGGGELPPAARSGCGCPSTARATVAPCAGRPCSWPFPRRRPHRGVAQHVVRREGGVRVLGQSRPRTCGEDGSEDLPVRIGAAAIRRCGVGAQVAAVVGAEVVVAIGDMSEGLFAVAFALRQSLQLSSRPRRRSLSLLVQW

SEQ ID NO: 74626 - protein, 102 aa, Zea mays
  Coding DNA Sequence Number=SeqID_32847
  Gene Ontology: Mol. function=branched-chain-amino-acid transaminase activity; Cellular component=chloroplast; Biological process =branched chain family amino acid metabolic process
  Homolog annotation: Hit_ID=Q6AT43; Match level="QueryCoverage=63%, HitCoverage=15%, E-value=3e-28, Identity=92%"; Hit description =Putative aminotransferase
MTVMSVMRIGGYASLEIGRGAPRSCLVGRFFATGLFEENAERMRTCAERMCMPAPSIEQFIDAVKQTVLANKRWIPPTGKGSLYIRPLLMGSGAVLGLAPAS

SEQ ID NO: 74627 - protein, 99 aa, Zea mays
  Coding DNA Sequence Number=SeqID_32848
  Gene Ontology: Mol. function=branched-chain-amino-acid transaminase activity; Cellular component=chloroplast; Biological process =branched chain family amino acid metabolic process
  Homolog annotation: Hit_ID=Q6AT43; Match level="QueryCoverage=57%, HitCoverage=14%, E-value=1e-22, Identity=89%"; Hit description =Putative aminotransferase
MYFGASYLAWLSQYEGREQSYEFIVQAYLGGPENGLFEGLKAYKKTDGSILLFRPEENAERMRTGAKRMCMPAPSVEQFIDAVKQTVLANKRQCYAHYL

SEQ ID NO: 74628 - protein, 163 aa, Zea mays
  Coding DNA Sequence Number=SeqID_32849
  Subcellular localization annotation: CTP_CleavageSite=76; ConfidenceScore=5.19e-01
MAELPWSRRSPAMARRPTLLHGRRSSSTPPHGAGVSPAAPSAPSCMDELHLCSSRAPPQPWRPLPFSSHGRELHFPCSSSSCGIGLVAFLCWLRDYLRRIPSWLVSRGARTTPVPVVFFSGMMKVVVVESEFTGGPKTETVEDNYVVSKFPDIFTKELPRMST

SEQ ID NO: 74629 - protein, 164 aa, Zea mays
  Coding DNA Sequence Number=SeqID_32850
MRKLELEPWRMEGSSQGRTAGRWERLLPALREEGRPTCRCAEPGRKEGARWREPAELRPSQGWLLPAPSSIGGDSRGVSVEGGGCRELGAAAGCRAMEKLLRGVQGRGSGARAHGRRRAGDAMAWPREDQAWGALEKSIGSPACCWPGKEKKMEAVAAEIFEGG

SEQ ID NO: 74630 - protein, 446 aa, Zea mays
  Coding DNA Sequence Number=SeqID_32851
TLEVVSGDFARDTKGCKRGGLPIKGGLRSPRQWPSLRPPLMPCALPPFEPPDGVPQRRLALAVVGGARTRGDRYLSAIVRLQGFSSCSPAAFPHQWSVWWGEASRAVASAPPSASRIFVIRAEAEERTEWGVASAWAGNPFLPPAFGGERHPPAMRGKANCYFLDRCSFPSFVRAAVVPHTGRPRPGLPRAVSRARGLPSTSYAARAVLVLWGGLGEDGSEDLPVRFGATGARWCGVGGQVDAAVGAVVAAAGEGFSADEIVGASCAPGLRLFGFNGWFSSSRERIRTRAFHRWRSPWGHRRCRRGCRFRKPRLLCDEPKPKAAVLARADAESAQKETSSAREMAASQAEEDVAAAAGAWPRHPLARCWRPPLGGGPFARVVVRGRAWFRRGWNQRRGIVYPNESYFSWKVMSEDPAINTEVESTKVVLVENFSEENFDAEGVPPF

SEQ ID NO: 74631 - protein, 280 aa, Zea mays
  Coding DNA Sequence Number=SeqID_32852
MRGGRRHGHCPGDRSPFYRQTSSLAPLSVTGEVPTDILQGSPPTTRGWDPHVIRADPKHEEGEPPRARHVTIPRLQALSHLHRNRWSKGWTATRQASNCTTTVRPFGSVHIRWTSAKEAGPHVMRGGRRFVFAIMTASKKPTPATTDNKSRSTTELKPRAQQEAPPRPDLTLQPWEEVFASPDPPDSASTPVSGGITSSPDPSLGLKRSLRLDRPWARSDRADRGCSIPLFLACSSYKKQDRHPIWLTPAMGNDAPKLSPNGHVGMYTGLRRSTAGHVSA

SEQ ID NO: 74632 - protein, 79 aa, Zea mays
  Coding DNA Sequence Number=SeqID_32853
  Pfam annotation: Domain name=LRR_1; Domain location=24-46; Score=8.1; E_value=8.7; Accession=PF00560.23; Description=Leucine Rich Repeat
  Pfam annotation: Domain name=LRR_1; Domain location=49-72; Score=9.7; E_value=4.4; Accession=PF00560.23; Description=Leucine Rich Repeat
  Pfam module annotation: Pfam domain module=LRR_1::LRR_1; Domain location=24-46::49-72
MAPYDVGLGLSGELAASSLCRVRGLVALSLASNDFEGQVPVGLAALGGILQVLDLRENLLSGVLHPALFGNLTSLLNCY

SEQ ID NO: 74633 - protein, 112 aa, Zea mays
  Coding DNA Sequence Number=SeqID_32854
  Homolog annotation: Hit_ID=Q6QP54; Match level="QueryCoverage=38%, HitCoverage=15%, E-value=8e-13, Identity=81%"; Hit description =Putative kinase
MATARSPFRGSVVAIRGKMAPGDKAHKSATNEGGATVFGLYSLARPRGSDSTTATEDRLDLDLDLGGASTSPNLGRGPTTSTGGAIITLPQADSGYGEEDRRPIWLAPLDRQ

SEQ ID NO: 74634 - protein, 349 aa, Zea mays
  Coding DNA Sequence Number=SeqID_32855
MAPGPASGEGTSLQVGPKFDWRLARCFCVLAVEPAPKESDSWAGAPVSVWAVGFNGGEEEHYRRRWRIPYTADWFAAFGGGEGTHHHRRWRAPHATVRLLRIRRPTPKEYDSWARAPVPETGAILPPSSPHSYVIVAAMALLDPPKRLQPEVALNLVRNPLRWGVLAFAGRTHIGVAPYGDLTAGEFAFFVSKLPSGLALPILSFFVLLLEGLGSSLYTLRPASSFRRPSLPTSAGCPWRRRSFPLLPPAFGGKDDHQPREGGHRVEPRFHPSRPDSLGSTASAAPPAPLATAGHAAPTPPGGSYKTSYAVGVAAAFLDEVVTAAGAEVVAAAGKLLGASLQRDPVGAE

SEQ ID NO: 74635 - protein, 406 aa, Zea mays
  Coding DNA Sequence Number=SeqID_32856
MTTSLVVERSESGCGLPPALSFKDVHHIHGVSRAAGRIASTSPWGLYKTSYAMGVAAAFLDAPTWSPPLVWLPTSEVVASAGETTGATCCRASHSLALMASLSSPVGRRGRGPLRNGACAEVVATAGESLVQRWPLSSVLMWSPPPASRSELATMRPTGVEVVHTCRVEMELGLRLKADVILLLFVRLDVSRLYTSTSETVVNNSQEAASRGSGSVHSFSRGAVVERVGPRYGTRLSGYTGSGPPQETNAKRPHRLRATPWNRVPFSRAGSQVVDIWEPCGWVRQKALSEKLQDQQAGFMGTDLTGLAYTDAPAPEGGTPSVIARWLPSSRRIPVTLKSPSQLGESCGALLGLVLAVGLGPELRFPSAFDEGALVFECGRFCMNLSEVWARRESRRVSGGRQASAP

SEQ ID NO: 74636 - protein, 91 aa, Zea mays
  Coding DNA Sequence Number=SeqID_32857
MEVRIMAERAAIDQRMADMFQYMQSLSASQGFAPPPPFVPCSLTLVYSKPLTNLGRHPTTLMKGSAQHSTRPTAHLHEFYVLTVEYLCLCV

SEQ ID NO: 74637 - protein, 65 aa, Zea mays
  Coding DNA Sequence Number=SeqID_32858
MEVRIMAERAAIDQRMADMFQYMQSLSASQGSQPLRVVPRGGGGTKDQRGGSDTVAHREEPVEQA

SEQ ID NO: 74638 - protein, 91 aa, Zea mays
  Coding DNA Sequence Number=SeqID_32859
MGLGVCGSLCQVWVRPLGRSAVHLGNLTGGYSPGESLLRLRSDALLGHLGGYEIDGFGYDYGAGCQHCNHCSDEDEAVEGDFQEFQDYDEF

SEQ ID NO: 74639 - protein, 98 aa, Zea mays
  Coding DNA Sequence Number=SeqID_32860
NRQSSFGDQEIELFEFYEAEDPEHLFGEGKNWGVVRFAVVPLMGLGVCGSLCQGWFAPWGRSAVVMRMMVFYFDYGNGKEEGVEADLQKFQDFDEFKD

SEQ ID NO: 74640 - protein, 85 aa, Zea mays
  Coding DNA Sequence Number=SeqID_32861
MAVAQRLTALELHHCCCPTPRHTSRLDLSSLRAGSPAEFAVEHRRGRLFLPCVVARNQQSSFGDQEIELFEFYEAEDPEHLFGEG

SEQ ID NO: 74641 - protein, 302 aa, Zea mays
  Coding DNA Sequence Number=SeqID_32862
  Subcellular localization annotation: CTP_CleavageSite=61; ConfidenceScore=5.73e-01
LTPPRSSLTSAPGSSALGARSPPSALFPRPTQQALSCPRSPPHAALSRFPPRPLLAPCAFPASTLAQPPPGPPTRRRLPQPPGRSLRRPRRARSRSRQPPSPLLSHLNAQPASPLPVGGLSAVAEIPGSIPSPRSSPLPNATASLRGGQPSATVASCPRLGPSAARLERLARPSRVDATRCPWPGCAPARPVRVPPARPRARVRRGPCVCPRRGLTLAFDAACVCALDVACVWLACPRLARACPHVPVLCRELVRPSAVVAGNQQSSFGDQEIELFEFYEVEDPEHLFGEGEEGVEADLQEF

SEQ ID NO: 74642 - protein, 255 aa, Zea mays
  Coding DNA Sequence Number=SeqID_32863
  Homolog annotation: Hit_ID=Q6QP51; Match level="QueryCoverage=16%, HitCoverage=18%, E-value=4e-09, Identity=73%"; Hit description =Putative growth-regulating factor 1
MRRKDGGYPPSGGLEGGKTRCIREREDMVAFQRGRSRRRFAFAIMTASKKGPGKGDTPKRILPREGTRLRASLLIRGSKAGPPEGFDSRLRSRGPYTHYWSEVRRSAPRKGSTAASGYSGSAPITDQGGNDLVTESHQREASSPRTPSPGDRVRQITRSSSETPCSAPIEGNMALSPLLLAERRRRGVCKKAEYVPDRPLALCRGSGAALANPAPAEPLTASTYQPENLGPDRTPGLRPARMREQPDQPRHYARH

SEQ ID NO: 74643 - protein, 396 aa, Zea mays
  Coding DNA Sequence Number=SeqID_32864
MNKRPAFKVPLQMELRFHLRSGDDDDFCSGGPNNSSDDLRADAAAMRPSPVPKLVRQGRAEGRRVGGRSVGSPGYLVGGRTSSSCRGGRRCRERLRSHSGQRARHAASACASNGERPSPRSLMEGAGRRPRRGRPLIGTLPSLALVMKILEAEGGVEVAAWGSEGGKTRCIREREDMVTLLLKATLPTCVPSRRGLSLLQHAPRSSPYGAGAGSHTSCKLAQGRRSQTAARGACNRPAVTSAPPLSPRPADERAGSHAGGMQPRQVGAPLRLPTRPAWRPTPTRHATGAPVATCKQLHRHSHHYCASSTAEPVPRLEATQRTTQQRQPSATVNTAKNGPAVMAVAGGQEQRRSKRRFAFAIMTASKKAASEPVGSTPTTDQGFEGWPSKGSQPPQT

SEQ ID NO: 74644 - protein, 35 aa, Zea mays
  Coding DNA Sequence Number=SeqID_32865
MALGGIGTNSSIKAKGVKSVESTIGTKATACHPSG

SEQ ID NO: 74645 - protein, 275 aa, Zea mays
  Coding DNA Sequence Number=SeqID_32866
  Homolog annotation: Hit_ID=Q6UU68; Match level="QueryCoverage=26%, HitCoverage=13%, E-value=2e-09, Identity=41%"; Hit description =Putative DNA-binding protein
  Pfam annotation: Domain name=zf-CCHC; Domain location=188-205; Score =19.0; E_value=0.00072; Accession=PF00098.13; Description=Zinc knuckle
MALGGIGTNSSIKAKGVKSVESTIGTKATACHPTPPKDRGAYVEHRIEPADGPALRPDGPQSGQSAPGGPDAELKLQPGSRASSTGVQRGSTGVQGKFSRGIFPGPHWSKPVEPVLGEVQPVSGSPDRSDLLAGRLTASVTPQAVELALGAVQPVSGPVFLQSDLRKRLTNHVANKKQGKESCKIKNQICYTCRRKGHLCKDCPMSKYPKSTMSIHSYSLRRPKNDICARKGIRINLCGNQAKGLQPSDIQRMPHRKNEALENELKRFYLALERI

SEQ ID NO: 74646 - protein, 126 aa, Zea mays
  Coding DNA Sequence Number=SeqID_32867
MELRPPAWESPPPHKGAAAARPLDRGPPPPAWKPPPPHKGAAAAARPLDRGPPPSAWQPSLMNRDGAGSRVSEEVVNGVRPRLEQLRAPYTEDNVLRVVLSAMYSMRCVGIGLSENDLIVGVDCVV

SEQ ID NO: 74647 - protein, 161 aa, Zea mays
  Coding DNA Sequence Number=SeqID_32868
  Subcellular localization annotation: CTP_CleavageSite=21; ConfidenceScore=5.23e-01
MTAASAGHTATHPTARVFIPRASLAPRAVMPARAIPPTIPGEENIPCVACSPALEVPPPRGFGDAAACLHKGLAADRGTSAPRVEVMELRPPAWESPPPHKDAAAARPLDRGPPPPAWKPLPPHKGAAAAARPLDRGPPPSAWEPPPPPAWQPSLMNRDGA

SEQ ID NO: 74648 - protein, 107 aa, Zea mays
  Coding DNA Sequence Number=SeqID_32869
MYDGTSTGRPTVAALDPEGERRRQRPYVVAAVSRPAVAAPDPEGERRQRPCAVAAIPRPVAATPLPRRVVAEVPRSAARPLCRQAAASPKPRGGGTSKAGEQAMPVD

SEQ ID NO: 74649 - protein, 217 aa, Zea mays
  Coding DNA Sequence Number=SeqID_32870
MTMSLSVETSLPVTEERSGITVFADILIWPNCFGGFPFRPSKVGRGSKQHGHRFLRENSFLDRFELGGDSEIQATVARPAVAAVPRPTVAALDPEGERRRQRPYVVAAVSRPAVAAPDPEGERRQRPCAVAAIPRPVAATPLPRRAVAEVPRSAARPLCRQAAASPKPRGGGTSKAGEQATPVDMRVATATREARCSSERRHRRGEMRAAMIARDIL

SEQ ID NO: 74650 - protein, 55 aa, Zea mays
  Coding DNA Sequence Number=SeqID_32871
MEAERMRCAVFSSLAIFLGCGKPKQKASTNGRGSGKGIFRKRILLSEGNGPEPSY

SEQ ID NO: 74651 - protein, 116 aa, Zea mays
  Coding DNA Sequence Number=SeqID_32872
  Homolog annotation: Hit_ID=Q6QP51; Match level="QueryCoverage=33%, HitCoverage=29%, E-value=2e-09, Identity=80%"; Hit description =Putative growth-regulating factor 1
MEAQAHMSCNRRNGYYVQGNRTATRANVASTQLQNQCRDSRQPCADRERGYFEKGSFPAKEMGPSPPTDQEFEGCTLRGSVTALEHSGSVPFTDQGFEGWPLGRVRQPPQSTQSQG

SEQ ID NO: 74652 - protein, 103 aa, Zea mays
  Coding DNA Sequence Number=SeqID_32873
MARRRPGSTVADPCGGTEGGGVGEVRERPAGAQMREGGRGRVGFWAQVAGGGAVASSTRDVGAESTAARSSGGGYAGKTGLTARAREQRERGKRARARRRRPR

SEQ ID NO: 74653 - protein, 407 aa, Zea mays
  Coding DNA Sequence Number=SeqID_32874
MTSHGSSDDGNALSHTDGLAREGFPRILWEVLQGGRYATPPQYAVQQFEKHRVPRCRVRMTLEPHPLQPGWRSLDSESFGYRAEDTIEAIALHGLTTFCGFHPLELSTHPIGLFPAEKEDDPMWKDRVEHAKDIWAIYPGQTAHLTVRCMNALYRLQVMRGEAMSHLMALLEATKITLDNREELVVDLSQEMVEKDLQVEQLSTDIQELEELVGTRENTIEVLEDQLINTQCHTRFWKANRMRTMYVPGSELTQLTGGCRQPTPRIRRSPGTPGSLLPRLRLLLSSGYNADNLVFCGEVPYLKADSGDSSVAAMARRRPGSMVADPCGGTEGGGSAFTYHRLVLASREQGRRGDPGRAAARRLAVTAKSAARQVPRISDAMEQVPTLLLATVISVGLMLLQDARTSD

SEQ ID NO: 74654 - protein, 67 aa, Zea mays
  Coding DNA Sequence Number=SeqID_32875
  Homolog annotation: Hit_ID=Q6F2Y7; Match level="QueryCoverage=91%, HitCoverage=7%, E-value=5e-13, Identity=61%"; Hit description=Heat shock protein 101
MDFRNTVIIMTTNLGAWHLLAGMVGNNSMKVARDLVMQEYSDYHNISRMTSFVGFQPFTREKECEGD

SEQ ID NO: 74655 - protein, 67 aa, Zea mays
  Coding DNA Sequence Number=SeqID_32876
MVGKNSMKVARDLVMQEILAEATIPAAGSRGLNQFLNDDIDLDDDMEDLDSDVDLDLESSGEIVYAI

SEQ ID NO: 74656 - protein, 137 aa, Zea mays
  Coding DNA Sequence Number=SeqID_32877
IPSSSPPPKSRDSCAGNLDRDRRRGPLPCTPLLATWERPTVVALGVWEVLLACPLTRGLGFLTADGTKLGGLHHGTPPVIAIGGLNQVTGVRWQLWSLIHVPIELGNDRLKANRSSGSMALLRSALLRGHDGDNHYT

SEQ ID NO: 74657 - protein, 305 aa, Zea mays
  Coding DNA Sequence Number=SeqID_32878
QMEVRCQTSFCQNKDGFPKLLRACIVRLEIRSQPEYDGREFVEHGTEKCVVTVYIGSSPHHVEWSVTTAGHRFKDTCQVVARKALRALCQIYEEEVADTPLRFFPPFQRDRPVWMARMRALEGKQLLEDDPTVVYLTAYLLTLDAQYDFLARHHRQMIARAEDAEKLNRNDYKSRAASLLGPAHNQSARSPRIPSSSPPPKSRDSCAGNLDRDRRRGPLPCTPLLATWERPTVVALGVWEVLLACPLTRGLGFLTADGTKLGGLHHGTPPSVFDVFSARNRTLGVGSVDHRRRRRRLAWSRHWPE

SEQ ID NO: 74658 - protein, 352 aa, Zea mays
  Coding DNA Sequence Number=SeqID_32879
  Subcellular localization annotation: CTP_CleavageSite=41; ConfidenceScore=5.59e-01
MSSHSLHASHPSTFRAPGWGAPAVLPSCRRWRNATSRKLVPFSHRSASRIFIRQLGCIPSPAVTQDSDHQLDGGQKRAGLRPLPHPQPQGCSSSVLGRGVRRVGARLRGRQPAPSLGDRGGSAFAFRGAGSCRVSGSPAWAALALLPVPPPTEAVGRGFFADEIVGATRGLTSSSTALVACPRPSSGDVGEGLVAAASALRSSLLLFGHPERRSLSLLPERASASHLEFRRPAGPPIVGSKRSFIGQSLAGPSTGGTDAGVGLPRPRAGLMSSEDSWLRLWSGRSSRLIGPGSRRRPRRRWPRRDADRFLRGRDPPTVLPFEAGSDSAEGGVDAEGAAAPPLMSDPVGTVYL

SEQ ID NO: 74659 - protein, 108 aa, Zea mays
  Coding DNA Sequence Number=SeqID_32880
MLPSEAGSDSAEGGVDAEGAAAPPLMSDPAGTVYLYCVIAYLSKSYFSRKVMSEKVMSEDPAFEVVEKHERCSGRKTFSEENFDAEGVPPLLAPEGGSAFAEARLTLP

SEQ ID NO: 74660 - protein, 172 aa, Zea mays
  Coding DNA Sequence Number=SeqID_32881
  Homolog annotation: Hit_ID=Q98148; Match level="QueryCoverage=53%, HitCoverage=7%, E-value=7e-07, Identity=28%"; Hit description=ORF 73
MWKDRVEHAKDVWALYLGQTAHLTVRCMNALYRLQAVRGEAMSQLMGLVEATKITLDNREDLVVDLSTELVEKALQVEQMATQIQELEEQVGARENTIEVLEDQLLNTQQQLEEANQHLDMHHQEIQDMEAEGADEDVDIEGGEEPEPASSLDTAGSRRPPSPESSVASFAH

SEQ ID NO: 74661 - protein, 214 aa, Zea mays
  Coding DNA Sequence Number=SeqID_32882
MTSHGSSKGGNAHSHTDGLAREGFPRILWEVLQGAGYTTPPHYAVQLFEEHRVPRCRVRMTLEPHPLQLGWRSLDSESFGYQAEDTIEAIALHGLTTFCGFHPLELSTHPIGQTAHLTVRCMNALYRLQAELEDLVWTRENTIEVLEDQLLNTQQQLEEANQHLDMHHQEIQDMEANEDVDIEGGEEPEPASSLDTADSGRPPSPESSVASFAH

SEQ ID NO: 74662 - protein, 271 aa, Zea mays
  Coding DNA Sequence Number=SeqID_32883
  Gene Ontology: Mol. function=potassium ion transporter activity; Cellular component=integral to membrane; Biological process =potassium ion transport
  Homolog annotation: Hit_ID=Q67VS5; Match level="QueryCoverage=69%, HitCoverage=25%, E-value=8e-85, Identity=75%"; Hit description =Potassium transporter 10
  Pfam annotation: Domain name=K_trans; Domain location=1-268; Score= -221.7; E_value=4.8e-13; Accession=PF02705.7; Description=K+ potassium transporter
MAIAILAAVVGSQAVITGTFSMIKQCASLGCFPRVKIIHTSAKAHGQIYIPEINWIMMILCLAVTIGFRNTKHLGNASGTVLLSRTHQVHEALYFLAALIKFREGAWVPIVLALIFILIMCVWHYGTIKKYEFDVQSKVSINWLLGLSPNLGIVRVRGIGLIHTELETGIPAIFSHFVTNLPAFHQVVRSSMIIRRIQVDLTLHVRPRCAERHCSTDGIVRCHQARLDLDGMDSTCVEGEEARVWLAGSGDIFLFNFSYGLCYLSCQIIQL

SEQ ID NO: 74663 - protein, 409 aa, Zea mays
  Coding DNA Sequence Number=SeqID_32884
  Gene Ontology: Mol. function=potassium ion transporter activity; Cellular component=integral to membrane; Biological process =potassium ion transport
  Homolog annotation: Hit_ID=Q67VS5; Match level="QueryCoverage=58%, HitCoverage=32%, E-value=1e-100, Identity=68%"; Hit description =Potassium transporter 10
  Pfam annotation: Domain name=K_trans; Domain location=12-405; Score =18.9; E_value=1.1e-21; Accession=PF02705.7; Description=K+ potassium transporter
MSQSVTTLDPCRLADTTQNKMQKDHFLRCRMERQLANLESAYCKFSNIICKEMFFREMVQILQVYIEKNVLLFQGFEHSNKDSTGIGCGSSASCLRGSWFWSLVEPTASCLLLQGDPFTLSGSEAMFADLGHFNQLSIQCTISEKIRWPIMTIAILAAVVGSQAVITGTFSMIKQCASLGCFPRVKIIHTSAKVHGQIYIPEINWIMMILCLAVTIGFRNTEHLGNASGLAIITVMLFTTCLMSLVIVLCWHKSIFLAIGFILFFGTIEALYFLAALIKFREGAWVPIVLALIFILIMCIWHYGTIKKYEFDVQSKVSINWLLGLSLNLGIVRVRGIGLIHTELETGIPGVIGSCHIRKNDPGCMSADRRGMNGWQRHWCGDITGESKMGAKCGINIGDKVRTSTTRGW

SEQ ID NO: 74664 - protein, 345 aa, Zea mays
  Coding DNA Sequence Number=SeqID_32885
  Homolog annotation: Hit_ID=Q10R48; Match level="QueryCoverage=28%, HitCoverage=23%, E-value=7e-31, Identity=68%"; Hit description=Kelch repeat-containing F-box family protein, putative, expressed
  Subcellular localization annotation: CTP_CleavageSite=22; ConfidenceScore=5.53e-01
VHTTAVVHGSASAPFHRQRVLRALSISQQRHSLPHFPTVVPPSPPTGDRAIPPFPTATTRPAWRIPEIALSPPDPAWRTPETTPFTLPHRGHRIPHTRAPAWRIHSTNARNGAACVHVPTGDQAIHHRSAPTLIILASPRRYSRQVGLQGGPPLTAPRSPRPPLGPRRDMRLPSPTRCSLLRTSQSRRSTPPPCCDPLPCVPMMLEGKSYLVPRSLLSSCEIETQWAYFAHEVHGGKRLAPEDCEVEDLDKADVGGKRSKPPSPQPHTPDISEGRGSSRHASGCGEQQGTGSNPMNSIDRDEKILAGSCAVAPVVKVESEPIQTSVDRSLASVDHVAYRGCGAEL

SEQ ID NO: 74665 - protein, 368 aa, Zea mays
  Coding DNA Sequence Number=SeqID_32886
  Homolog annotation: Hit_ID=Q10R48; Match level="QueryCoverage=26%, HitCoverage=23%, E-value=8e-31, Identity=68%"; Hit description=Kelch repeat-containing F-box family protein, putative, expressed
  Subcellular localization annotation: CTP_CleavageSite=45; ConfidenceScore=5.38e-01
MTSSGGCGSLAHWTCPVHTGQSGVHTTAVVHGSASAPFHRQRVLRALSISQQRHSLPHFPTVVPPSPPTGDRAIPPFPTATTRPAWRIPEIALSPPDPAWRTPETTPFTLPHRGHRIPHTRAPAWRIHSTNARNGAACVHVPTGDQAIHHRSAPTLIILASPRRYSRQVGLQGGPPLTAPRSPRPPLGPRRDMRLPSPTRCSLLRTSQSRRSTPPPCCDPLPCVPMMLEGKSYLVPRSLLSSCEIETQWAYFAHEVHGGKRLAPEDCEVEDLDKADVGGKRSKPPSPQPHTPDISEGRGSSRHASGCGEQQGTGSNPMNSIDRDEKILAGSCAVAPVVKVESEPIQTSVDRSLASVDHVAYRGCGAEL

SEQ ID NO: 74666 - protein, 121 aa, Zea mays
  Coding DNA Sequence Number=SeqID_32887
  Homolog annotation: Hit_ID=Q2RBN7; Match level="QueryCoverage=63%, HitCoverage=4%, E-value=1e-26, Identity=75%"; Hit description =Clathrin heavy chain, putative, expressed
MSLRDPAQMGRREAEREGGRKVAEDGRERGGNPADFVFVPRPGRGKKECFVSCLFICYDLIRPDVALELAWMNNMVDFAFPYLLQFIREYTSKVDDLVKDKIESQKEERAKEKEEKDLVAQ

SEQ ID NO: 74667 - protein, 474 aa, Zea mays
  Coding DNA Sequence Number=SeqID_32888
  Homolog annotation: Hit_ID=Q2RBN7; Match level="QueryCoverage=44%, HitCoverage=12%, E-value=3e-93, Identity=82%"; Hit description =Clathrin heavy chain, putative, expressed
  Pfam annotation: Domain name=Clathrin; Domain location=204-363; Score= 59.4; E_value=1.1e-14; Accession=PF00637.10; Description=Region in Clathrin and VPS
MASTKAPGPGEKHHSIDAQLRQLVPGKVFEDDKLIESRSATRSRPTTRAKKTRRSWASSAPSSRGWPPADAILVASSILHMLNLANLAEEVQITHCRRNDSKLKKRWLRRRGLSHHRVRHRGDAQAPRVRGRQVPQGGVRGAQEPDHRPRLHRASHTVRPPLAPAEKRQDPELSNPAECQDITDDDKQELDEAMQRVIQEMEVILRMRPIKGILQMATINKQAGQLHLVKPYMVAVQSNNVSAVNEALNELYVEDEDYERLRESVDMHDNFDQIGLAQKLEKHELLEMRRIAAYIYKKAGRWKQSIALSKKDNMYKDCMETCSQSGDRELSEDLLVYFIEQGKKECFASCLFICYDLIRPDVALELAWMNNMVDFAFPYLLQFIREYTSKVDDLVKDKIESQKEERAKEKEEKDLVAQQNMYAQLLPLALPAPPMPSMGGPPPPMGGMGMPPMAGMGMLPMGPGPMPAFGMGGY

SEQ ID NO: 74668 - protein, 127 aa, Zea mays
  Coding DNA Sequence Number=SeqID_32889
MTGIAYDPLRTHLERRAAEQLDIFKEMVSLRVFERIQVHSVFFRCSKLSMIRKYLLFLCTKSKLQFEMMMCLCEVNADNNTIGCLRRPRSKWSSTSSTEILGASTTPVNIDKWIKQQAIWIKSRGQS

SEQ ID NO: 74669 - protein, 199 aa, Zea mays
  Coding DNA Sequence Number=SeqID_32890
MAHRTVRCTPDMSGAPTTSSVPLESDRWSSDLWATLDVRWRTGQLLFIVRCASMGKPDVCARCGAFIASAGFLVNSYTDYKFILFFRCSKLSMIRKYLLFLCTKSKLQFEMMMCLCEVNADNNTIGCNMGMSALQKAVAAVVHDVNAEGWDRGLEGLRRPRSKWSSTSSTEILGASTAPVNIDKWIKQQAIWIKSRGQS

SEQ ID NO: 74670 - protein, 147 aa, Zea mays
  Coding DNA Sequence Number=SeqID_32891
  Subcellular localization annotation: CTP_CleavageSite=52; ConfidenceScore=5.44e-01
MESRPAAEHRQTPGSTRAPAARRARKPAPSRPGAPASATPTAALRALLPDPRQALATQPPARIPTAAPCPDPTRPRAASAQPDAAATPTLPLPALDAPGAPPAEYREARHRPASRPAPSPSPTPWLPRVYAAAPCSSAPTSAQFGLV

SEQ ID NO: 74671 - protein, 314 aa, Zea mays
  Coding DNA Sequence Number=SeqID_32892
  Homolog annotation: Hit_ID=Q5JKZ9; Match level="QueryCoverage=21%, HitCoverage=7%, E-value=8e-21, Identity=63%"; Hit description =Putative beta-galactosidase
  Subcellular localization annotation: CTP_CleavageSite=52; ConfidenceScore=5.31e-01
MESRPAAEHRQDPGSTRAPAARRARKPAPSRPGAPASATPTAALRALLLDPRQALATQRAPNPTQPRHRPCPSLHSTRLEPRQPSTMKRATDRHPDPHRAPARHPGFLASTQQRPAHPQELAAKLVVKEEEAKMTVWENMQKGEAEAAIQKLVIKLEKKRPYSLERIFNTLRSGSRKTQVAKDGAAVETVVQHNLYALLLNCLIEGKSYSHKMQDLCNLVNDYPPMDIFAYECILSQESRLPTEFEITNCCHPCVSDKENVLVVQVMRWSGGSYLEDQDHWRLSVYFFKATLDENSSLADIEVALIPILARSCE

SEQ ID NO: 74672 - protein, 66 aa, Zea mays
  Coding DNA Sequence Number=SeqID_32893
  Subcellular localization annotation: CTP_CleavageSite=48; ConfidenceScore=5.32e-01
MAPAPRALFTSPLAAASTGSRKVSLLRDKKTIRSCGNRWKIRLDASVMLSKGNESLLIPDNAQMTV

SEQ ID NO: 74673 - protein, 83 aa, Zea mays
  Coding DNA Sequence Number=SeqID_32894
MPLHPNDRCPCSFSSATRPRERGEVNGAGASCSVYLASGSRVYKIEIRLDASVMLSKGNESLLIPDNAQSVAHAEGEGAVFNI

SEQ ID NO: 74674 - protein, 150 aa, Zea mays
  Coding DNA Sequence Number=SeqID_32895
  Subcellular localization annotation: CTP_CleavageSite=15; ConfidenceScore=5.04e-01
MAPAPHALFTSPLAAASTRSRWKIRLDASVMLSKGNESLLIPDNAQVISSSVVDRCPHRSETQSVAHAEGEDDCLILGTIDSYGHLIVSRLDIMADDSQLKMKIGLFYGRSVKDGFGEGNVLLASSFVNDFVVVLVDGLCDVDLSLCNTN

SEQ ID NO: 74675 - protein, 84 aa, Zea mays
  Coding DNA Sequence Number=SeqID_32896
MKKMVNTRKTGGIDLPANSHNRRIIRQQQIEMNPQNPPPAGTDPVVAAQMQVSSGLDQNYNMKKHKEHEGWRRAEAMCRRASAC

SEQ ID NO: 74676 - protein, 68 aa, Zea mays
  Coding DNA Sequence Number=SeqID_32897
MKSICDLDKTPGPGRQVKYDNLELLLYSVNCLVMRFLLYLVNCVVLRTHCSSFCIKCSSDEELLLSLS

SEQ ID NO: 74677 - protein, 205 aa, Zea mays
  Coding DNA Sequence Number=SeqID_32898
  Subcellular localization annotation: CTP_CleavageSite=28; ConfidenceScore=5.29e-01
MAGMVSGSMHRSGRQLLSFAKNDSKKVVAAASCVLQLSIVLGMGLTVVLGLAMSFGTGIFTSDVHMIRVIHRGIPFSHRFQTLAQIRLQKQSKQLAEWNTTSFTSELTTTKHKEDNVDCPVTRLVGTPRWKFFTSKIMKSICDLDKTPRPGRQVKYDNLELLLYSVNCLVMRFLLYLVNCVVLRTHCSSFCIKCSSDEELLLSLS

SEQ ID NO: 74678 - protein, 168 aa, Zea mays
  Coding DNA Sequence Number=SeqID_32899
  Homolog annotation: Hit_ID=Q54ZN7; Match level="QueryCoverage=45%, HitCoverage=10%, E-value=6e-11, Identity=41%"; Hit description=E set domain-containing protein
MAAAVVSTGRKRKGGAAILTIGGALTFFHGTGNRRCLEVSITLETSETINPRALHPSRRGSPTVTKLHSEHHEVVSDLHHTSFLFSIPIDGPMSFSTSKVTVQWSLRFEFFTTPEGTDPARYEHPLLVEKREKGEWVLPVTVYAPPLHRRATRGRNDRSGLPGNILDS

SEQ ID NO: 74679 - protein, 76 aa, Zea mays
  Coding DNA Sequence Number=SeqID_32900
MAAAVVSTGRKRKGGAASLTVRYREGESAHSLRSRTPGSYAGGGVDFGGSRTDRPVLHIDSTQQCTHHIVTLHIES

SEQ ID NO: 74680 - protein, 323 aa, Zea mays
  Coding DNA Sequence Number=SeqID_32901
  Homolog annotation: Hit_ID=Q54ZN7; Match level="QueryCoverage=26%, HitCoverage=12%, E-value=2e-10, Identity=39%"; Hit description=E set domain-containing protein
  Pfam annotation: Domain name=Rgp1; Domain location=12-269; Score= -129.2; E_value=0.00077; Accession=PF08737.1; Description=Rgp1
MNNSQHVDCLRGKISSANTKFCPRKPIPPPTSGPARREVDGDTRVAAGAEGDVHGTRPRRGTPRSRKPKHQATVDKDQPECTAPHRYPSTVTERNTRGIQSSTSAAATASNGSGSCINGQEKKRWSSDSHSAIPGGRKCPFFKEPTSRKLRRGWRGFRRELNRSAELVTSVLSLQIGGALTFFHGTGNRRCLEVSITLETSETINPRALHPSRRGSPTVTKLHSEHHEVVSDLHHTSFLFSIPIDGPMSFSTSKVTVQWSLRFEFFTTPEGTDPARYEHPLLVEKREKGEWVLPVTVYAPPLHRRATRGRNDRSGLPGNILDS

SEQ ID NO: 74681 - protein, 116 aa, Zea mays
  Coding DNA Sequence Number=SeqID_32902
MNNSQHVDCLRGKISSANTKFCPRKPIPPPTSGPARREVDGDTRVAAGAEGDVHGTSPRRGTPRSRKPKHQATVDKDQPECTAPHRYPSTVTERNTVRNRAAPCNAVRNLAAPCHL

SEQ ID NO: 74682 - protein, 162 aa, Zea mays
  Coding DNA Sequence Number=SeqID_32903
  Gene Ontology: Mol. function=transferase activity, transferring phosphorus-containing groups; Cellular component=integral to membrane; Biological process=two-component signal transduction system (phosphorelay)
  Homolog annotation: Hit_ID=O82423; Match level="QueryCoverage=83%, HitCoverage=37%, E-value=4e-74, Identity=100%"; Hit description =Pyruvate dehydrogenase kinase isoform 1
  Pfam annotation: Domain name=HATPase_c; Domain location=27-154; Score= 78.2; E_value=2.6e-20; Accession=PF02518.16; Description=Histidine kinase-, DNA gyrase B-, and HSP90-like ATPase
MSWLQCMMDRGLVGSGTLKDLLSNRKYVTPHLHLMIFELVKNSLRAVQERYMDSDKLAPPVRIIVADGAEDVTIKISDEGGGIPRSGLSRIFTYLYSTAENPPDLDGHNEGVTMAGYGYGIPISRLYARYFGGDLQIISMEGYGTDAYLHLSRLGDSEEPLP

SEQ ID NO: 74683 - protein, 620 aa, Zea mays
  Coding DNA Sequence Number=SeqID_32904
  Gene Ontology: Mol. function=transferase activity, transferring phosphorus-containing groups; Cellular component=integral to membrane; Biological process=two-component signal transduction system (phosphorelay)
  Homolog annotation: Hit_ID=O82423; Match level="QueryCoverage=54%, HitCoverage=76%, E-value=1e-109, Identity=89%"; Hit description =Pyruvate dehydrogenase kinase isoform 1
MALEPVARAVAEEVARWGAMRQTGVSLRYMMEFGVRPTERTLLLAAQFLHKELPIRIARRALDLDSLPFGLSTKPAILKVVFVSCLLPLPHLSLGADCSWLWARWSATLLQEQVFSARYSDDPHSRSDGLIFGLFASAKVRDWYVESFRDIRSFPEVKNQEDELAFTQMIKMIKVRHTNVVPAVALGVQQLKKDLGGPKAFPPGIHEIHQFLDRFYMSRIGIRMLIGQHVALHDPDPEPGVIGLINTKMSPMTVARIASEDARAICMREYGSSPNVDIYGDPGFTFPYVTPHLHLMIFELVKNSLRAVQERYMDSDKLAPPVRIIVADGAEDVTIKIENPWVIRTSYCSEEEGFPHLLRSCALRLGIRKKPKYVWKEYRENGMEKCSMAVYLGESRNYPNHPPFQITFIGHRFPDTCQTVARKALKQLCQNYSRETFETPLRYFPPSNKNTPTWKKRLQALSEGDPIEDDPTIVYMVGYLHTLDNHYDELSSHYTHLNSRVESLEQQVKELTQEKVSLQESLSIAEGEEANTREAYRTLKIDFDKKLKALAPKRKIQKKTTNQGCQTEKKKKKAPLALPPPRIDDWSDEEDVSLASLDLLKAFGDTLDKELASTSKNALV

SEQ ID NO: 74684 - protein, 158 aa, Zea mays
  Coding DNA Sequence Number=SeqID_32905
MSDDLVVPVHFEVGQELCFCLLDHLLLVLFELELFVSRQEPSLEPVIEGRFDKSIFVVPSGVARKYVDAFSERQTLNKNRGGALWSGADVLGMELSDILLVQPPNASSRALAAAAKMVGLALGKPYSRRAAATRAAACKKCARLQAASEQFRYLEELT

SEQ ID NO: 74685 - protein, 248 aa, Zea mays
  Coding DNA Sequence Number=SeqID_32906
  Homolog annotation: Hit_ID=Q96G04; Match level="QueryCoverage=66%, HitCoverage=53%, E-value=3e-09, Identity=26%"; Hit description =Protein FAM86A
MESRFDRSICVVPSGVAKKYVDAFLERQTLNKNRGGALWSGVNGPRPGAGREAGGGSITPHVQNFLLETCTGSNVERCRDSTYTTIIFKKIISEVELSSNVVIDELYEEFAQRMLSEAIYSELKPSLHMQMIIFSQSECSIWPSSLFLSEFVLSYPKIFSTKCCFELGSGVGLVGICLNHVGASKVILTDGDPCTLRNMKENMELNNLCIEQEDSRALKESKNKVECKYLSWEEVSESDLWGYQPDVV

SEQ ID NO: 74686 - protein, 52 aa, Zea mays
  Coding DNA Sequence Number=SeqID_32907
MEFKSCSLLWGESEFRRENPSSTARRQVQLVYGQRGSQLKLSSAEVEKAQLS

SEQ ID NO: 74687 - protein, 75 aa, Zea mays
  Coding DNA Sequence Number=SeqID_32908
MVRERRTQTNTMSKNTRDTRFIPRLLVRGQRGQRPAELPLRTSSTGLDQRVQLVYGQRGSQLKLSSAEVEKAQLS

SEQ ID NO: 74688 - protein, 120 aa, Zea mays
  Coding DNA Sequence Number=SeqID_32909
  Homolog annotation: Hit_ID=Q1SA40; Match level="QueryCoverage=42%, HitCoverage=24%, E-value=3e-08, Identity=63%"; Hit description =TAFII55 protein conserved region
MEEQFILRVPPSVAERIERLMNESTASSSNPHEASLDLSFSGQVQWGFQALGTREAGNRLYVGASKALATHEVVCGGFQGACSRLCGDRFMCGARLLVYYSIGVGIMDLAWISLLENLRD

SEQ ID NO: 74689 - protein, 135 aa, Zea mays
  Coding DNA Sequence Number=SeqID_32910
  Gene Ontology: Mol. function=transcription factor activity; Cellular component=nucleus; Biological process=regulation of transcription
  Homolog annotation: Hit_ID=Q1SA40; Match level="QueryCoverage=88%, HitCoverage=61%, E-value=2e-31, Identity=59%"; Hit description =TAFII55 protein conserved region
  Pfam annotation: Domain name=TAFII55_N; Domain location=1-130; Score =71.3; E_value=3.2e-18; Accession=PF04658.4; Description=TAFII55 protein conserved region
MEEQFILRVPPSVAERIERLMNESAASSSNPDEASLDLSFSEDGRNGTFMIGNESFPASLLDLPAVVESYKTYDDSVLIKTADVGQNASATGGEEGGDRKKPPVARAAKQPGVQEPAANGEEADPERSDSDDSDN

SEQ ID NO: 74690 - protein, 435 aa, Zea mays
  Coding DNA Sequence Number=SeqID_32911
  Homolog annotation: Hit_ID=Q2QYN1; Match level="QueryCoverage=24%, HitCoverage=40%, E-value=2e-16, Identity=45%"; Hit description=Dual specificity phosphatase, catalytic domain containing protein, expressed
MGAKISLEASTQVTELRAQKIWGGTAVTRKCLEAPSKRIWTATGSPSYLEMAMGKYPPANLSRPFVEHHPRARCTVRLLDRPPLPTSLAAATDTASASHRFTLLASPARNSPKENIATDAPVRPVMQPASLSAMRAVLIPTRSSIHGNSSNTIIPIPAPSSLHLLLHAPSPRPACVPCRPRRGHDLGSVDDLPQLPHHGHRPGELHGALIVRSRTKVRCAHRQIQDQLTKVSCNVFKASEGRLCVISVVNGVEHGFGTAMEEQFILRVPPSVAERIERLMNESAASSSNPHEASLDLSFSACGKKPLRKPRFMNLLLGNEVQWGFQALGTREAGNRLYVGASKALATHEVIQIDVLKATLTSAPYIGPTRLPVLCAARERLGYGQGMSYAVISESLIVGSQPQKPEDIDHLKNEERVAYILCLQQDKDIYYLLRL

SEQ ID NO: 74691 - protein, 324 aa, Zea mays
  Coding DNA Sequence Number=SeqID_32912
MSAPNLGPGSDDERTMQFPRTVPVVGKLREVVDAAKVVAATGATRHARWAWGWSMEQEVEGGGCGNGDDGVGRVAMDRGACGDEDGSHRRQARRLHHRPHGGIGGGILVRRVTGGRCEEGEAMRGGRHRGWPRRTEAVSVAAAREAGRGGRSSKRTPHQATTHPLSEPRRPTPGAVWSNHAVSSRHSSARSYPQFLRPDSSADAHAADKSAAVALSGSLAPLPLCTLLTRTQASSVGRRGELLGGAVDRRCLCFGFSVPASEGIGWHKIRFVLCNALVVCQPIGVGCISTSNLSVPCAGHWFICLQQQQQQQQQQSLFVPSTLG

SEQ ID NO: 74692 - protein, 288 aa, Zea mays
  Coding DNA Sequence Number=SeqID_32913
  Gene Ontology: Mol. function=RNA-directed DNA polymerase activity; Biological process=RNA-dependent DNA replication
  Homolog annotation: Hit_ID=UPI00004C1733; Match level="QueryCoverage =99%, HitCoverage=14%, E-value=8e-27, Identity=76%"; Hit description =UPI00004C1733 related cluster
MPGIPREVAEHSLDIRANSRPVRQHLCQFNEEKRGVIGEEIHKLLVAEFIKEVFHHEWLANPVLVRKKGGKWRIVRIKVITILGYKLERARTQSAVEGKDGLAFVEAFLAQKIYLREVGLLPFFRVYGFRIDEKAGRGLTAGKWWSSAAGVVAGEVRAGIGGRGVVFQARCGVAKLMSLAICSLNNQRGGRDGEGLTGVEEDGGASAIELERGGDEWLRPVRGKEGMYCYTTMLFGLRNARGTYQRCMNHVFSNHIGSTVEAYVDDIAVKTRKANYLITDLETAFTCL

SEQ ID NO: 74693 - protein, 93 aa, Zea mays
  Coding DNA Sequence Number=SeqID_32914
MPKNRVTGGEPPSSPPGAGFFPAADRFASPQEAGTIDPEPVAPEEGQEPDLSEINLLCQESFNEGKSILPLMHNYLFFLPLPKPGLRGGIFAL

SEQ ID NO: 74694 - protein, 284 aa, Zea mays
  Coding DNA Sequence Number=SeqID_32915
VNYKTGKSHRVIDSGCTQHMTEDVLLLKDTLKPFTMGLPCPIGDEADGGQRAASPLAAPTPCPCCLGGRPSADIPWGQCARGPMSASPRGGQSMEASRTVASTTASIDMSRLLPQQRVSHDECSACGSMDVPPAQWNGQARRLRDGLVAARQRSGQGSLNAEAAHRLPVEWTGLIKCRGGTSPASGMDRRHALSATNAEAARPRGLTSGSARWLTSREVGHVAASGLRLGGERKQSQDPAVRGSDPHTEGSGPHPGGPVFSCGGPGPYPEAWVEPTPKEYDLWA

SEQ ID NO: 74695 - protein, 405 aa, Zea mays
  Coding DNA Sequence Number=SeqID_32916
MPVLSRRKAFSRHSMGSVRAGAHVGLASRRSVDGGIADGCFNNGKYGCAACQWNGQARRLRDGLVAARQRSGQGSLNAEAAHRLPVEWTGLIKCRGGTSPASGMDRRHALSATNAEAARPRGLTSGSARWLTSREVGHVAASGLRLGGERKQSQDPAVRGSDPHTEGGPAPSHGDPDSLMMLWSILPLWPRGGPGAVHVGTDSGPRAHLKGGYEPTGGAKALLAIGPRVIDWAVVFGGDEEARYRGRRFAPRMASEGALNLMRSLLGWGALSLDGRIRAGATPLGDLAAGEYVLFVSYLSLKGKYSVRCAKLISGEKAALGKRSAVYDYNSPDCRWCTGLSGEPTVASAMVGRAICGRHMARTNGRQGHRTVRCAPDSVKCANGPEAATVNYACFGRQSRTGQLQ

SEQ ID NO: 74696 - protein, 61 aa, Zea mays
  Coding DNA Sequence Number=SeqID_32917
MGKPVPSLLMLLLGRGLAFQGCGRQILWCGLGCWIRGYLLSSSLLRHEDVLSVSEDLITLC

SEQ ID NO: 74697 - protein, 103 aa, Zea mays
  Coding DNA Sequence Number=SeqID_32918
MGKPVPSLLMLLLGRGRVPLDSPTRWQDGRPSHSSNHFLQRTCKNYATSKAEYTNTQLDLPGLAFQSSGRQVLWCRLGCWIWGYLLSSSLLRHEDVLSVSKGF

SEQ ID NO: 74698 - protein, 139 aa, Zea mays
  Coding DNA Sequence Number=SeqID_32919
MGVGVHTRHEFLPSEPFRRFLQRTCPIHYFRSKTHVWGGFAQFRCRTSPIPKRVLGCIQARVFATGTISSFFAMNMPNPLLYDEDINTNTSTSTPAAPSLAQAPSSPVQAPPLPPGPVTRARARELNYIMLLKNEGPEE

SEQ ID NO: 74699 - protein, 148 aa, Zea mays
  Coding DNA Sequence Number=SeqID_32920
MEVENLLENDVGCPTTTTKMVWRLERQVHRLLITTIWGGGRRCAIRLQQPQGCCALAIVTPAPVVAALAVPRTTLNLQAIENKQEQDKKQTHFFVVARYPFRKRVVSRNFVVARYPFRKRVSGCIQARVFATGTISSFFATNMPNPVL

SEQ ID NO: 74700 - protein, 143 aa, Zea mays
  Coding DNA Sequence Number=SeqID_32921
  Gene Ontology: Mol. function=cysteine-type peptidase activity; Biological process=proteolysis
MARMSDIDWCQLVYTDLCDAAARWHKRNKTNITATIYGCSLIVLIYYLDHLHHPASPVNKYDVKILLLLTVLYGFIQFRSRSETCYVIAPERHVSAVFNIYVPRIKNLIGNKLQCLPSQQRPMFQSLFDAHDKEVDKYCDSLS

SEQ ID NO: 74701 - protein, 332 aa, Zea mays
  Coding DNA Sequence Number=SeqID_32922
  Gene Ontology: Mol. function=cysteine-type peptidase activity; Biological process=proteolysis
  Homolog annotation: Hit_ID=Q53MK8; Match level="QueryCoverage=58%, HitCoverage=19%, E-value=1e-21, Identity=33%"; Hit description=Ulp1 protease family, C-terminal catalytic domain, putative
MSDRQRDAVARLGFSRIFDLRTDALESRSLIRWLMDKLDPHDMTIRPGAGKELKITKETVHLILGLPCAGGGMEFTDWYGEVDAAAKLRRDLNVGKEEFDVVKLQDKIVLGNDDELSNRCFFLILFNRLLFPSASWGITNNEVLMTSNMAWMSNIDWCQLVYMDLCEAAARWHKRNKTNITATIYGCSLIVLIYYLDHLHHPASPVNKYDVKILLLQRPMFQSLFDAHDKEVDKYCDSLQLSHQMIVSKQIELSETFGEMIDEVLRAATQRDSQPEVSTPTAPTPDKQQHDQESHVPTDHIKVSDDAPTTDKPAAPKLTPDIIVEDKNLVTT

SEQ ID NO: 74702 - protein, 513 aa, Zea mays
  Coding DNA Sequence Number=SeqID_32923
  Homolog annotation: Hit_ID=Q6QP54; Match level="QueryCoverage=18%, HitCoverage=45%, E-value=9e-11, Identity=55%"; Hit description =Putative kinase
MGHGRPLGLPASSSPETPCSAPSEGIGPFEGLDHASPEPSLGQGSRPRRIYVSPEAPLQRRTYFRLAQGPVFAKKQPWPNHHSRSDRSHFAAPLTGLTEGQRRLRRSDCCATRQSEANRQPGPTSGTIGNSAPPDPGLGLGLSPGRRRTPLRPTQGSDSGSAPEDGELRSARPRARTRARPRKTANSAPPDPGLGLGLGPGRRRTPLRPTQGSDSGSAPEDGELRSARPKARTRAQPRKTTNSAPPDQGLGLGLGPGRRRTPLRPTQGSDSGSAPEDGELHSARPQGSDSGSAPEDDELRFARPQGSDSALASADGLRLARPRGSDSTSASEDRLDLDLGGTSTSPNLGHGPTTSTGGAIITLSQANSGYGEQDRRPIWLAPPDKLQRSSDGHDTTRTGCQNLFGCHDGIYGIRKYTYDHSLRSEEFTVQPLQRVENRFDQPGSTARAPHHRGPTGSGRAMGQQRCPMDAGKVTRGRFALSLSRPHRGRRHDDDDLRCACAWVRIVRRLSVGH

SEQ ID NO: 74703 - protein, 76 aa, Zea mays
  Coding DNA Sequence Number=SeqID_32924
MSGSLFTNSNWFAFDEDKALNDGLVSSEASPSPNSEISALKEDDEHDEVILGKIIDEIKGSEPTLPVIKISTTLSS

SEQ ID NO: 74704 - protein, 683 aa, Zea mays
  Coding DNA Sequence Number=SeqID_32925
  Homolog annotation: Hit_ID=Q8R3Q2; Match level="QueryCoverage=35%, HitCoverage=31%, E-value=5e-20, Identity=25%"; Hit description=SAPS domain family member 2
  Pfam annotation: Domain name=SAPS; Domain location=185-436; Score =103.4; E_value=6.6e-28; Accession=PF04499.6; Description=SIT4 phosphatase-associated protein
YGIRKYTYDHSLRSEEFTVQPLQRVENRFDQPGSTARAPHHRGPTGSGRAMGQQRCPMDAGKVTRGRFALSLSRPHRGRRHDDDDLRCACAWVRIVRRLSVGHCLRDKVQVEQLLRYIVEEAPEDAEKKRIFRFPFIACEIFTCEVDVIMKTLVEDEDLMNLLFSFLKPDHPHGTLSAGYFAKVVICLMIRKTLPLVSYVQGHPEIVSQLVDLIGITSIMEDSPEVHANAAEILCAVTRYAPPALAAKISSPSFVGRLFQHAFEDSRPKSVLVHSLSVCISLLDPKRLVSASYQAFRSQLSHGTLVTASPETVNGMLDSLGDLLKLLDVSSAENVLPTTYGSLQPPLGKHRLKDRLIGHVLDDCKLVTRILEAEKNSALSSDLTKHTMSSEGRSPPRIGIVGHMTRIANRLLQLQNSDWIEWHASTLTKRNALENVYQWACGRPTSLQDRGRDSDDEDFRDRDYDVAALASNLSQAFKYGIYSSEDIDEAQASLERDDEDVYFDDESAEVVISSLRLGDDQESGSLFTNSNWFAFDEDKALNDGLVSSEASPSPNSEISALKEDDEHDEVILGEIIDEIKGSEPTLPVFNKDANKESGSTGLANGTVDKFEDDIRPPTPDVKESQPEFVEWKEEEAEPGDIAEKDTAVPDIEVENEKQLDSMDDVMLCDAKLGEEKKSDELGI

SEQ ID NO: 74705 - protein, 579 aa, Zea mays
  Coding DNA Sequence Number=SeqID_32926
  Homolog annotation: Hit_ID=Q8R3Q2; Match level="QueryCoverage=41%, HitCoverage=31%, E-value=4e-20, Identity=25%"; Hit description=SAPS domain family member 2
  Pfam annotation: Domain name=SAPS; Domain location=81-332; Score =103.4; E_value=6.6e-28; Accession=PF04499.6; Description=SIT4 phosphatase-associated protein
LRDKVQVEQLLRYIVEEAPEDAEKKRIFRFPFIACEIFTCEVDVIMKTLVEDEDLMNLLFSFLKPDHPHGTLSAGYFAKVVICLMIRKTLPLVSYVQGHPEIVSQLVDLIGITSIMEDSPEVHANAAEILCAVTRYAPPALAAKISSPSFVGRLFQHAFEDSRPKSVLVHSLSVCISLLDPKRLVSASYQAFRSQLSHGTLVTASPETVNGMLDSLGDLLKLLDVSSAENVLPTTYGSLQPPLGKHRLKDRLIGHVLDDCKLVTRILEAEKNSALSSDLTKHTMSSEGRSPPRIGIVGHMTRIANRLLQLQNSDWIEWHASTLTKRNALENVYQWACGRPTSLQDRGRDSDDEDFRDRDYDVAALASNLSQAFKYGIYSSEDIDEAQASLERDDEDVYFDDESAEVVISSLRLGDDQESGSLFTNSNWFAFDEDKALNDGLVSSEASPSPNSEISALKEDDEHDEVILGEIIDEIKGSEPTLPVFNKDANKESGSTGLANGTVDKFEDDIRPPTPDVKESQPEFVEWKEEEAEPGDIAEKDTAVPDIEVENEKQLDSMDDVMLCDAKLGEEKKSDELGI

SEQ ID NO: 74706 - protein, 301 aa, Zea mays
  Coding DNA Sequence Number=SeqID_32927
  Gene Ontology: Cellular component=intracellular; Biological process =signal transduction
  Homolog annotation: Hit_ID=Q10Q51; Match level="QueryCoverage=52%, HitCoverage=21%, E-value=8e-36, Identity=48%"; Hit description =RhoGAP domain containing protein, expressed
MTWQGAPDYPVCTGLSVSPYSPPSRRLSERKGELDELGLERAGDVEVLELAEDVDPGVERGEEEASWERSSSAEACGSKAMPETLSSSTPEWEKPNSSSGMMLRRSARIAVSRISAAAGGTSTIAATRKRRAVREGPRLKADLEEVVVAEADIMNLQQKVSDLRGQLNNQVQLSSTSLCESCNNKRSINADKLVEGEQNAALSPQIASVEAPPIVGSYSVPDMFWATNQMVQKMLYSKGEIAKDGQDGSLTSRWNFAQRPHSNSPVVSRVQGSDAYSSTKTEESGGAPSSALAKLTYVSFK

SEQ ID NO: 74707 - protein, 107 aa, Zea mays
  Coding DNA Sequence Number=SeqID_32928
  Subcellular localization annotation: CTP_CleavageSite=91; ConfidenceScore=5.51e-01
MPTSTFNHSALPLKRRPRVRLLGITSKMPTPTFNHSAPPLKRRPRVRLLGITSKMPTPTFNHSAMPLKRRPRVRSLGITSKMPTPTFKSLGAASKAPTTCSIARHYF

SEQ ID NO: 74708 - protein, 134 aa, Zea mays
  Coding DNA Sequence Number=SeqID_32929
  Subcellular localization annotation: CTP_CleavageSite=25; ConfidenceScore=5.56e-01
MPTPTFNRSALPLKRRSHVRLLSITSKMPTPTFNHSALPLKRRPRVRSLGITSKMPTPTFNHSALPLKRRSRVQSPGITSKTPTSTFNHSALPPKRRPRVRSLGITSKNADADLQSLGAASKAPTTCSIARHYF

SEQ ID NO: 74709 - protein, 142 aa, Zea mays
  Coding DNA Sequence Number=SeqID_32930
MGSSSLRAEWESRLVGKVHNLCRVFEKTDISAVLAVMSGQGSSSGYEIDDSGYDYGAASPLQPNRILAEYVDVYSPLLYTPNPPPQVVSIATPAQAKMKLWKETSRSSKITTSSRCGLAATPSRLPVKAAVIYVSFPHFDLL

SEQ ID NO: 74710 - protein, 117 aa, Zea mays
  Coding DNA Sequence Number=SeqID_32931
MDKICRFGPLRSPRKNDLTNYWALGPFVRPFTSLMDPGDIYPPHYETDIPAVLAVMSGQGSSIDLRYLIRDVWFTGGDEDDGFGYDYGDGCPCCNHCSGEDEFMEEDFQEFQEYDEF

SEQ ID NO: 74711 - protein, 161 aa, Zea mays
  Coding DNA Sequence Number=SeqID_32932
MGIEHLLGSLFLFNPTCSISSRSLLRGGDLEDGVSSGQGRGRLQMGRRGKEGGGDGQRGGKGGGRLQQLGRRRGGRLGLGGRGGLPSIGSRSVAPNSLSHLSSRPQRKKCQKIYYFPEECLLKLQTPMPQNMKEKRKRNLTSFQKIGYHNGATKACVGPNP

SEQ ID NO: 74712 - protein, 167 aa, Zea mays
  Coding DNA Sequence Number=SeqID_32933
MTHIHAFEALDRSLRDLLSLKSAQAAQFPFGAALYPLHDFLLPLDLPPRSKDREEEEHVELKRKRGSRRCSTPSLLAVFLGETLDEVLIEVCIDLKADEVLIEEAFLREIVDLLSFFPLGSGAQMGDHPSLFLSSPFAAALYPLHDFLLPLDLPHAARIEKRRSTLN

SEQ ID NO: 74713 - protein, 299 aa, Zea mays
  Coding DNA Sequence Number=SeqID_32934
MPALSSLEPASTTTASMAGAGGGETLECGGEALGFEARDLGFLGTGERYRSERVETGITRRFWPPEAEAAAKRLASGPASGGRASHGSRPCTGNQKPPDPRVRWKPAIREGLHPPPEPCVLCKPQLSPSTAACSSVASVRRPRPQSRLPFRGIRSADLGVLAVCLSVASQNLHSNEADSIADKAIGRMQEISDKIFSVVRETIRPRRGLTSFDATKLRVALEEIACMLEQDSLVLQEHLDIVNNFNIPVDSSYEPSTLSSPPPSDDDLTPHWDFAEHFQNFWGVEYDSDQMPSFSANDV

SEQ ID NO: 74714 - protein, 128 aa, Zea mays
  Coding DNA Sequence Number=SeqID_32935
  Gene Ontology: Mol. function=protein binding
  Homolog annotation: Hit_ID=Q10CH7; Match level="QueryCoverage=76%, HitCoverage=24%, E-value=2e-38, Identity=79%"; Hit description=Actin- related protein 7, putative, expressed
MEAVVVDAGSKLLKAGIAAPDQAPPLVMPSKMKLDVEDQEMADGAVVEEVVHPVVRGFVKDWDAMEDLLNYVLYRDIGWEIGDEGQILFTEPLFTPKVMHPPARIELVENLKSVADAGRKFMGAKRTT

SEQ ID NO: 74715 - protein, 218 aa, Zea mays
  Coding DNA Sequence Number=SeqID_32936
  Homolog annotation: Hit_ID=Q10CH7; Match level="QueryCoverage=30%, HitCoverage=16%, E-value=8e-22, Identity=75%"; Hit description=Actin- related protein 7, putative, expressed
MKLDVEDQEMADGAVVEEVVHPVVRGFVKDWDAMEDLLNYVLYRDIGWEIGDEGQILFTEPLFTPKAASHCSLAPTAAQRPSRWPLLSGAHSSPPAPTAAQPAAVALLSQQTILVSTDFVQPYCPTVNQSFKLYLLNQVDEAIGASAHLRGRNFPRRAAGGCVRRNEDLEEEDTNLANEGDEDEEYILDDLDVEDEIEGSNSEKDGDDQGVDAHGSSY

SEQ ID NO: 74716 - protein, 97 aa, Zea mays
  Coding DNA Sequence Number=SeqID_32937
ASDSQVNQSFKLYLLNQVDEAIGASAHLRGRNFPRRAAGGCVRRNEDLEEEDTNLANEGDEDEEYILDDLDVEDEIEGSNSEKDGDDQGVDAHGSSY

SEQ ID NO: 74717 - protein, 175 aa, Zea mays
  Coding DNA Sequence Number=SeqID_32938
  Gene Ontology: Mol. function=L-lactate dehydrogenase activity; Cellular component=cytosol; Biological process=tricarboxylic acid cycle intermediate metabolic process
  Homolog annotation: Hit_ID=Q6RY59; Match level="QueryCoverage=82%, HitCoverage=43%, E-value=3e-48, Identity=68%"; Hit description =Malate dehydrogenase
  Pfam annotation: Domain name=Ldh_1_N; Domain location=31-165; Score =101.7; E_value=2.2e-27; Accession=PF00056.13; Description =lactatemalate dehydrogenase, NAD binding do
MEMMYTDIAQALEANGIEANLNDYLTFFCLGQIGYAIVAMIARGLMLGPDQPVVLHMLDLPKSADALSGVRMELIDAALPLLRGVVATSDEAEAFRGVSFAVLIGGWPRKEGMQRKDLIAKNVPIYQSQASALQQHAAPNCKVLVVANPANMNALVLKGIGAFGARQEHHLPHAS

SEQ ID NO: 74718 - protein, 202 aa, Zea mays
  Coding DNA Sequence Number=SeqID_32939
  Gene Ontology: Mol. function=phospholipase D activity; Cellular component=membrane; Biological process=phosphatidylcholine metabolic process
  Homolog annotation: Hit_ID=Q43270; Match level="QueryCoverage=30%, HitCoverage=7%, E-value=7e-19, Identity=78%"; Hit description =Phospholipase D alpha 1
  Subcellular localization annotation: CTP_CleavageSite=86; ConfidenceScore=5.10e-01
DWLLDKFGVLRDGKKSYPTILAYYVTVEARDLSVMSGMFFVNTLVRFVTFRRIALSLQFSVPSLPLAGRRYRFSRTPSPQDHAEKVAALKVGMQVTTTISRGKVGDQVSVTVEIAHPRDDILSVGEVVEDTEDSESTAGNHMYTDIAQALEANGIEANPKDYLTFFCLGNREVKQEGEYEPEEHPEPDIDYIRAQEARRFMI

SEQ ID NO: 74719 - protein, 212 aa, Zea mays
  Coding DNA Sequence Number=SeqID_32940
  Homolog annotation: Hit_ID=Q6QP51; Match level="QueryCoverage=74%, HitCoverage=59%, E-value=3e-12, Identity=36%"; Hit description =Putative growth-regulating factor 1
MEQRPGLERLLETTHLELDGKLFVNTQGLRTAVFMGARGVPSLLVYQGEPDGTSRGRSEPKVGRGGDSSEVEVEAEPWGRARRRPSSEVEVEAEPWGRARRRPSSEVEVEAEPWCRARRRLYSEVEVEAEPWGRARRRPSSEAEAGAKPRGRARRSFLWRLRLDSAAVSLTLAGGTAVGAGQAALFSRQVSQWRGEVTAVTSALPTEECASG

SEQ ID NO: 74720 - protein, 127 aa, Zea mays
  Coding DNA Sequence Number=SeqID_32941
  Subcellular localization annotation: CTP_CleavageSite=73; ConfidenceScore=5.15e-01
MGLYSWLRYLTLRLVTPISTKLQRPDGRDSGQGSVHSRDTISSRPSPASGRNSRPRQIHASPEGLLKQRTHLRLARGPGRAGSAEKQPWPDRYANRPYCRSIQCKDRLTLYPEAEVTAVTSPLHWPT

SEQ ID NO: 74721 - protein, 139 aa, Zea mays
  Coding DNA Sequence Number=SeqID_32942
MGILVEPHRVNWTQSRRRYPREPATSPTFPVSKTVLAHSTEINQRPFEENPSRAEFPFVGGDSPGDFSVSKSAQRQSSADPIQRHSITPYILQSPSIGADSRSSSGFDGNPYYPAKCVICIRLYITIIRSPDIKAKAVD

SEQ ID NO: 74722 - protein, 433 aa, Zea mays
  Coding DNA Sequence Number=SeqID_32943
  Gene Ontology: Mol. function=cysteine-type peptidase activity; Biological process=proteolysis
  Homolog annotation: Hit_ID=Q53MK8; Match level="QueryCoverage=63%, HitCoverage=28%, E-value=1e-21, Identity=28%"; Hit description=Ulp1 protease family, C-terminal catalytic domain, putative
MGILVEPHRVNWAQSRRRYPREPATSPTFPVSKTVLAHSTEINQRPFEENPSRAEFPFVGGDSPGDFSVSKPAQRQSSAAPIQRHSITPYILQSPSIGADSRSSRKLNIRCIPLDVIVSSWIMSDRQRDAVARLGFSSIFDLRTDALESRSLIRWLMDKLDPNDMTIRPGAGKELKITKDTVHLILGLPCAGGGREFTDWYGEIDAAANLRRHLNVCKEEFDVVKLQDKIVLGNDDELSIRCFFLILFNRLLFPSASWGITNNEVLMTSNMARMADIDWCQLVYTDLCDAATRWHKRNKTNITATIYGCSLIVLFRSRSETCYVIAPERPASAVFNIYVPRIKNLIGHKLQCLPSQQRPMFQSLFDAHDKEVDKYCDSLQSSHQMIVSKHIELSETFGEMIDEVLRAATQRDSQPQGFSIYVYFFKTKQVLYL

SEQ ID NO: 74723 - protein, 163 aa, Zea mays
  Coding DNA Sequence Number=SeqID_32944
MNPCFLLETPNKHHEQEALTLASLIDDEKKLDDSVAVAGVRARTAIHSAAARVLTDIKADLRDAEGSGGRSRAPSLDREAAEASATGRDPDVKSPSPLWLSRIVKLWIQALLGFVNAPGRFLATYKDNFLATWNDWEIRMLVLSSPALHQVSLLFSAVLILLL

SEQ ID NO: 74724 - protein, 158 aa, Zea mays
  Coding DNA Sequence Number=SeqID_32945
MSRAFDDYYIEDCGVILASEVTQRRIDNTVAVAGVRARTAIHSAAARVLTDIKADLRDAEGSGGRSRAPSLDREAAEASATGRDPDVKSPSPLWLSRIVKLWIQALLGFVNAPGRFLATYKDNFLATWNDWEIRMLVLSSPALHQVSLLFSAVLILLL

SEQ ID NO: 74725 - protein, 219 aa, Zea mays
  Coding DNA Sequence Number=SeqID_32946
  Homolog annotation: Hit_ID=Q2R0M9; Match level="QueryCoverage=41%, HitCoverage=17%, E-value=5e-07, Identity=41%"; Hit description =Expressed protein
MLIALPQAPKCRADLGGYDDAWQRRRRCGLARREQHTEVWRELHVEAWQRWRCPYSRRFLATYKDNFLATWNDWEIRMLVLSSPALHQLAYLLAYSICFERTHRIQTFWAPFLLHLGGQDTITACLLHRRQRRALEAPPAQPPHLDGLMLHSSILETPSYDEWKNNFPDQETEEDQPIIGHSIIHGVTADQQFLTQHKDIRVSACRYAHHHTVHHNPPI

SEQ ID NO: 74726 - protein, 333 aa, Zea mays
  Coding DNA Sequence Number=SeqID_32947
MGGSQSRSSRISSSNSSEEWLALVIKYVFVRVTRWAISLPANWDSPQFCTAPHGLTLRFFRDDKTPLQTEASSGSSHRCSDCNLARVSSPKLAYLLTASSAPTASRPSGHHSSSTSAARTPSPPAFSAEDNDVPWKRHLLSLLAQTQTNEASISHSVSWLVRTPMTISRVCLYQVAPFVTMLHGQSADQHCHDAGARAPSFVSRQSRPTRPSRSSCLSCTTENLHSKSKAAVIRTWYGRLFRCQSPTVLPNSTACVLFNVLDKGRCFRPESLAKWTNLMAQHNLTNFCLLEKPTMLAKVLSVLGAQSTLGQLAVHPAQRRVVGAQDSLQGPRP

SEQ ID NO: 74727 - protein, 136 aa, Zea mays
  Coding DNA Sequence Number=SeqID_32948
MCETQAAAAPWTWSTPRSGLGDPARRGKGSLLGRFAGACHGAGNREGRSQEEVKGADMLPGSSCSCGKKQREEERPPWEGAHCRRRGAPCCSRGEEGRAAVAVGGLLREVEEDRGNRLEKREGEWRLKIFRGGIAK

SEQ ID NO: 74728 - protein, 98 aa, Zea mays
  Coding DNA Sequence Number=SeqID_32949
MDMEHAEVGPGRSCAQGERLPVGEVRRGVPWSREQGRSQPRGGQGRRHAPRELLLLRQEAEGGGAAAMGGSSLPEKRGALLQPWRGRESCCCRGRTPA

SEQ ID NO: 74729 - protein, 325 aa, Zea mays
  Coding DNA Sequence Number=SeqID_32950
  Homolog annotation: Hit_ID=UPI00005BED01; Match level="QueryCoverage =42%, HitCoverage=11%, E-value=9e-10, Identity=29%"; Hit description =PREDICTED: similar to golgi autoantigen, golgin subfamily a-like
  Subcellular localization annotation: CTP_CleavageSite=93; ConfidenceScore=5.60e-01
MPAGGSGSQQHTSVGNVAGDPSAATTASSASTRGPPSAAAKEVPVAFAPTVQDDAGAEVAPRTPRIRLSPSRQCLRIPKFQCTQLEKRTNAASCQFASERAELEQEREDFKEDIRKVSDREEEVTRKERSLVKKKEHLDQKEEAVTALHDKLKAYNTVLEKQRVKQAAAEVKLQKLQQELADKASDIARIEESLKAREASLAKRETDLTWQEEDIAFREEMWARRNKLLDELELEAEEKGKRLEGKERALKEQILGARLEAEGSRLCRSVIEYLLTCFRSHDPAVSLGPVIAGPMDDTEDSAQEGVQDAVDAVVGRFQRDPADDE

SEQ ID NO: 74730 - protein, 547 aa, Zea mays
  Coding DNA Sequence Number=SeqID_32951
  Homolog annotation: Hit_ID=UPI00005BED01; Match level="QueryCoverage =24%, HitCoverage=10%, E-value=9e-09, Identity=29%"; Hit description =PREDICTED: similar to golgi autoantigen, golgin subfamily a-like
MEAVLARLPTLDESGVAVHQIGGRDPHRGIHFPGAPVGGSQSADVTPKASPAVPNSSDKGKGPASSSSTPDAARRSEEVRRHRLRRADGSFVSDLPRDSDSPQKHQKIAGGTKEAEPRVQDEQRGTDHRHHRGSGSNSSRGGNSSSNGNGHPAYKGLLFFGIRGRSFPAGPPCPPVGLAPNSIHLLGTSLAIRQRLPQPHRRRREAHHRQRPKRFQLRLPPPCRMTLVLRWHRGPPGSAYHRRGNAFGFPSSRWGSRSGSVANSRCRPNGGDTIGCTVIGRRGGCVQLCPSANSGRSGDYSWVTAPVWRRTWSNADSSPSERAELEQEREDFKEDIRKVSDREEEVTRKERSLVKKKEHLDQKEEAVTALHDKLKAYNTVLEKQRVKQAAAEVKLQKLQQELADKASDIARIEESLKAREASLAKRETDLTWQEEDIAFREEMWARRNKLLDELELEAEEKGKRLEGKERALKEQILGARLEAEGSRLCRSVIEYLLTCFRSHDPAVSLGPVIAGPMDDTEDSAQEGVQDAVDAVVGRFQRDPADDE

SEQ ID NO: 74731 - protein, 190 aa, Zea mays
  Coding DNA Sequence Number=SeqID_32952
MNKDTGIQGAITNGTPVPPPRVRTTPLHGGRPAEQQKTDERRAVTCSSSGDDDDFCSGGPNNGSTDLRADAAARRPPPLPKLVRQGRAEGCRVGGGVPGRRSGRRFAFAVITAPKKGPGKGDTPKRILPCEGTGLRAPLLIRGSKTGRQRGLTVASDRVGPTPTTGQRFEGRPPEGLHGRLRLPGLRAHY

SEQ ID NO: 74732 - protein, 244 aa, Zea mays
  Coding DNA Sequence Number=SeqID_32953
MVTSGLMVGESEPGCGLCPSLSLKDFHHRGWGGDCSVPGSRTRVASEPLAALASATAAGRGSSAEVVVVAAAGAGVGAPFVGLLLLRKPTPIEWGYSSVDYLSRLTKHESPRVKVTSEVSVSRRRRSSSARSALLSETLLAQLKGPLGRSSMSRGQGSGWRPREMVGRGPRGDWPSRLLGSDSRRSPRQRLPERGDDVVLRSREPRTASPSEARSGLAGGVVDAEGVAASFQRQDPSLQGQSVL

SEQ ID NO: 74733 - protein, 68 aa, Zea mays
  Coding DNA Sequence Number=SeqID_32954
  Subcellular localization annotation: CTP_CleavageSite=19; ConfidenceScore=5.14e-01
MYPISYCTRSHPQSSTSTREFLVSPKSLSVAKNYTLPWPAFHRSAHGLFVPVLASLYAGDARQPTQLR

SEQ ID NO: 74734 - protein, 116 aa, Zea mays
  Coding DNA Sequence Number=SeqID_32955
  Subcellular localization annotation: CTP_CleavageSite=27; ConfidenceScore=5.21e-01
MYPSSYCTRSHPQSSTSTREFLVSPKSLSAAKNYTLPWPAFHRSAHGLFVPVLASLYAEREEEIEVTEEQVQPPLDTQAGNSFYFDICGSEPESPVNEGKPRCICHLPCYFKIFLT

SEQ ID NO: 74735 - protein, 116 aa, Zea mays
  Coding DNA Sequence Number=SeqID_32956
MFPSSYRTHLHPKSPTSELEFLVFPKSLSAVKNYTLPWPAFHRSAHVLFVPVLASLYAEREEEIEVTEEQVQPPLDTQAENSFYFDICGSEPESPVNEGKPRCICHLPCYFKIFLT

SEQ ID NO: 74736 - protein, 368 aa, Zea mays
  Coding DNA Sequence Number=SeqID_32957
MFPSSYRTHLHPKSPTSELEFLVFPKSLSAVKNYTLPWPAFHRSAHVLFVPVLASLYAEREEEIEVTEEQVQPPLDTQAGNSFYFDICGSEPESPVNGGKPRIHFSKHFCKTESLNIEKPYLDSHITSIPLRVFSLVGWFQKKKIKTEVREDSVLHLGSFAFDFSGGVCASLTGDTFLVRLTARKSTGPIGVPRHQLAPRHESSSSGSNDPIGDLEARVSRLQAALQHRTDAWVTDGDRINELRRDIRHLQDQLADRDLALNWAVQSRLLMCAKEARAQARIKELSSTVDDLQVYCNTLHEEVHILYSQLHPSEPAPPAEAEAGPSHVAGRALGGELDLFEPPPSLRLVDVWTPTPDDEAAKTDGKQE

SEQ ID NO: 74737 - protein, 314 aa, Zea mays
  Coding DNA Sequence Number=SeqID_32958
MGRLEPRAEWESWFVGKVYNLCRVLETGISAMLTMARLRCTARKSVIPFLPSHLVERPLHRTVSGQSNHLERLHHRLHEEQEQQDSSPSPQREVESERPPSPTPQPEMPPAPPQGIPAAGGDPDGDEDDDDASGSSSHGTERSKEPEPEGWIVRPITRYDARGCHFHDALDTLLCRAFDRHTWSIEYRCVVYQHRRGLYPDHGVADGLDLKYYPRHSIGSAGGVIVSPVGEGNPRLSSMVNLVAVLNTELDHALDELGKVRAEVVELCAECAARHYLDDGSPAPVGIKHPYRSPPRGRFDYGTPDCRTRIDLDP

SEQ ID NO: 74738 - protein, 55 aa, Zea mays
  Coding DNA Sequence Number=SeqID_32959
MERLEPRAEWESWLVGKVYNLCKVLETGCPLCSQCSGGEAGNMDDFEEFQEYDEF

SEQ ID NO: 74739 - protein, 60 aa, Zea mays
  Coding DNA Sequence Number=SeqID_32960
MVVAPWVKYLSQEYDPMLTWVASTYRSPSCPSFRYLRTQVGITVDQNNTKVDTAPKVCPS

SEQ ID NO: 74740 - protein, 121 aa, Zea mays
  Coding DNA Sequence Number=SeqID_32961
MTEGKNMQKQLGASWEDIIGDMSETFKIQANVKTSQASLKDNMIRPKIHLSRRVANKLLLGAFGFRRYLRTQVGITVDQNNTKVDTAPKVNSTPVLFTLTWHSLLRHACTFISFKSKIRPS

SEQ ID NO: 74741 - protein, 48 aa, Zea mays
  Coding DNA Sequence Number=SeqID_32962
MADAGDVVVRVPSLSLAAGEPLSGYFALPVEIPGGRRRMDRGYKFDQV

SEQ ID NO: 74742 - protein, 52 aa, Zea mays
  Coding DNA Sequence Number=SeqID_32963
MADAGDAVVRVPSLSLAAGEPLAGYFALPVEIPGGRRRMDRGHKFDQLWCSK

SEQ ID NO: 74743 - protein, 40 aa, Zea mays
  Coding DNA Sequence Number=SeqID_32964
MADAGDAVVRVPSLSFATGEPLAGYFALPVEIPGDFVLQL

SEQ ID NO: 74744 - protein, 40 aa, Zea mays
  Coding DNA Sequence Number=SeqID_32965
MADAGDAVVRVPSLSFATGEPLAGYFALPVEIPGVISLIV

SEQ ID NO: 74745 - protein, 357 aa, Zea mays
  Coding DNA Sequence Number=SeqID_32966
MVTQGGLPPTSNEANLCTNDNGSQLGTRIVDEIMAGKNIFFDLPNKLTGEIWTLKFHCIGAQPGKEIVTINIDKAYVALYNVVYIKSKLGYSGRDFLFYKKRCGIDRSRLLALDYIHQEEAMLSDNMDERKISFVLTNDPPSDLEVSITPIKRPRQRTNVDKETIEVSIDAYKEWLAILQHENPEMVLYERQSNDDLILSDEEIHGSSKPTANWPSHARRHRKRDPDVIGIYVDNDGVFKKEGRGTLKGIAAATKRIKHGDHKLKIEFSSKLGGPVGPNTRTFVDEIVLFTKKKAPLIGVKKWKDIEFNVRSSIASDVLRRWEFPSNEDAHEKIWSIAKERYKGWRSTLSSTYKGIQ

SEQ ID NO: 74746 - protein, 353 aa, Zea mays
  Coding DNA Sequence Number=SeqID_32967
  Pfam annotation: Domain name=DUF1150; Domain location=165-239; Score=- 18.2; E_value=0.02; Accession=PF06620.2; Description=Protein of unknown function (DUF1150)
MELMGTCAAPRGRMSSPELRESSARMLEVTGGRWPKNVPIPRAAGEDFFTSHMARDLRVFPYGRNIAAVVSTVMNKDRQDAAQKRRAVVRMVDPVREAKRARGSTKAAAFGSGKLVPAAKTAAPGGSKASTGEKAAAAGGTKPLPGEPSPAKLPPPRKRVADFGTNISVEDYLGGSGEGQLVVVLPSVAATSPSAVLKAKGAMQDLWAAFCASGEILTAAAARDVAGTMSQRLREVSQQLSQQVTQQLKQAAQAEAKVALAKGSLASQHAEEWEARYNALRSRVDKAETSVRSEVMRTHAQLVEAYHDLGARTADFEVPDREASLRFLEWLQEELLVLPTIMQAFMSYASLVT

SEQ ID NO: 74747 - protein, 364 aa, Zea mays
  Coding DNA Sequence Number=SeqID_32968
  Pfam annotation: Domain name=DUF1110; Domain location=124-308; Score=- 43.4; E_value=0.003; Accession=PF06533.3; Description=Protein of unknown function (DUF1110)
MAGTMSQRMREVSQQLSQQLTQQLKQAADFADRVASGVLTADVAAEVENLRAQHVDAFRDKSAAESKNRRLAEKVATLEAEKTDLRRRLAEERREANQVVAEAQAAQAEAKVALAKGSLASQRAEEWEARFNALRSRVDKAETSVRSEVVRTHAQLAEAYHDLGARTADFDVPDREASLRFLEWLQEELVVLPTIVQGFMSYASLVTCEGAMNALSREGCKHYEVFDQSDENFEREIFKVEDPVVKDSAGALFDRMWGHHGREAVRERSDRAREQMACAEDVEDLGDLNSAQPETEVNPVLPEAEVNPALPSEAGEGSSAAPVSTMSGEGSLPAPAPVTEDPPKAVAEPAAEDPMAAAEPSQVA

SEQ ID NO: 74748 - protein, 151 aa, Zea mays
  Coding DNA Sequence Number=SeqID_32969
MGKNKKGRSSSHHSGDKQKREPSPPSEGFDDSEYSEEEFSSESEGSPVYASPPVSSDGSNDSQGIAAEVWTYIRAVERSGLDGSDESEISSDEENSSDSSEEGSGGDGDDEGDDGDGGDDGGGGDGDGKGDNDGDKGDGDSSKASGKAPLA

SEQ ID NO: 74749 - protein, 192 aa, Zea mays
  Coding DNA Sequence Number=SeqID_32970
MVSCYVKRRLSPDLFPDDLNGLLNTCDCLVTVVGDERLPPASINRLPASLVSSHISWPFVAYSPTFLFSSNQPWRKLKGGSSSHHSGDKRKREPSSPSEDFEVWTYIRAVERSELEGSDESEISSDEENSSDSSEEESSGDGDDKDGDDDGGDDDGDGAGDGKGDGDGGKGDGGSGKGDGGSGKASGNAPLV

SEQ ID NO: 74750 - protein, 98 aa, Zea mays
  Coding DNA Sequence Number=SeqID_32971
MGNQKLAKSMMRQSTREKCKPMKKKSYTFKVVNFKSTYRIMHISYALHSLDCNLADGEYVLIPEQGPVQEEDQEQAPEAAIEDLPAAPAIEGKPRFYA

SEQ ID NO: 74751 - protein, 98 aa, Zea mays
  Coding DNA Sequence Number=SeqID_32972
MGNQKLAKSMMRQSTREKCKPMKKKSYTFKVVNFKSTYRIMHISYALHSLDCNLADGEYVLIPEQGPVQEEDQEQAPEAAIEDLPATPAIEGKPRFYA

SEQ ID NO: 74752 - protein, 91 aa, Zea mays
  Coding DNA Sequence Number=SeqID_32973
MELRILSSTYGASIWWGCGEKEIGALLLAAQGGQGARPWLPWLPRPPRPAIQTGRSRAPRAGVRPWATASSLPWGKLQRAEDEQGRHEQGK

SEQ ID NO: 74753 - protein, 115 aa, Zea mays
  Coding DNA Sequence Number=SeqID_32974
MGNCELAAMGEASARQERRDREHTGRWMRHGEEASRATGFLCTGHGGRSRDARDHGAGKQGAEGRGAKHRGQREALDICWTADTGGKLGGHGRGGSSLRAAVRKNGTGKKIGSGG

SEQ ID NO: 74754 - protein, 151 aa, Zea mays
  Coding DNA Sequence Number=SeqID_32975
  Homolog annotation: Hit_ID=Q6QP51; Match level="QueryCoverage=34%, HitCoverage=30%, E-value=1e-14, Identity=79%"; Hit description =Putative growth-regulating factor 1
MQVACNCTTGTHAFDFDASSMEAQAHTSCNRRAGYYVRKTAPPLAPIPRLLDCGTGAATRGNPAHGPTVPTEHIGHGDRERGYSERDPSPRRKRAPSPPTDQGFKGWPLGRVRQPPQSTRALGSLLIRGSKAGPSEGFDSRLRAFGLRAHY

SEQ ID NO: 74755 - protein, 352 aa, Zea mays
  Coding DNA Sequence Number=SeqID_32976
  Subcellular localization annotation: CTP_CleavageSite=47; ConfidenceScore=5.39e-01
MLDASKSKGCVPVVQLHAACMAVRPFARWFRRRWRGGVLQPCGGRRTAAARPGCSILSSVWLHRRVSQHVVRREGGTRVLGRSRSSFRGEDGSEDLPVRFGAAGARWCGVGGQVDAIVDAEVVAAGEGFSVDEIVGVTCAPGLWLFGFNGWFSSPARGHKREPSSGSVRPGPSLLLQRSPASHPEFVVPQALRCGGCSYPQEWNRSSVCNGTLSAGVTSEVSVSRRRRSPSARSALPLKASLAQLRNPRLLCDEPEPEAAVSAWIEAESARKGASSAQEQVTSQAEEAQQQRLEPGRVIRERDQLRSPASETVSQADVLGGHLAEATERPAEPSARAGFLEETLAAMAQARC

SEQ ID NO: 74756 - protein, 96 aa, Zea mays
  Coding DNA Sequence Number=SeqID_32977
MRKTGEQLTESRRESASRVAWCSRPPSQVMKKPARRGAVAAVRSRDARTGDGAPVCSLAGLLARAGLLARAGLGPLKHRRLVVRAGLATLIGAACC

SEQ ID NO: 74757 - protein, 90 aa, Zea mays
  Coding DNA Sequence Number=SeqID_32978
MWKTGEQLTESRRESASRVAWCSRPPSQVMKKPARRGAVAVVRSRDARTGDGAPVCSPAGLLARAGLGPLKRCRLVARAGLATLIGAACC

SEQ ID NO: 74758 - protein, 69 aa, Zea mays
  Coding DNA Sequence Number=SeqID_32979
MEAKSHQQPKQGGTCKNYATSKAEYTNTQLDLPGLTALAYNAPLTPTAAVQWPHLYPPYLEWETQSQVA

SEQ ID NO: 74759 - protein, 92 aa, Zea mays
  Coding DNA Sequence Number=SeqID_32980
MEAKSHHQPKQGGTCKNYATSKAEYTNTQLDLPVTALVPTITRMGDHVSYRVRGKVCGQETIFVIRPISHQQENLKFLQELVGTILRSAKRP

SEQ ID NO: 74760 - protein, 93 aa, Zea mays
  Coding DNA Sequence Number=SeqID_32981
MEAKSHHHPKQGGTCKNYATSKAEYTNTQLDLPGYNGSSSLISCEKQTIRIEFLTLQGLTALAYNAPLTPTTVVQWPQLYPPYLEWETQYQVA

SEQ ID NO: 74761 - protein, 126 aa, Zea mays
  Coding DNA Sequence Number=SeqID_32982
MEAKSHHQPKQGGTCKNCATSKAEYTNTQLDLPGVRSLLPLPLDHAAVWLRGLYNGSSSLISYKKQTIRIEFYPCKVGQIQTCDFKNLQLQVQTSKQIDPRLSGKITKKSHPRLFGKLGKKHYILL

SEQ ID NO: 74762 - protein, 83 aa, Zea mays
  Coding DNA Sequence Number=SeqID_32983
  Subcellular localization annotation: CTP_CleavageSite=43; ConfidenceScore=5.45e-01
MPAGCLLCCAAPSTTSSTHALVVMPRAFHARQKPQAVDNMQTCATRVSQSRVKISSVHVMPKSNCKLLCEECIDKHIYVGYVL

SEQ ID NO: 74763 - protein, 198 aa, Zea mays
  Coding DNA Sequence Number=SeqID_32984
  Subcellular localization annotation: CTP_CleavageSite=43; ConfidenceScore=5.48e-01
MALLPPWSTCCKFCLVPLVVRLEPGVRSPSATASTPRRPCTCVASRAETLHATASPGSPLHRVLRWVCAALRVVVETLGEPLAVLIIPHSSLSVSRLTHPASNETPKPWTHAQLHLGFSQSKCAWLQSRVKISSVHVMPKLNCKLLCEERIDKHIYAGSAYNQFLVIIEVCSAFAKLSKKSWITLFGDLKIKLWMFKV

SEQ ID NO: 74764 - protein, 565 aa, Zea mays
  Coding DNA Sequence Number=SeqID_32985
MAHCIRMVGKGAGRWSSETRRPGGNSGGSPERGRRRRGQGEPPHWLTTAPRPAQGPRIGGRERLPRGGKEEKWAHLSFGEGARHGVPRRGGLGGASGCRDRSGRLLATWAQGLERLEKKTCPWRLEWRTCSGCARERREANQAIAEAQAARAGAKVAWAESSLASQRTEELEERFNALHGRVDKAEASTRSEVERTHAQFVDAYRELGARTADFEVPDREAGLRFLERLQEELLVLLTIVEGFMSFASLVTCEGAMNALSREGCRHYEVFDQSYENFEREIYKVEDPMVKQSARALFDRMWGPHGREVVRERSDRAIEQMVHAEDVEDLGALVGAPPEAAEVNPVPPLDAGEGSSAAPVPTVAGEDPVSAPAPMAEDALKVVAEQAAEVPTVAAGPSQGFGPAHATATDNANFVAALTVVAEGDSDDSVSKFFESDDSGSSIVWMEGSSEEDLDYFAAVDVAAMETPPLVMGAKNHPGASAGRRRRRVVAKRRVGELSRGERRHHGEMEGGRLRADGTGKWELLSLSAGASVGEGELRSLFASEELRIMLFNYREMGIIPKVEPM

SEQ ID NO: 74765 - protein, 430 aa, Zea mays
  Coding DNA Sequence Number=SeqID_32986
ERREANQAIAEAQAARAGAKVAWAESSLASQRTEELEERFNALHGRVDKAEASTRSEVERTHAQFVDAYRELGARTADFEVPDREAGLRFLERLQEELLVLLTIVEGFMSFASLVTCEGAMNALSREGCRHYEVFDQSYENFEREIYKVEDPMVKQSARALFDRMWGPHGREVVRERSDRAIEQMVHAEDVEDLGALVGAPPEAAEVNPVPPLDAGEGSSAAPVPTVAGEDPVSAPAPMAEDALKVVAEQAAEVPTVAAGPSQGFGPAHATATDNANFVAALTVVAEGDSDDSVSKFFESDDSGSSIVWMEGSSEEDLDYFAAVDVAAMETPPLVMGAKNHPGASAGRRRRRVVAKRRVGELSRGERRHHGEMEGGRLRADGTGKWELLSLSAGASVGEGELRSLFASEELRIMLFNYREMGIIPKVEPM

SEQ ID NO: 74766 - protein, 352 aa, Zea mays
  Coding DNA Sequence Number=SeqID_32987
MRLILRYLILTCGGCETARVSSHTFIAQQVVGNNVNELAKGVLDWAQYFLRYQGLNRNFSQDSGFPPHWTAGLFYRTPRVYLQRAHGEGVRVNPSHPMKNQESRLDREPVRTTSPRILILRSVFYGYVTYPTSSTVRSMAWIKATKGDAPDLIVTVQRTINGSQPTTHFQTAARRPERRRKQGCGGAIATTTDPPRWTYTFESDEATGSGEESEPNRGTLTGGLTARLPRPRREVVLRRREGSGEKSPEPQSDLDVVLGIDRGTRQTRRHRSYLKSRWGTHSLRRAMARQWRASGAADSGTRVHSSHQPQAREVPRERHQAPRIIAAQQLATTPQPLPHLFSLFLTAFGFFP

SEQ ID NO: 74767 - protein, 352 aa, Zea mays
  Coding DNA Sequence Number=SeqID_32988
MRLILRYLILTCGGCETARVSSHTFIAQQVVGNNVNELAKGVLDWAQYFLRYQGLNRNFSQDSGFPPHWTAGLFYRTPRVYLQRAHGEGVRVNPSHPMKNQESRLDREPVRTTSPRILILRSVFYGYVTYPTSSTVRSMAWIKATKGDAPDLIVTVQRTINGSQPTTHFQTAARRPERRRKQGCGGAIATTTEPPRWTYTFESDEATGSGEESEPNRGTLTGGLTARLPRPRREVVLRRREGSSEKSPEPQSDLDVVLGIDRGTRQTRRHRSYLKSRWGTHSLRRAMARQWRASGAADSGTRVHSSHQPQAREVPRERHQAPRIIAAQQLATTPQPLPHLFSLFLTAFGFFP

SEQ ID NO: 74768 - protein, 97 aa, Zea mays
  Coding DNA Sequence Number=SeqID_32989
MGNTRDPSALSLEERNFTEVGTFQPSFGFKDFHQAARPHPLAGGHPRRGRAEPELYLPRGFVGQPLPQHSRERALTGLAGGSDSDNAGPIDGEGRQL

SEQ ID NO: 74769 - protein, 235 aa, Zea mays
  Coding DNA Sequence Number=SeqID_32990
  Subcellular localization annotation: CTP_CleavageSite=61; ConfidenceScore=5.12e-01
MALCQKYIHVQAPTAIENRHRHSRCHYKRNSGSTSAGTNNPPRWRACGATERRRDSRWLIAARSGSNDNDFRPGRPNSSSDDLRADAAATRPSPASPPKGRGHAEGRRVGGQPVGSADYLVGGETSFGCLGGRWHRKHRRSHSGRRAGHAAAASATNGERPSPQSLREGAGRCPRGDRPQLGALPSPALMMNILEDEGGGRGRSPSRFSPTIELVITVLGDHRRGDAAGLSDENP

SEQ ID NO: 74770 - protein, 139 aa, Zea mays
  Coding DNA Sequence Number=SeqID_32991
MFLGAGPGVMMGMGAIQMCTRGLVQELARHLRWDLCPCMLARVPGGIAMRRGRSCGLCDSRYVSHPLVCTVTRFVLRIPTLVFTTGIGSGVLIGGPPLLGGHRGCVCATVLVAVRKKLYGPCVLRSMVACGYEDTDSGV

SEQ ID NO: 74771 - protein, 139 aa, Zea mays; identical to SEQ ID NO: 74770
  Coding DNA Sequence Number=SeqID_32992

SEQ ID NO: 74772 - protein, 248 aa, Zea mays
  Coding DNA Sequence Number=SeqID_32993
MDMQLQKRLLPNEIAVGNNSTEETIVQFSTPLSNVHYSTVHSTAPIGQYRFISTALVGPYIIADEWGRQVGLIPFMESLQSTGKPDDNRAISAILNHYNRGDFLYSRAYKMALVPLFIPWLSRSIPTPRSTHHRPPRRKSGRRRGRVPTPSIGIHRRGRELHRTYRIVLGDYASVEPHWCSMSEVNTSYLVLQAMVMWGNGWRMEFVRDAKILRRNFVIDLLSYKNNSCRYTIPANIQQRLINISTKE

SEQ ID NO: 74773 - protein, 106 aa, Zea mays
  Coding DNA Sequence Number=SeqID_32994
MGDTGYGDIVPLDPSSIPDATAPACRYGSLPTPQDPCLQFSTPLFNVHYSTVHSTAPIGQYWFISTDLEFWTDVLNADLLWPVTSSPVHILNLKNHVVEEKPTENE

SEQ ID NO: 74774 - protein, 77 aa, Zea mays
  Coding DNA Sequence Number=SeqID_32995
  Subcellular localization annotation: CTP_CleavageSite=30; ConfidenceScore=5.26e-01
MACPARVVTAPARPRARPSVPMARGPDVCTASSRRVTMRLMVLGFDSGNGCPHCSHCSGEDEAVEGDFQEFQDYGEF

SEQ ID NO: 74775 - protein, 81 aa, Zea mays
  Coding DNA Sequence Number=SeqID_32996
MGETASTDELAMGTGMALTPIGTARAGRGGLERFLECLSVTMRLMVLGFDSGNGCPHCSHCSGEDEAVEGDFQEFQDYDEF

SEQ ID NO: 74776 - protein, 81 aa, Zea mays
  Coding DNA Sequence Number=SeqID_32997
MGETASTDELAMGTGMALTPIGTARAGRGGLERFLECLSVTMRLMVLGFDSGNGCPHCNHCSGEDEAVEGDFQEFQDYDEF

SEQ ID NO: 74777 - protein, 83 aa, Zea mays
  Coding DNA Sequence Number=SeqID_32998
MAAPAPAWWPAVASPAMAPARQNDLVEEPEELAGEAPEQQSVTMRLMVLGFDSGNGCPHCSHCSGEDEAVEGDFQEFQDYGEF

SEQ ID NO: 74778 - protein, 136 aa, Zea mays
  Coding DNA Sequence Number=SeqID_32999
MRRAQPRRSSAGEAREDVGEGCSLHATSEDRQRVWMMRFPVKWKTPTVSRHRGGSCAEQRAGRRGARGREKRDKGCRHGAGASAVAASGQEQREKGKRKWSREGRRSRGGRRHGLIPGDEGNQGTSMRPPWLGKGA

SEQ ID NO: 74779 - protein, 98 aa, Zea mays
  Coding DNA Sequence Number=SeqID_33000
MAQGPSLVRARAGEPPSPMANALLSEHPLPTSSLASPAELLLGRALLMPVAPIPIQISCPFSSAVAQLRGSPRRTRRRTPIGCTQPPTALSKLVVKVG

SEQ ID NO: 74780 - protein, 316 aa, Zea mays
  Coding DNA Sequence Number=SeqID_33001
MKALMKVLVDCTEDATKSLGGLVDHALDHMHDEEILARTLFAIKDKLELLQQDALEAKVQAFPEVAKYEWDDISVDPPSPSPPPTVTDPSVDEEEFYCPDVSDEWNPLGPPEVNPFPDCIPPSNTSTPLQGSNTIPSIPVNLDSDAENSVQDINSPEKNAPPIHKPKKSKEQNFTGPEDLLLCTTWLQISSDPVMHTGQRTPNAPTTENDSASAGLTEYLSRLQEITEKQIQRSIEKGQKKEKCSEEDREMEKKRLELEAEKVIIRKRELKLQELDCAEKRLQRLEATNEEDVEPQVWIMMQNQKKKLQEFIFGYE

SEQ ID NO: 74781 - protein, 154 aa, Zea mays
  Coding DNA Sequence Number=SeqID_33002
MSTQCRSRPKTKRGHIRFRRAHLLMASSQEDKMKALMKVLVDCTEDATKSLGGLVDHALDHMHDEEILARTLFAIKDKLELLQQDALEAKVQAFPEVAKYEWDDISVDPPSPSPPPTVTDPSVDEEEFYCPDVSDEWYFSDSDRSTRNSYWNMF

SEQ ID NO: 74782 - protein, 136 aa, Zea mays
  Coding DNA Sequence Number=SeqID_33003
  Homolog annotation: Hit_ID=Q656B0; Match level="QueryCoverage=63%, HitCoverage=14%, E-value=4e-26, Identity=56%"; Hit description =Putative Noc3p
MGVRTHCCYLGAYRLLWPRGSPGTVHVAGLDAVYHATRDSRADTASSYCRKHHGEATIEAVRLIADHVKLNDCQLHPNSIKVFLSLRFDGDIGKDEVEEKKVDADLRAVSFTLDPKERKGIKKKQFLLCLRLTFAF

SEQ ID NO: 74783 - protein, 156 aa, Zea mays
  Coding DNA Sequence Number=SeqID_33004
MAATSAGVEADDVGHLWPRGRAAQRPYIRLRPLAYITGSGSRDSIGSLPERGAEVCTVRSGRVSALDPRLALTKVRVLFVPESRNPTESGPDPTQRSPGPVLGVRSVPAEVLDPAPRSDPYIQGSGTFPWGSGPTADALEHIVFSGHVVIRESSTW

SEQ ID NO: 74784 - protein, 195 aa, Zea mays
  Coding DNA Sequence Number=SeqID_33005
  Subcellular localization annotation: CTP_CleavageSite=49; ConfidenceScore=5.09e-01
MWVPLASPNLFCRFLVGSDDQSSPFRNSSIFLLRSDSGIAIRFPLPVILAADLRARAILTAVRDLVSFISPSLFPLRFVRCLLNAADSAEIARAQQESGLHGGIKSSESDSKLSRGALRCDLNGRPSAVNKSNGGLGCWLGAATFDYAMMALQCGRNTMGSLGTYAWDLRFTIGESGERRWRRRVDSQGRKKMVL

SEQ ID NO: 74785 - protein, 174 aa, Zea mays
  Coding DNA Sequence Number=SeqID_33006
  Subcellular localization annotation: CTP_CleavageSite=49; ConfidenceScore=5.09e-01
MWVPLASPNLFCRFLVGSDDQSSPFRNSSIFLLRSDSGIAIRFPLPVILAADLRARAILTAVRDLVSFISPSLFPLRFVRCLLNAADSAEIARAQQESGLHGGIKSSESDSKLSRGALRCDLNGRPSAVNKSNGGLGCWLGAATFDYAMMALQCGRNTMGSLGTYAWDLRFTIG

SEQ ID NO: 74786 - protein, 513 aa, Zea mays
  Coding DNA Sequence Number=SeqID_33007
  Gene Ontology: Mol. function=serine-type endopeptidase activity; Cellular component=chloroplast; Biological process=proteolysis
  Homolog annotation: Hit_ID=Q6AUN5; Match level="QueryCoverage=99%, HitCoverage=100%, E-value=1e-170, Identity=66%"; Hit description =Putative DegP protease
  Pfam annotation: Domain name=PDZ; Domain location=399-494; Score =15.5; E_value=0.017; Accession=PF00595.14; Description=PDZ domain (Also known as DHR or GLGF)
  Pfam annotation: Domain name=Trypsin; Domain location=180-397; Score =18.9; E_value=1.2e-07; Accession=PF00089.16; Description=Trypsin
  Pfam module annotation: Pfam domain module=PDZ::Trypsin; Domain location=399-494::180-397
  Subcellular localization annotation: CTP_CleavageSite=31; ConfidenceScore=5.45e-01
MSAAASSATACFLSPLPPPRRPRHFLRHLARAAVTKPEPASASSLALPSPWLWARRLCELVPAEAGGRLLSSAAGSLIVALASASLVLGDTGAASAFVVSTPRKLQADELATVRLFQENTPSVVYITNLAVRWASASPFLAAPPAQSPGLFVVCLNSGALSSSGLQSEAGGGPLISSACYVCRQDAFTLDVLEVPQGSGSGFVWDKSGHIVTNFHVIRGASDLRVTLADQSVYEAQVVGFDQDKDVAVLGIKAPKNKLRPIPVGVSADLLVGQKVYAIGNPFGLDHTLTTGVIRWNIFLSSWFMFVSFMLQCTESLCFVVSSDAPSGLRREISSAATGRPIQDVIQTDAAINPGNSGGPLLDSSGNLIGVNTAIYSPSGASSGVGFSIPVDTVGGIVDQLIKFGRVTRPILGIKFAPDQSVEQLGLSGVLVLDAPPNGPAGKAGLQATKRDPYGRLILGDIITSVNGTKVTNGSDLYRILDQCKVGDTVTVEVLRGDHKEKIPVVLEPKADES

SEQ ID NO: 74787 - protein, 293 aa, Zea mays
  Coding DNA Sequence Number=SeqID_33008
  Gene Ontology: Mol. function=serine-type endopeptidase activity; Cellular component=chloroplast; Biological process=proteolysis
  Homolog annotation: Hit_ID=Q6AUN5; Match level="QueryCoverage=98%, HitCoverage=58%, E-value=1e-129, Identity=84%"; Hit description =Putative DegP protease
  Pfam annotation: Domain name=PDZ; Domain location=179-274; Score =15.5; E_value=0.017; Accession=PF00595.14; Description=PDZ domain (Also known as DHR or GLGF)
  Pfam annotation: Domain name=Trypsin; Domain location=17-177; Score= -45.0; E_value=0.029; Accession=PF00089.16; Description=Trypsin
  Pfam module annotation: Pfam domain module=PDZ::Trypsin; Domain location=179-274::17-177
MCCWVTLADQSVYEAQVVGFDQDKDVAVLGIKAPKNKLRPIPVGVSADLLVGQKVYAIGNPFGLDHTLTTGVIRWNIFLSSWFMFVSFMLQCTESLCFVVSSDAPSGLRREISSAATGRPIQDVIQTDAAINPGNSGGPLLDSSGNLIGVNTAIYSPSGASSGVGFSIPVDTVGGIVDQLIKFGRVTRPILGIKFAPDQSVEQLGLSGVLVLDAPPNGPAGKAGLQATKRDPYGRLILGDIITSVNGTKVTNGSDLYRILDQCKVGDTVTVEVLRGDHKEKIPVVLEPKADES

SEQ ID NO: 74788 - protein, 217 aa, Zea mays
  Coding DNA Sequence Number=SeqID_33009
MEHVVPEWSHGMAYDDTRHTYMAKRGDFLLSLIAELRTVSTNIQKLRVSFAIFKTDRFSYQLEVKVFGSKINWDSRTSVPTSTEAKSISMDMDSADSIADKAIGRMQEIADKIFSIARQTIRPGRGLTSFEATKLRVALEDIACMLEQDSLVLQENLDNVNNVNNPADSSYEPSALSSPPPSNEFLSPDWDFAEHFANFWGLEYDFDQMPSFSDNEV

SEQ ID NO: 74789 - protein, 185 aa, Zea mays
  Coding DNA Sequence Number=SeqID_33010
MSEDKVRTKDSRWYVVTIYDPRELPGVSTADPGIGWGVTSGIRADPRGFTGVCGLGGSGKWCMAQVGPEWSHGMAYDATRHTDMAKRGGHWELVVAELPFLGNDAPSGLVPHSGNIRSLLLALELIGCSGWLLGQEGKVPGCSGAGTDFLLVGCSDDTVAADAEGTISVAVAASADDDAGAGDLA

SEQ ID NO: 74790 - protein, 110 aa, Zea mays
  Coding DNA Sequence Number=SeqID_33011
MARPPRRALPPAQIVSCSRRDGLGAALSSAQRAYENDPVEEPEELAGEAPEQQSVVRIATTAQEKMKSWKETSRSSKTTMSSRRGLAATPSRLPVKAAFIYVSFSHFDYL

SEQ ID NO: 74791 - protein, 132 aa, Zea mays
  Coding DNA Sequence Number=SeqID_33012
MAARRENDPVEEPEELAGEAPEQQSVAMRLMVLGFDSGNASPLQPDRTLAEYVDVYSPLLYTPNPPQVARIAATAQEKMKPWKETSRSSKTTTSSRRGLAATPSRLPVKAAFIYVSFSHFDYYKDYVDVSDI

SEQ ID NO: 74792 - protein, 115 aa, Zea mays
  Coding DNA Sequence Number=SeqID_33013
  Subcellular localization annotation: CTP_CleavageSite=22; ConfidenceScore=5.32e-01
MAARKLTAASFTAKRLRSRISRQNGETEHTATGSGSRTLERRSRSGPSSYPTRLTAALDRVQAAASWELVVHSGVCDHVGLLLEVELAVAKLLLVIDERRQRECLLLMVFVRSFK

SEQ ID NO: 74793 - protein, 127 aa, Zea mays
  Coding DNA Sequence Number=SeqID_33014
MAASRAPRQRQWDGYEPERSGAGLRRRTVPTHPTRARVVMASGDAGKSEHMRARTRREEEGKVRGSFVPSPGWRPGQLTAASFTAKRLRSRISRQNGETEHTATGSGSRTLERRSRSGPSSYPTRLT

SEQ ID NO: 74794 - protein, 129 aa, Zea mays
  Coding DNA Sequence Number=SeqID_33015
MAASRALRQQQWDDYEPERSGAGLRRRTVPTHPTRARVVMTSGDAGKSEHMRARTRREEVARSRLDNKAKFKYLLGTFGVRRSSKTGLNSISVVQCVNRYPRTKVGIAVDRNNTKLDTEPKVLSRKASE

SEQ ID NO: 74795 - protein, 176 aa, Zea mays
  Coding DNA Sequence Number=SeqID_33016
MAASRAPRQRQWDGYEPERSGAGLRRRTVPTHPTRARVVMASGDAGKSEHMRARTRREEEGKVRGSFVPSPGWRPGQLTATSFTAKRLRSRISRQNGETERTATGSGSRTLERRSRSGPSSYPTRLTGGFSMAVPPRGKEQARCSSNRQVGPARQSPRVEHRHGPTSREDRVGRIE

SEQ ID NO: 74796 - protein, 808 aa, Zea mays
  Coding DNA Sequence Number=SeqID_33017
MVAEEDEDEGALRHAARLSSESDLVEEFIAYGVWPLAHGWVLGEVTPHRIPTLGDQLVRSPAFVVDLRGRDAAAFVREVEAEATKIVGKYVPKTETLRSWDIRGSNVRLNRVFELNRLSYAGYPGDDYTDVAVRRGEKAMTTADEGPSRGTAPGATAKKRKLGTTAEGSRASDRFASDLLETCMVPGETMSSLELREPSARMLKVIGGRWPRNVLIPRAAGEDIFTSRLAREMKIFPYGRNVGVVVSAVMEKDHQNAPRKRRAFARLGDLRREAKMARASMKPAAPDASMPPPVAPTHGRRPPSPPRAGEAAVAGAEDSMDIFVDDYLVGGVAMFDAHTGLDPTGAESGQLDVVPAAVAASPVAVATVVLTGPVVQVLRCEIASTAAAKDVAASVAQQLKHAAALAERIASGALTSEFSAERRRLEGRIERLRTQHTEAIRDKSAAENMSRNLLEKLTVVEAEKEDLSRWLAAEREDAKKARAEAQATSAEASLALKRATDAESGQRSLRGYVDRTEASTRAEVDRVHVLLVDAYRQLGGVGFAPVHRDRSHVHREETANALSREGCRHFEVFDRVTEDFDRRIFQVGDEVLKWSAGALYDRMWGHHGRDTVQERVDRALEQMMNEEEVEDFGGLESSVTRAEDARTWAEEQPAPQADPLGDPAAAAMPAGKDPAAVAAPSQVLMSGPAQATPTDVDINFVAAANAVPVNGNSSRSEAESWSSDGGDFGSPFLWIEESSDEDLDYFAALDVVATESLARPEVREGSAPPSGAIAEEHRGERWCRSTMLVRCHEVRGVDGWGWNDPVFD

SEQ ID NO: 74797 - protein, 284 aa, Zea mays
  Coding DNA Sequence Number=SeqID_33018
MAVSKHNVGEMSRSERRRRMGMERPRLRLDRGGQRDLLSSTYGTCIGEGDLRNLFEGKELKMMLFNFREADLIPKAEPMLSRLVIVLAWRVNGMGTSLSTAMLDAYDAYLAAPLCGFCSTVSDSRDFAPLRRNRVREKLAVYSQKAVRSGAPDCPVLHRTVRWCTGQCPVRQTDSGELAALGNLPATYGYNSPDCPVSQRSAGPTVGRTICAGHVAEPTARRRHRTVRCANGSKSANGRLRHLRKEIGHRTVSGVHRTVRCASQQKARSAFLDCSQRLLAVLGL

SEQ ID NO: 74798 - protein, 243 aa, Zea mays
  Coding DNA Sequence Number=SeqID_33019
MESWCLEMIKGCLGAAVRPPPGRRSCRARAGYVQVLPAPSAAQHVVRREGGTHVLGRSRSRSRGKNGSEDLPVRFGAATACWCSVGGQVATVVGAEVVVAIGEAASAEAVAPADETVGATCGRTSGSLALMACPRPSCGDPPDAEVVVAAGAVVAGEPPRVCCPAGPLDLRPLCDELEPEAAVSAWTEAESARKEASSAQEQVASQAEEVQQRRLELGQVIREQDQARSHAAEAVSRAKVPGG

SEQ ID NO: 74799 - protein, 174 aa, Zea mays
  Coding DNA Sequence Number=SeqID_33020
MTTSSVVGRSKPGCGLCPAVSFKDVHHPGWGGGRTELGPASAWAGDPLLPPAFRGEGHTPALRRRRPPAMWGKANCCFLDRVQLSVLHPGDGRVARGPAMSRSSLRRRLHNTSYTARALYNLRPLCDELEPEAAASAWTEAESARKEASSAREHVASLAEEVQRRRLELGQVIR

SEQ ID NO: 74800 - protein, 67 aa, Zea mays
  Coding DNA Sequence Number=SeqID_33021
MEILKLRLGLGTGDVLPRLKHTLESLFLSRVRKRQIFVAFAPRWYQMKKNKSEDAGGRGPPYRIFLF

SEQ ID NO: 74801 - protein, 66 aa, Zea mays
  Coding DNA Sequence Number=SeqID_33022
MEILKLRLGLGTGDVLPRLKHTLESLFLSRVRKRQIFVAFAPRWYQMKKNKTEVREDLVLHIGSFT

SEQ ID NO: 74802 - protein, 66 aa, Zea mays
  Coding DNA Sequence Number=SeqID_33023
MEILKLRLGLGTGDVLPRLKHTLESLFLSRVRKRQIFVAFAPRWYQMKKNKTEVREDLVLHIGSFA

SEQ ID NO: 74803 - protein, 88 aa, Zea mays
  Coding DNA Sequence Number=SeqID_33024
  Subcellular localization annotation: CTP_CleavageSite=51; ConfidenceScore=5.66e-01
MAVLSPLRKQGDVSKVPAAPTAVLLQGSNAPPTATTPRTQGSSTSPTATLACTQGSGISLPDTLAHSYTPTVHLDPLLASIKGSLLEI

SEQ ID NO: 74804 - protein, 860 aa, Zea mays
  Coding DNA Sequence Number=SeqID_33025
  Gene Ontology: Mol. function=helicase activity; Biological process =viral genome replication
  Homolog annotation: Hit_ID=Q8LML8; Match level="QueryCoverage=95%, HitCoverage=77%, E-value=0.0, Identity=59%"; Hit description =Putative DNA helicase homolog
  Pfam annotation: Domain name=DUF889; Domain location=673-849; Score =138.1; E_value=2.3e-38; Accession=PF05970.5; Description=Eukaryotic protein of unknown function (DUF889)
  Pfam annotation: Domain name=ResIII; Domain location=529-668; Score= -39.7; E_value=0.098; Accession=PF04851.6; Description=Type III restriction enzyme, res subunit
  Pfam module annotation: Pfam domain module=DUF889::ResIII; Domain location=673-849::529-668
MDCGIYTFHAHGMMYHNVRSFGREAGAEHKHLELYFYDDDPSLEHRYRKCRQQQFEKDKAVIKHLVEILKGNPYSKHLRSMGHVDNIEDYHIALNLDQTLNQKLYNSPITSENDLAIYACLYVTITATDSKFVQKRVLPHVHFLLIMQRKYKLTCPDQYDHLISAEIPDKKKYPELYKMVIKHMMHGPCGLLNPKCPCTKGRASCKNHYPRAFSNATSQGKDSYPIYRRRDDGRKETVRGCELDNRWVVPYNPYLLRLFNCHINVEACGSIKAVKYLFKYIYKGHDRASVAVTDANKADGDIDEIKQYRDARWVTPLEALWRIFSFDLSQNSPPVMQLQLHLENMHMVSFHERAKVNHVVQRPGADRSMLTAYFQANRLHEEARGILYRDFPEWYTLQQGKAAQRRGLLEADDTIDECLNEAAIYQMMSALRRLFATILVYYEPNDVAELWQRHLDSMSEDYHRSTQSKIHVQQMVLIDIRNILQSMGKDIKTFPLPAIIDRYDDSHGTDREIYEEESIEPTTEDVAMKETLNEEQRSAYDKILSVVDTNNGGVFFVDGPGGTGKTYLYKALLAALRSQDKIAVATATSGVAASILPGGRTAHSRFKIPLTIDDGAVCSFTKQSGTTKLLQKASLIIWDEASMTKRQAIEALDNSMRDIMGRSGLPFGGKTVVFGGDFRQVLPVVRKGSRAQIVAASLRSSYLWESMCHLRLVQNMRAQSDPWFAEYLLRVGGGTEESNNDGDVRLPDEVCVPYTGNDCDLDRLIDDIYPNLNENMSNTSYITSREILSTRNDWVDMINMRMIDRFQGEQMMYHSFDTATTDQAKDGGKKSFEVPSEREKVKEAEEPKAKGEEEGLQSQG

SEQ ID NO: 74805 - protein, 336 aa, Zea mays
  Coding DNA Sequence Number=SeqID_33026
  Gene Ontology: Mol. function=helicase activity
  Homolog annotation: Hit_ID=Q1EPC6; Match level="QueryCoverage=83%, HitCoverage=18%, E-value=1e-57, Identity=42%"; Hit description=DNA helicase homolog, putative
MMSAENKNELKRRRQSSKNENVVHHERSKDENYNKCAPITKDVDMDKMTQSPRRQRHEHHVSSGERQSLISCQNQKFQSAIRRNFATATRDHGMEGESTSPCPVTAPHSDIMTEGADVGMQRQITPNVTTNDADEGVLFVENHDEDVLFEDDDEEDGYLFAGQDGESIEDIEIDETQDAFTVNPDVPDLYDKVYSNIPEETHLLSTVADCDYCKAKKFQYEPPGFCCRNGQIDLAPFETPPQLRRLWECSDADARHFRDNIRFFNGHFSFTSLYCCLDSMTTNMDCGIYTFRAHGMMYHNVRSFGREVGAEHKHLELYFYDDDPNLEHRYRKCEST

SEQ ID NO: 74806 - protein, 472 aa, Zea mays
  Coding DNA Sequence Number=SeqID_33027
  Gene Ontology: Mol. function=metal ion binding
  Homolog annotation: Hit_ID=Q6YYC5; Match level="QueryCoverage=68%, HitCoverage=87%, E-value=1e-153, Identity=77%"; Hit description =Copine I-like protein
  Pfam annotation: Domain name=Copine; Domain location=147-282; Score =245.6; E_value=1e-70; Accession=PF07002.6; Description=Copine
MAKKNDDGEKSTVRHRCSLPIDGSYTFLYLFPSTDRIVLTELYTIVISRQLPCRLLVRLFVFLAPPPARATRRRALTRQPSAYDAGGGHRRAMLSKKYSYIPDTYTSLDEVAAALREQGLESSNLILGIDFTKSNEWTGRQSFGGQSLHRVGDTPNPYEQAISIIGKTLAPFDEDNLIPCFGFGDATTHDYNVFSFHPDNSPCHGFEEVLACYRKIVPHLKLSGPTSFAPIVEAAVDIVDRSGGQYHVLVVVADGQVTRSVDTGDGDLSPQEKRTVESIVTARFDDKLPARDFDNFQFVNFTAIMARAATAQQKESAFALAALMEVPIQYKATMELGILGRSTGNAKRVAPAPPPLPHAQRQASSLRRGASNVGGAAAAPRDDQVCPICLTNAKDLAFGCGHMLYIAAPGTPSFSSTFAPRRGSPTTKLLLLAELHVAKSLNLSNTADVAAVGCCAIAKRLANLTDVEDKKA

SEQ ID NO: 74807 - protein, 185 aa, Zea mays
  Coding DNA Sequence Number=SeqID_33028
  Homolog annotation: Hit_ID=Q6YYC5; Match level="QueryCoverage=45%, HitCoverage=20%, E-value=2e-28, Identity=71%"; Hit description =Copine I-like protein
MFCNVCKTGETFLERTTVGGPNYLGGSVTAVDDEGKGRGLVAGWLGVRVGGGASADPAITEGSAIEGEGEGSRRAWEGAVRDRIVLTELNLYHRHLPPAAVPSAYDAGGGHRRAMLSKKYSYIPDTYTSLDEVAAALREQGLESSNLILGIDFTKSNEWTGRQSFGGQSLHRVGDTPNAPTPRWA

SEQ ID NO: 74808 - protein, 375 aa, Zea mays
  Coding DNA Sequence Number=SeqID_33029
MESHDLRAERESRLVGGNENDGFGIDYGNGKWHSFRLERMARLRHTARKSVIPFLPSRLAERPLRRPVTGQSSHLERLHHRLHKEQEQQGSSFSLQQVVESVRSCSPVLPLEAPPAPPLSAPAPGVAAGGDLDDGGSDSSSSFSTDLSADQELGGWVDRPITRDAARGCHFHDVLDILLRRALDRRTWSIEYRCVVFQHSRGVYPDRWEATCLVRRPENSLRGAEICSERYSISERDTAEAAMQDAARRALSHYCSVLCGVADGLNLKYYTRRPSGSTRGVIVSPVGEDNPRLSSTVNLAVVLNTELDHALDELSRAPAEIAQLRAERAEHRHLDDGSLAPVGTQHPYRSPRSGHQAYGNPDCRTKNKFRTIDRP

SEQ ID NO: 74809 - protein, 371 aa, Zea mays
  Coding DNA Sequence Number=SeqID_33030
MESHDLRAERESRLVGGNENDGFGIDYGNGKWHSFRLERMARLRHTARKSVIPFLPSRLAERPLRRPVTGQSSHLERLHHRLHKEQEQQGSSFSLQQVVESVRSCSPVLPLEAPPAPPLSAPAPGVAAGGDLDDGGSDSSSSFSTDLSADQELGGWVDRPITRDAARGCHFHDVLDILLRRALDRRTWSIEYRCVVFQHSRGVYPDRWEATCLVRRPENSLRGAEICSERYSISERDTAEAAMQDAARRALSHYCSVLCGVADGLNLKYYTRRPSGSTRGVIVSPVGEDNPRLSSTVNLAVVLNTELDHALDELSRAPAEIAQLRAERAEHRHLDDGSLAPVGTQHPYRSPRRGHQSYGNPDCRTKINLEP

SEQ ID NO: 74810 - protein, 149 aa, Zea mays
  Coding DNA Sequence Number=SeqID_33031
  Subcellular localization annotation: CTP_CleavageSite=53; ConfidenceScore=5.33e-01
MAVRLPVIVAEVTSLPFPHFLPSPNLTSFPRTVGATSPDCPTPCGPALQRDCTAVVPSGGGVPWRDSEIGDRIVPREDAPRMPTVVSAATWPPLHRPDPHCQRAHRRRPRLAAQFGLGVRHPAPLLGGTSGGAVLILVVVVKCRANITI

SEQ ID NO: 74811 - protein, 226 aa, Zea mays
  Coding DNA Sequence Number=SeqID_33032
  Homolog annotation: Hit_ID=Q10QZ3; Match level="QueryCoverage=45%, HitCoverage=11%, E-value=3e-35, Identity=74%"; Hit description =Copper-translocating P-type ATPase family protein, expressed
MRLSPARMNPGMERKPFSRKTETVYGPVTGFGDAAACLHKGLAADRGTSATARRDIVLGALGFHYCREPRPPTDWATNQRRCYISRLPLLRADPLSSATARLLFPRVEMAAVNLLAESAAVRLRAPAPPSAGEELAARLTECGFPATARRGGAVAGVGESARKWREMAARKEELLLRSRGRVAWTIVALCCGSHASHILHSLGIHVGHGINRLVLKGIEQTGSSVM

SEQ ID NO: 74812 - protein, 257 aa, Zea mays
  Coding DNA Sequence Number=SeqID_33033
  Gene Ontology: Mol. function=signal transducer activity; Cellular component=nucleus; Biological process=cell division
  Homolog annotation: Hit_ID=Q6EQW6; Match level="QueryCoverage=99%, HitCoverage=61%, E-value=1e-123, Identity=76%"; Hit description =Putative splicing factor
  Pfam annotation: Domain name=WD40; Domain location=174-214; Score =16.5; E_value=0.098; Accession=PF00400.22; Description=WD domain, G -beta repeat
  Pfam annotation: Domain name=WD40; Domain location=218-257; Score =14.3; E_value=0.45; Accession=PF00400.22; Description=WD domain, G -beta repeat
  Pfam annotation: Domain name=WD40; Domain location=37-75; Score=26.4; E_value=0.0001; Accession=PF00400.22; Description=WD domain, G-beta repeat
  Pfam annotation: Domain name=WD40; Domain location=79-124; Score=1.3; E_value=26; Accession=PF00400.22; Description=WD domain, G-beta repeat
  Pfam module annotation: Pfam domain module=WD40::WD40::WD40::WD40; Domain location=174-214::218-257::37-75::79-124
MDHTVHVWNVWDKGNTTARVLKHHTAAVKDLVDVVEGKVMEVFKEDQAVEVIKFNPSNPDLFLSGGSKGSLKLWDIRCGLVTKEFQRSLGTILDIDFSADGRQFISSTDTTRSNISENTIIVWDVLRQVPLSNQVYTEAFTCPCVRYHPREASFVAQSNGNYIAIFSARPPFKLNKYTRFEGHGVWGFPVKCSFSLGGRELASGSSDGSIYFYDYRSARLLRKIEAFKEACTDVAYHPVMPNVIAACSWAGEISVFE

SEQ ID NO: 74813 - protein, 317 aa, Zea mays
  Coding DNA Sequence Number=SeqID_33034
  Gene Ontology: Mol. function=signal transducer activity; Cellular component=nucleus; Biological process=cell division
  Homolog annotation: Hit_ID=Q6EQW6; Match level="QueryCoverage=86%, HitCoverage=60%, E-value=1e-132, Identity=80%"; Hit description =Putative splicing factor
  Pfam annotation: Domain name=WD40; Domain location=15-53; Score=28.6; E_value=2.3e-05; Accession=PF00400.22; Description=WD domain, G-beta repeat
  Pfam annotation: Domain name=WD40; Domain location=194-234; Score =16.5; E_value=0.098; Accession=PF00400.22; Description=WD domain, G -beta repeat
  Pfam annotation: Domain name=WD40; Domain location=57-95; Score=26.4; E_value=0.0001; Accession=PF00400.22; Description=WD domain, G-beta repeat
  Pfam annotation: Domain name=WD40; Domain location=99-144; Score=1.3; E_value=26; Accession=PF00400.22; Description=WD domain, G-beta repeat
  Pfam module annotation: Pfam domain module=WD40::WD40::WD40::WD40; Domain location=15-53::194-234::57-95::99-144
MDHTVHVWNVWDKGNTTARVLKHHTAAVKDVRWSLHRPFLLSGGLDCSLQLVDVVEGKVMEVFKEDQAVEVIKFNPSNPDLFLSGGSKGSLKLWDIRCGLVTKEFQRSLGTILDIDFSADGRQFISSTDTTRSNISENTIIVWDVLRQVPLSNQVYTEAFTCPCVRYHPREASFVAQSNGNYIAIFSARPPFKLNKYTRFEGHGVWGFPVKCSFSLGGRELASGSSDGSIYFYDYRSARLLRKIEAFKEACTDVAYHPVMPNVIAACSWAAELSPPPEPYDPEVDPAMKEALETIRIANEAVNRLLNEATDKILKED

SEQ ID NO: 74814 - protein, 84 aa, Zea mays
  Coding DNA Sequence Number=SeqID_33035
  Subcellular localization annotation: CTP_CleavageSite=71; ConfidenceScore=5.77e-01
MGSSVQATFGFLHPSTSTISPSVQASDSMLTSIAPLLPTFCTSPQPSNSAPPQHSTSQIEVLLVAATDLLRAAAAKVIRAAGPP

SEQ ID NO: 74815 - protein, 328 aa, Zea mays
  Coding DNA Sequence Number=SeqID_33036
  Gene Ontology: Mol. function=calcium ion binding; Cellular component =membrane; Biological process=homophilic cell adhesion
  Homolog annotation: Hit_ID=Q4TIC7; Match level="QueryCoverage=27%, HitCoverage=34%, E-value=3e-11, Identity=42%"; Hit description =Chromosome undetermined SCAF2249, whole genome shotgun sequence
QGSVHSRDTISPRPSPASGRSSRPRWIHASPEGLLKQRAHLRLARGPARAGFAEKQPWLDRLANRPDRRSIQCKDRLTPYPDACSSIDRAEQPSPASGAIGSSASPNPRARTQPRPRKTVSASPDPRARTQPRPRKTVSASPDPRARTQPRPRKTVSASPDPRARTQPRPRKAVSASPDPRARTQPRPRRSHRLAQPRARTDHTAGGPSYEKVAAREDGLTDRLSLSPSRTLVTPYCKRIRLGRRTTRAAATFGFLHPSTSTISPSVQASDSMLTSIAPLLPTFCTSPQPSNSAPPQHSTSQIEVLLVAATDLLRAAAAKVIRAAGPP

SEQ ID NO: 74816 - protein, 308 aa, Zea mays
  Coding DNA Sequence Number=SeqID_33037
  Subcellular localization annotation: CTP_CleavageSite=20; ConfidenceScore=5.61e-01
MASHGATPILTPACGQPRRRCMEARRGSRSAGQRACAPPSSPASKLASPESPFVTVTAIHFRASRNRQSSFGDQEIELFEFYKAEDPEHLIGEGKGTRGVVASSSCRQWGPGTVLALSRLSAEVKKKASRRISRSSRASTSSRIRLATSPISTPEDAARESRVTAVDDAQIHWAVWARVDPILRRSILPDIPPQVHEGMALRNNGPKAFHERHGVVDSRGSGSRCLSIGKVKAMPRVGRDSGGWRVGGQQDALVDVLYGNSPQQNVLYGGVEESGWAKMRKEMGSWSLIYDDDNKEKEVLMVVTESRL

SEQ ID NO: 74817 - protein, 162 aa, Zea mays
  Coding DNA Sequence Number=SeqID_33038
  Gene Ontology: Mol. function=transferase activity, transferring glycosyl groups; Cellular component=cytoskeleton; Biological process= telomere maintenance via telomerase
  Homolog annotation: Hit_ID=Q67VD0; Match level="QueryCoverage=76%, HitCoverage=42%, E-value=2e-57, Identity=76%"; Hit description =Ankyrin repeat protein chloroplast-like
  Pfam annotation: Domain name=Ank; Domain location=1-33; Score=5.1; E _value=5.7; Accession=PF00023.20; Description=Ankyrin repeat
  Pfam annotation: Domain name=Ank; Domain location=34-66; Score=42.4; E_value=1.6e-09; Accession=PF00023.20; Description=Ankyrin repeat
  Pfam annotation: Domain name=Ank; Domain location=67-99; Score=38.2; E_value=2.8e-08; Accession=PF00023.20; Description=Ankyrin repeat
  Pfam module annotation: Pfam domain module=Ank::Ank::Ank; Domain location=1-33::34-66::67-99
MASPLFTRAVIGKKEAVISHLLRKGANPHVRDRDGATPLHYAVQAGALQTVKLLIKYKVDVNVADNDGWTPLHLAIQSRNRDIAKVLLVNGADKTRRTKDGRTALDLSLCFGRDFKSYDLAKLVKLIPANRGFRLSCIHSEGNDPGIYAIRNMALYNGILFW

SEQ ID NO: 74818 - protein, 180 aa, Zea mays
  Coding DNA Sequence Number=SeqID_33039
  Homolog annotation: Hit_ID=Q5Z9Y2; Match level="QueryCoverage=37%, HitCoverage=12%, E-value=6e-15, Identity=57%"; Hit description =Putative xyloglucan galactosyltransferase
MEVILPRRGGRVLEERYLKQPLGDLGFKHSWAVDPVAPEADATVSCGGQAAVELADLRMWLNMFLEGSIVYTRATIVFMRRPNGDLIVGLRHDEEEAVPNTLPNRCSMICFIRGLDVGSHLWGNNSTAADHDTAGLRLLWWLKNQTSFQRSGSWDHFITLGHIFIDLEPENNQAYPSNYR

SEQ ID NO: 74819 - protein, 616 aa, Zea mays
  Coding DNA Sequence Number=SeqID_33040
  Homolog annotation: Hit_ID=Q67VD0; Match level="QueryCoverage=33%, HitCoverage=69%, E-value=1e-91, Identity=74%"; Hit description =Ankyrin repeat protein chloroplast-like
  Pfam annotation: Domain name=Ank; Domain location=453-485; Score =12.5; E_value=0.49; Accession=PF00023.20; Description=Ankyrin repeat
  Pfam annotation: Domain name=Ank; Domain location=486-518; Score =32.5; E_value=1.5e-06; Accession=PF00023.20; Description=Ankyrin repeat
  Pfam annotation: Domain name=Ank; Domain location=519-551; Score =42.4; E_value=1.6e-09; Accession=PF00023.20; Description=Ankyrin repeat
  Pfam annotation: Domain name=Ank; Domain location=552-584; Score =38.2; E_value=2.8e-08; Accession=PF00023.20; Description=Ankyrin repeat
  Pfam annotation: Domain name=PPR; Domain location=179-213; Score =21.2; E_value=0.0037; Accession=PF01535.11; Description=PPR repeat
  Pfam module annotation: Pfam domain module=Ank::Ank::Ank::Ank::PPR; Domain location=453-485::486-518::519-551::552-584::179-213
EDGFKNTITEKATETSVIIAINSASWRFVFNSFRVLEERYLKQPLGDLGFKHSWAVDPVAPEADATVSCGGQAAVELADLRMWLNMFLEGSIVYTRATIVFMRRPNGDLIVGLRHDEEEAVPNTLPNRCSMICFIRGLDVGSHLWGNNSTAADHDTAGLRLLWWLKNQTSFQSNAQALIFTTSMIWVLCKAGKLNDAKELFNQTETARVVPCAYAYNTILMAFATGGYAAMERITQWNLAFTGVGLVGTGIVTSLDLIGSGIAAGDGFVTSGPGPVSSGQGNISVFLWDPGGHAKDRLEQAVFQGVGNNSTGKPGLWSPDAGCLEMLVWAATASPPSTPSAVPFAPPHRAAAPRPPPPLCRSLPGLLCAGLIPPPRAAASDGDVFWEEPDDGSGSDYEDDGPEQRRALRFPSSSPSYRLEASAQQEQDLRREIELLLTPEEKATLDQHETPDPKWHPLHSYALALQIPLMDKLLNSGVDINLVDRDGFTSLHKAVIGKKEAVISHLLRKGANPHVRDRDGATPLHYAVQAGALQTVKLLIKYKVDVNVADNDGWTPLHLAIQSRNRDIAKVLLVNGADKTRRTKDGRTALDLSLCFGRDFKSYDLAKLVKLIPANR

SEQ ID NO: 74820 - protein, 142 aa, Zea mays
  Coding DNA Sequence Number=SeqID_33041
MPPTPPQGIPAARGDLDRDGDDDDDDAGGSSSHDTELSEEPDPEGWIVSHPGFGAPRPGREHHHQKSCYPSAKRQPIPYTSTEEARQGNTTRPLQSSTSFKKLVTVYRKLQCRNPSLDRHRSKINQGPPYTDHSPTALAPFE

SEQ ID NO: 74821 - protein, 197 aa, Zea mays
  Coding DNA Sequence Number=SeqID_33042
MAVRRGIPALELPINCSEFSKASGTLLRPRSVTLPRLLGRDGAYVMLMQGHHHANSGQHIAECAWGSCCSRRDSSHAAKRTSIEAPEIHHRRPGTFLCLWRLVDRASSPQRDSWEESSAAVQLVVLLLWRMDARDASLNACGIARVGVGPGVSGSGAPTGSFIMVASALLSGLVGGEDEDDSWAVDQEMRGSDHMAE

SEQ ID NO: 74822 - protein, 198 aa, Zea mays
  Coding DNA Sequence Number=SeqID_33043
MRDNKLQVARQRPLHHQRDSDLRLGRLDSSSDGLRANATAERARSHPLTGDENQPLKPKSRRSRAQVALTVSLAEATTAPVGSLTSGGHHFSTGDSSHLRTARPLSGWRTDSCTLTRQQQFAFPHMAGGCLLRRAGGCPFSPNGGRRSGSPAHVGGKTQLGAPSSPARMMNILEAEGGAEAAARLASPHHKAGDHPYG

SEQ ID NO: 74823 - protein, 122 aa, Zea mays
  Coding DNA Sequence Number=SeqID_33044
MGLEPRSRAAGCRPWRGGAGAPWKGAGNQGAMDRDSRAAAGRHGRRAEPPACCTPGTEEGGRSYCWECGAMDRGRQLQGSGGQPWLMAAERAEREGKKRSNDVVPWEGAAARHAARAPSWGG

SEQ ID NO: 74824 - protein, 101 aa, Zea mays
  Coding DNA Sequence Number=SeqID_33045
MDRDSRAAAGRHGRRAEPPACCTSGTVEGGRRAEGTQGGGGAMGGACCSPEGGAGHGEERSRAPCCWRGESREEDGAYCCAWEEAVREKWKWRLKNLEGWE

SEQ ID NO: 74825 - protein, 74 aa, Zea mays
  Coding DNA Sequence Number=SeqID_33046
MVVRTLGREGQHDAVCALLDETPLPPGSRLDVHAYTTVLHALSRAGRQALGPSTKYQEFHIHEAKGPNDGSVNS

SEQ ID NO: 74826 - protein, 786 aa, Zea mays
  Coding DNA Sequence Number=SeqID_33047
  Gene Ontology: Mol. function=binding; Cellular component=plastid chromosome; Biological process=positive regulation of transcription, DNA-dependent
  Homolog annotation: Hit_ID=O64624; Match level="QueryCoverage=88%, HitCoverage=85%, E-value=0.0, Identity=55%"; Hit description =Putative salt-inducible protein
  Pfam annotation: Domain name=PPR; Domain location=175-209; Score =37.4; E_value=4.9e-08; Accession=PF01535.11; Description=PPR repeat
  Pfam annotation: Domain name=PPR; Domain location=210-245; Score =11.0; E_value=0.38; Accession=PF01535.11; Description=PPR repeat
  Pfam annotation: Domain name=PPR; Domain location=246-280; Score =32.8; E_value=1.2e-06; Accession=PF01535.11; Description=PPR repeat
  Pfam annotation: Domain name=PPR; Domain location=281-315; Score =48.8; E_value=1.8e-11; Accession=PF01535.11; Description=PPR repeat
  Pfam annotation: Domain name=PPR; Domain location=316-350; Score =29.1; E_value=1.6e-05; Accession=PF01535.11; Description=PPR repeat
  Pfam annotation: Domain name=PPR; Domain location=351-385; Score =51.3; E_value=3.2e-12; Accession=PF01535.11; Description=PPR repeat
  Pfam annotation: Domain name=PPR; Domain location=386-420; Score =25.6; E_value=0.00017; Accession=PF01535.11; Description=PPR repeat
  Pfam annotation: Domain name=PPR; Domain location=421-455; Score =30.5; E_value=5.9e-06; Accession=PF01535.11; Description=PPR repeat
  Pfam annotation: Domain name=PPR; Domain location=456-490; Score =33.2; E_value=8.9e-07; Accession=PF01535.11; Description=PPR repeat
  Pfam annotation: Domain name=PPR; Domain location=491-525; Score =38.3; E_value=2.7e-08; Accession=PF01535.11; Description=PPR repeat
  Pfam annotation: Domain name=PPR; Domain location=562-596; Score=9.8; E_value=0.52; Accession=PF01535.11; Description=PPR repeat
  Pfam annotation: Domain name=PPR; Domain location=597-631; Score =44.4; E_value=3.9e-10; Accession=PF01535.11; Description=PPR repeat
  Pfam annotation: Domain name=PPR; Domain location=632-666; Score =19.7; E_value=0.01; Accession=PF01535.11; Description=PPR repeat
  Pfam annotation: Domain name=PPR; Domain location=668-702; Score =45.0; E_value=2.5e-10; Accession=PF01535.11; Description=PPR repeat
  Pfam annotation: Domain name=PPR; Domain location=703-737; Score =31.8; E_value=2.4e-06; Accession=PF01535.11; Description=PPR repeat
  Pfam annotation: Domain name=PPR; Domain location=738-772; Score =14.8; E_value=0.13; Accession=PF01535.11; Description=PPR repeat
  Pfam annotation: Domain name=TPR_4; Domain location=138-163; Score =9.1; E_value=3; Accession=PF07721.5; Description=Tetratricopeptide repeat
  Pfam annotation: Domain name=TPR_4; Domain location=176-199; Score =8.5; E_value=3.6; Accession=PF07721.5; Description=Tetratricopeptide repeat
  Pfam annotation: Domain name=TPR_4; Domain location=280-305; Score =0.1; E_value=37; Accession=PF07721.5; Description=Tetratricopeptide repeat
  Pfam annotation: Domain name=TPR_4; Domain location=315-340; Score =8.5; E_value=3.7; Accession=PF07721.5; Description=Tetratricopeptide repeat
  Pfam module annotation: Pfam domain module=PPR::PPR::PPR::PPR::PPR::PP R::PPR::PPR::PPR::PPR::PPR::PPR::PPR::PPR::PPR::PPR::TPR_4::TPR _4::TPR_4::TPR_4; Domain location=175-209::210-245::246-280::281
  Pfam module annotation: Domain location=:386-420::421-455::456 -490::491-525::562-596::597-631::632-666::668-702::703-737::738 -772::138-163::176-199::280-305::315-340
  Subcellular localization annotation: CTP_CleavageSite=95; ConfidenceScore=5.27e-01
MEATGRGLFPNKPTLPAGPRKRGPLLPAAPPPPSPSSLPLDSLLLHLTAPAPAPAPAPRRSHQTPTPPHSFLSPDAQVLVLAISSHPLPTLAAFLASRRDELLRADITSLLKALELSGHWEWALALLRWAGKEGAADASALEMVVRALGREGQHDAVCALLDETPLPPGSRLDVRAYTTVLHALSRAGRYERALELFAELRRQGVAPTLVTYNVVLDVYGRMGRSWPRIVALLDEMRAAGVEPDGFTASTVIAACCRDGLVDEAVAFFEDLKARGHAPCVVTYNALLQVFGKAGNYTEALRVLGEMEQNGCQPDAVTYNELAGTYARAGFFEEAARCLDTMASKGLLPNAFTYNTVMTAYGNVGKVDEALALFDQMKKTGFVPNVNTYNLVLGMLGKKSRFTVMLEMLGEMSRSGCTPNRVTWNTMLAVCGKRGMEDYVTRVLEGMRSCGVELSRDTYNTLIAAYGRCGSRTNAFKMYNEMTSAGFTPCITTYNALLNVLSRQGDWSTAQSIVSKMRTKGFKPNEQSYSLLLQCYAKGGNVAGIAAIENEVYGSGAVFPSWVILRTLVIANFKCRRLDGMETAFQEVKARGYNPDLVIFNSMLSIYAKNGMYSKATEVFDSIKRSGLSPDLITYNSLMDMYAKCSESWEAEKILNQLKCSQTMKPDVVSYNTVINGFCKQGLVKEAQRVLSEMVADGMAPCAVTYHTLVGGYSSLEMFSEAREVIGYMVQHGLKPMELTYRRVVESYCRAKRFEEARGFLSEVSETDLDFDKKALEAYIEDAQFGR

SEQ ID NO: 74827 - protein, 70 aa, Zea mays
  Coding DNA Sequence Number=SeqID_33048
MGRITRGPPSCDEAARWDDLVAGLRLMSCGAKGRLEAAVVVVVAGDDREVAVVPEVDGAVTGTARCGAVT

SEQ ID NO: 74828 - protein, 274 aa, Zea mays
  Coding DNA Sequence Number=SeqID_33049
MAVAPERARRWTPSRWLQLHDLDAWWRRICLPRLCRSVAVGSCRVPTALYVILPHPTIFGSVAWAATTSASSVSPTPRCLRALFPSSSHAIAPAPAASSAWPVLPSLDIAPCPRLEVATLSSSSAAPSVAHMSTSPQALRPHPLPLPRQSQVLGQPHCRLLELALCRKEANKDCNYRNAFTNEAHNTRRPRRARYNGPDRTWASELDEAARWEDLVAGLRLMSYRAKGVPARFVSVGPATAVKTSSGGWRLCLRPNICPPRDQFDKVTWCRRHR

SEQ ID NO: 74829 - protein, 108 aa, Zea mays
  Coding DNA Sequence Number=SeqID_33050
AAHYNSPDCPVHHRTVSGAPELSGSELASFGKTEGRSAKIHRTVRCTPDCPVRQRSNGYPAPTVDSDSEQCAIVHAAEVRAERQRGTGLSERERVEKDPSLSGLLNGD

SEQ ID NO: 74830 - protein, 146 aa, Zea mays
  Coding DNA Sequence Number=SeqID_33051
MEGRSAKIHRTVRCTPDCLVRQRSNGYLAPTVDSDSEQCAIVHAAEVRAEGQRGTGLSRCARDCPVPHEDKASNGRPAPTPTDRMTWLAHRTLSGVHRTVPVRPSPAAFSNGYILVGGYKYHPNRPLQERERVEKDPSLSGLLNGD

SEQ ID NO: 74831 - protein, 97 aa, Zea mays
  Coding DNA Sequence Number=SeqID_33052
  Gene Ontology: Mol. function=DNA-directed RNA polymerase activity; Cellular component=nucleus; Biological process=transcription
  Homolog annotation: Hit_ID=Q5WMZ9; Match level="QueryCoverage=45%, HitCoverage=2%, E-value=2e-18, Identity=100%"; Hit description =Putative RNA polymerase II
  Pfam annotation: Domain name=RNA_pol_Rpb1_2; Domain location=23-97; Score=-61.4; E_value=0.0047; Accession=PF00623.11; Description=RNA polymerase Rpb1, domain 2
  Subcellular localization annotation: CTP_CleavageSite=57; ConfidenceScore=5.16e-01
MAPFLRGLIRRFLASKISNPSPLPPNQNASYSYLQTLNALKQSRTQPGGRWSELDLRYVKKSSDQHLELGYKVERHLNDGDFVLFNRQPSLHKMSIM

SEQ ID NO: 74832 - protein, 1830 aa, Zea mays
  Coding DNA Sequence Number=SeqID_33053
  Gene Ontology: Mol. function=DNA-directed RNA polymerase activity; Cellular component=DNA-directed RNA polymerase II, core complex; Biological process=transcription from RNA polymerase II promoter
  Homolog annotation: Hit_ID=Q5WMZ9; Match level="QueryCoverage=83%, HitCoverage=85%, E-value=0.0, Identity=89%"; Hit description =Putative RNA polymerase II
  Pfam annotation: Domain name=RNA_pol_Rpb1_1; Domain location=12-349; Score=560.7; E_value=1.4e-165; Accession=PF04997.3; Description=RNA polymerase Rpb1, domain 1
  Pfam annotation: Domain name=RNA_pol_Rpb1_2; Domain location=351-519; Score=366.2; E_value=5.3e-107; Accession=PF00623.11; Description=RNA polymerase Rpb1, domain 2
  Pfam annotation: Domain name=RNA_pol_Rpb1_3; Domain location=522-686; Score=244.2; E_value=2.8e-70; Accession=PF04983.8; Description=RNA polymerase Rpb1, domain 3
  Pfam annotation: Domain name=RNA_pol_Rpb1_4; Domain location=711-817; Score=201.8; E_value=1.6e-57; Accession=PF05000.7; Description=RNA polymerase Rpb1, domain 4
  Pfam annotation: Domain name=RNA_pol_Rpb1_5; Domain location=824 -1417; Score=555.2; E_value=6.4e-164; Accession=PF04998.8; Description=RNA polymerase Rpb1, domain 5
  Pfam annotation: Domain name=RNA_pol_Rpb1_6; Domain location=890 -1074; Score=345.9; E_value=6.6e-101; Accession=PF04992.5; Description=RNA polymerase Rpb1, domain 6
  Pfam annotation: Domain name=RNA_pol_Rpb1_7; Domain location=1159 -1293; Score=290.9; E_value=2.4e-84; Accession=PF04990.3; Description= RNA polymerase Rpb1, domain 7
  Pfam annotation: Domain name=RNA_pol_Rpb1_R; Domain location=1545 -1558; Score=13.6; E_value=0.7; Accession=PF05001.4; Description=RNA polymerase Rpb1 C-terminal repeat
  Pfam annotation: Domain name=RNA_pol_Rpb1_R; Domain location=1565 -1578; Score=13.6; E_value=0.7; Accession=PF05001.4; Description=RNA polymerase Rpb1 C-terminal repeat
  Pfam annotation: Domain name=RNA_pol_Rpb1_R; Domain location=1579 -1592; Score=13.1; E_value=1; Accession=PF05001.4; Description=RNA polymerase Rpb1 C-terminal repeat
  Pfam annotation: Domain name=RNA_pol_Rpb1_R; Domain location=1593 -1606; Score=19.8; E_value=0.0096; Accession=PF05001.4; Description =RNA polymerase Rpb1 C-terminal repeat
  Pfam annotation: Domain name=RNA_pol_Rpb1_R; Domain location=1607 -1620; Score=17.1; E_value=0.065; Accession=PF05001.4; Description =RNA polymerase Rpb1 C-terminal repeat
  Pfam annotation: Domain name=RNA_pol_Rpb1_R; Domain location=1621 -1634; Score=17.1; E_value=0.065; Accession=PF05001.4; Description =RNA polymerase Rpb1 C-terminal repeat
  Pfam annotation: Domain name=RNA_pol_Rpb1_R; Domain location=1635 -1648; Score=17.1; E_value=0.065; Accession=PF05001.4; Description =RNA polymerase Rpb1 C-terminal repeat
  Pfam annotation: Domain name=RNA_pol_Rpb1_R; Domain location=1649 -1662; Score=20.2; E_value=0.0076; Accession=PF05001.4; Description =RNA polymerase Rpb1 C-terminal repeat
  Pfam annotation: Domain name=RNA_pol_Rpb1_R; Domain location=1663 -1676; Score=19.2; E_value=0.015; Accession=PF05001.4; Description =RNA polymerase Rpb1 C-terminal repeat
  Pfam annotation: Domain name=RNA_pol_Rpb1_R; Domain location=1677 -1690; Score=17.1; E_value=0.065; Accession=PF05001.4; Description =RNA polymerase Rpb1 C-terminal repeat
  Pfam annotation: Domain name=RNA_pol_Rpb1_R; Domain location=1691 -1704; Score=17.1; E_value=0.065; Accession=PF05001.4; Description =RNA polymerase Rpb1 C-terminal repeat
  Pfam annotation: Domain name=RNA_pol_Rpb1_R; Domain location=1705 -1718; Score=18.8; E_value=0.02; Accession=PF05001.4; Description=RNA polymerase Rpb1 C-terminal repeat
  Pfam annotation: Domain name=RNA_pol_Rpb1_R; Domain location=1719 -1732; Score=19.8; E_value=0.0098; Accession=PF05001.4; Description =RNA polymerase Rpb1 C-terminal repeat
  Pfam annotation: Domain name=RNA_pol_Rpb1_R; Domain location=1733 -1746; Score=17.1; E_value=0.065; Accession=PF05001.4; Description =RNA polymerase Rpb1 C-terminal repeat
  Pfam annotation: Domain name=RNA_pol_Rpb1_R; Domain location=1747 -1759; Score=5.9; E_value=24; Accession=PF05001.4; Description=RNA polymerase Rpb1 C-terminal repeat
  Pfam annotation: Domain name=RNA_pol_Rpb1_R; Domain location=1760 -1776; Score=4.9; E_value=37; Accession=PF05001.4; Description=RNA polymerase Rpb1 C-terminal repeat
  Pfam annotation: Domain name=RNA_pol_Rpb1_R; Domain location=1777 -1790; Score=18.4; E_value=0.025; Accession=PF05001.4; Description =RNA polymerase Rpb1 C-terminal repeat
  Pfam annotation: Domain name=RNA_pol_Rpb1_R; Domain location=1791 -1804; Score=5.8; E_value=25; Accession=PF05001.4; Description=RNA polymerase Rpb1 C-terminal repeat
  Pfam annotation: Domain name=RNA_pol_Rpb1_R; Domain location=1807 -1820; Score=14.1; E_value=0.53; Accession=PF05001.4; Description=RNA polymerase Rpb1 C-terminal repeat
  Pfam module annotation: Pfam domain module=RNA_pol_Rpb1_1::RNA_pol _Rpb1_2::RNA_pol_Rpb1_3::RNA_pol_Rpb1_4::RNA_pol_Rpb1_5::RNA_pol_ pb1_
  Pfam module annotation: Pfam domain module=RNA_pol_Rpb1_R::RNA_pol _Rpb1_R::RNA_pol_Rpb1_R::RNA_pol_Rpb1_R::RNA_pol_Rpb1_R::RNA_pol_ pb1_
  Pfam module annotation: Pfam domain module=RNA_pol_Rpb1_R::RNA_pol _Rpb1_R::RNA_pol_Rpb1_R::RNA_pol_Rpb1_R; Domain location=12-349::351
  Pfam module annotation: Domain location=1579-1592::1593-1606::1607 -1620::1621-1634::1635-1648::1649-1662::1663-1676::1677-1690::169 -1704::1705-1718::1719-1732::1733-1746::1747-1759::1760-1776::17
MDARFPYSPAEVAKVEFVQFGILSPDEIRQMSVIQIEHAETMERGKPKPGGLSDPRLGTIDRKIKCETCMAGMAECPGHFGHLELAKPMFHIGFIKTVLSIMRCVCFNCSKILADEDETKFKQALKIRNPKNRLKRIYDACKSKKVCAGGDDLDVQEQDTDEPIKKRGGCGAQQPNITVDGMKMVAEFKAPKKKTDDQDQLPEPVERKQILSAERVLNVLKRISDEDCLLLGLNPKYARPDWMILQVLPVPPPPVRPSVMMDTSSRSEDDLTHQLAMIIRHNENLRRQERNGAPAHIITEFAQLLQFHIATYFDNDLPGQPRATQRSGRPIKSICSRLKAKEGRIRGNLMGKRVDFSARTVITPDPNINIDELGVPWSIALNLTYPETVTPYNIERLKELVEYGPHPPPGKTGAKYIIREDGQRLDLRYVKKSSDQHLELGYKVERHLNDGDFVLFNRQPSLHKMSIMGHRIKIMPYSTFRLNLSVTSPYNADFDGDEMNMHVPQSFETRAEVLELMMVPKCIVSPQSNRPVMGIVQDTLLGCRKITKRDTLIEKDVFMNILMWWQDFDGKIPAPTILKPRPIWTGKQVFNLIIPKQINLIRFSAWHSEEEKGFITPGDTMVRIEKGELLSGTLCKKSLGTGSGSLIHVIWEEVGPDAARKFLGHTQWLVNYWLLQNGFSIGIGDTIADASTMETINDTISKAKNAVKELIKKAHEKQLEAEPGRTMMESFENRVNQVLNKARDDAGSSAQNSLSESNNLKAMVTAGSKGSFINISQMTACVGQQNVEGKRIPFGFIDRTLPHFTKDDYGPESRGFVENSYLRGLTPQEFFFHAMGGREGLIDTAVKTSETGYIQRRLVKAMEDIMVKYDGTVRNSLGDVIQFLYGEDGMDAVWIESQKLDSLKMKKPEFDNVFRYELDDENWRPNYMLPEHVDDLKTIREFRNVFEAEVQKLEADRYQLGSEITTTGDNSWPMPVNLKRLIWNAQKTFKIDFRRPSDMHPMEIVEAIDKLQERLKVVPGDDAMSIEAQKNATLFFNILLRSTFASKRVLKEYRLTKEAFEWVIGEIESRFLQSLVAPGEMIGCVAAQSIGEPATQMTLNTFHYAGVSAKNVTLGVPRLREIINVAKKIKTPSLSVYLKPQVNQKKELAKNVQCALEYTTLRSVTHATEIWYDPDPLGTIIEEDTEFVQSYYEMPDEDIDPDKISPWLLRIELNREMMVDKKLSMADIAEKINREFDDDLSCIFNDDNADKLILRIRITNDEAPKGEIQDESAEDDVFLKKIEGNMLTEMALRGIPDINKVFIKEGKVNTFYQDDGFKAANEWMLDTEGVNLLAVMCHEDVDATRTTSNHLIEVIEVLGIEAVRRSLLDELRVVISFDGSYVNYRHLAILCDTMTYRGHLMAITRHGINRNDTGPLMRCSFEETVDILLDAAVYAESDHLRGVTENIMLGQLAPIGTGGCALYLNDQMLQQAIELQLPSYVEGLDFGMTPARSPITGTPYHEGMMSPSYLLSPNIRASPINTDASFSPYVGHMAFSPFPSPGGYSPSSGGYSPSSPVFTPEKGYSPLSPSYSPASPSYSPTSPSYTPGSPTYSPTSPNYSPTSPTYSPTSPSYSPTSPSYSPTSPSYSPTSPSYSPTSPSYSPTSPSYSPTSPVYSPTSPAYSPTSPAYSPTSPSYSPTSPSYSPTSPSYSPTSPSYSPTSPSYSPTSPSYSPTSPAYSPTSPGYSPTSPSYSPTSPSYSPTSPSYNPSSAKYSPSHAYSPSSPRMSPYSQTSPSYSPTSPTYSPTSPSYSQPSPSYSPTSPSGSYSPTAPGYSPSSTGQGNDKDDKSAR

SEQ ID NO: 74833 - protein, 288 aa, Zea mays
  Coding DNA Sequence Number=SeqID_33054
  Homolog annotation: Hit_ID=Q8LQG2; Match level="QueryCoverage=53%, HitCoverage=34%, E-value=2e-19, Identity=36%"; Hit description =Selenium-binding protein-like
MVHISDIKLIRTDTTLDLSQKAEKDSASRLRAAEYSSHASARAAPPHSRSCATHTSSPRATSPAPRCGYPTSSCSPLRPSRRLRAPPGARRSRPIPLEHVCPSPRPRIALLCFACGRTPTRFPLSSRVKACGRAPGCRAGLLVHAEAVRRGMGVDIFSLHGERAHQLWTGSRRNVFDEAGGASRSWNTMGAGYTGCGRWGSRRSCSTKWSWETCSLGGLDGRARSLFEETMERNVILWTIFIDGHVRCSGAKEALEYFQTEQFGARKIASLLFRKVFVLNLLDWMVVR

SEQ ID NO: 74834 - protein, 157 aa, Zea mays
  Coding DNA Sequence Number=SeqID_33055
MAHQTLSGAQAEALYELTALGFSQRASTISHRTVRSQNCKVRTHQIVRCRKWTTDSNDQQLQTPTVLPIHPLVDFYQLKGMKKRLKEAEEQYKHQLASHHTRPSRPPREHVSQLHFVEQLLREPHLPHPVYPAPMVFHDLEAPPASSNTFLREPVQS

SEQ ID NO: 74835 - protein, 779 aa, Zea mays
  Coding DNA Sequence Number=SeqID_33056
  Gene Ontology: Mol. function=RNA-directed DNA polymerase activity; Cellular component=exocyst; Biological process=exocytosis
  Homolog annotation: Hit_ID=Q8RZJ0; Match level="QueryCoverage=85%, HitCoverage=99%, E-value=0.0, Identity=70%"; Hit description =Putative leucine zipper protein
  Pfam annotation: Domain name=Exo70; Domain location=194-773; Score =314.6; E_value=1.8e-91; Accession=PF03081.6; Description=Exo70 exocyst complex subunit
MHFYKKLMSRTERPDNRWIDLRWTYAQQPAVLQTIWFRTALRNEYRPYDQERTISDEEANQAWSHLKPPAQRSGQISRLHFASPSISFLFSPPLPRPFSHPRSKKPPIPRQSRMAAAAPPDGQEKVIAAAQHIVKLLASSKNAADDMIRILSGFDNRLSLMSDLFTPPPAAAAVGSILEADEGTQREGDEADYDEDDAAARAEAEWDVAAEVVERRVSPAAGAAEVVERRVSPAAGEALVFDSREGAEEYLAAVACLVGAPGPRAEAALQAAMTRLEDEFRHLLVRGAPPLAPEDLQTSLLRRLSLTVPSFNSSAVDLDCHSFAHHPAAVGGDEQQCGRSSASDDETLPYLMAPDTVSALRDIADVMLRAGYAPELCQVYGEVRRDTLMERLAVLGIDKMSLEEVQQVEWGVLDGKTKKWIQAFKVVVRGLLAEERRICSQILAADPNAEEECFTEAAKGCVLQMLNFADAIAIGKRSTEKLFRILGMYEALAEVLPELEGLFSGDAKDFIKDEAEGILRVARLKSLLMPYRERLLGVGDRCLVGRSIPLTRYVMNYVCLLADYNASLNRLLEYWDTELTGVDNPNTTPLGHCVFMLITHLQCKIDEKSRLYEDEALQNIFFMNNLLYIVQKVKDSELKTLLGDNWIRKHRGQIRQYSTGYLRSSWTRVLACLRDDGLPHTMGSSGALKAALKDRFKNFNLAFEELYRTQTSWKVVDPQLREELKISISEKVLPAYRSFVGRFHGQLEGGRGSARYIKYNPDDLENQVSEFFEGRKPNA

SEQ ID NO: 74836 - protein, 272 aa, Zea mays
  Coding DNA Sequence Number=SeqID_33057
  Homolog annotation: Hit_ID=Q1SU13; Match level="QueryCoverage=87%, HitCoverage=52%, E-value=2e-37, Identity=39%"; Hit description=IMP dehydrogenase/GMP reductase
MRLGVPFIAPRQLGAVGGQLGRPNLPSVGCVPAPLVVSDSGEKMLASEALAATFHLSKADLEWFDGKPSLFSSRCGAGEACLKVLVYTDRKGSACGVSSGRLLGKATVPLDLKRAEAKPAVLHISSKAKLKFLNLSFRAALSAPDEPIVCGSPSSLRQANTLVHDDRRYPVEYCLIDHDVLQVRGSMRQPIFTCKFGCRSNSDLRRPGMRPERDAMEHKGWSVTVHDLKGSPVAMASMVTLFVPSLGTDRVSRSNPGAWLILRPAADGAWQP

SEQ ID NO: 74837 - protein, 149 aa, Zea mays
  Coding DNA Sequence Number=SeqID_33058
KDLILLAKTGPGRTDAFTLPIPQELLSNRQAEQAFFNYMLSPMRRVQEDGHFMLPIPQELLSNCQAEQSFFACLLSPMMLIVDQFEVLRSTIGLRYSVASVIDAIVEENGEARKWCGVVASSYGRIAGHHRLRETHLLGRFVPDACFQQ

SEQ ID NO: 74838 - protein, 136 aa, Zea mays
  Coding DNA Sequence Number=SeqID_33059
MGNEQYIGEIEGAIGIENGNTGGSEEVVRCCRQQLWQDRRSPPSKGNSPPWEICSRCMFSARHIPMSPADVYITTNMCSYNKKVGVTVAQGSKDVGASRIIGIDIDYKKFDVGVAYILAIMFISFHCPPLLVFISW

SEQ ID NO: 74839 - protein, 283 aa, Zea mays
  Coding DNA Sequence Number=SeqID_33060
MGNEQYIGEIEGAIGIENGNTGGSEEVVRCCRQQLWQDRRSPPSKGNSPPWEICSRCMFSARLLRVQKMLVLLELLALTLTIKSLMLETTIKDRIQEGLKRQCRLELNLSGEDSDSMFYNIQIPTTIKNKSIDLTGLPHIALLHSGKNKKIQSTSDISDDDKTKGNEDHIDPFNPKNINHLTSIKELPYELFQKIQTKLDVDLKAFLKSCTKDHRNKVTQFLEPNFNDSIASISIALEVNDKLKYDDDPFPTHDANAKMLQDHRMFTSNNLMIVVNMVMSRFD

SEQ ID NO: 74840 - protein, 144 aa, Zea mays
  Coding DNA Sequence Number=SeqID_33061
MFKILPRKNKKIQSTSDISDDDKTKGNEDHIDPFNPKNINHLTSIKELPYELFQKIQTKLDVDLKAFLKSCTKDHRNKVTQFLEPNFNDSIASISIALEVNDKLKYDDDPFPTHDANAKMLQDHRMFTSNNLMIVVNMVMSRFD

SEQ ID NO: 74841 - protein, 53 aa, Zea mays
  Coding DNA Sequence Number=SeqID_33062
MAMAGGQEQRSRCQPSLRPIQGQRENPLSRDRERGIPRKGSFSVKETCPEPPY

SEQ ID NO: 74842 - protein, 433 aa, Zea mays
  Coding DNA Sequence Number=SeqID_33063
  Homolog annotation: Hit_ID=Q6QP51; Match level="QueryCoverage=26%, HitCoverage=55%, E-value=2e-12, Identity=42%"; Hit description =Putative growth-regulating factor 1
MAERYQLPRSCVPPTTRRKDCGCSPSGGSEGGKARCIREREDMVAFQGGHPPFKGNSPYFRPQPSRAESSPTRSKVLPLWHGGWVPRVMQASPGQKKPNRRARCMQLPSSYKHSSTFAQASGPTRHATGTPVATCKQLHRHSHHYHASSTAEPAGRSSGHVVSQAYVPIQGQRENPLSRRERRRARVPFLERLAHAQRPPREPLAPTHLTPRRGQAGASGRRSEATLSPFAIMTASKKAPSLPTDQRFKGWPLGGVQQPPQSAWVPHPLLVRGSKAGPSEGFNGRLRPLGLRAHYCSGVRRLALEGGNDLVTESHQREASSPQTPSKGDRVRQITRSSPETPCSAPSEGNMALPPLLLAERRRRGVCKKVEFVRDRPLALCRGSEAALANPAPAKPLTASTYQPENLGPDRAPGLRPARMRERPDQPKHCARH

SEQ ID NO: 74843 - protein, 85 aa, Zea mays
  Coding DNA Sequence Number=SeqID_33064
MSSSSSSAANTPSADASSEDTLSNVAAEELHPGDTVEFGVSRISSKRKIGHKIAQFGSCTFTPRTGKTSMEVVELVPCARNKWGN

SEQ ID NO: 74844 - protein, 715 aa, Zea mays
  Coding DNA Sequence Number=SeqID_33065
MPSSSSSAANTPSADASSEDTLSNVAAEELHPGDTVEFGVSRISSVRIQDMQQLGYFGSGVGRVPGAKEVLQRFEVQVHQLTSNVVVALAKYVWAATSYGGQPSVEVFAKHYCEVEDHPGLLVVVMCSHYYVAYPQFDVAEDDEDEGALRCAARMSSGRDLVEEFIGYGVWPLAHGWALGEVCPREMPSLGGQWVRSPAFVLDLHGQDPAAFVREAEDGAARIVGRYVPRTKGCRAGISLGPTPRGKDVFARAPGVFGANAGETPGGRLDRGSYARGEKGAGSAKAAASGGSKLVPAAKPAAPGHGKASASAKAAAAGGSKPPPGGLEKGQRPLLPARRIADFGTNISVDDYLVDEGQLAVVPPPVVTTSPMAVVGAKGAAWDSWATFCASGEILSAAAAKDVAGSMSQRLREALQQLKQTADFADLVASGALTADVAAEVEHLRAHHANAVREKSAAESKNRRLSEKAEAKVARAEGSLAHQRAEELEARFNALRSRVDKAESSTRAEVERTHAQFVDAYHELGAWTADFKVPGQEAGLRFLEWLQEELLVLPTIVTGFMSFASLVTCEGAMNALSREGCRHYEVFDQADDNFECEIFKVEYPVVKESVGALFDRMWGPHGREAVRERSDRAIEQMAHAEDVKDLVGLDGALPEAAEVDLVPPSNAGEGPSPTPALAAAGEDPAPAPVPTSEGALKAVAEPAAEDPTAAAGPSQ

SEQ ID NO: 74845 - protein, 300 aa, Zea mays
  Coding DNA Sequence Number=SeqID_33066
MEYGYYRRFIEGFSKIVKPLTSLLEKVVVEEIPVDLPRIRVVHGVILEDSSEELLPMPTLLAESLAFAAGLSASARPAPAVQAPAPGGDDSDDSGDDDEDDDDEEDDKENVNKEANNVCSAGLLHGVWACHRTLHINVRDMALPQPAARRVACVGNLRSTLVRDKAPLSTYAASVSDVARWTLWSLSHTYWQQLHDMKFRHLPLHLSGGSQTSIVPGGTGEDHLNTLAGVLAGLNTDLDSATLDLSRVHLELEDAHARIAALEAQFQGRDPSEAQVPAMALSPPCKRIRYGEPRSITKLL

SEQ ID NO: 74846 - protein, 236 aa, Zea mays
  Coding DNA Sequence Number=SeqID_33067
  Subcellular localization annotation: CTP_CleavageSite=39; ConfidenceScore=5.05e-01
MANGPKTDFRPRPRKRARGRARDPPVVPPRETWKFGSTREGKRNSPKSWEGVSSAEPRTPSRPSRGRSAPYRAQLRLALLAAWPAVRLRWRMSCLGPVTAWRTPAAVRPTPGARVPSLVWASYACCVEKCLRAATRPTGSRARYTLPSSSSPPGVRLVGSREPAAFASCRHRPMAGGTEDTSLALLVSDVAHAEGRRRVGVTRPRIGSARMNDGQPGTTPPRGGWRWPVCEDVLPG

SEQ ID NO: 74847 - protein, 490 aa, Zea mays
  Coding DNA Sequence Number=SeqID_33068
  Homolog annotation: Hit_ID=Q8TGM6; Match level="QueryCoverage=15%, HitCoverage=62%, E-value=5e-10, Identity=55%"; Hit description =Protein TAR1
  Subcellular localization annotation: CTP_CleavageSite=39; ConfidenceScore=5.33e-01
MAHLELPILWHGSPKQPRRPTYLKRAPTRTLHRRSGSVSGAAREGLPLVSFLAHLRPLRRSAPRGAPEARGYRPCRRRLPGAPRAPGLWPPARATTVHAPSQSADQQEPFRIRPVRVASPHPLPSRQFQALFDSLFKVLFIFPSRYLFAIGLSPVFSLGRSLPPDLGCIPKLPDSLTAPRGATGSGPDRALTLPGVPFQRTWARSVAEDASPDYNSGGEAARFSSWAAPGSLAVTRGILGRMAGRAPGRCTENNLMSPTTCCVRRGSPAAPASAHLALRRGGPDATSLAPRGGVGSVFWRDAQADVLSARRLRAQLAFKNSMVRGILQFTPGIAFCYVLQRCESRDIRCRESCRLRCNRCPGSGRRADRSAGQEVVLVFLGARGAVGSFSRPPFPAGDKHMTTGRINQVARPRRQASAGLRAEASCRAGRRSFGRTDSWARDANASPAFSVSHIRDQKRQRGVLGAAGHRPMAARGKHRGRSRADEPHPG

SEQ ID NO: 74848 - protein, 187 aa, Zea mays
  Coding DNA Sequence Number=SeqID_33069
  Gene Ontology: Mol. function=glutamate synthase (NADPH) activity; Cellular component=chloroplast; Biological process=metabolic process
  Homolog annotation: Hit_ID=Q9ZNX7; Match level="QueryCoverage=88%, HitCoverage=7%, E-value=6e-62, Identity=72%"; Hit description=NADH dependent Glutamate Synthase precursor
  Pfam annotation: Domain name=GATase_2; Domain location=59-187; Score =20.5; E_value=1.5e-12; Accession=PF00310.11; Description=Glutamine amidotransferases class-II
MAQGHISLSMSYEHNHVNCSGALRAVEESACDAEVVRPLSKLPNSSIGLYDSSFERDACGVGFVAELSGDYKHVTVNDTIEMLERMAHRGACGCEKNTGDGAGIMVALPHDFFKEVAKDAGIELPPLGEYAVAMFFMPTDEKRRKKGKAEFKKVAESLGHVILGWRLVPTDNSDLGESALETEPVIE

SEQ ID NO: 74849 - protein, 233 aa, Zea mays
  Coding DNA Sequence Number=SeqID_33070
  Gene Ontology: Mol. function=glutamate synthase (NADPH) activity; Cellular component=chloroplast; Biological process=metabolic process
  Homolog annotation: Hit_ID=Q9ZNX7; Match level="QueryCoverage=73%, HitCoverage=7%, E-value=4e-61, Identity=69%"; Hit description=NADH dependent Glutamate Synthase precursor
  Pfam annotation: Domain name=GATase_2; Domain location=105-233; Score= 20.5; E_value=1.5e-12; Accession=PF00310.11; Description=Glutamine amidotransferases class-II
MTVRVVMRYLVNKLGLEDDSQHRLTKHLGEPHKAQATSHLLESRESYRQMANCGLWELEKQATNCSGALRAGKESACDAEVVRPLSKLPNSSIGLYDSSFECDACGVGFVAELSGDYKHVTVNDTIEMLERMAHRGACGCEKNTGDGAGIMVALPHDFFKEVAKDAGIELPPLGEYAVAMFFMPTDEKRRKKGKAEFKKVAESLGHVILGWRLVPTDNSDLGESALETEPVIE

SEQ ID NO: 74850 - protein, 98 aa, Zea mays
  Coding DNA Sequence Number=SeqID_33071
MARVTCTNQANGWTVECCALGSREPVLNLFPLQMLVCDLCLLNPAILAPSEVFETRTGACGPDNLGGSATKMRIRLKKKKMKIKKMSHLRRKTLIKER

SEQ ID NO: 74851 - protein, 70 aa, Zea mays
  Coding DNA Sequence Number=SeqID_33072
MAGVTCAHLASGWMVGYYALGSQFPLQMLVCDLCLLVPAILAPSEVFETRTATCGPDNLGGSATAGKKVH

SEQ ID NO: 74852 - protein, 336 aa, Zea mays
  Coding DNA Sequence Number=SeqID_33073
  Homolog annotation: Hit_ID=Q8SA97; Match level="QueryCoverage=18%, HitCoverage=11%, E-value=6e-11, Identity=64%"; Hit description =Ornithine carbamoyltransferase
MALPIDVVGLRPRLGDVEAPPRSGSSLSSVAVVESEPLGRARRRPSAEARAESEPWGRAKRSSSSSRAEPKSEPWVGRSGVRRLLGLGPSPSLGSGGAEFAVFQGLAQPESEPWVGRSGVRRLPGLSPSPSPGSGGAEFAVFRGLAQGLSPSPSPGSGGAELPMVPEVEPDCLSASLCQVALQSATFALNAPAIWSVGAAIWSGLLLGEDRASGKPELCADGGYQLRIRSLEEPGLREQPPSLCTGREDDQGQTRLFYICPCVAFPQGGGGKAPCCPRWAPNMVSPVSCWRVIRADVRAPFARGRLEAQRRAQKYLRVIYRTWSPVDGVRGLDASL

SEQ ID NO: 74853 - protein, 205 aa, Zea mays
  Coding DNA Sequence Number=SeqID_33074
ILEIRLKRGRPIWDGRWGSGGRPGLLLRLAGAAALVPAAEGSPETRGTGDWRGSGAIRVVGEVGEGTGTPLVGSGSGQRRRRGAVHGGAARRRGYSTPASNQTQQRAKQRAIGAGEVRYLKAGSGDSSAATGTRRELGSTVAAARRTTGERGQREIGRGRGNWGAFRVADVGAELTGAKGAAELQRRRGTELGTAGLWRRRSACA

SEQ ID NO: 74854 - protein, 541 aa, Zea mays
  Coding DNA Sequence Number=SeqID_33075
AARIRFGLIKTGPPDLGRTVGIGWPAWASPTASWGGGARPRGGGLAGDEGHGRLAGLWGNPSGRGGRGGHGDSIGGVWVGAEAPEGGGSRRGGSAPGLLYSGEQSNATESKTKAIGAGEVRYLKAGSGDSSAATGTRREPGSTVAAARRTTGECGQREIGRGRGNWGAFRVADVGAELTGAKGAAELQRRRGTELGTAGLWRRRSACAQRGGERVYWGANGGGGEGEWGSGLKWPGARWGEFHARRGRGEGGREQLGRRLREEDGADSPGPRAERESEGASARGESGSADRWGRASSERGRRPSRAESSLARSKVLPLRHGGWAPTRHASRPRAEEAKPPRAVHATVQRLQMSLHFRPDQRVKGRAAMQAACNRAKWAHLSDFQRAQHGSPGPSVMQPVHRMLRASNCTATRATATPPRLRNQYRDSRQPYARPSSANLARWRSKRRFTFTIMTASKEAPSLPTDQRFEGWPLEGFDNRLRARGLHTHYWSEAGPRRVHNRLRHRARDDHGYVRYITKARAALPRSPAGTFGRASGPLADP

SEQ ID NO: 74855 - protein, 119 aa, Zea mays
  Coding DNA Sequence Number=SeqID_33076
  Subcellular localization annotation: CTP_CleavageSite=37; ConfidenceScore=5.37e-01
MHAACNRAKWAHFSDFQHAQHGGPGPRVMQPACRMLRASNYTATRITATPHRLRNQYRDSRQPYARPSSASLARRRRLWQEKQATLRLRHNDRVKKGSKAGPPEGFNDRLRLLGLRAHY

SEQ ID NO: 74856 - protein, 184 aa, Zea mays
  Coding DNA Sequence Number=SeqID_33077
  Subcellular localization annotation: CTP_CleavageSite=39; ConfidenceScore=5.32e-01
MVVTGGQKQRSRRQPSSRPIQGQRGSPLSRREDGALVIRSSNGSHTRNDRLANRSPRRINSAAGQAAPQAEKQATLRLRHNDRVKKRLGLRSRGTLGHFRDQRERSCNGIPSEGGIEPSDPVKGDRVRQITRRGSGAALANPAPAKPLTASTYQPENLGPDRALGLRPARMREQLGQPKCCEAH

SEQ ID NO: 74857 - protein, 223 aa, Zea mays
  Coding DNA Sequence Number=SeqID_33078
  Homolog annotation: Hit_ID=Q6QP51; Match level="QueryCoverage=66%, HitCoverage=58%, E-value=4e-11, Identity=50%"; Hit description =Putative growth-regulating factor 1
MPHEGTIKPVEASRKAFRPQRSQTTPPRPRGLYPAGALACTHQNKAKTEKGRSPHRKCGKSLQASTNTPFEARGLLSGTIIRGTPNAPNHGWKTAPLALLRLPCQPPRPRLTTSHDQPPSSASGTTGSSASPDLRLRPREEVSASPDLRLRPREDVSASPDLRLRPQEEVSASPDLRLRPRPRPREESRPRPTPASASREVSASPDLGLGPTAPTGDTSLPYS

SEQ ID NO: 74858 - protein, 125 aa, Zea mays
  Coding DNA Sequence Number=SeqID_33079
  Subcellular localization annotation: CTP_CleavageSite=73; ConfidenceScore=5.49e-01
MRWKSPSPSPFLENSAARPAPTTVSTTQAKTDNKSRSTTEFDLGRNRKLRLARPQAPASGGGFRLARPQAPASAPALGGGLRLARPQAPASTPASGGITSSPDPGLGLKRSLCLARPWARTDCAN

SEQ ID NO: 74859 - protein, 239 aa, Zea mays
  Coding DNA Sequence Number=SeqID_33080
  Homolog annotation: Hit_ID=Q6QP54; Match level="QueryCoverage=44%, HitCoverage=37%, E-value=2e-29, Identity=63%"; Hit description =Putative kinase
  Subcellular localization annotation: CTP_CleavageSite=30; ConfidenceScore=5.10e-01
MSPGHWVPTVGASDRWATGQSSGAPDRRPLAQIAVAPLAHRTVWCYTRQSAQPLRVVGLIGTLLVHTSRVRDVVTCLLASSERPEDRGVPGPTSVVACPSPDGSSARASAKGESEAAGDRRERGGNSAAFVLRAVVVTEYVGRHHCLSGGASQMGRRSCFLRPESARGRVMMAPPVDVAGLRPRLGDVEAPPKPRSSLSSVAEAESEPLGRARRRSSAEARAESESWGRAKRSSSSSGT

SEQ ID NO: 74860 - protein, 115 aa, Zea mays
  Coding DNA Sequence Number=SeqID_33081
MALATLDIDIMFVVASSPSTCSDPCLAIDSDVATFLCRVGCAPTAQQDVLLASSPSTVLPWRGCPHSPHLRVFWMSAQPLRVVGLIGTLLVYISRVRDVVTCLLASSERPGEKIP

SEQ ID NO: 74861 - protein, 76 aa, Zea mays
  Coding DNA Sequence Number=SeqID_33082
MAIWPRLLLREACPSWASGESKLRLGVLGVPLIMVPDTRAEWESQLAGKVCNLCRVLETGISAVLTIMSSLGILFD

SEQ ID NO: 74862 - protein, 191 aa, Zea mays
  Coding DNA Sequence Number=SeqID_33083
  Subcellular localization annotation: CTP_CleavageSite=63; ConfidenceScore=5.51e-01
MAPSPLDKGKGAASSASALGSSVGASSSAAPKATPPLPDTRPTDGSGSQQQGSAEGGAGGPLLAAARTAPLASHALAGDPTTVASASGGVAAAEKVPAGGSVPTPNTGVTQGALSHPVLEGKPYANHRIPRLLITASMADIPVSNTLQRLHTLPTSCDSHSARGSSLPIDNYQGDLTGSHYVAFTKISQRS

SEQ ID NO: 74863 - protein, 82 aa, Zea mays
  Coding DNA Sequence Number=SeqID_33084
MSQAFERTKHMPRNMVNRGLYPSRDLRRGLPFRLWWVQVRSLHDGSRGSLEDMVAGVTWPSILPPGWTVEWDPASAEEEHEE

SEQ ID NO: 74864 - protein, 100 aa, Zea mays
  Coding DNA Sequence Number=SeqID_33085
MGIGCPRDKNWIRIKCVPWGQAFERTKHMPRNMVNRRLYPSRDLRRGLPFRLWWVQVRSLHDGSRGSLEEMVAGVTWPSILPPGWTVEWDPTSAEEEHEE

SEQ ID NO: 74865 - protein, 338 aa, Zea mays
  Coding DNA Sequence Number=SeqID_33086
MERPAEVVVVGSGGAPGPVVEQVGAIMEVLALTVSTTMMAAGSGALPPSYEESRDRSPSGQTNNCWTKFVGTVYSSAGIALQEKREKRIAETPIQHMKGDEGNQEPTSKRKGTTTKLTPGTQSINQSAVEAQAEINDWVGEREERGSGRGKEIRREEEICGNRTNKEEPNHEPPEKMQEHSRWRTAKVAHDFRSAPFRAAAIRPPRRLLDTIGPCLGCDFWVDSLGFEPGWRWLLGTTGYWVPPCRAWERSAPASGPRRRRKREGELNGDSQRMTGSRRRALMEADDGIWEWQLRLAGWMAGCGLDGGRECRSRRSRRPRRAGVQVAAFAAAAAGGLR

SEQ ID NO: 74866 - protein, 234 aa, Zea mays
  Coding DNA Sequence Number=SeqID_33087
  Homolog annotation: Hit_ID=Q652P6; Match level="QueryCoverage=32%, HitCoverage=18%, E-value=3e-17, Identity=70%"; Hit description =Putative genetic modifier
MTAWGCQRPDRPIDEARRRLPGGPSHEAAAGEGGGQGSAGDDMERPAEVVVVGSGGAPGPVVEQVGAIMEVLALTVSTTMMAAGSGALPPSYEESRDRSPSGQTNNCWTKFVGTVYSSAGIALQEKREKRIAETPIQHMKGDEGNQEPTSKRKGTTTKLTPGTQSINQSAVEAQAEINDWVGEREERGSGRGKEIRREEEVPAADRAIGRPRRRRWVAEEQEVASAVAELWLVG

SEQ ID NO: 74867 - protein, 76 aa, Zea mays
  Coding DNA Sequence Number=SeqID_33088
MKYYLRLVLYLKVNEVLFEVGIVSEVFVVTYGSDRTGYNLASYVARGGVRCGFIPLEVLVAHQGEWEVAAHPPSLS

SEQ ID NO: 74868 - protein, 123 aa, Zea mays
  Coding DNA Sequence Number=SeqID_33089
  Gene Ontology: Mol. function=hydrolase activity, hydrolyzing O -glycosyl compounds; Biological process=carbohydrate metabolic process
  Homolog annotation: Hit_ID=Q9XE93; Match level="QueryCoverage=59%, HitCoverage=11%, E-value=4e-18, Identity=67%"; Hit description =Exhydrolase II
MVRPYRYNLASYVARGGVRYGFIPLEMMWFYTLRDHGTQQFNNYQNFITILTDHIYSGLIRMSWIDDVMTRILRIKVTMRLFGNLMLDPSFADQLGKQEHKNWSGRGGLGAVRKSAPQEQQVR

SEQ ID NO: 74869 - protein, 239 aa, Zea mays
  Coding DNA Sequence Number=SeqID_33090
  Pfam annotation: Domain name=DUF1336; Domain location=57-192; Score= -78.7; E_value=0.0002; Accession=PF07059.3; Description=Protein of unknown function (DUF1336)
MTTVVPFMESVYDRVQSPWKRRGGSGGGGRIQSDLFQSTVGLVAVVVMGGLLLSEAMIRFVPERGGVGGRRRLGRAVAVVANWKKARVVERYNWFFTCLFPNHSGVVILSLPHHPTRSTVVGRKLGDRQAVLHLALGAIMSVTIDMGRQAVLHLALGAIMSVTIDMGFLVESQPEEELPERLFGAMRIAQMEMGTTGIIHEQVPSNLDLSDLSQNHSVKKHKGYEGWNEAEAVRKGASA

SEQ ID NO: 74870 - protein, 47 aa, Zea mays
  Coding DNA Sequence Number=SeqID_33091
MARKRAKCARGTLRLGPFGLKSKSQCEEAQGNEGWNRAEAVRKGASA

SEQ ID NO: 74871 - protein, 86 aa, Zea mays
  Coding DNA Sequence Number=SeqID_33092
MPKLFCAQLRLCSILRFPCASSHCDFDSSPKGPSPKLYKFAILTKSKILKNSEIWGSKIDRIQLNSDLGIWGFMGYLLQIIKNFII

SEQ ID NO: 74872 - protein, 139 aa, Zea mays
  Coding DNA Sequence Number=SeqID_33093
  Gene Ontology: Mol. function=translation elongation factor activity; Cellular component=cytoplasm; Biological process=translational elongation
  Homolog annotation: Hit_ID=Q84VH4; Match level="QueryCoverage=39%, HitCoverage=13%, E-value=1e-23, Identity=94%"; Hit description =Translation elongation factor-1 alpha
MPKLPCAQLRLCSILRFPCAYSYCDFDSSPKGPSPKQCAGINVGNKTLNMVGGGGINCPHPPGHQLAVTSTFLRMGAMDSPMLSNPDKIAFVPISGFEGDNMIERSTNLDWYKGPTLLEALDQITEPKRPSDKPPRLPL

SEQ ID NO: 74873 - protein, 37 aa, Zea mays
  Coding DNA Sequence Number=SeqID_33094
MPKLPCAQLRLCSILRFPCASSYCDFDSSPKVIGVVC

SEQ ID NO: 74874 - protein, 56 aa, Zea mays
  Coding DNA Sequence Number=SeqID_33095
MSVGKVLCIVTTRSTTALVVPSNLDLSDLSQNHSVKKHKGYEGWNKAKAVRKGASA

SEQ ID NO: 74875 - protein, 69 aa, Zea mays
  Coding DNA Sequence Number=SeqID_33096
MARKRAKCARGCRSTRETKDGTEPKLCARELRHDDRKKETDLKGLILSNTLRAQKNAEDESCTIALNNL

SEQ ID NO: 74876 - protein, 115 aa, Zea mays
  Coding DNA Sequence Number=SeqID_33097
MGLMDTFGWRSEWRHTGRRWLGSMEKTTIGEERLPSTLKLCILLDERRMDGVMGHNTPPPIIPAPGGAYVGEGATLGENSNPLHDFVNEFSLLEVVDTTPTTPICGVSFVPNCAL

SEQ ID NO: 74877 - protein, 410 aa, Zea mays
  Coding DNA Sequence Number=SeqID_33098
MGPRAQAHPVPRTGMNRGPEDFRVDVVWPFQSPSQDPPPSNPLSSNSAHGIKPCPPSPLGHSYHAKRQSTAMENASPASVGVKTAPESECDGSDDYRDLHDVRFDLDTGAARASGEGGFTISFLLYLCVSARPSSVILHQITVGDDTKLTFPASGASSAGRSEELGYAHLGLTRPTPLLTILSTARSGTRCRWRLGAAGRKTAMETSKKIKEQACHGEARGQQSTGRENDAGKREIARRLEIRERRTLLGERSAMAEMANGRARGLGKRRRPEVRQARVMRAWPWTTDREKLRELEGNGEERGGSGCLRRGGSRGAVTPQCHSGGRGNGNTCSTAADTPGSRPFAHRASQCTPARTRRSRRAPLRPALTLTGQPLSLSSGELNSARHCRQSFGHRGQPTPAILWASQCFA

SEQ ID NO: 74878 - protein, 119 aa, Zea mays
  Coding DNA Sequence Number=SeqID_33099
  Subcellular localization annotation: CTP_CleavageSite=37; ConfidenceScore=5.17e-01
MGRGNGNTCSTVADTPGSRPFAHRASQPDSSPPTSIPAYARGPTDSGHLRRRPAHRCDPRDLPYVLDHFTGAISPPEQASEACPEQGPVQEEDQEQASEAAIEDLPAAPAIEGKPRFYA

SEQ ID NO: 74879 - protein, 202 aa, Zea mays
  Coding DNA Sequence Number=SeqID_33100
MAEERQPPRGRAPPTAARRRQDRQHYRAGNRERELPGGRFPHSRPKHHGQGLPRCAPGFPLYDMGARPHTSCKLARSAEKANRRIGSVQPPCGYTPLPPSPQSAVEKANRRTGSMQPSCGYSPFHLHHNQRSRRRTAAQGACNRPTVARSLSFATTGGPTSGMGAQAHMSYTRRVGSWVHESCTAARANTAPPRGRRRGLRR

SEQ ID NO: 74880 - protein, 199 aa, Zea mays
  Coding DNA Sequence Number=SeqID_33101
MAEERQPPRGRAPPTAARRRQDRQHYRAGNRERELPGGRFPHSRPKHHGQGLPRCAPGFPLYDMGARPHTSCKLARSAEKANRRIGSVQPPCGYTPFHLRRNQRSRRRIVAQGACNHPAVTRPSIFTTTSDQGGEPPHKEHATAPRLRALSASLQPVVQPLAWGPRPTCHTPDASVPGCMKVAPPLAPIPRLLEAVAED

SEQ ID NO: 74881 - protein, 191 aa, Zea mays
  Coding DNA Sequence Number=SeqID_33102
  Gene Ontology: Mol. function=cysteine-type peptidase activity; Biological process=proteolysis
  Homolog annotation: Hit_ID=Q53MK8; Match level="QueryCoverage=88%, HitCoverage=18%, E-value=4e-12, Identity=30%"; Hit description=Ulp1 protease family, C-terminal catalytic domain, putative
QSNPSQIVGNPPNVDSQTLINETVEVDSDDDDFMPAIKKRNVSGSHTRVLRKVVTKRIKAEDLPRQWLNIRCNPQDVIASIHILNDRQRHAIRRKGFSNILDMTVDALCSRSHLRWLMDKLDHKDMTIHPGLGKELKITKDTMHLILGVSNHGGGKPLGIDEAVAASNLRAELGLAKDEFNVTLLQDRLRK

SEQ ID NO: 74882 - protein, 350 aa, Zea mays
  Coding DNA Sequence Number=SeqID_33103
  Gene Ontology: Mol. function=cysteine-type peptidase activity; Biological process=proteolysis
  Homolog annotation: Hit_ID=Q53MK8; Match level="QueryCoverage=48%, HitCoverage=18%, E-value=1e-11, Identity=30%"; Hit description=Ulp1 protease family, C-terminal catalytic domain, putative
  Subcellular localization annotation: CTP_CleavageSite=74; ConfidenceScore=5.57e-01
MPMFMMPCSRFSYSNTRGVTTAKPQLSPRDSRILHRLRPPRRLRSIRRSLSIQSQSAVERCLLVVPNPRTTILTAATGDGSPDWRKPSFSTDATASPFFVVVPYFSAVNRCRSSFSPTVALPQPSMVVSSSTSPNNVLEVLPNPSETHYPGSLSTVNKEQSNPSQIVGNPPNVDSQTLINETVEVDSDDDDFMPAIKKRNVSGSHTRVLRKVVTKRIKAEDLPRQWLNIRCNPQDVIASIHILNDRQRHAIRRKGFSNILDMTVDALCSRSHLRWLMDKLDHKDMTIHPGLGKELKITKDTMHLILGVSNHGGGKPLGIDEAVAASNLRAELGLAKDEFNVTLLQDRLRK

SEQ ID NO: 74883 - protein, 177 aa, Zea mays
  Coding DNA Sequence Number=SeqID_33104
  Subcellular localization annotation: CTP_CleavageSite=66; ConfidenceScore=5.29e-01
MSGNMVTGTLHDMVDGVTCPSTLPPALTSNPLSQLTSPTLTNGGDTRFSFDYLSHKGFPSILWEVLCSTGYPTPPLYTVQPRWCSLDSETVGFRADDTTEATVLKAMTTFYRYHPLEMMMHPLGLFLAEKRDDPMWCNRATKITLDNREDFVVDLSSKLVEKDLQVEQMNQCIMTLE

SEQ ID NO: 74884 - protein, 177 aa, Zea mays
  Coding DNA Sequence Number=SeqID_33105
  Subcellular localization annotation: CTP_CleavageSite=66; ConfidenceScore=5.29e-01
MSGNMVTGTLHDMVDGVTCPSTLPPALTSNPLSQLTSPTLTNGGDTRFSFDYLSHKGFPSILWEVLCSTGYPTPPLYTVQPMWCSLDSETVGFRADDTTEATVLKAMTTFYRYHPLEMMMHPLGLFLAEKRDDPMWCNRATKITLDNREDFVVDLSSKLVEKDLQVEQMNQCIMTLE

SEQ ID NO: 74885 - protein, 99 aa, Zea mays
  Coding DNA Sequence Number=SeqID_33106
  Pfam annotation: Domain name=CXC; Domain location=9-39; Score=2.1; E _value=0.017; Accession=PF03638.5; Description=TesminTSO1-like CXC domain
MGLSLIILQLQKYCKKSSCLKKYCERYQKNEVSKEYFLKTVRNIVVINCLSKLLHNIKCRSKKMVLVIVHDDYILEKGRLHEEEAWCSFSRWLLLNNAL

SEQ ID NO: 74886 - protein, 134 aa, Zea mays
  Coding DNA Sequence Number=SeqID_33107
MTVMRLTHGCFSLTVRMSRRGLRRWDWDARIQHKTSRQWIEPTHTWLNKGGLRKWFLSLCMMITSLRREDYTKKKHGVLSAGFIGAVILVIDCWLAFAYFLGFLATLRGAWGVGPNYLKFPSILFALCFYFVRL

SEQ ID NO: 74887 - protein, 175 aa, Zea mays
  Coding DNA Sequence Number=SeqID_33108
MTGNCRGPSSAFCLLYKLLFTMKLIVKQTHDLLKHQDSPYIRAIGKDFSQKNEVSKEYFLKTVRNIVVINCLSKLLHNIKCRSKKMVLIIVHDDYILEKGRLHEEEAWCSFSSLLLNNWVCEVCVHDSYPEGCMGVGPNYLKFPSHVSTVVKGTPLSLILSDTLKMTKLPCFLLW

SEQ ID NO: 74888 - protein, 148 aa, Zea mays
  Coding DNA Sequence Number=SeqID_33109
  Homolog annotation: Hit_ID=P57751; Match level="QueryCoverage=42%, HitCoverage=13%, E-value=9e-09, Identity=53%"; Hit description=UTP- -glucose-1-phosphate uridylyltransferase 1
MSVIGMQIAMMIMEILNCNLGRELEITLEVTTLYFKVISLNLSKKMVLVIVHDDYILEKGRLHEEEAWCSFSRSQQAPMKFSLIQVVNFLVRFKSICSIAELDSLKVSGDVWFGSGITLKVVLHLPYSGTYDQLPYNYSLRRSPLPNP

SEQ ID NO: 74889 - protein, 181 aa, Zea mays
  Coding DNA Sequence Number=SeqID_33110
  Subcellular localization annotation: CTP_CleavageSite=83; ConfidenceScore=5.42e-01
MPGRPRRALGPGHRSRARPTPPPATPAPTRKATLPDPPAAAAASVAPGPRRARPPTCKAALAHPGPDRRRRRPCRGRAPPRTRLSAPAAPPPTLPWTSPTQATDPHPLRPSAHNNDDVEYDRMEEMLQDLRVEIIPTGYGAAEDVSMKTNASSSAVQSPASFTSSHGSSKCSRCSTSEVAN

SEQ ID NO: 74890 - protein, 166 aa, Zea mays
  Coding DNA Sequence Number=SeqID_33111
TFLPNRTGYAADAPDRFGNGLYDLRAALVPGRALHLTSLHGPPPRPHLPPPDRACPRPRPPLARPAPDELAQAPTSMPPLRPAFVSTAAPARPAPDRCSRRPCRATPRPSRPHPSAPAAQPPTPPWTSPTQATDPHPLRPSAPVAPLKIQQKWSNCEKNLGNIRIT

SEQ ID NO: 74891 - protein, 102 aa, Zea mays
  Coding DNA Sequence Number=SeqID_33112
  Subcellular localization annotation: CTP_CleavageSite=69; ConfidenceScore=5.71e-01
MASAKAPARYVPSSLFRVCALSSLSCAPQRSASARPCAPKLLARSFLELGPALFLSLCSCSPCRTLINRAMQKTTQVDPKHGLLHRMMLMNKPEDDRQADVV

SEQ ID NO: 74892 - protein, 108 aa, Zea mays
  Coding DNA Sequence Number=SeqID_33113
  Subcellular localization annotation: CTP_CleavageSite=42; ConfidenceScore=5.09e-01
MASAKAPARYVPSSLFRVCALSSLSCAPSVLLPLVPARQAPCAEARAKIYPHSYEYWVAFDTGEPIYNFCTLINRAMRKTTQVDPKHGLLHRMMLMDKPEDDRQADVV

SEQ ID NO: 74893 - protein, 173 aa, Zea mays
  Coding DNA Sequence Number=SeqID_33114
MPFTFANDPIVTHRVLIRVRRYLFMYYTPETLLNHVFEDLRKPKAPNTRYNQALGRYRQRIVHSRELGVRDLVLRLCIRVCQPGEVRPLSRYHFLSNPPIQLSTLAGIMTSELSSQACSLGPLYESRGSGSLGAGSRERVPVPWGGPELCSRLAWFRTLSLHTPPLCDMYPSI

SEQ ID NO: 74894 - protein, 126 aa, Zea mays
  Coding DNA Sequence Number=SeqID_33115
  Subcellular localization annotation: CTP_CleavageSite=56; ConfidenceScore=5.37e-01
MPFTFANNSIVTRRGLNSLFIFKSVSFSAIMPKLFCAQLRLRAILRIPFVLLHTVVLTQVRRYLFMHYTPETLLNHVFEDLRKPKAPNSYQELSSSFHPQHSSMLSKRCSELSPTRKGGDKGSVQE

SEQ ID NO: 74895 - protein, 213 aa, Zea mays
  Coding DNA Sequence Number=SeqID_33116
MSKPDKTFPFPILPVLPSLLNPGVGPHEFGLSDCPHSLKWLYYKGVQKIYFRKFGLRPFFRGYGFRICEAGDSKGRLNSVGGGWEGAVHGEVAGFRGGDRRRWALGERLGLGRGASGARGEGSDGARRTPVSYTPPPMRLHGGAVPARTLVKGGGTGRCPTSLCGEKTEVMAGGDRDEPYAGRTTKRLTSGATLPVGVIASEGEGWGEADGWG

SEQ ID NO: 74896 - protein, 50 aa, Zea mays
  Coding DNA Sequence Number=SeqID_33117
MAGGDRDEPYAGRTTKRLTSGATLPVGVIASEGEGWGEADGWGRCWKNRI

SEQ ID NO: 74897 - protein, 87 aa, Zea mays
  Coding DNA Sequence Number=SeqID_33118
  Subcellular localization annotation: CTP_CleavageSite=9; ConfidenceScore=5.04e-01
MPLPTPATSASLRAGNRQHLVSLDVPMAPPPSYPISASVTAFVKEEDAPNPFGGLPDGAVSVLPDLEFIEIQKEQAQTSPCTGGQAE

SEQ ID NO: 74898 - protein, 119 aa, Zea mays
  Coding DNA Sequence Number=SeqID_33119
  Subcellular localization annotation: CTP_CleavageSite=24; ConfidenceScore=5.36e-01
MALPLSYSTSSSLRSRRSRRKLLHAQEVKQKSRTVTKIPIPSEGFAVAPAGPRTRRSGAMVMGDLAFKALTGGLGVTTLYLATTFPVNVYRGLSWHSEQSVRRTPDRPPPITVDLAPAR

SEQ ID NO: 74899 - protein, 114 aa, Zea mays
  Coding DNA Sequence Number=SeqID_33120
  Subcellular localization annotation: CTP_CleavageSite=59; ConfidenceScore=5.11e-01
MAVGDLAFKALTAGLGVATLYLAATFSVNVYRGLSWHSEQSVRPPSPHPCRFGSRPLIRCAGFDHAGAVTDGPLNTASPICLLDGREAIVLPFLRSVHTIIQANLFACSLQALT

SEQ ID NO: 74900 - protein, 172 aa, Zea mays
  Coding DNA Sequence Number=SeqID_33121
  Homolog annotation: Hit_ID=Q8S1Y5; Match level="QueryCoverage=28%, HitCoverage=25%, E-value=9e-16, Identity=78%"; Hit description =Putative ubiquitin conjugating enzyme
MVMGDLAFKALTGGLGVTTLYLATTFLINVYRGLSWHSEQSYLHDYPTFAATARYWTEAFAKSASTGMEEKVQKLVEMGFPEDQAAALLGEQPVYHAVQRTIGCGAAMPPVALPGKDTRYLGEYWRSIMAPNEAEAATCALDVAGGPPDAGGGCCLGAEAELMIVETFIPDW

SEQ ID NO: 74901 - protein, 161 aa, Zea mays
  Coding DNA Sequence Number=SeqID_33122
MSLRYARIYTPRALKIQRPRLSVNVAILAKGRYPRTKVGIAVDRNNTKVDTEPKVRAGKLRCDSKEWNRLKDEKAIQTSIDYYRIIIKFKKKRNKNKDAGDERKLKIARCSSVLTPFILEINMLGHTMSKSADTASSVFSGNPMLASSKPSRPLPTSTSSS

SEQ ID NO: 74902 - protein, 123 aa, Zea mays
  Coding DNA Sequence Number=SeqID_33123
MGIRTEFGMNIKGCRMRSMKGCIVHPSQCLVMAGEPEIRGYLRTKVGIAVDRNNTKVDTEPKVRAGKLRCDSKEWNRLKDEKAIQTSIDYYRIIIKCEQYPRTVHADLTFTFCVTLVLSSPLD

SEQ ID NO: 74903 - protein, 48 aa, Zea mays
  Coding DNA Sequence Number=SeqID_33124
MTKVMLAEDVEKLKKWKGIETISNYKCTFGLEGDDSTNVTQKVNAKSA

SEQ ID NO: 74904 - protein, 242 aa, Zea mays
  Coding DNA Sequence Number=SeqID_33125
  Subcellular localization annotation: CTP_CleavageSite=47; ConfidenceScore=5.16e-01
MPIPLFRSKTHVWGGFAQFRCRTSPIPKTGVGVHTKVEFSPPEPFLRFSQRTCPIHYFRSKTHVWGGFAQFLCRTSPITKTGVRVHTKHKFFPPEPFLRFSQRTCPIHYSRSKTHVWGGFAQFCCRTSPIPKTGVGVHTKQEFLPPEPFLRFSQRTCPIHYFRFKTHVWGGFAQLRCRTSRIPKTGVGVHTKQEFLPPEPFLRFSQRTYPIHYFRSKTHVWVCFAQFRCRTLPIPKTIVGGA

SEQ ID NO: 74905 - protein, 242 aa, Zea mays
  Coding DNA Sequence Number=SeqID_33126
  Subcellular localization annotation: CTP_CleavageSite=47; ConfidenceScore=5.16e-01
MPIPLFRSKTHVWGGFAQFRCRTSPIPKTGVGVHTKVEFSPPEPFLRFSQRTCPIHYFRSKTHVWGGFAQFLCRTSPITKTGVRVHTKHKFFPPEPFLRFSQRTCPIHYSRSKTHVWGGFAQFCCRTSPIPKTGVGVHTKQEFLPPEPFLRFSQRTCPIQYFRFKTHVWGGFAQLRCRTSRIPKTGVGVHTKQEFLPPEPFLRFSQRTYPIHYFRSKTHVWVCFAQFRCRTLPIPKTIVGGA

SEQ ID NO: 74906 - protein, 285 aa, Zea mays
  Coding DNA Sequence Number=SeqID_33127
MTLVVPTTASDEETCKRDRTSSSAYSPTQDNELAYTGTLLPSPACRLDMTKPVDEVPAWTIGGHGADVVRLPAEVGSPYSPTSGGRGKSHYDFLYLPMGFRKEANKGYIFDNLISLEAACRPWWAHKGLPRAPVAFKGSAKTCVARCIGQSWPSFLHHLEPVPAPAPPDRWAPPVSGAPPSPRPLWTSEQALAHVARILVHVALPTPQLLLSPARARTHSPALFHAVPPLARALLTPPDLAGDPRPPPRSSSSPETAPSHPELRPEALARLKPPPRGRNPSLEFL

SEQ ID NO: 74907 - protein, 170 aa, Zea mays
  Coding DNA Sequence Number=SeqID_33128
MGEIRPGRDERLRAALLLSTALRLAELRQARARVAPGSLEWVREGENDTTNSVGGKGHESEVREGRTAGRRPRAGRRNSGEGFRPRGGGLRHAKAWEGFRRGRGDTGTYTGALDRAKLAGHRAGMADRHGRAPVMPKLAEHISKLGKLSTGTGVSPRGGARGGLARSPAS

SEQ ID NO: 74908 - protein, 649 aa, Zea mays
  Coding DNA Sequence Number=SeqID_33129
  Gene Ontology: Mol. function=protein dimerization activity; Cellular component=nucleus; Biological process=regulation of transcription, DNA-dependent
  Homolog annotation: Hit_ID=Q71VM2; Match level="QueryCoverage=29%, HitCoverage=64%, E-value=1e-65, Identity=70%"; Hit description =Plakoglobin/armadillo/beta-catenin-like protein
  Pfam annotation: Domain name=Arm; Domain location=1-38; Score=22.6; E_ value=0.0014; Accession=PF00514.13; Description=Armadillobeta-catenin- like repeat
  Pfam annotation: Domain name=Arm; Domain location=123-164; Score =10.2; E_value=0.66; Accession=PF00514.13; Description=Armadillobeta -catenin-like repeat
  Pfam annotation: Domain name=Arm; Domain location=167-212; Score=0.0; E_value=12; Accession=PF00514.13; Description=Armadillobeta-catenin -like repeat
  Pfam annotation: Domain name=Arm; Domain location=39-79; Score=26.4; E_value=0.0001; Accession=PF00514.13; Description=Armadillobeta -catenin-like repeat
  Pfam annotation: Domain name=Arm; Domain location=80-122; Score=10.5; E_value=0.59; Accession=PF00514.13; Description=Armadillobeta-catenin- like repeat
  Pfam annotation: Domain name=DUF1771; Domain location=427-492; Score =67.7; E_value=3.8e-17; Accession=PF08590.1; Description=Domain of unknown function (DUF1771)
  Pfam annotation: Domain name=Smr; Domain location=499-612; Score= -4.6; E_value=0.048; Accession=PF01713.11; Description=Smr domain
  Pfam module annotation: Pfam domain module=Arm::Arm::Arm::Arm::Arm::DU F1771::Smr; Domain location=1-38::123-164::167-212::39-79::80 -122::427-492::499-612
NKTKIVDAGALEPLLGYLRSSDPNLQEYATAALLTLLASSTTKPVIGASGAIPLLVEVLKGGNPQTKNDVVMALYNLSTIADNLQAILSAQPIPPLIELLKGGKRSSKTADKCCALLESLLAFDQCRVALTSEEGGVLAVVEVLEEGSLQGREHAVGALLTMCESDRSRYRDLILNEGAIPGLLELTEAPTPLMEFGRTKAAAVALIPEATFRRSSLSFSASATPWSREKNPNSGWAAFDRKQRSADGSGYEGDADPFPSLSNSGASNIASSSITEKNGLKRKPFASVVRPSVDSGAVSTGCGNKNSANHVDSGNHGAISAPLNKVKILKDAHSWADIHLIEDVLAAVNNDVGQASDLLKVMDSPALQTGEGRTSGQLADVMNKTHGSPSESAAAGKANPDSSQLLLPLMNFPSIPLQPEFEDIDDEYFSYRKDALKMMRAATKHSQSASNAFLRDDHAAAKELSLRAQEERAAAEKLNNKAAEEIFRLRNSNNDIWKIDMHGLHASEAVAVLERHLHMIEFQQPGNKSASSEDLAKLESAYSESTTGSNIELAAEKVVLRRPKQSILHVITGMGNHSKGQASLPVAVRGFLIENGYRFDELRPGVFAVRPKFRRSDNLVSSGLRSDSLSSPAPAPSRHGFVSCSRSYN

SEQ ID NO: 74909 - protein, 746 aa, Zea mays
  Coding DNA Sequence Number=SeqID_33130
  Gene Ontology: Cellular component=cytoplasm
  Homolog annotation: Hit_ID=Q71VM2; Match level="QueryCoverage=25%, HitCoverage=64%, E-value=1e-65, Identity=70%"; Hit description =Plakoglobin/armadillo/beta-catenin-like protein
  Pfam annotation: Domain name=Arm; Domain location=112-152; Score =26.4; E_value=0.0001; Accession=PF00514.13; Description =Armadillobeta-catenin-like repeat
  Pfam annotation: Domain name=Arm; Domain location=153-195; Score =10.5; E_value=0.59; Accession=PF00514.13; Description=Armadillobeta -catenin-like repeat
  Pfam annotation: Domain name=Arm; Domain location=196-237; Score =10.2; E_value=0.66; Accession=PF00514.13; Description=Armadillobeta -catenin-like repeat
  Pfam annotation: Domain name=Arm; Domain location=240-285; Score=0.0; E_value=12; Accession=PF00514.13; Description=Armadillobeta-catenin -like repeat
  Pfam annotation: Domain name=Arm; Domain location=71-111; Score=27.7; E_value=4.1e-05; Accession=PF00514.13; Description=Armadillobeta -catenin-like repeat
  Pfam annotation: Domain name=DUF1771; Domain location=500-565; Score =67.7; E_value=3.8e-17; Accession=PF08590.1; Description=Domain of unknown function (DUF1771)
  Pfam annotation: Domain name=DUF634; Domain location=60-253; Score= -161.4; E_value=0.1; Accession=PF04826.4; Description=Protein of unknown function (DUF634)
  Pfam annotation: Domain name=Smr; Domain location=572-685; Score= -4.6; E_value=0.048; Accession=PF01713.11; Description=Smr domain
  Pfam module annotation: Pfam domain module=Arm::Arm::Arm::Arm::Arm::DU F1771::DUF634::Smr; Domain location=112-152::153-195::196-237::240 -285::71-111::500-565::60-253::572-685
MSQIWVFEYCSLIWNPGITHDACIVGFVETTTTSCTKRWVDREYGTQGHAAVPREDHHARAPAQSDLRMPFHINKTKIVDAGALEPLLGYLRSSDPNLQEYATAALLTLLASSTTKPVIGASGAIPLLVEVLKGGNPQTKNDVVMALYNLSTIADNLQAILSAQPIPPLIELLKGGKRSSKTADKCCALLESLLAFDQCRVALTSEEGGVLAVVEVLEEGSLQGREHAVGALLTMCESDRSRYRDLILNEGAIPGLLELTEAPTPLMEFGRTKAAAVALIPEATFRRSSLSFSASATPWSREKNPNSGWAAFDRKQRSADGSGYEGDADPFPSLSNSGASNIASSSITEKNGLKRKPFASVVRPSVDSGAVSTGCGNKNSANHVDSGNHGAISAPLNKVKILKDAHSWADIHLIEDVLAAVNNDVGQASDLLKVMDSPALQTGEGRTSGQLADVMNKTHGSPSESAAAGKANPDSSQLLLPLMNFPSIPLQPEFEDIDDEYFSYRKDALKMMRAATKHSQSASNAFLRDDHAAAKELSLRAQEERAAAEKLNNKAAEEIFRLRNSNNDIWKIDMHGLHASEAVAVLERHLHMIEFQQPGNKSASSEDLAKLESAYSESTTGSNIELAAEKVVLRRPKQSILHVITGMGNHSKGQASLPVAVRGFLIENGYRFDELRPGVFAVRPKFRRRSFGTSTASPTSSFSFIDLRPLFSFSTPIPIRVRRVDMASSAAPEATMFVDSKHFCLL

SEQ ID NO: 74910 - protein, 470 aa, Zea mays
  Coding DNA Sequence Number=SeqID_33131
  Subcellular localization annotation: CTP_CleavageSite=89; ConfidenceScore=5.08e-01
MHRGLPPCEPPDGEHPRCLRLAAVGGARPRGGWRPSAIARLQGFSSGSPTAVPRRRSPRMMTVGLMVGRSKPGCGLCPALSFKDVHHPRCGGGRAEPGFYLPHGPASHLFLQHSGERALTGLAEGANFDNAGPVGRKRHQLQRAWLAGSAGSGAASDAASCRLVRAWPPVHRTGDCYVVCTGGSSKTSYAARAAFVSLDCLVLTPARRLRVEVATVVGAEVVAVREGFSADETVGATCGRTSVSSALMACPRPLRGDMGEGFSTPAFALRSSLLLFSRPRWRSLSLLMGRSSASHLEFVVPQTLWCGGCSYPREWNQSSICNGTLSMGNLRPLCDELEPEAAVLAWTEVESARKEASSAQEQVASQAEEDPGGGPGCDGPSVVLASSFEVEILPLVSPSEAGPGSAEGGNDAEGAAAPSADDLFVGSRIAYPSESYFSRKVMSEDSIIDIVKKARKSFWQKSFRALGLVR

SEQ ID NO: 74911 - protein, 336 aa, Zea mays
  Coding DNA Sequence Number=SeqID_33132
  Homolog annotation: Hit_ID=Q6QP51; Match level="QueryCoverage=45%, HitCoverage=79%, E-value=2e-55, Identity=69%"; Hit description =Putative growth-regulating factor 1
CSPSGGSQGGRPRCMRGVPRHGYCLGIDPFLKAALPTRILKRHGQSLHRRAPVSSPYDTGVGSHTSCKLTRNGRSQTAAHGACNRPTVISTPPSSPKPAVERRTATQGAYNRTTVVHPFGFVASGMEAQAHTSCNRRVGYCVQETAPPLAPIPRLLDCRTSAVTRGSPARDPTVPIGCNDHGLAPRKGSTATPEHSGSKPVTDQGFEGWPLGRVRHLPKSTRAPRPLLIRGSKAGPSEGFNSRPKAHRVRDDSGYVRYMAEARATLPSHFALSLTDLTGKQRRSPRSDYCATHQGETDNSRVQPRAQQESFASPDLRPQPRKEVSASPDPRARPEE

SEQ ID NO: 74912 - protein, 488 aa, Zea mays
  Coding DNA Sequence Number=SeqID_33133
  Gene Ontology: Mol. function=hydrolase activity, hydrolyzing O -glycosyl compounds; Cellular component=cellulose and pectin -containing cell wall; Biological process=carbohydrate metabolic process
  Homolog annotation: Hit_ID=Q2MV13; Match level="QueryCoverage=83%, HitCoverage=85%, E-value=1e-124, Identity=48%"; Hit description=Beta- mannosidase 4
  Pfam annotation: Domain name=Glyco_hydro_1; Domain location=53-474; Score=332.7; E_value=6.1e-97; Accession=PF00232.9; Description =Glycosyl hydrolase family 1
  Subcellular localization annotation: CTP_CleavageSite=34; ConfidenceScore=5.10e-01
MARVVQTGRDPLTSRVGSLTRGPRATCSDPTSVQSMLEDTRPTQAPLLLVTSRKDLSENRNIDDGSNGDVAADHYHRYKLPARQHARDPSLVPVFNLNYMLVPFKYPWPEGRFGGVNQAGVKFYNSLINGLLEKGIQPFVTINHYDIPEELQERYNSWLNPEIQEDFTYFVELCFKMFGDRVKHWVTFNEPNLIVKLAYSIGAFPPNRCSEPYGKCDSGNSSTEPYIAAHNMILAHAKTVNIYRKNYKSKQGGFVGISLHLRWYEPLRNITEDHLAMRQILGPNLPKFTEGEKKLLKNQIDFIGVNHYQTFYVKDCIYSLCDMDAYPSEALVSISTERNGIPIGKPTPVANTYVVPSSMEKLVMYLKQRYKSIPLYITENGYAQIANISTTAEEIINDIERSTYIRDYLTYLSFAIRKGADVRGYFVWSLMDNFEWISGYTVKYGLCHVNFKSLKRTPKLSAKWYSKFIKGYEQIEMASEELPKHMVS

SEQ ID NO: 74913 - protein, 85 aa, Zea mays
  Coding DNA Sequence Number=SeqID_33134
  Gene Ontology: Mol. function=hydrolase activity, hydrolyzing O -glycosyl compounds; Cellular component=cellulose and pectin -containing cell wall; Biological process=carbohydrate metabolic process
  Homolog annotation: Hit_ID=Q1RV93; Match level="QueryCoverage=60%, HitCoverage=9%, E-value=2e-15, Identity=65%"; Hit description =Glycoside hydrolase, family 1
MPSNYLFHVTALLAETSRCERYFVWSLMDNFEWISGYTVKYGLCHVNFKSLKRTPKLSAKWYSKFIKGYEQIEMASEELPKHMVS

SEQ ID NO: 74914 - protein, 125 aa, Zea mays
  Coding DNA Sequence Number=SeqID_33135
MGRREAKREGGKRRPETGVREVEIPRPSCSSRAQVGRKERIQPKSAWGRVMMAPLVDVAGPRPRLGDVEAPSRSRSSLSSEAEVESEPLGRARRRPSAEARAESEPWGRAKRSSSSSGAEPESEP

SEQ ID NO: 74915 - protein, 177 aa, Zea mays
  Coding DNA Sequence Number=SeqID_33136
MAHARAYKAPRDFDRTPPHALDHTGAQNHRRLPVHGVLAAARFPRHRRPANRTLLNPVRPLEKTVHTSVKLPERGIGVCFAGEASPRSPDFARPPVSVDRVSAFQDRGVPGPTSEMSSRAPAQMGRREAEREGGKRRPETGVREVEIPRPSCSSCAQVGRKERIQVYNGGCSGVLRV

SEQ ID NO: 74916 - protein, 139 aa, Zea mays
  Coding DNA Sequence Number=SeqID_33137
  Gene Ontology: Mol. function=protein binding
  Homolog annotation: Hit_ID=O49527; Match level="QueryCoverage=67%, HitCoverage=11%, E-value=2e-11, Identity=38%"; Hit description =Pollen-specific protein - like
  Pfam annotation: Domain name=Rep_fac-A_3; Domain location=1-100; Score=68.7; E_value=1.9e-17; Accession=PF08661.1; Description =Replication factor A protein 3
MDTSSPATLVNAQMLNMFVGRRVRTVVQVQHNEGGVLVGQSTDGHQLCVKSAMDVPVSHFMEVYGIAENSETIRAEVCTDFGPNFGEISNAFGVCLDPLIAISAWVFPNRMSKYMHLFEVICVRIPMPCAYFMLQLNEG

SEQ ID NO: 74917 - protein, 65 aa, Zea mays
  Coding DNA Sequence Number=SeqID_33138
MDTSSPAALVNAQMLNMFVGRRVRTVYGIAENSQTIRAEVCTDFGPNFGEISNAFGVCLGPLIAI

SEQ ID NO: 74918 - protein, 120 aa, Zea mays
  Coding DNA Sequence Number=SeqID_33139
  Gene Ontology: Mol. function=kinase activity
  Homolog annotation: Hit_ID=Q6S563; Match level="QueryCoverage=52%, HitCoverage=19%, E-value=4e-14, Identity=73%"; Hit description =Putative ribokinase
MDTSRPATLVNAQMLNMFMKIAENSETIRAEVCTDFGPNFGEIANAFGVCLGPLIAIVSIVESNHILNEVSTDILPSHNYVTPIITIAGGSVANTIRGLSAGFGISTGDYCLSTIRALVV

SEQ ID NO: 74919 - protein, 112 aa, Zea mays
  Coding DNA Sequence Number=SeqID_33140
  Gene Ontology: Mol. function=kinase activity
  Homolog annotation: Hit_ID=Q6S563; Match level="QueryCoverage=56%, HitCoverage=19%, E-value=4e-14, Identity=73%"; Hit description =Putative ribokinase
MDTSRPATLVNAQMLNIETIRAEVCTDFGPNFGEIANAFGVCLGPLIAIVSIVESNHILNEVSTDILPSHNYVTPIITIAGGSVANTIRGLSAGFGISTGDYCLSTIRALVV

SEQ ID NO: 74920 - protein, 62 aa, Zea mays
  Coding DNA Sequence Number=SeqID_33141
  Gene Ontology: Mol. function=nucleic acid binding; Cellular component= intracellular; Biological process=chromatin modification
  Homolog annotation: Hit_ID=Q6QP57; Match level="QueryCoverage=80%, HitCoverage=16%, E-value=1e-22, Identity=100%"; Hit description =Putative zinc finger protein
MGSCSVCWYFTDSWEQFRISGSIDVIDASTTDPAKLQGVLDKESLYLKTGGYKKLEWLSEGF

SEQ ID NO: 74921 - protein, 104 aa, Zea mays
  Coding DNA Sequence Number=SeqID_33142
  Gene Ontology: Mol. function=FMN binding; Biological process =pyridoxine biosynthetic process
  Homolog annotation: Hit_ID=Q10SP1; Match level="QueryCoverage=93%, HitCoverage=34%, E-value=3e-18, Identity=53%"; Hit description =Pyridoxine 5'-phosphate oxidase, putative, expressed
MGSCSVCWYFTDSWEQFRISGSIDVIDASTTDPAKLQNSPIAYLAAIQIYGKQWLSLLSQHKEKAWFSSSVKSRLQYLGPQPGIPVLDDEHVMMSMLRVFISIL

SEQ ID NO: 74922 - protein, 105 aa, Zea mays
  Coding DNA Sequence Number=SeqID_33143
MDYAACHLRHAVLATGVPISMGCAACHLRHAILTTGVPISMGSITCQFCHHILDADVPISRDSAKFRHIIFVDSVSIPMGDGTRGSHSSTITTSIDGGLVDQHKG

SEQ ID NO: 74923 - protein, 168 aa, Zea mays
  Coding DNA Sequence Number=SeqID_33144
MELVIAEPWLHLVVSPMGTETPSTKMMDAGCQDGVTKVACGAAHGDGDVGCQDDVMKVTCSRVHGDVDVGCQNDATKLAAEAMRSDRNPSYPIPDVMVARSVKDWRGVSMGRNVGRGPLPTTKQEKGFSLLILGGPHLHVLHRGQERPMSSPSGVTKKITTGSNLQQE

SEQ ID NO: 74924 - protein, 182 aa, Zea mays
  Coding DNA Sequence Number=SeqID_33145
  Subcellular localization annotation: CTP_CleavageSite=22; ConfidenceScore=5.11e-01
MPSPTRASVASLPTAGAVLSCRAHRASRWLTHTRSTLHPKKPAGGTLEYAIMHCGVQVSRLHACRLSILRAYARLRAASGLHLPRVSRSSIVVYPRIARCLHAIRDTGHLRAIWDLGWRRWQLQPEEILHWMAPGTPQMFCRDEFIKVDISGVNKRVIRLSNVQNRWAQWLIDGHQATVTNI

SEQ ID NO: 74925 - protein, 113 aa, Zea mays
  Coding DNA Sequence Number=SeqID_33146
  Subcellular localization annotation: CTP_CleavageSite=22; ConfidenceScore=5.03e-01
MPSPTRASVASLPTAGAVLSCRAHRASRWLTHTRSTLHPKKPAGGTLEYAIMHCGVQEILHWMAPGTPQMFCRDEFIKVDISGVNKRVIRLSNVQNRWAQWLIDGHQATVTNI

SEQ ID NO: 74926 - protein, 83 aa, Zea mays
  Coding DNA Sequence Number=SeqID_33147
MGKPVPSLLMLLLSRVTALVPTITGMGDHVSGCVRGYVHCQVHSGLAFQSWGRQILWGRLWYWIQGYLLSNSLLRHEDVLSVS

SEQ ID NO: 74927 - protein, 106 aa, Zea mays
  Coding DNA Sequence Number=SeqID_33148
MGKPVPSLLMLLLSRVTALVPTITGMGDHVSGRVRGYVCGQVHSGTRLTDLPYFSWQAGPLVQALVLDLGLPPEQLLAPARGRTLRQQDYSLLNAMNIGQFTRVLG

SEQ ID NO: 74928 - protein, 86 aa, Zea mays
  Coding DNA Sequence Number=SeqID_33149
MGKPVPSLLMLLLGRVTALVPTITGMGDHVSGRVRRAICCQVHSDFQVVDFRIVLRDLPELPVKASKYSGGCYRLVCILFPVIEYA

SEQ ID NO: 74929 - protein, 113 aa, Zea mays
  Coding DNA Sequence Number=SeqID_33150
MGKPVPSLLMLLLSRGRYNGSSSLISCEKQTIQIEFLSLQVTALVPTITGMGDHVSGRVRGYVHCQVPSGIRTLILIPISPRRPRIPMDPCPPTNYQYDMKSGYNQFLISREC

SEQ ID NO: 74930 - protein, 88 aa, Zea mays
  Coding DNA Sequence Number=SeqID_33151
MGKPVPSLLMLLLSRVTALVPTITGMGDHVSGRVRGYVHCQVHSGIRTLILIPISPRRPRIPMDPCPPTNYQYDMKSGYNQFLISHEC

SEQ ID NO: 74931 - protein, 82 aa, Zea mays
  Coding DNA Sequence Number=SeqID_33152
MGKPVPSLLMLLLSRVTALVPTITGMGDHVSGRVRGYVHCQVHSGIRTLILIPISSRRPCIPMDPCPLTNYQYDMKVGTTNS

SEQ ID NO: 74932 - protein, 88 aa, Zea mays
  Coding DNA Sequence Number=SeqID_33153
  Subcellular localization annotation: CTP_CleavageSite=18; ConfidenceScore=5.28e-01
MKLWKETSRSSKITTSSRCGLAATPSRLPVKAVLSTFLFRTLIYCIRTLILIPISPRRPRIPMDPCPPTNYQYDMKSGYNQFLISREC

SEQ ID NO: 74933 - protein, 144 aa, Zea mays
  Coding DNA Sequence Number=SeqID_33154
  Subcellular localization annotation: CTP_CleavageSite=56; ConfidenceScore=5.02e-01
MGRETGTLQLLAPLLLTGGKGADLVIRGDVVLNTLSARSTSTLLRNQICINSTSIRQVSGLAELSYATGFDSPSTQLNVLSFCSILRGKYIAEILECMRRHGSSAMISEPQLHLLCTLRGLIVYPDYRATIAPVALVTEAYSLS

SEQ ID NO: 74934 - protein, 110 aa, Zea mays
  Coding DNA Sequence Number=SeqID_33155
MTLSGVGSNSLIEAKGVKSIELTIRTKTLTVAFFATEVEGLRPSRTVLRDRLRFSLYAIERWPAAIGAAVEPDGVAMNCCSEQHGYDLVHHGGSSHRVPWMLAALNVSKP

SEQ ID NO: 74935 - protein, 117 aa, Zea mays
  Coding DNA Sequence Number=SeqID_33156
  Gene Ontology: Mol. function=protein binding
  Homolog annotation: Hit_ID=Q2XPP4; Match level="QueryCoverage=91%, HitCoverage=23%, E-value=6e-43, Identity=78%"; Hit description =Autophagy 4
MNTQLMAQTVDIALDNLEADTSSYHCSVVRALALEQIDPSLAIGFYCRDKDDFDDFCSRASELAEKANGAPLFTVVQSIEPSKQMYKQDDGLGCSGSSMANDDDLDGSGEAEEWQIL

SEQ ID NO: 74936 - protein, 235 aa, Zea mays
  Coding DNA Sequence Number=SeqID_33157
  Gene Ontology: Mol. function=hydrolase activity, hydrolyzing O -glycosyl compounds; Cellular component=microtubule associated complex; Biological process=carbohydrate metabolic process
  Homolog annotation: Hit_ID=Q2XPP4; Match level="QueryCoverage=93%, HitCoverage=46%, E-value=1e-101, Identity=81%"; Hit description =Autophagy 4
  Pfam annotation: Domain name=Peptidase_C54; Domain location=4-235; Score=245.5; E_value=1.2e-70; Accession=PF03416.9; Description =Peptidase family C54
MLCFWKISLPGYGSLTGKGCMVRSSQMLVAQALIFHHLGRSWRKPPEKPYNPDYIGVLRLFGDSEACAFSIHNLLQARRNYGLAAGSWLGPYAMCRAWQTLIRTNREQADAVDGKENFPMALYVVSGDEDGERGGAPVVYIDVAAQLCSDFNKGPSTWSPILLLVPLVLGLDKINPRYIPLLKETFMFPQSLGILGGKPGTSTYIAGVQDDRALYLDPHEVQMQWHVYSAAIPVP

SEQ ID NO: 74937 - protein, 306 aa, Zea mays
  Coding DNA Sequence Number=SeqID_33158
MDDTGGLGAHNGRGLREVWRRAEGCSHPVQLPHFILLKPNVDAWCYHDFTFRIDTLGPSHTPRLDVVPCGPTPSARAAVSLLMPCGPPAPAPLELMSLLQKFETNHQTTTGIRVFAECWILCRVPFVGHSAKKALPRAALGKVRLSAKSPFTECWTLGRGQHSAKTRLPSVKHSAKKALGKGPSLAVPKLTAVNLCRVPTVGSRQRCFFAECRAAGTRQRKLYRVSYPDTRQSFAECFRHSAKRLIPVVDHSYAFLNFLKPFVCSYVQQQLKYGARLRPDPHISDPGCCYVHRPAEASEYPNVGAP

SEQ ID NO: 74938 - protein, 289 aa, Zea mays
  Coding DNA Sequence Number=SeqID_33159
  Homolog annotation: Hit_ID=Q84S18; Match level="QueryCoverage=22%, HitCoverage=7%, E-value=7e-07, Identity=44%"; Hit description =Putative cellulose synthase-like protein OsCslF1
  Subcellular localization annotation: CTP_CleavageSite=78; ConfidenceScore=5.21e-01
PFVGHSAKKALPRAALGKVRLSTKSPFTECWTLGRGQHSAKKALGKGPSLAVPKLTAISLCRVPTVGSRQRCFFAECRAAVTRQRKLYRVSYADTRQNSLVTTQHISAHSSTPLCSVLSAACTEQVSYSYRPAAQLIQSLLAELVASCLPLTDHRVDQSMAPKAPANNGAVVVAGGHHGGSTDVGGVAGGATTTTVPTSVAANGNGKQHGTRKQRRPAAVVVSPMDKYWTPVDDKEAAEAVDDGGEDGRRPLLFRTYKVKGILLHPYSNSSHGSPGSAGLPFRLLGASR

SEQ ID NO: 74939 - protein, 79 aa, Zea mays
  Coding DNA Sequence Number=SeqID_33160
MATSHATVDCNAFNALLRAEDRARAKGAPDSLQDLSGAPPDSPEAPPVRAPTMSENRRRGGKRAQQERPAQQDEAPQQQ

SEQ ID NO: 74940 - protein, 146 aa, Zea mays
  Coding DNA Sequence Number=SeqID_33161
MNGGVVGVFIAPTTKSGRWEAVCRMAHRTVRCASHVSRPLGSDRWSSDRWGLWAVRCAFCACSVLCTLARIKCVAVDRCVRSSRCSAGTPDSPDSPVNYSGATSHFPEGEEFSVEFPGAPDTVRWHTGQSGAPDQGAFGMSLALFI

SEQ ID NO: 74941 - protein, 156 aa, Zea mays
  Coding DNA Sequence Number=SeqID_33162
  Subcellular localization annotation: CTP_CleavageSite=83; ConfidenceScore=5.11e-01
MTPAAEGYNLAGEDNYPHGPKVHDTWYQRQVILTTTSRPSLTTTSRRAISRRNALPPALSNSRCIHSAQREFWPLRRAVGLVRCDVPPLQGEDREGTPSSGAASDGSARVPGTPPVSHPALRNKARCISYMRQEDNIYNNRVYRDKCHNNIRVFIT

SEQ ID NO: 74942 - protein, 262 aa, Zea mays
  Coding DNA Sequence Number=SeqID_33163
  Pfam annotation: Domain name=IQ; Domain location=13-33; Score=23.6; E_ value=0.00068; Accession=PF00612.17; Description=IQ calmodulin -binding motif
  Pfam annotation: Domain name=IQ; Domain location=55-75; Score=14.9; E_ value=0.28; Accession=PF00612.17; Description=IQ calmodulin-binding motif
  Pfam module annotation: Pfam domain module=IQ::IQ; Domain location=13- 33::55-75
MFHRYKEKTEKELQAAVRLQTAARGFLARRQVQSLRGEKHLAVASRATPWPSSHEQAVVRLQAAVCGFLVRRAVRKLHLLISSSLHQLATCVLNHQVSSILFEPPAEVEIWVCSPPARPKRIVSFIRALALVLDRPNIRTGWFLHLSSNVKAAVQLFPWDPGGQEDIAAVQIYILISQLFCIFVLNNKARGRAGPQGRGRCHGHHRERSLMWSRTYARQKREAAGGAGSNARKEGTGARSSARKEGMAKENARKEGMAKESD

SEQ ID NO: 74943 - protein, 437 aa, Zea mays
  Coding DNA Sequence Number=SeqID_33164
  Gene Ontology: Mol. function=hydrolase activity, acting on ester bonds; Cellular component=cellulose and pectin-containing cell wall; Biological process=lipid metabolic process
  Homolog annotation: Hit_ID=Q8RZ61; Match level="QueryCoverage=76%, HitCoverage=85%, E-value=7e-98, Identity=52%"; Hit description =Lipase-like
  Pfam annotation: Domain name=Lipase_GDSL; Domain location=67-389; Score=187.0; E_value=4.5e-53; Accession=PF00657.12; Description=GDSL- like LipaseAcylhydrolase
  Subcellular localization annotation: CTP_CleavageSite=52; ConfidenceScore=5.52e-01
MPTPTPPSPSPSPSSGTCPLLRIGAGRRFAMAFPSWATLFFAGMMVVLAAVEAEAEAGGGSVCFDRMFGFGDSLTDTGNFLLSVPDDFPDPARNLPYGQTFFGRPSGRYSDGRNLLDFFAEAFGLPYVPPYLGSGDFQNGANFAVGGATALNGSFFRERGVEPTWTPHSLDEQMQWFKKLLPFIAPSETELNEIMSKSLLFVGEIGGNDYNHLIVREKSVDELHEIVPNVVGAISSGITDLINLGAKKLVVPGNFPIGCVPLYLAIFQSQKEGYYEEQTGCIKWLNEFAEYHNRMLQEELEKLRNLHPDVTIIYADYYGAALNIFRAPLKFGFTVPLNACCGSDAPYNCSPSILCGRPGSTVCPDPSKYISWDGLHFTEASYKVVIQGVLGGSRQRPPSPALVARAAPTTSDADPHTDVTVVTSPTSLTTPPELYCR

SEQ ID NO: 74944 - protein, 408 aa, Zea mays
  Coding DNA Sequence Number=SeqID_33165
  Gene Ontology: Mol. function=hydrolase activity, acting on ester bonds; Cellular component=cellulose and pectin-containing cell wall; Biological process=lipid metabolic process
  Homolog annotation: Hit_ID=Q8RZ61; Match level="QueryCoverage=82%, HitCoverage=85%, E-value=7e-98, Identity=52%"; Hit description =Lipase-like
  Pfam annotation: Domain name=Lipase_GDSL; Domain location=37-359; Score=187.0; E_value=4.5e-53; Accession=PF00657.12; Description=GDSL- like LipaseAcylhydrolase
MAFPSWATLFFAGMMVVLAAVEAEAEAGGGSVCFDRMFGFGDSLTDTGNFLLSVPDDFPDPARNLPYGQTFFGRPSGRYSDGRNLLDFFAEAFGLPYVPPYLGSGDFQNGANFAVGGATALNGSFFRERGVEPTWTPHSLDEQMQWFKKLLPFIAPSETELNEIMSKSLLFVGEIGGNDYNHLIVREKSVDELHEIVPNVVGAISSGITDLINLGAKKLVVPGNFPIGCVPLYLAIFQSQKEGYYEEQTGCIKWLNEFAEYHNRMLQEELEKLRNLHPDVTIIYADYYGAALNIFRAPLKFGFTVPLNACCGSDAPYNCSPSILCGRPGSTVCPDPSKYISWDGLHFTEASYKVVIQGVLGGSRQRPPSPALVARAAPTTSDADPHTDVTVVTSPTSLTTPPELYCRR

SEQ ID NO: 74945 - protein, 106 aa, Zea mays
  Coding DNA Sequence Number=SeqID_33166
  Gene Ontology: Mol. function=transcriptional activator activity; Cellular component=transcription factor complex; Biological process =regulation of transcription, DNA-dependent
  Pfam annotation: Domain name=BRF1; Domain location=31-102; Score =28.6; E_value=1.9e-06; Accession=PF07741.3; Description=Brf1-like TBP-binding domain
MGFEGLINDSMPPKDPEEGGENCEGNADPESLSDIDDAEADGYLHNEEETQYKKIIWEEMNKEYLEEQAAKEALAAELAATGIDPEAGKKVRNNFGQQNFLFNFGN

SEQ ID NO: 74946 - protein, 596 aa, Zea mays
  Coding DNA Sequence Number=SeqID_33167
  Gene Ontology: Mol. function=transcriptional activator activity; Cellular component=transcription factor complex; Biological process =regulation of transcription, DNA-dependent
  Homolog annotation: Hit_ID=Q1SQ46; Match level="QueryCoverage=68%, HitCoverage=87%, E-value=4e-27, Identity=31%"; Hit description=IMP dehydrogenase/GMP reductase
  Pfam annotation: Domain name=BRF1; Domain location=435-537; Score =87.8; E_value=3.3e-23; Accession=PF07741.3; Description=Brf1-like TBP-binding domain
  Pfam annotation: Domain name=TFIIB; Domain location=199-270; Score =31.0; E_value=4.3e-06; Accession=PF00382.10; Description =Transcription factor TFIIB repeat
  Pfam module annotation: Pfam domain module=BRF1::TFIIB; Domain location=435-537::199-270
MANPKDHNNIVLDINTRLTNSPANEEEKLEDHMKRLDEEFQRQQAQISKVAKKWYLSHFKVDHHQKVVKKREVKYDSLSALLHQLPIPVAGAPAALSLTGFGALFRGFGALFRALANLLDRSPPPATKKVQTLVYRGCVELSTFGFSEKVLDQEVYTDEPTFVKDNKGQSRLAGSILESIESGYSMSRQRTLDKGRDEIRQIVNNLHISGGETIVSKAFRFYELALDRNFTRGRRTTHVAAACLYIACSYVLGAVFLQLCQVLQLAEHPVVQKLVDPSLFIHRFTKQFLATADESNEEPVSKHSPKSGEILCKHKDKGFEHFAHGLCEKCYNKFTKLSGGLEGGSDPPAFQRAEKKRLEAAKRAEEAAAAKEAALEESLCDTQNSEVESAMTPRKGLSGDKSSKMGSEGLINDSMPPKDPEEGGENCEGNADPESLSDIDDAEVDGYLHNEEETQYKKIIWEEMNKEYLEEQAAKEALAAELAARGIDPEAGKKKRKRNEGTKSSTPAETPAEATCNMLKRKGLGSKINVGAVDELYKTKDEVGSANNEEEMEFDALFGPDNAAGETVDDGYNYNYGGYDDDGAEGYNGLDDDFDF

SEQ ID NO: 74947 - protein, 122 aa, Zea mays
  Coding DNA Sequence Number=SeqID_33168
MAYSDRVTTFEDSEKESEYGYVRKIWLPAGSRLGIWVMSAVTVSGFPSRLTPSPPVIRTPAGDPAWLPVFLYLLPPLMDRKRSPATADAPVRPEGSGSQQPLLHQGGCTALGALMPQSERYP

SEQ ID NO: 74948 - protein, 665 aa, Zea mays
  Coding DNA Sequence Number=SeqID_33169
  Gene Ontology: Mol. function=hydrogen ion transporting ATP synthase activity, rotational mechanism; Cellular component=proton -transporting two-sector ATPase complex; Biological process=ATP synthesis coupled proton transport
  Homolog annotation: Hit_ID=O23654; Match level="QueryCoverage=99%, HitCoverage=99%, E-value=0.0, Identity=86%"; Hit description =Vacuolar ATP synthase catalytic subunit A
  Pfam annotation: Domain name=ATP-synt_ab; Domain location=273-500; Score=354.0; E_value=2.5e-103; Accession=PF00006.15; Description=ATP synthase alphabeta family, nucleotide-binding domain
  Pfam annotation: Domain name=ATP-synt_ab_C; Domain location=518-662; Score=191.3; E_value=2.4e-54; Accession=PF00306.17; Description=ATP synthase alphabeta chain, C terminal domain
  Pfam annotation: Domain name=ATP-synt_ab_N; Domain location=66-128; Score=67.3; E_value=5e-17; Accession=PF02874.13; Description=ATP synthase alphabeta family, beta-barrel domain
  Pfam module annotation: Pfam domain module=ATP-synt_ab::ATP-synt_ab _C::ATP-synt_ab_N; Domain location=273-500::518-662::66-128
MAYGDRVTTFEDSEKESEYGYVRKIWLPAGSRLGIWVVLAVTVVDLLGVAGLVQVVLACWDLASIGGQVSGPVVVADGMGGAAMYELVRVGHDNLIGEIIRLEGDSATIQVYEETAGLMVNDPVLRTRKPLSVELGPGILGNIFDGIQRPLKTIAIKSGDVYIPRGVSVPALDKDVLWEFQPTKLGVGDVITGGDLYATVFENTLMQHHVALPPGSMGKISYIAPAGQYNLQDTVLELEFQGIKKKFTMLQTWPVRSPRPVASKLAADTPLLTGQRVLDALFPSVLGGTCAIPGAFGCGKTVISQALSKYSNSEAVVYVGCGERGNEMAEVLMDFPQLTMTLPDGREESVMKRTTLVANTSNMPVAAREASIYTGITIAEYFRDMGYNVSMMADSTSRWAEALREISGRLAEMPADSGYPAYLAARLASFYERAGKVKCLGSPDRNGSVTIVGAVSPPGGDFSDPVTSATLSIVQVFWGLDKKLAQRKHFPSVNWLISYSKYSKALESFYEKFDPDFIDIRTKAREVLQREDDLNEIVQLVGKDALAESDKITLETAKLLREDYLAQNAFTPYDKFCPFYKSVWMMRNIIHFNTLANQAVERAAGTDGHKITYSVIKHRLGDLFYRLVSQKFEDPAEGEEALVGKFKKLYDDLTTGFRNLEDEAR

SEQ ID NO: 74949 - protein, 224 aa, Zea mays
  Coding DNA Sequence Number=SeqID_33170
  Homolog annotation: Hit_ID=Q6QP51; Match level="QueryCoverage=24%, HitCoverage=29%, E-value=1e-10, Identity=60%"; Hit description =Putative growth-regulating factor 1
MGAHAHASCNRRTGRYVQATAPPLAPLSRLLDCGTSTATRGNPAYDPAGLARRDDGAPVFRSSNGSRTRNGHPTNHSPRHINSAAGGASGRGSERRFTFAIMTASKKAPSLPTDQRFEGWPLGGVKQSPQSAWAPHPLLVRGSKAGPLEGFNGCERELESSAKTKASTPQLILRRRSAYLSIFWGRVQSKRTSSLAASGHSGSAPTTDQGFEGWPSKGSQSPQT

SEQ ID NO: 74950 - protein, 318 aa, Zea mays
  Coding DNA Sequence Number=SeqID_33171
  Homolog annotation: Hit_ID=Q6QP54; Match level="QueryCoverage=25%, HitCoverage=25%, E-value=2e-09, Identity=45%"; Hit description =Putative kinase
MSARDRETAEALVREDKGFHSVTHPSPSLRASLHLFGESSKQKDFVFAANPISTKLQRPDGHDSGQGSVHLRDTISSRPSPASGRNSRPRQIHASSEGLLKQQAHLRLARGPARAGFAEKQPWPDRHANRPYRRSNQCKDRLTPYPDARSSVDKAAENNAACPAPTAVPLARVRPTAAKSSLGRHRKLRLARPQGSAPVSASEDGLRLARPQGSDSTSTSEDGLRLARPQGSDSASTSEDGLRLARPQVSDSTSTSEDGLRLARPQGSDSASTPEDGLRLARPQGSDSASTSEESPSSPDLGLGPTTSQGGPHHYPTP

SEQ ID NO: 74951 - protein, 114 aa, Zea mays
  Coding DNA Sequence Number=SeqID_33172
MKGGREIIDEAIKRNEKESHDALDEAKRAEEAAERARLIGMHFLIYFHRFFSFDTDRYLWLNATELSPPPEPYNPEADPSIKEALDIIKIANDSIDEAVDRLLNEAADKVLRED

SEQ ID NO: 74952 - protein, 93 aa, Zea mays
  Coding DNA Sequence Number=SeqID_33173
MEDHWCHKNLLVASSRRVSSGWEDNGGWMWSFDTDRYLWLNATELSPPPEPYNPEADPSIKEALDIIKIANDSIDEAVDRLLNEAADKVLRED

SEQ ID NO: 74953 - protein, 463 aa, Zea mays
  Coding DNA Sequence Number=SeqID_33174
  Gene Ontology: Mol. function=transferase activity; Cellular component= mitochondrion; Biological process=embryonic development ending in seed dormancy
  Homolog annotation: Hit_ID=Q656A1; Match level="QueryCoverage=99%, HitCoverage=72%, E-value=0.0, Identity=75%"; Hit description =Putative fertility restorer
  Pfam annotation: Domain name=PPR; Domain location=100-134; Score =33.3; E_value=8.4e-07; Accession=PF01535.11; Description=PPR repeat
  Pfam annotation: Domain name=PPR; Domain location=135-169; Score =27.8; E_value=3.9e-05; Accession=PF01535.11; Description=PPR repeat
  Pfam annotation: Domain name=PPR; Domain location=170-204; Score =37.9; E_value=3.5e-08; Accession=PF01535.11; Description=PPR repeat
  Pfam annotation: Domain name=PPR; Domain location=205-239; Score =50.2; E_value=6.9e-12; Accession=PF01535.11; Description=PPR repeat
  Pfam annotation: Domain name=PPR; Domain location=240-274; Score =33.9; E_value=5.5e-07; Accession=PF01535.11; Description=PPR repeat
  Pfam annotation: Domain name=PPR; Domain location=275-309; Score =42.7; E_value=1.2e-09; Accession=PF01535.11; Description=PPR repeat
  Pfam annotation: Domain name=PPR; Domain location=31-64; Score=26.8; E_value=7.7e-05; Accession=PF01535.11; Description=PPR repeat
  Pfam annotation: Domain name=PPR; Domain location=310-344; Score =29.7; E_value=1e-05; Accession=PF01535.11; Description=PPR repeat
  Pfam annotation: Domain name=PPR; Domain location=346-380; Score =29.6; E_value=1.1e-05; Accession=PF01535.11; Description=PPR repeat
  Pfam annotation: Domain name=PPR; Domain location=65-99; Score=23.6; E_value=0.00073; Accession=PF01535.11; Description=PPR repeat
  Pfam module annotation: Pfam domain module=PPR::PPR::PPR::PPR::PPR::PP R::PPR::PPR::PPR::PPR; Domain location=100-134::135-169::170-204::205- 239::240-274::275-309::31-64::310-344::346-380::65-99
MVPRNPGLYLAVALGILHDVIPAWNLVPDKFTYSTVVSALADAGCVEEAVALVHEMVVDGVVSAEAFNPVLKAMLRAGDVNGAVKLFRFMQLKGCTLTAVTYNVLLHGLLLCGEARAAMNIMRRMENEGIVPGLMTYGAVVDGLVKCGRVEDAWKVAQEMGGQGLAPSEFVFSAVITGFCKSGEVDRALMVWETMVAARVKPNVVLYSAMIDGFARSGRMTEAEKLFEEMVDAKCIPNIVTYSSMVRGYFHIANSSRALSTWEEMIKVGCVPTAISYSILISGLCDVGRLKDAMMVWKNMIGRGCAPDTIAYTSMMKGLCMSGMVDGGLRLFNDMLAKGDAKPDVISYNVLLDALIRTNDLPRAMDLLNQMLDQMCDPDTITCNIFLREFGVLEGKGREFLEGLVMRLCYRDRYRAAGDVVMVMLAKYIVPEAGIWYTIVRGVCQTKRVQKVVDNCWDEIWRP

SEQ ID NO: 74954 - protein, 619 aa, Zea mays
  Coding DNA Sequence Number=SeqID_33175
  Gene Ontology: Mol. function=calcium ion binding; Cellular component =mitochondrion; Biological process=embryonic development ending in seed dormancy
  Homolog annotation: Hit_ID=Q656A1; Match level="QueryCoverage=79%, HitCoverage=90%, E-value=0.0, Identity=49%"; Hit description =Putative fertility restorer
  Pfam annotation: Domain name=PPR; Domain location=276-309; Score =26.8; E_value=7.7e-05; Accession=PF01535.11; Description=PPR repeat
  Pfam annotation: Domain name=PPR; Domain location=310-344; Score =23.6; E_value=0.00073; Accession=PF01535.11; Description=PPR repeat
  Pfam annotation: Domain name=PPR; Domain location=345-379; Score =33.3; E_value=8.4e-07; Accession=PF01535.11; Description=PPR repeat
  Pfam annotation: Domain name=PPR; Domain location=380-414; Score =27.8; E_value=3.9e-05; Accession=PF01535.11; Description=PPR repeat
  Pfam annotation: Domain name=PPR; Domain location=415-449; Score =37.9; E_value=3.5e-08; Accession=PF01535.11; Description=PPR repeat
  Pfam annotation: Domain name=PPR; Domain location=450-484; Score =50.2; E_value=6.9e-12; Accession=PF01535.11; Description=PPR repeat
  Pfam annotation: Domain name=PPR; Domain location=485-519; Score =33.9; E_value=5.5e-07; Accession=PF01535.11; Description=PPR repeat
  Pfam annotation: Domain name=PPR; Domain location=520-554; Score =42.7; E_value=1.2e-09; Accession=PF01535.11; Description=PPR repeat
  Pfam annotation: Domain name=PPR; Domain location=555-589; Score =29.7; E_value=1e-05; Accession=PF01535.11; Description=PPR repeat
  Pfam module annotation: Pfam domain module=PPR::PPR::PPR::PPR::PPR::PP R::PPR::PPR::PPR; Domain location=276-309::310-344::345-379::380 -414::415-449::450-484::485-519::520-554::555-589
MPPVALPGKEAGYLGEYRRSIMAPDEAEAATSALDVAGGYLMLADFQTRNAGNKKCGKAVPPPEDSRRPPHRHASPSPMPHPATRLPLSFRRLTYLPSLAASNARGCRSSSSSDDELPLAAELFPAAGPTLLSIARSLAVASPPPSAASVLGFLCRLPHDASPHIFPHLVAALARSPRPVLALRLFLSPPTSAATTHHSFNSALLRFPLPLHLLPAFFTHSILRFPGLTPTLLSFNLLLKCICSSMVPRNPGLYLAVALGILHDVIPAWNLVPDKFTYSTVVSALADAGCVEEAVALVHEMVVDGVVSAEAFNPVLKAMLRAGDVNGAVKLFRFMQLKGCTLTAVTYNVLLHGLLLCGEARAAMNIMRRMENEGIVPGLMTYGAVVDGLVKCGRVEDAWKVAQEMGGQGLAPSEFVFSAVITGFCKSGEVDRALMVWETMVAARVKPNVVLYSAMIDGFARSGRMTEAEKLFEEMVDAKCIPNIVTYSSMVRGYFHIANSSRALSTWEEMIKVGCVPTAISYSILISGLCDVGRLKDAMMVWKNMIGRGCAPDTIAYTSMMKGLCMSGMVDGGLRLFNDMLAKGDAKPDVISYNVLLDALIRTNDLPRAMDLLNQMLDQ

SEQ ID NO: 74955 - protein, 75 aa, Zea mays
  Coding DNA Sequence Number=SeqID_33176
MGQQAAALLGEQPVYHAVQRTIGCGAAMPPVALPGKEAGYLGEYRRSIMAPDEAEAATSALDVAGGYLMLAVAAA

SEQ ID NO: 74956 - protein, 123 aa, Zea mays
  Coding DNA Sequence Number=SeqID_33177
ERLPREPEADEFRRPRFLGAPDMSGRAAGSGGGFVVGRRGIAAGAVVRGIRDAAALLGEQPVYHAVQRTIGCGAAMPPVALPGKEAGYLGEYRRSIMAPDEAEAATSALDVAGGYLMLAVAAA

SEQ ID NO: 74957 - protein, 93 aa, Zea mays
  Coding DNA Sequence Number=SeqID_33178
MAYDYYASGAEDEWTLQENMEAFSRIFVAIAPVLDRFALDAQAIEDVDPRAIDLAMRIAERMFLKMKKDEVKIKIEEEDNDRWRPYDESTSSQ

SEQ ID NO: 74958 - protein, 418 aa, Zea mays
  Coding DNA Sequence Number=SeqID_33179
  Gene Ontology: Mol. function=oxidoreductase activity; Cellular component=peroxisome; Biological process=electron transport
  Homolog annotation: Hit_ID=Q6YT73; Match level="QueryCoverage=99%, HitCoverage=100%, E-value=1e-179, Identity=80%"; Hit description =Putative glycolate oxidase (Os07g0152900 protein) (Putative (S)-2- hydroxy-acid oxidase)
  Pfam annotation: Domain name=FMN_dh; Domain location=14-406; Score =663.3; E_value=1.9e-196; Accession=PF01070.8; Description=FMN -dependent dehydrogenase
  Pfam annotation: Domain name=Glu_synthase; Domain location=83-371; Score=-219.0; E_value=0.015; Accession=PF01645.7; Description =Conserved region in glutamate synthase
  Pfam annotation: Domain name=IMPDH; Domain location=45-415; Score= -230.2; E_value=0.013; Accession=PF00478.15; Description=IMP dehydrogenase  GMP reductase domain
  Pfam module annotation: Pfam domain module=FMN_dh::Glu_synthase::IMPDH ; Domain location=14-406::83-371::45-415
MGEITNVMEYQAIAKQKLPKMAYDYYASGAEDEWTLQENREAFSRILFRPRILIDVSKIDMTTTVLGFKISMPIMVAPTAMQKMAHPDGENATARAAAAAGTIMTLSSWATSSVEEVASTGPGIRFFQLYVYKDRKVVEQLVRRAERAGFKAIALTVDTPRLGRREADIKNRFVLPPHLTLKNFEGLDLGKMDQLNVCAPIEHGQAADSGLASYVAGQVDRTLSWKDVKWLQTITTLPILVKGVLTAEDTRLAVANGAAGIIVSNHGARQLDYVPATISALEEVVKAARGQLPVFVDGGVRRGTDVFKALALGAAGVFVSYLPTLLPSADTTTAQTSNNVFIIRLPGLPSSDWLTYVGRPVVFSLAAAGEAGVSNVLRMLRDEFELTMALSGCTSLAEITRKHIITESDKLSAIPSRL

SEQ ID NO: 74959 - protein, 144 aa, Zea mays
  Coding DNA Sequence Number=SeqID_33180
  Gene Ontology: Mol. function=oxidoreductase activity, acting on NADH or NADPH, quinone or similar compound as acceptor; Cellular component=photosystem II; Biological process=mitochondrial electron transport, NADH to ubiquinone
  Homolog annotation: Hit_ID=P12159; Match level="QueryCoverage=60%, HitCoverage=34%, E-value=6e-34, Identity=85%"; Hit description =NAD(P)H-quinone oxidoreductase chain K, chloroplast (EC 1.6.5.-) (NAD(P)H dehydrogenase, chain K)
  Pfam annotation: Domain name=Oxidored_q6; Domain location=1-70; Score= 73.8; E_value=5.6e-19; Accession=PF01058.12; Description=NADH ubiquinone oxidoreductase, 20 Kd sub
MAPSLVRLYEQMPEPKYVIAMGACTITGGMFSTDSYSTVRGVDKLIPVDVYLPGCPPKPEAVIDALTKFHEEGIVREDVPFRRAESKYSVEQVGVTVEFYGGELNGTWMLKWNLEHSKKLEIQLQGDRQPDTTLLWYLSPPFFV

SEQ ID NO: 74960 - protein, 162 aa, Zea mays
  Coding DNA Sequence Number=SeqID_33181
  Gene Ontology: Mol. function=chlorophyll binding; Cellular component =photosystem; Biological process=photosynthetic electron transport
  Homolog annotation: Hit_ID=Q2QW47; Match level="QueryCoverage=50%, HitCoverage=32%, E-value=2e-35, Identity=85%"; Hit description =Photosystem II P680 chlorophyll A apoprotein, putative
MQKSKSTLRTVRRKSKDRLRQSADRPLTKGWAIHLGPHGDGIAVGWLGHPVFRDKEGHELFVRRMSTFFETFPVVLVDEEGIVRADVPFRRAESKYSVEQVGVTVEFYGGKLNEADLLSYPQQVRWHCSPHSPIPMLKQPPKDPYESRNQQLESSWQVPINA

SEQ ID NO: 74961 - protein, 319 aa, Zea mays
  Coding DNA Sequence Number=SeqID_33182
MGLKSLSQRIECVRMESWCLGMIKECLANRWIFGLVGAPDTVRCPLLTVGAGHASLADLAADRCAGGRWLTEQSGAPPDSLVNYSRTPPKTPKSSQFAGDQSGAPDTVCAHSPSSSLTRALTALGTRLAPRAHLGSSTVVRRGPPPILWPSLSLCRARCLGELHLFASSGDIFRFAPNPSGSPGPRSPAFSPCSRSPTAVDLRPPCAPVVAQAFLSLHSRSATLTCPYFPSYCSVVRVITCRSESAPPLSRSIAVCALGCLCAGVVPTAGSAESPRSCLSPFLVPQTLVVVVPSPPAKLRNKVGRRHREPVSNPARARH

SEQ ID NO: 74962 - protein, 141 aa, Zea mays
  Coding DNA Sequence Number=SeqID_33183
MKHNEFTTRTELKSLTKSIKCAETECGRLRMLKVCLCDSSMRLEVPFIALRQLGAVGGILGRQILPSVGWRTGTVRCTTGTPAVHVWCAISFHSWRSQPCNFGLVGAPDTVRCPQPTVGAGHASPADLAADRCAGSRWLTG

SEQ ID NO: 74963 - protein, 369 aa, Zea mays
  Coding DNA Sequence Number=SeqID_33184
  Homolog annotation: Hit_ID=Q9FN37; Match level="QueryCoverage=27%, HitCoverage=10%, E-value=2e-11, Identity=40%"; Hit description =Putative receptor protein kinase
  Pfam annotation: Domain name=DUF538; Domain location=180-310; Score= -32.1; E_value=0.0085; Accession=PF04398.3; Description=Protein of unknown function, DUF538
MVLAGLFEMMVLPALPAILAPNRRESCSPNLRWRRLHCRWRCQVCSGVCRWEGMVCSGSGQVVSLSLPFYGLTGTLSTAFGNLTFLRMLNLSSNSFRGEVLATIVRLAHLHALDLSYNAFSDAHDISQCNKISEKVLDGCVEEVGGYRVGYDIKLSGTESPRSVTGLEGVCVRVLFAWVLITGVEAADGEVTVHIGPIRKSFPAVGFKSSPWCIIGWATKAWPFLRVLDGCVEEVGGYHVGYDIKLSSTESPRSVTGLEGVRVRVLFAWVPITGVEAVDGEVTVHIGPIRKSFPAVGFKSSPRCIIRLEAWSLVMGWRLRIQANITDHNIKCMRQGKEANRCRFSSFLLDPFLAILDLHSPGLQGLPFA

SEQ ID NO: 74964 - protein, 659 aa, Zea mays
  Coding DNA Sequence Number=SeqID_33185
  Homolog annotation: Hit_ID=Q0IKM2; Match level="QueryCoverage=16%, HitCoverage=10%, E-value=4e-28, Identity=65%"; Hit description=Ca2+ binding protein cbp1
  Pfam annotation: Domain name=DUF538; Domain location=180-310; Score= -31.9; E_value=0.0081; Accession=PF04398.3; Description=Protein of unknown function, DUF538
  Pfam annotation: Domain name=efhand; Domain location=382-410; Score =17.4; E_value=0.051; Accession=PF00036.22; Description=EF hand
  Pfam module annotation: Pfam domain module=DUF538::efhand; Domain location=180-310::382-410
MVLAGLFEMMVLPALPAILAPNRRESCSPNLRWRRLHCRWRCQVCSGVCRWEGMVCSGSGQVVSLSLPFYGLTGTLSTAFGNLTFLRMLNLSSNSFRGEVLATIVRLAHLHALDLSYNAFSDAHDISQCNKISEKVLDGCVEEVGGYRVGYDIKLSGTESPRSVTGLEGVCVRVLFAWVLITGVEAADGEVTVHIGPIRKSFPAVGFKSSPWCIIGLATKAWPFLRVLDGCVEEVGGYHVGYDIKLSSTESPRSVTGLEGVRVRVLFAWVPITGVEAVDGEVTVHIGPIRKSFPAVGFKSSPRCIIRLEAWSLVMGWRLRIQANITDHNIKCMRQGKEANRCRFSSFLLDPFLAILDLHSPGLQVDAMLQELEKEIDDVDAQIGNRWQLLDKDHDGKVTPEEVAAATAYLKDTIGKEGVQELISNLSKDTGSFTYMLPQCCLCPIFLYFSERSLYALPQKEKILVEDIVKLASQIENNEEEEEARNHSSRHNNSNHKCRCSRRNHKNKQHLLCAENHLLLLGKQQWHINLRRLNLFNLRPRSSVKHQRDLVQWHPQPPVAASAPKPGGSPKKGEVKPAVDPVQTPTTGADSTKPEPSAPSLPGAEGVDKMAIDEASGDAPEVAEELDPALEEEMSMEEMIRVTRAKLRRRTTTEVPAGN

SEQ ID NO: 74965 - protein, 82 aa, Zea mays
  Coding DNA Sequence Number=SeqID_33186
MDITSKMDVAKVILGCIARRQLIKPRTEARRASRYQVHGRRSRRLRNPKPRDVGAKKCQSRSSQADLMIYESNIKAQACEML

SEQ ID NO: 74966 - protein, 82 aa, Zea mays
  Coding DNA Sequence Number=SeqID_33187
MDITSKMDVAKVILGCIARRQLIKPRTEARRALRYQVHGRRSRRPRNPKPRDVGAKKCQSRSSQADLMIYESNIKAQACEML

SEQ ID NO: 74967 - protein, 91 aa, Zea mays
  Coding DNA Sequence Number=SeqID_33188
RLNLPPGRLSLPWQAWQPVCQSDWQTDAQTDRILVRGVRDQLNCPSGPVQPVLTREFRRENPSSTAQRQVQLVYGQRGSQLKLSSAEVQPS

SEQ ID NO: 74968 - protein, 109 aa, Zea mays
  Coding DNA Sequence Number=SeqID_33189
MKHKTAALKLTQRFLSKDLKWERQEMCVREREAWQPVCQSDWQTDAQTDRILVRGVRDQLNCPSGPVQPVLTREFRRENPSSTAQRQVQLVYGQRGSQLKLSSAEVQPS

SEQ ID NO: 74969 - protein, 105 aa, Zea mays
  Coding DNA Sequence Number=SeqID_33190
MGSPCLTMDSAVQPLWTTSKRRLRRSLPYTAAHGPWRGNEKDRQLGMGMSFAVRTEWEWQNTEWGSLPLTVLIGSREMGQAHYTEGMRALGAGASDMVIWLIQGL

SEQ ID NO: 74970 - protein, 444 aa, Zea mays
  Coding DNA Sequence Number=SeqID_33191
RFVSRQLIRRRQKKLRIRERQKAEVAEIKRKAAAEEAEKKKEEEAEDKRKAEAEEAEIKRKAEAEEAEIKRKAEAEEAEIKRMAAAEEVVKKKADAEKKVEAEEKRIQVAIQKQLKDNIKALKKPVPAAKLKKMFQLQMSKEYAEQRQQYEDRLNMLRQEAKAEIDSLEKSIDAQAGPSSSFDDIQFPAESDDDINNLTQPIRLSQDEVSVGQADFSEFQRMIFKRLGDRVLKKPREYISPFKIPRNRPEIPLAKAVALRRKITSDPELKRRILLEFGLLVGLTGKEILTSFSNDTLGESGIIDFFVHCMRHDDIVHKVDSCGYRVFLTTGFYVFVPIKDGAHYFVYCFNFIHKRIDVLDSNDYFLNCSNQEERHKAVFAKIPIIDAAFQKVSNLKLPRFKGPIYRCELLHYEIFHPLNQAEIPGSLDKFRIGGRPLPIEWDSS

SEQ ID NO: 74971 - protein, 877 aa, Zea mays
  Coding DNA Sequence Number=SeqID_33192
  Homolog annotation: Hit_ID=Q53MK8; Match level="QueryCoverage=30%, HitCoverage=27%, E-value=2e-20, Identity=31%"; Hit description=Ulp1 protease family, C-terminal catalytic domain, putative
  Subcellular localization annotation: CTP_CleavageSite=23; ConfidenceScore=5.04e-01
MSRASFPLVHNGGHTTNIVGLVSQDSRPTRYNVTMTHARVEGFEVFFIMDQDQNVTGQQGAHTVRRSPRVENKRKQLDKNELKERRKRLRLKVPPIQDAESDDEQDPEFIPGGDGSGDDNVGIVGGDENKGITKTRAIRCSPGKFIKLVSSLSDELKSEVVAKGFGGLLRFKPHLMSRKLLSWLMRNLKPETMKLEIGGGKEIQITEHSVWCVLQLPNVGSDPPPMSDADARALRDELGEQICGKSYRRISGINIYVITDRLQKRTLNGELGLRAFFMAAFQCLLFSNTDTRIRIDDVKYTQDIQNMGNKNWCKAVVDRLSIAARLYRKDFAEKGINAPISGCGIFVAMLYVDNLQHGLDTSPFSIPRCAFLDSKMIDAIANKDLRGDVPPGTTEFGHLRLRSITDTCYGIPIGALAILHAPVPAPVPVAVPNPTAAPNPVAAASVLVATAAPTGTSADVLGTSHDPACHASFNIQPPVFYQYPSFRSSFGQSITDLVGRSRKSDALNILKAFDESTSEAQSYAQKAAKYSTISRDLMAKAHHECYTGIQKLIADAIVEKRAAKERRRKVKNDPRAGAGAGTSSIAPEDQSRGGDGEEIMWSPVAIDTRAGAGSGTTSNVPEDQSGGGDSEEIQLDCSGGDLDDSLDFMRTPSCGDDIDLEEGNLNRTPPDLRGAIRSLDDILQMMYSPQHFASIDGESPPNSQPTRAPRITVRKRKASSNPPGNDQRHVGAPEIEEEPLSRDTGMQHPTAQDHITYSKRSDRSIQVANTQKAEAEKKKVEIEMKNAEAEEAEKRKAEAEQADKKKAEEAENKRKAEAEVAEIKRKAAAEEAEKKKEEEAEDKRKAEVEEAEIKRKAEAEEAEIKRKAAARSCEEEG

SEQ ID NO: 74972 - protein, 111 aa, Zea mays
  Coding DNA Sequence Number=SeqID_33193
  Gene Ontology: Mol. function=calcium ion binding; Cellular component =oxygen evolving complex; Biological process=photosynthesis
  Homolog annotation: Hit_ID=Q41806; Match level="QueryCoverage=74%, HitCoverage=38%, E-value=1e-07, Identity=40%"; Hit description =Oxygen-evolving enhancer protein 3-2, chloroplast precursor
MEEDLDTDDEGSWDLVGRDIRLKAAFLCIDLGRVIALCGGEERKKALTALANKLFYSMDELGDAVESRSLPLTQARYSDTADALREVVAVLALSLDLEFGPDDPCSPDILI

SEQ ID NO: 74973 - protein, 343 aa, Zea mays
  Coding DNA Sequence Number=SeqID_33194
  Gene Ontology: Mol. function=ATPase activity, coupled to transmembrane movement of ions, phosphorylative mechanism; Cellular component=membrane; Biological process=metabolic process
  Homolog annotation: Hit_ID=Q94IM7; Match level="QueryCoverage=50%, HitCoverage=25%, E-value=8e-91, Identity=93%"; Hit description=P -type ATPase
  Pfam annotation: Domain name=Cation_ATPase_C; Domain location=196 -342; Score=31.5; E_value=9.4e-07; Accession=PF00689.11; Description =Cation transporting ATPase, C-terminus
MEEDLDTDDEGSWDLVGRDIRLKAAFLCIDLGRVIALCGGEERKKALTALANKLFYSMDELGDAVESRSLPLTQARYSDTADALREVVAVLALSLDLEFGPDDPDGKRIAEYINRRRKTKYRDYWPARDQLQPIQEKIRYMISSNIGEVASIFLTSALGIPEGLIPVQLLWVNLVTDGPPATALGFNPPDKDIMKKPPRRSDDSLITPWILFRYMVIGLYVGVATVGIFIIWYTHDSFMGIDLASDGHTLVSYSQLSNWDQCSSWEGFKVSPFTAGARTFSFDANPCDYFQGGKIKATTLSLSVLVAIEMFKFQIIKVHFLQSNNLQDHGLCKHYYMYPDQYE

SEQ ID NO: 74974 - protein, 262 aa, Zea mays
  Coding DNA Sequence Number=SeqID_33195
  Gene Ontology: Mol. function=ATPase activity, coupled to transmembrane movement of ions, phosphorylative mechanism; Cellular component=membrane; Biological process=metabolic process
  Homolog annotation: Hit_ID=Q94IM7; Match level="QueryCoverage=65%, HitCoverage=25%, E-value=3e-90, Identity=93%"; Hit description=P -type ATPase
  Pfam annotation: Domain name=Cation_ATPase_C; Domain location=110 -254; Score=33.8; E_value=5.9e-07; Accession=PF00689.11; Description =Cation transporting ATPase, C-terminus
MCRSMDASAPSGLTELVTDVKRIAEYINRRRKTKYRDYWPARDQLQPIQEKIRYMISSNIGEVASIFLTSALGIPEGLIPVQLLWVNLVTDGPPATALGFNPPDKDIMKKPPRRSDDSLITPWILFRYMVIGLYVGVATVGIFIIWYTHDSFMGIDLASDGHTLVSYSQLSNWDQCSSWEGFKVSPFTAGARTFSFDANPCDYFQGGKIKATTLSLSVLVAIEMFKFQIIKKFSKIEPSLPLLAERNPFVSRTSSASSTELL

SEQ ID NO: 74975 - protein, 262 aa, Zea mays
  Coding DNA Sequence Number=SeqID_33196
  Gene Ontology: Mol. function=ATPase activity, coupled to transmembrane movement of ions, phosphorylative mechanism; Cellular component=membrane; Biological process=metabolic process
  Homolog annotation: Hit_ID=Q94IM7; Match level="QueryCoverage=65%, HitCoverage=25%, E-value=3e-90, Identity=93%"; Hit description=P -type ATPase
  Pfam annotation: Domain name=Cation_ATPase_C; Domain location=110 -261; Score=30.1; E_value=1.2e-06; Accession=PF00689.11; Description =Cation transporting ATPase, C-terminus
MCRSMDASAPSGLTELVTDVKRIAEYINRRRKTKYRDYWPARDQLQPIQEKIRYMISSNIGEVASIFLTSALGIPEGLIPVQLLWVNLVTDGPPATALGFNPPDKDIMKKPPRRSDDSLITPWILFRYMVIGLYVGVATVGIFIIWYTHDSFMGIDLASDGHTLVSYSQLSNWDQCSSWEGFKVSPFTAGARTFSFDANPCDYFQGGKIKATTLSLSVLVAIEMFKFQIIKKFSKIEPSLPLLAERNPFVSQTSSASSTELL

SEQ ID NO: 74976 - protein, 132 aa, Zea mays
  Coding DNA Sequence Number=SeqID_33197
MVVEAAVAAVLVEEMWWRQLDSIVSAVSFGLMSMFLAIAILEHFLRPLAHTLEHAPPRGIRHRLLLFLSRGGAAMPFHGVPHQLSEVHKKRTLYHPELPSASRHFVCYSSIGHAFGPKKRVKLLSLFIIWNL

SEQ ID NO: 74977 - protein, 1046 aa, Zea mays
  Coding DNA Sequence Number=SeqID_33198
MPASAHKNLDSGCPRRSTRFKDIHVVYEDSDRDPSSFKRIKTEVIDSELSVGSVSDKDSEHNCHDVLLKDLRTQCKAKNRKISKITLEGCGIKNQVKTEDDIDLDKPIVALKQKRLKTSPAKANIKMDALRSSPCAAKEKDTTSARDKILSSAQTFLLKATMQDRGLEKPGRRIAELEQSKVVIDSAEEIVGEQIYCAEVNNTAGVLAGCVKPDVLYEIKTEDTNYSEFGTSMCSIKNPDHSSFELQQKLVDDDDCVPPFCFMTRPAQLADVSDHSCEQTCSSKENNSDDITAAKATDVVSSLDLTDEIKMSNGIYLPMGNEPAKILEELSPIDESSTDTQSDLCRSTEMNFTSLEGVVRMEAEGQLDSIVCCGVRPKHMLLDMEIGHTATGTFTFDKTIDLAHPANFVAQDGRLESIVYDVLNNHAQRTTSKSKSSVGLPDTAVLQSSLIEFTDNCLEDKRASDDKFSHPNNVDLPLKDTLNSTIDYDICRSINNEGSEEEIVPQHQLYQSCSDKFNLSSVMPEISNAEKSQKLSAGTQNSSATSLETDGRIKRPNFFVDEESIEEHAPKVLLSKRKIMSPTSQEKLYSAVTDSKIIIEDCDKTTISLPQPAHMQGKSMFHTDRRLKDRTSVSPTSKGLLKSTGSPPNQQTCSCMRSSPVVLDTEKAVEFSQRQMHDIENIAAKLIRSLKHMKSIVDESLSTEAYSLLPNFNIAQVLSLYVEFKSPCKAAIFTMFAEATSVHTPTVVHVLPPAHPARGRTLPRITQSRRNSCSRRFRERLNTAFRLRCLSACLARAPRRRPHPHLEAATPPPSWLTPRRKSVCRPSPPISPSLLPSPVTTHTSATSAVVLGAMVVEAAVAAVLVEEMWWRQLDSIVSAVSFGLMSMFLAIAILEHFLRPLAHTLEHAPPRGIRHRLLLFLSRGGERSAAPSLDLEAATKLQAHAPLEMGPMRTRIRNWTMGPTGWPRGGCGSRSPSALMSSASVSRSSGSSTEQGAAMPFHGVPHQLSEVHKKRTLYHPELPSASRYAPPRYGGRNVHERELSEV

SEQ ID NO: 74978 - protein, 137 aa, Zea mays
  Coding DNA Sequence Number=SeqID_33199
  Gene Ontology: Mol. function=protein phosphatase type 2C activity; Cellular component=nucleus
  Homolog annotation: Hit_ID=Q2HW33; Match level="QueryCoverage=91%, HitCoverage=38%, E-value=9e-20, Identity=41%"; Hit description =Protein phosphatase 2C-like
LRGPCVAVYGKLRRSRRLDAVQSGCTALSIVKQGDLMVVANADNSRVVLGTATDDGAITPSINTIHLKPNLSRKSLQTDHKFLCAGMTAIVVVVQESSILTMSRAFDDYYIKDCSVISAPEVTQRRTDNNDHSPSSG

SEQ ID NO: 74979 - protein, 402 aa, Zea mays
  Coding DNA Sequence Number=SeqID_33200
  Homolog annotation: Hit_ID=Q2HW33; Match level="QueryCoverage=31%, HitCoverage=38%, E-value=6e-19, Identity=41%"; Hit description =Protein phosphatase 2C-like
  Subcellular localization annotation: CTP_CleavageSite=58; ConfidenceScore=5.34e-01
MIPVLGFPCGNGSTTHSNSQVTVDDGSTNHPNSQVTVGSGNTHHPNSQVTIDSRSMCCLSFEAGIGSWSKDDPSSWFPIGTGSTDHSNFQVTVGTGSTQYPSSQVPTGIGSAYQSDFHVTLGDRSASIPDSQATVHYGIKHQPNSCVSVGNGSTGSVNSQDIVGHGSTYNPESLPAIGDGSMHNTNFEVVVGVGSTDKGNSQDTLVDGNLNRPSSMVSVDNGSSCYPNCKDAVGDTCAPSSEGSNPEYASCTVVVEQSRLSRDRFLRGPCVAVYGKLRRSRRLDAVQSGCTALSIVKQGDLMVVANADNSRVVLGTATDDGAITPSINTIHLKPNLSRKSLQTDHKFLCAGMTAIVVVVQESSILTMSRAFDDYYIKDCSVISAPEVTQRRTDNNDHSPSSG

SEQ ID NO: 74980 - protein, 67 aa, Zea mays
  Coding DNA Sequence Number=SeqID_33201
MPTLLLPLLILLPFGPLEIIRVFGSILNILIVLDLGAYLRLLLCGDCSLVGGIAVGPLIATTPVQGE

SEQ ID NO: 74981 - protein, 700 aa, Zea mays
  Coding DNA Sequence Number=SeqID_33202
  Homolog annotation: Hit_ID=Q10T05; Match level="QueryCoverage=32%, HitCoverage=76%, E-value=4e-44, Identity=46%"; Hit description=DNA -binding family protein, putative, expressed
  Pfam annotation: Domain name=DUF296; Domain location=147-260; Score =72.3; E_value=1.6e-18; Accession=PF03479.5; Description=Domain of unknown function (DUF296)
  Subcellular localization annotation: CTP_CleavageSite=64; ConfidenceScore=5.28e-01
MKKEVEEVEGHGYGAATPMTPPPSSLGLPSPSVSTLTSAAAARVLARPMPASVPSLRAPSPFVRAMRTRVDPPPPQPLTAPPLLRPRPVLPPPPIPEKQRRGRPRNCDRLLPPPPGFHLAPSARAPLPARGQPSSRGHPFRGQFGGLQLHVLKIHVGEDIVSKIVQVSKITGKAVCVLSVFGAVQDCYLLHSAVILNHKGPLEIIHVFGSILTSDSPGFGCLSATLACGDCSLVGGIAVGPLIAATPVQAIVGSFHNDAFQANKKPKLVACYPSSHVTAGTGGMCCVNSKITIGSLRKHDTSSWFPIGNGSTTHSNSQVTVDDGSTNHPNSQVTVGSGNTHHPNSQVTIDSRSMCCLSFEAGIGSWSKDDPSSWFPIGTGSTDHSNFQVTVGTGSTQYPSSQVPTGIGSAYQSDFHVTLGDRSASIPDSQATVHYGIKHQPNSCVSVGNGSTGSVNSQDIVGHGSTYNPESLPAIGDGSMHNTNFEVVVGVGSTDKGNSQDTLVDGNLNRPSSMVSVDNGSSCYPNCKDAVGDTCAPSSEGSNPEYASCTVVVEQSRLSRDRFLRGPCVAVYGKLRRSRRLDAVQSGCTALSIVKQGDLMVVANADNSRVVLGTATDDGAITPSINTIHLKPNLSRKSLQTDHKFLCAGMTAIVVVVQESSILTMSRAFDDYYIKDCSVISAPEVTQRRTDNNDHSPSSG

SEQ ID NO: 74982 - protein, 107 aa, Zea mays
  Coding DNA Sequence Number=SeqID_33203
  Subcellular localization annotation: CTP_CleavageSite=56; ConfidenceScore=5.15e-01
MGIDSHLSTCVGTQSPKYLEMAQGHISLSPVQSPYVLISAVCVALACSGSFPDNVRVMMSTVHSATWAYFLPTEWTGTPPAGWPGRRLPAEWTGHIKCRGGTSLPAE

SEQ ID NO: 74983 - protein, 304 aa, Zea mays
  Coding DNA Sequence Number=SeqID_33204
  Gene Ontology: Mol. function=DNA binding
YARADECTELIITRTLPGKLPLHANATQTADIRAQGDCAGRVHSATWPEISSSTFGAPGRGLGFEFLLVLPLDIMVHIVEHQYFMPKDFMLEEEAASSTPRTTNLPAPGAAAAVHSARQHTPAQTSRASREALGALSASRELLRHPPSSTASSGAMKQWHDDIDRLLGMAHSGSTRARPRSYRPQHEASASVRSPSVRAVPTKDLRAELNRRRAGEDALVSLERSNDLRTELNHRRAGEDARISLERACERRQNVEGRNLDYGFATVAPQTTTGARIQAGVPLACVGCATLADHLRAATWPSKF

SEQ ID NO: 74984 - protein, 108 aa, Zea mays
  Coding DNA Sequence Number=SeqID_33205
MAQLYNGGVAMCYVASGGVPGRYARVNVSVGEVHEPCRSTAVGAAWILLTSPCFRRGLENHRCHGYTRGTIIACYQARGRARRRFLRGRGPGSGEDVTLPEAEAKAEP

SEQ ID NO: 74985 - protein, 306 aa, Zea mays
  Coding DNA Sequence Number=SeqID_33206
  Homolog annotation: Hit_ID=Q6QP51; Match level="QueryCoverage=74%, HitCoverage=88%, E-value=3e-21, Identity=40%"; Hit description =Putative growth-regulating factor 1
MSNCPRALGPPSPPTDQGFEGCALRGPATAPEHSGPRALLLIRGSKVAPYGVQQPALEHSGPRALLLIRGSKVAPCRVQQPPQTLGPPSPPTNQGFEGCALRGPAAAPERSGPRALLLIRGSKVAPCGVQQPPQSTRASCPLLIKGSKAGPSEGFDSRPRACRVRDDPGYIRYMAEARATLPRYPRTFPRPAGTICNGIPPEGGTEPSDPIEMGPGPANPLQSGSLRPFTNRSDRKNSAAWPAPAAVPNRLGETDNGQVQPRAQQEALPRPTLGLGLGLGRRSPPRPTPRLGLSLGLGKSHVLARP

SEQ ID NO: 74986 - protein, 69 aa, Zea mays
  Coding DNA Sequence Number=SeqID_33207
MARADRADPTTTARPSARVPAREVAWGQERGSPLNEQPLHQKAGGITNSRWLAGDHYTSSATTTSASGG

SEQ ID NO: 74987 - protein, 206 aa, Zea mays
  Coding DNA Sequence Number=SeqID_33208
  Homolog annotation: Hit_ID=Q75KQ9; Match level="QueryCoverage=43%, HitCoverage=13%, E-value=2e-36, Identity=87%"; Hit description =Expressed protein
KLDEKVDLVEVLTRQVENLQRDTLFVERDELRKDIEQLCMQQAGPGYVSVATRMLTQRTAALEQDIENLQKKLGGCLRENQNLQEELAEAYRIKSQLAELHGAALSKHARPQRRAGLESRTTTLAVVVFAGDDALKIGARVMEVGGGWGIVTQGSRVQVDGVCWSGAPVRRLGARWQCPPNSHCPWQRPKGISLCGSIAVLTLAGT

SEQ ID NO: 74988 - protein, 422 aa, Zea mays
  Coding DNA Sequence Number=SeqID_33209
  Homolog annotation: Hit_ID=Q75KQ9; Match level="QueryCoverage=47%, HitCoverage=26%, E-value=8e-60, Identity=61%"; Hit description =Expressed protein
MGKIVSLRLEQLSLEARDLIGVGAGEVHGPLHSLSTCSTTTPGRLGIQDNNIGRGGVWGDDALKIGARGSVTQGSRVQVDVSSGWEGASGTVGQASLEEEKESLKAKISKLQSNLRMGLEIEQHLQRNARILEKRQSDYPADLNSVSFDESKALAQALQEKMEALMLFSQEQERYLLEKQRDLIVIEELQKNLSQLLERKTLFPNTPLCVQVKDEKVKVLMELTKLKEQYLLLKGSSAVKEGHDTGDSSKLIPGHDQQGMMKTMLKRTSLRHWMRKESSTIGHGSSDGNDHIVCKEHSVDVARLRVENAMLLEGVGTVEHLTSSVHRLHIVLLKRPTTEHEQAVKRIIRYVAGTLDHGLYYPRCPGEAHLVGYSDSDHAGDIDTSKSTSGMLQMHLWGRLILGDSRGRAGSRPRAVKPAVLL

SEQ ID NO: 74989 - protein, 239 aa, Zea mays
  Coding DNA Sequence Number=SeqID_33210
  Homolog annotation: Hit_ID=Q75KQ9; Match level="QueryCoverage=91%, HitCoverage=32%, E-value=8e-67, Identity=59%"; Hit description =Expressed protein
MKLILHTITILCILLLAVGKVKDEKVKVLMELTKLKEQYLLLKGSSAVKEGHDTGDSSKLIPGHDQQGMLKTMLKRTSLRHWMRKESNTIGHGSSDGNDHTVCKEHSVDVARLRVENAMLLEGVGTVEHLTSSVHRLHIVLLKAYDDIKSADPLESTFEALNSLITEANLMKTALNVVLPVSWSGDSSDAIKYEAMCDPSDSPKSKSGKVDPLSSAGMEMVELLILAAEILKESFLVKK

SEQ ID NO: 74990 - protein, 94 aa, Zea mays
  Coding DNA Sequence Number=SeqID_33211
MAGQPCVRHIVAHTRCANAVAVAPNDKYLCTGGSDQKVVSCLFVLLVSYVAYVMSYWKRFYIITEVGVHILIGVFHILCKEMIDMLPEIIELFR

SEQ ID NO: 74991 - protein, 242 aa, Zea mays
  Coding DNA Sequence Number=SeqID_33212
  Gene Ontology: Mol. function=protein dimerization activity; Cellular component=nucleus; Biological process=regulation of transcription, DNA-dependent
  Homolog annotation: Hit_ID=Q8S977; Match level="QueryCoverage=37%, HitCoverage=11%, E-value=3e-39, Identity=86%"; Hit description=Auxin response factor 8
  Pfam annotation: Domain name=Auxin_resp; Domain location=9-92; Score =168.6; E_value=1.5e-47; Accession=PF06507.4; Description=Auxin response factor
  Pfam annotation: Domain name=WD40; Domain location=127-163; Score =11.6; E_value=1.6; Accession=PF00400.22; Description=WD domain, G -beta repeat
  Pfam annotation: Domain name=WD40; Domain location=85-122; Score =19.1; E_value=0.016; Accession=PF00400.22; Description=WD domain, G -beta repeat
  Pfam module annotation: Pfam domain module=Auxin_resp::WD40::WD40; Domain location=9-92::127-163::85-122
  Subcellular localization annotation: CTP_CleavageSite=9; ConfidenceScore=5.06e-01
MHIELLAAVAHAAATNSRFTIFFNPRASPTEFVIPLSKYIKAIFHTRISVGMRFRMLFETEESSVRRYMGTITEVSDADPVRWPSSYWRSVKGDQGVNATQWLHNEPILVTVSGDGSVGMWDVTLGQPCVRHIVAHTRRANAVAMAPNDKYLCTGGSNQKVVSCLFVLLVSYVAYVMSYWKSLWFQYKKFAAKVIFTEDKQYSPVPIPQQTDNQFEEEDGSFSPQLMHGNEDEDAIDPEKDS

SEQ ID NO: 74992 - protein, 142 aa, Zea mays
  Coding DNA Sequence Number=SeqID_33213
  Subcellular localization annotation: CTP_CleavageSite=20; ConfidenceScore=5.25e-01
MEMMKMVAVQATIWSFRRSRSQKDGSPDPSLMTLLTVVISMTLLTPCYVRPSTDTLGPSNQWEAPSRVIPGPMGVSEGNPRLSSMVNLVAVLNIELDHALDELSKAQAEIAEQAFEIPDGWCADDMIEHVGGQGFAFGCCFG

SEQ ID NO: 74993 - protein, 221 aa, Zea mays
  Coding DNA Sequence Number=SeqID_33214
MSEDKVHTKDSCWSVGTIYDPRELSGVSTAGPGIGRGVTSGIRADTRGFTGVFGLGGSDNEQPVVPECVAEDFSEQQPGEGKCPLTQGLRLFHEYLFVVPIAISAQEEMQMVRLRCTARKSVIPFLPSRLAEHPLRHTVIGVGAPTPGAGAAGLFPLPQDEVESGRHPSPTPQPEMPPAPPQSIAAVGGDLDGDGDNDDGGSSSHITELSEEQEPEGWRRR

SEQ ID NO: 74994 - protein, 55 aa, Zea mays
  Coding DNA Sequence Number=SeqID_33215
MAMQDDDPKDLERAFLSVSSLSTPGGVTSTWFSFRTIKGTWVKAPATITKGIKEN

SEQ ID NO: 74995 - protein, 617 aa, Zea mays
  Coding DNA Sequence Number=SeqID_33216
  Gene Ontology: Mol. function=protein kinase activity; Cellular component=integral to membrane; Biological process=protein amino acid phosphorylation
  Homolog annotation: Hit_ID=Q5ZBN0; Match level="QueryCoverage=90%, HitCoverage=81%, E-value=0.0, Identity=66%"; Hit description =Receptor-like protein kinase 1-like
  Pfam annotation: Domain name=LRRNT_2; Domain location=30-67; Score =36.1; E_value=1.2e-07; Accession=PF08263.3; Description=Leucine rich repeat N-terminal domain
  Pfam annotation: Domain name=LRR_1; Domain location=121-143; Score =10.8; E_value=2.8; Accession=PF00560.23; Description=Leucine Rich Repeat
  Pfam annotation: Domain name=LRR_1; Domain location=145-167; Score =15.0; E_value=0.27; Accession=PF00560.23; Description=Leucine Rich Repeat
  Pfam annotation: Domain name=LRR_1; Domain location=169-190; Score =11.0; E_value=2.5; Accession=PF00560.23; Description=Leucine Rich Repeat
  Pfam annotation: Domain name=LRR_1; Domain location=191-213; Score =8.9; E_value=6.3; Accession=PF00560.23; Description=Leucine Rich Repeat
  Pfam annotation: Domain name=LRR_1; Domain location=72-95; Score=2.5; E_value=96; Accession=PF00560.23; Description=Leucine Rich Repeat
  Pfam annotation: Domain name=LRR_1; Domain location=97-120; Score =10.5; E_value=3.1; Accession=PF00560.23; Description=Leucine Rich Repeat
  Pfam annotation: Domain name=Pkinase; Domain location=378-612; Score =13.4; E_value=2.3e-09; Accession=PF00069.15; Description=Protein kinase domain
  Pfam annotation: Domain name=Pkinase_Tyr; Domain location=377-594; Score=15.4; E_value=2.1e-13; Accession=PF07714.7; Description =Protein tyrosine kinase
  Pfam module annotation: Pfam domain module=LRRNT_2::LRR_1::LRR_1::LRR_ 1::LRR_1::LRR_1::LRR_1::Pkinase::Pkinase_Tyr; Domain location=30 -67::121-143::145-167::169-190::191-213::72-95::97-120::378-612::
MAGPGASVAALAVLLAAAAAFTRCAVAEPPPRERSALLAFLTATPHERRLGWNASTPACGWVGVTCDNANATVVEVRLPGVGLVGAIPPGTLGRLTNLRALSLRSNRVLGTIPDDVLQLPVLKALFLQHNLLSGPIPPGIQRLGGLERLVLSRNNLSGPIPFALNSLTALRVLRLDGNRLSGSIPSISIAGLGSFDVSDNNLNGSIPKSLSRFPRESFAGNLQLCGDPLPPCSSPFFPPAPSPGGPSPPSGGGGGGGPAPGSSKKRKLSGAAIAGIVVGAVVVGLLILIATVLCVVSRRRGAGARDGPKAATSAAARGQPPPASGGLTSSSKEDLGGGASGSAAAVAAAAAAAAGEQSRLVFVGKGAGYSFDLEDLLRASAEVLGKGSVGTSYKAVLEEGTTVVVKRLKDVAVQRREFDAHMEALGRVEHRNVLPVRAYYFSKDEKLLVYDYLPNGSLSAMLHGSRGSGRTPLDWETRMRFALSAARGLAHLHTAHNLVHGNVKASNVLLRADADAAALSDLSLHRLFAPSTTRAGGYRAPEVVDARRLTFKSDVYSLGVLLLELLTGRSPSHASLEGDGTLDLPPFSFIPFVMVAGAFTHVPLIVLKLNHVEVTWE

SEQ ID NO: 74996 - protein, 95 aa, Zea mays
  Coding DNA Sequence Number=SeqID_33217
MKPTGRSHSAVTATPQASEVTPSRGGCNCPTAARGEPESEIPARDMQQLGYFGNSVGCVPGAEEIPEPEGELVMFEAFFITDLRLPAHRFVAEVL

SEQ ID NO: 74997 - protein, 135 aa, Zea mays
  Coding DNA Sequence Number=SeqID_33218
MRMGLWRRREFSAVAVIQRRPPQHARRLEEGTGRPRNWGRKLEEFSLFRSLDDQKGCDRAIFIEGSTESEVRNSRRDPRELWFGSVTATSTENTGSDEADRTVPQLRDCHSTSERGDPVQGRLQLPNSGARRTRV

SEQ ID NO: 74998 - protein, 141 aa, Zea mays
  Coding DNA Sequence Number=SeqID_33219
MRMGLWRRREFSAVAVIQRRPPRHARRLEEGTGRPRNWGRKLEEFSLFRPLDDQKGCDRAIFIEGSTEFEVRNSRRDPRELWFGSVTATSTENTGSDEADRTVPQLRDCHSTSERDVIVDITPQLITLNQRSKSDMYHKNK

SEQ ID NO: 74999 - protein, 283 aa, Zea mays
  Coding DNA Sequence Number=SeqID_33220
  Subcellular localization annotation: CTP_CleavageSite=57; ConfidenceScore=5.37e-01
MSGLSPTRAPQQNAGFVARLCADSAAACSSLPRITRAAVGQLQSPLDGVTSLACGVAVTALWDRPVGFIASCVLGRSRRNRTKPKLAWISPDVSHLGLCRPLYKNRAVAALLVVQRPEQREFLKLPSPIPRPPCSLLQSARMPGWPSLDYRHSRELVPPSHTCQEPRCVESREKTATSVETRRLGAGVPYARRTGHTVVLPSERALRALLEGAEDFRGRTVRRFGVEYTGSPHRTLWICRGPYLAVRITLWGVLGGSTAKASPHGGARPACVSARVEKTTGYR

SEQ ID NO: 75000 - protein, 288 aa, Zea mays
  Coding DNA Sequence Number=SeqID_33221
  Subcellular localization annotation: CTP_CleavageSite=21; ConfidenceScore=5.47e-01
MSGLSPTRAPQQNAGFVARLCADSAAARSSLPRITRAAVGQLQSPLDGVTSLACGVAVTALWDRPVGFIASCVLGRSRRNRTKPKLAWISPAVSHLGLCRPLYKNRAVAALLVVQRPEQREFLKLPSPIPRPPCSLLQSARMPGWPSLDYRHSRELVPPSHTCQEPRCVESREKTATSVETRRLGAGVPYARRTGHTVVLPSERALRALLEGAEDFRGRTVRRFGVEYTGSPHRTLWIRRGPYLAVVCDTCVTIPGKSSTNRIVVDISLFLPMRVEDNAVGSTRRLDG

SEQ ID NO: 75001 - protein, 147 aa, Zea mays
  Coding DNA Sequence Number=SeqID_33222
MPGWPSLDYRHSRELVPPSHTCQEPRCVESREKTATSIETRRLGAGVPYARRTGHTVVLPSERALRALLEGAEDFRGRTVRRFGVEYTGSPHRTLWIRRGPYLAVVCDTCATIPGKSSTNRIVVDISLFLPMRVEDNAVGSTRRLDG

SEQ ID NO: 75002 - protein, 147 aa, Zea mays
  Coding DNA Sequence Number=SeqID_33223
MPGWPSLDYRHSRELVPPSHTCQEPRCVESREKTATSVETRRLGAGVPYARRTGHTVVLPSERALRALLEGAEDFRGRTVRRFGVEYTGSPHRTLWIRRGPYLAVVCDTCATIPGKSSTNRIVVDISLFLPMRVEDNAVGSTRRLDG

SEQ ID NO: 75003 - protein, 883 aa, Zea mays
  Coding DNA Sequence Number=SeqID_33224
  Gene Ontology: Mol. function=DNA binding; Cellular component=nucleus; Biological process=multicellular organismal development
  Homolog annotation: Hit_ID=Q1SFF6; Match level="QueryCoverage=71%, HitCoverage=70%, E-value=1e-173, Identity=54%"; Hit description =Lissencephaly type-1-like homology motif; Single-stranded DNA -binding protein, SSDP; WD40-like
  Pfam annotation: Domain name=WD40; Domain location=438-476; Score =25.5; E_value=0.00019; Accession=PF00400.22; Description=WD domain, G-beta repeat
  Pfam annotation: Domain name=WD40; Domain location=480-518; Score =45.3; E_value=2e-10; Accession=PF00400.22; Description=WD domain, G -beta repeat
  Pfam annotation: Domain name=WD40; Domain location=523-562; Score =33.2; E_value=9.2e-07; Accession=PF00400.22; Description=WD domain, G-beta repeat
  Pfam annotation: Domain name=WD40; Domain location=566-604; Score =5.6; E_value=8.2; Accession=PF00400.22; Description=WD domain, G -beta repeat
  Pfam annotation: Domain name=WD40; Domain location=609-646; Score =30.1; E_value=7.8e-06; Accession=PF00400.22; Description=WD domain, G-beta repeat
  Pfam annotation: Domain name=WD40; Domain location=653-691; Score =9.2; E_value=3.1; Accession=PF00400.22; Description=WD domain, G -beta repeat
  Pfam annotation: Domain name=WD40; Domain location=695-740; Score =0.6; E_value=31; Accession=PF00400.22; Description=WD domain, G-beta repeat
  Pfam module annotation: Pfam domain module=WD40::WD40::WD40::WD40::WD4 0::WD40::WD40; Domain location=438-476::480-518::523-562::566 -604::609-646::653-691::695-740
MDCTRASMYSVDKFMDTWNGCDPWFLRRLLGDALGVQALTNSGCPPSPCRMRHGGREEGEEDEGKRSNVDFAGRVGVDLDGEVVVALCNKFRPGALNFLVLLRLVFFGTLGIKTEINPILTPRAAGPEGSFIGAQGSNQAGNNLTLKGWPLTGLEQLRSGILQQKSFIHNQQQLQQQIQMLTPQQQQQLMLHAQQNMSSPTSSDVDNRRLRMMLNRNAVLGRDGQTNSGSDIIPNIGSPSQSGGDIDMLIKKKLAQQQQLLQQQSNSQQLPQQHQLQQPAVSSQQSQSSNQHLQQEKPGIGSMPADGGIPNSFGGAEQTAKKRKKPGSSSGRANSSGTANTAGPSPSSAPSTPSTHTPGDVMSVPQLQQNGGSAKPMVMFGSDGTGSLTSPANPLDDVDRLLEDGSLDDNVESFLSQDDMDPRDNLGRCMDASKGFGFSEVAKARASTAKVVCCHFSADGKLLATGGHDKKVTLWCTDSLNPKSYLEEHSFLITDVRFSPSMSRLATSSFDKTVRVWDADNTDYSLRTFTGHSATVMSLDFHPNKEDMICSCDSDGEVRSWSINNGSCLTCVKVFKGGATQMRFQPRKGKYLAAASDKAIYILDGETQHACRSPLQGHNKNIQSLCWDSAGEYLASVSEDSVRIWSFSSGREGEFVHELNRSGNQFHSCVFHPTYQSLLVIGCYESLELWDIREKNTMTFNNAHDGLVAALASSSATGKVASNNPRVAGIGDDHEVPLFEDGQRRAAALDRVQAAAAPELTEHSDTCSHVVLLPEVELAVAKLLFVVDERRQRERLLPVVFVRGFQALYEVKPKGAKETLIKKGEDGLVCGLVRRCHPPDSPMCIGQSNARSDQGAALGKFQPVLAINHRTVRAERRTVRCAS

SEQ ID NO: 75004 - protein, 78 aa, Zea mays
  Coding DNA Sequence Number=SeqID_33225
MDSGAAALDHVQAAAALELAKHGAAALDSGVCDHVGLLPKVELAVAKLLLVIDERRQRERLLLVVFVRGFQVIVIQYT

SEQ ID NO: 75005 - protein, 633 aa, Zea mays
  Coding DNA Sequence Number=SeqID_33226
  Gene Ontology: Mol. function=snoRNA binding; Cellular component =ribonucleoprotein complex; Biological process=35S primary transcript processing
  Homolog annotation: Hit_ID=Q9LGT2; Match level="QueryCoverage=79%, HitCoverage=95%, E-value=0.0, Identity=68%"; Hit description =Putative BING4-like protein
  Pfam annotation: Domain name=BING4CT; Domain location=456-536; Score =196.7; E_value=5.7e-56; Accession=PF08149.2; Description=BING4CT (NUC141) domain
  Pfam annotation: Domain name=WD40; Domain location=372-410; Score =39.8; E_value=9.6e-09; Accession=PF00400.22; Description=WD domain, G-beta repeat
  Pfam module annotation: Pfam domain module=BING4CT::WD40; Domain location=456-536::372-410
MADRKGSVTCTQESDRGGHGPVAEISAANKEWLNGPADSCSSLKSDPVHGPHTQRHKHPAVQRPQTSAIDPARASSGCQPGPACQGRVPKEFNEKNPKNKYVTTIQTVKHPVPVQVQTQDAPHELEMEVEVAKYSRGQGADLKALGDKKLKGQLSVKEKLYGQSAKAAANAEKWLMPNDGGILEPGHLEKTYRFSQEDILTEVDLLSSRKPFDMILPVLGPYNIGYTSNGRYMLVGGRKGHLAMMDMLHMDLIKEFEVRETVRDVTFLHNEQLYAVAQKKYPYIYNRHGTEIHCLKEHGKALKLQFLSKQFLLASINSFGQLHYQDVSTGEMVANYRTGLGRTDVMRGNPYNAVIGLGHAGGKVTMWKPTSVKPLVTMLCHHGPVTAVAFDRGGNLMATAGVDRKIKIWDLRKYEVVRSYPMRAQSLDFSQKGLLACSNGSQVEIYRDFGGHDYRLYMKHKIVKGYQVGKVVFRPYEDILGIGHSMGFSSILVPGSGEPNFDTFVDNPMETTKQKREKEVHALLDKLPPETIMLNPNTIATVRAPKKKEKKTKEEIEEEMADAVEAAKNTERKKKTKGRSKPSKRAKKKEEDVFKAKRPFLEQSDKVDGRPDKKQRIGELPKALQRFAKKPQS

SEQ ID NO: 75006 - protein, 212 aa, Zea mays
  Coding DNA Sequence Number=SeqID_33227
  Subcellular localization annotation: CTP_CleavageSite=51; ConfidenceScore=5.27e-01
MAHGDFVTPEKTPIAALHQTRVHAMLRDSFTPNSPSAINGGCPSWISNPPRRSGRSQRGFEDGRIGRRGALDRGRPGEQRESYRRPGRDVPGMLTVSSMATIIGSDEEGKGKLEMADRKGSVTCTQESDRGGHGPVAEISAANKEWLNGPADSCSSLKSDPAHGPHTQRHKHPAVQRPQTSAIDPARASSGCQPGPACQVQWRRHGKFGLCG

SEQ ID NO: 75007 - protein, 101 aa, Zea mays
  Coding DNA Sequence Number=SeqID_33228
  Subcellular localization annotation: CTP_CleavageSite=37; ConfidenceScore=5.24e-01
MAPQGGCVCPSDSHKDGGGAAERLGSCPQSGRNALSRLSTRPRLFFLLSSKFLKILQPFCNGGYIQGIPRSAAGERIKGVLLAKESKENMDQTEGLFQYFV

SEQ ID NO: 75008 - protein, 43 aa, Zea mays
  Coding DNA Sequence Number=SeqID_33229
MAPQGGCVCPGDSHKDGGGAAERLGSCPQSERNALSRLSTRPS

SEQ ID NO: 75009 - protein, 138 aa, Zea mays
  Coding DNA Sequence Number=SeqID_33230
MTVADAREQRARRQPSSRPIRGQRESSLSRGEDNAPVIRSSNGSHTRDGCPANHSPRRINSVAGQVALLAGATGDASPSPKQPHQKRGSGAALANPAPAEPLTASTYQPENLGLDRTPRLRPARMREQPDQPKHYARH

SEQ ID NO: 75010 - protein, 318 aa, Zea mays
  Coding DNA Sequence Number=SeqID_33231
MANTLNTEGGTGIAARWRFWQEQRATLRLRRNNPHQKRDRERGIPRKGSFPVKETRLRASLLIRGSKAGPPKGSTAASDRVGPTPTTGQRFEGRPPEGFHGRLRLLGLRAHYRSGVRRLAPEGFTVASDAERGMTRGTLGHFRDQRERSCNGIPSEGGIEPSDPVARGPGPADHPQRLGGCSRKPGSGRTVDSVNIPARELGPRPYTRATASSHEGTTRPAEALRKALRPRRSETTPPRPRGLHPAGALARTHRNQMQPRKAGPLAKKCDESLQASANTPFEARGLLSGTIIRGTLKTPNSQLVTPISIKLQRPDGCD

SEQ ID NO: 75011 - protein, 121 aa, Zea mays
  Coding DNA Sequence Number=SeqID_33232
  Gene Ontology: Mol. function=alpha-1,4-glucan-protein synthase (UDP -forming) activity; Cellular component=cellulose and pectin -containing cell wall; Biological process=cellulose biosynthetic process
  Homolog annotation: Hit_ID=P80607; Match level="QueryCoverage=48%, HitCoverage=16%, E-value=5e-26, Identity=93%"; Hit description=Alpha- 1,4-glucan-protein synthase [UDP-forming]
MVDAGWVKGQEGQDVTHFYTQEDQHKGLLKVEVQNLLLKVKEVQNHVNRRYNGSDRSGKGIFWQEDIIPFFQNVTIPKDWGTVQQCYIYLSGQVKEKLGKIDPYFVKLGDAMVTWIEPGMS

SEQ ID NO: 75012 - protein, 106 aa, Zea mays
  Coding DNA Sequence Number=SeqID_33233
  Gene Ontology: Mol. function=alpha-1,4-glucan-protein synthase (UDP -forming) activity; Cellular component=cellulose and pectin -containing cell wall; Biological process=cellulose biosynthetic process
  Homolog annotation: Hit_ID=P80607; Match level="QueryCoverage=55%, HitCoverage=16%, E-value=1e-24, Identity=89%"; Hit description=Alpha- 1,4-glucan-protein synthase [UDP-forming]
  Subcellular localization annotation: CTP_CleavageSite=30; ConfidenceScore=5.10e-01
MAGSSRLLPTVDALADVHRGRWMVFSSLTRASSTSSSNGSTDGKGIFWQEDIIPFFQNVTIPKDWGTVQQCYIYLYGQVKEKLSKIDPYFVKLGDAMVTWIEPGMS

SEQ ID NO: 75013 - protein, 291 aa, Zea mays
  Coding DNA Sequence Number=SeqID_33234
  Gene Ontology: Mol. function=nucleotide binding; Cellular component =cytoplasm; Biological process=response to unfolded protein
  Homolog annotation: Hit_ID=Q5KQJ9; Match level="QueryCoverage=69%, HitCoverage=25%, E-value=1e-93, Identity=82%"; Hit description =Putative heat shock protein Hsp70
  Pfam annotation: Domain name=HSP70; Domain location=10-291; Score= -204.6; E_value=3.7e-08; Accession=PF00012.10; Description=Hsp70 protein
  Pfam annotation: Domain name=RGP; Domain location=34-291; Score= -146.7; E_value=0.0063; Accession=PF03214.4; Description=Reversibly glycosylated polypeptide
  Pfam module annotation: Pfam domain module=HSP70::RGP; Domain location=10-291::34-291
MKFSNLAPLIFLGSKFWIALNNTTEVASLTTPSPNTWLYKNGVSSWLNTCKVSIVGYKKGQLKMLSHAYDRSLGGRDFDEALFKHFATKFKEEYKIDVYQNARACLRLRVACEKLKKTLSANPEAPLNIECLMDEKDVRGFIKREEFEHISAPVLVRVKRPLEKALAEAGLTTENVHFVEVVGSGSRVPAIIKIITDFFGKEPRRTMNASECVARGCALQCAILSPTFKVREFQEDIIPFFQNVTIPKDWGTVQQCYIYLSGQVKEKLGKIDPYFVKLGDAMVTWIEPGMS

SEQ ID NO: 75014 - protein, 470 aa, Zea mays
  Coding DNA Sequence Number=SeqID_33235
  Homolog annotation: Hit_ID=Q6Z130; Match level="QueryCoverage=32%, HitCoverage=46%, E-value=1e-66, Identity=81%"; Hit description =Hydrolase, TatD family like protein
  Pfam annotation: Domain name=TatD_DNase; Domain location=141-449; Score=-33.6; E_value=8.6e-05; Accession=PF01026.11; Description=TatD related DNase
MQRLAGHAPGGALGLISRLNIGALELGDYLALGAIFSATDSICTLQVLSQDKTPFLYNHVFGEGVVNDATSVVLFNAIQNFDPRNISGAKLLNFIGSFLYLFGSSTILGVASGLLSAYTIKKLYFGRHFAFFKSKHSCKLLLTGCLFIACLCNIVVYLRDFSVSLCCCYVPYMILVIQVIVWWAGLMRGAVSIVLAYNKVLWQCEAFWEVVSASLGTFIFVMMLSFRLQCHTGSFGVGAAWFLAVHVGCSTMFPRFCGSARHFGRDIIMPNLKSSVTTTASAVEYRDEVLKALPPDLKGGSGETPFSVGQAINSPELVFPVGVTHSFTDLAEDWDRLLSFENMFIGVNGCSLKTNENLEVLRGIPVERLMIEIDSPYCDIINTHARSPYVKSVWPSKKKEKYEPDSTVKGRNEPCLVRQVLEVVVGSKGISGVEGLSRTLYHNTCRLFFPQDLDASANAQLESGTAVQDC

SEQ ID NO: 75015 - protein, 151 aa, Zea mays
  Coding DNA Sequence Number=SeqID_33236
  Subcellular localization annotation: CTP_CleavageSite=10; ConfidenceScore=5.00e-01
MAPEAGLSCCQSHPVEWHNSRSRAGGAVFLSVRHCGCGDAAAGGSGTTEPSASTRLRQRQQPASGQRFTGSGVQRHAVVAPSQMSNSGGKGCRSRARSMPPEKQLGISSFLPEPPPPPPSTKGSTNGQPCMDDEEQDAESDPDVMNDYGEL

SEQ ID NO: 75016 - protein, 140 aa, Zea mays
  Coding DNA Sequence Number=SeqID_33237
  Subcellular localization annotation: CTP_CleavageSite=71; ConfidenceScore=5.17e-01
MELSSTEQTAARAPMSTATKVRHCGCGDAAAGGSGTTEPSASTRLRQRQQPASGQRFTGSGVQRHAVVAPSQMSNSGGKGCRSRARSMPPEKQLGISSFLPEPPPPPPSTKGSTNGQPCMDDEEQDAESDPDVMNDYGEL

SEQ ID NO: 75017 - protein, 171 aa, Zea mays
  Coding DNA Sequence Number=SeqID_33238
  Homolog annotation: Hit_ID=O82143; Match level="QueryCoverage=38%, HitCoverage=16%, E-value=3e-16, Identity=71%"; Hit description=OsS5a
MGSKASFCVTFLLLLLIAAAAWGPAAQADDAVVVGPYPIHCPLTFSPSCTSKAVSYISEKQMQDKVIGFLHDACSQSFSFEQKQALAMSMEGGASGSVAVTDSAMAEAGAVDPDLVLALQMSVQDANMSSDTDMSKVFEDRTFVSSILNSEEKKEDKSDKTEDEKNCFKLE

SEQ ID NO: 75018 - protein, 131 aa, Zea mays
  Coding DNA Sequence Number=SeqID_33239
  Homolog annotation: Hit_ID=O82143; Match level="QueryCoverage=40%, HitCoverage=13%, E-value=8e-16, Identity=77%"; Hit description=OsS5a
MQVLSPTNLVADFSRALPPGAPIPMLRPVDKAQPNPRLCFLLRAALHLALAAAGDKQEQPKDANMSSDTDMSKVFEDRTFVSSILNSLPGVDPNDPSIKDLLASLHSQGEEEKKEDKLDKTEDEKNCFKLE

SEQ ID NO: 75019 - protein, 95 aa, Zea mays
  Coding DNA Sequence Number=SeqID_33240
MDGSDLKRPDLSTPVGSRSTALANPPNRDDGDAATALLLPHAKSAEGKDPTAWSRVSAMERRRRPLERVAGEADRWAPHVGAGFCGLGRASFTFG

SEQ ID NO: 75020 - protein, 144 aa, Zea mays
  Coding DNA Sequence Number=SeqID_33241
MDGSDLKRPDLSTPVGSRSTALANPPNRYPFDLIATVELWINGHNPFSPPGHRRATAMSSAAAVSPTNCEPGGDDGDAATVLLLPHAKSAEGKDPAARSRVSSMERRRPPRERVAGEADRWDPLVGAGFVIWAAREWRSGIGPN

SEQ ID NO: 75021 - protein, 107 aa, Zea mays
  Coding DNA Sequence Number=SeqID_33242
MMQNAKAIISFGPAQAKKEIKDQINLDNSGTFGLGMKLYTIWRAGSERKLNQRRSYAQESFGLVAEKGTDLRRKRLSSPRQIVLKSIVNMKGINVISHRLRPVPINR

SEQ ID NO: 75022 - protein, 107 aa, Zea mays
  Coding DNA Sequence Number=SeqID_33243
MMQNAKAIISFGPAQAKKEIKDQINLDNSGTFGLGMKLYTIWRAGSERKLNQRRSYAQESFGPVAEKGTDLRRKRLSSPRQIVLKSIVNMKGINVISHRLRPVPINR

SEQ ID NO: 75023 - protein, 135 aa, Zea mays
  Coding DNA Sequence Number=SeqID_33244
MVALQRELARLAARSVARLPAGAGLGGSGTAEEAEMAAALMDVAAASAAASAAVFSTVTSVSAAASSCSNKKAPTAFMVVAFAKKPETPTTADVAQEKHEELERCIDECESGSKVVFRSIVRNRVSLLNIHSPAI

SEQ ID NO: 75024 - protein, 135 aa, Zea mays
  Coding DNA Sequence Number=SeqID_33245
MVALHRELARLAARSVARLPAGAGLGGSGTAEEAEMAAALMDVAAASAAASAAVFSTVTSVSAAASSCSNKKAPTAFMAAAFAKKPETPTTADVAQEKHEELERCIDECESGSKVVFRSIVRNRVSLLNIHSPAI

SEQ ID NO: 75025 - protein, 211 aa, Zea mays
  Coding DNA Sequence Number=SeqID_33246
  Homolog annotation: Hit_ID=Q33A43; Match level="QueryCoverage=21%, HitCoverage=30%, E-value=6e-07, Identity=69%"; Hit description =Retrotransposon protein, putative, unclassified
MEHLLSTLMCTHPCFHIKHQVAHTVTIAQEKKKMVLRTKVLQLRRKRGLKFDLWNHSRGLKETSSFGTAQLGPNVSIKAASITISWDGKLEIVDFSNACIPIAGNKTLRMSLWDHGPLVGNETLCISLWEHGAFAMAYQTVHDSVTPPPIPGPAVLTPGNSLGSYIIPTDQTRVFCAHFVLTHAHPRKLPDRSPILNCSKPSTLNLEVLLR

SEQ ID NO: 75026 - protein, 312 aa, Zea mays
  Coding DNA Sequence Number=SeqID_33247
MNALSREGCRHFEVFDQADEDFKRDIFKVEDPVVKESAGALYDRMWGLHGREVVRERAETAMAQALRGEKVDDFGALNSMLSDPEPTLGTAEDAPGAPASAAAGEGLPPEVAEGTPDALAAAAPSAEDPAAVAAEAAAETTAKPTAEAPATSEPSQVQDFGPAHTTATTKFLAASTAEDGNECGGSASVCFDCADSGSSVEWTEESEEEDLDYFAALDVAAAEASPRVADAGDAPGPSTGRRRRKAIAKRRVSGAEGARLRVSGADRQELLSLPAAVNTGEGELRSLFAGEELRIMLFNYREMGIIPKVEPM

SEQ ID NO: 75027 - protein, 332 aa, Zea mays
  Coding DNA Sequence Number=SeqID_33248
  Subcellular localization annotation: CTP_CleavageSite=19; ConfidenceScore=5.24e-01
MSSSSSSAAATSPAGSSPPAAASSEETLSGLMPEELRAGDTVDFGVSRMSSARVEDMQRLGYFGGGVARAPGTEKVPEPDGELVVFEAFFAAGLRLPAHRVAEAAKAARALSSASKRVADFATDICVEDYLGGSDEGQLAVVAPTAGTVPKAGGDALGSGGEVSALVVVRDEAGAATHRLKGVTEALSQVTEALGQVADFASRAASGALTAAVSAEVERLRTQHADAVREKSASDSKCRKLTDKVAVLEKEKADLRRQLAAEKREANEAIAKQQAAQAEAKLARAEGNLAKELAEHLQERLNALESRAKGAEAAGAMNALSREGCRHFEVFD

SEQ ID NO: 75028 - protein, 298 aa, Zea mays
  Coding DNA Sequence Number=SeqID_33249
  Homolog annotation: Hit_ID=Q67WM2; Match level="QueryCoverage=21%, HitCoverage=7%, E-value=3e-15, Identity=64%"; Hit description =Putative isoleucine-tRNA ligase
MPPLGRTPSPPLAAITEQHRSKELASSSVRSISMILTLVARPRRKADAAEGEVEIRRLEEAIHGAMVFDLGKYNETCHNIVPKYISEWEAMVTRTRRRIDFKNDYKTMDLNFMESVCRWPLRVEVVDWTRRRLEGFGERWMVGRCNQELEWAGNDDEGRSLLFFVNLYYFLRLHVDVHRSNILASKENVSVLRLQENEEQTSVRRRQYEARHPAHREREAATVRGTPPSPRRGSSAHQQGLRQCVDLHSNRCNLQERWIQETLSKSTMTANILSVLNMEYGFARIEYGIWLPTFYPYF

SEQ ID NO: 75029 - protein, 353 aa, Zea mays
  Coding DNA Sequence Number=SeqID_33250
  Homolog annotation: Hit_ID=Q67WM2; Match level="QueryCoverage=21%, HitCoverage=9%, E-value=8e-28, Identity=77%"; Hit description =Putative isoleucine-tRNA ligase
  Subcellular localization annotation: CTP_CleavageSite=64; ConfidenceScore=5.52e-01
MEGRAAPTVCAINASPAVRSPSPPSMEGRVAPAVPRFCRWRTPPRIAPAAASPPRTPPAARIPPASTLDASDKAAEGMGVRGEGEVGGADVRWRECRPFPAAVTSAVQARIHGVALAPPPPRQSCSRGPFNTGDVALPTFPTGSAVLASSGDSGRPCPPPSVAPPLSPSPRPASGPPCHPSLPLAAITEQHRSKELASSSVRSISMILTLVARPRRKADAAEGEVEIRRLEEAIHGAMVRGMQMYVAGGGWMAGVIICRSFLLSNFLNTARYRITNRQQVFDLGKYNETCHNIVPKYISEWEAMVTCTRRWIDFKNDYKTMDLNFMESVWYSGGCLQSSGRRTSSIRASRLHL

SEQ ID NO: 75030 - protein, 901 aa, Zea mays
  Coding DNA Sequence Number=SeqID_33251
  Gene Ontology: Mol. function=kinase activity; Cellular component =proton-transporting two-sector ATPase complex; Biological process =ATP synthesis coupled proton transport
  Homolog annotation: Hit_ID=Q6Z7G3; Match level="QueryCoverage=75%, HitCoverage=90%, E-value=1e-124, Identity=40%"; Hit description =Cingulin-like
  Pfam annotation: Domain name=DUF827; Domain location=146-605; Score= -100.7; E_value=0.0061; Accession=PF05701.2; Description=Plant protein of unknown function (DUF827)
  Subcellular localization annotation: CTP_CleavageSite=54; ConfidenceScore=5.25e-01
MPSAALSLASRVLAGGMRAAGGVRGGDAAAGAMRGGAQPQAAAPPLPRPSSPTSGSAVATAHPPLPPPNFSAILALPVREQRRHSKGTRGGQATAAETQAPQCRAPIPSKRSSHPSVLVLDHCASAREVDPRGQWAVAVDPSPSDGGSISWLESRSSSAEAKSNSKPDKEKKGGGGGTPPTPKDSKPRKPAVPKASAAGHGTPRAADKSPGSGSADRKAPTPKAAASRLATPPEKGKPAKRPQEQQAQLAEIREELVKAKEQLLENEKEKCRVLAELERAKKVADEANAKLQDALDVQRRAIEAQEADKLPAGESKQASIHDQQEDDDAVLRSTVEQLEKARYELADAVDAKNEALSQVDDAVRASEVKAQEVEHLIAEVTRLKGLVDSKVDGNRKKTAERIQNLEEENFALKLELQKKKAAEEKAVRLERMIDELESDVDDARNFGSKSKQLADEWQKKAQLLEVRLEEADQSNILKGESLNSAMEELDSTSSLLRDRESEVAALRDKVRFFEDEQTKLKNDIVVSGQRADAAEKEAADLWTEVEGLRLKLHTVEEEKMEALNSDKSTTLETETLNEQKNQLTDKLEANKDELEKTKKAMEGLASALQEMSAESREAQEKYLLKQDEIERAQAQVEELSLSLKNTKENYELLLDEANYEKVCLTKTVERLKAEAKSAHEEWHSKELSFVNSIKNSEEEIVAIRVQMIRTLEVVKEKERENTELQEKLQQLESQLMEANRIREEASAETIRWKENILDQENELQNIKQENDDLQAKELAASEKVKELSFQLANVKDSLINGNTKEGDNEKGGTEEDDEPVVVVAKMWENGKFADCDSSKEKDNDGDSQVDLESNKGDAGLDSNGLHSTNESSGRASTKQPQQHKKPLLKRFGGLLKKKSEK

SEQ ID NO: 75031 - protein, 195 aa, Zea mays
  Coding DNA Sequence Number=SeqID_33252
  Subcellular localization annotation: CTP_CleavageSite=29; ConfidenceScore=5.08e-01
MRKTQSAHQLFTVQTGSGGLDSARQGPIRADLRRSSGPGPVPPHAVYLHVRPHLSVRPRARTVPPVPPVSPPALSARSRMPVARARAVRPVPPVSRSRRRAPARPPRDLILAVDLRSNGYNEQSVFPEAVAEDVPDQQFGEGKGLRLFPEYLSVRTAVVPSMGSRHSACSAEAECRGEGEAVEGDFQEFQDYDEF

SEQ ID NO: 75032 - protein, 75 aa, Zea mays
  Coding DNA Sequence Number=SeqID_33253
NEQSVFPEAVAEEVPDQQFGEGKGLRLFPEYLSVRTAVVPSMGSRHSACSAEAECRGEGEAVEGDFQEFQDYDEF

SEQ ID NO: 75033 - protein, 266 aa, Zea mays
  Coding DNA Sequence Number=SeqID_33254
  Homolog annotation: Hit_ID=Q6QP51; Match level="QueryCoverage=64%, HitCoverage=91%, E-value=2e-24, Identity=50%"; Hit description =Putative growth-regulating factor 1
MANRCTRGMQPPRGDRERGIFRKRILLSEGNGPRALLLIRGSKVAPYGVRQPPQSTRAPSPLLIRGSKAGPSEGFDSRPRARRVRDDPGYVRYMAKARVALPSHQGKTNNSHGLSRVRPRAQQGALPRPTLGLGLSFGLGRRSPPRPTLTSASALASGEGLRLARPRPREKDFASPDLGLRRRTPPRPTSASDRLRYRGYIITLPLASRLRLRRNKTGVTSRLLRPQGMSRAFRREERRREEKGKNTGSKSNEDGLIHTSSSTPRC

SEQ ID NO: 75034 - protein, 163 aa, Zea mays
  Coding DNA Sequence Number=SeqID_33255
  Subcellular localization annotation: CTP_CleavageSite=44; ConfidenceScore=5.28e-01
MDPYPYPSGIRRENNTIHPVPTTVPTTRVRLTTVSHGLSRVRPRAQQGAPPHLTPGLGLSLGLGRRSPPRPTSASDRLRYRGYIITLPLASRLRLRRNKTRVTSRLLRQQMDNLQQPLQPGTMLCFGSLEFMSPDGGYDMVSSDLNQKGRSSKDTKVDTVPKL

SEQ ID NO: 75035 - protein, 191 aa, Zea mays
  Coding DNA Sequence Number=SeqID_33256
  Homolog annotation: Hit_ID=Q2R029; Match level="QueryCoverage=32%, HitCoverage=9%, E-value=3e-21, Identity=84%"; Hit description=AAA -type ATPase family protein, putative, expressed
MEKSTVVVSVPVVVMAETAETDYSSSFSLLVVDSHLLPGDAESQKDVGKGDKSRDKGTAEKFAIYQKHRSSLADTVQFRRPAAPTSSVNADIVGTSTLQSASLPKQEPSTATSKSYTFREGDRVRYMGPAQLSSLSQRKRVALHSHRIDKNTLGQPVLVLIEMSHQQTLMQSQILLLQSYVYTRRHKCIYN

SEQ ID NO: 75036 - protein, 361 aa, Zea mays
  Coding DNA Sequence Number=SeqID_33257
  Homolog annotation: Hit_ID=Q2R029; Match level="QueryCoverage=36%, HitCoverage=28%, E-value=2e-36, Identity=50%"; Hit description=AAA -type ATPase family protein, putative, expressed
MAEEIHQNQEEEEEEEVVAASTAQAQTQGGVFREEAQADAQEGLNRAVDGGPRDVPPRHCPRALALSASLTKSPPAPASEIIIWVREIQFILISPTIYMFILLSPSTLDGDGEQAAATLRSQCSPQHPRSWKVQQITVQAPLKDAESQKDVGKGDKSGDKGTAEKFAIYQKHRSSLADIVQFRRPAAPTSSVNADIVGTSTLQSASLPKQESSTATSKSYTFREGCYISIAESLRPDFSAGEEVERLAMTELIEVISEENKSGPLIVLLKDVEKSFIGVTESLSSLRSKFESLPSGVLIIGSHTQMDSRKEKDEALLTDWKQQLDRDVETLKAKSNIGSIRTILHIIATFAISYLYVYANF

SEQ ID NO: 75037 - protein, 240 aa, Zea mays
  Coding DNA Sequence Number=SeqID_33258
  Homolog annotation: Hit_ID=Q6QP51; Match level="QueryCoverage=18%, HitCoverage=20%, E-value=3e-12, Identity=81%"; Hit description =Putative growth-regulating factor 1
MQAACNHTKGAHPFDFAASSLEAQAHTSCNRRAGYYVQETAPPLAPVPRLLDCRTGAATRGNPACGPAVPTRHAGHGSVSRGRRGDGRYGTGKEDTPKGILLHEGNGPRAPLLIRCLKASPSEGFDSRLRALGLRAHYWLEVRRLAPRKGSTAASGHSGSTPTTDQRKATQGRMKKAESVLDRPLALCGGSGAALTNLAPAKPLTASTYQPENLGLNYAPGLRPVRMREQPDRPNHRERH

SEQ ID NO: 75038 - protein, 473 aa, Zea mays
  Coding DNA Sequence Number=SeqID_33259
  Homolog annotation: Hit_ID=Q10M18; Match level="QueryCoverage=48%, HitCoverage=96%, E-value=2e-67, Identity=55%"; Hit description =Thioredoxin-like 1, putative, expressed
  Pfam annotation: Domain name=Thioredoxin; Domain location=85-185; Score=-21.1; E_value=0.0087; Accession=PF00085.10; Description =Thioredoxin
  Subcellular localization annotation: CTP_CleavageSite=72; ConfidenceScore=5.58e-01
MAAAQVVAKGSVVSPCGNRAVPGLLGRRRDAVAAQMTPSAVRIGGSWRKNAFPGVRLALGTRRSRPASRSFSASPVQPNMREIESAQDLVDSLTNAGERLVVVDFFSPGCGGCRALHPKICQFAERNPDVLFLQVNYEEHKSMCYSLRVHIKKFKDALAKHKPDRCTFGPTRGLDESELLALAANKELQFTYTREPELTPMGDTPGEVIAPEPAKLPAATKPLVKLGSEERADALAVGVTSVREGERERERERERERASLFVGPSSRATTLSYEGPGPSFYRCKERVQGNDVPPVAWSVRAQGRVRRRLLLRPRPGWGEDVIPSEVEVEAEPWGQARRRPSSEAEVEAEPWGQARQRPPSEAEVEAEPWGRARQRPPSEAEAQGRARRSFLLRLRLDLAVVSLTLDKVSSDPCIECSCDSVGWRGDLAKVASLRSLPELGLGRVEGWSVDAVNGLAVARFAKAAPEPLHRARG

SEQ ID NO: 75039 - protein, 723 aa, Zea mays
  Coding DNA Sequence Number=SeqID_33260
  Gene Ontology: Mol. function=ATP-dependent helicase activity; Cellular component=nucleus
  Homolog annotation: Hit_ID=Q650T9; Match level="QueryCoverage=50%, HitCoverage=59%, E-value=1e-102, Identity=72%"; Hit description =Putative RNA helicase
  Pfam annotation: Domain name=DEAD; Domain location=240-423; Score =90.9; E_value=3.8e-24; Accession=PF00270.19; Description=DEADDEAH box helicase
  Pfam annotation: Domain name=KOW; Domain location=658-695; Score =17.8; E_value=0.04; Accession=PF00467.19; Description=KOW motif
  Pfam annotation: Domain name=UDPGP; Domain location=1-271; Score= -209.3; E_value=1.7e-06; Accession=PF01704.8; Description=UTP- -glucose-1-phosphate uridylyltransferase
  Pfam module annotation: Pfam domain module=DEAD::KOW::UDPGP; Domain location=240-423::658-695::1-271
MSSLVPEEGRELKIVHRLPPNQHGDDQKQDVMKCKLVVQIGSQSVVVARGQAYPPKDVVTVHGIERRDDHTKVQVDFVFDNFLEFPLPIPIAGGDMFTLGEAKNSFVLWPKSGIQLAEEGYHWALLVIFPKWNTVYNIDSKGYQSPSWAFGAYVDKKGRHNKNFGRTVIWKHFQGSAGFATCPLLPDEIANVRERLLDFFMNESDLYTLVDGFVTRNSARTNPSNPSIELGPEFKKVGSFLGRFKSIPSIVELDSLKVSGDVWFGSRIVLKSLVNGANKASRRTEHGRTPSVLVLLPTRELANQVHADFEFYGATFGLSACCVYGGSPYHPQEMALRRGVDIVVGTPGRVKFLMYATSLVKDFIVKGTLNLKCLKFCVLDEADEMLNMGFVDDVELILGKVEDATKVQTLLFNATLPDWVNKLSMRFLKVDRKTVDLVGNEKLKASASVKHLALPCNKAARAQVILDIIRCYSQDVLPHRCGGRTIIFTETKDSASQLSGLISGSRALHGDVAQAQRECQQTRKGVWVKFEHISVPQPTDVAQSAGSEAADAIASVSDSVIPIFRQQAEQLLSSSSLSAADLLAKALAKAVLELTEICVLGLHGHKEKIIVIFLGGLQYTTSSNWQTDVVTWVCYNIPVIVFLRRRGHICSHWCYLQFDVGNVVMVTGGRNTERVGVIKNWEKHKGIFEENIEWNSNLVVAKVWRLDSYTVKLNISANSCILV

SEQ ID NO: 75040 - protein, 105 aa, Zea mays
  Coding DNA Sequence Number=SeqID_33261
MVTGRRNIGRVGVIKNWEKHKGSFKEKSNLKRDDFVQPKSARSGCTGLSGGAPDSVRWFTRQCPVRQVGSGKLAALGALTAVYGYKSPDCPVSHSQANSSLSGDD

SEQ ID NO: 75041 - protein, 211 aa, Zea mays
  Coding DNA Sequence Number=SeqID_33262
MDCAACHLRHAVLATDVPISMGYAACHLRHAILATDVPISMGSIVCQFCHHNLDASVPISRDYAKFRYIIFVDAPDVGGIQAVARGFLALRRVREMRRQMLEATLVTVDLGIQGRNLALSDGHQQRHRAAISKCEHGTSPAGDELQLYDSGGREGTPLVIGKGALFSATTFRYRSPRGCLRWLLLRPIPGPKVAHRGAAAAAAMSPPRGIR

SEQ ID NO: 75042 - protein, 396 aa, Zea mays
  Coding DNA Sequence Number=SeqID_33263
  Gene Ontology: Mol. function=transcription regulator activity; Cellular component=nucleus; Biological process=regulation of transcription
  Homolog annotation: Hit_ID=Q10FX7; Match level="QueryCoverage=67%, HitCoverage=33%, E-value=1e-112, Identity=73%"; Hit description=Not1 N-terminal domain, CCR4-Not complex component family protein, expressed
  Pfam annotation: Domain name=NOT2_3_5; Domain location=221-388; Score= 190.7; E_value=3.6e-54; Accession=PF04153.8; Description=NOT2  NOT3 NOT5 family
MELVIAEPWLPLVASPMGTETPSTKMIVQDVVTKLAGDAAHGDRDVSCQDGVTKVACGAAHGDGDVGCQDGVTKVTCGAVHGDGDAGCQDDAVKLAAEAMGSNRNPSYLIPDVMIARSFNSQSSSISSQVNLGVQGTDAGHIKSEEEEQLLAEDGVESSATTGANKQTSEDDTKIPYSNPSAPAAESNQLPRDTDPSPGQPLQPGMSSSGVGVIGRRSVSDLGAIGDNLTGTSASSGHDQLYNLQMLEAAFHKLPQPKDSERAKTYIPRHPAVTPASYPQVQPSIVSHPSFWERIGSDTLATDMLFFAFYYQQNTYQQYMAARELKKQSWRFHRRYNTWFQRHVEPQVTTDEYERGSYVYFDFHVTEDGSGWCQRIKNDFTFEYNFLEDELSVQTN

SEQ ID NO: 75043 - protein, 193 aa, Zea mays
  Coding DNA Sequence Number=SeqID_33264
MPLIKVYNTDSDTYGLKGHSTFKSSASAEAVSSCRTFGDEAWSQQRAIKVTEMTEEAKKKRFGHSARKRSLETGNLVKFKPGISDWREIWQGARNLQGCSMGTLEHIPPFGFTGFDRNSKFAQEVRKTGFTASQTENKREKGEESREQLTERGRGDKRRHRAPEDRRRGGRSPAKGGKSPETESRRGQGRKLS

SEQ ID NO: 75044 - protein, 85 aa, Zea mays
  Coding DNA Sequence Number=SeqID_33265
MSDRLAKDEMTTWKAHTRGDDPGKTGDSTRAIKVTEMTEEAKKKRFGHSARKRSLETGNLVKVKPGISDWREIWQECYWKCCEGA

SEQ ID NO: 75045 - protein, 85 aa, Zea mays
  Coding DNA Sequence Number=SeqID_33266
MSDRLAKDEMTTWKAHTRGDDPGRTGDGTRAIKVTEMTEEAKKKRFGHSARKRSLKTGNVVKFKPGISDWREILQDFEKWTKGGN

SEQ ID NO: 75046 - protein, 91 aa, Zea mays
  Coding DNA Sequence Number=SeqID_33267
MSDRLAKDEMTTWKAHTRGDDPGRTGDSTRAIKVTEMTEEAKKKRFGHSARKRSLETGNLVKFCLESRIGVKFGKSVTQSVVKVLAPSYTF

SEQ ID NO: 75047 - protein, 59 aa, Zea mays
  Coding DNA Sequence Number=SeqID_33268
MSDRLAKDEMTTWKAHTRGDDPGRTGDGTRAIKVTEMTEEAKKKRFGHSARKRSLETGN

SEQ ID NO: 75048 - protein, 160 aa, Zea mays
  Coding DNA Sequence Number=SeqID_33269
MSDRLAKDEMTTWKAHTRGDDPGRTGDDTRAIKVTEMTEEAKKKRFGHSARKRSLETGNLVKFKPGISDWREIWQEFTRFGFDTQGGGTVCLEKQRERSRGEERGCSPRRDEEKHKVVVGSPVVAGEGRSPVGERESPERQRESAGEMSLWLGLGLEAFF

SEQ ID NO: 75049 - protein, 59 aa, Zea mays
  Coding DNA Sequence Number=SeqID_33270
MATWKAHTRGENPGRTGDGTRAVKVTEMTEERIMAQKTRDMAIERSNDAKTAFEREIVP

SEQ ID NO: 75050 - protein, 154 aa, Zea mays
  Coding DNA Sequence Number=SeqID_33271
  Homolog annotation: Hit_ID=Q1EPC6; Match level="QueryCoverage=50%, HitCoverage=4%, E-value=2e-21, Identity=66%"; Hit description=DNA helicase homolog, putative
MTVNKAQGQTIPNVGVYLPELVFSHGQLYVALSRATARSNIKILAIPVVDGKKRSRKGVRKNPIVDCGTYTKNIIYKEDHMKIIEDDGPGAAFYASAKALTNGNHTFYHYFFSIMGENLTVRVQRMLYVTFNEELCWCCDKDTCPRAVWSEVKQ

SEQ ID NO: 75051 - protein, 151 aa, Zea mays
  Coding DNA Sequence Number=SeqID_33272
  Gene Ontology: Mol. function=helicase activity
  Homolog annotation: Hit_ID=Q1EPC6; Match level="QueryCoverage=51%, HitCoverage=4%, E-value=2e-21, Identity=66%"; Hit description=DNA helicase homolog, putative
MTVNKAQGQTIPNVGVYLPELVFSHGQLYVALSRATARSNIKILAIPVVDGKKRSRKGVRKNPIVDCGTYTKNIIYKEDHMKIIEDDGPGAAFYASAKALTNGNHTFYHYFFSIMGENLTVRVQRMLYVTFNEELCWCCDKDTCQEQYGRR

SEQ ID NO: 75052 - protein, 87 aa, Zea mays
  Coding DNA Sequence Number=SeqID_33273
  Subcellular localization annotation: CTP_CleavageSite=57; ConfidenceScore=5.43e-01
MGLKYMYGLASSGMTYLIKHGSKSSTPEPSRHRRSCLRSPVLPFERSRNQSALCGERCQDRKPLIEEDGRVELPQALTEEDGRCEPP

SEQ ID NO: 75053 - protein, 476 aa, Zea mays
  Coding DNA Sequence Number=SeqID_33274
  Gene Ontology: Mol. function=transferase activity, transferring nitrogenous groups; Cellular component=integral to membrane; Biological process=biosynthetic process
  Homolog annotation: Hit_ID=Q2R3K3; Match level="QueryCoverage=52%, HitCoverage=81%, E-value=2e-70, Identity=78%"; Hit description =Serine palmitoyltransferase 2, putative, expressed
  Pfam annotation: Domain name=Amino_oxidase; Domain location=109-475; Score=-19.3; E_value=5.2e-05; Accession=PF01593.14; Description =Flavin containing amine oxidoreductase
  Pfam annotation: Domain name=Aminotran_1_2; Domain location=233-448; Score=-84.3; E_value=0.0037; Accession=PF00155.11; Description =Aminotransferase class I and II
  Pfam module annotation: Pfam domain module=Amino_oxidase::Aminotran_1_ 2; Domain location=109-475::233-448
MPHLALVRIGALVRHSRRDFFPQSRMRGFVFVSQEHMKIIEDNGPGAAFYASAKAMTNGNHTFYVSKLIQSSGMTYLTSTVASLPPPNPHAIDAAVFGLPCFPLRDQGLAGLSTAEYLADAGHKPILLEARDVLGGKVAAWKDEDGDWYETGLHIFFGAYPNIQNLFGELRIEDRLQWKEHSMIFAMPNKPGEFSRFDFPETLPAPINGIWAILRNNEMLTWPEKVKRTSNTTRCLNLGSYNYLGFAAADEYCTPRVIESLKKYSASTTKFHNELEELPARFVGKLAAILFGMGYVTNSAIIPCLIGKGGLIISDSLNHNSIVNGARGSGATVRVFQHNSPAHLEEVLREQIASGQPRTHRPWKRIIVIVEELKKMGFEVLGDNDSPVMPIMLYNPAKIPAFSRECLRQKVVVVTVAFPATPLLLARARICISASHTREDLIKALDVISRVGDLVGIKYFPAEPPKIAGADHDKLE

SEQ ID NO: 75054 - protein, 59 aa, Zea mays
  Coding DNA Sequence Number=SeqID_33275
MATWKAHTRGDDPGRTGDGTQAIKVTEMIEERDMAQETRDETIERSNDVKTTFERYTVP

SEQ ID NO: 75055 - protein, 510 aa, Zea mays
  Coding DNA Sequence Number=SeqID_33276
MLRRRRSYRKKQLRLKLTARDAEAFENESPTPVCRLLSCLDRHLSCELSRHQFRMPRTKNVSAPGGGDDEDPRRPFRQVKGKTVYLEQQEGRKKRRTDRAARAAAVAAAAAAQAELGDQPQTPSDQIAYRVRRLTSRPRSSTHTSASTLPPTLPAPVTPIAPSTTTAILATSTTPASTAPPFPAPASAPPVPPPRFRERDETEVRPLAADPRLFDLQRATAARVRRFRYVPVESWLPAQRDPAVVDLFSTPGADSKAHLTYQPGLLTLLTTSGRRTLLPRMGYREATTHIQLWLLGALVSHSEFDVVDFLICEIEDTVLDGIRARRQLPYAHYLCHIFAQLIQPPRFQGTLEASRLVFGSYRPAPETPVPASAPVFDSQAEDAALRQFDSQDTAADDDDDDDFGVPPPPPMPPRSHDHEAGSSSAAPAAPPAMDPALASILQSITQQQAHLAAEQARLSERMLSMFQNMQDRQDALQQQLLQDRAESRAFMALMLQQSDVLVPPVQSEST

SEQ ID NO: 75056 - protein, 196 aa, Zea mays
  Coding DNA Sequence Number=SeqID_33277
MARDPLRGLYKVPLASENPLQFMGRALARIPRLTAIAANQPENLLACNSPTALAPFRDNKLLPFLNTHAIPASTVDTAQWQPRHGRGGPHRLKAEPADDETRCAARHRSKRFNISSSTPRSATQPDDGAQVHDPAGRWRPRMQSSMPGSAHGDFVLPATPDNRNSSVVTTPSLCSQGSDPGMALMVLSPAVGNGEP

SEQ ID NO: 75057 - protein, 147 aa, Zea mays
  Coding DNA Sequence Number=SeqID_33278
MAAHRTVWWRIGLSALEVELEELRCRFGHALDFVGARGSSLVEHLDNVPCRDRGVIGFGVWQDISVVLLVAELPIVCSLQEVVGPPLALPDEGLKEMLECYDKVASRIRLYPIPTSRVSHVAKVCKALRHYRGEWLGIHYEAFTKFH

SEQ ID NO: 75058 - protein, 292 aa, Zea mays
  Coding DNA Sequence Number=SeqID_33279
VQIDRKRRSGSSQGADRSPDSESTEHILQMLRQLPTKNISDKISHDEITDDSISNVNNSFADRKALHLAIHSSEKVRKAVVSGVKGLLSSCSSTLKRTKMLLLECLCVLACDDAAAVSEATQDALDHLFNQGHNLVTENEISDTFTRLVERLPQVVIAARFFDCLGLCIGHSSQFSGSMDKLIVSKPLSIGYLYSVAELNSGAYSKDTTNISLHATSTSAASKISVIHDNALPIALLGTVEYELPHMPPWFFHAGSQKLYGVLAGIIRLVGLSTMSVDGFDSLKLTVVVTSP

SEQ ID NO: 75059 - protein, 389 aa, Zea mays
  Coding DNA Sequence Number=SeqID_33280
  Subcellular localization annotation: CTP_CleavageSite=50; ConfidenceScore=5.52e-01
MPSPPCASYTKLGQYCARQLQLRVADTLFNSSNTRSAFTVGKLANLLLCSVSTVSGKLDFAPNPMQMIFHYFFLQEFKLIESVELAPLRKLIDPLTGVQIDRKRRSGSSQGADRSPDSESTEHILQMLRQLPTKNISDKISHDEITDDSISNVNNSFADRKALHLAIHSSEKVRKAVVSGVKGLLSSCSSTLKRTKMLLLECLCVLACDDAAAVSEATQDALDHLFNQGHNLVTENEISDTFTRLVERLPQVVIAARFFDCLGLCIGHSSQFSGSMDKLIVSKPLSIGYLYSVAELNSGAYSKDTTNISLHATSTSAASKISVIHDNALPIALLGTVEYELPHMPPWFFHAGSQKLYGVLAGIIRLVGLSTMSVDGFDSLKLTVVVTSP

SEQ ID NO: 75060 - protein, 87 aa, Zea mays
  Coding DNA Sequence Number=SeqID_33281
  Homolog annotation: Hit_ID=Q2QZL9; Match level="QueryCoverage=41%, HitCoverage=5%, E-value=1e-07, Identity=72%"; Hit description =Protein kinase domain containing protein, expressed
MTSFQLEFFSRKLDFAPNPMQMIFHYFFLQEFKLIESVELAPLRELIDPRTGGFGPVYKDQFPEAAGIGVKRLASHSGQGFVEFKIE

SEQ ID NO: 75061 - protein, 116 aa, Zea mays
  Coding DNA Sequence Number=SeqID_33282
  Subcellular localization annotation: CTP_CleavageSite=28; ConfidenceScore=5.29e-01
MSGAPAASPGRWDSTIGASIFWARLAVRCTPDRQLQLRVADTLFNSSNTRSAFTIGKLANLILLVIYTAVFVAFGFYGFWEIRFCTKSNANDISLFLPVRVQVERKRRVGSSQGAD

SEQ ID NO: 75062 - protein, 83 aa, Zea mays
  Coding DNA Sequence Number=SeqID_33283
MPSGSDGVVSENATLTAYEILLGLFSARLRVAAQASCLHTVARGTPNPGYRQWPPGPLQGRMRAYSYYQPAYGHADCHACRCS

SEQ ID NO: 75063 - protein, 170 aa, Zea mays
  Coding DNA Sequence Number=SeqID_33284
GVVVHRIALVPTRGRDITTGYRQDSTSSIKRGHIANLKARPASIHNLYNSGCRYAQSLYVMLCPQAYIMDNNSCGSTRPSTKWGAEALQIEPRHASIPDPCVGHDTSSPRTLLWVVRSSLGGVRTLSNGSGLLYFEGPGCAYRGPMPSRSDDVVSENATLTSHEILLGLS

SEQ ID NO: 75064 - protein, 89 aa, Zea mays
  Coding DNA Sequence Number=SeqID_33285
MNAKARVAQKRHVRFRPLAYTARRVRHSPMGSRLTVDALEYITFSGHVAAPDPPMWWETTDQAKDGGKKSFDVPSAREKVKETKEPKAR

SEQ ID NO: 75065 - protein, 304 aa, Zea mays
  Coding DNA Sequence Number=SeqID_33286
HDSPQHLATTLGQQQRLTPPHRRVWGRHVSRESDILQGINSESGPHGRVPDPCIYGPGLQIWPRTSTCANWTPRMGSGPPLYGVRAAHSGVPGFQDRTYPGLNQDPGGDPGPTRVQTWSGGIQTYPHTLLLPAQAETLWCHVAYCTRHKPTGGTWHDASGLHAPSHSLRIRCFPHVLLLVTMVQIIEHRDLSPEDFLMEEGAASSMPRGSNRPAPGAAAMHAARQHTPVQTSRTPSRAAPGGALSAARELLRNPPNSTASLGAMRQWREDVDRLLAWPILARPGPGLGHSGVNAMRQHLCAHPQ

SEQ ID NO: 75066 - protein, 535 aa, Zea mays
  Coding DNA Sequence Number=SeqID_33287
MEVRCQTSFCQNEDGFPKLLRAYTVRLGIRSQPEYDGREFVEHGTEKCVMTVYIGSSLHHVEWSVTAAGHIFRHTCQVVARKALRALCQIYEEEVTDTPLRFFPPFQRDRAAWMARMRALEEQQLLEDDPTVVYLTAYLLTLDTQYDFLARHHPQARVAALESREAIAVEALKQAKDEHVQKLMEAYLVTHNQRRAVRIQEPAPSNPVQPMRVEDPQILEGHPVSVRGEKKAWELPEGAIVLEGIPVSPKAMDKQEHPESSQDPPPELFEPLTMKKIPAPSLEVKEEAASTPQAPPPSEDLQEPVPLEEEFDPVLPSQITARRSHQHQLPIDPSRRCLRWKLCASLARREAARSELVIPSPLRALGSEVFLHFGQSPACMRDHKLDLILTLCFHSHLNPSQEKSALPKKIPRSLPLKPGTSYRRNQSSRSVKRTDRENQSTAPESKQTGKEDRRSYYHTERQRFLEPETTNIRVIDPTTHPCPSHACPPPCALPPPHAPPFAAHYRRPRHLCSAPTATIIAGNTRPPPLIAPAAA

SEQ ID NO: 75067 - protein, 69 aa, Zea mays
  Coding DNA Sequence Number=SeqID_33288
MAVGALQKGVWVAVGVHMEAGTRAGARVSGGVNDPDVCGLWFQESLPLCMGSGQSEEKLHYPMHAEDWV

SEQ ID NO: 75068 - protein, 260 aa, Zea mays
  Coding DNA Sequence Number=SeqID_33289
  Subcellular localization annotation: CTP_CleavageSite=42; ConfidenceScore=5.19e-01
MAQASAKRAAPGASMPPPGAPGAIMPLLAAPTHERRPPLPSRAAEAAVGGAAVSMDIFVHDYLVGGVTMFDAHTGRGPAGEFFCAKSVVRPTDCCPDAGGSWSGDCGNYGEGFFTGPMAQPPWLLLGRIERLRTQHTEAVRDKSASENKSHKLLEKLSAAEAKKEDLGCWLAAKKEDAKKARTAIQAARAEASLALKPATDAESGQRSLRGYVDKAEVSTRTGVDRAHVLLMDAYRQLGARTAPFDTFSEEVGLCFLGWL

SEQ ID NO: 75069 - protein, 460 aa, Zea mays
  Coding DNA Sequence Number=SeqID_33290
  Subcellular localization annotation: CTP_CleavageSite=42; ConfidenceScore=5.19e-01
MAQASAKRAAPGASMPPPGAPGAIMPLLAAPTHERRPPLPSRAAEAAVGGAAVSMDIFVHDYLVGGVTMFDAHTGRGPAGEFFCAKSVVRPTDCCPDAGGSWSGDCGNYGEGFFTGPMAQPPWLLLGRIERLRTQHTEAVRDKSASENKSHKLLEKLSAAEAKKEDLGCWLAAKKEDAKKARTAIQAARAEASLALKPATDAESGQRSLRGYVDKAEVSTRTGVDRAHVLLMDAYRQLGARTAPFDTFSEEGELELLPSIVMGLMSFASLITCEGAANALSSEGCRHFEVFDRANEDFDRGIFQVEDEVLKRSAGALYDRMWGPHDCNTVQERSNRALEQMMNDEEVDDFGGLESSVTRVEDARTGVEEQPAPEADPGGDIAATAAPASEDRPASAAPSQSWSSDGVEFGSLFSWTEESSDEDLDYFASLDVAAAESLLQPKVREVSAPPAGAMTEECHR

SEQ ID NO: 75070 - protein, 129 aa, Zea mays
  Coding DNA Sequence Number=SeqID_33291
MESAESVENRAEPGNDLGEIGWGLGLFSRGCWDLTPWWLYSLGLSPLSNQKNTCAGIHGGKQRKETERVGVVRLQAIQRAPCLLSLFGARLVVSSVPNCSLVGYGRPQSRGVGESLRELRIQVWPIPYA

SEQ ID NO: 75071 - protein, 275 aa, Zea mays
  Coding DNA Sequence Number=SeqID_33292
MTMVALSPLTEARGRQQGLDSPDSCPSARLQRSSDGHDTTRTGCQNLSGCHDGMVDGIRLRVWLYDPGLSPLSNQKNTCAGIHGGKQRKETERVGVVRLQAIQRAPVRQPRQPERRNLLVLRTHGVMPNPDPAAGEVGINTTAQETHLRCCSVRLIGPWCVAGEWWSCSWARRSPLTTGVVANCSSKQRVLGGVAMRRGRSCGRCDSRYVVHPLVRTVTRFVLRIPMLVFTTGIRLEGAHRWSTVARRPPRMRVRHRPGHREEEAGLAVGSVMVG

SEQ ID NO: 75072 - protein, 118 aa, Zea mays
  Coding DNA Sequence Number=SeqID_33293
  Subcellular localization annotation: CTP_CleavageSite=55; ConfidenceScore=5.03e-01
MGMEWKQKVSLFDLVNETSVSTKLGHATSNGVPATATRGNSQGLGDSVIILCIVRSKQGVKSSCQRVNITRRSTNSKSQGPSSNHTYYLNVHNMDTGDHVAVKVLDKAKVHKKKLAGK

SEQ ID NO: 75073 - protein, 54 aa, Zea mays
  Coding DNA Sequence Number=SeqID_33294
MDNGGHVAVKILDKAKVHKNKLAEQNSVCCIGMHVLQVNHFIWIVFPLITGDGK

SEQ ID NO: 75074 - protein, 170 aa, Zea mays
  Coding DNA Sequence Number=SeqID_33295
  Subcellular localization annotation: CTP_CleavageSite=55; ConfidenceScore=5.02e-01
MGMEWKQKVSLFDLVNETSVSTKLGHATSNGVPATATRGNSQGLGDSVIILCIVRSKQGVKSSCQRVNITRRSTNSKSQGPSSNHTYYLNVHNMDTGDHVAVKVLDKAKVHKKKLAGKVMGSKTRIYMVLDFVMGGELHDIIVVLNLEHYEDARACCIWIFVLLIGLFRI

SEQ ID NO: 75075 - protein, 91 aa, Zea mays
  Coding DNA Sequence Number=SeqID_33296
MDTRDHVAVKVLDKAKIHKNKLAEIYWQGKSVVEPYAVDLKEICCQQYLTVARQKEAVKLAAEARKTAFEAAKKDATEKEAAKKEVVRSVY

SEQ ID NO: 75076 - protein, 254 aa, Zea mays
  Coding DNA Sequence Number=SeqID_33297
MSMILSLYLDEVVTVHVCHWQSESSELDSRVSNTLDRPYISYEDYRLSDHCMVMGVSSRRSPHGGCDHHALDHEDWEKRALSGRDRSLGEPSPFLEAVGFFSHPCPSSSVAEDSFPQPPKVAVGRLSVRWRTGQSGAHRTVRCPQPRHHCRWILTVGASDLWARLGVRCTPDRYCLLSGVPAWAFLTPVRAERALNARQRAVGAEKTVAPEAHRTVRCTPDSPVNFSGLAVGVSRSWRVPEADLPWRTGQSGEL

SEQ ID NO: 75077 - protein, 116 aa, Zea mays
  Coding DNA Sequence Number=SeqID_33298
  Subcellular localization annotation: CTP_CleavageSite=40; ConfidenceScore=5.27e-01
MPHSPLADPLIHAPLRVLLVGTKIGKPQPPNVAVGRLSVRCRTRQSGAHRTVRCPLPRHHCRWILTVGAPDLWARLGVRCTPDRYCLLSGVPVWARLTSAHSARAINAPQVAVGAD

SEQ ID NO: 75078 - protein, 193 aa, Zea mays
  Coding DNA Sequence Number=SeqID_33299
MEKLHQELIDKASDIARVEGNLKAREASLVKRTTDLTWQEEDLAFREEMWARRNKLLDELELEAEEKVKRLEGKVRTLEEQVRQFQAAQATQRALGSQAAEVLGAHLEAKGGRLCRSAIEYVLTCFRSHDPTVSLGPVIVGPVADTEDAAGRAFGMLWTRWSGASNGILLTMSSQIGMEKNEGSAGERVAICL

SEQ ID NO: 75079 - protein, 260 aa, Zea mays
  Coding DNA Sequence Number=SeqID_33300
  Subcellular localization annotation: CTP_CleavageSite=63; ConfidenceScore=5.80e-01
MGGSSSSNSNVCPAFKATGRFTVPRSACHRRGNTFGFPSSIWGSRSGGVANSYCRPNSGDTVRCIAGGRRGGASGSVPLPTLEGPKVILGRPLRSGVEPGATLTPLPQVLTRAHQALQETEVAIRREWKALETEHQRLGDWCSQLERRTKAAFCQFALERAELEQEREDFKEDIRKVSDREEEVTRKERSLDKKKKHLDQKEEVVTALHDKLKAYNAVLEKQRDKQAAAEAKLQQELTDKASDIARIEGNLKAREASLAK

SEQ ID NO: 75080 - protein, 49 aa, Zea mays
  Coding DNA Sequence Number=SeqID_33301
MGDHISGRVRGKVHCQVQSGIRTLILIPISSRRLRIPMDPCPQTNIGMI

SEQ ID NO: 75081 - protein, 74 aa, Zea mays
  Coding DNA Sequence Number=SeqID_33302
MEKPIPSLLMLLLSRVTALVPTITRMGDHVSGRVRGKVYCQVQSGIRTLILIPIPSRSPRIPMDPCPQTNINMM

SEQ ID NO: 75082 - protein, 279 aa, Zea mays
  Coding DNA Sequence Number=SeqID_33303
MNLAWREKDLAFREEMFERREKLLADHELEAEEKERALEERVRQFQAAQAEQAAPGPQAVEAMKKTLEDLQAEQRAGVQRIATWAGEASTTLVPLGVSPIPVSELPTSISDALPMLDSAADSLRCLDQILGARLEAEGGRLCRAVIEYILTCFRSHDPAISLEPVIAGPVADTEDAAREGVQGAVDLVVERFQRDPADDEYIPKKELVTQPPGGSLDWDLDLTCRIESGKPGLMSRPTRLQLQILGHPLQSGGGAGLGYGTKLSGYTALDHPRKQAPIL

SEQ ID NO: 75083 - protein, 570 aa, Zea mays
  Coding DNA Sequence Number=SeqID_33304
  Gene Ontology: Mol. function=helicase activity; Biological process =viral genome replication
  Homolog annotation: Hit_ID=Q1EPC6; Match level="QueryCoverage=91%, HitCoverage=42%, E-value=0.0, Identity=63%"; Hit description=DNA helicase homolog, putative
MAKGADVEMQHQTTQNVTTNEDDDEAVFDDDDEEEGYLFSRPAPLEAPSQLRRLWECADVDARHFRDNIRFFNGHFSFTSMGNPYSKHLRSMGHIDNVEDYHITLNLDQMLDQKLYNAPITLEVAAVWIEGSERRGEHGWHANIPKSNVSMDEVDTYHEQHRTRDAYDDETGIFNPILHGKRLFQQFAVDTYIKIESSRLDFICENRVDEIGKRTVLPTSFIGGPRDMRRRYMDAMALVQKFGKPDIFLTMTCNPTWDEITRELLPMQSPQDRPDLVVRIFRAKLEELKKRLTKQHILGKIWAYVYVVEFQKRGLPHAHFVLIMQRKYKLTCPEQYDLLISAEIPDKKKYPQLYKMVIKHMMNGPCGLLNPKCPCTKVRASCKNHYPRAFSNATLQGKDSYPIYRRRDDGCKEKVRGCELDNRWVVPYNPHLLRLFNCDINVEACGSIKDVKYLFKYIYRGHDRASVAVREANKDDGDVDEIKQYRDARWVTPPEALSQISPLVMQLELHLKNMHMVSFHERAKVNHVVQRPGADRSMLTAYFEANRQHEEARGIVYRDFPEWYTLQQGK

SEQ ID NO: 75084 - protein, 269 aa, Zea mays
  Coding DNA Sequence Number=SeqID_33305
  Gene Ontology: Mol. function=helicase activity
  Homolog annotation: Hit_ID=Q1EPC6; Match level="QueryCoverage=77%, HitCoverage=13%, E-value=4e-70, Identity=59%"; Hit description=DNA helicase homolog, putative
MAEGADVEMQYQTTQNVTTNEDDGGVLFAEDDDEAVFDNDDEEGYLFAGQDGESGEDIEIVETQDAFTVTPDIPDPYDKVYNNMPEETHLLNTVADCNYCKAKKFQYEPPGLCCLSGQVDLAPLETPSQLQRLWECADVDARHFRDNIHFFNDHFSFTSLYCCLDSTTTNMDCGVYTFRAHGTMYHNIRSFGRQARSEHKHFELYFYDDDPSLEHRYRKYRQDQLEKDKSVIKQLVDILRGNPYSEHLRSMGHIDNVEDYLLGTCSQML

SEQ ID NO: 75085 - protein, 95 aa, Zea mays
  Coding DNA Sequence Number=SeqID_33306
  Subcellular localization annotation: CTP_CleavageSite=46; ConfidenceScore=5.06e-01
MAEALAAMAGGIELAGAKGKWLAGEGTGSCSVTKVPVSERLVPRSNCAKTMSNEFGLSSNFSRMCSREFGTTLIFGSPGFESRKIENADDLWEEV

SEQ ID NO: 75086 - protein, 181 aa, Zea mays
  Coding DNA Sequence Number=SeqID_33307
MAGVGRSTRAGGDARRRRGVRPGHGEVDQLDGSERFTGCQRRYGCKELVGDSLDSSVHARRRKTEVRLGTGSCSVTKVPVLERLVPRSNYAKTVSNEFGLSSNFSRMCSREFGTTLIFGSPGFESRKTENADDLWEEVWHLRETLGDTGVSQPSPLKGISSRDSGQSPPRVKRRVRLMGNG

SEQ ID NO: 75087 - protein, 92 aa, Zea mays
  Coding DNA Sequence Number=SeqID_33308
MARSSEAPKLYGNTSASIGPPRASSHHGTLHRAPRYFLVSPDALTMEDRRRGAAPRAGKAAADAIVDITPQPITLNQRFKSDRYHKNKHSNI

SEQ ID NO: 75088 - protein, 59 aa, Zea mays
  Coding DNA Sequence Number=SeqID_33309
MGQNGYSRPRLVYIIGSGSMVKIDVGVDVDAIVDITPQPITLNQRSKSDMYHKNKHSST

SEQ ID NO: 75089 - protein, 192 aa, Zea mays
  Coding DNA Sequence Number=SeqID_33310
MARHPPVAQSNGARANAAEVRRLARIPSPEARIPHSLGNIQGRYHGQTERHTITTDYDVKSPTHVEQRLDSVLWPESNRWCPADVIVDITPQPITLNQRSKSDMYHKNIHSSIQIFTKIVLILFLRVGLLFLKVTTGFQSVKSTFVLEVKRFRSIVNIPLIPLLSHSSFRAPRPGREIITRCAGTKSHTYDE

SEQ ID NO: 75090 - protein, 61 aa, Zea mays
  Coding DNA Sequence Number=SeqID_33311
MENHPGKQCYHEGELLLYSKDVTFVYVPLFIICVRLGPSTPGDYFAPRIIESNISDTGRRD

SEQ ID NO: 75091 - protein, 95 aa, Zea mays
  Coding DNA Sequence Number=SeqID_33312
  Subcellular localization annotation: CTP_CleavageSite=47; ConfidenceScore=5.10e-01
MAEALAAMAGGNKLAGAKGKGLAGEGTGSCSVTKVPVSECLVPRLSCAKTVSNEFGFEFKLSQNVFKRTQMIFEKRSEIQKFRNLNFSKGSLIKG

SEQ ID NO: 75092 - protein, 215 aa, Zea mays
  Coding DNA Sequence Number=SeqID_33313
NRGGRKGGGAYRRRDGSGEVVEDVGEVSGITTVCGSPSEMAGVGRSTRAGGDARRRRGVRPGHGEIEQLDGSERFTGCQRRHERKELGGDSLDSSVHARRRKTEVRGLATVAEALAAMAGGNELAGAKGKWLAGEGSCSVTKVPVSECLVPRSNYAKTMSNEFGLSSNFSRMCSSEFGTTLIFGSPGFEFRRTQMIFGKRSEIQKFRNLNFSKGS

SEQ ID NO: 75093 - protein, 263 aa, Zea mays
  Coding DNA Sequence Number=SeqID_33314
  Subcellular localization annotation: CTP_CleavageSite=58; ConfidenceScore=5.20e-01
MGPGPRVRDWVTLTRVGRGLLRRFGASVGESFFKKGIPPSVVAIFITRSTLSLLSSLRSSTAMALLDPPERLQLEVVLNLVCNLLGWGAPAFVERICVSASTHGDLTAGEFMLFVSNLPSGGHRRPPRQDVRGGDTPSRFFLQHSGGRMFTSLVKVDSGLSSGSIPRAPTLWGGKRVVLRLHLFGFDGFGAASNGGRTRRRQQAGFMRADLTGLAHTDAPGVRKRHSSCSKVVTPGSAHFHHLEGSFPAGGEFMGPFLVQYSP

SEQ ID NO: 75094 - protein, 122 aa, Zea mays
  Coding DNA Sequence Number=SeqID_33315
MALLDPPERLQPEVALNLVRNLLGWGAPAFVRRICVGASAHGDLTAREFMLFVSDLPSDLALPILPFFVLLLEELGLQPQHITPCFILQVAIIAYLCRMSVGATLLPASSSSIRGEGCSPAS

SEQ ID NO: 75095 - protein, 143 aa, Zea mays
  Coding DNA Sequence Number=SeqID_33316
MAPSHGGRCPTRPGGFEWGSAGGLMAPAVGAEAEAAREVPVADGITATIRASGLRAGGGEPLVSLLLLRRPTPIEWGYSHVDYLNRFTKHESPRVKVTSESGDPWTASPFEARSDLAEGVVDAEGATAPFQRQDPSLQDQSVL

SEQ ID NO: 75096 - protein, 349 aa, Zea mays
  Coding DNA Sequence Number=SeqID_33317
  Subcellular localization annotation: CTP_CleavageSite=96; ConfidenceScore=5.49e-01
MSSRSLMHHVFPPSKPPDGGYPPSSRLIVGGTQLRGSWYLSAIVRLQGFSSASPAVPPPPRRRSPKMVTTSSWVGRSKTGCDLGPTLSFKDVHHPRWGGGQAEPALYLPRGFVGHPLPRRSRERALTGPADGPDFDNVGLVDGRRRHLQRVGVVGLAPGGPSCRRAAAAPGRCPTRPGGFEWGSTGGLMAPAISAEAKAAREVPVTDGITATIRASGLRFFVLVLAPRAAGGGEPLVSLLLLRRPTPIEWGCSYLRSMNRGGVGSKMKPGWPEPSRVVRQRDRRRSLSAEASGRAGALGRWLAEAPERSPWTASPSEAGSDLAEDVVDAEGAIAPFQREDPSLQDQSVL

SEQ ID NO: 75097 - protein, 171 aa, Zea mays
  Coding DNA Sequence Number=SeqID_33318
MPPPRLTLRADPQPPDPPGPRLSFPFALKQPSRADLGTTKQEPTPHLPLFRDGDNKVNVDLDDDSDWLHRNETFQTNDYVATTDLLSPGSVHESVGVIGEPSIGVREYRLERLRLYNQTPKRKEAKIEYMRKRRVLQADTLNVASIAMEDPTYTPEVVHPATEPSTVTTCD

SEQ ID NO: 75098 - protein, 1639 aa, Zea mays
  Coding DNA Sequence Number=SeqID_33319
  Gene Ontology: Mol. function=helicase activity; Biological process =viral genome replication
  Homolog annotation: Hit_ID=Q1EPC6; Match level="QueryCoverage=94%, HitCoverage=99%, E-value=0.0, Identity=70%"; Hit description=DNA helicase homolog, putative
  Pfam annotation: Domain name=DUF889; Domain location=1223-1459; Score= 440.2; E_value=2.7e-129; Accession=PF05970.5; Description=Eukaryotic protein of unknown function (DUF889)
MEDPTYTPEVVHPATEPSTVTTCDWVIPEFIRTPFLPAQTQTEDVGSFDMSTEAIRHKHHVPRGERQAILARRNKQFQASIARNVTTLNGDTIGDANNNDDDDDDEAVIFEEDDDDDEGYIFAGQYEETDEDIEIDGTQDESTGTDVPDPYDKVYSNLPEETHMLKPVPDCGYCTAKKFEYEPPGFCCRGGKVELAPLDTPPQLRRLWDSADSDAKHFRDNIRFFNGNFSFTSLYCCLDSMTTNVRDSGIYTFRAQGMMYHNIKSFGKEGGSEHKHLELYFYDDDPSLEHRYRKCREEQLQKDKDVIKQIVGILHGNPYSEHLRSMGHVENLDDYHIALNLDQTLNQKTYNTPLTSEVAAVWIEGSERRGQFSKSVMLHGKDRSSHDIRSYHGCYDALSYPLFFPKGELGWHANIPKVGVSMDEVDAYRATHRANNSNDEDAESPTHLCVSVRDYYCYKFQIRPGVFNPILHGKRLFQQFAVDTYIKIESSRLDFIRKNQDRLRADLYQGLVDSMLDGDIRAEKVGKRTVLSTSFIGGPRDMKRRYMDAMALVRKFGKPDIFLTMTCNPNWDEIRRELLPGQTPQDRPDLVVRVFHAKLQELKHRLTKQDILGKVRAYVYVVEFQKRGLPHAHFILIMQRKYKLTCPEQNDLLISAEIPHNKYPELRKMVIKHMMHGPCGSLNPNCPCTKGHVSCKNHYPRPFSDTTLQGKDSYPIYRRRDDGRKEKVRGCELDNRWVVPYNPYLLRLFNCHINVEACGSIKAVKYLFKYIYKGHDRASVVMRDASKADDDVDEIKQYRDARWVTPPEALWRIYGFELSQNSPPVMQLQLHLPNMHMVAFHERQMVERVVNRPGAYRSMLTAYFEANRLHEGARGILYRDFPEWYTWQSGKGKVWQRRKRDTGGQVGRIVSAHPAEGERYYLRVLLNHVTCATSYVDLRTVDGVPLPTFREAAKRRGLLESDNTLDDCLTERALFQMPSALRRLFATILVYCEPSDVAVLWQNHLDVMSEDYQHRSQGKTHVEQMVLIDIRNMLQSMGKDIKTFPLPPILDAYDDAIGTAREVYEEESIEPAVGDVALKDSLNEEQRAAYDKILSVVDTDQGGLFFVDGPGGTGKTYLYRVLLATLRSQGKIAVATATSGVAASIMPGGRTAHSRFKIPLTIDDGAVCSFTKQSGTAELLRKASLIIWDEASMTKRQAVEALDNSMRDIMGRPELPFGGKTIVFGGDFRQVLPVVRKGSRAQVVASSLRMSYLWESMSHLKLVSNMRAKNDPWFAEYLLRVGGGTEDTNSDNDICLPDEVCVPYSGSDSDLDKLIEFVFPNLNENMSDSTYITSRAILSTRNDWVDMINAKMIDRFQGEHMVYHSFDSAMDDPHNYYPPEFLNTLMPNGLPPHVLKLRIGCPVILLRNIDHANGLCNGTRLVVRGFQRNSIDAEIVLGQHAGKRIFLPRIPLCPSDEEMFPFQFKRKQFPVRLSFAMTVNKAQGQTIPNVGVYLPEPVFSHGQLYVALSRATARSNIKILAIPTFNGKKRSRKGVRKNPTVDCGTCTKNIVYKEVMCLCWEITATISSSTNNLKRWFPTGSAYRKFFILSCTSTAQDMAAYLHYKGATLLTIIGAFLDKLIYNRGSLDFDLVSDSVGIR

SEQ ID NO: 75099 - protein, 329 aa, Zea mays
  Coding DNA Sequence Number=SeqID_33320
  Gene Ontology: Mol. function=protein binding; Cellular component =clathrin vesicle coat; Biological process=intracellular protein transport
  Homolog annotation: Hit_ID=Q8LPJ0; Match level="QueryCoverage=73%, HitCoverage=99%, E-value=2e-69, Identity=49%"; Hit description =Clathrin-associated protein, putative
  Pfam annotation: Domain name=Adap_comp_sub; Domain location=135-329; Score=107.9; E_value=2.9e-29; Accession=PF00928.11; Description =Adaptor complexes medium subunit family
  Subcellular localization annotation: CTP_CleavageSite=18; ConfidenceScore=5.05e-01
MGPPSDFDPAKTHDVPVRVKNSYNPKAPGTLITRQRDMDKVVLTSIVLKSNVTMLDILSTQMLGQYGFPGKGLMEFLEQRILDEMMDNGFPLTTEPNILKEMITPPNIVNKMLNVVTGKSSTLGSKLPNAAASFVPWRRTTVKDASNEVYVNIVEELDACVNRPWDSNQILSFVPPDGQFKLMSYSTLTFDQTSRVQKLKKTPIYVKPQLTSDSGNCRVSVMVGILEAEHSTCTFTLLCFSDASLLMQTCLWTIGQIPKDKAPALSGNLRLEEGLAQLHALSTFQVRFTIMGVALSGLQIDKLDVKNTLNAPYKSFRAQTQAGKYEVRS

SEQ ID NO: 75100 - protein, 97 aa, Zea mays
  Coding DNA Sequence Number=SeqID_33321
  Gene Ontology: Mol. function=aspartate kinase activity; Cellular component=chloroplast; Biological process=amino acid biosynthetic process
  Homolog annotation: Hit_ID=Q9MAX0; Match level="QueryCoverage=91%, HitCoverage=27%, E-value=2e-32, Identity=76%"; Hit description =Aspartate kinase
MGPPSDFDPAKTHDVPVRVKNSYNPKAPGTLITRQRDMDKVVLTSIVLKSNVTMLDILSTQMLGQYGFPGKDLCISVDCVATSEVSVSVSLDPFLYL

SEQ ID NO: 75101 - protein, 1234 aa, Zea mays
  Coding DNA Sequence Number=SeqID_33322
  Gene Ontology: Mol. function=helicase activity; Biological process =viral genome replication
  Homolog annotation: Hit_ID=Q1EPC6; Match level="QueryCoverage=88%, HitCoverage=67%, E-value=0.0, Identity=73%"; Hit description=DNA helicase homolog, putative
  Pfam annotation: Domain name=DUF889; Domain location=763-999; Score =454.1; E_value=1.9e-133; Accession=PF05970.5; Description=Eukaryotic protein of unknown function (DUF889)
  Pfam annotation: Domain name=tRNA_m1G_MT; Domain location=1067-1226; Score=109.1; E_value=1.3e-29; Accession=PF01746.11; Description=tRNA (Guanine-1)-methyltransferase
  Pfam module annotation: Pfam domain module=DUF889::tRNA_m1G_MT; Domain location=763-999::1067-1226
MIRPGVFNPILHGKRLFQQFAVDTYIKIESSRLDFIRKNQDRLRADLYQGLVDSMLDGDIRAEKVGKRTVLSTSFIGGPRDMKRRYMDAMALVRKFGKPDIFLTMTCNPNWDEIRRELLPGQTLQDRPDLVVRVFHAKLQELKHRLTKQDILGKVRAYVYVLEFQKRGLPHAHFLLIMQRKYKLTCPEQYDLLISAEIPHNKYPELRKMVIKHMMHGPCGSLNPNCPCTKGHASCKNHYPRPFSDTTLQGKDSYPIYRRHDDGRKEKVRGCELDNRWVVPYNPYLLRLFNCHINVEACGSIKAVKYLFKYIYKGHDRASVVMRDASKADDDVDEIKQYRDARWVTPPEALWRIYGFELSQNSPPVMQLQLHLPNMHMVAFHERQMVERVVNRPGADRSMLTAYFEANRLHEGARGILYGDFPKWYTWQSGKGKVWQRRKRDTGGQVGRIVSAHPAEGERYYLRVLLNHVTCATSYVDLRTVDGVTLPTFREAAERRGLLESDNTLDDCLTERALFQMPSALRRLFATILVYCEPSDVAVLWQNHLDVMSEDYQHRSQGKTHVEQMVLIDIRNMLQSMGKDIKTFPLPPIIDAYDNAIGTAREVYKEESIKPVVGDVALKDSLNEEQRAAYDKILSVVDTDQGGLFFVDGPGGTGKTYLYRVLLATLRSQGKIAVATATSGVAASIMPGGRTAHSRFKIPLTIDDGAVCSFTKQSGTAELLRKASLIIWDEASMTKRQAVEALDNSMRDIMGRPELPFGGKTIVFGGDFRQVLPVVRKGSRAQVVASSLRMSYIWESMSHLKLVSNMRAKNDPWFAEYLLRVGGGTEDTNSDGDICLPDEVCVPYSGSDSDLDNLIDFVFPNLNENMSDSTYITSRAILSTRNDWVDMINAKMIDRFQGEHMVYHSFDSVMDDPHNYYPPEFLNTLTPNGLPPHVLKLKIGCPIILLRNIDPANGLCNGTRLVVRGFQRNSIDAEIVLGQHAGKRIFLPRIPLCPSDEEMFPFQFKRKQFPVRLSFAMTVNKAQGQTIPNVGVYLPEPVFSHGQLYVALSRATARLNIKILAIPAVDVKKRSRKGIKKNPTIDCGTCTKNIVYKEKTLGKFDDLKAGVLGPKTRHGLGVGILLYFNIHDRKENLVYLTADAETVLDDLDMSKIYIIGGLVDRNRWKGITLKKSAEQGIQSAKLPIGNYLKMSSSQVLTVNQVFEIMLKFVETRDWKTAFFHVIPQRKRGEAETGD

SEQ ID NO: 75102 - protein, 162 aa, Zea mays
  Coding DNA Sequence Number=SeqID_33323
MDYIAPTGVALEAGSGQPHQWWRPPLHRRIADSNDHLCTSSDNDLRLGRLDSSSDRLRASATRQMALMPSPAEATTSARGSLTSGGDHLCTTASARTKGFSLPFRPTGVRTRPSKNATATAAAYDVLCGPPVRPAGKGSHGCGKPVHSATVARVVDGQPRPD

SEQ ID NO: 75103 - protein, 259 aa, Zea mays
  Coding DNA Sequence Number=SeqID_33324
  Gene Ontology: Mol. function=transporter activity; Cellular component= intracellular; Biological process=transport
  Homolog annotation: Hit_ID=Q6Z7A1; Match level="QueryCoverage=99%, HitCoverage=69%, E-value=1e-110, Identity=77%"; Hit description =Putative SEC14 cytosolic factor
  Pfam annotation: Domain name=CRAL_TRIO; Domain location=21-208; Score= 10.8; E_value=1.5e-06; Accession=PF00650.10; Description=CRALTRIO domain
GLPVFGIGVGHSTYDKASATTTAKIMKLDAFSLLLYAMDTFIFERGILSQVHYYVQSHIQINEYRDRIILPRLTQQFERPVVRCIKVLDMTGLKLSALSQIKMLTSISTVDDLNYPEKTETYYVVNVPYIFSACWKVVKPLLQERTKKKVKVLSGCGRDELLKIMDYSSLPHFCRREGSGSSKHSSADVDDCYSLDHPFHKELYDHIKEQASRRELIKMGSLHVSIPEPDPEDAKIVEVIQAEFQKIGEQDESTTGHKD

SEQ ID NO: 75104 - protein, 94 aa, Zea mays
  Coding DNA Sequence Number=SeqID_33325
MDEGCTQPLSSDPMINLNTTVFFFLILSPVCEESPQLGVSRPYNKDQSESTRGLPVFGIGVGYSTYDKASIITLMLVVCLISYNYSQNHETGYL

SEQ ID NO: 75105 - protein, 234 aa, Zea mays
  Coding DNA Sequence Number=SeqID_33326
MSSIHHREARPPGSIFGSDRPPSGLSSFAYASGVPRLLLLQKNEVSKEYFLKTVRNIVGDKSCFTISNAVGGPTAPFRPQMADSNPRAHLIQGAATTVSGSVPTRSIVSGNAPVNQALGSSKVSAGMESQSQQLSAPKPLAATSLSQTQSLGIQEEPKIQGKKQLLFESLPATDLKYWSLERKLCQPLLITEKLIEADREVFERQEGFQLAIGNEKNAEGGEGDDGLLLWNYAI

SEQ ID NO: 75106 - protein, 333 aa, Zea mays
  Coding DNA Sequence Number=SeqID_33327
  Gene Ontology: Mol. function=transcription initiation factor activity; Cellular component=transcription factor TFIID complex; Biological process=transcription initiation
  Homolog annotation: Hit_ID=Q10IZ0; Match level="QueryCoverage=57%, HitCoverage=23%, E-value=2e-60, Identity=63%"; Hit description =Transcription initiation factor TFIID component TAF4 family protein, expressed
  Pfam annotation: Domain name=PRP38; Domain location=1-181; Score= -7.1; E_value=6.8e-06; Accession=PF03371.5; Description=PRP38 family
MEIQSSGRSIEGLMDKVLSVNILSSDYFKELFKYKTYHEVIDEIYNQVDHVEPWMTGNCRGPSSAFCLLYKLLFTMKLTVKQMHGLLKHQDSPYIRADAKCFRNIVRSQAVSRNIVNAIREVLDAPATADARVAKMLLAEEMKNEVSKEYFLKTVRNIVGDKLLKQAASQYQMQAQRSPQINPSNYSLSGQVSGQQTAPNGSVTGDEQKGYPGAHTIPMRQAIASTRPPQFRPSSSGQMGSNTGYPPLQTNLHKANEMGNMSDGKGVHMLQTRPPNNSIPVQTMQHHVQRPQTSSPVFGANSIHARPFPRPVGGPAAPFRPQMADSNPRAHLI

SEQ ID NO: 75107 - protein, 49 aa, Zea mays
  Coding DNA Sequence Number=SeqID_33328
MSKPDKTFPLLILPVLPSLLNPGKIYFRKFGLRSFFQGYGFRINGPRFF

SEQ ID NO: 75108 - protein, 49 aa, Zea mays
  Coding DNA Sequence Number=SeqID_33329
MPKPDKTFPLLILPVLPSLLNPGKTYFRKFGLWSLFRGYGFRINDPRFF

SEQ ID NO: 75109 - protein, 73 aa, Zea mays
  Coding DNA Sequence Number=SeqID_33330
MPKPDKTFPLLILPVLPSLLNPGVGPHEFGLSDCPHSLEWLYVKGVQKTYFRKFGLWSLFRGYGFRICGSLFF

SEQ ID NO: 75110 - protein, 73 aa, Zea mays
  Coding DNA Sequence Number=SeqID_33331
MPKPDKTFPLLILPVLPSLLNPGVGPHEFGLSDCPHSLEWLYDKGVQKTYFRKFGLWSLFRGYGFRICGSLFF

SEQ ID NO: 75111 - protein, 49 aa, Zea mays
  Coding DNA Sequence Number=SeqID_33332
MPKPDKTFPLLILPVLPSLLNPGKTYFRKFGLWSLFRGYGIRINDPRFF

SEQ ID NO: 75112 - protein, 89 aa, Zea mays
  Coding DNA Sequence Number=SeqID_33333
MSTQLYATVQHAQQQCPALGGWEPVVWKKQLLPPPGNPLKSRRGVASRIRDDGRSALCSTGALFDNGLDRRAVCRMALAPPASGVDKTH

SEQ ID NO: 75113 - protein, 205 aa, Zea mays
  Coding DNA Sequence Number=SeqID_33334
MEARMRAEREAERAAYLADQQRMVEMPYPVRLRSPLRRRPDAVAWLVARDISQQAEPDVRPLGRAVSAFIAERTCRLSTLLTGDVPPQHLMRPVHSAGRWRQGHPADGALVQSIVKQKRPIRKALARAAKTLLSLEHRTVRWCTGQCPVRQAGSSEVAALENSPATYGYNSPDCLVYTGLSGEPTVGRANGRPRDLRGTRGRANG

SEQ ID NO: 75114 - protein, 143 aa, Zea mays
  Coding DNA Sequence Number=SeqID_33335
MGKHVPSLLMLLLSRGRVPLDSPTRWQDGRPSHSSNHVLQRTCKNYSTSKAEYTNTQLDLPGYNGSSSLISCEKQTIRIEFYPCKIRAHRLGVQCLTDPDCRRAVTALVPTITGMGDHVSGRVRGKVCGQVHSSTRLTDLPYF

SEQ ID NO: 75115 - protein, 80 aa, Zea mays
  Coding DNA Sequence Number=SeqID_33336
MGDHVSGRVRGKVGGQVHSGALRPHTHQPSPSIPRQQIRAHRLGVQCPTDPDGRRAVTALVPTITGWEPLLRTLRERPRQ

SEQ ID NO: 75116 - protein, 78 aa, Zea mays
  Coding DNA Sequence Number=SeqID_33337
MAEMHPALFLKSGCDRSDIINGHLSMYHHKMVNTRKGGGIDLPPNRHTRRIFRQPQQQQLEMDPPQPPPAGVDPAVAA

SEQ ID NO: 75117 - protein, 67 aa, Zea mays
  Coding DNA Sequence Number=SeqID_33338
MAHHDGALRGYRSLARVGELDIINGHLSMYHHKMVNTRKGGGIDLPPNQHTRRIFRQPQQQPEMDPP

SEQ ID NO: 75118 - protein, 206 aa, Zea mays
  Coding DNA Sequence Number=SeqID_33339
  Homolog annotation: Hit_ID=Q688W0; Match level="QueryCoverage=25%, HitCoverage=10%, E-value=4e-16, Identity=79%"; Hit description =Putative integral membrane protein
MDVVVITLSRELSKLQPARATHGVHTPHGARYVVPLHPPAVARRPASRRQQPSLLTDGYKYFFTVALCSATISQQSRHAISLTITSCALSAFARWWYKFPTIYRHPEHGTLPCIVLIPGLFFIVESPRRLAKMNIMDDCETSLQVLRGFDADITSELNDIKVGGDGREIETHGFAVLDNFRGKKNITEWIRKKHNTGSNICGKECL

SEQ ID NO: 75119 - protein, 167 aa, Zea mays
  Coding DNA Sequence Number=SeqID_33340
  Gene Ontology: Mol. function=sugar porter activity; Cellular component=integral to membrane; Biological process=carbohydrate transport
  Homolog annotation: Hit_ID=Q688W0; Match level="QueryCoverage=80%, HitCoverage=34%, E-value=4e-32, Identity=53%"; Hit description =Putative integral membrane protein
MNMMDDCETSLQVLRGFDADITAELNDIKIGIGLLVLQQLSGINGILFYASSIFKAAAFKHHVFVFVYNSAGVVGLDFNLTIKGLQISSAGMTLSLLVVAIVFYIKDNISHDSDLYDILSMVSLVGVVAYVIAFSFAYLVYRVGEPSALTHRLPLFPNCTDRERWLT

SEQ ID NO: 75120 - protein, 204 aa, Zea mays
  Coding DNA Sequence Number=SeqID_33341
MGKKHGSVPNLHTCSGLDSHNEQKHWHSKGHYKRNSGSTSAGTNNPTRLGGPAEQQKTDERLVVACPSSDDDDDFCFGGPNSGNDDLRADAAARRPPPVPKLVRQGRAEGRRVGGPPLRRGGWVPHVMQAGPEQKKPNHRAWCVQPPSGYKRLSTFAQTSRRKGGQPCRRHATAPSGCTSPTPDTPSMEAQTHASCNRRAGCYV

SEQ ID NO: 75121 - protein, 204 aa, Zea mays
  Coding DNA Sequence Number=SeqID_33342
MGKKHGSVPNLHTCSGLDSHNEQKHWHSKGHYKRNSGSTSAGTNNPTRLGGPAEQQKTDERLVVACPSSDDDDDFCFGGPNSGNDDLRADAAARRPPPVPKLVRQGRAEGRRVGGPPLRRGGWVPHVMQAGPEQKKPNHRAWCVHPPSGYKRLSTFAQTSRRKGGQPCRRHATAPSGCTSPTPDTPSMEAQTHASCNRRAGCYV

SEQ ID NO: 75122 - protein, 130 aa, Zea mays
  Coding DNA Sequence Number=SeqID_33343
MKDAPYWSLPKPLSPRDPEQERPLLLKPGTESGSGGATVDSRGYRRLEPRAASGKFIGDHWGDSKRYRSKCDPTLQEFSLVGITNVVASRRCVIRTDAVQIRDHYVNGNMENHPGKTVLPQGFNGTPLAD

SEQ ID NO: 75123 - protein, 263 aa, Zea mays
  Coding DNA Sequence Number=SeqID_33344
MANNRTHFVLLCFHSFHHWPLDATRRSLTSGIGDTVPDLAASSYYTYCVKMADAFDLSVVASLEAQSKSMDVKSRMLTTRNSVMGILKTSAVVLLVPWGNEWTLSSRASWKRSAQRTVVVRVSRYRLDSHGYFEPDPLLFPSQPKPLSPRDPEQERPLLLKPGTESGSGGATVDSRGYRRLEPRAASGKFIGDHWGDSKRYRSKCDPTLQEFSLVGITNVVASRRCVIRTDAVQIRDEQATGDPEVQLVETAEQELVEGKLCP

SEQ ID NO: 75124 - protein, 293 aa, Zea mays
  Coding DNA Sequence Number=SeqID_33345
MSPSESIKDRVDVGLQIEDPLTGHMPRHGSSAEYNRFGSPYLRGYGDLATDLYLGLVKKLASAGSTFSKHLCKTESLIIEKPYLDSLITSIPLRAFSLVGKMPPRTRKTTRKSTGPIGVPRHQLAPRHEDSSSGSNDPIGDLEAQVNQLQAELQRRTNIWVADGDRINELRSHIRRLQDQLADRDLALDWTVQSRSLAWAKEAKAQARVEELSSAIDNLQAYCNTLHEEVHVLYSQLHPSVPANPVETKAGPSHEAGEAFGGELDLFRPPLSMKLVDEWSPTPDSEATKSDRK

SEQ ID NO: 75125 - protein, 245 aa, Zea mays
  Coding DNA Sequence Number=SeqID_33346
MAVMGSTSEKMYLCQDPLLVSIYAKQSSLIIEKPYLDSLITSIPLRAFSLVGKMPPRTRKTTRKSTGPIGVPRHQLAPRHEDSSSGSNDPIGDLEAQVNQLQAELQRRTNIWVADGDRINELRSHIRRLQDQLADRDLALDWTVQSRSLAWAKEAKAQARVEELSSAIDNLQAYCNTLHEEVHVLYSQLHPSVPANPVETKAGPSHEAGEAFGGELDLFRPPLSMKLVDEWSPTPDSEATKSDRK

SEQ ID NO: 75126 - protein, 123 aa, Zea mays
  Coding DNA Sequence Number=SeqID_33347
MVDCGFISTKLRDSYVNLPQRRGIAAPGPLDPQPMAQIRSHFKHNPYTPSWPSDQDPTARIQFGRRGLYMLTTICYQKWEEIQATSMRLFPAVALSDPVVYQHQARLMESIPIGQDSVESASA

SEQ ID NO: 75127 - protein, 315 aa, Zea mays
  Coding DNA Sequence Number=SeqID_33348
MVLWRLLQEVGYTEAPKYQWSRTILRVQPWYEVVVRIPERARKPSWPQWMFHAEGMTPWEGVEVAALEVLTTICYQKWEEIQATSMRLFPAVALSDPVVYHHQARLMESIPIGQDSVESASARVLMAVLELQLTRGHNHQMWQQLYTGSYAAFKMMEMAKNRACTQAQEQLEETRIQAERIVGLEHQVAELQAQHKADQDHIKELEHQLTNAHSKSKVLSQQQEETHSYAVTVREELKETMGFLGQQDHVLEELHRTYPMEFQTVQRLINHLQQTVHMLLSDRERGTTPRTAFRELRPETRNGNARNISRNGRGT

SEQ ID NO: 75128 - protein, 365 aa, Zea mays
  Coding DNA Sequence Number=SeqID_33349
  Subcellular localization annotation: CTP_CleavageSite=53; ConfidenceScore=5.41e-01
MSDGAPDTVRWHTGQSGVSLIPFHSSNTTIRPAATTTTTIWLAAAPGAAAPTTATAAGAADVPLLGSLEGSGPQQQASAGLDAGDLPPPVTAEAAPSGPQVPPATTEAGLSGPQLPTATVEAAPSGPQALVGGSEAAVPLTATADPTAMAMSSNTPSATAEDAGGAPSSIPPSIPEELEVILGRQLQTGAGPEAAPTPLPRVLSHAHQALLETKAAILREWEALKTEHQRLERCELEQEREDFKEDLEKVFDRERERQRDEQTATEADLQKLRRELDDRASNLSLAEENLKEKDASLEERAMALVWQEKDLAWREEMRERREKLLAEHELEAEEKEKKLEEKERTLEERVRRFQATQAAQAALGS

SEQ ID NO: 75129 - protein, 165 aa, Zea mays
  Coding DNA Sequence Number=SeqID_33350
MRERREKLLTKHELEAEEKEKKLEEKERTLEEQVRRFQATQAAQVAQTAQVAPGSQAVEVMKKTLEDLWAEHRTRVQCIAAWADEVSSALVPLGILGARLEHEGSRLYRAVIEYILTCFQSHDPAISLGSVITGIGQRLSFSCGEANTPGSAYFCHLEGSFPAGG

SEQ ID NO: 75130 - protein, 533 aa, Zea mays
  Coding DNA Sequence Number=SeqID_33351
  Homolog annotation: Hit_ID=Q10PS3; Match level="QueryCoverage=24%, HitCoverage=16%, E-value=7e-51, Identity=81%"; Hit description=HEAT repeat family protein, expressed
  Subcellular localization annotation: CTP_CleavageSite=27; ConfidenceScore=5.53e-01
MARVRPLPRQPSLTLARSLRSRLFLLRSSRVATAPSTPEIVARRHAAPETAPQSRGTSSPMHRRAPEPASRRHPHTTCPLSPSGRDDTGLEKGPETGASPPRIHTIDVVLPLVSPSTFLQWLSATGLVARSCDGEIESRVAEQGWSQRAAGVVTCVRGRTPGRCAASCGGRVAGGVAWRTQRPYNLQGLLPPHGVDLDGLHGRGGRGVTAASEDIVDVPYHLDWRWHRQPPATARANGGVDLTVFKQFERMNPEPANGDDDGALSLPETGLGLSLNTDGVLKAWCAEALRLLMAMGLTCHCPLLMWYNSHHYKIYTTWHLHRQGLAQLSAVLTADTWRCDTARCVAQASHTALLFFKEQPLAASSRGRPVSDDSCKNPWEKASGPGNVTRTSLAPQGLQAQINEFVKLGGEQLVPYYADILGAVLPCISDEEEKIRVVLSHHDSYTYCNVNCVVARETNEELRAIKADPAEGFDIGAILSIAKRELNSEHEATRIEALHWFFTLLDRYCAEFLAYLNDIFDPLLNALSDPSDA

SEQ ID NO: 75131 - protein, 608 aa, Zea mays
  Coding DNA Sequence Number=SeqID_33352
  Homolog annotation: Hit_ID=Q10PS3; Match level="QueryCoverage=21%, HitCoverage=16%, E-value=8e-51, Identity=81%"; Hit description=HEAT repeat family protein, expressed
  Pfam annotation: Domain name=DUF707; Domain location=331-600; Score= -27.7; E_value=4.5e-07; Accession=PF05212.3; Description=Protein of unknown function (DUF707)
  Subcellular localization annotation: CTP_CleavageSite=27; ConfidenceScore=5.53e-01
MARVRPLPRQPSLTLARSLRSRLFLLRSSRVATAPSTPEIVARRHAAPETAPQSRGTSSPMHRRAPEPASRRHPHTTCPLSPSGRDDTGLEKGPETGASPPRIHTIDVVLPLVSPSTFLQWLSATGLVARSCDGEIESRVAEQGWSQRAAGVVTCVRGRTPGRCAASCGGRVAGGVAWRTQRPYNLQGLLPPHGVDLDGLHGRGGRGVTAASEDIVDVPYHLDWRWHRQPPATARANGGVDLTVFKQFERMNPEPANGDDDGALSLPETGLGLSLNTDGVLKAWCAEALRLLMAMGLTCHCPLLMWYNSHHYKIYTTWHLHRQGLAQLSAVLTADTWRCDTARCVAQASHTALLFFKEQPLAASSRGRPVSDDSCKNPWEKASGPGNVTRTSLAPQGLQAQINEFVKLGGEQLVPYYADILGAVLPCISDEEEKIRVVLSHHDSYTYCNVNCVVARETNEELRAIKADPAEGFDIGAILSIAKRELNSEHEATRIEALHWFFTLLDRYCAEFLAYLNDIFDPLLNALSDPSDAPAHEKIGVVDSQWIVHQVIPSLGNQGQSENGRAPWEGLRERCRKEWGLFQTRMAEAEKAYYEMMGITPPNVIFVS

SEQ ID NO: 75132 - protein, 293 aa, Zea mays
  Coding DNA Sequence Number=SeqID_33353
  Gene Ontology: Mol. function=binding
  Homolog annotation: Hit_ID=Q10PS3; Match level="QueryCoverage=44%, HitCoverage=16%, E-value=3e-51, Identity=81%"; Hit description=HEAT repeat family protein, expressed
  Pfam annotation: Domain name=DUF707; Domain location=16-285; Score= -27.7; E_value=4.5e-07; Accession=PF05212.3; Description=Protein of unknown function (DUF707)
  Subcellular localization annotation: CTP_CleavageSite=46; ConfidenceScore=5.09e-01
MASASPRPRSTQRGKVLTADTWRCDTARCVAQASHTALLFFKEQPLAASSRGRPVSDDSCKNPWEKASGPGNVTRTSLAPQGLQAQINEFVKLGGEQLVPYYADILGAVLPCISDEEEKIRVVLSHHDSYTYCNVNCVVARETNEELRAIKADPAEGFDIGAILSIAKRELNSEHEATRIEALHWFFTLLDRYCAEFLAYLNDIFDPLLNALSDPSDAPAHEKIGVVDSQWIVHQVIPSLGNQGQSENGRAPWEGLRERCRKEWGLFQTRMAEAEKAYYEMMGITPPNVIFVS

SEQ ID NO: 75133 - protein, 196 aa, Zea mays
  Coding DNA Sequence Number=SeqID_33354
MSICGSVPADKKLRRQQCQSLRDEATTGMPTRRQSSITQPSAPRDGGGAASLQQQSSHQNQSRRPSTRFRRGSPWAVATGGRRPTRRAPRARSRIRPRGSCLHHSGPPIRQREARTLATALDFLVMASGRRGVGGWVLRKGEEEHQARRFVVRSGRTFLAAWHCAGHEVFPVVRPGIRLVVTGKKMITAGGGPTRP

SEQ ID NO: 75134 - protein, 172 aa, Zea mays
  Coding DNA Sequence Number=SeqID_33355
MARDPLRGLYKVPLASENPLQFMGSSNAGFLSDRHRSKINQGPPYTDHSPTALAPFGGNQGKMDKQSRVTYWVPSKLNLCMKLQGLERKKIQGSVVHLSGPRIRYNSNETAILHNPTERTAGWWWRGIAAAAILSPEPVTEAEHEIQTGIALGGGHGRTETDTKGAASAFKN

SEQ ID NO: 75135 - protein, 146 aa, Zea mays
  Coding DNA Sequence Number=SeqID_33356
MGVEGAGGGFYRRAGVLEGVWSGSDGAGDTRQQVRQGEGGPVAGDDGGGCAAKGGMGGGSALQRGRGWRLFQASRVSFPVSSWRKPFLKERKHTSSAMISTIKSNVLNKGRIEFFQSTDYSDSGAKHNYYCSAPELRTMLNATYEH

SEQ ID NO: 75136 - protein, 115 aa, Zea mays
  Coding DNA Sequence Number=SeqID_33357
MAGGKELAGAKEGWLAGDGFELGIKVNTLDLWLKDYIKEYYHHTEEETEDYEPCTTVFNPRITKHCDLRGDGVENGFACDLAEGILSGVFFLGWKLRELVGGLIGERGCSGGVEW

SEQ ID NO: 75137 - protein, 154 aa, Zea mays
  Coding DNA Sequence Number=SeqID_33358
  Subcellular localization annotation: CTP_CleavageSite=26; ConfidenceScore=5.24e-01
MAKLPRGLPKTKAKVGEPATTNSGTRRSTISGERIERSARGGQGRRRRGGEGFFQKSEPANTYSRLNRSSQGQIRAAVAGRCLYAGSMAMAADRARTQASGLLRRGDEMWLCVIEEKRHIYRARARDRNGQLETPDSHRACRELAFCLREEESV

SEQ ID NO: 75138 - protein, 178 aa, Zea mays
  Coding DNA Sequence Number=SeqID_33359
  Homolog annotation: Hit_ID=Q8H6I2; Match level="QueryCoverage=99%, HitCoverage=86%, E-value=1e-77, Identity=75%"; Hit description =Putative MURBZC
MDSAAELCAQKLSLAAVAARDTLNASAAASIVAADYCATFSLGNDVVSTLDVLESAVAAEKSAMRSYKQASAAVDCAKETVAKYFEVNQKLAQALRYAMSQMSDTAKKLQDTASLCYTDENVVDGFKLTQVARSMDELAEMLEVTAIDCQVSMMDPTTMLEAGYASEDTAVWEDVFRD

SEQ ID NO: 75139 - protein, 167 aa, Zea mays
  Coding DNA Sequence Number=SeqID_33360
  Homolog annotation: Hit_ID=Q8H6I2; Match level="QueryCoverage=76%, HitCoverage=58%, E-value=2e-50, Identity=76%"; Hit description =Putative MURBZC
MDSATELCAQKLSLAAVAARDALNASAAASIVAENSALRSYKQASAAVDCAKETVAKYSEPLCWFPKMILNPQLTLAVLLVNQKLAQALRYAMSQMSDTTKKLQDTASLCYTDEEVVDGFKLTQVARSLDELAEMLEVTAIDCQVSMMDPTTMLEAGYASEDIAVWE

SEQ ID NO: 75140 - protein, 374 aa, Zea mays
  Coding DNA Sequence Number=SeqID_33361
MATSSLMVGESEPGCGLCPLPQPQGFSSPRLGRGECRVGVGPCVGGGPLLHSVMGGEAGIARGRSRPPRRTSNFYGLCPSLPHEFWHERGLLAAASTLRSALPLFGPPEQKSPSSPLLEQVTARRSLAFRCSAGLPPRSGVARACGGGTGVPFVMALRMPESLGPFGLVAWGSSSLVEETPRPPFDGPRPGVAISVLAEAELAREWEPAEPTPKSVSRGLGSGWRPWRLVDRGPGGNRLSRLLGPDSRRSPWTAASPEAGSGFAEDVVDAEGAMAPFGVKTRACRIRSSCSVCFPRPPRPEEHTLAPLAKLRLFSSCFEHLDFVGNRDVCVSESCFSRKGRVRYPYPRGVGIPRLSRPCRLRVLSPVHEAPSPT

SEQ ID NO: 75141 - protein, 521 aa, Zea mays
  Coding DNA Sequence Number=SeqID_33362
MGGSEPGSFVEKDPFRGIPLSRSLLQEIEKEENGKGLACQESEKRVHLARLRAACMAARPFCPLVWAKMGGRLNATPWEWVPLSHRSASRIFITQPGRTPSLAVTRDGDLQLDGGGKRAGLRPLPLPQPQGFSSPRLGRGECRVGVGPCVGGGPLLHSVMGGEAGIARGVRQLQRAWSSAASGFGATCGVGVCHGSRKRFFRRRGGRDRPRADLQLLRPSARPCLTSFGTGGGLLAAASTLRSALPLFGPPEQKSPSSPLLEQVTARRSLAFRCSAGLPPRSGVARACGGGTGVPFVMALRMPESLGPFGLVAWGSSSLVEETPRPPFDGPRPGVAISVLAEAELAREWEPAEPTPKSVSRGLGSGWRPWRLVDRGPGGNRLSRLLGPDSRRSPWTAASPEAGSGFAEDVVDAEGAMAPFGVKTRACRIRSSCSVCFPRPPRPEEHTLAPLAKLRLFSSCFEHLDFVGNRDDPFSEVVKKHERNPAKKRSFFEEKFDAEGVSPLLAPEGGSGFAEARPTLP

SEQ ID NO: 75142 - protein, 85 aa, Zea mays
  Coding DNA Sequence Number=SeqID_33363
MTLGQNQCKNPSLHYGPSGGFDVFSWVKLLLMERASLLAAYLWDVCFHVFSWNLTLRVDLVGFLMELMITVLESSLPNMEMSLKV

SEQ ID NO: 75143 - protein, 71 aa, Zea mays
  Coding DNA Sequence Number=SeqID_33364
  Subcellular localization annotation: CTP_CleavageSite=35; ConfidenceScore=5.33e-01
MTLGQNQCKNPSLHYGQSGGKARTVRDLARTVRPQARTVRVSQLLLGRCEGQIADEQRFSTFSGCQRASLN

SEQ ID NO: 75144 - protein, 197 aa, Zea mays
  Coding DNA Sequence Number=SeqID_33365
MEKVGRARAVEKALFGLRFLYRAYVRFRRGAYLGVVNLDAEEGSLTGTTFANWCSGAYVFCGDPCKVDKSEDHDTYRQRYWMCANYAFELTIVQRRMNLMTVDEREEKGVGARPEDAGDDDGRRRARPVAESDGGHSQRAVRATGRLGGEAPGRLGGGALGVAREPCRVGAGRQGRRGGQGAGGRRGTRLENGRCPN

SEQ ID NO: 75145 - protein, 173 aa, Zea mays
  Coding DNA Sequence Number=SeqID_33366
MSRRGKAAKQRKGPLIGTAFDPLSLPTGVPVPMCFCGDPCKVDKSEDHDTYRQRYWMCANYAFEPTIVQRRMNLMAPPPLCDFEQWIDTEISQKDKKWLENLKKCDVEDKERMKKRREEPVAEQQQKDEQGMRRVAECREEKEKKLERAHRAKEAMEENPDAFRKGKWPRCTQ

SEQ ID NO: 75146 - protein, 233 aa, Zea mays
  Coding DNA Sequence Number=SeqID_33367
  Homolog annotation: Hit_ID=Q7FS86; Match level="QueryCoverage=24%, HitCoverage=65%, E-value=4e-15, Identity=83%"; Hit description =Putative response regulator
MAARAEATGDGVNPPWQGRSYCKGENPGLCITIGSPDHPPTSGDGCSLGRASAGDPGGQQRCRPEAGDRRRRSTRNERQRHSRGGRASSDGVLEADGRRQRTLGPMATTFVPSVSAMSTAAAAPTSVASSPAPKANNSRKAVVPGMTGYELLKRVKESAALRDILVVIMSLENVSTRIIPLPGGVRPAPRLVNAVHSVIFVPRDSGVKRILYAWADAIDAVAGSNVVADWGFH

SEQ ID NO: 75147 - protein, 216 aa, Zea mays
  Coding DNA Sequence Number=SeqID_33368
  Homolog annotation: Hit_ID=Q7FS86; Match level="QueryCoverage=27%, HitCoverage=67%, E-value=5e-16, Identity=84%"; Hit description =Putative response regulator
MAARAEATGDGVNPPWQGRSYCKGEGPRSHPRARSYLVPRRHYKKTPPRRQGLGFSGDGCSLGRASAGDPGGQQRCRPEAGDRRRRSTRNERQRHSRGGRASSDGVLEADGRRQRTLGPMATTFVPSVSAMSTAAAAPTSMASSPAPKANNSRKAVVPGMTGYELLKRVKESAALRDILVVIMSLENVSTRIIPLPGGVRPAPRRNLGPIRHYEIN

SEQ ID NO: 75148 - protein, 206 aa, Zea mays
  Coding DNA Sequence Number=SeqID_33369
  Homolog annotation: Hit_ID=Q7FS86; Match level="QueryCoverage=28%, HitCoverage=67%, E-value=5e-16, Identity=84%"; Hit description =Putative response regulator
MAARAEATGDGVNPPWQGRSYCKGELSSPTPPLQKTPPRRQGLGFSGDGCSLGRASAGDPGGQQRCRPEAGDRRRRSTRNERQRHSRGGRASSDGVLEADGRRQRTLGPMATTFVPSVSAMSTAAAAPTSVASSPAPKANNSRKAVVPGMTGYELLKRVKESAALRDILVVIMSLENVSTRIIPLPGGVRPAPRRNLGPIRHYEIN

SEQ ID NO: 75149 - protein, 225 aa, Zea mays
  Coding DNA Sequence Number=SeqID_33370
  Homolog annotation: Hit_ID=Q6QP51; Match level="QueryCoverage=74%, HitCoverage=60%, E-value=2e-20, Identity=49%"; Hit description =Putative growth-regulating factor 1
MTLGTSDTWLRLGLRSRGTLGHFRDQQERFCNGIPSEGGIEPSDPIKWDRVRQITCSRQSRSDRSHFASPLTDLTGKQRRLRCSDCSATRQGAIGSSASPDPRARTQPRPRTTDSASPDPRARTQPRLWKTVSALPDPRARTQPRLRKTVSASPDPRARTQPRLRKTVSASPDPRARTQPRLRKTVSTSPDPRAQTQPRPRRSHRLARSRARTNHVTGGPSLPYP

SEQ ID NO: 75150 - protein, 248 aa, Zea mays
  Coding DNA Sequence Number=SeqID_33371
  Gene Ontology: Mol. function=calcium ion binding; Cellular component =membrane; Biological process=homophilic cell adhesion
  Homolog annotation: Hit_ID=Q93FQ9; Match level="QueryCoverage=60%, HitCoverage=55%, E-value=7e-21, Identity=38%"; Hit description=Cell surface mucin-like protein
MNLMNKVFMEYLDKFIVLVTPISTKLQRPDGRNPGQGSVHSRDTISSRPSPASGKDSRPRRIHVSPEGPFKQQAHLRLARGLGLNLDSGRRSPPRPTPGLGLNLDSGRRSPPRPTPGLGLNLDSGRWSPHRPTPGLGLNLDFRRRSPPHPTPGLGLNLDSGRRSLPRPTPGLGLNLNSGRRSPPRPTLGLGLNLDSGRRSPPRPTPGFRLHLDLGRRSPPRPTPGLGLSLDIGGVTASPDLRLGPTTS

SEQ ID NO: 75151 - protein, 73 aa, Zea mays
  Coding DNA Sequence Number=SeqID_33372
MPKPDKTFPLLILPVLPSLLNPGVGPHEFGSSDCPHSLEWLYDKGVQKVYFRKFGFRPFFRSYGIRICGSRFF

SEQ ID NO: 75152 - protein, 352 aa, Zea mays
  Coding DNA Sequence Number=SeqID_33373
MSKPDKTFPLLILPVLPSLLNPGVGPHEFGLSDCPHSLEWLYDKGVQGDEGKDGLAFVEALLAQKIYFRKFGLRPFFRSYGIRICGSIWPERVGRGLPTGRGRSSAAGIAAGGLWVGDGGWKVVLRVRGNVRELLRSLNFLPDQRRRRGRRRKGLTGEEDDAGASRIVLGGGEERDDRGWCEEEGARGEPFIGARGKGAVELLGSDELHSAAINAAQRRRGDTTAGRYRRGRWSKERGGRSGAKLPCAARRRRGGRRRRPEVTTVKGRRKDDEATDQRGHSARGSERARERAADEWGRLASEREAGCGAGWRARGGRPKMGRERRSAGAWEGEAADPDTADGPQSLPGLSAA

SEQ ID NO: 75153 - protein, 985 aa, Zea mays
  Coding DNA Sequence Number=SeqID_33374
  Homolog annotation: Hit_ID=Q7XBD4; Match level="QueryCoverage=81%, HitCoverage=83%, E-value=8e-17, Identity=20%"; Hit description =Cinful1 polyprotein
  Pfam annotation: Domain name=Transposase_28; Domain location=16-193; Score=-49.1; E_value=0.005; Accession=PF04195.3; Description =Putative gypsy type transposon
  Subcellular localization annotation: CTP_CleavageSite=26; ConfidenceScore=5.10e-01
MPSSSSSAATTPTAKATSEDLSGTVAAAELRPGDTVEFGVSRMSLVRVQDMQQLVYFGGGVGRVPGPEEVPELEGELVVFEAFFIAGLRLPAHRFMSEVLQKFKVQYVWATTSYGGQPSVEVFAKQYGLHWQKRKNGHKIAQFGSCTFTPKSGKTSMEVVELVPCAQNKWGNWWDYWFYVSEAEVEDHPGLPAAIMCSHYYVAYPPFEVAEDDENERALRIAARTSSGRDLVEEFIGYGVWPLAHGWALGKVCPREMPSLGGRKVRSPLFALDVRGRDPAAVVHEAEDGAVRIVGCYVPKTEAQRSWDIRGSNDRLNRVFELNCLPYGGYPGEDVVDHSGKKPAAVTEDDPASEAAPATKKRKLGTAVGELGVSDSFAMELMGTCVAPGGRMSSPELRESSARMLEVTGGRWPKNVPIPRAAGEDFFTSRMARDLRVFPYRRNIAVVVSIVMNKDHQDAAQKRRAVIRLPDARREAKRARGSAKAIVPGGSQPMLAAKPAAPGSSKVPESGKAVGAGGTKSAPDGAVKVRELPSTGKRVADFGMNISVDDYLVGSSEGQLVVVPPVVATTASTAVLGVKGGAFSAGGEISAATAVKDEAGTMSRRLREASQQLSQAADFADRVASGALTADVSAEVERLWAQHADAVREKSAAESKSHRLAEKVAALEGERMDLRRQLVEERREANQAIAKVQAAQAEAKLAWAEGSLASQRAEEWEVRFNALHARMERAEASTRSEVERTRKQLVDSYRELGARTADFEVPDREASLRFLEWLQEELLALPTIVEGFMSFASLVTCEGAMNALSRKGCNHYEGFDRSDEDFGREIFKVEDPVVKDSAGALFDRMWGPHGREAVKERSDRAREHMAHAEDVKDLGGLNSAPPEAAEGRPVLPSDAGERPSDVPVPAAVGEDPVSAPVPTVKGAHEVVAEPVVEGPTAAEAPAQVQGFGPAYATATESANFVAASTVVAENDSGDSVSKFFESDDS

SEQ ID NO: 75154 - protein, 1100 aa, Zea mays
  Coding DNA Sequence Number=SeqID_33375
  Homolog annotation: Hit_ID=Q7XBD4; Match level="QueryCoverage=73%, HitCoverage=83%, E-value=9e-17, Identity=20%"; Hit description =Cinful1 polyprotein
  Pfam annotation: Domain name=Transposase_28; Domain location=16-193; Score=-49.1; E_value=0.005; Accession=PF04195.3; Description =Putative gypsy type transposon
  Subcellular localization annotation: CTP_CleavageSite=26; ConfidenceScore=5.10e-01
MPSSSSSAATTPTAKATSEDLSGTVAAAELRPGDTVEFGVSRMSLVRVQDMQQLVYFGGGVGRVPGPEEVPELEGELVVFEAFFIAGLRLPAHRFMSEVLQKFKVQYVWATTSYGGQPSVEVFAKQYGLHWQKRKNGHKIAQFGSCTFTPKSGKTSMEVVELVPCAQNKWGNWWDYWFYVSEAEVEDHPGLPAAIMCSHYYVAYPPFEVAEDDENERALRIAARTSSGRDLVEEFIGYGVWPLAHGWALGKVCPREMPSLGGRKVRSPLFALDVRGRDPAAVVHEAEDGAVRIVGCYVPKTEAQRSWDIRGSNDRLNRVFELNCLPYGGYPGEDVVDHSGKKPAAVTEDDPASEAAPATKKRKLGTAVGELGVSDSFAMELMGTCVAPGGRMSSPELRESSARMLEVTGGRWPKNVPIPRAAGEDFFTSRMARDLRVFPYRRNIAVVVSIVMNKDHQDAAQKRRAVIRLPDARREAKRARGSAKAIVPGGSQPMLAAKPAAPGSSKVPESGKAVGAGGTKSAPDGAVKVRELPSTGKRVADFGMNISVDDYLVGSSEGQLVVVPPVVATTASTAVLGVKGGAFSAGGEISAATAVKDEAGTMSRRLREASQQLSQAADFADRVASGALTADVSAEVERLWAQHADAVREKSAAESKSHRLAEKVAALEGERMDLRRQLVEERREANQAIAKVQAAQAEAKLAWAEGSLASQRAEEWEVRFNALHARMERAEASTRSEVERTRKQLVDSYRELGARTADFEVPDREASLRFLEWLQEELLALPTIVEGFMSFASLVTCEGAMNALSRKGCNHYEGFDRSDEDFGREIFKVEDPVVKDSAGALFDRMWGPHGREAVKERSDRAREHMAHAEDVKDLGGLNSAPPEAAEGRPVLPSDAGERPSDVPVPAAVGEDPVSAPVPTVKGAHEVVAEPVVEGPTAAEAPAQVQGFGPAYATATESANFVAASTVVAENDSGDSVSKFFESDDSVSSVVWTEESSDEDLDYFAALDVAAAEASPCVMGAEVLGPSAGRRRQRAVAKRGVSEVEGGRLRVDRAGRRELLSLPDGASVGEGELRSLFEGEELRIMLFNYREMGIIPKVEPL

SEQ ID NO: 75155 - protein, 49 aa, Zea mays
  Coding DNA Sequence Number=SeqID_33376
MAFPLDVGDLFPTVQANVLSLPAAAPWWLSSSTSHLRSLGHDVVHLGWV

SEQ ID NO: 75156 - protein, 417 aa, Zea mays
  Coding DNA Sequence Number=SeqID_33377
  Homolog annotation: Hit_ID=P36183; Match level="QueryCoverage=36%, HitCoverage=19%, E-value=3e-68, Identity=89%"; Hit description =Endoplasmin homolog precursor
  Pfam annotation: Domain name=ERp29; Domain location=131-227; Score= -10.7; E_value=0.006; Accession=PF07749.3; Description=Endoplasmic reticulum protein ERp29,
  Pfam annotation: Domain name=HATPase_c; Domain location=244-354; Score=2.4; E_value=0.052; Accession=PF02518.16; Description =Histidine kinase-, DNA gyrase B-, and HSP90-like ATPase
  Pfam annotation: Domain name=KOW; Domain location=374-410; Score =34.7; E_value=3.2e-07; Accession=PF00467.19; Description=KOW motif
  Pfam module annotation: Pfam domain module=ERp29::HATPase_c::KOW; Domain location=131-227::244-354::374-410
  Subcellular localization annotation: CTP_CleavageSite=44; ConfidenceScore=5.14e-01
MAFPLDVGDLFPTVQANVLSLPAAAPWWLSSSTSRLRSLGHDVVHPVVEDFISFPKSLSLLFLDEDCDTYIWLVLDWLIGSLVVLSVTLPFVSKSALLGDSEFVLDAKVPCWLWRGQLKVGVVEDHLAQAGLVPSLNPLVKEFLNAADDKRKEVLSKIEEDVAKLSAKKLQVNAEESSDDLANPPKVEEKLGAVPHGLSTDSEVAQREAESISRKTLRSSAEKFEFQAEVSRLMDIIINSLYSNKDIFLRELISNASDIRFLSLTDKEVLGEGDTAKLEIQIKLDKEKKILSIRDRGIGMTKEDLIKNLGTIAKSGTSVQEQELLESLVEADTRRQERAKKMEEKKVYLQLYEAMEALVKINLETNKIMDFIKFDVGNVVMVTGGRNTGRVGVIKNREKHKGSFETIHVLLGAFCYV

SEQ ID NO: 75157 - protein, 177 aa, Zea mays
  Coding DNA Sequence Number=SeqID_33378
MAGIARSTRAGGCPRRRRVYRPNHGELVKSEGTVSFTGSRSDCVHKESKDGGVVYPVHVLRRGRELRRAWTGFSGEVLSDSLLGEPHGASSAKVALARVTPGVLHQVLLMRAGVQLCSGDIIVTKKSSFQKLQEKNQKLNLSTKSQPIVNLRLRTLPTSRDSLLPRADQTLKHYQGE

SEQ ID NO: 75158 - protein, 202 aa, Zea mays
  Coding DNA Sequence Number=SeqID_33379
MRRVKAIRSKSTTKDEVTNSRAKEEDTTKRKKVSGPTVSTTLIPLMSHPVLKRLRTLPTSCDSLLPRADQTLKHYQELSNSIKLDNNNPKGNLGQAANPLNKSIDTHLMKMLPTLILTDLEELEVAKRTGAKGKNNEKRETTLRPTKGKGNNKTWRVGVQDKHHGKVQGMTRVKVITDKHNQGGILDKTCEVSKNGKQSMVK

SEQ ID NO: 75159 - protein, 68 aa, Zea mays
  Coding DNA Sequence Number=SeqID_33380
MNVCELTLAVSHPPQVKSRDLRTRTHGMKKHGKNTEDGIEPKLCARELRHDGRKEETDLKRKRLSRPR

SEQ ID NO: 75160 - protein, 115 aa, Zea mays
  Coding DNA Sequence Number=SeqID_33381
MAKSPIEKRWALGRWRGCIIGYAVQIWVGYWRWRSELRSYFLTGVDFPTSDRCWQWAALIIQSCCWDLRTRTHGMKKHGKNTKDGKELKLCARELRHDGRKEETDLKRKRLSRPR

SEQ ID NO: 75161 - protein, 157 aa, Zea mays
  Coding DNA Sequence Number=SeqID_33382
MEQGTRPGKGLGTGRGGWTQGEPWRWAPSSMDAGRREELAGWLGMEEEKSTRAIEGLRQGQGAAEKWRERSKGAARLLADRSWRRKPRPERRRARRGHGWGRGTTGDLERGVLEDGAEEAVQRRNVGCREEKRAWRSCATMMTTTDGSRDQIKLPRA

SEQ ID NO: 75162 - protein, 133 aa, Zea mays
  Coding DNA Sequence Number=SeqID_33383
  Subcellular localization annotation: CTP_CleavageSite=75; ConfidenceScore=5.19e-01
MARPASSRRARFRVPFLAEFPAPSLPSAGAPAPPSMAMPCCSSVLAAGDDAWSPNLPPHRLSLPIFSSSTHRRVSCSPSSVGLAVAKYVHRAMCFGLWSLPLAHHPLFDLVVKLRLSLSSSVTLVRCAIEDFS

SEQ ID NO: 75163 - protein, 127 aa, Zea mays
  Coding DNA Sequence Number=SeqID_33384
QAAAPPRRCAACRRVPSVVCPSARLFFAVCSRHGEQSVLRRLLVFPDGALALFGCPASGAHLPIAGRRLASMEAQEPDGHEASSVSSESTFSTRGRILDDYRSSLKPATIQALGEGDDGDIESVEFP

SEQ ID NO: 75164 - protein, 184 aa, Zea mays
  Coding DNA Sequence Number=SeqID_33385
  Homolog annotation: Hit_ID=Q6ATQ2; Match level="QueryCoverage=29%, HitCoverage=12%, E-value=8e-16, Identity=68%"; Hit description =Expressed protein
  Subcellular localization annotation: CTP_CleavageSite=15; ConfidenceScore=5.15e-01
MGKWALEAGQPNRARAPSGKTSRRKRKNGYPNSGYPYPTRDFRVLTGAFWTNAAGPGWKLSFAVEPWTKGFSTSCAVPYSAGATKHQLLLDEKVDNSTVASDSDGLITTLFISIPQEGISMVFFEGGVNLISLAGVWPYITQDMLKSKLIPEDEFDWSLLLVGSGSDEQERCKLKYIGGTDIMV

SEQ ID NO: 75165 - protein, 415 aa, Zea mays
  Coding DNA Sequence Number=SeqID_33386
  Homolog annotation: Hit_ID=Q2QP98; Match level="QueryCoverage=17%, HitCoverage=8%, E-value=4e-10, Identity=41%"; Hit description=HAT family dimerisation domain containing protein
  Pfam annotation: Domain name=zf-C2HC_plant; Domain location=128-183; Score=53.7; E_value=6.1e-13; Accession=PF07567.3; Description =Protein of unknown function, DUF1544
  Subcellular localization annotation: CTP_CleavageSite=69; ConfidenceScore=5.52e-01
MAPSFCATVNPTPLGALWTSPHVVLTPATCPPLAASPSSAPAAGRPPPAPPLPAALLWLPPRRPPPVVEASSRRGLRRPPLAAAQASTSGCRPPPAVEASGDRPQGESGSQQPYDPTKDPKRKAKSNDPAWNYCYWPDLNKKDVVKCILCGKIVHSGVRRLKQHLVGSHGDVAKCPKTTSAISKEMSDYLKKNARQKPIELDDDKEGEKTMKLKYLEKGKVEHLIQLFSPVPEQPKREGSQRKQAKTINTCRSLLSQLHPCFAKHLRMWFMRGIARATLKLHCSERARRRRKEQICMLLILFMSESTVREGDDLAWAHVDDAIGASSSLQGRNFPRRARYESVYSRRCQAAATQEERVMEEEEQGNEGNEQDDEEYMPNDDEEVDDFGESPHNSPTQAGAGREENAMDDLDLGDI

SEQ ID NO: 75166 - protein, 95 aa, Zea mays
  Coding DNA Sequence Number=SeqID_33387
  Subcellular localization annotation: CTP_CleavageSite=54; ConfidenceScore=5.14e-01
MPPLCKPSQQALVSPAPPLPPSQQHEPLLCKPSQQALVSPAPPLPPSQQPALPLCNMPNDDEEVDDFGESPHSNPNQAGAGGEENAMDDLDLGDI

SEQ ID NO: 75167 - protein, 262 aa, Zea mays
  Coding DNA Sequence Number=SeqID_33388
  Gene Ontology: Mol. function=DNA binding
MEVRPELGSLGCRAEMIRKSGAAHTGQGDTRLGSGAHWCLRCNRSEVLIEVATIDVLAALAGPFQGDPGILSRTPAIELCPEVVGLCALTEGERTDADASCWRRDDRVFDLVEVECAIPSSQSTSSRHCFIAPGEAVELGGCRNNSLATDNAPGYALDGVRDVCAAVCCRAACTVGVPGTGRPGTCGVEEAASPSTAKSTEVLAQCSMICTIMHGLGEASCRREDEYSTLLGTGALFASRLIRRVVCWMGLTPSASGWDMAH

SEQ ID NO: 75168 - protein, 230 aa, Zea mays
  Coding DNA Sequence Number=SeqID_33389
  Gene Ontology: Mol. function=DNA binding
MNFQRVSPGLLPHRMEVGLHTVLLVRPELGSLGCRAEMIRKSGAAHTGQGDTRLGSGAHWCLRCNRSEVLIEVATIDVLAALAGPFQGDPGILSRTPAIELCPEVVGLCALTEGERTDADASCWRRDDRVFDLVEVECAIPSSQSTSSRHCFIAPGEAVELGGCRNNSLATDNAPGYALDGVRDGKLSCRREDEYSTLLGTGALFASKLIRRVVCWMGLTPSASGWDMAH

SEQ ID NO: 75169 - protein, 47 aa, Zea mays
  Coding DNA Sequence Number=SeqID_33390
MMLILYSMLYVSPSSSLVMFTKGVLDKESLYLKIGGYKKLEWLSEGF

SEQ ID NO: 75170 - protein, 102 aa, Zea mays
  Coding DNA Sequence Number=SeqID_33391
MSRWINNSNSGIQKPSDWNGIVTNNLNDGIISSDENNLVRGAEHAAITRITYETAVSGSILTLVYGDNGSNLAKLREGVLDKESMRLKTGGYKKLEWLYEGF

SEQ ID NO: 75171 - protein, 42 aa, Zea mays
  Coding DNA Sequence Number=SeqID_33392
MAAASRRATVAASRRAKGVLDKESLYLKIGGYKKLEWLSEGF

SEQ ID NO: 75172 - protein, 44 aa, Zea mays
  Coding DNA Sequence Number=SeqID_33393
  Homolog annotation: Hit_ID=Q6QP57; Match level="QueryCoverage=57%, HitCoverage=8%, E-value=3e-07, Identity=96%"; Hit description =Putative zinc finger protein
MAAASRRATMAVAASRRAKGVLDKESLYLKTGGYKKLEWLSEGF

SEQ ID NO: 75173 - protein, 49 aa, Zea mays
  Coding DNA Sequence Number=SeqID_33394
  Homolog annotation: Hit_ID=Q6QP57; Match level="QueryCoverage=52%, HitCoverage=8%, E-value=1e-07, Identity=100%"; Hit description =Putative zinc finger protein
MAEVWERQDILSLIAKLVLRGVEQGVLDKESLYLKTGGYKKLEWLSEGF

SEQ ID NO: 75174 - protein, 257 aa, Zea mays
  Coding DNA Sequence Number=SeqID_33395
  Homolog annotation: Hit_ID=Q6QP57; Match level="QueryCoverage=33%, HitCoverage=27%, E-value=3e-07, Identity=42%"; Hit description =Putative zinc finger protein
  Subcellular localization annotation: CTP_CleavageSite=77; ConfidenceScore=5.05e-01
MAGAAATSPLVLAELVLNPVVPLRSVLVEVTPGSRLLFLLPWTRLLHLFISLTQASSLFLWRLQQGVLHPLSIFSPCCLLFSPYVDVFVFKMGWMGREDGPFFVVGSIVYLSGVRVTQQTARLTSLLANSAPMPSGAQYPSPLLQEASPARRGYGDLGRQGTRRLPQQQTLVAPSAIFFMSLGQHVGVQHLCACPPSTIKGEVWRKVATEVSVELQPLREKWGLLLASLIFQGVLDKESLYLKTGGYKKLEWLSEGF

SEQ ID NO: 75175 - protein, 127 aa, Zea mays
  Coding DNA Sequence Number=SeqID_33396
  Subcellular localization annotation: CTP_CleavageSite=77; ConfidenceScore=5.06e-01
MAGAAATSPLVLAELVLNPVVPLRSVLVEVTPGSRLLFLLPWTRLLHLFISLTQASSLFLWRLQQGVLHPLSIFSPCCLLFSPYVDVFVFKMGWMGREDGPFFVVGSIVYLSKLNCMKPTPKDSCEV

SEQ ID NO: 75176 - protein, 89 aa, Zea mays
  Coding DNA Sequence Number=SeqID_33397
MERDCRRREGHGGWGVRGGGIGAEPWCRMRMRDLGRRGADARVEARGARAGARWIRGAFLNGRWGGWRGPRALMGAEAEPCAIYCGRLR

SEQ ID NO: 75177 - protein, 516 aa, Zea mays
  Coding DNA Sequence Number=SeqID_33398
  Homolog annotation: Hit_ID=Q5PPB8; Match level="QueryCoverage=34%, HitCoverage=5%, E-value=3e-07, Identity=27%"; Hit description=UL36 tegument protein
  Pfam annotation: Domain name=Extensin_2; Domain location=72-442; Score=-134.9; E_value=0.049; Accession=PF04554.4; Description =Extensin-like region
MTTHSPNTTDKLNEKEEGGLPTSLLLNVGRWAHRNCTSVCVNVWGCTSEDGDSRLMPHIIPSREALLPKPQTQKTALHMEAKKKPSAPAAVGAAPPPPGNGYFSTVFSAPTAGSASDAKHADLYTMLNKQSSRGQNGRDGKSHSRPTYKDGKHAHPNEPSESPYFGSSVHYGGREFYSSVLRKQPANEPHTDYKGDNPDGSATRGDWWQVYGARFCLGAHQRSRPPPSSPPPVKEGASDPPCPRPGASGLHPRVRAPAPQISHPHPTPWLRPDAPSAHAPASVTLAPPAISLHDPRPHSSSNPEVLEVSTCNGPFPPSPLLRQSQMEAPTASDETLADVLDHLKPHTIALLHLLYSRCPPLDPPPPYAKWPLSSAPPQPQRLCPRTRPLARDSRLPEHRPGDTVVLPLPAASHIPPPACVRQRRAKASKHCFNDGNCDPARKDRVVVESREAIPLSFGNSTTKDLAAAMKPKPKAKVRKNPMKQSRFDFTKVDVVLLPIVFLVVCPNVGKSTLFNR

SEQ ID NO: 75178 - protein, 133 aa, Zea mays
  Coding DNA Sequence Number=SeqID_33399
MPPRTRLTARKSTGPIGVPRHQLAPRYESSSSGSNDPIGDLEAQDQLADRDLALDWAVQSRLLACAKEARAQARIEELSSTVDNLQVYCNTLHEEVHILYSQLHPSVPAHPAEAEAGPSHVPGRALGGELDLF

SEQ ID NO: 75179 - protein, 161 aa, Zea mays
  Coding DNA Sequence Number=SeqID_33400
MPPRTRLTARKSTGPIGVPRHQLAPRYESSSSGSNDPIGDLEAQDQLADRDLALDWAVQSRLLACAKEARAQARIEELSSTVDNLQVYCNTLHEEVHILYSQLHPSVPAHPAEAEAGPSHVPGRALGGELDLFEPPPSLRLVDVWTPTPDDEAAKSNGKQG

SEQ ID NO: 75180 - protein, 178 aa, Zea mays
  Coding DNA Sequence Number=SeqID_33401
MAPFPDVAGHEEGDGRGDEEECAAGDEEARAERMRDASGIASVLRPRIPGSKDGAETTGPCADPGSKDGAADPGSKDGAETTGAGEGAPLRDDGPLRGDDGRLRDDVGRGRGAEDLRVGGQGWQGRVGARMPESGRGQEWWCNPWNGTLPSMESGARARMAAETRIAEEGAWQNCAPT

SEQ ID NO: 75181 - protein, 934 aa, Zea mays
  Coding DNA Sequence Number=SeqID_33402
  Gene Ontology: Mol. function=methyltransferase activity; Cellular component=nucleus; Biological process=mRNA editing
  Homolog annotation: Hit_ID=Q69VD4; Match level="QueryCoverage=55%, HitCoverage=97%, E-value=0.0, Identity=81%"; Hit description=PPR -repeat protein-like
  Pfam annotation: Domain name=PPR; Domain location=113-147; Score =27.0; E_value=6.8e-05; Accession=PF01535.11; Description=PPR repeat
  Pfam annotation: Domain name=PPR; Domain location=12-46; Score=16.1; E_value=0.092; Accession=PF01535.11; Description=PPR repeat
  Pfam annotation: Domain name=PPR; Domain location=182-216; Score =22.9; E_value=0.0012; Accession=PF01535.11; Description=PPR repeat
  Pfam annotation: Domain name=PPR; Domain location=244-278; Score =42.3; E_value=1.7e-09; Accession=PF01535.11; Description=PPR repeat
  Pfam annotation: Domain name=PPR; Domain location=279-313; Score=4.3; E_value=2.3; Accession=PF01535.11; Description=PPR repeat
  Pfam annotation: Domain name=PPR; Domain location=345-379; Score =38.7; E_value=1.9e-08; Accession=PF01535.11; Description=PPR repeat
  Pfam annotation: Domain name=PPR; Domain location=380-414; Score =11.4; E_value=0.33; Accession=PF01535.11; Description=PPR repeat
  Pfam annotation: Domain name=PPR; Domain location=416-450; Score =12.9; E_value=0.22; Accession=PF01535.11; Description=PPR repeat
  Pfam annotation: Domain name=Pkinase; Domain location=698-928; Score =7.7; E_value=5.1e-09; Accession=PF00069.15; Description=Protein kinase domain
  Pfam annotation: Domain name=Pkinase_Tyr; Domain location=698-914; Score=-60.0; E_value=8.6e-09; Accession=PF07714.7; Description =Protein tyrosine kinase
  Pfam annotation: Domain name=TPR_4; Domain location=112-137; Score =4.8; E_value=10; Accession=PF07721.5; Description=Tetratricopeptide repeat
  Pfam annotation: Domain name=TPR_4; Domain location=346-369; Score =3.1; E_value=16; Accession=PF07721.5; Description=Tetratricopeptide repeat
  Pfam annotation: Domain name=TPR_4; Domain location=81-106; Score =12.5; E_value=1.2; Accession=PF07721.5; Description=Tetratricopeptide repeat
  Pfam module annotation: Pfam domain module=PPR::PPR::PPR::PPR::PPR::PP R::PPR::PPR::Pkinase::Pkinase_Tyr::TPR_4::TPR_4::TPR_4; Domain location=113-147::12-46::182-216::244-278::279-313::345-379::380
  Pfam module annotation: Domain location=:698-914::112-137::346 -369::81-106
MATTCHHAMPLRDCNVLIRTLARRGSFSRVMAVYYDLRARGLAADSYTYPFVLRAIGTMKLSVEGRKVHAAAVKTGFRWDAYTACSLMEMYTMLGRADSARRVFDEMPQRFLVLWNMMMRCYIRCGRFTAAVALAVQMESGGATPDRVTLVTAVTACSRAGDLNLGRRIHSYMDGVFGFSLPVANALLDMYTKNGYLEEAVKMFEQMPERNIISWTILVSGYGIAGQLDKARVFFYQCTQKDLILWTSMINACVQHGSFEEALILFRDMQLQRVEPDKFTVVTLLTCCANIGALDQGEWIHQYAESRNMKIDAVLGTALIEMYSKCGHVDKSLQIFGRMQGKDAAAWTAIICGLATNGQASKALELFEEMQRSKTKPDGITFIGVLSACCHGGLVDEGQRYFQAMKEVYHIEPRIEHYSCLVNLLGHAGLLYEAEKLITDMPVNNDTMPLFGALLTACKANGNVEMSEWLTKRIAKEDCSPNPDVNVLMSNVYATASRWEEAIRVRSKMTNPAVKKTAGCSMIETSTGITPPFLPSPALRHPRPHSPLPSLPSYAQVLGAPSPANVVSQAPVVSAQGPIVSQGRPFPCSRRLRAILGSGVRGAILGPGVRARARRLRAILGSGDPGSQDGGYSGGVSHALRTGLLVAGGALLLIAAAIAFFVARDIRKRRHVAARGDWKMTPFVVDLGFGEESILRGLTEANIVGRGGSGRVYRITFTNRLNGAAGAIRTTGKLDGKLEREFESEADILDNVRHNNIIRLLCCLSGAEAKLLVYDYMDNESLDKWLHDDALAAGEHPMAARARSARRQRLDWPTRLKVAVGAAPGLCYMHHECVSPIVHRDVKTSNILLDSEFQAKVADFGLARMLAQAEAPETMSVVAGSFGYMAPVDFISSHFLSVRFWPLQIARTGLLSKLRFHFFWINLKLGFLGERRVG

SEQ ID NO: 75182 - protein, 64 aa, Zea mays
  Coding DNA Sequence Number=SeqID_33403
MNVCELTLAVSHPHKSRTELLLYSKDVTFVSVPLFIICVRLRPSTPGDYFAPGFWTLKTGYDRC

SEQ ID NO: 75183 - protein, 164 aa, Zea mays
  Coding DNA Sequence Number=SeqID_33404
MNVCELTLAVSHPHRSRTELLLYSKDVTFVSVPLFIICVRLGPSTPGDYFALGFWTPKTQCTRKVLRNKEVDQGPSNDISSIPNQTTTSSYLTPYLGEEYTLESRTTLLQEGEDDEDITAIDTTAAATLHKLLLSKDTPPDYLKQDPDFIRSVQGCSWHGNEST

SEQ ID NO: 75184 - protein, 197 aa, Zea mays
  Coding DNA Sequence Number=SeqID_33405
MNVCELTLTVSHPHRLRTELLLYSKDVTFVSVPLFIICVRLGPSTPGDYVSAQVPAFRSAQANPDDAMSDDILMDANAMSLSGNVSGESDFGSWSSEGGKLGSPFSWMDDESFEDDLDYFVALDLAAAESPLRTPPAKHRGLQSVHSQLTCGGEKRWGCRNKTSVSLRKVLEDITEWEWRGHVFGSNHGWIRVPVAN

SEQ ID NO: 75185 - protein, 142 aa, Zea mays
  Coding DNA Sequence Number=SeqID_33406
MGKTEGYMDASSAAASLDAEAERARSSLTAELRAERALEARLHPGRTLASLDELHLSGLNPTSSTSPPSQLQLQLPGRASPLHRRDFNFTDLKAEPTSSFLDARSPRWGGLGKYLSMRGEGNTRQGQAEAQAVNADTIVLIE

SEQ ID NO: 75186 - protein, 165 aa, Zea mays
  Coding DNA Sequence Number=SeqID_33407
MGKTEGYMDASSAAASLYVWLENASGGRGSSPGSLRVRGRDAEAERARSSLTAELRAERALEARLHPGRTLASLDELHLSGLNPTSSTSPPSQLQLQLPGRASPLHRRDFNFTDLKAEPTSSFLDARSPRWGGLGKYLSMRGEGNTRQGQAEAQAVNADTIVLIE

SEQ ID NO: 75187 - protein, 162 aa, Zea mays
  Coding DNA Sequence Number=SeqID_33408
MEAPDCPVCTGHVRCANGSKTANGRLRHRRNEIGHRTMSGVHRTVRSEQTEEGVEIDSKPRVMKAGEHREDKEGECFVRFGHGRGLTPSGITVKKKEIGSQMEVRCQTSFCQNEDGFPKLVRACTVRLGIRSQPEYDGREFVEHGTKKCVVTIVGVSRPGGP

SEQ ID NO: 75188 - protein, 164 aa, Zea mays
  Coding DNA Sequence Number=SeqID_33409
MEEGVLVKSFGSRSIPHFSLWVRRRRGGVERPSLVTIAASGSCERVASGSGLGGGATCQRGGITCEDMKFFAGQGEGTLGGNAWPMYGQGGMRGPCMDKEKARWVGMCGPYRWQNTSEAEHVKGKDDPQNSDGCIRLREKMGEKEYRFLATQLINLIRHHRATK

SEQ ID NO: 75189 - protein, 435 aa, Zea mays
  Coding DNA Sequence Number=SeqID_33410
  Homolog annotation: Hit_ID=Q3LRV2; Match level="QueryCoverage=23%, HitCoverage=44%, E-value=6e-42, Identity=78%"; Hit description=Gag
MATSDGRSTPPRRLRTHGEKCGIDLEPKDFPNTPSSIGVTSASSSATTRHLRPTSRHPILHQCGSSTPSSIGAAASNSSTMTRHLRPTTPYYKWCQSISDKWTQGGTYKDVEPRHVGTGANQMEVTNACHARHGRTACQWNGQARRLRDGLVAACQRSGHDTLNAEAAHRLSVEWTELIKCRGGPSPASGIDRQRALSAINAEAARPKRLTSGSARWLTSRAVGHVAASVLRLSGEHKQSPDPAVSGLDPTQRGPEPILGVRFAPVEVPDLSRRSGLHIQGSGTLPWGSGLTVDILEYIILSSHVATPELSTWWGRVLFTTRPEIVAWAPRLHTVVRGKPPYFDGEDYYMWSDKMRHHLTSLHESIWDIIEFGAQAPQVGDEDYDSDEAAQIRHFNSQATSILLASLCREEYNKVQGLKNAKEIWDVLKMAHEGD

SEQ ID NO: 75190 - protein, 802 aa, Zea mays
  Coding DNA Sequence Number=SeqID_33411
  Gene Ontology: Mol. function=binding; Cellular component =intracellular; Biological process=protein kinase C activation
  Homolog annotation: Hit_ID=Q2QVE3; Match level="QueryCoverage=67%, HitCoverage=78%, E-value=0.0, Identity=71%"; Hit description =Pentatricopeptide, putative, expressed
  Pfam annotation: Domain name=PPR; Domain location=229-263; Score =40.5; E_value=5.7e-09; Accession=PF01535.11; Description=PPR repeat
  Pfam annotation: Domain name=PPR; Domain location=331-365; Score =45.7; E_value=1.5e-10; Accession=PF01535.11; Description=PPR repeat
  Pfam annotation: Domain name=PPR; Domain location=366-400; Score=2.2; E_value=4.1; Accession=PF01535.11; Description=PPR repeat
  Pfam annotation: Domain name=PPR; Domain location=402-436; Score=6.8; E_value=1.2; Accession=PF01535.11; Description=PPR repeat
  Pfam annotation: Domain name=PPR; Domain location=96-130; Score=35.0; E_value=2.5e-07; Accession=PF01535.11; Description=PPR repeat
  Pfam annotation: Domain name=Pro_isomerase; Domain location=562-694; Score=-3.5; E_value=9.7e-07; Accession=PF00160.11; Description =Cyclophilin type peptidyl-prolyl cis-tr
  Pfam module annotation: Pfam domain module=PPR::PPR::PPR::PPR::PPR::Pr o_isomerase; Domain location=229-263::331-365::366-400::402-436::96 -130::562-694
MMRGFLRAGKPTHALTLFRRVLRDRLAVDARTIVFAVKAAATSSSPTEAIHCVAFKRGFIGQSVLAGNALVHMYTSSMLLPDARKLFDEMADRDVVSWTTLIDGYARGGLPDEAWRVFCRMVVAESVWPNEVTLVAAASAAGQMGLLGLGRTVHQCIVESGGRMSVNLENALVDMFGKCGCVAAAKEVFDGMPIKDVYSWTSMVSAYAKCGDLENAAKLFKEIPNRNVVSWSCMVAAYSHANMPDEAIRIFNDMIAAGVEPIDATLVSVLSACAQLCSLDVGTWLYDTYIVSHKVELTPNLSNAFIDMFAKCGDVGAASRLFSNMEDKNVVSWNTMIMAHGLHGQPEEALHLFQEFKGNGILPDEATYIGVLSACSHGGLVSEGRCHFKEMKIVYGIEPRAEHYACMIDLLGKVGLLQEAFEVARSMPVGADEAGWGALLNACRMHGNVEIGKCAADKLAGLDPSDSGIYVLMSQIYASKSKWGQVKMLRTVMRDRRVKKNPGCSSIEVDGKCHEFLVADVSHVHSEDIYAALGNIYLHSKAEGSGVSFYCGPCTQFLPQNLEFFSIGENEVLQCVSVPQGGEGFLGTNPTGTGTDGDSVYKFLYGDQARFFDDEIRPELRHSKTGTVAMASAGENCNASQFYITLRDDMDYLDKHTVFGMVAKGFDMLTKINEAYVDDKGRPFKDIRTYLGKSSYPSSKKGKGFLSTVLISEVENGAHTLLICSRQTSGSWVKENKDTHSLDDLFYDPPRLAELIPENSHTGKPHFEVVEERLEDTWVPLDQTVGNPNPVLGMSVVLIDLN

SEQ ID NO: 75191 - protein, 647 aa, Zea mays
  Coding DNA Sequence Number=SeqID_33412
  Gene Ontology: Mol. function=binding; Cellular component =intracellular; Biological process=protein kinase C activation
  Homolog annotation: Hit_ID=Q2QVE3; Match level="QueryCoverage=96%, HitCoverage=89%, E-value=0.0, Identity=72%"; Hit description =Pentatricopeptide, putative, expressed
  Pfam annotation: Domain name=PPR; Domain location=192-226; Score =35.0; E_value=2.5e-07; Accession=PF01535.11; Description=PPR repeat
  Pfam annotation: Domain name=PPR; Domain location=325-359; Score =40.5; E_value=5.7e-09; Accession=PF01535.11; Description=PPR repeat
  Pfam annotation: Domain name=PPR; Domain location=427-461; Score =45.7; E_value=1.5e-10; Accession=PF01535.11; Description=PPR repeat
  Pfam annotation: Domain name=PPR; Domain location=462-496; Score=2.2; E_value=4.1; Accession=PF01535.11; Description=PPR repeat
  Pfam annotation: Domain name=PPR; Domain location=498-532; Score=6.8; E_value=1.2; Accession=PF01535.11; Description=PPR repeat
  Pfam annotation: Domain name=PPR; Domain location=92-126; Score=19.6; E_value=0.011; Accession=PF01535.11; Description=PPR repeat
  Pfam module annotation: Pfam domain module=PPR::PPR::PPR::PPR::PPR::PP R; Domain location=192-226::325-359::427-461::462-496::498-532::92-126
  Subcellular localization annotation: CTP_CleavageSite=74; ConfidenceScore=5.46e-01
MPSPPTLAPPSPRPAWNTNCNLVVTHPLLSVLESCASFRRLLQLQALLTVSGLASNRFPASRLLAFCALSDPPRLAHAAAVLAQCTEGPNAYMLATMMRGFLRAGKPTHALTLFRRVLRDRLAVDARTIVFAVKAAATSSSPTEAIHCVAFKRGFIGQSVLAGNALVHMYTSSMLLPDARKLFDEMADRDVVSWTTLIDGYARGGLPDEAWRVFCRMVVAESVWPNEVTLVAAASAAGQMGLLGLGRTVHQCIVESGGRMSVNLENALVDMFGKCGCVAAAKEVFDGMPIKDVYSWTSMVSAYAKCGDLENAAKLFKEIPNRNVVSWSCMVAAYSHANMPDEAIRIFNDMIAAGVEPIDATLVSVLSACAQLCSLDVGTWLYDTYIVSHKVELTPNLSNAFIDMFAKCGDVGAASRLFSNMEDKNVVSWNTMIMAHGLHGQPEEALHLFQEFKGNGILPDEATYIGVLSACSHGGLVSEGRCHFKEMKIVYGIEPRAEHYACMIDLLGKVGLLQEAFEVARSMPVGADEAGWGALLNACRMHGNVEIGKCAADKLAGLDPSDSGIYVLMSQIYASKSKWGQVKMLRTVMRDRRVKKNPGCSSIEVDGKCHEFLVADVSHVHSEDIYAALGNIYLHSKAEGSGVRSVF

SEQ ID NO: 75192 - protein, 628 aa, Zea mays
  Coding DNA Sequence Number=SeqID_33413
  Homolog annotation: Hit_ID=Q53MK8; Match level="QueryCoverage=30%, HitCoverage=22%, E-value=1e-19, Identity=30%"; Hit description=Ulp1 protease family, C-terminal catalytic domain, putative
  Pfam annotation: Domain name=TolA; Domain location=48-354; Score= -148.0; E_value=0.044; Accession=PF06519.2; Description=TolA protein
SGTTSNVPEDQSGGGDTEEIQLDYSGGDLDDILDFMRTSSCGDDIDLQERNLNRTPPDLHGAIRSLDDILQMMYSPQHFAGIDGEDHITYSRRSDRSIQVANTQKAEAEKKAEIEMKNAEAEEAEKRKTEAEQADKKKAEEAENKRKTEAEVAEIMRKAAAEEAEKKKEEEAEDKRKAEAHNTQQLFSQPQPNQTDPEAEEAEVKRKAEAKEAEIKRKAETEEAVIKRKAAAEEVVKKKADAEKKVEAEEKRIQVAIQKQLKDNIKALKKPVPVAKLKKMFQLQMSKEYAEQRQQYEDRLNMLRQEAKAEIDSLEKSIDGQAGPSSSFDDIQFPAESDDDINNLTQPIRLSQDEVSVGQADFSEFQRMIFKRLGDRVLKKLREYISPFKIPRNRPEILLAKAVALRRKIASDPELKRRILLEFGLLVGLTGEEILTYFSNDTLGESGIIDFFVHCMRHDDIVHKVDSCGYRVFLTTSFYVFVPIKDGAHYFVYCFNFIHKRIDVLDSNDYFLNCSNQEERHKAVFAKIPIIDAAFQKVSNLKLPRVSKWRRPFIDVPKQEGQSDCLFFVWKYMEYYDGDKMTKENNPFKGPIYRCELLHYEIFHPLNQAGIPGSLDKFRIGGRPLPIE

SEQ ID NO: 75193 - protein, 781 aa, Zea mays
  Coding DNA Sequence Number=SeqID_33414
  Homolog annotation: Hit_ID=Q9ATU7; Match level="QueryCoverage=40%, HitCoverage=59%, E-value=4e-83, Identity=50%"; Hit description =Putative cytochrome P450
  Pfam annotation: Domain name=p450; Domain location=1-357; Score=40.9; E_value=7.7e-13; Accession=PF00067.12; Description=Cytochrome P450
EDTPRLRRRQRERPVDLGGLLLSCTNSVTGRAAFGNRCSRELTADFLSAISVVISNISGLCVSDLFPSLRFVDALTGTKRRLRRAHQRLEDVFARIISDGEARRAERKGTGAGAGGDDDDDDLLSVMLRIRDEGEFEIPINNTNIKAIILDLFTGGTETTSSVAEWLMAELMRNPDAMHKAQDEVRQAFEHSSPDEHEAQMDKLRYTKTVIKETLRLYPPLPLLLPRQCRETCDIGGFQVAKGSRVIVNAWAIARSPAHWDDADRFMPERFERDDSAAGYSRATTDGTTQFEYLPFGHGRRICPGMGFGLSTLEILVARLLYYFDWSLPEGMQVVDLDMDMTVVVFIMDQEQNVIGQQGADTVRRSPHVQNKRKELDKNELKKRRKRLRLKVPLSPIQDEESDDEQDPEFAPAGDGSGDVNVVIVGGDENKGKNKTRAIRCSPGKFIKLVNALSDELKGEVVAKGFGGLLRFKLHLLSRKLLSWLMRKLNSETMKLEIGGGKEIPITEHNVWCVLLLPNVGRDPPPMSDADARALRDELGEKICGNSYRRRSGINLSVITDRLQKRILTGELGLRAFFMAAFQCLLLSNTDTRIRIDDVKYTQDIQNMANKNWCKAVVDRLSIAARLYKKDFAEKGINAPISGCGIFVAIANKDLRGDVPPGTTEFGHLRLRSIADTCYDVPIGALAILHAPVPAPAPVADPNPTAAPNPGAAASAPVAAAPTAQDQELLQLHRRTNLEEVIVKKLYGVPLQLTLEQEQDQELLQMHRKTNLEKVIVKKSS

SEQ ID NO: 75194 - protein, 70 aa, Zea mays
  Coding DNA Sequence Number=SeqID_33415
  Homolog annotation: Hit_ID=Q10IP1; Match level="QueryCoverage=61%, HitCoverage=17%, E-value=5e-17, Identity=88%"; Hit description =Mitotic checkpoint protein BUB3, putative, expressed
MSEDKVCTKDLCWSVGTIYDPSELPGTVRLYDADANVLKREFMHPGAILDCCFHDDSSGFSAGADHTIRR

SEQ ID NO: 75195 - protein, 143 aa, Zea mays
  Coding DNA Sequence Number=SeqID_33416
MSEDKVRTKDLCWSVGTIYDPSELPGVSTAGLGFGGVLHRSGWRRSAPTRRGWCGDMDPTSPRGRSWRFIVCTWEEEVANTSVRAISQAPQRRHPGGCWIESEGRTMEDGGVCGGGSELKERSSMGTTMIEKGVSQTWTVGYR

SEQ ID NO: 75196 - protein, 151 aa, Zea mays
  Coding DNA Sequence Number=SeqID_33417
  Homolog annotation: Hit_ID=Q6ESL5; Match level="QueryCoverage=71%, HitCoverage=38%, E-value=3e-21, Identity=55%"; Hit description =Putative teosinte branched1 protein
MLPYPNPHHHFGVSQEPPHPNPTTGFPMLPRGAHLDQRYVDHHFFPGHGHTNSETLEAVLRPTRAAPECEAAVVTAPPQGGSGRRNGAVPAAGGQGQGHAHAHARAPRKRPFRTDRHSKIRTAQGVRDRRMRLSLDVARDFFALQTGSALI

SEQ ID NO: 75197 - protein, 286 aa, Zea mays
  Coding DNA Sequence Number=SeqID_33418
  Homolog annotation: Hit_ID=Q6ESL5; Match level="QueryCoverage=76%, HitCoverage=80%, E-value=6e-44, Identity=52%"; Hit description =Putative teosinte branched1 protein
  Pfam annotation: Domain name=TCP; Domain location=102-262; Score =90.5; E_value=5e-24; Accession=PF03634.4; Description=TCP family transcription factor
MLPYPNPHHHFGVSQEPPHPNPTTGFPMLPRGAHLDQRYVDHHFFPGHGHTNSETLEAVLRPTRAAPECEAAVVTAPPQGGSGRRNGAVPAAGGQGQGHAHAHARAPRKRPFRTDRHSKIRTAQGVRDRRMRLSLDVARDFFALQDRLGFDKASKTVDWLLTQSKPAIERLAATTEPSQRSVGGSDDAALSPPTSGVADGSGMRGGVAEKLGSRSGGSAASMEMEMEHASELDRLVSAAPVLRQYYYGLSEMMSNDNGGDGDDDGEYEEEDGDFLDDAIVCSAFVI

SEQ ID NO: 75198 - protein, 58 aa, Zea mays
  Coding DNA Sequence Number=SeqID_33419
MENAMREQQERFREELRQQQMAFLQQQSEYMTPNQMNNFVYDLFASGGSGHNSNAPYM

SEQ ID NO: 75199 - protein, 154 aa, Zea mays
  Coding DNA Sequence Number=SeqID_33420
  Homolog annotation: Hit_ID=Q2HW33; Match level="QueryCoverage=40%, HitCoverage=18%, E-value=1e-12, Identity=58%"; Hit description =Protein phosphatase 2C-like
MEDAMREQQEKFREEMRQQQMTFLQQQSEYMAAYNAQAQQATNSPMPQWELHAPPPPPPPQGSKVMGHNTPPPVISAPGGAYVGEGATPREVYYLADEPEVHFVWQPSQESWVLVMSRAFDDYYIMDYDVISAPEVTQRRTDNNDQFVILATVW

SEQ ID NO: 75200 - protein, 103 aa, Zea mays
  Coding DNA Sequence Number=SeqID_33421
MGWRGEHNTGAARDESHPGVGAADVYLRRAPGAGLRCRPPPTPGPDSWRPLGGRGRQALLGGDQDLQDLAWETKPYVRTYRITAPNTKKAIIRVSRASDYKIA

SEQ ID NO: 75201 - protein, 128 aa, Zea mays
  Coding DNA Sequence Number=SeqID_33422
MGWRGEHNTGAARDESHPGVGAADVYLRRAPGAGLRCRPPPTPGPDSWRPLGGRGRQALLGGDQDLQDLAWETKPYVRTYRITAPNTKAQDAACEKLHSCPLQMLTIKIQAITGRLVISSLSRFTPSS

SEQ ID NO: 75202 - protein, 84 aa, Zea mays
  Coding DNA Sequence Number=SeqID_33423
MKLVYPENGNFWLAWHKSVHDRLACIVEMEKENASLAELRERKLMNKYNELKEAGKLDAFMEKRWRKNASKDHRFMPYRRSGDV

SEQ ID NO: 75203 - protein, 349 aa, Zea mays
  Coding DNA Sequence Number=SeqID_33424
  Homolog annotation: Hit_ID=Q10R18; Match level="QueryCoverage=27%, HitCoverage=31%, E-value=4e-27, Identity=68%"; Hit description=AP2 domain containing protein
  Pfam annotation: Domain name=AP2; Domain location=193-242; Score =56.5; E_value=9.1e-14; Accession=PF00847.10; Description=AP2 domain
MEEKTAKKAAPDKSEVHPLNVIKVTMEDLTKADRKEIEEEIARELEEKRNERLACFRKTKNGVIKLIGGASTSSKKVQGELQGFGDELDDDHSYDGRNDWGFCATLNVWTKGPSLAQRRMYIARLREMAGQIRTHLASAQQPHHSASQSASSGVAPITRPWSKARGFAGFTKRALVAADAAVVSSIPVNPLDVAKIREPNKRTRLWLGSFATAEEAALAYDEVACRLYGPDAFLNLPHLRASAVSSTAAHQRLRWLAASARGAAAVPAYDLLNLNAQHNVLALIHQNVIPSMSNPSILCDFLTRSYDIGGVISVMALSAELRERKLMNKYNELKLYDSAIEFVILSIDL

SEQ ID NO: 75204 - protein, 342 aa, Zea mays
  Coding DNA Sequence Number=SeqID_33425
  Homolog annotation: Hit_ID=Q9AV81; Match level="QueryCoverage=38%, HitCoverage=25%, E-value=5e-65, Identity=90%"; Hit description =Putative WD-repeat containing protein
  Pfam annotation: Domain name=WD40; Domain location=117-154; Score =27.8; E_value=4e-05; Accession=PF00400.22; Description=WD domain, G -beta repeat
  Pfam annotation: Domain name=WD40; Domain location=32-69; Score=8.8; E_value=3.4; Accession=PF00400.22; Description=WD domain, G-beta repeat
  Pfam annotation: Domain name=WD40; Domain location=76-113; Score =18.0; E_value=0.035; Accession=PF00400.22; Description=WD domain, G -beta repeat
  Pfam module annotation: Pfam domain module=WD40::WD40::WD40; Domain location=117-154::32-69::76-113
MAQWFIPWFGQVQHLPTPRCGVPTDEGCTQPLSSGPKTHLNTTVEAVTVHVTQKYFVSASKDNSWCFYDISTGSCLTQVGEASGQEGYTSASFHPDGLILGTGTTDAVVKIWDVKAQSNVAKFEGHVGPVTAMSFSENGYFLAIAAHDGVKLWDLRKLRNFRTFSPYDLDTPTNTGNGSDTGQTDSWFELKVCVTALLTTGQSLLSVVYLCGNLGPECIIYAMLLFHRLLMFDPVNQDQAYFPYLTLFSINWKGNPAKSFELMIQRELSRRMFSCRGVDASTGHVGRTRPFCPNLELAKWCYLVTECITMAHHSVCLQLLSYGYIAPAYLTHLFQGQLDGTD

SEQ ID NO: 75205 - protein, 411 aa, Zea mays
  Coding DNA Sequence Number=SeqID_33426
  Gene Ontology: Mol. function=ubiquitin-protein ligase activity; Cellular component=ubiquitin ligase complex; Biological process =protein ubiquitination
  Homolog annotation: Hit_ID=Q9AV81; Match level="QueryCoverage=90%, HitCoverage=68%, E-value=1e-159, Identity=76%"; Hit description =Putative WD-repeat containing protein
  Pfam annotation: Domain name=WD40; Domain location=189-227; Score =33.4; E_value=8.1e-07; Accession=PF00400.22; Description=WD domain, G-beta repeat
  Pfam annotation: Domain name=WD40; Domain location=234-271; Score =16.9; E_value=0.074; Accession=PF00400.22; Description=WD domain, G -beta repeat
  Pfam annotation: Domain name=WD40; Domain location=275-312; Score =32.2; E_value=1.8e-06; Accession=PF00400.22; Description=WD domain, G-beta repeat
  Pfam annotation: Domain name=WD40; Domain location=99-160; Score=6.2; E_value=6.8; Accession=PF00400.22; Description=WD domain, G-beta repeat
  Pfam module annotation: Pfam domain module=WD40::WD40::WD40::WD40; Domain location=189-227::234-271::275-312::99-160
MTLEHFWLKLRDRFLRQLQELLLQLLFPMEKEVSHNSTFFDTVIEDEIGPDGKKIRPGINPVMIDELTECNAMLSAQRKKRQVPPTLAPIDALERYTQISSHPLHKTNKPGILSMDIHPSKETSELFMQAPSQKILSYTKSYSQDIVATGGIDTNAVIFDRSSGQILCTLAGHSKKTVRIWQENENGNYNCVHTLKDHTDEVEAVTVHVTQKYFVSASKDNSWCFYDISTGSCLTQVGDASGQEGYTSASFHPDGLILGTGTTDAVVKIWDVKAQSNVAKFEGHVGPVTAMSFSENGYFLATAAHDGVKLWDLRKLRNFRTFSPYDLDTPTNTVEFDFSGNYLAIGGSDIRVYQVANVKAEWNLIKTLPDLSGTGLTNSSDEDTICFVDYDAKQLKFSAQIPVIQNELLAS

SEQ ID NO: 75206 - protein, 181 aa, Zea mays
  Coding DNA Sequence Number=SeqID_33427
  Homolog annotation: Hit_ID=P24345; Match level="QueryCoverage=34%, HitCoverage=17%, E-value=4e-22, Identity=85%"; Hit description =Homeotic protein knotted-1
MASLVHPERIQSEGALNLVRNLLGWSAPAFAERIRTGATPLGDLAAGEFVLFVSYLSYGSSGSSFSTSRPTPSSRRPSLPTSARCSWGWHFFRQSSDERVLRSDLPEMESELSCGSIFRVNFIASCSGLVSSSLNFTSTSWYASMNWSSSGSVSAARPAERHALSCLHLFSFDGLKRRLQR

SEQ ID NO: 75207 - protein, 273 aa, Zea mays
  Coding DNA Sequence Number=SeqID_33428
  Homolog annotation: Hit_ID=P24345; Match level="QueryCoverage=44%, HitCoverage=44%, E-value=3e-35, Identity=59%"; Hit description =Homeotic protein knotted-1
MASLVHPERFQSEGALNLVRNLLGWSAPAFAERIRAGATPLGDLAAGEFVLFVSYLSYGSSGSSFSTSRPTPSSRRPSLPTSARCSWGWHFFRQSSDERVLRSDLPEMESELSCGSIFRVNFIASCSGLVSSSLNFTSTSWYASMNWSSSGSVSAARPAERHALSCLHLFSFDGLNVASNDEGSFTLTHASRRPPPLASCSTGLPLAPLFPVVATVFRVSGRPAPGGAEGGCPRAVVVIAGPVADTEDAAREVVQDVVETAATRFQRDPADVR

SEQ ID NO: 75208 - protein, 1034 aa, Zea mays
  Coding DNA Sequence Number=SeqID_33429
  Gene Ontology: Mol. function=binding; Cellular component =intracellular; Biological process=metabolic process
  Homolog annotation: Hit_ID=Q6ZIP5; Match level="QueryCoverage=71%, HitCoverage=91%, E-value=0.0, Identity=81%"; Hit description =Pentatricopeptide (PPR) repeat-containing protein-like protein
  Pfam annotation: Domain name=PPR; Domain location=354-388; Score =11.8; E_value=0.3; Accession=PF01535.11; Description=PPR repeat
  Pfam annotation: Domain name=PPR; Domain location=492-526; Score =45.0; E_value=2.6e-10; Accession=PF01535.11; Description=PPR repeat
  Pfam annotation: Domain name=PPR; Domain location=527-561; Score=3.7; E_value=2.7; Accession=PF01535.11; Description=PPR repeat
  Pfam annotation: Domain name=PPR; Domain location=566-600; Score=0.5; E_value=6.4; Accession=PF01535.11; Description=PPR repeat
  Pfam annotation: Domain name=PPR; Domain location=628-662; Score =37.3; E_value=5.2e-08; Accession=PF01535.11; Description=PPR repeat
  Pfam annotation: Domain name=PPR; Domain location=663-697; Score=2.4; E_value=3.9; Accession=PF01535.11; Description=PPR repeat
  Pfam annotation: Domain name=PPR; Domain location=729-763; Score =52.1; E_value=1.8e-12; Accession=PF01535.11; Description=PPR repeat
  Pfam annotation: Domain name=PPR; Domain location=764-798; Score =11.4; E_value=0.33; Accession=PF01535.11; Description=PPR repeat
  Pfam annotation: Domain name=PPR; Domain location=800-833; Score =13.4; E_value=0.19; Accession=PF01535.11; Description=PPR repeat
  Pfam annotation: Domain name=PPR; Domain location=866-900; Score=8.2; E_value=0.79; Accession=PF01535.11; Description=PPR repeat
  Pfam module annotation: Pfam domain module=PPR::PPR::PPR::PPR::PPR::PP R::PPR::PPR::PPR::PPR; Domain location=354-388::492-526::527-561::566- 600::628-662::663-697::729-763::764-798::800-833::866-900
MEPTGVVALLLRRGGDVLSAARHGAETELPTGSHAAALLRRQSRGGLIPAGEPPLPSAATNASNPWWLTFEKAIASAGGELSKPEILSSTTDSRFARQLGIPALGFSPMTTEPCFFPLYLGVAVSGRQSVPEGHPKPSEASSSSSSSSDDDDTPSTAARSTRSSNPVLSSCLDYGFKGAEIAMASYCSELQFLRNPVTNHVLKCSTVPAQHALSGRGVAGVRLGRVEARLHAMPRPPPPHGVTSLPHQCSVLLRRLAASRSLASSSYFLRALRCLHARLLTSALLHAPPHPHLTLRLIHLYTLSRDLPAAATLFCADPCPVSATSLVAAYAAADRLPAAVSFFDAVPPARRDTVLHNAVISAYARASHAAPAVAVFRSLLASGSLRPDDYSFTALLSAGGHLPNISVRHCAQLHCSVLKSGAGGALSVCNALVALYMKCESPEATRDARKVLDEMPNKDDLTWTTMVVGYVRRGDVGAARSVFEEVDGKFDVVWNAMISGYVHSGMAVEAFELFRRMVLERVPLDEFTFTSVLSACANVGLFAHGKSVHGQIIRLQPNFVPEAALPVNNALVTFYSKCGNIAVARRIFDNMTLKDVVSWNTILSGYVESSCLDKAVEVFEEMPYKNELSWMVMVSGYVHGGFAEDALKLFNKMRSENVKPCDYTYAGAIAACGELGALKHGKQLHGHIVQLGFEGSNSAGNALITMYARCGAVKEAHLMFLVMPNIDSVSWNAMISALGQHGHGREALELFDRMVAEGIYPDRISFLTVLTACNHSGLVDEGFRYFESMKRDFGIIPGEDHYTRLIDLLGRAGRIGEARDLIKTMPFEPTPSIWEAILSGCRTSGDMELGAHAADQLFKMTPQHDGTYILLSNTYSAAGCWVDAARVRKLMRDRGVKKEPGCSWIEAGNKVHVFLVGDTKHPEAHEVYKFLEMVGAKMRKLGYVPDTKVVLHDMEPHQKEHILFAHSERLAVGFGLLNLPPGATVTVLKNLRICDDCHAAIMFMSKAVGREIVVRDVRRFHHFKDGECSCGNYW

SEQ ID NO: 75209 - protein, 132 aa, Zea mays
  Coding DNA Sequence Number=SeqID_33430
  Gene Ontology: Mol. function=nucleic acid binding; Cellular component= nucleus; Biological process=selenocysteine incorporation
  Homolog annotation: Hit_ID=Q7EZ58; Match level="QueryCoverage=90%, HitCoverage=59%, E-value=4e-42, Identity=68%"; Hit description=RNA Binding Protein-like
  Pfam annotation: Domain name=RRM_1; Domain location=2-56; Score=1.2; E_value=0.11; Accession=PF00076.12; Description=RNA recognition motif. (a.k.a. RRM, RBD, or
  Pfam annotation: Domain name=RRM_1; Domain location=78-132; Score =12.2; E_value=0.011; Accession=PF00076.12; Description=RNA recognition motif. (a.k.a. RRM, RBD, or
  Pfam module annotation: Pfam domain module=RRM_1::RRM_1; Domain location=2-56::78-132
MADLRQLMIASVKIIRNKQTGHSEGYGFIEFSSRGAAEHTLMNFNGQMMSNVEITFKLNWASASIGDKRGDSGSDHTIFVGDLAHGVTDSMLEDVFRAKYPSVRGANVVVDRMTGWPKGYGFVRFGDLNNAL

SEQ ID NO: 75210 - protein, 142 aa, Zea mays
  Coding DNA Sequence Number=SeqID_33431
  Gene Ontology: Mol. function=nucleic acid binding; Cellular component= nucleus; Biological process=selenocysteine incorporation
  Homolog annotation: Hit_ID=Q7EZ58; Match level="QueryCoverage=82%, HitCoverage=57%, E-value=3e-42, Identity=69%"; Hit description=RNA Binding Protein-like
  Pfam annotation: Domain name=RRM_1; Domain location=88-142; Score =12.2; E_value=0.011; Accession=PF00076.12; Description=RNA recognition motif. (a.k.a. RRM, RBD, or
MHMTDFIFVDLILSSNCILLFVKIIRNKQTGHSEGYGFIEFSSRAAAEHTLMNFNGQMMSNVEMTFKLNWASASTGDKRGDSGSDHTIFVGDLAHGVTDSMLEDVFRAKYPSVRGANVVVDRMTGWPKGYGFVRFGDLNNAL

SEQ ID NO: 75211 - protein, 124 aa, Zea mays
  Coding DNA Sequence Number=SeqID_33432
  Gene Ontology: Mol. function=nucleic acid binding; Cellular component= commitment complex; Biological process=nuclear mRNA splicing, via spliceosome
  Homolog annotation: Hit_ID=Q7EZ58; Match level="QueryCoverage=72%, HitCoverage=44%, E-value=3e-28, Identity=65%"; Hit description=RNA Binding Protein-like
  Pfam annotation: Domain name=RRM_1; Domain location=70-124; Score =12.2; E_value=0.011; Accession=PF00076.12; Description=RNA recognition motif. (a.k.a. RRM, RBD, or
MGVDAGEERHRSAYGAGAKVDGARRLGGSIHSLMNFNGQMMSNVEMTFKLNWASASTGDKRGDSGSDHTIFVGDLAHGVTDSMLEDVFRAKYPSVRGANVVVDRMTGWPKGYGFVRFGDLNNAL

SEQ ID NO: 75212 - protein, 123 aa, Zea mays
  Coding DNA Sequence Number=SeqID_33433
MDLRGRNATTFVREVETMKIVGKYVSKMGTLRSWDIRGSNVRLNRVFELNHLSYGGYLEGDCANVASRRGETNDVIGRGRPLTGQGSGCGHQEKEISSRGNDVFARAPRIFYANVEGYQGSLA

SEQ ID NO: 75213 - protein, 135 aa, Zea mays
  Coding DNA Sequence Number=SeqID_33434
MGGQMVRSPLFAMDLRGRNATTFVREVETMKIVGKYVSKMGTLRSWDIRGSNVRLNRVFELNHLSYGGYLEGDCANVASRRGETNDVIGRGRPLTGQGSGCGHQEKEISSRGNDVFARAPRIFYANVEGYQGSLA

SEQ ID NO: 75214 - protein, 597 aa, Zea mays
  Coding DNA Sequence Number=SeqID_33435
  Homolog annotation: Hit_ID=Q6QP51; Match level="QueryCoverage=47%, HitCoverage=97%, E-value=6e-17, Identity=42%"; Hit description =Putative growth-regulating factor 1
  Subcellular localization annotation: CTP_CleavageSite=18; ConfidenceScore=5.10e-01
MAERCRSPRGRAPPTIARARRRWGTPSRGSKGGRAQGMRGGRRHGHCPGDRSPFYRQTSSLAPLSVTGEIPTASSRVLPYDTGAGTHTSYELIQSTKKKPVVERVDCHATGIQLHRNCAPLRLHPHPVDQRKGSGPTCHETDASVTTCEKLHRHSRQCCASSTAEPVPQLEVAPRMTQQCQLKATATGQSAAGDRERGRCGKDPSRRRKRAPSPPTDQGFEGWPFGRVSTAALEHLDFKPITDQGFEGWPLERVRQSPQSMQSEGWLWVRSIHNRGSSYAPEPRVGTVVPDEFTPRPRPSSGSGRPLGSPEAQLGRGFVVKQPWPYRLTNRPLHRRIKCRGCLMSYPDTRASVGQAEVTAVTSPLFFTVRYDRKTAPLAPLRLPCQPPRQRLTISHDQPPSSSLGRNRKLCLARPHALASGGLHLARPQAPASGGGLRLARPPDSASTPILGVIVSSPDPGLGLKRSLCLDRPWARIDRADRGCIISLFLACSGYKEQDRRPIWLTLATGLRRSSGGHAITCTAPKLSPNGHVGMATLREVHAREAVDELGTPRGRNADRGQVGGEATVPCPWCLFETVQQAIQSADQIWVSGVDEA

SEQ ID NO: 75215 - protein, 268 aa, Zea mays
  Coding DNA Sequence Number=SeqID_33436
MGCSSAALLLLSLEECDLVEIGTFQPSLGFKDFRQPGCSGPLLPSVIWGEGRSPPVALVAAARLAPRHERLWCCLQCRPKARPQVLTPVLATRTRTGPSQNTNAALAACDALCDPPIADGAARRATPGVCYPASLPVWRLFIPVGAEQESRRENRRGFCRRLSLCSIVTPNFWDPRLLCDEPEPEAAVLARTDAESAQKETSSAREMAVEVLLPESPSEARPGSAEGGNNTEGAAAPPADARTYRNKGFPLLALEVGSGFAEARLTLP

SEQ ID NO: 75216 - protein, 449 aa, Zea mays
  Coding DNA Sequence Number=SeqID_33437
  Gene Ontology: Mol. function=cysteine-type peptidase activity; Biological process=proteolysis
  Homolog annotation: Hit_ID=Q53MK8; Match level="QueryCoverage=63%, HitCoverage=30%, E-value=8e-20, Identity=26%"; Hit description=Ulp1 protease family, C-terminal catalytic domain, putative
  Subcellular localization annotation: CTP_CleavageSite=53; ConfidenceScore=5.01e-01
MKHVDRPLNNPKHNFMPALKKRNVSESHTRVLRKVVTKRIKPEDLPRQRLNVRCNPQDVIASINILNERQREAIRRKGFSNILDMTVDAMCSRSHLQWLMDKLDHKDMTIRPGPGKELKITKDIVHLILGVPNHGGGKPLGIDEAVAASNLRAELGLAKDEFNVTFLQDSLRKGENDDLTIRCFFLILFNCLLFPTASWGITNHEVLLTEEMHRFHEIDWCQLIFNDLCEAAKKWHNRSTTNVSTTIYECSIVVLLYYLDHLHAAAAPQNKLGTPRIKFFDKNIIKALTKADKRKGAENRRRHGRTRGAIITCYWGEPGWNAAQGWARQRLLLRPRPGSGEDAIPPEVEVEAEPWGRARRSPPSEAEVEVEPWGRARRRPPPEVEAQGRARRSFLLRLRLIVAIVSLTLAGGTAVGEGRATLSPYQVGQWKVEVTAVTSTLPTEARVPG

SEQ ID NO: 75217 - protein, 87 aa, Zea mays
  Coding DNA Sequence Number=SeqID_33438
MEQVTQGNKCDGVGDGVAGGNGGGCAAKGWRGVAVVRCKGGVGQCFDSHGRSFLLSDRIGSSVAYCRLQGALAQSEEKLHYPMHAED

SEQ ID NO: 75218 - protein, 50 aa, Zea mays
  Coding DNA Sequence Number=SeqID_33439
MEGQCFDSHDRSFLLSDWIGSSVAYSMLQGALAKVKKNFTTQCMQRTGHN

SEQ ID NO: 75219 - protein, 237 aa, Zea mays
  Coding DNA Sequence Number=SeqID_33440
  Gene Ontology: Mol. function=helicase activity
  Homolog annotation: Hit_ID=Q1EPC6; Match level="QueryCoverage=56%, HitCoverage=8%, E-value=1e-46, Identity=65%"; Hit description=DNA helicase homolog, putative
MTEGADVGMQQQITPNVTTNDADEGVLFVENHDEDVLFEEDDDEEDGYLFAGQDCESIEDIEIDETQDAFTVTPDVPDPYDKVYSNIPEETHSLDIVADRVYCKAKKFHMTTNMNCGIYTFRAHGMMYHNVRSFGREAGAEHKHLELYFYDDDPSLEHRYRKCRQDQLEKDKVVIKQLVEILKGNPYSEHLRSMGHVDNIEDYHIALNLDQMLNHNLYNAPITSEVAAVWIEGSERR

SEQ ID NO: 75220 - protein, 1218 aa, Zea mays
  Coding DNA Sequence Number=SeqID_33441
  Gene Ontology: Mol. function=helicase activity; Biological process =viral genome replication
  Homolog annotation: Hit_ID=Q1EPC6; Match level="QueryCoverage=94%, HitCoverage=78%, E-value=0.0, Identity=62%"; Hit description=DNA helicase homolog, putative
  Pfam annotation: Domain name=DUF889; Domain location=994-1203; Score =316.9; E_value=3.6e-92; Accession=PF05970.5; Description=Eukaryotic protein of unknown function (DUF889)
MTEGADVGMQQQITPNVTTNENHDEDVLFEEDDDEEDGYLFAGQDVPDPYDKVYSNIPEETHSLDIVADRVYCKAKKFQYEPPRFCCRNGQIDLAPFETPPQLRRLWECSDADARHFRDNIRFFNGHFSFTSLYCCLDSMTTNMNCGIYTFRAHGMMYHNVRSFGREAGAEHKHLELYFYDDDPSLEHRYRKCRQDQLEKDKVVIKQLVEILKGNPYSEHLRSMGHVDNIEDYHIALNLDQMLNHNLYNAPITSEVAAVWIEGSERRGELGWHANIPKSNVSMDEVDAYREQHRIRDANDDDTVLHGKRLFQQFAVDTYIKIESSRLDFIHKNQDRLRADLYKGLVDSLHEGENRVDKIGKRTVLSTSFIGGPRDMRRRYMDAMVLDRSDLVVCIFRAKLEELKKRLTKHHILRKIRAYVYVVEFQKRGLPHVHFLLIMQRKYKLTCPDQYDLLISAEIPDKKKYPELYKMVIKHMMHGPCGLLNPKCPCTKGPASCKNHYPRAFSNATSQGKDSYPIYRRRDDGRKETVRGCELDNRWVVPYNPYLLRLFNCHINVEACGSIKAIKYLFKYIYKGHDRASVAVTDANKVDGDVDEIKQYRDARWVTPPEALWRIFSFDLSQNFPPVMQLSMLTTYFEANRLHEEARSILYCDFPEWYTLQQGKVWQRRKRNTGGQVGRIVSAHPAEGERFYLRLLLNHVMGATSYADLRIVDGDTLPSFREAAQRSGLLEADDTIDECLNEAAIYQMPSALRRLFATILVYCKPNDVAELWQRHLDSMSEDYHRSTQSKTHVQQMVLIDIRNILQSMGKDIKTFPLPTIIDKYDDSHGTDREIYEEESIEPTAEDVAMKETLNEEQRSAYDKILSAVDTNNGGVFFVDGPGGTGKTYLYKALFAALRSQDKIAVATATSGVAASILPGGRTAHSRFKIPLTINDSVVCSFTKQSRTAKLLQKASLIIWDEASMTKRQAIEALDNSMRNIMGRPRLPFGGRTVVFGGDFRQVLPVVRKWSRAQIVAASLRSSYLWESMCHLKLVQNMRAQSDPWFAEYLLHAGGGTEEANNDGDVHLPNEVCVPYTGNDRDLDRLIDDIYPNLNENMSNTSYITSRAILSTRNDWVDMINMRMIDRFQGKQMMYHSFDTAVDDPNNYYPSEFLNTLTPNGLPPHILKLKVGCPIMLLRNIDPANGLCNGTRIADDLAPAMSAVVAGGVAAVLWVGRRG

SEQ ID NO: 75221 - protein, 411 aa, Zea mays
  Coding DNA Sequence Number=SeqID_33442
  Gene Ontology: Mol. function=helicase activity; Cellular component =membrane; Biological process=protein amino acid phosphorylation
  Homolog annotation: Hit_ID=Q1EPC6; Match level="QueryCoverage=93%, HitCoverage=23%, E-value=1e-156, Identity=68%"; Hit description=DNA helicase homolog, putative
  Pfam annotation: Domain name=DUF889; Domain location=187-396; Score =316.9; E_value=3.6e-92; Accession=PF05970.5; Description=Eukaryotic protein of unknown function (DUF889)
MGKDIKTFPLPTIIDKYDDSHGTDREIYEEESIEPTAEDVAMKETLNEEQRSAYDKILSAVDTNNGGVFFVDGPGGTGKTYLYKALFAALRSQDKIAVATATSGVAASILPGGRTAHSRFKIPLTINDGVVCSFTKQSRTAKLLQKASLIIWDEASMTKRQAIEALDNSMRNIMGRPRLPFGGRTVVFGGDFRQVLPVVRKWSRAQIVAASLRSSYLWESMCHLKLVQNMRAQSDPWFAEYLLHAGGGTEEANNDGDVHLPNEVCVPYTGNDRDLDRLIDDIYPNLNENMSNTSYITSRAILSTRNDWVDMINMRMIDRFQGKQMMYHSFDTAVDDPNNYYPSEFLNTLTPNGLPPHILKLKVGCPIMLLRNIDPANGLCNGTRIADDLAPAMSAVVAGGVAAVLWVGRRG

SEQ ID NO: 75222 - protein, 245 aa, Zea mays
  Coding DNA Sequence Number=SeqID_33443
  Subcellular localization annotation: CTP_CleavageSite=29; ConfidenceScore=5.13e-01
MAGLHLHGPTARRLHQFFYTGGGGAPLARAAMGTSFSRSEANMAPGRKGIRSIREPPPAEITPTDYEKQRAENVMRNNQMFQRLGINQLRIMMTATRARSKYDGPHESGSLFDGEDSEGSEQEEDSHVAKGVLGHNPTHVADKTTQGTRGSKRVVAPDVPGQEIRFTRQRSADINQQSSLSLTTTTHASSRATTNQASTQNLTTATRFTSSVATEQDYTEGLNTAAQPTSPIQAEVNDHNRDEGK

SEQ ID NO: 75223 - protein, 212 aa, Zea mays
  Coding DNA Sequence Number=SeqID_33444
  Gene Ontology: Mol. function=nucleic acid binding
MTTATHFTSSVATEQDYTEDLNTAAQPTSPIQAEVNDHNRDEGKGLGTKIPIQISDGKRRQDPPIQAAKFALEGGIILRQHIPIFPHCKEYKKQENEDKITDYIGKLVGQFTMDVESNAVKDACVDMLKGGQRQMRYRLKKYFTGDPANQVRTTSPVSCMTDDQWRELVQMWSSPNHKLNAWNTTGFTITGSTSRYTQSRMGKISSNLSRRK

SEQ ID NO: 75224 - protein, 226 aa, Zea mays
  Coding DNA Sequence Number=SeqID_33445
  Subcellular localization annotation: CTP_CleavageSite=46; ConfidenceScore=5.04e-01
MDVDSNSVKDACVGMLKGGQCQMRYRLKKYFTGVPANQVRTTSPVSCMTDDQWRELVQMWSSPNHKRQENIKMSNLVQLIFSRRCIVARKKGFSEVVQKAIGDMEAMVATPVEDGQLAKSATKVVSNVLPGSSKFLHNAGLLPSSKRSNTGTVLARMQELQSQLDNERREKDGLREDMDTLKAKSESSEATIANQSTKIADLKKSLAENSILLRQILSISRDQVNP

SEQ ID NO: 75225 - protein, 351 aa, Zea mays
  Coding DNA Sequence Number=SeqID_33446
  Subcellular localization annotation: CTP_CleavageSite=76; ConfidenceScore=5.69e-01
MEAARQHPPCPSPHDRTGTVPRPPRPGSRPRRGSRAGHDRQSRPAPAVPSPMSRPVILSPSSSSPALPSTRRAPIHALYRSPSIGASDEDPHLSRPFVVGAPHRSPRIVGAPLHSCKDPGGVETPGPVDLGKLESDAQKEDTYYVLMQIQSRVVSFEEQEPCESVYCAILCFGEEEWGGGVGVAQAHITAQPQPLSMDGETELRGAVFAGFRVGIWGGGAAGQSHPFSWLDAAISEPYYFLHHLAFFSYFAARSTALSADDRGELHDRLLRREIQAVLVFLVLFVVKTIVEVEKTELEEEADVLSEIEEEKLESELDGEEGSFEVAKLRHGVRKQSPDAELVVLPPPFWGA

SEQ ID NO: 75226 - protein, 236 aa, Zea mays
  Coding DNA Sequence Number=SeqID_33447
STSTTATEASAPAAGGGAAGQSHPFSWLDAAISEPYYFLHHLAFFSYFAARSTALSADDRGELHDRLLRREIQAVLVFLVLFVVKTIVEVEKTELEEEADVLSEIEEEKLESELDGEEGSFEVAKLRHGVRKQSPDAELVVLPPPFWGADPNSVFQVFLVPAPKLLVASRSLIDSMVIICVGQSAQVHLGQQGAAGFHNTGVSSLCMLHEIKQTIQFVGETTGQKAILHFIHSMVP

SEQ ID NO: 75227 - protein, 134 aa, Zea mays
  Coding DNA Sequence Number=SeqID_33448
MAFILIYIPIWLYLENEEESEVTQEKTSPPLESQAETWLYFDICLMIEDPFNWSHASSWHTLESLFLSRVRKRQSFVAFAPRWYLMKKNKNEDTGGLGPPHRIFLFDNYLGGSVTAISWEEFLPPLICVLSTRL

SEQ ID NO: 75228 - protein, 373 aa, Zea mays
  Coding DNA Sequence Number=SeqID_33449
MAFILIYIPIWLYLENEEESEVTQEKTSPPLESQAETWLYFDICESEPDSPTNKGKPRRDGFYLQEYFHLEQWWDLTAKFPVMLFSSLGTETILRMEHTLESLFLSRVRKRQSFVAFAPRWYLMKKNKNEDTGGLGPPHRIFLFDNYLGGVFASLDMCTQHSFIALMNQQEAPTGVGEFLRDFGVLVVLWRLLQEVGYTEAPKYQWSRTVLRGQPWYEVVVRIPERARKPSWPYWMFHAEGMTPWEGAQVAALEVLTTICYQKREEIQATSMRLFPAVALSDPLVYHHQARLMESIPIGQDSVESASARVLMAVLELQLTRGHSRQKWQQLYTGSYAAFKMMEKAKNSACTQAQERLEETKVQAEQVIGLEHQ

SEQ ID NO: 75229 - protein, 457 aa, Zea mays
  Coding DNA Sequence Number=SeqID_33450
  Gene Ontology: Mol. function=protein binding; Cellular component =anchored to membrane; Biological process=protein amino acid phosphorylation
  Homolog annotation: Hit_ID=Q9SSD1; Match level="QueryCoverage=75%, HitCoverage=68%, E-value=1e-42, Identity=35%"; Hit description =Protein TOO MANY MOUTHS precursor
  Pfam annotation: Domain name=LRRNT_2; Domain location=23-61; Score =12.5; E_value=0.042; Accession=PF08263.3; Description=Leucine rich repeat N-terminal domain
  Pfam annotation: Domain name=LRR_1; Domain location=132-155; Score =6.6; E_value=17; Accession=PF00560.23; Description=Leucine Rich Repeat
  Pfam annotation: Domain name=LRR_1; Domain location=157-180; Score =12.0; E_value=1.6; Accession=PF00560.23; Description=Leucine Rich Repeat
  Pfam annotation: Domain name=LRR_1; Domain location=182-204; Score =14.3; E_value=0.44; Accession=PF00560.23; Description=Leucine Rich Repeat
  Pfam annotation: Domain name=LRR_1; Domain location=206-228; Score =14.5; E_value=0.38; Accession=PF00560.23; Description=Leucine Rich Repeat
  Pfam annotation: Domain name=LRR_1; Domain location=230-252; Score =15.9; E_value=0.15; Accession=PF00560.23; Description=Leucine Rich Repeat
  Pfam annotation: Domain name=LRR_1; Domain location=254-276; Score =14.4; E_value=0.41; Accession=PF00560.23; Description=Leucine Rich Repeat
  Pfam annotation: Domain name=LRR_1; Domain location=278-300; Score =7.4; E_value=12; Accession=PF00560.23; Description=Leucine Rich Repeat
  Pfam annotation: Domain name=LRR_1; Domain location=302-324; Score =9.8; E_value=4.2; Accession=PF00560.23; Description=Leucine Rich Repeat
  Pfam annotation: Domain name=LRR_1; Domain location=326-348; Score =18.0; E_value=0.034; Accession=PF00560.23; Description=Leucine Rich Repeat
  Pfam annotation: Domain name=LRR_1; Domain location=350-375; Score =3.2; E_value=72; Accession=PF00560.23; Description=Leucine Rich Repeat
  Pfam module annotation: Pfam domain module=LRRNT_2::LRR_1::LRR_1::LRR_ 1::LRR_1::LRR_1::LRR_1::LRR_1::LRR_1::LRR_1::LRR_1; Domain location
MLPALIALLLSLLPAVADAASMDPTERETLFRVMEAVSSDRDWRVESPDPCGGPWPGLECKPAADAGAARMHVTRLDFGVEPNPTCKDSASFPPEVFTLPHVQSLFFVDCFTNPAATTALALPPPANLSATGLQQLSIRANPALSGVMPPALASLRSLQVLTISQNGLVRGEIPPGIGDLTSLLRLDLSYNSLSGPVPSQIGQLKSLVGLDLSYNSLSGAIPSRLGELRQLQKLDLSSNNLTAGIPDAVANLTSLTFLALSNNGLTGRFPPGISGLRSLQYLIMDSNPMGVPLPSELGSLARLQELRLAGSGYSGPIPDAFGQLASLTTLSLQDNNLTGPIPAALSRLGRMYHLNLSNNALGGAVPFDRAFLRRLGGNLDLSGNSGLCLDDRSALRGIGACRGGGDGGTPMSSSARTSSGSRGVPAGAINPRVAGLANLRYPSRVAGVGTGLILISQ

SEQ ID NO: 75230 - protein, 156 aa, Zea mays
  Coding DNA Sequence Number=SeqID_33451
MKRKTLSQENNEENQDQTRDGNEFKTRGYRDYKLVPARLMLNPYPHPLLVTGSVCYPNPLPAGLWHLRSTQTHNAHQYTTHTQAWALDANCSSVGDLEWGKEGRREEDDSVPWMSGFIVYLPPVHGAGTMVRVPTLEGKRGTWGSSGRPKDPSMMV

SEQ ID NO: 75231 - protein, 241 aa, Zea mays
  Coding DNA Sequence Number=SeqID_33452
  Gene Ontology: Mol. function=nucleoside-triphosphatase activity; Cellular component=membrane; Biological process=proteolysis
  Homolog annotation: Hit_ID=Q5Z9Q8; Match level="QueryCoverage=92%, HitCoverage=58%, E-value=2e-69, Identity=65%"; Hit description =Putative spastin protein
  Pfam annotation: Domain name=AAA; Domain location=122-240; Score= -0.7; E_value=0.00024; Accession=PF00004.19; Description=ATPase family associated with various cellular activities (AAA)
  Pfam annotation: Domain name=AAA_3; Domain location=122-233; Score= -14.3; E_value=0.012; Accession=PF07726.2; Description=ATPase family associated with various
  Pfam module annotation: Pfam domain module=AAA::AAA_3; Domain location=122-240::122-233
MGSSEPSSRSVQNLVLYAASAALSCLVLLAGLRHLDPNRAASQKAQQQKKEIAKRLGRPLVSTTPYEDVIACDVINPDSIDVEFDSIGGLDKVKQALYELVILPLRRPELFASGKLLSPQKGVLLYGPPGTGKTMLAKAIARESRCRLHQCQDLQSHEQVVRGRAEARLAHKLQPAIIFIDEVDSFLGQRRTTDHEAMTNMKTEFMSLWDGFTTDRESFYTLPAAMKVDVQLTFVDNDVNL

SEQ ID NO: 75232 - protein, 300 aa, Zea mays
  Coding DNA Sequence Number=SeqID_33453
  Gene Ontology: Mol. function=DNA binding; Biological process =regulation of transcription
  Homolog annotation: Hit_ID=Q10PU3; Match level="QueryCoverage=45%, HitCoverage=15%, E-value=2e-47, Identity=66%"; Hit description=No apical meristem protein, expressed
  Pfam annotation: Domain name=NAM; Domain location=147-277; Score= -13.9; E_value=3.3e-06; Accession=PF02365.6; Description=No apical meristem (NAM) protein
MEVMRQWRLDLEEDEARRRSDETRPRDGVLAAVFSLAHKLQPAIIFIDEVDSFLGQRRTTDHEAMTNMKTEFMSLWDGFTTDQSKRLTTDKKTLQAQLSVSYRAPAQTSTFDIFGDWQDISQPNFEANPPDGVLAVPLLRHQSWPGLPRGVEFNPSDSDLLWHLAAEVGNALAERHPFINEFIKFVDDVREFICTHPQHIPGVRQDGRASYFFHRSFEPYINENDVNNCWKKIGSHISIILDGTLMGCKEVFALYADMPSDKRSQETDWRLHQYHLQKHSEGRVRDSGVENIPCITEQSV

SEQ ID NO: 75233 - protein, 107 aa, Zea mays
  Coding DNA Sequence Number=SeqID_33454
MMLQLGGGVFKIKLDVVGSIMGHDGFHIEKDVPLPDRAGDLHEKRVSVSPSESIKDRLDVGLMIEDLLTGHMPHHGVRKQQIFVAFVPRWCLRKKTKSEASGGSVLL

SEQ ID NO: 75234 - protein, 143 aa, Zea mays
  Coding DNA Sequence Number=SeqID_33455
MSSDSDRDNDKKGKKKEKKRYYKKGGDAHMCREWDSDESSTDSSSDEDAANIAINKAFSSPTSATNASWQRMAKRRSFRTENDSLISKAKELNVCNDSISYDRTSQAPPWNKSNKSLLLPHLQQHGFKNPEYGVYFRKSYPSK

SEQ ID NO: 75235 - protein, 95 aa, Zea mays
  Coding DNA Sequence Number=SeqID_33456
  Gene Ontology: Mol. function=DNA binding; Cellular component =ribonucleoprotein complex
  Homolog annotation: Hit_ID=O80401; Match level="QueryCoverage=92%, HitCoverage=18%, E-value=6e-21, Identity=65%"; Hit description=SAR DNA binding protein
MGNRANAINLDFSDVIVDIYILSDEELETYLKVIAVISMGTEVIEHDLLNIRELYDHVLALLYDYLRSKMNTITPILTALVGESVGAILCMVEVW

SEQ ID NO: 75236 - protein, 277 aa, Zea mays
  Coding DNA Sequence Number=SeqID_33457
  Gene Ontology: Mol. function=DNA binding; Cellular component =ribonucleoprotein complex
  Homolog annotation: Hit_ID=O80401; Match level="QueryCoverage=66%, HitCoverage=39%, E-value=9e-34, Identity=54%"; Hit description=SAR DNA binding protein
  Pfam annotation: Domain name=Nop; Domain location=50-154; Score= -13.6; E_value=2.2e-06; Accession=PF01798.8; Description=Putative snoRNA binding domain
MGNRANAINLDFSDVIVDIYILSDEELETYLKVIAVISMGTEVIEHDLLNIRELYDHVLALLYDYLRSKMNTITPILTALVGESVGAILCMVEVCSFFGFIQSSKEKHSTPKYGLIYHASSIGKASQKHNGKNLGLYLQKLLLLSDRMPLVLMRTTPLALRVDSRWPCDMLLLNNLRHSFKLLKDQQTICQRWIPCLEIVVPLGLIYGSDFENPDLNLEVLCAHNLTLHEQVVTVGLESTLVAEDLNDCAFVYGFLSFLDKISCVIILFVLELYGAK

SEQ ID NO: 75237 - protein, 83 aa, Zea mays
  Coding DNA Sequence Number=SeqID_33458
MAVGVVTYSLRMDVTTRERAVKYEEIRPISYLLTEAKEAIDKGTVVEVLRYQRALQPNRHDLLMQCEIVSTQNWQDWTCSVAC

SEQ ID NO: 75238 - protein, 414 aa, Zea mays
  Coding DNA Sequence Number=SeqID_33459
MDKDRQDAARKRRAVTRVGDPMHEVKQARGGAKSIAPGSSKPPPAAKPAVPRPSKSSAGPRAAASSAGKLPSAEPAKERRPPSPVRTDEAAAGGADFDMDSCVDDYLVGSGARQLAVVPGLVAGYFAYGGGVERRADAFADHVASSALTSEFAAERQRLEGRIKRLRVQHVDVVRDKSVAENKSRRLSESLRDRLDKTKTSTCVKVEQTHTQLVDTYQELGARTAPFEAPGQEVGLRFLGWLQEELEVLPTIVTGLMSFASLVTCEGTVNALSHEGCGHFEAFDQSDEGFEREIFQFEDPMLKSSAGALFDRMWGPHGRETVWERSDRAMDQMAHDEEVEDLGDLDSMLPEASGVELAPPSDAGEGPSATPAPTRAGEDPAPATVLMGEDALKVVGEPAAEDPAASAGPSQVAE

SEQ ID NO: 75239 - protein, 119 aa, Zea mays
  Coding DNA Sequence Number=SeqID_33460
MDIGMDDYRVGGVMMFDAHMGRGLVGSDAGQLAIVLAPVAATPAALAAEAKGTSQDPWSKFCASGEISSVAAAKDVAGSISQQLKHAVAFADHVASSALTSEFAAERQRLEGRIERLRA

SEQ ID NO: 75240 - protein, 208 aa, Zea mays
  Coding DNA Sequence Number=SeqID_33461
  Homolog annotation: Hit_ID=Q9ZQW0; Match level="QueryCoverage=49%, HitCoverage=65%, E-value=3e-41, Identity=87%"; Hit description =Response regulator 1
  Pfam annotation: Domain name=Response_reg; Domain location=110-207; Score=10.3; E_value=0.00056; Accession=PF00072.14; Description =Response regulator receiver domain
  Subcellular localization annotation: CTP_CleavageSite=52; ConfidenceScore=5.16e-01
MTSEADRHKGGSVRAQTAQQRRASRRPTAALHQERATTTLRGRRASGDGAVEADGRRQRTLGPATTAGCPVRLCDGTAAAAPASVAPSLAPKANDSRKEVVPVDASELEKHVLAVDDKSVDRAAIARILRGSRYRVTAVESATRAPELLAMGLLPDVSMIITNYWMPGMTGYELLKRIKESAALRGIYVVIMSSMTIVIYTFSNKILR

SEQ ID NO: 75241 - protein, 493 aa, Zea mays
  Coding DNA Sequence Number=SeqID_33462
  Homolog annotation: Hit_ID=Q75GM0; Match level="QueryCoverage=29%, HitCoverage=22%, E-value=2e-40, Identity=63%"; Hit description =Putative phytosulfokine receptor kinase
  Pfam annotation: Domain name=Pkinase; Domain location=130-352; Score=- 85.0; E_value=0.0017; Accession=PF00069.15; Description=Protein kinase domain
  Pfam annotation: Domain name=Pkinase_Tyr; Domain location=116-311; Score=-129.8; E_value=0.00016; Accession=PF07714.7; Description =Protein tyrosine kinase
  Pfam module annotation: Pfam domain module=Pkinase::Pkinase_Tyr; Domain location=130-352::116-311
  Subcellular localization annotation: CTP_CleavageSite=50; ConfidenceScore=5.05e-01
MGVGVAIPLRRRLCPPLWARMATPPRLSLAACERPPRVFSTWRHLSPGTLASSAGCLASVFGPQPVEEERMDLVSRWLFQESLSFGDLPSLFYFVYALFSIFCLVLLVVCVVIFSLKIGKRLLHDRRVDGTTYKAVLEDGTTVVVKRLKEVVAGKREFEQQMELIGKVPLCCFACYFTCFANLLSESLTRHIIHISVEMKLYGNKAAGRTPLDWETRVKITLGIARGMAYLHSVGSGVKFIHGNIKSSNILLSQELGACVTEFGLAQLMSTPHVHPLHTEWLTFTPAFGFVGIAGCLEEDDGGLFPPPPAIEEGKSVADKGLPRNCGGREGGGAIRAATTPHHLGEAVASYLSSSRHIALINVRYNLVFGSPDVIAVECKKSHASWIVLDNLCKYSLHILRASGPQSGPRVHNYSVPRRHYKNTPRRQGLGFSGGGGSLGHASDGDPGGQQRCRLEAGDRRRRSTRNERQRRSEAGGQAVTALSKRTDDGSAP

SEQ ID NO: 75242 - protein, 69 aa, Zea mays
  Coding DNA Sequence Number=SeqID_33463
MDTLQEAPFRRLNSKVEMQTLVDDAGFLPREPWAFSTRKWCSASGSSRTLPAVSTIELLAKNVVGLVPS

SEQ ID NO: 75243 - protein, 168 aa, Zea mays
  Coding DNA Sequence Number=SeqID_33464
MDDKHLGRVVRPRPIDQANNVRGGDNDGHASCTVKEYGEASVVEADVEDTSSIVETAESVREELEAEHHLRVEKAHGSLRIYSIEHGREKRQIQTITVATKGVAQPVITVTREGRSSRTMEPRRRGTGGTRRAASADPSYLPVAVTTTASEEEARTQWPSHNRHHDDV

SEQ ID NO: 75244 - protein, 1242 aa, Zea mays
  Coding DNA Sequence Number=SeqID_33465
  Gene Ontology: Mol. function=binding; Cellular component=ubiquitin ligase complex; Biological process=regulation of transcription, DNA -dependent
  Homolog annotation: Hit_ID=UPI000051A8F0; Match level="QueryCoverage =85%, HitCoverage=85%, E-value=0.0, Identity=41%"; Hit description =PREDICTED: similar to Cullin-associated NEDD8-dissociated protein 1 ...
  Homolog annotation: Hit description=(Cullin-associated and neddylation-dissociated protein 1) (p120 CAND1) isoform 1
  Pfam annotation: Domain name=HEAT; Domain location=1064-1095; Score =9.0; E_value=3.4; Accession=PF02985.12; Description=HEAT repeat
  Pfam annotation: Domain name=HEAT; Domain location=135-170; Score =0.7; E_value=35; Accession=PF02985.12; Description=HEAT repeat
  Pfam annotation: Domain name=HEAT; Domain location=256-292; Score =13.4; E_value=0.8; Accession=PF02985.12; Description=HEAT repeat
  Pfam annotation: Domain name=HEAT; Domain location=337-376; Score =4.1; E_value=13; Accession=PF02985.12; Description=HEAT repeat
  Pfam annotation: Domain name=HEAT; Domain location=457-492; Score =1.6; E_value=28; Accession=PF02985.12; Description=HEAT repeat
  Pfam annotation: Domain name=HEAT; Domain location=631-669; Score =9.5; E_value=3; Accession=PF02985.12; Description=HEAT repeat
  Pfam annotation: Domain name=HEAT; Domain location=674-708; Score =1.5; E_value=28; Accession=PF02985.12; Description=HEAT repeat
  Pfam annotation: Domain name=HEAT; Domain location=714-750; Score =3.2; E_value=17; Accession=PF02985.12; Description=HEAT repeat
  Pfam annotation: Domain name=HEAT; Domain location=904-939; Score =12.8; E_value=1.2; Accession=PF02985.12; Description=HEAT repeat
  Pfam annotation: Domain name=HEAT; Domain location=96-132; Score=4.4; E_value=12; Accession=PF02985.12; Description=HEAT repeat
  Pfam annotation: Domain name=HEAT; Domain location=984-1020; Score =18.8; E_value=0.02; Accession=PF02985.12; Description=HEAT repeat
  Pfam annotation: Domain name=TIP120; Domain location=1097-1206; Score= 27.7; E_value=4.2e-08; Accession=PF08623.1; Description=TBP (TATA -binding protein) -interacting protein 120 (TIP120)
  Pfam module annotation: Pfam domain module=HEAT::HEAT::HEAT::HEAT::HEA T::HEAT::HEAT::HEAT::HEAT::HEAT::HEAT::TIP120; Domain location=1064
  Pfam module annotation: Domain location=96-132::984-1020::1097-1206
MGRRARGSAWGRTALIAAAVGRRVGDPRALIGGDMVSIEELVALMAGGFEAWLAKMANLNITNILEKMTGKDKDYRYMATSDLLSELNKESFKADQDLEPKLTITVLQQLEDASGDVSGLAVKCLAPLVKKVGEDRVVEMTNKLCDKLINGKDQHRDTASIALKTIIAEVTTPSLAEKILLSLAPQLIKGVNTPQKLFNSLDIINYILSSAMKYFWNDIIAWQFHHLLWQAKSAEIKCECLDILADVLHRFGNLITKDHEYMLNALLSQLGSNPASVRKKSISCIASLAPSLSDDLLAKATLQVVQLLKNRGAKSEITRTNIQMIGSLSRSVGYRFGPHLAETVPLLISYCTSASENDEELREYSLQALESFMLRCPRDISPYCEGILNLALEYVSYDPNFTDSMDEDTDEEAKEEDDDDESANEYTDDEDASWKVRRASAKCLSAIIVSRPEMLSKMFLEACPKLIERFREREENVKMDIFNTFIELLRQTGNVTKGQGDIDESSPRWLLKQEVPKVVKSINRQLREKSIKTKVGAFSVLKELVVVLPDCLADHFGSLVPGIEKALNDKSSTSNLKIEALVLTRLVMASHSPSVFHPYIKALSAPILSAIRDRYYKVTAEALRTTSVDFKPYIGPIYNAILGRLANQDQDQEVKECAISCMSLVVSTFGDGLERELPACLPILVDRMGNEITRLTAVKAFSVIANSPLRIDLSCVLDHVVSELTAFLRKANRALRQATLGTLNSLVVTYGGQIGSSSYETIIAELSTLISDMDLHMTALALELCCTIMVDRKSIQNVGLAVRDKVLPQALVLIRSALLQGQALQALQRFFASLVQSANTSFDALLESLISAAKPSHSAAGDQKCASTIEMLKGILKDDSTTNSAKQHMALLCLGEIGRRKDLSNHVQIENIVIESFQSPFEEIKSAASYALGNIAVGNLSKYLPFILDQIDNQQKKQYLLLHSLKEVIVRQSVDHTGQSELQDSNIEKILALLFNHCESEEEGVRNVVAECLGKISLIEPKKLVPALEVRTSSPAANTRATVAIAIKYSIVERPEKIDEIMYSKISTFLMLIKDSDRHVRRAAVLALSTAAHNKPNLIKGLLPEILPLLYDQTVIKVVKKTPEPLPHPYTAASKPISTISVLDSIVEPIEKTISHKPKGDAVKQEVDRNEDMIRSALRAISSLSRISGSDYSIRFKNLMNKITATPALAEKYNSSPLAYIGKVTPTVQEGIKQQAPLKPFT

SEQ ID NO: 75245 - protein, 302 aa, Zea mays
  Coding DNA Sequence Number=SeqID_33466
MKRVGIVGRTGVLQIAVERWFLRWVSCAVIVTRPHHGSARCPRSSSPTRPAISTPFCSVDNAPPPINARASSSINARGSATLLPTAAAINAVLPHADPWAFLSTFAAMEGRLYHAVDPPLSTAPWMADLPVPCPRCPRITSSSSRRPRHHHHQVAVPESLGVRRTTQMAGRSTTGLGPSTGSFLRPWLALVALGCPPHRRALHVPHREGPTFSDLHLAPGKLVTATLLSLITSLGTSSLPLPRSTRGGATPPTVKGAPARGNWLAHHITRVMADLDFYIGEEALAPSRASSSHSLSYPICNG

SEQ ID NO: 75246 - protein, 484 aa, Zea mays
  Coding DNA Sequence Number=SeqID_33467
  Subcellular localization annotation: CTP_CleavageSite=86; ConfidenceScore=5.21e-01
MALPFTGLLLSCPCRLLTFHSSPGFSEAKYSARSHAVCLPPPLGCASPPAMASAVASSVHAGPAAAGALTFGWLGPRLSLGGRDASATAAEAEEPAAASNAAEPAISKDFIDFEFCLGVSSTTMLPADELFADGKLLPLRPPQAAAARGVERRRDTALVEEVPAAPELSRAARLSAPEAALDLDPYVFSPKAPTCSSRWRELLRLRKAGQTPSASASPPASPAATPSSRASSSSAARSLKLLLQRSGGGRVADLAAAPLLLRDSSDSEASLSLTSSRYSLSSSSSSSGHDHDDFPRHSLDSVDPTPRPRIRLVRSHPQAPQPQPHPPVSASASAPAPAPARAAHSPARRRPSPSPSPPPPQQQQQQASVISVDSPRMNASGKIVFQGLERSSSSPAGSAHSSMRSRSRSRSRVMDRSYSAGVRATPVVLNVPVCSRPVFGFFKDKKEAAAAAARSRSALGRRTTTTTTAAAGGVGGRDLGNGPQ

SEQ ID NO: 75247 - protein, 434 aa, Zea mays
  Coding DNA Sequence Number=SeqID_33468
  Subcellular localization annotation: CTP_CleavageSite=36; ConfidenceScore=5.08e-01
MASAVASSVHAGPAAAGALTFGWLGPRLSLGGRDASATAAEAEEPAAASNAAEPAISKDFIDFEFCLGVSSTTMLPADELFADGKLLPLRPPQAAAARGVERRRDTALVEEVPAAPELSRAARLSAPEAALDLDPYVFSPKAPTCSSRWRELLRLRKAGQTPSASASPPASPAATPSSRASSSSAARSLKLLLQRSGGGRVADLAAAPLLLRDSSDSEASLSLTSSRYSLSSSSSSSGHDHDDFPRHSLDSVDPTPRPRIRLVRSHPQAPQPQPHPPVSASASAPAPAPARAAHSPARRRPSPSPSPPPPQQQQQQASVISVDSPRMNASGKIVFQGLERSSSSPAGSAHSSMRSRSRSRSRVMDRSYSAGVRATPVVLNVPVCSRPVFGFFKDKKEAAAAAARSRSALGRRTTTTTTAAAGGVGGRDLGNGPQ

SEQ ID NO: 75248 - protein, 151 aa, Zea mays
  Coding DNA Sequence Number=SeqID_33469
MEWSGSTAALEPRRALPAAAMPNYPAQMMRQQEKNKASQQEVAITVAVGENRQLPMEHMSRRRSTSTTNSSRRRWSPELVDGGKGVAELRLLCTTVKSEWREPNGEHRGEGVLTMRAWWVLLRCARNKGIGDDRAAPPVSEREIGSACERD

SEQ ID NO: 75249 - protein, 151 aa, Zea mays
  Coding DNA Sequence Number=SeqID_33470
MEWSGSTAALEPRRALPAAAMPNYPAQMMRQQEKNKASQQEVAITVAVGENRQLPMERMPRRRSTSTTNSSRRRWSPELVDGGKGVAELRLLCTTVKSERREPNGEHRGEGVLTMRAWWVLLRCARNKGIGDDRAAPPVSEREIGSACERD

SEQ ID NO: 75250 - protein, 372 aa, Zea mays
  Coding DNA Sequence Number=SeqID_33471
  Gene Ontology: Mol. function=protein serine/threonine kinase activity; Biological process=protein amino acid phosphorylation
  Homolog annotation: Hit_ID=Q6YXH1; Match level="QueryCoverage=41%, HitCoverage=38%, E-value=4e-33, Identity=48%"; Hit description =Putative calcium-dependent protein kinase
  Subcellular localization annotation: CTP_CleavageSite=39; ConfidenceScore=5.02e-01
MEGPTPPSRSPRSCSKEGNSDPAIPAPALLSRPPSWKVRSLSPSPRGCSKEGRSDPAIAIPARLHSPLAIPARLLQGRSDPAIAIPARLLQGRKVRHRHPRSGRFRSSTPARAMETVSRKRKGAPPVCSATRSLQDLASRKRAYRGSEPQQSHCTDAPVPAVRGSSRGAGSSGKVGCIDNATRIGWRKRLESEYDLGDEIGHGKFGFVRVCRPKAGTRGEEEFACKALPKNGGDTTHREVEIMQHLSGHPGVVTLSAVFEDTDAFYLVVSPTSPQWEIPILHAPARAMEPVSRKRKGAPPVSATSSERGQVNGDGIRQQHVRDRALLQGGTQNGELLVMDSMNSNIYRMALPLSQCAFAAYDYSGYGASTGK

SEQ ID NO: 75251 - protein, 120 aa, Zea mays
  Coding DNA Sequence Number=SeqID_33472
MAMAGSDLPWSSRAGMARGECSRAGMAMAGSDLPSLEQPRGDGERERTFHDGGRERRAGAGIAGSEFPSLEQLRGDRDGGVGPSMMAAERDVIVDITPQLITHNQRSKSDRYHKNKHSSV

SEQ ID NO: 75252 - protein, 49 aa, Zea mays
  Coding DNA Sequence Number=SeqID_33473
MGIGVNITRDIVEIGVGTWDVIVDITPQLITLNQRSKSDKYHKNKHSSV

SEQ ID NO: 75253 - protein, 318 aa, Zea mays
  Coding DNA Sequence Number=SeqID_33474
  Homolog annotation: Hit_ID=Q7XAB1; Match level="QueryCoverage=21%, HitCoverage=12%, E-value=4e-12, Identity=52%"; Hit description=AP2 domain-containing protein AP29
MADYLDYSRILEATDPSGIVDGLFSGHGNGRFLGSWSIGTSPVEEVGGGDPGPAEGGAGVAGHLPHRRGRRALLRRRRAKLNSPEDATAHRARDAEAAFAAARAGPPAALLDSQAVGDDMADYLDYSRILEATEPSGIVDGLFSGHGNGRFLGSGFEMGSVAAGADEGWWGRARAGATEHIHAHQRWAAPLLVSVLLSPLLISASLSFSSSRALLISFSPLPSAASAEPLFVEAPRGAPCPGWCGGRCCAVVVGGAFHRAWEGTRLWASARSAGGEIRGGCEGHPGVRRFRAGLACVVSPLHCNHQYHADFDIVGDHN

SEQ ID NO: 75254 - protein, 278 aa, Zea mays
  Coding DNA Sequence Number=SeqID_33475
  Homolog annotation: Hit_ID=Q2HW33; Match level="QueryCoverage=20%, HitCoverage=16%, E-value=6e-08, Identity=49%"; Hit description =Protein phosphatase 2C-like
MGPLEPTADFLKIITITQKRWSVALRCPEDTGGFAQEHFADLEDVYPKPLLELPCKLTAKEAECPYVATLFHHYIATISIMQTSIYATICMVSSLESTFHTCWKKFPSYIVSHQTHTTIRSCLNKKNNPRVVNVGDNHEAPLLNDGQRGAAALDRVQVVASRELVVHSGACDHVGLLLEVELTVANLLLVIDKRRQPRRGLYRGMRMGMSSAGGGNEKDKIKNENDRHGNGNGGRTREWPTTLTALIVVEIWQNLPYTHVMHADVAQSRCVTSLGPGC

SEQ ID NO: 75255 - protein, 169 aa, Zea mays
  Coding DNA Sequence Number=SeqID_33476
  Subcellular localization annotation: CTP_CleavageSite=26; ConfidenceScore=5.61e-01
MLVSDPKSGTSTRSSFFSVPRSEVLRASARGARLLSARGEELVQSSCRAGGRPGWSSGRRRLSLVAGSRRVHVLVRQPKVIQPVIAGHASTAALLEKVLSGLGGGPCPAVVAVDGGRRAVAGPIAAAVEVVIEVLIRLMLRGGFPFVEVHDRLAFVIVAGRVDRGGESK

SEQ ID NO: 75256 - protein, 533 aa, Zea mays
  Coding DNA Sequence Number=SeqID_33477
  Homolog annotation: Hit_ID=Q016F1; Match level="QueryCoverage=38%, HitCoverage=30%, E-value=1e-32, Identity=37%"; Hit description=[S] KOG1793 Uncharacterized conserved protein
  Pfam annotation: Domain name=IWS1_C; Domain location=308-491; Score =259.0; E_value=1e-74; Accession=PF05909.5; Description=IWS1 C -terminus
MAEEKSRHTVLGPPAVADRCQAGPTVRRTLLPGWAARLASSGGPKDEVWAQGFASRLAAVSMGDNYDDEGEPIVNLDEREPSPEHQPYEDLDDDLDGGGDWTRDRSPTPVHGDDGGAGSSSKPRKRLLKKGGGGGMPGDDGLDDFGLEDEDADPSAEARKRKGSSSLRDLARGGAGREKKAKKMRMEDDGRGRDTGMVRDRRGSGGRDSGGRDDQDDGEREIQELWDTIAGGESEDDQEGVRTVDDDNFIDDTGVDPADRYGSDNERHSPGRYAQAEEGEEDDEIERLFKGGKKKKKKNDRPRADIGLIVEQFIAEFEVAAEEDANLNRQSKPAINKLMKLPLLIDVLSKKNLQQEFLDHGVLTLLKNWLEPLPDGSMPNMNIRSAVLKLLTDFPIDLEQYDRREQLKKSGLGKVIMFLSKSDEETTANRKLAKELVDKWSKIDPEQIRARAKQAVQDQRRLKMNKKLQQLKAPKKKNLQASKLSVEGRGMIKRDEEHSAPLGTGALFANSLDRRAVCWMPLTPSTSGLDRTH

SEQ ID NO: 75257 - protein, 237 aa, Zea mays
  Coding DNA Sequence Number=SeqID_33478
MPRSLGVGWWPRGALQKYLRVIRRTQTPSTGSEGSMPPSGGIPLQIVPAGLGNVLGAASSHDIGSAVEEARHSAQVAVRLFARRNRRAGYMTCRPASFVLVHRMRSKPKGRTIAVRLDACRVAVHPFDHRFLRRWESACNRGAVACLACGGSPSSHFGLARVTCGTQPPCRRGRTLEYVSGDFAYDAKGCKQGGLPIKGDGSPGQWPCLRSPLMHRALPPFEPPDGVYWHRLALAVV

SEQ ID NO: 75258 - protein, 403 aa, Zea mays
  Coding DNA Sequence Number=SeqID_33479
  Subcellular localization annotation: CTP_CleavageSite=32; ConfidenceScore=5.47e-01
MPSFSPHALRPSTFRAPRWGILASPCSCYRWRSAASWRSALFSHRWASKIFVVQPGCIPSPMVSLVGRSKPGCGLRPTLSFKDLHHPCYGGGRAESGFYLPHGPAGRLFLQHSGERALTGLAEGANFGNTGPVDRKRRQLQRAWLAGSAGSFAASDAASCRLIRAWPSVHRAGDCCAVRTGESSKTPCAAWAAFVFLDCLVLTPARRLRAEAGASAIRRRGAGAWVAAVIGAEVVAAREGFSADETVGAIWSLLSRRPSGVEVVHTRGSGTGVPFVRGYTGFLPEKNNPRLLCDEPEPEAEVLARTEAELARKETSSARELAASQVKEDVAAAVGAWPRHPLARCWRPPLGGGPFAWVVVRGRARFHRGWKQRRGCCCSPCRCLNLQEQFVCSMRMFFTAVEA

SEQ ID NO: 75259 - protein, 68 aa, Zea mays
  Coding DNA Sequence Number=SeqID_33480
MEGDDVASDNGGGCAAKGGGGGVLQKGAWGGGSAHGGGLIPDFKDKLSSIFLGKVLFLLRWVKMRMEA

SEQ ID NO: 75260 - protein, 54 aa, Zea mays
  Coding DNA Sequence Number=SeqID_33481
MAVGALQKGAWVAVVRCKGGGTRAGGTGFKGKLPGIFLGKVLFLLRWVKMRMEA

SEQ ID NO: 75261 - protein, 105 aa, Zea mays
  Coding DNA Sequence Number=SeqID_33482
MPGFAPCSPRSDHDFDFPNDAGARCFRCAVYNYDGKRPRPSFQDESDTQSCAHGRHASFFSVSSGDYKDKDGVKGLYASENIIASCHWAYKGVEEDSTLEDPYFL

SEQ ID NO: 75262 - protein, 50 aa, Zea mays
  Coding DNA Sequence Number=SeqID_33483
MTHRECSEKCPAGKHATRTRLYASENIIASCHWAYKGVEEDSTLEDPYFL

SEQ ID NO: 75263 - protein, 75 aa, Zea mays
  Coding DNA Sequence Number=SeqID_33484
MPGFAPCSPRSDHDFDFPNDAGARCFRCAVYNYDGDYKDKDGVKGLYASENIIASCHWAYKGVEEDSTLEDPYFL

SEQ ID NO: 75264 - protein, 82 aa, Zea mays
  Coding DNA Sequence Number=SeqID_33485
MAGIAERRGRRALMAAAHLLPTPSTCAPSTSWGRCALMAASDPRNHGAEGEEGGGIHGNLPGNGSNLAAVAFGPTWLVQARG

SEQ ID NO: 75265 - protein, 209 aa, Zea mays
  Coding DNA Sequence Number=SeqID_33486
MAASDPRNHGAEGEEGGGIHGNLPGNGSNLAAVAFGPTWLVQARGGVNRDAAGVANHARIPPTSSRGAVPPDASRGRERILRRGRRRDHAGLDDGDERPSGARVWRARACVGESNDEGVCESGGERKGGEAEKGSAAMKRLSRRESRDAGHTRMRGHGRGLEGGGGGWGGSSATWDLRAPSKAWGGRWGRADRRARWGGTSGTFHRRRG

SEQ ID NO: 75266 - protein, 429 aa, Zea mays
  Coding DNA Sequence Number=SeqID_33487
  Homolog annotation: Hit_ID=Q7XH18; Match level="QueryCoverage=16%, HitCoverage=17%, E-value=3e-07, Identity=47%"; Hit description=F-box domain containing protein, expressed
  Pfam annotation: Domain name=F-box; Domain location=19-67; Score =16.7; E_value=0.083; Accession=PF00646.23; Description=F-box domain
MTSRNHRTLPGLEATEPERPAAALSIDLMEEIFLRVASPADLARASTACVSFRRIISDPSFLRRYRSIHPPLLLGLIGVAGFTPADPPHPSAALSRAVARAADISFDFLPRSRTANWRHSHPWYPCDVRDGRVLVKCIREEPVVYLDLAVCDPLSRRYLLLPPLAEDLVLASVGLQKPSVVHSGVSFIPSGGVEETSFRVISWKYSKTRLYSVQCVYGHCYWRLCGTSKLIKLDMNSMEFSTVDLPPDHEKRNVIIVESWGSNVAMFSMIDEGASVDYYTSSQNDSEKSHEWHMMISIPLPADYIIGPCFKGPAEGQPRKPSAQATPPVIRAAINGRCRGSPTPPSTEGVKDLLPLYSAIPVIRGRHQRPPTHAVDGRCPRFHPIAPSYLLCPTFLPTPSMGARRSQVAEDPPHPPPPPSRAPAVPPAC

SEQ ID NO: 75267 - protein, 181 aa, Zea mays
  Coding DNA Sequence Number=SeqID_33488
  Homolog annotation: Hit_ID=Q8S0J7; Match level="QueryCoverage=24%, HitCoverage=13%, E-value=4e-12, Identity=88%"; Hit description =Probable membrane-associated 30 kDa protein, chloroplast precursor
MESQAEALDQLATDDLLEGKFALLETSSVDDDLSQLKKELSGSSLILFVSGVLLTIGSKPTVQFFTKPKDHKCDSSEPDLCDSGCNGVQMMRPSVISKAGGLEREKDYRYTGSDVAKTLPKNLIADPPCKVSNGTGFGGTCPLASLCALAESRHKSAAQGEGSLGRRRDMVTRLTYAVSEC

SEQ ID NO: 75268 - protein, 148 aa, Zea mays
  Coding DNA Sequence Number=SeqID_33489
  Gene Ontology: Mol. function=cysteine-type endopeptidase activity; Cellular component=lysosome; Biological process=proteolysis
  Homolog annotation: Hit_ID=Q10716; Match level="QueryCoverage=84%, HitCoverage=34%, E-value=5e-60, Identity=85%"; Hit description =Cysteine proteinase 1 precursor
  Pfam annotation: Domain name=Peptidase_C1; Domain location=1-146; Score=10.8; E_value=2e-12; Accession=PF00112.13; Description=Papain family cysteine protease
MRLHTLRVISKAGGHEREKDYPYTGSDGKCKFDKSRISSVQNFSVVSVDEGQNVANLIKDGPLAIGINVAYMQTYIEGMPCPYICGRHLDHGVLLVGYGATGFAPIRLKDKPYWIIKNSWGKNWRENGYYKICRVPTFATSAVTPFMY

SEQ ID NO: 75269 - protein, 860 aa, Zea mays
  Coding DNA Sequence Number=SeqID_33490
  Gene Ontology: Mol. function=nucleoside-triphosphatase activity; Cellular component=membrane; Biological process=protein catabolic process
  Homolog annotation: Hit_ID=Q8LQJ8; Match level="QueryCoverage=75%, HitCoverage=94%, E-value=0.0, Identity=72%"; Hit description=Cell division protein ftsH (FtsH)-like
  Pfam annotation: Domain name=AAA; Domain location=258-442; Score =324.1; E_value=2.5e-94; Accession=PF00004.19; Description=ATPase family associated with various cellular activities (AAA)
  Pfam annotation: Domain name=AAA_2; Domain location=255-412; Score= -42.7; E_value=0.016; Accession=PF07724.4; Description=ATPase family associated with various
  Pfam annotation: Domain name=AAA_5; Domain location=258-389; Score =12.7; E_value=0.00019; Accession=PF07728.4; Description=ATPase family associated with various cel
  Pfam annotation: Domain name=Peptidase_M41; Domain location=449-645; Score=381.0; E_value=1.8e-111; Accession=PF01434.8; Description =Peptidase family M41
  Pfam module annotation: Pfam domain module=AAA::AAA_2::AAA _5::Peptidase_M41; Domain location=258-442::255-412::258-389::449-645
MVTFPVFCQCPAAADNATTLVTYVMQPGDTAPRSDNAAGGMLRNLQVRYRSSYTGSFPHWIRELDSPREASLLKQIYKSDPERVVQIFERHPSLHSNSAALSEYIKALASLDRLEDSPLLKTLQRGFATSAAEEERSTGLAAFGSVGRRTKDGALGTANAPIHMVTAGTGQFKEQLWKTFRSVALTFLVISGIGALLEDRGISKGLGLNEEVRPNMDSKTKFSDVKGVDEAKAELEEIVHYLRDPKRFTCLGGKLPKGVLLVGPPGTGKTMLARAIAGEAGVPFFSCSGSEFEEMFVGVGAKRVRDLFNAAKKCSPCIIFIDEIDAIGGSRNPKDQQYMKMTLNQLLVELDGFKQNGGVIVIAATNFPQSLDKALVRPGRFDRHIVVPNPDVEGRRQILEAHMSKVLRADDVDLMIIARGTPGFSGADLANLVNVAALKAAMDEAKAVTMQDLEYAKDRIMMGSERKSAVISDESRKITAYHEGGHALVAIHTEGAHPVHKATIVPRGVSLGMVIQLPEKDQHSVSRKQMLARLDVCMGGRVAEELIFGESEVTTGSSSDLNYATRLARAMVTKYGMSKRVGLVSYSENSVSGQTSVIDKEVKEILEKAYNNAKAILTTHDKELHMLANALLEHETLSGAQIKKLLPQVDNSNNKQKKAAKVPQKTPAARAKGVAQEAAGKAKGVAVQQRWHKKRQQRTPREVQVQQRRHKKRQRRWQRKPRELPVQRRRHKKRQQQTPREVQVQQRRHKKRQQQTPREVQVQQRRHKKRQRRWQRKPRELPVQRRRHKKRQQQTPRELQVQQRRHKKRQRRWQRKPRELPVQRRWHKKRQQQTPRELQVLAHSGIGEKHKSAFCAAPTR

SEQ ID NO: 75270 - protein, 91 aa, Zea mays
  Coding DNA Sequence Number=SeqID_33491
  Gene Ontology: Mol. function=protein-tyrosine kinase activity; Cellular component=integral to membrane; Biological process=protein amino acid phosphorylation
  Homolog annotation: Hit_ID=Q70KR3; Match level="QueryCoverage=84%, HitCoverage=13%, E-value=4e-10, Identity=45%"; Hit description=SYM10 protein
  Pfam annotation: Domain name=LysM; Domain location=3-49; Score=10.9; E_value=0.041; Accession=PF01476.10; Description=LysM domain
MRYQIGLGDTYWIVSTTKLQNLTHYQAMERVNPTLVPTDLDVGTMVTFPVFCQCPATADNATTLVTYVMQPVDTRIRGSAPSEGSGSGTNE

SEQ ID NO: 75271 - protein, 163 aa, Zea mays
  Coding DNA Sequence Number=SeqID_33492
MRKLDLEPWRMEGSSQGRTAERWERLLPALGEEGRPTCRCAEPGRKEGARWREPAVLRPSQGWLLPAPSSIAGDSRGIDVEGGGCRELGAAAGCRPMEKASARRPRQGKWSSRPWEEKGRGRHGWPRGGAGLGAMERSMAPCCCCRGRKKTWRLWRLEIFEGW

SEQ ID NO: 75272 - protein, 121 aa, Zea mays
  Coding DNA Sequence Number=SeqID_33493
  Subcellular localization annotation: CTP_CleavageSite=93; ConfidenceScore=5.48e-01
MASPALLLPWARAPLPLPWTPRRSFSMAGAQHQLQAPCTLLPERRRSLSSIPRRAPLQTPSQSILSTRPPSARLIIVNSYLSWSKSVEGALVDHMMRKTSRVDPKMMYGWASSQGDAGGST

SEQ ID NO: 75273 - protein, 159 aa, Zea mays
  Coding DNA Sequence Number=SeqID_33494
MENRELDMAPMAVAATKTSHPTGGAERLGEKIRRRGVHGASTVRPPWEKSRGSGYRALGGRVERIDWLGVCRGARRGIEDRERRRSGRRVQGAWSWCWAPAMEKLLRGVQGRGSGARAHGRRRAGDAMAGRGEKQAWAPWRGAWLPAAASGIEKEEGCA

SEQ ID NO: 75274 - protein, 430 aa, Zea mays
  Coding DNA Sequence Number=SeqID_33495
MGGAEPGSFAEKDPSRATGVPVARRVGLGSKLACQKSEKRVHLARLHAACMAARPFCPLVWAKMGGRLGGPWSVLEKTRPAAPGGAPPGLPVFQAPGWGISAAFPPPRWRNATPWELVPLSHRSASRIFITQPGRTPSPAVTRDGDLQLDGGGKRAGLRPLPLPQPQGFSSPRLGRGECRVGVGPCVGGGPLLHSVMGGEAGIARGVRQLQRAWSSAASGFGAPCGVGVCHGSRKRFFRRRGGRDRPRADLHLLRPSARPCLTSFGTGGGLLTAASTLRSALPLFGPPEQKSPSSPLLEQVTARRSSVFRCSAGLPPRSGVVRTCGGGTGVPFVMALRMPPRVKVTGEAGGSDISMNRGGVGSRMGNLVGRSLAVSPVSGADAQVGQSRPRIGLAPLEAGCPRPQGRRRCRGCYGSPRREDPSLQDQIVL

SEQ ID NO: 75275 - protein, 382 aa, Zea mays
  Coding DNA Sequence Number=SeqID_33496
MGGAEPGSFAEKDPSRATGVPVARRVGLGSKLACQKSEERVHLARLHAACMAARPFCPLVWAKMGGRLGGPWSVLEKTRPAAPGGAPPGLPVFQAPGWGISAAFPPPRWRNATPWELVPLSHRSASRIFITQPGRTPSPAVTRDGDLQLDGGGKRAGLRPLPLPQPQGFSSPRLGRGECRVGVGPRVGGGPLLHSVMGGEAGIARGVRQLQRAWSSAASGFGAPCGVGVCHGSRKRFFRRRGGRDRPRADLHLLRPSARPCLTSFGTGGGLLTAASTLRSALPLFGPPEQKSPSSPLLEQAGGSDISMNRGGVGSRMGNLVGRSLAVSPVSGADAQVGQSRPRIGLAPLEAGCPRPQGRRRCRGCYGSPRREDPSLQDQIVL

SEQ ID NO: 75276 - protein, 264 aa, Zea mays
  Coding DNA Sequence Number=SeqID_33497
MDESEKGDRGKELRLFPTLPVAVGPLICFAAYIGLLQPHSDDMSRVVDQLLKLFATFVERCREAQPSAACGSHHSSSPCNCLGDALESREVIAVEALKQAKDEHVQKLMEAYLVTHNQRRALRIQELASSNPVQPIKAEDPQILKGHPVSTRGEKKAWELPEGSIVLEGIPVSPKAMDKQEHPESSQDPPPELLEPLTMKKIPAPSLEVKEEAASTPPAPPPSEELQEPVPLEEEFDPVLPSQSLPEEVINISSLLTHPGDVSD

SEQ ID NO: 75277 - protein, 117 aa, Zea mays
  Coding DNA Sequence Number=SeqID_33498
METTTSHGKAPSREFGAKGREESPPRIKSHRSGDKKKKMKKVVYYETDSSSPSTSGSDAASVTSKRYERKKFSKIPEAPQSSGTQIPIYIAKQISGPTATGKVGNSRNSYPIIDHLL

SEQ ID NO: 75278 - protein, 94 aa, Zea mays
  Coding DNA Sequence Number=SeqID_33499
MALTVTFSFSLSRRCEPYVERLFIYYILLYGVLFPCIKCVECGDEDDGFGYDYGTGKWYSFRLERVHQVVSQNNTGEDEVVEEDFQEFQEYDEF

SEQ ID NO: 75279 - protein, 84 aa, Zea mays
  Coding DNA Sequence Number=SeqID_33500
MASTITFSFSLSHNGQLAESEGVAGEDPEQQLRYLIRDVWFTGGDEDDGFGNDYGTGCPRCNHCSGEDEVVEEDFQEFQEYDEF

SEQ ID NO: 75280 - protein, 342 aa, Zea mays
  Coding DNA Sequence Number=SeqID_33501
MTRLRHTARKSVIPFLPSRLAERPLRRTLSGQSSHLESLHHRLREEQERQCQQREQQGSSSLPEQEVESVRRRSPVPQLEAPPAPPQDAPAIGGATGGGPGGDPDGDDDDGSYHSTEPFEPQEAEGWVARPITRDAARGCHFHDALDTLLRRAFDRHTWSIEYRCVVYQHCRGRYPNRSEATCLVCHPEDDLRGAEAFSEHYSISERDTAEAAMQDAARRALSQYCSLFGGVADGLNLRYYPRRPTGSTESVVVSPIGEDNPRLSRTVNLVAVLNTKLDHSLDELSRARAKIAELRAELAERRHQEGGSPAPVGTQHPYRSPPRGHHTYGSPACRTRIDLDP

SEQ ID NO: 75281 - protein, 323 aa, Zea mays
  Coding DNA Sequence Number=SeqID_33502
  Subcellular localization annotation: CTP_CleavageSite=40; ConfidenceScore=5.41e-01
MLTMTRLRHTARKSVIPFLPSRLAERPLRRTLSGARAPVSAEGASRALPPCLSKEVESVRRRSPVPQLEAPPAPPQDAPAIGGATGGGPGGDPDGDDDDGSYHSTEPFEPQEAEGWVARPITRDAARGCHFHDALDTLLRRAFDRHTWSIEYRCVVYQHCRGRYPNRSEATCLVCHPEDDLRGAEAFSEHYSISERDTAEAAMQDAARRALSQYCSLFGGVADGLNLRYYPRRPTGSTESVVVSPIGEDNPRLSRTVNLVAVLNTKLDHSLDELSRARAKIAELRAELAERRHQGGWFPRSCWDSAPLPLAATWSPHLWFPCL

SEQ ID NO: 75282 - protein, 89 aa, Zea mays
  Coding DNA Sequence Number=SeqID_33503
  Gene Ontology: Mol. function=binding
  Homolog annotation: Hit_ID=Q5N7T3; Match level="QueryCoverage=59%, HitCoverage=10%, E-value=2e-09, Identity=58%"; Hit description =Peroxidase-like protein
MNADLGMVWLSGSLQGKYMFCWLDWPARVEELDVLKGLVAPVEAELETEDHAEHTLTQQRYEQAVATAPNNSLILANFTQFRLAVLLLS

SEQ ID NO: 75283 - protein, 610 aa, Zea mays
  Coding DNA Sequence Number=SeqID_33504
  Gene Ontology: Mol. function=binding; Cellular component=membrane
  Homolog annotation: Hit_ID=Q5N7T3; Match level="QueryCoverage=66%, HitCoverage=77%, E-value=5e-99, Identity=51%"; Hit description =Peroxidase-like protein
  Subcellular localization annotation: CTP_CleavageSite=55; ConfidenceScore=5.27e-01
MKHKVEPSQYVPSTYGPLLKVPQRLPLFSSHLSGLLRAAVVRALLFPHLPSAAVVAQSKASRGALEVSRWTPAAAEQDHGLPGGRGGTVAVRALLLRLNVALDLLSAVARLPWRRWPRVRRAREIPVTRILGNRCDGAAAASSSDASEPAGAVGCGWPASVERSASNVGLPLSLRMMKRKRQQQLVAAARHPRWDEGLLVSAAGESVGRAFSSMVLIVRELQSFALQQIRDAVVCDDLQGVLARVQGEMHASFVWLFQHIFAGTPALMLSLMLLLANFTVQSMGHSVAAAAATIPPTPPAERAEPSRSRSRFDAASVKAFSVGRTASVSGNDGGGGKTPPVSGATGDGRSDESSLYRPSRVTPQQPSAPPGAETAAQYAANAAEEAIWEMMLAEASKMQASARAEELSDSDVLRGLVAPVETELETEDHAEHTLTQQRYEQAVAAAPNNSLILANFAQFLYLVQNDHDRSVPPKPVRRTDDAPAVVHQIAHTSLRRAEHYFERAVRAEPADSEALSWYATFLWKARNDLAGAEETYQEAIAADPGNAHHAAAYAHFLWNTGDMVVAVALIRPLRGTRANGALDPAGEIRVLTPDELVRADRRQGGMDSWL

SEQ ID NO: 75284 - protein, 89 aa, Zea mays
  Coding DNA Sequence Number=SeqID_33505
  Gene Ontology: Mol. function=metalloendopeptidase activity; Cellular component=mitochondrial respiratory chain; Biological process =proteolysis
  Homolog annotation: Hit_ID=Q9ZU25; Match level="QueryCoverage=76%, HitCoverage=13%, E-value=5e-26, Identity=82%"; Hit description =Probable mitochondrial-processing peptidase alpha subunit 1, mitochondrial precursor
  Pfam annotation: Domain name=Peptidase_M16; Domain location=1-89; Score=5.1; E_value=0.00014; Accession=PF00675.10; Description =Insulinase (Peptidase family M16)
MAFKSIVNRTHLQLVREVEAIGGNVSASASREQMSYTYDALKNYTPEMVEVLIDNVRNPAFLDWEVKEQRVRTPESEEFPLRRSLSRPK

SEQ ID NO: 75285 - protein, 277 aa, Zea mays
  Coding DNA Sequence Number=SeqID_33506
  Gene Ontology: Mol. function=adenosylmethionine decarboxylase activity; Biological process=spermidine biosynthetic process
  Homolog annotation: Hit_ID=Q9SC67; Match level="QueryCoverage=52%, HitCoverage=45%, E-value=2e-46, Identity=57%"; Hit description=S -adenosylmethionine decarboxylase 2
  Pfam annotation: Domain name=Peptidase_M16; Domain location=1-92; Score=6.9; E_value=0.0001; Accession=PF00675.10; Description =Insulinase (Peptidase family M16)
  Pfam annotation: Domain name=SAM_decarbox; Domain location=145-277; Score=-58.8; E_value=1.6e-08; Accession=PF01536.7; Description =Adenosylmethionine decarboxylase
  Pfam module annotation: Pfam domain module=Peptidase_M16::SAM _decarbox; Domain location=1-92::145-277
MAFKSTVNRTHLRLVREVEAIGGNVSASASCEQMSYTYDALKSYTPEMVEVLIDNVRNPAFLDWEVKEQIRSFVHMANDAFGRRVAKLLGDVFHVLLLVLLKTPLSVVTKTIPRNHFLSSSTGCLSSCSKTIAVLQVVAAAPTPASAIGFEGYEKRLEISFYEAPVFADPNGRGFLFVYPYKILIKTCGTTKLLLGILRILELAKELSLPLVAAKYSRGTFIFPDAQPSPHKNFDDEVTFLNHFFDGLRFGGNAYVIGDSAKHKQKWHVYYATTEHP

SEQ ID NO: 75286 - protein, 277 aa, Zea mays
  Coding DNA Sequence Number=SeqID_33507
  Gene Ontology: Mol. function=adenosylmethionine decarboxylase activity; Biological process=spermidine biosynthetic process
  Homolog annotation: Hit_ID=Q9SC67; Match level="QueryCoverage=52%, HitCoverage=45%, E-value=2e-46, Identity=57%"; Hit description=S -adenosylmethionine decarboxylase 2
  Pfam annotation: Domain name=Peptidase_M16; Domain location=1-92; Score=8.9; E_value=7.3e-05; Accession=PF00675.10; Description =Insulinase (Peptidase family M16)
  Pfam annotation: Domain name=SAM_decarbox; Domain location=145-277; Score=-58.8; E_value=1.6e-08; Accession=PF01536.7; Description =Adenosylmethionine decarboxylase
  Pfam module annotation: Pfam domain module=Peptidase_M16::SAM _decarbox; Domain location=1-92::145-277
MAFKSTVNRTHLRLVREVEAIGGNVSASASREQMSYTYDALKSYTPEMVEVLIDNVRNPAFLDWEVKEQIRSFVHMANDAFGRRVAKLLGDVFHVLLLVLLKTPMSVVTKTIPRNHFLSSSTGCLSSCSKTIAVLQVVAAAPTPASAIGFEGYEKRLEISFYEAPVFADPNGRGFLFVYPYKILIKTCGTTKLLLGILRILELAKELSLPLVAAKYSRGTFIFPDAQPSPHKNFDDEVTFLNHFFDGLRFGGNAYVIGDSAKHKQKWHVYYATTEHP

SEQ ID NO: 75287 - protein, 106 aa, Zea mays
  Coding DNA Sequence Number=SeqID_33508
MSSNRGTESYHRYGGDDHFRLAKRMEAQGIHVSVPPTTTSCSLSLVFTSTYTYISTYRTSVVDIFVMLLIKINSICNAGQINFLEANWVVGANFLGATVSRRKLAS

SEQ ID NO: 75288 - protein, 61 aa, Zea mays
  Coding DNA Sequence Number=SeqID_33509
MTSRSLFLVFTSTYTYISTYQTSATLPTHEREDGLDFVETLFASGGIDHHSSLYPDGDRRS

SEQ ID NO: 75289 - protein, 150 aa, Zea mays
  Coding DNA Sequence Number=SeqID_33510
MQAACNRAKWTRFFESRHASMEAQAHASRDRRAGCCMQATAPPLAPPSRLLDRGTNTATRGDPAHDPAAPARHDGGREQRSRRRPSSRPIQGQQENPLSRREDNAPVIRSSNDSRTRNGRPANRSPRRINSAARQASLLAGGAGDASPSP

SEQ ID NO: 75290 - protein, 194 aa, Zea mays
  Coding DNA Sequence Number=SeqID_33511
  Homolog annotation: Hit_ID=Q6QP51; Match level="QueryCoverage=27%, HitCoverage=24%, E-value=6e-10, Identity=64%"; Hit description =Putative growth-regulating factor 1
MAERYQLPRSCVPPTTRRKDCGCSPSGGSEGGKTRCIREREDMVAFQGGHPPFKGDSPYLRPQPSRAESSPTRSKAGGSNGHVVSQAYVPSRDSKGTLSHGVKTGPGKGIPRKGILLREGNRPRASLLIRGLKASPSEGFNSRLRALGLRAHYWSEVRRPAPRKGSTVASGHSGSAPTTDQGFVGWPSKGSHPP

SEQ ID NO: 75291 - protein, 520 aa, Zea mays
  Coding DNA Sequence Number=SeqID_33512
  Homolog annotation: Hit_ID=Q6QP51; Match level="QueryCoverage=28%, HitCoverage=71%, E-value=8e-07, Identity=30%"; Hit description =Putative growth-regulating factor 1
  Subcellular localization annotation: CTP_CleavageSite=61; ConfidenceScore=5.55e-01
MVAFQGGHPPFKGDSPHLRPQPSRAESPPTRSKVLPLRHGGWVPRVMQAGPGRKKPNRRARCMQLPSGYKHSSAFAQTSGPTRHATGAPVAACEQLHRHSRHYRTSSTVEPVPRLEETLRVTQQCQPGASVMGQSAAGEGATVNTAENGPTVMAVAAGGSSGHVVGQAYVPSRDSKGTLSHGDRRHRWQEKRETLRLRHNGRIKKGTGKGYTPKGILLREGNGPRAPLLIRGSKADPSEGVNRRLRALGLRAHYWSEVRRPAPRKGSTAASGHSGSAPTTDQGLGDCSRKPGSGQTVDSVNIPARELGTRPCTRATASSHEGTTRPAEALRNALRPRRSQTTPPRPRGLHPEGALARTHRNKTQQREAGPLAKKCDKSLQASINTPFEARGLLSGTIIRGTLKTPKSQLPRAKAADPGGLTSRPRPPSSNGHTFGSPEAQSSPRSNLGQIATPTDQIAWAFNAKGSDSSSAPEDDELRIARPQGSDSGLSPLKTTNSASPDPRAQTRAQPRKTTTPHHRP

SEQ ID NO: 75292 - protein, 101 aa, Zea mays
  Coding DNA Sequence Number=SeqID_33513
DTLPDHLGSDQWGLALPGQNGNHGSWVKWFEIQGLCYGFGSAMMMLFLDEEMPNGTFAEYVDVYSSLLYHQTPGCPHCNHCSGEGEAVEGDFQEFQDYDEF

SEQ ID NO: 75293 - protein, 73 aa, Zea mays
  Coding DNA Sequence Number=SeqID_33514
WFEIQGLCYGFGSTMMMMFLDEEMPNETFAEYVDVYSSLLYHKTPGCPHCNHCSGEGEAVEGDFQEFQDYDEF

SEQ ID NO: 75294 - protein, 298 aa, Zea mays
  Coding DNA Sequence Number=SeqID_33515
MEKLLRLENRVEPWVAVVTSGRSDSPPWTAHGRSRAREKDAADLGKRAADTREARCGLEKRAADERTESSACSSDGVTLPGAPHTAASAKRRRSSSDGVTLLRAPHTAASAKRGRSVKPQRVLTRSNFARGSPSQSDNKGKLMELSPNEQKVGTTKCNMGKMGSSQDYSKKLEELGSKEPKMCWSRPHRTSQMVHWTRSMQCPLVKEGVQLYRGLWAHGPRLVRDGSGSGKVRVSHLPAHQHIRASSAYPCPRELAGKIFDPYPQDISGYRATRYPPENTIRMYLQFEGNESTSVTQK

SEQ ID NO: 75295 - protein, 78 aa, Zea mays
  Coding DNA Sequence Number=SeqID_33516
  Homolog annotation: Hit_ID=Q5EUC8; Match level="QueryCoverage=45%, HitCoverage=7%, E-value=3e-08, Identity=75%"; Hit description =Adenosine 5'-phosphosulfate reductase 2
MEGMAPSARHHRDPRLGAVLQAQQVLHPGAGEGHRDGALKDVRVAAEPFPLVDLGASAWASLSLAGELDLPCYDSGRA

SEQ ID NO: 75296 - protein, 174 aa, Zea mays
  Coding DNA Sequence Number=SeqID_33517
MLTRWGELLAEHELEAEEKERKLEEQIHQFNAAQAALGPQAMEATRKALEDLQAEHRAGVQRIVAWAGEASMTLVPLGMSPIPVSELPTLMSDALPVLDSAVDRLRCLEGEGGKLCRVVVEYVLTCFRSHDPAISLAPVIAGQVAATKDAAREGVQDVVELVAERFQRDPTDDL

SEQ ID NO: 75297 - protein, 109 aa, Zea mays
  Coding DNA Sequence Number=SeqID_33518
MTEYQAKLSALDQTLEAQRAHQVKVVERLQKWQQELEGKASDTALAEENLKAKEQSLDRREKDLVRRETDFVFREEMLTRRGELLAEHELEAEEKERKLEEQIRQFNAA

SEQ ID NO: 75298 - protein, 134 aa, Zea mays
  Coding DNA Sequence Number=SeqID_33519
MEERVEGLTGSETAPAGELVGGEESGLSRAQLTNQMGGRPKFGEGDLGLPVKFCRVRGLGKLHKLMAKLTERLARLGSDRSGLAMVAEALAAMAGGKELAGAKDGRLAGEEIWSPEIRSVSLLKPEANPRFCRV

SEQ ID NO: 75299 - protein, 148 aa, Zea mays
  Coding DNA Sequence Number=SeqID_33520
ERVEGLTGGETAPAGELVGGEESDLSRAQLINQMGQRASPGIKEGPRAWEASQAIGEANRVAARLGSDRSGLATVAEARVAMAGGRELAGAKEGCLAGEGAGGHDRGSDKRFGRARANASARSGVWHGVEHEAAQREVKFKRRLSPNL

SEQ ID NO: 75300 - protein, 124 aa, Zea mays
  Coding DNA Sequence Number=SeqID_33521
  Gene Ontology: Cellular component=chloroplast
  Homolog annotation: Hit_ID=Q6Z8N7; Match level="QueryCoverage=82%, HitCoverage=47%, E-value=3e-26, Identity=69%"; Hit description =Thylakoid lumen protein, chloroplast-like
MTSSREQYRGWLVGAGEASSIKSVTAFYPEQAAADSSGFCVSLSLLPSPPVSVAITGSGPDFTSLKSLGDVDAFAEGLACTTWNTRCRTPASGGGTSSRPSGWPSTAGTTASTATTQVSQVSAK

SEQ ID NO: 75301 - protein, 312 aa, Zea mays
  Coding DNA Sequence Number=SeqID_33522
  Homolog annotation: Hit_ID=Q6Z8N7; Match level="QueryCoverage=49%, HitCoverage=64%, E-value=3e-56, Identity=72%"; Hit description =Thylakoid lumen protein, chloroplast-like
  Pfam annotation: Domain name=PsbP; Domain location=86-282; Score= -49.2; E_value=0.035; Accession=PF01789.7; Description=PsbP
  Subcellular localization annotation: CTP_CleavageSite=48; ConfidenceScore=5.82e-01
MAAVTSTASICPAAAGALSSLPSFITRKPTSGSRRLQQAAATTVCHCRSARYTPQSPIGAHLARRHNSASPLLEELRMTVEEGLLGRRDALLLGIVFSAATPPLLAPAGALADEATAESQEGFTTYEDEANKFSIQVPQGWLVGAGEASGIKSVTAFYPEQAATDSNVSVAITGIGPDFTSLKSFGDVDAFAEGLELAEAAGARRQAHRLQGGKRYYGLYYLEYTLQNPGERRRHIVSAIGMAFNGWYNRLYTVTGQYIDDDDSEKYRPQIEKANALSFPCEILYDSSETLAFQKGQGSCNLASKQANGFVS

SEQ ID NO: 75302 - protein, 128 aa, Zea mays
  Coding DNA Sequence Number=SeqID_33523
  Homolog annotation: Hit_ID=P17847; Match level="QueryCoverage=26%, HitCoverage=5%, E-value=4e-08, Identity=73%"; Hit description =Ferredoxin--nitrite reductase, chloroplast precursor
  Subcellular localization annotation: CTP_CleavageSite=22; ConfidenceScore=5.01e-01
MPSIDAGPSTRGHRSQLPPGTSAPALGTTPSPKGPGSSDEDGESRALDQRNHTQHGRHTGTAPNLGAPDLAHRGSAVRDHVVVDLGEAAQETNLRHLHLAVAEGESSPVQMHRPWNGQNASPPHTPPL

SEQ ID NO: 75303 - protein, 328 aa, Zea mays
  Coding DNA Sequence Number=SeqID_33524
  Homolog annotation: Hit_ID=P17847; Match level="QueryCoverage=10%, HitCoverage=5%, E-value=2e-07, Identity=73%"; Hit description =Ferredoxin--nitrite reductase, chloroplast precursor
  Subcellular localization annotation: CTP_CleavageSite=22; ConfidenceScore=5.01e-01
MPSIDAGPSTRGHRSQLPPGTSAPALGTTPSPKGPGSSDEDGESRALDQRNHTQHGRHTGTAPNLGAPDLAHRGSAVRDHVVVDLGEAAQETNLRHLHLAVAEGESSPVQMHRPWNGQNASPPHTPPLWASTGLTTPPPVMTAAARVSLLPPHIPHAPHRELLLPHAPPVMPAAARVFLLPPRQLRASFPGSPHPPSPPPAPRFLPRQPTPASSVLHAPRSVRPTSRASRRWDTRLPRAPTKSEGEIHRQFRAPRVKSSRHSDAAVIPCPARDGPCTTAFDSRVASPQTKPTRAHKESPDGFVTKPEMLTDGIVKLMIWHRTIPSMQG

SEQ ID NO: 75304 - protein, 66 aa, Zea mays
  Coding DNA Sequence Number=SeqID_33525
  Homolog annotation: Hit_ID=Q6ZKZ3; Match level="QueryCoverage=65%, HitCoverage=6%, E-value=6e-16, Identity=90%"; Hit description =Putative beta-1,3-galactosyltransferase 5
MAHPPRAGVSQLQHGRTEVNAELKKEAEFFRDIVFVPFLDNYDLVVMKTLAICEYGVWQRISCCLN

SEQ ID NO: 75305 - protein, 184 aa, Zea mays
  Coding DNA Sequence Number=SeqID_33526
MGCTRVAFFLRLLEERDPAGVGVLQTSLGFKDFHHAARLQSLTNGWGGGRTELGPASAWAGDPLLPPAFGGEGHPLALRRRRPPAMRGKANCCCLARVQLSVLHPGDNRAVHRRLMSSVPKRRPSLERLPTAVVVASADETVSATCARGLWLFGFNGWFSSSVRGHERGPFSGSVGPEAIAAAV

SEQ ID NO: 75306 - protein, 168 aa, Zea mays
  Coding DNA Sequence Number=SeqID_33527
  Gene Ontology: Mol. function=Ral GTPase binding; Biological process =protein transport
  Homolog annotation: Hit_ID=Q8S3U9; Match level="QueryCoverage=59%, HitCoverage=9%, E-value=5e-34, Identity=73%"; Hit description =Exocyst complex component 2
MTDLSMEYRGKVRVLCENANGILIEERNVQDSSDIIAIVLVYCMANNNIIRFHPTRRNINGLLRSFFADIESKLRQIEEDPEGAGTAHLYSVTLKISGVANRAFEPLFERQAQAEKIRSVQGMLQRFRTLFNLPSAIRGNIRKGEYDLAVREYQKAKSIVLEYCIRLL

SEQ ID NO: 75307 - protein, 150 aa, Zea mays
  Coding DNA Sequence Number=SeqID_33528
  Gene Ontology: Biological process=protein transport
  Homolog annotation: Hit_ID=Q8S3U9; Match level="QueryCoverage=70%, HitCoverage=10%, E-value=2e-30, Identity=59%"; Hit description =Exocyst complex component 2
MSQGLEPNMRDKVIYSSPNFDPKVFLSWVHKDTSAADLEASALTLKTDLKGRTQQKKLLVKENFDCFVSCKTTIDDIESKLRQIEEDPEGAGISLCADTVIRRCFMAMSIRQTKSDDDTSSHMNCKGFSYFLHVGVKSRLWNTEFTRSRR

SEQ ID NO: 75308 - protein, 864 aa, Zea mays
  Coding DNA Sequence Number=SeqID_33529
  Gene Ontology: Mol. function=Ral GTPase binding; Cellular component =exocyst; Biological process=protein transport
  Homolog annotation: Hit_ID=Q8S3U9; Match level="QueryCoverage=98%, HitCoverage=83%, E-value=0.0, Identity=56%"; Hit description=Exocyst complex component 2
MREAKVAPNIQELDQKAAAAAAAAARKALTSVQTLPKGVEVLDPLGLGVIDNKSLRLITDASVSSPISREKSQGLDPNMRDKVIYSSPNFDPKVFLSWVHKDTSAADLEAGALTLKTDLKGRTQQKKQLVKENFDCFVSCKTTIDDIESKLRQIEEDPEGAGTAHLYSVTQKISGVANRAFEPLFERQAQAEKIRSVQGMLQRFRTLFNLPSAIRGNIRKGEYDLAVREYQKAKSIVLPSHVGILKRVLEEVEKVMQEFRGMLYKSMEDPHLDLAEIENIVRLLLELEPETDPVWHYLNIQLEVDSTIGDSPRVDQLSTNFMAEEADSLRATYIRRLTSVLIQHVPAFWRLALSVFSGKFAKAASGNVVSDFDVNAKPTANKNDEKGGEVKYTNHTLDEVGSMVQATISAFDTKVQSTFRDFEECNILCPYMSDTIKEIAKACQTLEGKDSSPTAVKMLRTLHFEMTKLYILRLCSWMRATTKEISKDETWVTLSTLERNKSQYAISCLPLEFRDITVSAMDRIDTMILNLMSETAKSYDISQPLQEINESVRLAFLNSFLDFAGYLERFGDGDLHKKLLVVLSNIGYCKAELSEELYSKYRHIWSPVRNNEERSSDMRDLRTSFSALEEKVLDQYTFAKSNLIRSAAQSYLLDSGIYWGAAPMVKGIRDATLDLLHILVAVHAEVYSGARPLLEKTMKILVEGLVDIFLSVFHENKTKDIRLLDANGFCQLMLELEYFETVLHTYFSPEAQQAMKSLQENLLEKACESVAEAMENPGHQRRPTRGSEDTASDDRQPSVSPDDLLVLAQQCSSDLLQGELERTRLNIACFMESTLSTNSCASRPKACRTFFLPSTACSRPNVLA

SEQ ID NO: 75309 - protein, 439 aa, Zea mays
  Coding DNA Sequence Number=SeqID_33530
  Pfam annotation: Domain name=zf-GRF; Domain location=34-78; Score =10.5; E_value=0.0016; Accession=PF06839.3; Description=GRF zinc finger
MYREALWQKRGRPRELYPDVSSKDAPVPPELPVPNCDCGRLAWVHQSQHPDTAARCYYLCGTLDGHQRCFFFQWIDGPDKFDPRYLLFVNWLSGRTTHERFKRWVPPPPNPPPMTDAEKEVATERRMDSPPRCDCGDRAVIDEDYDKQFCCPNIDYPYGWRKCRFREWLYGPLSHWPEPQETRKCSWESYDDKGEVMRTIESKRIMGQKMRCGSQLVDSYINDRIRDMRREAKSAFYDSPKRAEYRRLKAADEKRAQDAREWEAAQAEKQMLDNLADRLKGKIGSGVNYLADEAHARYVQDKMATVELMEEEDDDTSRLSELIALAEAGLHKEEEDDMSRLSELIALAEAGLRAQEEEDEFLSQAAAEVEAAYYKKKSDEAEAEDELFSQAADEAEANYYKRTGDKCDAGQCSKWNEVVVEDCETDDSEDELLIDCDSD

SEQ ID NO: 75310 - protein, 453 aa, Zea mays
  Coding DNA Sequence Number=SeqID_33531
MASVSLSMCKRDNAVAAVDATSATAMADARTQMKDMYREALWQKRGRPRELYPDVSSKDAPVPPELPVPNCDCGRLAWGHQRCFFFQWIDGPDKFDPRYLLFVNWLSGRTTHERFKRWVPPPPNPPPMTDAEKEVATERRMDSPPRCDCGDRAVIDEDYDKQFCCPNIDYPYGWRKCRFREWLYGPLSHWPEPQETRKCSWESYDDKGEVMRTIESKRIMGQKMRCGSQLVDSYINDRIRDMRREAKSAFYDSPKRAEYRRLKAADEKRAQDAREWEAAQAEKQMLDNLADRLKGKIGSGVNYLADEAHARYVQDKMATVELMEEEDDDTSRLSELIALAEAGLHKEEEDDMSRLSELIALAEAGLRAQEEEDEFLSQAAAEVEAAYYKKKSDEAEAEDELFSQAADEAEANYYKRTGDKCDAGQCSKWNEVVVEDCETDDSEDELLIDCDSD

SEQ ID NO: 75311 - protein, 1370 aa, Zea mays
  Coding DNA Sequence Number=SeqID_33532
  Gene Ontology: Mol. function=helicase activity; Biological process =viral genome replication
  Homolog annotation: Hit_ID=Q1EPC6; Match level="QueryCoverage=89%, HitCoverage=79%, E-value=0.0, Identity=61%"; Hit description=DNA helicase homolog, putative
MSDEQKNEKNKKRREARLRNKELNKKRSEASGDEKVNVDPDDDFDWLHINYTLQSNDIDATTEVLTPGSVHENVGHTPKHTRQRTAYFSERYKNLTPVEREFRRERLRLYNRTPRRKEAKVDHNRRRRVMQADTLNPTSIAMEDPTYTPELVHPTADVKGSDGSILTVCDWVIPEFVNAPFLPSPTQTEDVASPDMSTNTLKRKHHVPRGERQAILARRNQQFESAISRKVGTSIEDTSGDAVEGDDWTQRHTPMKITNNGDDDEGVIFEDDDDENEGYLFAAQCTIFDFYYPSKAYVNIHVLLIVFKKISDEDTDEDIEIDGTQEESAATYVSDPYDKVYNNIPEETHMLKLVPNCGYCTAKKFEYEPPGFCCRGGKVELAPVETPPQLKRLWDSADSDARHFRDNIRFFNGHFSFTSLYCCLDSMTTNVRGSGIYTFRAQGMMYHNIKSFGREGGAEHKHLELYFYDDDPSLEHRYRKCREEHQQKDKEVIKQIVDILRGNPYSEHLRTMGHVDNLDDYRIALNLDQTLNQKTYNTPLTSEVVAVWIEGSEGRGQFSKSVMLHGKDSSRHCIRSYHGCYDALSYPLFFPRGELGWHSNIPKVGVFMDEVDAYRATHRASNANDEDAESPSHLCVSVRDYYCYKFQIRPGVFNPILHGKRLFQQFAVDTYIKIESSRLDFIRKNQDRLRADLYQGLVDSMLDGDIRAEKIGKRTVLSTSFIGGPRDMRRRYMNAMALVRKFGKPDIFLTMTCNPNWDEIRRELLPGQTLQDHSDLVKRGLPHAHFLLIMQRKYKLTCPEQYDLLISAEIPSNKYPELRKMVIKHMMHGPCGSLNPNCPCTKGRKSCKNHYPRNFSDTTLQGKDSYPVYRRRDDGRTEKVRGCELDNRWVVPYNPYLLRLFNCHINIEACGSIKAVKYLFKYIYKGHDRASVVMRDASKADDDVDEIKQYRDARWVTPPEALWRIYGFELSQISPPVMQLQLHLPNMHMVSFHERQMVERVVNRPGVDRSMLTAYFEANSLHKEACGILYRDFPEWYTWQSGKGKVWQQRKRDTGGQVGRIVSAHPAEGERYYLRVLLNHVTGATSYVDLRTVDGVTLPTFREAAERRGLLESDNTLDECLTKRALFQMPSAPRRLFATILVYCEPSDVVVLWQKHLDSMSEDYQHRNPCKTHVEQMVLIDIRNMLQSMGKDIKTFPLPPIMDAYDDAIGTAREVYEEEIIEPAAGDVALKDCLNKEQRAAYDKILSAVDTDQGGLFFVDGPGGTGKTYLYRVLLATLRSQGKIAVATATSGVAASIMPGGRTAHSRFKIPLTIDDGAVCSFTKQSGTAELLRKASLIIWDEASMTKRQVVEALDNSMRDIMGRPGLPFG

SEQ ID NO: 75312 - protein, 1516 aa, Zea mays
  Coding DNA Sequence Number=SeqID_33533
  Gene Ontology: Mol. function=helicase activity; Biological process =viral genome replication
  Homolog annotation: Hit_ID=Q1EPC6; Match level="QueryCoverage=90%, HitCoverage=87%, E-value=0.0, Identity=61%"; Hit description=DNA helicase homolog, putative
  Pfam annotation: Domain name=DUF889; Domain location=1375-1516; Score= 70.7; E_value=4.7e-18; Accession=PF05970.5; Description=Eukaryotic protein of unknown function (DUF889)
MSDEQKNEKNKKRREARLRNKELNKKRSEASGDEKVNVDPDDDFDWLHINYTLQSNDIDATTEVLTPGSVHENVGHTPKHTRQRTAYFSERYKNLTPVEREFRRERLRLYNRTPRRKEAKVDHNRRRRVMQADTLNPTSIAMEDPTYTPELVHPTADVKGSDGSILTVCDWVIPEFVNAPFLPSPTQTEDVASPDMSTNTLKRKHHVPRGERQAILARRNQQFESAISRKVGTSIEDTSGDAVEGDDWTQRHTPMKITNNGDDDEGVIFEDDDDENEGYLFAAQCTIFDFYYPSKAYVNIHVLLIVFKKISDEDTDEDIEIDGTQEESAATYVSDPYDKVYNNIPEETHMLKLVPNCGYCTAKKFEYEPPGFCCRGGKVELAPVETPPQLKRLWDSADSDARHFRDNIRFFNGHFSFTSLYCCLDSMTTNVRGSGIYTFRAQGMMYHNIKSFGREGGAEHKHLELYFYDDDPSLEHRYRKCREEHQQKDKEVIKQIVDILRGNPYSEHLRTMGHVDNLDDYRIALNLDQTLNQKTYNTPLTSEVVAVWIEGSEGRGQFSKSVMLHGKDSSRHCIRSYHGCYDALSYPLFFPRGELGWHSNIPKVGVFMDEVDAYRATHRASNANDEDAESPSHLCVSVRDYYCYKFQIRPGVFNPILHGKRLFQQFAVDTYIKIESSRLDFIRKNQDRLRADLYQGLVDSMLDGDIRAEKIGKRTVLSTSFIGGPRDMRRRYMNAMALVRKFGKPDIFLTMTCNPNWDEIRRELLPGQTLQDHSDLVKRGLPHAHFLLIMQRKYKLTCPEQYDLLISAEIPSNKYPELRKMVIKHMMHGPCGSLNPNCPCTKGRKSCKNHYPRNFSDTTLQGKDSYPVYRRRDDGRTEKVRGCELDNRWVVPYNPYLLRLFNCHINIEACGSIKAVKYLFKYIYKGHDRASVVMRDASKADDDVDEIKQYRDARWVTPPEALWRIYGFELSQISPPVMQLQLHLPNMHMVSFHERQMVERVVNRPGVDRSMLTAYFEANSLHKEACGILYRDFPEWYTWQSGKGKVWQQRKRDTGGQVGRIVSAHPAEGERYYLRVLLNHVTGATSYVDLRTVDGVTLPTFREAAERRGLLESDNTLDECLTKRALFQMPSAPRRLFATILVYCEPSDVVVLWQKHLDSMSEDYQHRNPCKTHVEQMVLIDIRNMLQSMGKDIKTFPLPPIMDAYDDAIGTAREVYEEEIIEPAAGDVALKDCLNKEQRAAYDKILSAVDTDQGGLFFVDGPGGTGKTYLYRVLLATLRSQGKIAVATATSGVAASIMPGGRTAHSRFKIPLTIDDGAVCSFTKQSGTAELLRKASLIIWDEASMTKRQVVEALDNSMRDIMGRPGLPFGGKTIVFGGDFRQVLPVVRKGSRAQVVASSLRMSYLWESMSHLKLVTNMRAKNDPWFAEYLLRVGGGTEDTNTDGDIRLPDEVCVPYSGSDNDLDNLIDFVFPNLNKNMSDSTYITSRAILSTRNEWVDMINVKMIDRFSRGAYGVP

SEQ ID NO: 75313 - protein, 161 aa, Zea mays
  Coding DNA Sequence Number=SeqID_33534
  Subcellular localization annotation: CTP_CleavageSite=52; ConfidenceScore=5.32e-01
MPTPTFNHSALPLKRRPWVQSLGITSKMPTPTCYHSALPLKRRPRVQSLGITSKMPTPTFNHSALSLKRRPCVQSLGIASKMPTPTFNHSALPLKRRPRVHTPSITSKNADAGILSLGVISKMLTPYFVTQHYFQNADADLLSFGIASKMLVLCSIAQCYF

SEQ ID NO: 75314 - protein, 193 aa, Zea mays
  Coding DNA Sequence Number=SeqID_33535
MGKNNKRKREPTPPSEEFGDSEYSEEEFSSEAEGSPAPASPPASSDDSDDSQGIAAEVWTYIRAVERAGLEGSDESECSSDEEDSDGGDEGEDDDDDDDDDDDGWGWRRRQQGQHQGQQQGQHQGRRRRQQGQHQGQQQGQHQRRRRRRGQGQGQWLDATVETAPSDVKIDISVLEVALSNRTQDQRFRGNAE

SEQ ID NO: 75315 - protein, 280 aa, Zea mays
  Coding DNA Sequence Number=SeqID_33536
  Gene Ontology: Mol. function=nucleic acid binding; Cellular component= ribonucleoprotein complex; Biological process=rRNA processing
  Homolog annotation: Hit_ID=UPI0000162ACD; Match level="QueryCoverage =64%, HitCoverage=22%, E-value=9e-39, Identity=48%"; Hit description =RNA binding / nucleic acid binding
  Pfam annotation: Domain name=RRM_1; Domain location=114-179; Score =36.3; E_value=1e-07; Accession=PF00076.12; Description=RNA recognition motif. (a.k.a. RRM, RBD, or
MGSDPSRAGPALLKLPSIDAGYRVVHHAHGAPALCLLENPNANRLLKTLQGRMVSVRVSYLIEKQMIAIRIALGETHIIAETKKFLSRSGVNVAALEEHASKRNDKFKRSNYVILVKNLPFNSTKEELATLFQKHGSLDKIILPPTRVFALVVFVEATEAQYAFKKLLYTPYKDTPLYLECAPENILSPTSAPVDEEVKNEDGERILTKANIDQTVEGVSAEDIDPDRVEDSASLIASPNESSAMLHQNFASTFSFPQGGELGKLQIDISKFMARKPGYR

SEQ ID NO: 75316 - protein, 497 aa, Zea mays
  Coding DNA Sequence Number=SeqID_33537
  Gene Ontology: Mol. function=nucleic acid binding; Cellular component= ribonucleoprotein complex; Biological process=rRNA processing
  Homolog annotation: Hit_ID=UPI0000162ACD; Match level="QueryCoverage =88%, HitCoverage=53%, E-value=1e-58, Identity=34%"; Hit description =RNA binding / nucleic acid binding
  Pfam annotation: Domain name=RRM_1; Domain location=361-432; Score =71.1; E_value=3.5e-18; Accession=PF00076.12; Description=RNA recognition motif. (a.k.a. RRM, RBD, or
  Pfam annotation: Domain name=RRM_1; Domain location=5-89; Score=38.0; E_value=3.2e-08; Accession=PF00076.12; Description=RNA recognition motif. (a.k.a. RRM, RBD, or
  Pfam module annotation: Pfam domain module=RRM_1::RRM_1; Domain location=361-432::5-89
MSSRLCVKNLPKGADERRLRDVFSRKGEVTDAKVIRTNAKNLHVIELLLLVRDGKSRQFAFIGYRTNEEADEALKYFNNTYIDTCKITCEVARKIGDPDAPRPWSRHSLKKSEYGSKDKNNAGAVDAPPKGSNAQGTSAHASGSKGSVANDPKFLEFLEAMQPRSKAKMWANDTAATLDTAAKDSVVAAKESKGPLKNVLTSENDSSSEDTSDEKVANDLSSENASEQLKTENKQDKNMTDADFFKSKVKKNWSDSESDDEGSAHQSNTTTDDEDSSDESQDSDNQLADTKGDPDKRNIVDKDTLVENTDLQEPEDLDNKESEDLDGRPRGTEIHEDQERADENGAPITDEKKLALETGRLYICNLPYATSEDDLVELCRQYGDVEQAHIVVNKATKISTGRGYVLFSLPDSAVRALDELDNSSFQGRVLRVKAAKPLNKLESFHETKCGESKSQAEKVEENIARKNGISKSELLDREADDLLVRIALGETHVMQFL

SEQ ID NO: 75317 - protein, 150 aa, Zea mays
  Coding DNA Sequence Number=SeqID_33538
  Gene Ontology: Mol. function=protein serine/threonine kinase activity; Cellular component=membrane; Biological process=protein amino acid phosphorylation
  Homolog annotation: Hit_ID=Q9FPR5; Match level="QueryCoverage=39%, HitCoverage=6%, E-value=4e-28, Identity=93%"; Hit description=EDR1
MEAHFSSNELIDPRLAGNFTAEGIKYSNFSDLCQKQEAVKEVLGSLAKFACVLFPNIPEAYLDRWCDVYSFGVILWELATLRMPWSGMNPMQVVGAVGFQDRRLDIPKEVDPLVARIIFECWQNDQGGEDDNFAIVFAAMGVNMEKTQFL

SEQ ID NO: 75318 - protein, 271 aa, Zea mays
  Coding DNA Sequence Number=SeqID_33539
  Gene Ontology: Mol. function=acyltransferase activity; Cellular component=endoplasmic reticulum; Biological process=metabolic process
  Homolog annotation: Hit_ID=Q6ZFU0; Match level="QueryCoverage=54%, HitCoverage=50%, E-value=1e-65, Identity=74%"; Hit description =Putative mono-or diacylglycerol acyltransferase
  Pfam annotation: Domain name=DAGAT; Domain location=42-250; Score =32.6; E_value=9.1e-16; Accession=PF03982.3; Description =Diacylglycerol acyltransferase
MAGVSAAARRVHPGGVREKLVGAQDTEILLLLANWREAQTIHRVLATQLFFMFLPLSDKSRLGCKIARFISKYVIEYFPVTLHVEDYGAFDPNRAYVFGYEPHSVLPIAVGILGDLVGFMPLPKLKILASSAVFYTPFLRQIWTWLGLAPASRKSFYSYLGAGYSCIIVPGGFVKIAIEMGCPVVPVFAFGQLIDRPEGGYLTADLPMPRGEIVIGGPNIIKGYFKNEAKTNEVYKQGIKYSDFSDLCQKQEAVKEVLGSLAKECIIIFLA

SEQ ID NO: 75319 - protein, 84 aa, Zea mays
  Coding DNA Sequence Number=SeqID_33540
MNSSVSGNGKGDVAKIHRTVQWYTGLSNLSLACVALPNLTLCFLCDLHCKGERLQTVEIPRTREKTLTKKTVVFKLIIGSLERG

SEQ ID NO: 75320 - protein, 110 aa, Zea mays
  Coding DNA Sequence Number=SeqID_33541
  Subcellular localization annotation: CTP_CleavageSite=72; ConfidenceScore=5.25e-01
MTSDRSQPPMEARKGQQHPCRTVRVCFYKAQGASPTATLARLQGLKALLPRPRTRSNKFTGRLTVPAGPKHRQMYKGERLQTVEIPHTREKTLKKKIVVFKLIIRSLERG

SEQ ID NO: 75321 - protein, 140 aa, Zea mays
  Coding DNA Sequence Number=SeqID_33542
MSLTGRGGAEALDHANRSRSARALNSDDEFHPIRGRPARSEGTDEFPWTLAHPRDYAQRMEHRRRVLSTLAQGDRRWSGPSAHGKGPKRPEASFAHAPEKIPSGAQSLGEVASAVDVAGYTILSPSHGQRAMVADWIRLI

SEQ ID NO: 75322 - protein, 350 aa, Zea mays
  Coding DNA Sequence Number=SeqID_33543
MDTSVLLLLLPHGCAPLCSNPSATPSTLGERKHSHFPMKVGPAVGGGGGGHPSSIITKHTARSGSSRSIANLWHATQSGSHQQEAADRVDTATSVTDPLLEWAREAHWSMRGLPAVISLTRANLPPRNGVPKQLQPYMLRSSFPRVPETPPPIALAFVDLASSMEGSPPRHSCCSVSPAPFLFLTCGFQFSFLPSDGVLDQRGRVHGTVSGAALELEKGCVATAEGTTPMSGGGVPLHNPPTPPLPSNHVGAEVYYLPYVTDVEYYTTGGKKISSTSIYFESLPINPSLDDIQYVLLRLLLSRADRPQDFIPPSVSGLVWIEMGVCVSKDTRCCCCREPHNRVTNDRTDA

SEQ ID NO: 75323 - protein, 108 aa, Zea mays
  Coding DNA Sequence Number=SeqID_33544
MQVGGAFAYFGQKTQVYHQSLPSKYIPYLPPREDPIHYRRVAVLPSVAPLLFHPLRLLTADRPQDFIPPSVSGLVWIEMGVCVSKDTRCCCCREPHNRVTNDRTDAGA

SEQ ID NO: 75324 - protein, 145 aa, Zea mays
  Coding DNA Sequence Number=SeqID_33545
  Gene Ontology: Mol. function=G-protein coupled photoreceptor activity; Cellular component=membrane; Biological process=regulation of transcription, DNA-dependent
  Homolog annotation: Hit_ID=P25764; Match level="QueryCoverage=73%, HitCoverage=9%, E-value=1e-44, Identity=83%"; Hit description =Phytochrome B
MVRDEHVKFTLKFEYGFGYDSLVLEKSEFSLGDVMNAVVSQTMSLLRERDLQLIRDIPDEIKDALAYGDQFRIQQVLADFLLSMAQSAPSENGWVEIQVRPNVKQNYDGIDTELFIFRFACPGEGLPLTLSRICSAIPNGQPKKA

SEQ ID NO: 75325 - protein, 280 aa, Zea mays
  Coding DNA Sequence Number=SeqID_33546
  Gene Ontology: Mol. function=G-protein coupled photoreceptor activity; Cellular component=membrane; Biological process=regulation of transcription, DNA-dependent
  Homolog annotation: Hit_ID=P25764; Match level="QueryCoverage=58%, HitCoverage=14%, E-value=3e-73, Identity=83%"; Hit description =Phytochrome B
  Pfam annotation: Domain name=HATPase_c; Domain location=154-266; Score=52.8; E_value=1.1e-12; Accession=PF02518.16; Description =Histidine kinase-, DNA gyrase B-, and HSP90-like ATPase
MRLSFSSLAPLFLYFIQWLDYGCCYALPSYLGLFHILTCKVYADGDSSVSTYERRASLREFYGIREATTANPNDAHVAGVGKAYLRSYSSSTDTFVVPPRLPSPSSSLVLEKSEFSLGDVMNAVVSQTMSLLRERDLQLIRDIPDEIKDASAYGDQFRIQQVLADFLLSMAQSAPSENGWVEIQVRPNVKQNYDGTDTELFIFTFACPGEGLPTDIVQDMFSNSQWSTQEGVGLSTCRKILKLMGGEVQYIRESERSFFLIVLELPQPRLAAGRENQLIC

SEQ ID NO: 75326 - protein, 184 aa, Zea mays
  Coding DNA Sequence Number=SeqID_33547
  Subcellular localization annotation: CTP_CleavageSite=68; ConfidenceScore=5.03e-01
MNKHTGIRSAITNGTPVPPPQVRTTPLRGGRPAEQQKNDERPAAARSNHDANHPRPGQRSGLGSSFVAGVMTGGLSPAEDENQPFGPGDGGPGPLAPYLSRHGWRKSPWDSRTPFSPRRGGRKRQPTHAGAAPPTRLIFHLGLDDENPWGRGRSRGHDLARFPHRRTGGHHLGSPPVAGRGQAA

SEQ ID NO: 75327 - protein, 127 aa, Zea mays
  Coding DNA Sequence Number=SeqID_33548
MVSPVSCKRVIRVDVRAPFVGGRLGAQRHAQKYLRQLARRLLDAWAWASKLACQKSEKRVHLARLHAVCMAARPFRLLVWAKPGHAPPPAVTQDGDLQFDGGESGPGRGLYSSLGLKDFRHPGQDGR

SEQ ID NO: 75328 - protein, 334 aa, Zea mays
  Coding DNA Sequence Number=SeqID_33549
MDGATGSSEAVGDDGASSRRVVNGDDAANRCAARRGATEGGITRQRRRGRAWPGHAGQGTDDGELLRADVWFDKDGRGWGVRGESFLRGRGLRRPGLGRARTPRRRWGIRAWGCRCARTDPCRAGVETGSVEPPWLLGQCVDGGRMGPSSRKARQGEGRREGGRRCYARLRVGDVGAGTRTVGEDVPWRPENEQRLRERLGDLFCARELGLLGALASRPGGLGVGERPWRASWATVGGCTSGWAGARVLAAQGGSGVGRARGALMGRLGAREQRRCSRPIDAILEDLLDLWVRTHTRFRCANLILLVDVDCIVFIGELEVAKRTGARGKNNEKR

SEQ ID NO: 75329 - protein, 232 aa, Zea mays
  Coding DNA Sequence Number=SeqID_33550
MDGATGSSEAVGDDGASSRRVVNGDDAANRCAARRGATEGGITRQRRRGRAWPGHAGQGTDDGELLRADIWFDKDGRGWGVRGESFLRGRGLRRPGLGRARTPRRRWGIRAWGCRCARTDPCRAGVETGSVEPPWLLGQCVDGGRMGPSSRKARQGEGRREGGRRCYARLRVGDVGAGTRTVGEHVPWRPENEQRLRERLGDLFCARELGLLGALASRPGGLGVGERPWRAS

SEQ ID NO: 75330 - protein, 65 aa, Zea mays
  Coding DNA Sequence Number=SeqID_33551
MELGLRLKADLILLLFVRPTGRAYEGGPHRASVHPFLHGFVKSLDPWGVQKGFRGKVGDEVGSRL

SEQ ID NO: 75331 - protein, 53 aa, Zea mays
  Coding DNA Sequence Number=SeqID_33552
MELGLRLKVDVILLLFVRPTGRAYEGGPHRVGVHPFLHGLVRSLDPWGVQKGF

SEQ ID NO: 75332 - protein, 126 aa, Zea mays
  Coding DNA Sequence Number=SeqID_33553
MDWLLRRGKVRFLARGASPRHAWSTLRVGRGWERLCWPVYGGWGSGGRGHAVRGAMTAIWCSGPRYGPRLSGYMGSRPPQETNQQAGLMRADLTGLAYTHFCMDLSEVWTRGESRRVFGGRQASTP

SEQ ID NO: 75333 - protein, 203 aa, Zea mays
  Coding DNA Sequence Number=SeqID_33554
  Homolog annotation: Hit_ID=Q6Z4F1; Match level="QueryCoverage=47%, HitCoverage=8%, E-value=1e-19, Identity=50%"; Hit description =Putative leaf development protein Argonaute
MGMSALQKVVAAVVHDVNAEGWDRGLEGDNGGPAFETDFADQLKNFSKMGHGVSSGGGTVVDNNICHPTEFDFFVCIHAGAKGTSRPTHYHVLRDDNKFTADALQSLTYNLCYIPAALPQPTALPRSIPPSIHRQPRILASLASSADHPGRTYKMSSVYAPTTHRCGSTLSIVWYTRVPLRDAKNRANGTTKPTMVAARFQNL

SEQ ID NO: 75334 - protein, 299 aa, Zea mays
  Coding DNA Sequence Number=SeqID_33555
MASLPCSQIKLSKVLVRRKFHESGQTNLPRPLHWKPLRPGRFENLVLQCTKNLSWETSLPYASAEDDASIIKGTGVVEPIDTEEAPQIPILQSDEDVVEVKNEPSWHLKAFKLAMWLVGPSILLVTGIVPTLWLPLSSVFHGPNIAGLLSLVGLDFIFNMGAMLFFLMADACSRQENNIFDLKRSALDDLRTETTSSKKTSTFNVDVSACRNGPGHKGPVWFGDGRSEGKAEGGGEDGRTGGGGERGEDAGLPVDGWRDGAWEGGGLREGGGAADRMQGEVRPRADVGRMRRRGRTMWV

SEQ ID NO: 75335 - protein, 322 aa, Zea mays
  Coding DNA Sequence Number=SeqID_33556
MAQRLREESQRLPQQLGQAADFAERVASGVLTADVAAEVERLRTQHADAIREKSVAESKNRRLAEKVAALEAEKTDLRRKLAEERREANKVVAEAQSAEAEAKVARAEVSLASQRTEEWEARFNALRGRVDKAEASTRSEVKQTLTQFVDSYSELGARAADFEVPDREAGLRFLEWLQEELLNLPTIVEGFMSFASLVTCEGAVNALSRVGCRHYEVFDQADENFEREIFKVEDPVVKQSAGALFDRMWGAHGPEAVRERSDRAREQMEHAEDVEDLGGLNDAPPEAAGDIPVLPSDASEGPSAVPVPAAAGEDPVPVPAPT

SEQ ID NO: 75336 - protein, 543 aa, Zea mays
  Coding DNA Sequence Number=SeqID_33557
  Homolog annotation: Hit_ID=Q2MJJ9; Match level="QueryCoverage=6%, HitCoverage=8%, E-value=2e-07, Identity=82%"; Hit description =Putative RH2 protein
MAQRLREESQRLPQQLGQAADFAERVASGVLTADVAAEVERLRTQHADAIREKSVAESKNRRLAEKVAALEAEKTDLRRKLAEERREANKVVAEAQSAEAEAKVARAEVSLASQRTEEWEARFNALRGRVDKAEASTRSEVKQTLTQFVDSYSELGARAADFEVPDREAGLRFLEWLQEELLNLPTIVEGFMSFASLVTCEGAVNALSRVGCRHYEVFDQADENFEREIFKVEDPVVKQSAGALFDRMWGAHGPEAVRERSDRAREQVKMEHAEDVEDLGGLNDAPPEAAGDIPVLPSDASEGPSAVPVPAAAGEDPVPVQGFGPAYATATDNDNFVAASTVVVEDVLDDSVSKFFESDDSGSSVEWTEESSDEDLDYFLAFDVAAAEASPRVMGAEVFPVASGGRRRRRAVAKRRVSEVEAGRLRVDGASKRELLSSPAGIDQVDIRLQAVHLIGRLLALSNIYFGENNKVVFIEFLKRFSNKSAKVRIVAIDAVKACYMEVVFVLVILIFATLPHEILEMTSKFMTKPPRILMKREELTLT

SEQ ID NO: 75337 - protein, 539 aa, Zea mays
  Coding DNA Sequence Number=SeqID_33558
MEKCKPIKTPMPTNGHLDLDEGVTLIARVPSPVLPGSSPLVHQFRMPRTKNVSVPGGGDDEDPRRPFRQVKGKTVYLEQQEGRKKRRTDRAARAAAAAAAAAAQAELGDQPQTPSDQIAYRVRRLASRHRSSTHTSASTPPPTLPAPVTPIAPSTSTAIPATSTTLASTTPPPPAPASAPPVPPPRFRERDETEVRPLATDPCLFDLQRATAARAQMSAQIALRVHRLLDLPAFLLAAGADSEAHLTYLPGLQTLLTTSGSLCYGTSDPPRRPHGGVAPGTAHVAALFRPPFSDGSRRSPADFTTAAKYLYELIRRTLLPRMGYREATTHIQLWLLGALVSHSEFDVVDFLICEIEDTILDGIHARRHLPYAHYLCHIFAQLIQPPRFQGTLEASRLVFGSYRPAPEIPVPASAPVFDSQAEDAALRQFDTQGTAADDDDDDDDDFGVPPPPPMPPRSHDHEAGNSSAVPATPQAMDPALASILQTLTQQQAHLAAEQARLSERMLSMFQNMQDRQDALQQQLLLDRAESRAFMALMLQ

SEQ ID NO: 75338 - protein, 482 aa, Zea mays
  Coding DNA Sequence Number=SeqID_33559
MEKCKPIKTPMPTNGHLDLDEGVTLIARVPSPVLPGSSPLVHQFRMPRTKNVSVPGGGDDEDPRRPFRQVKGKTVYLEQQEGRKKRRTDRAARAAAAAAAAAAQAELGDQPQTPSDQIAYRLLLSLHLDSGSAMRLRFDPWATDPCLFDLQRATAARAQMSAQIALRVHRLLDLPAFLLAAGADSEAHLTYLPGLQTLLTTSGSLCYGTSDPPRRPHGGVAPGTAHVAALFRPPFSDGSRRSPADFTTAAKYLYELIRRTLLPRMGYREATTHIQLWLLGALVSHSEFDVVDFLICEIEDTILDGIHARRHLPYAHYLCHIFAQLIQPPRFQGTLEASRLVFGSYRPAPEIPVPASAPVFDSQAEDAALRQFDTQGTAADDDDDDDDDFGVPPPPPMPPRSHDHEAGNSSAVPATPQAMDPALASILQTLTQQQAHLAAEQARLSERMLSMFQNMQDRQDALQQQLLLDRAESRAFMALMLQ

SEQ ID NO: 75339 - protein, 128 aa, Zea mays
  Coding DNA Sequence Number=SeqID_33560
MQIHYVILKENLNLEDCNLANGEYILVPEQGAAQEVAPDPAPEPAPEDLPATALEGKPRRLPSSCDLRRGLPFRLWWVQVRSLHDGQSGSVRHCSLEEMVAGITWPSTLPPGWTVEWDPASAEEEHVE

SEQ ID NO: 75340 - protein, 281 aa, Zea mays
  Coding DNA Sequence Number=SeqID_33561
  Subcellular localization annotation: CTP_CleavageSite=70; ConfidenceScore=5.12e-01
MEETHLHVFDAFCPRQSTLTRAPACPAPRLSQTSTVARARAYKALPGFDYTLPRTLKPHRSFARRRLPVRSESAAAQSPCHRRPAIRAIPNPVQPSEKPVHTSVRLPEQGIGVCFAGEASPRSPELSTPPEYVDRVNHSTILRFLVHTVAASPREAHRALGLNQFAVVWPVHSPPTSTPACARRPGDSGHPRRQAVPRRDRQSLPEPTLPFTGPPSPPTIQIHYVILKENLNLKDCNLADGEYILVPEQGAAQEVAPDPAPEPAPEDLPATALEGKPRFYA

SEQ ID NO: 75341 - protein, 94 aa, Zea mays
  Coding DNA Sequence Number=SeqID_33562
MTGMGDHVSGRVRGKVCGQVHSGTRLTDLPYFSWQAGPLVQALVLDLGPPPEQLLAPCRFELQQWFNNFQKICKNYSGLPFAILACFKNLKLKI

SEQ ID NO: 75342 - protein, 78 aa, Zea mays
  Coding DNA Sequence Number=SeqID_33563
MTGMGDHVSSRVRGKVCGQWQAGPLVQALVLDLGPPPEQLLAPCRFELQQWFNYFQKFCENYSGLPFAILACFKNLKL

SEQ ID NO: 75343 - protein, 155 aa, Zea mays
  Coding DNA Sequence Number=SeqID_33564
MAFFMKYGNGYYFAASNWVLHFSLAGELVGGEGSSLSRAQLTNQMGQRASPGIKEGGRPKSGEDDLGSPVKFCQVRELGKLHKLLAKLTEWLARLGSDWSGLATVAEARVAMEGGKELTGAKEGRLAGEGEHGVSVEHEAAQREVEFKRGLAPNL

SEQ ID NO: 75344 - protein, 234 aa, Zea mays
  Coding DNA Sequence Number=SeqID_33565
MASPLLSLPSRASRSLSDPFDWSIVPWIGRTPHRRRAPPPAHVEPADSDHPRRRPAYRHDPEDLPYTLDHLTGAVSLPMNSPTPASGGDTRFSSDFLSHDGFPSILWEVLNSAGYPTPPLYTVQLYEEHRVPRCRVWLTLEAHPLQPGWRSLDSETIGFRTDDTTEAAAMKTLTTFCGYHPLEMVMHPLGLFPAEKKDDPMWCNHVSHVKDVWAMYPDLVGRVTVQCMSALYRL

SEQ ID NO: 75345 - protein, 50 aa, Zea mays
  Coding DNA Sequence Number=SeqID_33566
MSQKLQKGVGAQASSTQATLIMALVDYVRVIDYVGHMIRHRDIIEFGMVF

SEQ ID NO: 75346 - protein, 185 aa, Zea mays
  Coding DNA Sequence Number=SeqID_33567
  Homolog annotation: Hit_ID=Q6QP44; Match level="QueryCoverage=49%, HitCoverage=12%, E-value=3e-18, Identity=62%"; Hit description =Putative aminoalcoholphosphotransferase
MEKSPRSIPMGSGPAKADIRRDVAEAAEGSRRTGIVDTSNIDYGTSRLRPRHRLCRTHDPAQRYNRVWDGLLDAIRQMQLSADELRKLSRRNHVPEYLDMLHKNCLINAMSDVTQIAKGLDTMSRDLEEVLIGPQPLLEDYEALGMYDDFKTDVHCDCTELCGSDEDNSSFDSDEIPDRRMKGPI

SEQ ID NO: 75347 - protein, 102 aa, Zea mays
  Coding DNA Sequence Number=SeqID_33568
MGGGEPAEQQKTDERRAVTRSSSGDDNDFCSWGPNNGSTDLRADAAAKRPPPMPKLVRQGRAEGRRVGDTGAASGSEATRAREPGTLQLPAPQTTTAHPSDH

SEQ ID NO: 75348 - protein, 148 aa, Zea mays
  Coding DNA Sequence Number=SeqID_33569
  Homolog annotation: Hit_ID=Q9FH78; Match level="QueryCoverage=96%, HitCoverage=77%, E-value=1e-10, Identity=29%"; Hit description =Arabidopsis thaliana genomic DNA, chromosome 5, TAC clone:K9E15
  Pfam annotation: Domain name=Hin1; Domain location=5-123; Score=27.6; E_value=7.1e-06; Accession=PF07320.4; Description=Harpin-induced protein 1 (Hin1)
PRASYVAVRAASLYALVYVQTEALDDVQATVRVEARNGNTHSAAYFSRLECRLAFAGATLAVLRAYPFRVPARGVLPLGDAGSAAMETALRDGVVPFRVEGEARTRWKVAGIVGVDQWTRLACQLRFFWSNGTVLPFRCSSKSKFLFF

SEQ ID NO: 75349 - protein, 49 aa, Zea mays
  Coding DNA Sequence Number=SeqID_33570
MVLAVVVLLDVVVVLVVVLLQPRTPYVAVRAASLYVLVYGQTGALDDVQ

SEQ ID NO: 75350 - protein, 125 aa, Zea mays
  Coding DNA Sequence Number=SeqID_33571
MALATNSAAAAAAVSGVEATIHSAPRRILLLPIQTSDLAWRHADLVVSLEAAAAAGTGADGALGDAGALCLHQRPSSDAPPTLAPLWDLRWRAPHRRGTSAGEQTRTSAAPPNLDEQQRNQCLFI

SEQ ID NO: 75351 - protein, 109 aa, Zea mays
  Coding DNA Sequence Number=SeqID_33572
  Subcellular localization annotation: CTP_CleavageSite=101; ConfidenceScore=5.04e-01
MALATNSAAAAAAVSGVEATIHSAPRRILLLPIQTSDLAWAARGSGGFSRGGGGGRNRGRWRSRGCGGSLSSSATLLRRSSDARPAVGPPLASPSPPRDVRWRADQGNH

SEQ ID NO: 75352 - protein, 475 aa, Zea mays
  Coding DNA Sequence Number=SeqID_33573
  Gene Ontology: Mol. function=acyltransferase activity; Cellular component=integral to membrane
  Homolog annotation: Hit_ID=Q69X62; Match level="QueryCoverage=47%, HitCoverage=42%, E-value=1e-94, Identity=77%"; Hit description =Putative beta-ketoacyl-CoA synthase
  Pfam annotation: Domain name=ACP_syn_III_C; Domain location=357-442; Score=-17.3; E_value=0.00088; Accession=PF08541.1; Description=3 -Oxoacyl-[acyl-carrier-protein (ACP)
  Pfam annotation: Domain name=Chal_sti_synt_C; Domain location=300 -444; Score=21.7; E_value=2.7e-05; Accession=PF02797.6; Description =Chalcone and stilbene synthases, C-te
  Pfam annotation: Domain name=FAE1_CUT1_RppA; Domain location=157-343; Score=74.2; E_value=3.7e-21; Accession=PF08392.2; Description =FAE1Type III polyketide synthase-lik
  Pfam module annotation: Pfam domain module=ACP_syn_III_C::Chal_sti _synt_C::FAE1_CUT1_RppA; Domain location=357-442::300-444::157-343
  Subcellular localization annotation: CTP_CleavageSite=54; ConfidenceScore=5.49e-01
QDGKRSPSPFPAAISASPLQSPTLAASSPSPVMAHQCNLLPHGVHTSPPPPPARDASSSSRFAIPVVNQPRCHTPPHPRCHTPPSSFIAPTTSVSLLHAFATLTVSNGRAPVPRLRRSYATLPLAPHRAAQIYHLRLGGLLLHRRPGTCAWWAPDPGAHLRPPPPVELQSCSAQFWVCAADIYTIYEVGWCYERGSSRMMASFSASRPLSPPSLLARQSPFAAARSCGLVVRHWQKISSKLVSNCLFRMGGTAVLLSNQRSDRRRAKYELVHTVCTHKGADDRCFGCVTQKEDGEGVLGVSLSRDLMAVAGDALKTNIRTLGPLVLPLSEQLLFMATLVAKKLLKMKKVKSYIPDFKQAFEHFCIHAGGHAVLDELESNLALTDWHMEPSRMMLHQFGNTSSSSLWYELAYSEAKGRIRHCHRVWQIAFGSGFKCNSAVWRALRSVNPAEETNLWMDEIDRFPVDVPKVSKVSSD

SEQ ID NO: 75353 - protein, 78 aa, Zea mays
  Coding DNA Sequence Number=SeqID_33574
MANRLEEEASRAGGGGGEVWTPWGNRLHWCAITGEGELAARVGDCSGDAEIAAGKGGANAYIDHNRETINVIFYALKA

SEQ ID NO: 75354 - protein, 258 aa, Zea mays
  Coding DNA Sequence Number=SeqID_33575
  Gene Ontology: Mol. function=calcium ion binding
  Homolog annotation: Hit_ID=Q6ZFI7; Match level="QueryCoverage=52%, HitCoverage=100%, E-value=6e-52, Identity=76%"; Hit description =Calcium-binding EF-hand family protein-like
  Pfam annotation: Domain name=efhand; Domain location=24-52; Score =13.2; E_value=0.46; Accession=PF00036.22; Description=EF hand
  Pfam annotation: Domain name=efhand; Domain location=74-102; Score =25.8; E_value=0.00016; Accession=PF00036.22; Description=EF hand
  Pfam module annotation: Pfam domain module=efhand::efhand; Domain location=24-52::74-102
MSVEILDGSTVQSFVEDERAFNSSVDGRFAALDADHDGLLTYAEMAGELMSLRVLEKHFGVDEAAMAPEELGALYRGLFARFDRDGSGKVDRHEFRAEMKEVMLAVANGLGFLPVQMVVEEGSFLKVAVDRELGQLAKAADHEEIHEYEGESPCLSTTTATTLPPVPMPAPAPATHHVDLAEVPHVPGLHAEDGRHRANSTKQGITVFVPKDSAFAAFGEETTLGNLSSGRCSRTTRWAEFDQLSSHGPVDTLAGSQC

SEQ ID NO: 75355 - protein, 775 aa, Zea mays
  Coding DNA Sequence Number=SeqID_33576
  Homolog annotation: Hit_ID=Q53NS3; Match level="QueryCoverage=8%, HitCoverage=9%, E-value=2e-21, Identity=74%"; Hit description =Expressed protein
  Pfam annotation: Domain name=PPR; Domain location=531-565; Score =31.6; E_value=2.7e-06; Accession=PF01535.11; Description=PPR repeat
MSLDTKLILDAISELFDKFDARWAKRDTTRDLFDSGNDSVEQHYEEPIIADNWGGFFNDDEQYCAALDALPNNIHPDLLNSSSRHSHDHLFVLNPVVAQDYSAEEAMAAMEAVMNAGDPARLNQPSPSPSLLVVGNLLLPSLAVPQLQAEVVDKQYRAAMSPVHPLPVVDDLYHDDAAGVMTLGSTAFKVFDVWRPRVDASIEHLQTSMAQICASLPSLESPWSQYTRHDGSGHPNAHGAASILVLVKCVLHEPPLGGYDGSLDDEPESGVTYIDAPLDRAIGCVGHASVAAATHRTDAVGVVGHGLLAHVVAAGSTQATCSTIYLADDRNFADISVGALWEETMEQATTTLHPSFPKKKLVLLSSSTDGKLGGMKAYHLWFDPSVLVMLLTRYLAERMTLYYDANTDDYHNVPRVETRVSDFGSTSTLRYLPRGQPSQMGSAYLQRLRLLVVSACDQLREARDPGGAQPGRHLRTITASAQPAVVARGARAASHHALHAMGQPCARDAREHLRLSLLKHDPPRSTVMNLGSLNVMIDAYCHVEWFLDAILVFGKMVEKRCAPDALSYNNLIDWLGKNKILEEALDKEGRDGVQVRPMPWPSFFGITIWRHLLESLSLVFYCSDETPVVIRQVVKTGANLFAGIRILDMFRLRIDLGASRILRRGEWLSEWALVDCLVEYKGLLTLRAGEGVHRAVAAQLVELRPARGTGAATGAEVAQRRLLAKRRESRVLGHEDGDTLLRAVRSMTSVFCMQSRNVWNLREVHVGKNKDWLKD

SEQ ID NO: 75356 - protein, 255 aa, Zea mays
  Coding DNA Sequence Number=SeqID_33577
  Homolog annotation: Hit_ID=Q6QP51; Match level="QueryCoverage=53%, HitCoverage=55%, E-value=5e-14, Identity=35%"; Hit description =Putative growth-regulating factor 1
MSRLLETTEPVQWLEAAPRMTLQHLQHKDDALVFHSSNDSRTRRRYPASRPSRCINYLGSGKGTFRRSPSQQKKWAPSPPTDQGFKGCTLWGSATSPEHSGSEPFTDQGFEGWPLGVILQPPRTCRVRDDPDYVRYMAKARATLPRYPKTFSRPAGMVCNGIPPKGGTEPSDPIKWVRVQRITCRGTPNTPKHGWKTSSKQTIKTGKQHYSPRSDYCANHQGKTKDRRYVEFGEDLITWVCLELNARALVTVGVK

SEQ ID NO: 75357 - protein, 121 aa, Zea mays
  Coding DNA Sequence Number=SeqID_33578
  Homolog annotation: Hit_ID=Q6QP51; Match level="QueryCoverage=78%, HitCoverage=44%, E-value=2e-09, Identity=46%"; Hit description =Putative growth-regulating factor 1
  Subcellular localization annotation: CTP_CleavageSite=69; ConfidenceScore=5.46e-01
MSGTVIRGTPNTPKHGWKTSSKQTVKTGKQHYSPRSDYCANHQGKTNNRNSASPDPRPRPQPRPREKVSASPGSRPRLQSQPREKVSASPDSRPRPQSWPREKVPASPDLSLGLRRSRRLA

SEQ ID NO: 75358 - protein, 58 aa, Zea mays
  Coding DNA Sequence Number=SeqID_33579
MDVADLRMARPSPVRWTDSHTTTRQQVAVRLLRKAGIGKRDILKEPFATKEMGHEPSY

SEQ ID NO: 75359 - protein, 259 aa, Zea mays
  Coding DNA Sequence Number=SeqID_33580
MAWADRADPTATTRPSARVPARVVVSGKYQYIPLQTGSQLHSRRNELPPHQKGCEITNSKRLTGDHCITSDNDLRLGRLDSSSDCPRANATVKRFSPSPPTRGREQAIKAKEPEVQPQVALTVSSAEATTSAVGSLTCGGHHLSTDDSGYLRTNTAPANGGRPSVHKEVLTPVLATGVRTRPSRDADTAPAVYDVLYDPLVRPTAREGPWTWPTYARRDRRPCGGRTTTPRPGSRWQFASSARLVNALLPQMLEEEAGR

SEQ ID NO: 75360 - protein, 282 aa, Zea mays
  Coding DNA Sequence Number=SeqID_33581
MTDAEKEVATERRMDSPPRCDCGDRAVIDEDYDKQFCCPNIDYPYGWRKCRFREWLYGPLSHWPEPEVKEKRYMGWAAEEVKFDPVLCKCGIEAKYGLVPSELGVGYFCGHMVDYDEETRKCSWESYDDKGEVMRTIESKRIMGQKMRCGSQLVDSYINDRIRDMRREAKSAFYDSPKRAEYRRLKAADEKRAQDAREWEAAQAEKQMLDNLADRLKGKIGSGVNYLADEAHARYVRQWAELGRGTGRAAATALGGARAGGGDRARGSSSGRRAPATSGGAR

SEQ ID NO: 75361 - protein, 395 aa, Zea mays
  Coding DNA Sequence Number=SeqID_33582
  Pfam annotation: Domain name=zf-GRF; Domain location=34-78; Score =10.5; E_value=0.0016; Accession=PF06839.3; Description=GRF zinc finger
MYREALWQKRGRPRELYPDVSSKDAPVPPELPVPNCDCGRLAWVHQSQHPDTAARCYYLCGTLDGHQRCFFFQWIDGPDKFDPRYLLFVNWLSGRTSHERFKRWVPPPPNPPPMTDAEKEVATERRMDSPPRCDCGDRAVIDEDYDKQFCCPNIDYPYGWRKCRFREWLYGPLSHWPEPEVKEKRYMGWAAEEVKFDPVLCKCGIEAKYGLVPSELGVGYFCGHMVDYDEETRKCSWESYDDKGEVMRTIESKRIMGQKMRCGSQLVDSYINDRIRDMRREAKSAFYDSPKRAEYRRLKAADEKRAQDAREWEAAQAEKQMLDNLADRLKGKIGSGVNYLADEAHARYVRQWAELGRGTGRAAATALGGARAGGGDRARGSSSGRRAPATSGGAR

SEQ ID NO: 75362 - protein, 147 aa, Zea mays
  Coding DNA Sequence Number=SeqID_33583
  Subcellular localization annotation: CTP_CleavageSite=53; ConfidenceScore=5.25e-01
MAGMAHRSYSGPPEAFSPPFSPLCLWIRGLFPAIEFVVAPSSSLPNPGATLARASLNSGDLTAAERSSAARSYNEQSEVPECVVGDLLEQKPGEGKWPSMGSRRSARSAKVGVQRFFQFGFVSHPPWGGGDAGNMDDFEDFQEYDEF

SEQ ID NO: 75363 - protein, 122 aa, Zea mays
  Coding DNA Sequence Number=SeqID_33584
MSDGSSNLSLRLWLLRELRVVTGTVTGVVVVSVSVKGASLAEVQGKATSQTPPPAEARGKSPAAPTPAPGVGAPAPRAGDDAVSPDAKPTQAADWGFATKKELELVIFLELLEVIHVASITS

SEQ ID NO: 75364 - protein, 407 aa, Zea mays
  Coding DNA Sequence Number=SeqID_33585
  Subcellular localization annotation: CTP_CleavageSite=46; ConfidenceScore=5.13e-01
MGRPRRRDPGGSQRLGRGSTRRGPPGVAPHGGAGAAPWACGGSARRATTAPKARRPRALPLRAAPQPLGVLPCSDDLGLGGARVAPSGPGLRQPHAGHGFDVRGRDAASWGHPCGRACHGGAGAEAPGGAGAPASPCGSSAPADGGQTRACPPARGHKAFPPAAPRPCGHDELGSGADTRTRRARGSVERAGAQWPCRGMAAWPRHGHGRSGPGLGLTATLAPLPRRGRGGLGLCTAALVPTLAWAHSPDGASPGHSAARSPDSTQRALVRIRRGTIAIYLFPFVRNLHNLESLALTIEVTKKAQSKVGKSNTNKTQIRSTTTHKSQLELETQRMEFATQMELNSLTLRIKSVESESGSLRMFREGLVLSSMCLGVPFIAPRQLGAVGGQLGRPNLPFVGWCTGQSL

SEQ ID NO: 75365 - protein, 88 aa, Zea mays
  Coding DNA Sequence Number=SeqID_33586
  Subcellular localization annotation: CTP_CleavageSite=20; ConfidenceScore=5.29e-01
MEARSPYQRTWGGLGGATPVARSGSAAGARGAVLRAWPPMAERARPPGRAGARPGGRPRLRRRGGLVPSRYARPRSPSACCLAPTTSA

SEQ ID NO: 75366 - protein, 114 aa, Zea mays
  Coding DNA Sequence Number=SeqID_33587
MDGVTQAVENLPRLNGSAQDALQLLKSLQFQLDLLAQQLPTFDEVQSGQATLKSWDEQYKKTLLLGDGEESTIRRRNLQPLLSQTSDCVHCLSTFLMVTVGNHFLKIKGHIAPL

SEQ ID NO: 75367 - protein, 114 aa, Zea mays
  Coding DNA Sequence Number=SeqID_33588
MDGVTQAVENLPRLNGSAQDALQLLKSLQFQLDLLAQQLPTFDEVQSGQATLKSWDEQYKKTLLLGDGEESTIRRRNLQPLLSQTSDCVHCLSTFLIVTVGNHFLKIKGHIAPL

SEQ ID NO: 75368 - protein, 114 aa, Zea mays; identical to SEQ ID NO: 75366
  Coding DNA Sequence Number=SeqID_33589

SEQ ID NO: 75369 - protein, 109 aa, Zea mays
  Coding DNA Sequence Number=SeqID_33590
NGQSVFPEEVAEEVPDQQFGEGKGTRGVVASSSCRQWGPGTVFALPRLSAELRSDTLPDHLGSDQWGLALPGQKGNHDSWVKCATSAEGSETDISAVLTVMSCLGILFD

SEQ ID NO: 75370 - protein, 88 aa, Zea mays
  Coding DNA Sequence Number=SeqID_33591
MGSRHSACSAEAECRGSFVLLLLVTLLRGELRSDTLPDHLGSDQWGLALPGQKGNHDSWVKCATSAEGSETDISAVLTVKSSLGILFD

SEQ ID NO: 75371 - protein, 109 aa, Zea mays
  Coding DNA Sequence Number=SeqID_33592
NGQSVFPEEVAEEVPDQQFGEGKGTRGVVASPSCRQWGPGTVLALPRLSAELRSDTLPDHLGSDQWGLALPGQKGNHDSWVKCATSAEDSETDISAVLTVMSSLGILFD

SEQ ID NO: 75372 - protein, 305 aa, Zea mays
  Coding DNA Sequence Number=SeqID_33593
MKHENNVDAESNKERRGLTGVNDDDDGAAQNSKHPAGIPTCCSLRSAKQRAARRRRSCCSWREKLGAGNLDATAADRAERGTVQGRYDCCCVRENEQGNRGAKAAGRAEASARASCCCIHGQGAVFGHVKKGSRLDEKRTGRCKENGSGCSWLLGKKGAVGGAGKFFWTPSMESGARAHGVEDREQMRRAMGMGKESWAALQFLRAGEDSSLLQPRLKGRGVERHGGCFAARHGQQGRGRKRLAPWEQLQRAEEEGRPAAGIPSAGSRGPARGERPASWEELGGMGAWSSAPCLLPCRRNGGAAA

SEQ ID NO: 75373 - protein, 305 aa, Zea mays
  Coding DNA Sequence Number=SeqID_33594
MKHENNVDAKSNKERRGLTGVNDDDDGAAQNSKHPAGIPTCCSLRSAKQRAARRRRSCCSWQEKLGAGNLDATAADRAERGTVQGRYDCCCVRENEQGNRGAKAAGRAEASARASCCCIHGQGAVFGHVKKGSRLDEKRTGRCKENGSGCSWLLGKKGVVGGAGKFFWTPSMESGARAHGVEDREQMRRAMGMGKESWAALQFLRAGEDSSLLQPRLKGRGVERHGGCFAARHGQQGRGRKRWAPWEQLQRAEEEGRPAAGIPSAGSRGPARGERPASWEELGGMGAWSSAPCLLPCRRNGGAAA

SEQ ID NO: 75374 - protein, 136 aa, Zea mays
  Coding DNA Sequence Number=SeqID_33595
  Gene Ontology: Mol. function=pyridoxal phosphate binding
  Homolog annotation: Hit_ID=Q6ZCF0; Match level="QueryCoverage=73%, HitCoverage=19%, E-value=4e-29, Identity=61%"; Hit description =Putative gamma-aminobutyrate transaminase subunit isozyme 3
MAMLQSVETDTWFGSLGRCLQKAESGDAPNQDEMHARAYSRTDASSLLKHVTGTASLQGYADSLLDATVRHFGSAPSAQPEENGFKGHGMLAPFTAGWQGNDLHPLIIERSEGSYVYDINGNKYLDSLAGLWCTTL

SEQ ID NO: 75375 - protein, 82 aa, Zea mays
  Coding DNA Sequence Number=SeqID_33596
  Gene Ontology: Mol. function=pyridoxal phosphate binding
  Homolog annotation: Hit_ID=Q1EPF9; Match level="QueryCoverage=63%, HitCoverage=9%, E-value=2e-17, Identity=75%"; Hit description=Gamma -aminobutyrate transaminase, putative
MRIACWMRQSLHPSIIERSEGSYVYDINGNKYLDSLAGLWCTALGGSEPRLVKAATEGAWLCCAIRSIYELFVLLHLGTMGN

SEQ ID NO: 75376 - protein, 144 aa, Zea mays
  Coding DNA Sequence Number=SeqID_33597
MGKHVPSLLMLLLSRDRVPLDSPTRWQILWCRLGCWIRGYLLSSSLLRHEDVLSVSKVTVYRNAMNMQGSSSAAGVPANSRRSGSIQWHGELHGGRRDCEHKESENGSVDYRSTHSGGVVNSGERGLASPAKQTSIPRSGSFTE

SEQ ID NO: 75377 - protein, 224 aa, Zea mays
  Coding DNA Sequence Number=SeqID_33598
MGKHVPSLLMLLLSRDRVPLDSPTRWQILWCRLGCWIRGYLLSSSLLRHEDVLSVSKVTVYRNAMNMQGSSSAAGVPANSRRSGSIQWHGELHGGRRDCEHKESENGSVDYRSTHSGGVVNSGERGLASPAKQTSIPRSGSFTEVCSLVSEGWTGLGKAGLAGLRRQGLGWPRTRRARANDGELSFGESASNTWSFSSARVPQLAQVANLRILAKIRRESFPGT

SEQ ID NO: 75378 - protein, 189 aa, Zea mays
  Coding DNA Sequence Number=SeqID_33599
  Gene Ontology: Mol. function=oxidoreductase activity; Cellular component=integral to membrane; Biological process=metabolic process
  Homolog annotation: Hit_ID=Q8H184; Match level="QueryCoverage=73%, HitCoverage=35%, E-value=8e-40, Identity=60%"; Hit description =Integral membrane protein, putative
MHPKPEGGGDDDGAAAEVGSPRSGYFRQRSMHAAAAAADPEAARRPFHVENPPCSAGGGLRPSESVTKLESLERAALAPAVVLRTGFYILVWYAFSTCLTLYNKTLLGDKLGKFPAPLLMNTVHFALQAGLSKLIIWFQPKGPEAAVDMGWKDYFMRVVPTALGTALDINLSNASLVFISVTFATMVLL

SEQ ID NO: 75379 - protein, 458 aa, Zea mays
  Coding DNA Sequence Number=SeqID_33600
  Gene Ontology: Mol. function=structural molecule activity; Cellular component=cytoplasm; Biological process=phosphate transport
  Homolog annotation: Hit_ID=Q8H184; Match level="QueryCoverage=88%, HitCoverage=92%, E-value=1e-126, Identity=59%"; Hit description =Integral membrane protein, putative
  Pfam annotation: Domain name=DUF6; Domain location=94-227; Score =13.3; E_value=0.011; Accession=PF00892.11; Description=Integral membrane protein DUF6
  Pfam annotation: Domain name=TPT; Domain location=236-416; Score =130.7; E_value=4.1e-36; Accession=PF03151.7; Description=Triose -phosphate Transporter family
  Pfam annotation: Domain name=UAA; Domain location=87-422; Score= -95.5; E_value=1.2e-05; Accession=PF08449.2; Description=UAA transporter family
  Pfam module annotation: Pfam domain module=DUF6::TPT::UAA; Domain location=94-227::236-416::87-422
MHPKPEGGGDDDGAAAEVGSPRSGYFRQRSMHAAAAAADPEAARRPFHVENPPCSAGGGLRPSESVTKLESLERAALAPAVVLRTGFYILVWYAFSTCLTLYNKTLLGDKLGKFPAPLLMNTVHFALQAGLSKLIIWFQPKGPEAAVDMGWKDYFMRVVPTALGTALDINLSNASLVFISVTFATMCKSASPIFLLLFAFAFRLENPSIKLLGIIVVISTGVLLTVSKETEFDFWGFIFVTLAAVMSGFRWSMTQILLQANGFFIYVHVDLHVSRKTITAYSGLVLTSVSLPIRGGLKNPITLMSHVTPVMAIATMILSLLLDPWSEFQKNSYFDSPWHVMRSCLLMLIGGSLAFFMVLTEYILISATSAITVTIAGVVKEAVTILVAVFYFHDEFTWLKGFGLFTIMVGVSLFNWYKYERFKRGQINEDDVSSPFTGDVKYIIIDDLEYQNEFEEDT

SEQ ID NO: 75380 - protein, 75 aa, Zea mays
  Coding DNA Sequence Number=SeqID_33601
MAELKSQFQSWFSSILPLGSLSLSWLCPSMAAIGELGTTDRVLIPTAKPILAADSRAVEAVCELIDEDEDCGKWL

SEQ ID NO: 75381 - protein, 78 aa, Zea mays
  Coding DNA Sequence Number=SeqID_33602
MAAIGELGTMDRVLIPTTKPILAADSRAVEAVCELIGDELRMGHTGLVVNMGHEVDLAQTREKQIPRYKINDILLVIS

SEQ ID NO: 75382 - protein, 85 aa, Zea mays
  Coding DNA Sequence Number=SeqID_33603
MAAIGELGTTDRVLIPTAKPILAADSWAVEAVCELIGRMWLRKEDKPDIWGPHPSVAGDQSARTHGQMGDGLTAGEIGPRFLIRI

SEQ ID NO: 75383 - protein, 38 aa, Zea mays
  Coding DNA Sequence Number=SeqID_33604
MAAIGELGTTDRVLIPTAKPILAADSWAVEAVCELIDF

SEQ ID NO: 75384 - protein, 70 aa, Zea mays
  Coding DNA Sequence Number=SeqID_33605
MAAIGELGTTDRVLIPTAKPILAADSRAVEAVCELIGVYVDVIVDITPQLITINQRSKSDKFHKNKHSSV

SEQ ID NO: 75385 - protein, 68 aa, Zea mays
  Coding DNA Sequence Number=SeqID_33606
MAAIGELGTTDRVLIPTAKPILAADSRAVEAVCELIGRMWLRKEDKPDIWAPSVGGRRPERAHTWANG

SEQ ID NO: 75386 - protein, 68 aa, Zea mays
  Coding DNA Sequence Number=SeqID_33607
MAAIGELGTTDRVLIPTAKPILEADSRAVEAVCELIGDELRMGHVGLVVNMGHEVDLAQTREKVNSKV

SEQ ID NO: 75387 - protein, 1319 aa, Zea mays
  Coding DNA Sequence Number=SeqID_33608
  Gene Ontology: Mol. function=peptidase activity; Cellular component =cell surface
  Homolog annotation: Hit_ID=Q6K675; Match level="QueryCoverage=95%, HitCoverage=87%, E-value=0.0, Identity=45%"; Hit description =Putative streptococcal hemagglutinin
  Pfam annotation: Domain name=DUF566; Domain location=1025-1319; Score= -76.5; E_value=0.00014; Accession=PF04484.3; Description=Family of unknown function (DUF566)
  Subcellular localization annotation: CTP_CleavageSite=16; ConfidenceScore=5.86e-01
MPAAAPTTPRRHPSPNAGGRASSPTPAGSQAKRSQSTERRPVTPSRPSSGGSRPSTPSRISAPASPSSATSSPSSFSSSSTPVGDAVPETQIALRRLPGGRAPDGLWPSMRSLSSSFQLESKGKKISSSSSADQAKTRDAAPADRKRSPLRGRATPEQSENPHAKVIDHHRWPAMMGGRVSASTMSKSMDLTDKISRSALPSVPSRGVSPKRTTVSSAANTLSRSIDLADKIDRLVSSSMSSQGESPRKSPCNGADDVSKKVGVRKDLKLSSLAISRRVSPVTTDDKIDRLVSSSMSSQGGSPRKSPCNGADDVSKKVGVRKDLKLSSLAISRRVSPITTAASDGTRTLSGSMDLTEKDNSTLSPVSSPSISPSASLSSVSNAASQTTTKSSERLIGPVSNLSSSRGLSPRRTTSGGIVDLMKSIDFPEKDRRPASSRGFSPRRRLVSDGVNDIGKNMDFAEKDSRVVSSSIPSRGVSPRRRLASDGVDTMCRSSEFSGKDNRPSTSSSTSRGMSPRRRLASDGISAVTKGMDFGDNANRPSTSKGVSRGISPRLQLASDGVGNVSKGTDLADGLDRPSTSYATPRGMSPRRRVASDASNATSERIKFTKEDSGTVSSSVAPRGVSTLRQLASDGVESVSKSMDLVEKDTRPTTSSASSRGLSPRRRLSSDGVNVISKSMDLVENNNKLVTMSAAARGVSPRRRLASDGVKVTSKSIDLVENSNKPLTVSAATRGASPRRRLTSDGLAFISKSTNITEKSIRPSTPSMSSRGMSPRRRLASDGINAVLDTEFADKNCRPSSSSAALRGVSPRSRSASNAISTGMTNAENDSRPSTTSSPSCQTLQSSRLESNGVNILSKDMEISSTVSGCTSDSRLDGAGALVKSIDVTEKLTVSTEDGGGEDDPGRIDSSDVVTSAVSSSLASQEVSSRHVTDDVKNASESVGATQKGNRPLSVKVPSRVASPRRRLASDGIDTISKSMDFAEKDKKPMTVSVPSRGMSPRRTARSDSADIMSKSMDFPLQVFSTRRVLGPDGANAMSRSMDLTDKIRQKISSTMQSSRVSPRKMPLAYNRIKGPEILSGDAESPGSADGNESQEENASSSPDAPSNSSEKSTPPKQLARRSPSPSHILICPSSSSNASSTPSFVSRRLPSPSRTRPSTPVSPCSSARSDSASSILSYIGDATRGKKSPTHTEDAHQLRLLHNRNLQWCFTTSYVDELLSIQKISAETMLYSVWDANSRMCDSMVIKRNYVQQLRQEVKLGIVLKEQESITIIELINIKTMSIHALIITIFSTIASFNFIFHIKIIKNIFLILVIFIC

SEQ ID NO: 75388 - protein, 126 aa, Zea mays
  Coding DNA Sequence Number=SeqID_33609
MRSSGDSWAQVAGEVLIADGIAAAICAPGLRLFGFDSLSSALEWGRGRGPCRSSVCPEVIAAAVWPPRAEVVVAAAGAGGGEPPGVLSPAGPPMWGGCSYLRGRNRSSVCNGTLSAGVLFIASVRA

SEQ ID NO: 75389 - protein, 240 aa, Zea mays
  Coding DNA Sequence Number=SeqID_33610
MPRQSPTLPRGLEGGNPLCVKIFLGKSLSARTSFVLFDYFESGILKTTEYTQLSPEDISPAHGLGDPTQALVPPVDGPARLRPTKILFEPTPPLSMLTPLPPAPAHRRAAEGPDRRNEQDTGTQGAITNRTPVSPPQVRTTPPHWRACGRQNPRWLTAARSGSSDNDLRSGRPNSSSDDLRADATATRPSPTPPLEGRGQAIKAKEPEARSADGSSDPVGDEDFSSHLRPAVPRGPHPGS

SEQ ID NO: 75390 - protein, 224 aa, Zea mays
  Coding DNA Sequence Number=SeqID_33611
  Pfam annotation: Domain name=zf-CCHC; Domain location=167-184; Score =13.1; E_value=0.0069; Accession=PF00098.13; Description=Zinc knuckle
MAGNQFQQHGGRVLPQGPRDTTYLEFSETRPPLFIEAEEPLEADEWVDTDLKKKNCFMRGLNDRLQRKKATCLDLTYNKAVSTALAVEAKNVGHGKSKGFGGERSNQGPEKRTRLVIRPFNQNRSSPRPPSYPFKHPVFIRPTTAPTLTNQPTAPGTHFPTLLSSSSGCFNCGKSEHFIKDRPYPKQNKSNFQQTPGNSSQGKGNMADSSKSKNFKKTRREYYT

SEQ ID NO: 75391 - protein, 166 aa, Zea mays
  Coding DNA Sequence Number=SeqID_33612
MTRTKTTKRKSTGPLSVPRHQLASRHEGSSSGSNDPIGASGQNYATGIGHLHPDVPLDVAAMGARPSGIANEGPDGELDLFRPPPSMSLADERCHHELAHMTVRGHPTVGEDTPNLPPVPPTLVEAIAALVNATANNTRFFHEMAGNQFQQHGGRVPPQGPRDTTY

SEQ ID NO: 75392 - protein, 243 aa, Zea mays
  Coding DNA Sequence Number=SeqID_33613
  Subcellular localization annotation: CTP_CleavageSite=40; ConfidenceScore=5.16e-01
MALLRTVGGGGRSASLEPERPASKGSSGGKGAARRTGRLGAGRGSSGNPQSDRPRRFGKPAIQQYAVHQRSHQKPPRNHFERGQRLRHLATSSAPAAGPTETKRAGTPFAGLGTLTKACGDVLPRRGLVQPQGPPESKFQQGDGFSTSSCASTADGREGKVADLVIRDRTWASELDEAALWDDFVAGLRLVLIKRRVSLPVLSLSEQRLSAKTSSEGWRLCLRPNICPPRDQFDKVTWCRRRR

SEQ ID NO: 75393 - protein, 214 aa, Zea mays
  Coding DNA Sequence Number=SeqID_33614
  Subcellular localization annotation: CTP_CleavageSite=75; ConfidenceScore=5.05e-01
MALLRTVGGGRGGRGSSGNPQSDRPRRFGKPAIQQYAVHQRSHQKPPRNHFERGQRLRHLATSSAPAAGPTETKRAGTPFAGLGTLTKACGDVLPRRGLVQPQGPPESKFQQGDGFSTSSCASTADGREGKVADLVIRDRTWASELDEAALWDDFVAGLRLVLIKRRVSLPVLSLSEQRLSAKTSSEGWRLCLRPNICPPRDQFDKVTWCRRRR

SEQ ID NO: 75394 - protein, 198 aa, Zea mays
  Coding DNA Sequence Number=SeqID_33615
MKSLIKMVDRLPRAHHLLGLQEHGGGAALCFLFLVAVVASAEGHKMGRKKSEALSVRQELTAAVLQVAPEEVVSIFYNKCCAKCLQDLLAADPVTSLWRLGSSAHLKHRRGIITETAPASPSNRPEQVRTPPRVTHHISVGGEQVVDHVGSLPREQQIDRSHNNVEVERADNVLSDPLPSLPSAVEAQEDVENPSPFP

SEQ ID NO: 75395 - protein, 83 aa, Zea mays
  Coding DNA Sequence Number=SeqID_33616
MELPLDAQSSGRRLDVDERVEQCRAVAGVLHVLARFVQVLQMQHLRGHISNTRPHTRGEDKPSKPKRRRYLSWIERHRLTSLL

SEQ ID NO: 75396 - protein, 355 aa, Zea mays
  Coding DNA Sequence Number=SeqID_33617
MVTTGSMVGRSKPGCGLCPALSFKDLHHPCWGGERGEPELYLQHSGESVLTDLAEGADFDNAGLASRKRRQLQRAWLAGSASSGAASGATSHRWGGAWLSAHRGATVASCVPGDRPRRRTSLGRRSCSWIVLSSLRHDASVRRSVPARPRGLEWGSAGAGWGGHSRTDLRLFGYDGLSSPLVWGRGRGPSHSSICPEVLLCGGCSYPREWNRSFVCNGTLSAGVCSLRLSGSPSAQSALPLKASLAQLRNPWPLCDEPEPEAAVSAWTEAESARKRASSAQEQVTSQAEEVQQRRLEPGRVIRERDQLRSHASEAMNRADVLGGQLAEAMEWPAEPFARAGFLEETLAAMAQARC

SEQ ID NO: 75397 - protein, 273 aa, Zea mays
  Coding DNA Sequence Number=SeqID_33618
MERLEPRAEWESRLVGKVCNLCRVLETGGDAGNMEDFEEFQDYDDFYIEQEQQDSSPSPQQEVDSGRQPSPAPQPVMSPAPPQGIPYAGGNPDGDDDDAGGSSSHSMELSEEQEPEGWVARPITCDAAHVCHFHDALDTLLRRAFDRHTWFIKYRCVVYQHRCGLYPVQWEATCLVRRPDNDLQGAEAFSKHYSITERDTAKAAMQDAARRVIVSLVGEGNPRLNSMVNQATVFNTELDHALDELGKHPYRSPPRGRFKYGTPDCRTQIDLDP

SEQ ID NO: 75398 - protein, 52 aa, Zea mays
  Coding DNA Sequence Number=SeqID_33619
MALHQERAMAMLPRRVDKRTHRSPETLQSPPCCQHLLLSTEYSGDNLGWGGL

SEQ ID NO: 75399 - protein, 253 aa, Zea mays
  Coding DNA Sequence Number=SeqID_33620
  Homolog annotation: Hit_ID=Q0PMD7; Match level="QueryCoverage=36%, HitCoverage=22%, E-value=8e-36, Identity=77%"; Hit description=J -domain protein
  Subcellular localization annotation: CTP_CleavageSite=42; ConfidenceScore=5.67e-01
MALAASHHGLLPFAPAATPTPSRGHLRFRAARPLPRPARRICCQSINSANVLGASSTTSDEAIPVPVVQIDQDSDRDATIVQLSFGDHSGILLDTFLSYLPIIFPDIHCFPDSFKAINDEGMSMYQRPFMKGKLYIHFSVEFPDSLSLEQCKALEAVLPPKPVSQYTDMELDECEDTMPYDVNIKEEMRRRQQQHQEAYDEEMMCQAVGRGCSAPSSRQLAANLLFRFGRLLSLPACIGLMILLLQECSITKD

SEQ ID NO: 75400 - protein, 109 aa, Zea mays
  Coding DNA Sequence Number=SeqID_33621
  Gene Ontology: Mol. function=amino acid binding; Biological process =metabolic process
  Homolog annotation: Hit_ID=Q2QXL3; Match level="QueryCoverage=91%, HitCoverage=38%, E-value=3e-18, Identity=52%"; Hit description=ACT domain-containing protein, putative, expressed
  Subcellular localization annotation: CTP_CleavageSite=42; ConfidenceScore=5.67e-01
MALAASHHGLLPFAPAATPTPSRGHLRFRAARPLPRPARRICCQSINSANVLGASSTTSDEAIPVPVVQIDQDSDRDATIVQLSFGDHSGILLDTILSRQSLLTIKGAV

SEQ ID NO: 75401 - protein, 346 aa, Zea mays
  Coding DNA Sequence Number=SeqID_33622
  Homolog annotation: Hit_ID=Q0PMD7; Match level="QueryCoverage=26%, HitCoverage=22%, E-value=1e-35, Identity=77%"; Hit description=J -domain protein
MTPPLAIVAASTLPSAPGAGAGTSGLGGEADEADDEDPPTSTSPPQTPDLSPSVPGRRQRHSSELRAETVTVGRMTRRTPLRPAPHQIARTHPWALAASHHGLLPFAPAATPTPSRGHLRFRAARPLPRPARRICCQSINSANVLGASSTTSDEAIPVPVVQIDQDSDRDATIVQLSFGDHSGILLDTFLSYLPIIFPDIHCFPDSFKAINDEGMSMYQRPFMKGKLYIHFSVEFPDSLSLEQCKALEAVLPPKPVSQYTDMELDECEDTMPYDVNIKEEMRRRQQQHQEAYDEEMMCQAVGRGCSAPSSRQLAANLLFRFGRLLSLPACIGLMILLLQECSITKD

SEQ ID NO: 75402 - protein, 999 aa, Zea mays
  Coding DNA Sequence Number=SeqID_33623
  Gene Ontology: Mol. function=protein binding; Cellular component =integral to membrane; Biological process=defense response to fungus
  Homolog annotation: Hit_ID=Q6K7T8; Match level="QueryCoverage=88%, HitCoverage=88%, E-value=1e-162, Identity=39%"; Hit description =Putative HcrVf2 protein
  Pfam annotation: Domain name=LRR_1; Domain location=129-154; Score =11.9; E_value=1.7; Accession=PF00560.23; Description=Leucine Rich Repeat
  Pfam annotation: Domain name=LRR_1; Domain location=156-178; Score =5.5; E_value=27; Accession=PF00560.23; Description=Leucine Rich Repeat
  Pfam annotation: Domain name=LRR_1; Domain location=233-256; Score =7.4; E_value=12; Accession=PF00560.23; Description=Leucine Rich Repeat
  Pfam annotation: Domain name=LRR_1; Domain location=258-283; Score =6.5; E_value=18; Accession=PF00560.23; Description=Leucine Rich Repeat
  Pfam annotation: Domain name=LRR_1; Domain location=286-308; Score =7.6; E_value=11; Accession=PF00560.23; Description=Leucine Rich Repeat
  Pfam annotation: Domain name=LRR_1; Domain location=310-332; Score =16.3; E_value=0.11; Accession=PF00560.23; Description=Leucine Rich Repeat
  Pfam annotation: Domain name=LRR_1; Domain location=334-356; Score =4.9; E_value=35; Accession=PF00560.23; Description=Leucine Rich Repeat
  Pfam annotation: Domain name=LRR_1; Domain location=363-385; Score =9.5; E_value=4.7; Accession=PF00560.23; Description=Leucine Rich Repeat
  Pfam annotation: Domain name=LRR_1; Domain location=387-409; Score =16.2; E_value=0.12; Accession=PF00560.23; Description=Leucine Rich Repeat
  Pfam annotation: Domain name=LRR_1; Domain location=411-434; Score =11.9; E_value=1.7; Accession=PF00560.23; Description=Leucine Rich Repeat
  Pfam annotation: Domain name=LRR_1; Domain location=436-462; Score =12.5; E_value=1.3; Accession=PF00560.23; Description=Leucine Rich Repeat
  Pfam annotation: Domain name=LRR_1; Domain location=484-507; Score =11.1; E_value=2.4; Accession=PF00560.23; Description=Leucine Rich Repeat
  Pfam annotation: Domain name=LRR_1; Domain location=509-531; Score =15.2; E_value=0.24; Accession=PF00560.23; Description=Leucine Rich Repeat
  Pfam annotation: Domain name=LRR_1; Domain location=532-551; Score =1.0; E_value=1.9e+02; Accession=PF00560.23; Description=Leucine Rich Repeat
  Pfam annotation: Domain name=LRR_1; Domain location=553-575; Score =6.0; E_value=22; Accession=PF00560.23; Description=Leucine Rich Repeat
  Pfam annotation: Domain name=LRR_1; Domain location=576-598; Score =3.5; E_value=63; Accession=PF00560.23; Description=Leucine Rich Repeat
  Pfam annotation: Domain name=LRR_1; Domain location=600-621; Score =11.4; E_value=2.1; Accession=PF00560.23; Description=Leucine Rich Repeat
  Pfam annotation: Domain name=LRR_1; Domain location=645-667; Score =12.4; E_value=1.4; Accession=PF00560.23; Description=Leucine Rich Repeat
  Pfam annotation: Domain name=LRR_1; Domain location=669-692; Score =14.7; E_value=0.35; Accession=PF00560.23; Description=Leucine Rich Repeat
  Pfam annotation: Domain name=LRR_1; Domain location=694-716; Score =9.0; E_value=5.9; Accession=PF00560.23; Description=Leucine Rich Repeat
  Pfam annotation: Domain name=LRR_1; Domain location=718-740; Score =17.9; E_value=0.038; Accession=PF00560.23; Description=Leucine Rich Repeat
  Pfam annotation: Domain name=LRR_1; Domain location=793-815; Score =11.8; E_value=1.7; Accession=PF00560.23; Description=Leucine Rich Repeat
  Pfam annotation: Domain name=LRR_1; Domain location=817-839; Score =14.2; E_value=0.47; Accession=PF00560.23; Description=Leucine Rich Repeat
  Pfam annotation: Domain name=LRR_1; Domain location=841-863; Score =23.8; E_value=0.00061; Accession=PF00560.23; Description=Leucine Rich Repeat
  Pfam annotation: Domain name=LRR_1; Domain location=865-886; Score =11.1; E_value=2.3; Accession=PF00560.23; Description=Leucine Rich Repeat
  Pfam annotation: Domain name=LRR_2; Domain location=233-254; Score =2.8; E_value=6.7; Accession=PF07723.3; Description=Leucine Rich Repeat
  Pfam annotation: Domain name=LRR_2; Domain location=334-357; Score =4.3; E_value=4.2; Accession=PF07723.3; Description=Leucine Rich Repeat
  Pfam annotation: Domain name=LRR_2; Domain location=645-668; Score =9.9; E_value=0.7; Accession=PF07723.3; Description=Leucine Rich Repeat
  Pfam module annotation: Pfam domain module=LRR_1::LRR_1::LRR_1::LRR _1::LRR_1::LRR_1::LRR_1::LRR_1::LRR_1::LRR_1::LRR_1::LRR_1::LRR _1::LRR_1::LRR_1::LRR_1::LRR_1::LRR_1::LRR_1::LRR_1::LRR_1::LRR
  Pfam module annotation: Pfam domain module=LRR_2::LRR_2::LRR_2; Domain location=129-154::156-178::233-256::258-283::286-308::310 -332::334-356::363-385::387-409::411-434::436-462::484-507::509 -531::532-551::553-575::...
  Pfam module annotation: Domain location=576-598::600-621::645 -667::669-692::694-716::718-740::793-815::817-839::841-863::865 -886::233-254::334-357::645-668
  Subcellular localization annotation: CTP_CleavageSite=66; ConfidenceScore=5.15e-01
MTPVALSPLRQQGDVSRILAALPVVLLQDSGAPPTATLSRVQGSSSPPIATLACTQGLGISLPDTLAQSYTPHCTSGPSPYVYKREEPRRRRARPPHDYWQHDSFFSDHDSGNHWLRGQISPSITALRRLRRLDLSGNLLGGPGVTIPGFLGSLSSLVYLNLSAMDFDGMVPPQLGNLSRLVRLDLNNPLLGNQYSPDLSWLSRLSLLEHLNLNIVNLSTVADPTQAINALANLRVLHLDECSISIYSLLSRLTNLTAVEELDLSNNFLFSGPFSSRWWFWDLGSRLRSLQLDACGLFGSFPRELGYMTSLEVLDLGNNDLNGMLPETFRNMCSLNTLTLAYTNIGLDIARLLDRLPSCPERKLRELDLSQANLTGTMLNWLPNQTSLTLLDVSGNHLTGPVPVEIGELAALSSLDVSGNNLNGVMSEEHFSKLTSLTSLDLSDNNLQIRVDPDWVPPFQLNVAEFSSCQLGSRFPAWLRWQNQVNVLDISYSNLTGTIPEWFWAVFANASSLDLSYNKITGELPRDLEFMSVGILQLRSNQLTGSVPRLPRSIVTFDISRNSLNGPLSLNFEAPLLQLVVLYSNRITGLIPNQICQWKQLRVLDLSDNLLAGELPDCGTKVAKQGNSSSTSMPHSSPASPPSLNIRTLLLSSNSLSGEFPLLLQSCTNLLVLDLSHNKFTRNLPAWIGERLQNLEILALRSNTFSSHIPGEITRLPALQFLDLANNNLSGTLPQSLANLKAFTTIAYTGGTGNPFDEEYDGEYGFVTMGPSDDSLTVETKGQELNYTESMIFLMSIDLSNNNLAGPIPEEIGTLVGLINLNLSRNLISGKIPEQIGNLQSLESLDLSNNHLSGEIPWDLSNLTSLSYMNLSYNNLSGRIPSGHQLDTLSSDDPTSMYIGNPDLCGHPLPKQCPGDHQTPDVEHPIRDHEDGSGSDRMMDLGLGLLVGFVVGLWVVFCGLLFKKKWRCTYFMLLDKLYDKVFVFSVLIWRKWFSEAGEH

SEQ ID NO: 75403 - protein, 87 aa, Zea mays
  Coding DNA Sequence Number=SeqID_33624
  Subcellular localization annotation: CTP_CleavageSite=37; ConfidenceScore=5.09e-01
MTPVALSPLRQQGDVSRILAALPAVLLQDSGAPPTATLSRVQGSSSPPTATLACTQGLDISLPDTLAHSYTPHYAGWKMHPTAWLGE

SEQ ID NO: 75404 - protein, 175 aa, Zea mays
  Coding DNA Sequence Number=SeqID_33625
MHQGSLCMVFVYPWPFTSVVKIGSVQPRLERDHDLWFYSYSCAYDVFCRWPVSGALHYCSLFTEVADGLDLKYYPRRSTDSAGGVIVSPVGEGNPRLNRMVNLAAVLNIELDHTFDELGKVRAEVAELCAECATRHYLDGGSPTPVGIQHPYRSPPRGRFNYGTPDCRTRIDLDP

SEQ ID NO: 75405 - protein, 176 aa, Zea mays
  Coding DNA Sequence Number=SeqID_33626
MHQGSLCKGYVVYPWPFTSVVKIGSVQPRLERDHDLWFYSYSCAYDVFCRWPVSGALHYCSLFTEVADGLDLKYYPRRSTDSAGGVIVSPVGEGNPRLNRMVNLAAVLNIELDHTFDELGKVRAEVAELCAECATRHYLDGGSPTPVGIQHPYRSPPRGRFNYGTPDCRTRIDLDP

SEQ ID NO: 75406 - protein, 223 aa, Zea mays
  Coding DNA Sequence Number=SeqID_33627
  Homolog annotation: Hit_ID=Q6QP51; Match level="QueryCoverage=67%, HitCoverage=98%, E-value=2e-15, Identity=45%"; Hit description =Putative growth-regulating factor 1
MQEACNRTVVVHPFGFVTSGGPAWRPEPVQRFEAAPRVTQQCQLSATITGIGKGDISKKDPSQRRKWAPSPPTDQGFEGCALRASATAPEHSSSEPFTDQGFEGWPLGRVRQPPQSTRAPSPLLIRDSNAAPRKGSTAAPEHAESGMTLGTSVTWPRLGLRSRASGTTEGLCLVRPWASASASASGGVTTSPDLSLCLRRSLRLARPRPRTDYATGDTSLPYH

SEQ ID NO: 75407 - protein, 364 aa, Zea mays
  Coding DNA Sequence Number=SeqID_33628
MLVHRMRRSRKGAQPRCGCMLPTWRSTLSTAGFGEDGGMLINAGRLHASCAAILLFPFLVSPHDVWDPAPALEGVRPRGSWRSSDIARLQGFSSCSPAAVSHQWSSVGMITSFVVGRSKPGCGLCPALSFKDVHHPGWGGGRTELGPASAWAGDPLLPPVFGGEGHPPALRGRRPLAMRGKAKCCCLDRVQLSVFHPGDGRRLHRGVAQHVVRREGGTRVPGRSRSRSCGESGSEDLPVRFGATVARWCGVGGQVAAVVGAEVVVTIGEAASTEAVASADETVSVACAPDLRLFGFNGWFSSPVRGRERGPFNSSVCPVAIAAAILPPETEVIAALLVQWSSASHLEFVVSQALWCGGCSFLRE

SEQ ID NO: 75408 - protein, 345 aa, Zea mays
  Coding DNA Sequence Number=SeqID_33629
  Homolog annotation: Hit_ID=Q8SA97; Match level="QueryCoverage=31%, HitCoverage=17%, E-value=2e-15, Identity=53%"; Hit description =Ornithine carbamoyltransferase
  Subcellular localization annotation: CTP_CleavageSite=39; ConfidenceScore=5.40e-01
MSVAGGSSGHVVSQAYVPSWGSGASGRGSERRFAFAIMTASKKGPGKGDTPKRTLLHEGNRLRASLLIRGSKAGPSEGFNSRLRAHGLHTHYWSEVRRSAPRKGSTAASGHSGSAPTTDQGFEGWALEGGNDLVMESHQREASSPRTPSTGDRVRQITRRGSGAALANPAPAKPLTASTYQPENLGPDRAPGLRPARMRGTTRLAEALRKALRPRRSQTTPPRPRGLHPVGALAHTHRNKTQPRKAGPLAKKCDESLQASINTPFEARGLLSGTIIRGTLKAPNSQLVTPISIKLQRPDGARTRAQSRKTENSAPPDPGLGLGLSPGRRRTPLRPTQGSDSGSVP

SEQ ID NO: 75409 - protein, 165 aa, Zea mays
  Coding DNA Sequence Number=SeqID_33630
  Gene Ontology: Mol. function=protein phosphatase type 2C activity
  Homolog annotation: Hit_ID=Q2HW33; Match level="QueryCoverage=38%, HitCoverage=18%, E-value=1e-09, Identity=51%"; Hit description =Protein phosphatase 2C-like
MGAGSWAQRSRTVEDKEGEFSKPMQRYRGTPRVAQQNHQVRRPRSCGKKRPTPTTWAAPGSPRDQRRQYTPRYQQWVRTPTGKCQTPGYTDRTYGRGSRPPQVYYLAEEPEVHFVWQPSQESSILDMSRAFDDNYIMDCGVISASEVTQRRTDNNDQFVILPTVG

SEQ ID NO: 75410 - protein, 92 aa, Zea mays
  Coding DNA Sequence Number=SeqID_33631
MLLAFDDYYIMDCGVISAPEVTQRRTDSNDQFVILTTIGVAFCAVSAYGGTCLMTDDVRGNFFWQAWGVLSNDETMEIVAYIEVGMILMVAM

SEQ ID NO: 75411 - protein, 126 aa, Zea mays
  Coding DNA Sequence Number=SeqID_33632
  Homolog annotation: Hit_ID=Q6K669; Match level="QueryCoverage=35%, HitCoverage=7%, E-value=3e-12, Identity=71%"; Hit description =Leucine aminopeptidase 2, chloroplast precursor
MALSVAPHRIILLLSEEESGGVIHPESDSFGIKRMPPRLQRVRLHEYLPQDRGKALSGKVVEVEAGVSTIGWGGEVICVRGVTFSVKDIEFSEWKGDILVVAITKKDLSKDADSKFENVVLKKLDG

SEQ ID NO: 75412 - protein, 212 aa, Zea mays
  Coding DNA Sequence Number=SeqID_33633
MEETPASALTTFPERAFPLSCGRYLLTATLALALTPLSQMTSPTPTDGGDTRFSFDYLSREGFPSTLWEPRWRSIDSETIGFRADDTIEAATLKTLTTFCGYHPLEMMMHPLGLFPAEKRNDPMWCNRVSHVKDVWAMHLDQVGRITIQCMSALYRLQALQSEAMTHLTGLAQTAKTTLDDRDDFVVDLSLELVEKDLQVEQMSNPIQELEQ

SEQ ID NO: 75413 - protein, 259 aa, Zea mays
  Coding DNA Sequence Number=SeqID_33634
MEIGSFWAEWESRLVGKVCDLFRVLETDISAMLTMARIRCTARKSVILFLPSRLVEHPLRRPVPATGGDPDGDGDDDNADGSSSHSTELSEEQEPEGWIARPITHDAARGCHFHDALDTLLRQAFDRHTSSIEYHCVVYQHRRGLYPDQWEATCLVRRPDNDLRGAEAFSEHYSITERDTVEAAMQDAARRALSQYCLLFSGVADGLDLKYYPRRSTGSAGGVIVSPVGEGNPRMNSMVNLVVVLNTELDHALDELGKV

SEQ ID NO: 75414 - protein, 51 aa, Zea mays
  Coding DNA Sequence Number=SeqID_33635
MEIGSFWAEWEIRLVGKVCDLCRVLETVLSEKSLKAGPEVLSDLHYEKVGF

SEQ ID NO: 75415 - protein, 51 aa, Zea mays
  Coding DNA Sequence Number=SeqID_33636
MTDAEKEPYGWRKCRFREWLYGPLSHWPEPEETRKCSWESYDDKGERLDVA

SEQ ID NO: 75416 - protein, 51 aa, Zea mays
  Coding DNA Sequence Number=SeqID_33637
MTDAEKEPYGWRKCRFREWLYGPLSHWPEPEETRKCSWESYDDKGERLEAA

SEQ ID NO: 75417 - protein, 325 aa, Zea mays
  Coding DNA Sequence Number=SeqID_33638
MYRKTLWQKRGRLRELYPDVSSKDASVPPELPVPNCDCGRLAWLSGRTSHERFKRWVPPPPNPPPMTDAEKEPYGWRKCRFKEWLYGPLSHWPEPEETRKCSWASYNDKGEVMRTIESKRLMGQKMHCGSQLVDSYINDRIRDMRREAKSAFYDSPKRAEYRRLKEADEKRAQDAREWEAAQAEKQMLDNLADRLKGKIGCGVNYLVDEAHARYVQDKMSTVELMEEEEDDTSRLSELIALAEVGLHEEEEDDTSRLSELIALAETGLRAQEEEDEFMSQAAEEVEAAYCKKKSDEAEAEHELFSQAADEAEANYYKRTVDKCDA

SEQ ID NO: 75418 - protein, 135 aa, Zea mays
  Coding DNA Sequence Number=SeqID_33639
MVLSSNSYHLMQQSSEKDFEIAREVANAPGLAFVYSSRKGPRVLVNSQLAVPDGVQARPRSGEQLRRPIEAKTGANLRLSPNSSSYERFPQLNYTIGGLGSSGHGGRKHNGNMIVFPAMGAGLVQLKGSGSITEA

SEQ ID NO: 75419 - protein, 205 aa, Zea mays
  Coding DNA Sequence Number=SeqID_33640
MVLSSNSYHLMQQSSEKDFEIAREVANAPGLAFVYSSRKGPRVLVNSQLAVPDGVQARPRSGEQLRRPIEAKTGANLRLSPNSSSYERFPQLNYTIGGLGSSGHGGRKHNGNMIVFPAMGAGLVQLKGVGEHHRGMRMLKRGRKGRALTGVGLATVYLHRIMLKTQLEVELRAPHSTLMVALFSRAVIHRTGPYGEALEKPLEPP

SEQ ID NO: 75420 - protein, 50 aa, Zea mays
  Coding DNA Sequence Number=SeqID_33641
MDVELKREVIKKAYEMDLAQLYNQKKLKITEIVCKKKHKQKLKHYTLKMN

SEQ ID NO: 75421 - protein, 122 aa, Zea mays
  Coding DNA Sequence Number=SeqID_33642
MDVELKRVVIKKAYEMDLAQFYLNCCHFFYFAVCWSSFSCLVVLLLLVILALSVSEVEALYKLFKKINNAFIDDGLINKVINGCLLLQANHARRSRRPTTLQARSAAAMQGFPGGAPDPQQL

SEQ ID NO: 75422 - protein, 66 aa, Zea mays
  Coding DNA Sequence Number=SeqID_33643
  Pfam annotation: Domain name=FYVE; Domain location=21-64; Score= -15.7; E_value=0.049; Accession=PF01363.12; Description=FYVE zinc finger
SVGEVEALYKLFKKINNAFIDDGLINKYHCQRCGGLFCTSITQQRTILRGQGDSPIRICDPCKKLE

SEQ ID NO: 75423 - protein, 152 aa, Zea mays
  Coding DNA Sequence Number=SeqID_33644
MGGSRAATWPEKVIHSKVVVVNPDPHGKVLEPRIYSPDLQDWSRTPTCTDRTPPYGVRTAHSRVLRFQDKTHPGLRSGADTCPDLVWWDPDQSAYTPAPCLGGDPLLPCVIKTPGDYSGVTSISYSHNVFLPLCSWARMSGLSILVCASLKL

SEQ ID NO: 75424 - protein, 52 aa, Zea mays
  Coding DNA Sequence Number=SeqID_33645
MSAFCFSITVVIMQPAGMPQRDMSMGMSSSREAHTRMLSPDMWAQEHNGRNT

SEQ ID NO: 75425 - protein, 183 aa, Zea mays
  Coding DNA Sequence Number=SeqID_33646
MPLQMGLRFRSRGYEQPPYQEAHGTTNCKRLTGNRSSSSDNDLRPGRQDSCSNGFRANAAAEKPSPTKDENQPFKLGRRRSRRRGLSLHQRAQRSSPYDTGAGSHTTCKLAQDRRSKPPRAERVTAQRLQAFLCLRLNQRVKGRTTMQAACNRAMGMHPFDFNASSMESQAHTSCNRRAGYYV

SEQ ID NO: 75426 - protein, 289 aa, Zea mays
  Coding DNA Sequence Number=SeqID_33647
  Homolog annotation: Hit_ID=Q6QP51; Match level="QueryCoverage=65%, HitCoverage=84%, E-value=1e-13, Identity=35%"; Hit description =Putative growth-regulating factor 1
MEARAHMSCNRRAGYYVQRKTAPPLAPMPRLLDSRTSAATRGSPARDPTVPIKCDDHGASDTSGRRSGRRFTSVMMTASKKGSGKGIFRKRILLSEGSGPRALLLIRGLKVAPCGARQPPQSTRAPSPLLIRGSKAGPSEGFDSRPRARRVRDDPRYVRYMAEARATLPRYPRTFPRPAGTICNGIPPEGGTEPSDPIKWVRVQQITCRVTLSHDLPRVQPRAQQGAPPCPTSGLGLSLGLGEKVSASPDLGPRPQPRSREKSHPRSTSGLGLSLGLGRSHILARPQPR

SEQ ID NO: 75427 - protein, 82 aa, Zea mays
  Coding DNA Sequence Number=SeqID_33648
  Subcellular localization annotation: CTP_CleavageSite=3; ConfidenceScore=5.06e-01
MSSVSRNWARPSPLLLVLLSCRSNIPLDRPTRWQGGLTALAYNAPLTPGCRGAVTALVPTIASMEDPVSGRMRDKVRARLHS

SEQ ID NO: 75428 - protein, 68 aa, Zea mays
  Coding DNA Sequence Number=SeqID_33649
MSSVSRNWARPSPLLLVLLSCRSNIPLDRPTPVGRGGRAKSHHQPFPEMYKESSSLISCEKQTIRIEF

SEQ ID NO: 75429 - protein, 132 aa, Zea mays
  Coding DNA Sequence Number=SeqID_33650
MSSVSRKWARPSPLVLVLLSCRSNIPLDRPTRWQGGRPSHTINHFLNGTCKNYATSKAEYTNTQLDLTGYKGSSSLISREKQTIRIEFKPCKLNKVNFTYVRPLGGILGKLGQTLSKGRRGALNYNYYLTVL

SEQ ID NO: 75430 - protein, 165 aa, Zea mays
  Coding DNA Sequence Number=SeqID_33651
MQWLFGATSYGNIVDGILLYNFAAELADKLTVDRRLSAVCRVAQLSHRVAVTRYCCQIGAEREEEIEVTEDRTPPPSESQAENSFYFDICGSEPDSPVNEGKPRRADRGPFNWSHASSWHTLESLFLSRVRKRQIFVAFAPRWYQMKKNKTEVREDLVLHIGSLA

SEQ ID NO: 75431 - protein, 339 aa, Zea mays
  Coding DNA Sequence Number=SeqID_33652
  Homolog annotation: Hit_ID=Q6QP51; Match level="QueryCoverage=29%, HitCoverage=41%, E-value=4e-22, Identity=65%"; Hit description =Putative growth-regulating factor 1
MQAACNCTIGAHPFDFDASSMKAQAHTSCGWKQQSNRLQAHVPSWDSERALSHDVKMTRSCSIPRTARATAAPRTTRPVALTPRQGRRHLWQAKRATLHLRHDDRVKKGVPRRSILYPFPLPLSLSCYRDRERGYSERDPSLRRKWAPSPPTDQGFEGWPLGRVRQPPQSTRALRPLLIRGSKAGPSEGFDSRLRALGLRAHYWSEVRRLAPRKGSTAASGHSGSAPTTDQGFEGWPPEGFDSRLKTRRARDDSRPPARLSSPSTTGLRRDSRHRRVIHVADDPIRPPADKLTVDRRLSAVCRVAQLFHRVAVTRYCCQIGAAVAPFGRYRCSPEHGRA

SEQ ID NO: 75432 - protein, 188 aa, Zea mays
  Coding DNA Sequence Number=SeqID_33653
  Gene Ontology: Mol. function=kinase activity; Cellular component =nucleus; Biological process=regulation of progression through cell cycle
  Homolog annotation: Hit_ID=Q9SSZ6; Match level="QueryCoverage=72%, HitCoverage=30%, E-value=8e-43, Identity=57%"; Hit description=Cyclin
  Pfam annotation: Domain name=Cyclin_C; Domain location=44-151; Score =88.8; E_value=1.7e-23; Accession=PF02984.9; Description=Cyclin, C -terminal domain
KYEEICPPLVEELCYITDYSYTKEEVLQMEASVLNNLKFEMTVPTAKCFLRRFVRVAQVPDKGSSLHLEFLVNYICELSLLEYSLLCYLPSMNSSLSYYTRYTPSELRGCVRVLHRLFRLGPGSNLPAIREKYSQHKSSSRSWELDLRSRLDFSVQFEASNEVRLAVYFSFVQFQASNEIILVILFGA

SEQ ID NO: 75433 - protein, 62 aa, Zea mays
  Coding DNA Sequence Number=SeqID_33654
  Subcellular localization annotation: CTP_CleavageSite=45; ConfidenceScore=5.19e-01
MPPLCKPSQQALVSPAPPLPPSQQHEPLLCKPSQQALFEASNEVRLAVYFSFVQFQASNELD

SEQ ID NO: 75434 - protein, 112 aa, Zea mays
  Coding DNA Sequence Number=SeqID_33655
  Homolog annotation: Hit_ID=Q94KS6; Match level="QueryCoverage=38%, HitCoverage=15%, E-value=1e-14, Identity=88%"; Hit description=Beta -expansin 8 precursor
MNYYPVSKCHFDLSDTVFGRLAKPGLNDKLRPSGIIDIEFTRIHRRHWGNWGVVRFAVVPLMGLGVCGSLCQEMFGLQVVMRMVGFDYDYGNGKEGDEVDFHEFQDIDEFKD

SEQ ID NO: 75435 - protein, 101 aa, Zea mays
  Coding DNA Sequence Number=SeqID_33656
  Gene Ontology: Cellular component=extracellular region; Biological process=sexual reproduction
  Homolog annotation: Hit_ID=Q94KS6; Match level="QueryCoverage=57%, HitCoverage=20%, E-value=2e-19, Identity=79%"; Hit description=Beta -expansin 8 precursor
  Pfam annotation: Domain name=DPBB_1; Domain location=2-59; Score=5.6; E_value=0.0045; Accession=PF03330.8; Description=Rare lipoprotein A (RlpA)-like double
MASPTVSAPTTTKTVIITDMNYYPVSKCHFDLSDTVFGRLAKPGLNDKLRPSGIIDIEFTRIHCPHWGFESSLVAWRHVIWCWGPSSSEGPQKHDLTISSK

SEQ ID NO: 75436 - protein, 77 aa, Zea mays
  Coding DNA Sequence Number=SeqID_33657
  Gene Ontology: Cellular component=extracellular region; Biological process=sexual reproduction
  Homolog annotation: Hit_ID=Q94KS6; Match level="QueryCoverage=55%, HitCoverage=15%, E-value=4e-14, Identity=86%"; Hit description=Beta -expansin 8 precursor
MNYYPVSKCHFDLSDTVFGRLAKPGLNNKLRPSGIIDIEFTRIHRRHWGFESSLVARRHVIWRPPDLCCRCGAPSRQ

SEQ ID NO: 75437 - protein, 109 aa, Zea mays
  Coding DNA Sequence Number=SeqID_33658
  Subcellular localization annotation: CTP_CleavageSite=57; ConfidenceScore=5.09e-01
MSKNTRDTRFIPRFGHTTKVPYFLIEAPTKSRVSFNPNPPFADHKDKNRLSVRLSVRLNQYFKKGEQCKNRLNLFFQKAILAKIDLKRLYYILSLRINKGKLEVLDQGF

SEQ ID NO: 75438 - protein, 75 aa, Zea mays
  Coding DNA Sequence Number=SeqID_33659
  Subcellular localization annotation: CTP_CleavageSite=26; ConfidenceScore=5.09e-01
MSKITRDTRFIPRFGHTTKVPYFLVEAPTKSRVSFNPNPPFADHKDKNRLSVRLSVRLNQYFQKGEQCKNRLNLF

SEQ ID NO: 75439 - protein, 75 aa, Zea mays
  Coding DNA Sequence Number=SeqID_33660
  Subcellular localization annotation: CTP_CleavageSite=26; ConfidenceScore=5.10e-01
MNKNTRDTRFIPRFGHTTKVPYFLVEAPTKSRVSFNPNPPFADHKDKNRLSVRLSVRLNQYFQKGEQCKNRLNLF

SEQ ID NO: 75440 - protein, 65 aa, Zea mays
  Coding DNA Sequence Number=SeqID_33661
  Subcellular localization annotation: CTP_CleavageSite=26; ConfidenceScore=5.03e-01
MNKNTRDTRFIPRFGHTTKVPYFLVEAPTKSRVSFNPNPPFADHKDKNRLSVRLSVRLNQYFEKG

SEQ ID NO: 75441 - protein, 65 aa, Zea mays
  Coding DNA Sequence Number=SeqID_33662
  Subcellular localization annotation: CTP_CleavageSite=26; ConfidenceScore=5.14e-01
MSKNTRDTKFIPRFGHTTKVPYFLVEAPTKSRVSFNPNPPFADHKDKNRLSVRLSVRLNQYFEKR

SEQ ID NO: 75442 - protein, 94 aa, Zea mays
  Coding DNA Sequence Number=SeqID_33663
  Subcellular localization annotation: CTP_CleavageSite=52; ConfidenceScore=5.04e-01
MVRERRTQTNTMSKNTRDTRFIPRFGHTTKVPYFLVEAPTKSRVSFNPNPPFADHKDKNRLSVRLSVRLNQYFPESNFGQDRLKKVVLHTFTKD

SEQ ID NO: 75443 - protein, 86 aa, Zea mays
  Coding DNA Sequence Number=SeqID_33664
MVRERRTRISTMNKNTRDTRFIPRFGHTTKVPYFLVEAPTKSRVSFNPNPPFADHKDKNRLSVRLSVRLNQYFQKGEQCKNRLNLF

SEQ ID NO: 75444 - protein, 483 aa, Zea mays
  Coding DNA Sequence Number=SeqID_33665
MALESGSNVRRLKERSWIGAAEIAWQVASAARKVASVVRDMVGKLPQHRHHHGSSSLGAEELNLLHMARGGSPPDGGGGGGESRGALGQWKCRLLGSLRPCRARCVVCLQVQHVTGLPPAAEGHGLVVGWRSKGGEGEHTAPARVARGAAAFDEVFLQHFTAGSATLRGFTVWAALLDAPADNGDLGAFPVDLAEVAAAAAETSNSNASKFGGKALSFPLGGAAAGAVLSVSVYCRVMDQHEDSHGAANNNAAGQAREKKKNKGKAGSYASCLPDLSCLRNRQVAAASGGSARRAPSIRSDRGGFITIENSMSEIIGGGGAAFGVAEDVDEGAEGAGFITMEEGRVSSRRPLTPDTVASEEEDEKPCLLMELSSEEAAVDVEKVEDEFLAMLEDRYLARSKEIEKGLGVSLDIGLDLGLDLDSLIKDAEMELAKAEQAWKSKVGAAIVEEEEYRELVRRWSARETASHHSAGCSWGFGFGSPI

SEQ ID NO: 75445 - protein, 68 aa, Zea mays
  Coding DNA Sequence Number=SeqID_33666
MGRPGGVWPIQLGWMPRGSWAELEVGLALANYKLGITPLLNFDQKFADEDMMANLMDASLVIPPVIFL

SEQ ID NO: 75446 - protein, 169 aa, Zea mays
  Coding DNA Sequence Number=SeqID_33667
  Subcellular localization annotation: CTP_CleavageSite=70; ConfidenceScore=5.17e-01
MEETHLHVFDASCPRQSTLTRAPACPAPRPSQASAVARARAYKALPGFDCTLPRTLKPHRSLARRRLPVRSVSAAAQSLCHRRPANRAIPNPVQPSEKTVHISVKLPERGIGVCFAGEASPHSPELSTPPEYVDRRTWTSIHRKMTGGITRLASMEFSIISSSATSDQN

SEQ ID NO: 75447 - protein, 109 aa, Zea mays
  Coding DNA Sequence Number=SeqID_33668
MEQVTRGSMGDRGERGDGVAGGNGGGCAAKGAWVAVVRCKGGMGGGSSAHGGGHACGGTAYSRLQGGLGITNFRPGNFSSGKAGAQLQSETSPGWVKRELMLMTSSGGD

SEQ ID NO: 75448 - protein, 76 aa, Zea mays
  Coding DNA Sequence Number=SeqID_33669
  Subcellular localization annotation: CTP_CleavageSite=68; ConfidenceScore=5.54e-01
MTLMFVVSGSKNLCLSVWALTKAKKNFTTQCMQRTGHTNFRPGSFSSGKAGAQLQSETSPGWVKRELMLMTSSGGD

SEQ ID NO: 75449 - protein, 209 aa, Zea mays
  Coding DNA Sequence Number=SeqID_33670
MTDTGLILGEPSSYLLFTIFFSLTLSFSLLFPLEDSIKEYYHHTDEETEDYEPCTTVFNPRITKHRDLRSKGLENGVACYLAGGFYLVCFCFGWKLRELVGEFICEWGLLGCGVAVMEQVTRGNKPDKGRGLVLSAVGALQRESGAVMVRMEAGTRAGGTGEWWGSMTLMFVVSGSKNLCLSVCFFHASRGSSQSEEKLHYPMHAEDWA

SEQ ID NO: 75450 - protein, 89 aa, Zea mays
  Coding DNA Sequence Number=SeqID_33671
MTSGQTLLRQGPRSRPHSRGEDKQKALELEPSRTESSPTRSKILPLQHGGWVPRVMQAGPGQKEPNRRARSARLPSGYKHSSTFAQTSG

SEQ ID NO: 75451 - protein, 97 aa, Zea mays
  Coding DNA Sequence Number=SeqID_33672
MDESGMPPGTSNCITFESQRIGDASQLHDLWAWASTLDASKSKGCISVVQLHAACMAVRPFTRWFRRRWRSACDCGAVWLLLSWASSHDAWDLAPVS

SEQ ID NO: 75452 - protein, 132 aa, Zea mays
  Coding DNA Sequence Number=SeqID_33673
MGEWWSDSRGEGYVTRVGPDCLTTREIKKEHAGPNDFVVRKREKLTHDNSIKGLTSMLSVEHVLNAKLTEFNTSEQRQPIKPRMEARRASRYRVHGRRSRRPGTQKPGVKKKTCKVKVNRVKKSYGVSRITT

SEQ ID NO: 75453 - protein, 222 aa, Zea mays
  Coding DNA Sequence Number=SeqID_33674
  Gene Ontology: Mol. function=transferase activity, transferring glycosyl groups; Cellular component=membrane
  Homolog annotation: Hit_ID=Q1S232; Match level="QueryCoverage=61%, HitCoverage=24%, E-value=3e-11, Identity=34%"; Hit description =Exostosin-like
MTKVMPSEGVEKAQEMESLDHHTCSLVLNSVSFTLSTCSILSTLVSPLIELSSKHQNLQESFHVFLPYYAALDALPYVIDLALLDESTRHGVALAEFLSPDKAHILSRRHGHDHFLVVAGSAWDYAQSLGVEPRLWGSTSLLRLPGLANFTSLTLESCTWPWQEHAIPHPTSFHPSFLGHLRVWLARARRSRCATLMLFAGGASHPCRPLLGQTVLGYRWTV

SEQ ID NO: 75454 - protein, 126 aa, Zea mays
  Coding DNA Sequence Number=SeqID_33675
MAELQKKNEDGTTTLFYLQKIYPVTSADFKSQQCHISKNGVLFLLKNGYRCGTYAKIMTRATVYVQSFVITFSFGMGAIPWLMMSEFCFTSGDTEIGGQKGAAQDYSEDVINGDLCEQYPSLPADM

SEQ ID NO: 75455 - protein, 343 aa, Zea mays
  Coding DNA Sequence Number=SeqID_33676
  Homolog annotation: Hit_ID=Q8H046; Match level="QueryCoverage=32%, HitCoverage=9%, E-value=3e-17, Identity=74%"; Hit description =Putative callose synthase
MDADARWLVGNGAGCPLQRSHRTADALHRLIPRLCRPFDFADNMPLALNINPVLPFGLSQCHLFCILCDTVLCMPIYLADEASSLPRWKEFMVVSETAFRSGPFKVIFNSKKLLNVIAKLVVVLGILRGTTESSDLKKGLVNAIQDLYDVVHHEAFSVDMSVFTPYYSEIVLYNMAELQKKNEDGITTLFYLQKIYPVTSADFKSQRCHISKNGGPCYWSYNMAISTSGMTLCLLAISVVFFLKSFVITFSFGMGAIPWLMMSEFCFTSGDTEIGGQKGAAQDYSEDVIDGDLCEQYPSLLADMQRKIANELDRTPTPAALLGEDCQGGRLEQARAALISDRA

SEQ ID NO: 75456 - protein, 78 aa, Zea mays
  Coding DNA Sequence Number=SeqID_33677
MARWRRMSQGIQDLIAACAAGVVGTRDARSGGGRGMERQNIAACGRRAEIGGRPVAAIIGPNLTNEHGAGSRDRLREM

SEQ ID NO: 75457 - protein, 132 aa, Zea mays
  Coding DNA Sequence Number=SeqID_33678
  Subcellular localization annotation: CTP_CleavageSite=11; ConfidenceScore=5.28e-01
ITVSFTVVVLNAAFRSSIQSTSSWNRAARRDPRDGRAHHARHLGERHARTSGAAMARWRRMSQGIQDLIAACAAGVVGTRDARSGGGRGMERQNIAACGRRAEIGGRPVAAIIGPNLTNEHGAGSRDRLREM

SEQ ID NO: 75458 - protein, 71 aa, Zea mays
  Coding DNA Sequence Number=SeqID_33679
MVRAAIAGVTTAARFQELVDWMEERKAAFRDDDKWTEMVQVNKSDYDNVKVVLYLKVNRKEIWDLCGLKKH

SEQ ID NO: 75459 - protein, 72 aa, Zea mays
  Coding DNA Sequence Number=SeqID_33680
MAGGKELAGAKEGWLAGDEIWSPEIRSISLIIPEEPGNPVYLPDHTRGKSRVLSCLGLTSQCHLLACDKGVS

SEQ ID NO: 75460 - protein, 68 aa, Zea mays
  Coding DNA Sequence Number=SeqID_33681
MAEALVAMAGGKELAGAKEGWLAGDGERGRYGARKSGLSPCSNPRQIQGFVVSRARVPMPSSGMRQRG

SEQ ID NO: 75461 - protein, 355 aa, Zea mays
  Coding DNA Sequence Number=SeqID_33682
MTSHGSSDGGNAQSHTDGLAREGFPRILWEVLQGAGYTTPPQYAVQLFEKHRVPRCRVRMTLEPHPLQPGWRSLDSESFGYRAEDTIEAIALHGLTTFCGFHPLELSTHPIGLFPAKKEDDPMWKDRVEHAKDIWALYPGQTAHLTVRCMDALYRLQVRRGEAMSHLMALLEATKITLDNREELVVDLSTKMVEKDLQVEQMSNEIQKLEELVGTRENTIEMSSGTSAAAHSISPFPLTTSSSSSACTLRVAVVGGGPAGASAAEALASSRARMRVFLLLLARAMGSKASFCVTFLLLLLIAAAAWGPAAQADDAALQMSVQDANMSSDTDMSKEEKKEDKSDKTEDEKNCFKLE

SEQ ID NO: 75462 - protein, 82 aa, Zea mays
  Coding DNA Sequence Number=SeqID_33683
  Gene Ontology: Cellular component=protein complex
  Homolog annotation: Hit_ID=O82143; Match level="QueryCoverage=92%, HitCoverage=18%, E-value=4e-21, Identity=72%"; Hit description=OsS5a
MSMEGGALGSTAVTDSAMAKAGAVDPDLALALQMSVQDANMSSDTDMSKVFEDITFVSSILNSLPGVDPNDPSVKGLCIVMQ

SEQ ID NO: 75463 - protein, 146 aa, Zea mays
  Coding DNA Sequence Number=SeqID_33684
  Homolog annotation: Hit_ID=O82143; Match level="QueryCoverage=32%, HitCoverage=11%, E-value=3e-14, Identity=83%"; Hit description=OsS5a
MASLTNVAYVDGLFRCQSPPSNPGDEDNLGASTFGRYPETLERMARALREINNSPLAKQTRLYHPTSHLHILCLYAALQMSVQDANMSSDTDMSKVFEDRTFVSSILNSLPGVDPNDPSVKGFFIYLLKQQEKKEDKSDKTEDKKN

SEQ ID NO: 75464 - protein, 38 aa, Zea mays
  Coding DNA Sequence Number=SeqID_33685
MEVKDMRHWKMRTIQLKSPRNSQEKPLSSSRLVKASVP

SEQ ID NO: 75465 - protein, 276 aa, Zea mays
  Coding DNA Sequence Number=SeqID_33686
RTIQLKSPRNSQEKPLSSSQLVKASGYEIDDFGYDYGAASPLQPNRILAEYVDAKMKLWKETSRSSKITTSSRCGLAATPSRLPVKAAMARLRHTARKSVIPFLPSRLAERPLRRPVVGQSSHLERLHHRLREEQERRRQEQQGSSFSLQQEIESVRSCSPVLPLEAPPAPPLGAPASGVAAGGDPDDGGGDDSSSHDTDFSANPEPEGWVARPITRDAARGCHFHDALDTLLRRAFNRHTWSVEYRCVVYQHSRGVYPDRWETTCLVRCPENSLQ

SEQ ID NO: 75466 - protein, 364 aa, Zea mays
  Coding DNA Sequence Number=SeqID_33687
  Homolog annotation: Hit_ID=Q9AYP0; Match level="QueryCoverage=9%, HitCoverage=62%, E-value=5e-07, Identity=69%"; Hit description =Mitochondrial ATP synthase 6 KD subunit
MGQVGDDHIEGNTVLKLDEMMIIQPTGGTPDSALPITDSDVKDGYAFIEVVQVQETVVSMDNIKIPKKVTAELQECAGAPLINGSRQRQVGNHQAISHHTSDSTALPVNQVTSTNVQNSSEVPVRRRPACWHSPSSTVARRPPLHRPLAQRQTNSLPHLHDSGAASPPTHHAFSEFGFHQDKWAAPQQQTPTTVPLPVCHRSLDRVGTGSRLQFATSYNSTSPIQSPYNLVISRSERIKGLNGWSASLVLLDELGVLEVLLDEVGRHLGDDEAGDGEPRDEGPVMSNVFILSSRSAQRKGGGSTRCCSARPRRGGIVVAAGRSSWGWDDARSAVPAQAPAPCRNSLLACWQSCELWDSDALCFL

SEQ ID NO: 75467 - protein, 249 aa, Zea mays
  Coding DNA Sequence Number=SeqID_33688
  Homolog annotation: Hit_ID=Q9AYP0; Match level="QueryCoverage=14%, HitCoverage=62%, E-value=3e-07, Identity=66%"; Hit description =Mitochondrial ATP synthase 6 KD subunit
MAPEAGLGGCQPHPDGWHSSRSSAGDAVFLSGQPVERQSDCGHFGPVDRGACVRIRCQTILALNAPAIRFPICVVFVMIFETLQHDLSLISPHSVAICILFLKIFTGCLPKMVIRICDNQHSSSYIEVIRWCCKRNLSLVCSHSVAICILFLKNFTGCLPNCLRASVRSVASRRSPRHLGTSPRMTSHADDSTTRPTAGAEGREDEDVQHHRPFITGFAITGFIVIKITTNFTEEDLKNSKFIQEHKRR

SEQ ID NO: 75468 - protein, 428 aa, Zea mays
  Coding DNA Sequence Number=SeqID_33689
MEHRPGLERLLETTHLELDGKPFVNTQQAPTWRANCRRFDPGGSLDRRPHPDGWHSSRSSAGGTVFLSAIRPSLLLREACPSWASGESKVRPLLEETLGRGVNLTWSTVPARGWAQARRDRDPRVDGALTGITPIRPLQLCADGGYQLRLGVLGPTPPPNPNHSGAAPRGLASIRSSGRLPRRLCGGSNLPSCCASCINARLVEYHTRLRMMRSLRDSLHGRIAARLEAKRKTDEQRIWRTSKEQDIMELRNRLTELKRKTAVDKTEVEQASSDLKAKTVPLNLALVTLKKRRADAVAMHTNAMKVAQMNLPTPPPNPNHSGAAPHRADLPRSAPAAARRGDCVVVALALSRAGPRGSLRAAGPVHGGEARASRRAQAEGQNCSGDDTEARGRGFASEAVNGSGGALRAAAAYMEAGAPPLIWMILDL

SEQ ID NO: 75469 - protein, 172 aa, Zea mays
  Coding DNA Sequence Number=SeqID_33690
MRSLRDSLHGRIAARLEAKRKTDEQRIWRTSKEQDIMELRNRLTELKRKTAVDKTEVEQASSDLKAKTVPLNLALVTLKKRRADAVAMHTNAMKVAQMNLMATTSDCMKMQSKSVKQLCRLFPMRRVPVGLCAQRDPSTAVRRGLQGGRRRRGRIARAMTRRLAAAASHPRP

SEQ ID NO: 75470 - protein, 143 aa, Zea mays
  Coding DNA Sequence Number=SeqID_33691
MTYSSVPKMRPNSDVELLDIIDSEIKYARGLRTAMTTIGVIWIMLAKSYDYHVALGQTYWKKPRGDYGTTSAEGGLDDGAAITGLYLFRSNLFGMQYSRKRYFVLEDVALRCFKFATFSKREYLMAKPRNNLRTPLDTLLAAL

SEQ ID NO: 75471 - protein, 190 aa, Zea mays
  Coding DNA Sequence Number=SeqID_33692
GRAAQRPYVRLRLLAHVTGSRPRGSIGCPPERGAEAYTVWSGHVSAPDPRLALVKAWVFFIPKSRDPAVSGPDPTQRGPEPILGVRFAPVEVPDLSRRSGLHIQGPGKKPRGDYGTTSAEGGQDDGAAITGLYLFRSNLFGMQYSRKRYFVLEDVALRCFKFASFSKHEYLMAKPRNNLRTPLDTLLVAL

SEQ ID NO: 75472 - protein, 313 aa, Zea mays
  Coding DNA Sequence Number=SeqID_33693
  Gene Ontology: Mol. function=translation initiation factor activity; Cellular component=cellular_component; Biological process=translation
  Homolog annotation: Hit_ID=Q10CA6; Match level="QueryCoverage=67%, HitCoverage=26%, E-value=1e-62, Identity=67%"; Hit description=Piwi domain containing protein, expressed
  Pfam annotation: Domain name=Piwi; Domain location=75-298; Score =68.6; E_value=2e-17; Accession=PF02171.8; Description=Piwi domain
MGTLWPLLYLLDSLSSQYRAAVVASCLPNLPIAAPPWNATSGTVPGAGGRPGSRVHGAPLGGLVLVSKDPDNIRDIATGMVVNPRPFIEVQSAAPNHIENALRDVHKRATQMLAQQAVGNQLQLLIVILPEVSGRNTVVASMDWPEITKYRGLVSAQPHQEIIEDLFTVSKDPQMGNNVNGGMIRDGVSEGQFNHVLLHEMDAIRKKRHHTRLFPEVHGRRDMTDKSGNILLGTVVDQKICHPTEFDFYLCSHAGIQGTSRPTHYHVLYDENELTADALQSLTNNLCYTKPCSAPKWKEMTGSGIFAARGETE

SEQ ID NO: 75473 - protein, 151 aa, Zea mays
  Coding DNA Sequence Number=SeqID_33694
  Gene Ontology: Mol. function=translation initiation factor activity; Cellular component=cytoplasm; Biological process=multicellular organismal development
  Homolog annotation: Hit_ID=Q10CA6; Match level="QueryCoverage=76%, HitCoverage=11%, E-value=6e-42, Identity=64%"; Hit description=Piwi domain containing protein, expressed
  Pfam annotation: Domain name=Piwi; Domain location=1-136; Score= -76.6; E_value=0.00016; Accession=PF02171.8; Description=Piwi domain
MQGTTDCFPQRKTNRKLERIIFYRACVPRFLFLVHLLYAVERKKKRHHTRLFPEVHGRRDMTDKSGNILLGTVVDQKICHPTEFDFYLCSHAGIQGTSRPTHYHVLYDENELTADALQSLTNNLCYTKPCSAPKWKEMTGSGIFAARGETE

SEQ ID NO: 75474 - protein, 111 aa, Zea mays
  Coding DNA Sequence Number=SeqID_33695
  Homolog annotation: Hit_ID=Q42539; Match level="QueryCoverage=38%, HitCoverage=19%, E-value=7e-09, Identity=68%"; Hit description =Protein-L-isoaspartate O-methyltransferase
MHKCCRYCRFKESSEMGGVLNTYGLIEPDFEERRAKRIGMMDAISALIQQQMAIDSMSIGYNTTISVPQMHAVCPELLEKNLQPGMRALNVGSWIGVAAGLVPSGLARCCY

SEQ ID NO: 75475 - protein, 1131 aa, Zea mays
  Coding DNA Sequence Number=SeqID_33696
  Homolog annotation: Hit_ID=Q6YVV6; Match level="QueryCoverage=13%, HitCoverage=24%, E-value=1e-63, Identity=82%"; Hit description =Putative serine/threonine-specific protein kinase
  Pfam annotation: Domain name=DUF248; Domain location=222-615; Score= -99.8; E_value=9.2e-20; Accession=PF03141.7; Description=Putative methyltransferase
  Pfam annotation: Domain name=PCMT; Domain location=668-827; Score= -84.9; E_value=0.0016; Accession=PF01135.9; Description=Protein-L -isoaspartate(D-aspartate) O-methyltransferase (PCMT)
  Pfam annotation: Domain name=Pkinase_Tyr; Domain location=1007-1131; Score=-127.8; E_value=0.00013; Accession=PF07714.7; Description =Protein tyrosine kinase
  Pfam module annotation: Pfam domain module=DUF248::PCMT::Pkinase_Tyr; Domain location=222-615::668-827::1007-1131
MQDILDALTRMEARLTDALVGRCGEPYAREHTSPFDGCAPPSSIVNTQYRDEAILPPLVHDDAAKVASLDSGNDFGLQQTATVLASLGSDEMSSSTTLLAGSISDRYIPPFYDDDCYTMPQPFVDTLANPDDDLLQELDVLDEDAASANAADDDSGAVLVYAPLDSNIDSSGSPRYPCLPEGAVLFHRDPDEKVLIGGTELSGEVRRLRFSLPSPDQAMNPALVPNTDAEEEEVLTITPTKCLMRVLNRRTYSVPNLPEEKVQNLIRVGGDKLRFPDDRTMFPNSANAYTDDIGRLVLSHGSIHIALDIECGMTSWAAYLLSWDILAMSFALRDSHEARMQFTLVRGVPVMIGVLASKCFAYPTRALHMAHCFCCYSPLQLYDGLYLIEDDRVLHPRGYWILSGPPINWKKYWKGWERTKEDAANNCAHGYYTAGKGTVLVANNFGDDLFAGSNEIKQPWPPPLELACLDWNIMVFFVFRVSTTLFIDIDSAGFGTGLELWSSRASDKNKFMLEQLHRNKMSNRATHGCYACRRPIHLRGQDTICSGCNDGFIQESSEMGGVLNTYGLLEPDFEERRAKRIGMMDAISALIQQQMAEIGRDSLFDIHGRQGTCTEHRRRSTAIHTLIIGCIPSPAVGSSESSDVNIIMRGGSRVRAVHPNFSSLVVGSSLEALFEHLLLQNNRQATPPAPQSAIDSMSIGYNTTISVPQMHAVCLKLLEKNLQPGMRALDVGSGIGLAAGLVPSGLSAVSSGQGNFSVFVWDPGDSGLVTSSLSAVSSDQGNFSVFVWDPGDRGLVTYGLRVVSIARVTAIMSGTYARAAATTSSPKMRQTQFRWRAEERRDAFNNDANPQMKLILHRQRLGGKPRFKEWGMLGVAAMWGHCQGASVANNFAQVFIEKPNVVPCEVCYETYACGFNSISRGEEVQFAGRGCCSRADYSNSLEPRSLPLFLEAAAAAAWTNSTGEAAIVKPRRIDRTDPTYSVEAEDTEMVDSMMIDVATLRAATGDFDESNKLGEGGFGAVYKGVLPDGDEIAVKRLWQCSTQGLDELKNELALVAKLKHKNLVRLVGICLEQQERLLVYEFLPNRSLDLILFDAEKREQLSWEQRYRIINGHRPRPAVPPRGLPASSSPP

SEQ ID NO: 75476 - protein, 946 aa, Zea mays
  Coding DNA Sequence Number=SeqID_33697
  Homolog annotation: Hit_ID=Q6EP94; Match level="QueryCoverage=27%, HitCoverage=39%, E-value=6e-62, Identity=52%"; Hit description =Dehydration-responsive family protein-like
  Pfam annotation: Domain name=DUF248; Domain location=222-615; Score= -92.5; E_value=3.4e-20; Accession=PF03141.7; Description=Putative methyltransferase
  Pfam annotation: Domain name=PCMT; Domain location=668-827; Score= -84.9; E_value=0.0016; Accession=PF01135.9; Description=Protein-L -isoaspartate(D-aspartate) O-methyltransferase (PCMT)
  Pfam module annotation: Pfam domain module=DUF248::PCMT; Domain location=222-615::668-827
MQDILDALARMEARLTDALVGRCGEPYAREHTSPFDGSAPPSSIVNTQYRDEAILPPLVHDDAAKVASLDSGNDFGLQQTATVLASLGSDEMSSSTTLLAGSISDRYIPPFYDDDCYTMPQPFVDTLANPDDDLLQELDVLDEDAASANAADDDSGAVLVYAPLDSNIDSSGSPRYPCLPEGAVLFHRDPDEKVLIGGTELSGEVRRLRFSLPSPDQAMNPALVPNTDAEEEEVLTITPTKCLMRVLNRRTYSVPNLPEEKVQNLIRVGGDKLRFPDDRTMFPNSANAYTDDIGRLVLSHGSIHIALDIECGVTSWAAYLLSWDILAMSFALRDSHEARMQFTLVRGVPVMIGVLASKCFAYPTRALHMAHCFCCYSPLQLYDGLYLIEDDRVLHPRGYWILSGPPINWKKYWKGWERTKEDAANNCAHGYYTAGKGTVLVANNFGDDLFAGSNEIKQPWPPPLELACLDWNIMVFFVFRVSTTLFIDIDSAGFGTGLELWSSRASDKNKFMLEQLHRNKMSNRATHGCYACRRPIHLRGQDTICSGCNDGFIQESSEMGGVLNTYGLLEPDFEERRAKRIGMMDAISALIQQQMAEIGRDSLFDIHGRQGTCTEHRRRSTAIHTLIIGCIPSPAVGSSESSDVNIIMRGGSGVRAVHPNFSSLVVGSSLEALFEHLLLQNNRQATPPAPQSAIDSMSIGYNTTISVPQMHAVCLKLLEKNLQPGMRALDVGSGIGLAAGLVPSGLSAVSSGQGNFSVFVWDPGDSGLVTSSLSAVSSDQGNFSVFVWDPGDRGLVTYGLRVVSIARVTAIMSGTYARAAATTSSPKMRQTQFRWRAEERRDAFNNDANPQMKLILHRQRLGGKPRFKEWGMLGVAAMWGHCQGASVANRALWVEQRKEPRKVAGGRWSRGRRVELRKQVRARGEEARVFSGKDFYSERRMRERVA

SEQ ID NO: 75477 - protein, 159 aa, Zea mays
  Coding DNA Sequence Number=SeqID_33698
  Homolog annotation: Hit_ID=Q6QP51; Match level="QueryCoverage=54%, HitCoverage=39%, E-value=2e-23, Identity=69%"; Hit description =Putative growth-regulating factor 1
MALRKGSTAAPEHSGFRLITDQGFEGWPFGRVQQPPQSIRASGSLLIKGLKAGPSEGFDSRPRARRARDDSGYVRYMAEARATLPRKATKGRMIKVETVLDRPLAPCRGSGAALANPATAKPLTASINQPENLEPDHAPGLKSDRMREQPDRPRHHERH

SEQ ID NO: 75478 - protein, 97 aa, Zea mays
  Coding DNA Sequence Number=SeqID_33699
MAGGNELAGAKERWLAGEALPGWLAQQSERGERRCFPVRSFGRSRVARAAPEPLHGARGRSRTVSTFIIRPFVAFPQGQMGESAMLPSEGTEHGCFQ

SEQ ID NO: 75479 - protein, 110 aa, Zea mays
  Coding DNA Sequence Number=SeqID_33700
MAVMGSTSEKMYLCQVPNFGFEMIKLRPGGGLARERSLGVVSPSESIKDRLDVGLMTEDPLTGHMPRHGKNFYKTESLIIEKPYLDSLITSIPLRVFSLVGVVPKEERQE

SEQ ID NO: 75480 - protein, 151 aa, Zea mays
  Coding DNA Sequence Number=SeqID_33701
MAFILIYIPIWLYLENEEEVEVEEEKTAPPPPVEHQAGNCFYFDICGSKPDSPINERSCFTKDDVAKVGGMFSKIKLDGGSIMTVMGSTSEKMYLCQVPNFGFEMIKLRPSELLARERSLGVVSPSESIKDRLDVGLMTEDPLTGHMPRHG

SEQ ID NO: 75481 - protein, 75 aa, Zea mays
  Coding DNA Sequence Number=SeqID_33702
MAPSSPPWWMRDATQRSCNEPACSFKDERENNGFIPTRLQVRCGSKAMYAYLVLAILMELAALGLVLFSYLLQEL

SEQ ID NO: 75482 - protein, 394 aa, Zea mays
  Coding DNA Sequence Number=SeqID_33703
  Homolog annotation: Hit_ID=Q9FH46; Match level="QueryCoverage=25%, HitCoverage=16%, E-value=2e-23, Identity=60%"; Hit description =Signal recognition particle 68kD protein-like
MAPSSPPMVDARRNTEVLQRASVFVQGREGEQRIHPRQASGQILMALSEEMSFSHDDRMIAIHGHWWNQRHRCNGSVIWHSTPSPKWRRLRPSAPRASSSRRLLVVAPARVAPTEILFCTTQKAVQVSQVFAWRRKQLNGRHFSQLYSVIGDSRTSLEAYAYASYMKGALFSEQDKNIDATIINFKNTRAIYEESGKSGSIENELLCYQCIEEVDPMIDLCSHKLGGSYLQAHELLDTANDLLNEDECIYFLTAPLTYLDFLLRAHNLIGCCLQLYMNQKEVVDTLSLQAKKCRSTKKLTMNQVMWRQTLRDIEKGGARGCAWAVPKFYIISISLGCHAVWGALKYIPDSKIKKCVKKTKDEKKATKAKVTNSLKTQTNGTIQKGSKAPSRVMA

SEQ ID NO: 75483 - protein, 608 aa, Zea mays
  Coding DNA Sequence Number=SeqID_33704
  Gene Ontology: Mol. function=cysteine-type peptidase activity; Biological process=proteolysis
  Homolog annotation: Hit_ID=Q109R5; Match level="QueryCoverage=81%, HitCoverage=53%, E-value=7e-57, Identity=28%"; Hit description=Ulp1 protease family, C-terminal catalytic domain containing protein
MDIVVEKGNVDVGNTAEPSYEVVARSGCSAQLSTNDTDEHELDVIHLTSLDVPNESSQISSDADMVKQNQQDALDTLIRISQHKKPKKLNVARVVSEDYKCTPEDVQLIEYIKTLPGKQVVVNIDSAWLNRNDMECLFHGDMQLSDKALNAYIHCIRGEEHLLHREGGKVFLENTVISSLLKRDGDPKVLLNCVPSNEYRRFSLVPGNSECKKSELKGLERQIKLAAKHKELYQGKWSNLDVASWPVIEKITTQMQTDGVSCGLWMINYMEYWTGSSLSDNVTQDDITMFRFKLPAILWDSRLNTKKGHQNLDHNVDEDGESSSDVQIIDTPLTSTNTQELMFVLCTYIMGIDNDKYLKKHWIQSTKPYPISLSLQKLKDILDVNKPMDTDCFNMAVRMIACNDSLFLLEDKYHYMDLQFCSITKFGRDPRLHAKPDINMLAKLLECWPDMEYDVSDCKQILLPFSFLGHFTLYVLNMDTRSIYIMESMPIPSWFKGDHPSMHYIHNIHYIANNMNAAMELANPTWKDDIYMWRRIVPTWVPRTLNWDLSGFLVINFMHDWNGIRLPCICTNGNDLRTKFLVELLKYKDNESKDNIPEEIQEIIRHIR

SEQ ID NO: 75484 - protein, 158 aa, Zea mays
  Coding DNA Sequence Number=SeqID_33705
  Gene Ontology: Mol. function=cysteine-type peptidase activity; Biological process=proteolysis
  Homolog annotation: Hit_ID=Q6JAG6; Match level="QueryCoverage=77%, HitCoverage=28%, E-value=2e-07, Identity=28%"; Hit description =Putative small nuclear ribonucleoprotein
MEYDVSDCKQILLPFSFMGHFTLYVLNMDTRSIYIMDSMPIPSWFKGDHPSMHYIHNIHYIANNMNAAMELANPTWKDDIYMWRRIVPTWVPRTLNWDLSGFLVINFMHDWNGIRLPCICTNGNDLRTKFLVELLKYKDNESKDNIPEEIQEIIRHIR

SEQ ID NO: 75485 - protein, 158 aa, Zea mays
  Coding DNA Sequence Number=SeqID_33706
  Gene Ontology: Mol. function=cysteine-type peptidase activity; Cellular component=ribonucleoprotein complex; Biological process =proteolysis
  Homolog annotation: Hit_ID=Q6JAG6; Match level="QueryCoverage=80%, HitCoverage=29%, E-value=3e-10, Identity=31%"; Hit description =Putative small nuclear ribonucleoprotein
MEYDVSDCKQILLPFSFLGHFTLYVLNMDTRSIYIMDSMPIPSWFKGDHPSMHYIHNIHYIANNMNAAMELVNPTWKDDIYMWRRIVPTWVPRTLNWDLSGFLVINFMHDWNGIRLPCICTNGNDLRTKFLVELLKYKDNESKDNIPEEIQEIIRHIR

SEQ ID NO: 75486 - protein, 646 aa, Zea mays
  Coding DNA Sequence Number=SeqID_33707
  Subcellular localization annotation: CTP_CleavageSite=36; ConfidenceScore=5.00e-01
MKRRVSLPVLSFRPATAAKGDERRVASLPSPQQSLTASGVAEASKAARALPLAGKRVADFGTDITVDDYLGGSDEGQLAMVAPGAEIATAAIVPKARGEALDAGGEVSALAVVRGEAGAATRRLKGVTEALSQATEALSQVADFASRTTSGALTAAVSAEVERLWTQHADTVREKSASDSKCRKLTDRVAALEREKADLRRQLATERREANEAVAKGLAAQAEAKLARAEGNLAKELAKHLQERLTALESRAKEAEAAVHAEAERTRTQLMDTYRELGARTDDFEVPDREPGLRCLHWVQEELLELPAVVGGLMSYASLVTCEGAMNALSREGCRHFEALDQVDEDFGRDIYEVEDPVVKESAGALYDRMWGLYGREVVRERAEAARAQAERGERVDDFGALNSALPGPEPTPAEAATGVALETTPEPVEDAPSVPTSAVAGEDLPPKVAEGAPDAPAAAAPSAEDSAAVVAETAAEETAEAPAAAGPSQVQDFGPAHATATTGFLAASTAEDGNEYGGSVSEFFDFTDSGSSVEWTEESSEEDLDYFAALDVAAAEASPHAADAPDVLGPSTGRRRRRAVAKRRVSAEEGARLRVSRGGRQELLSLPAATSTGEGELRSLFAGEELRIMLFNYREMGIIPKVEPM

SEQ ID NO: 75487 - protein, 141 aa, Zea mays
  Coding DNA Sequence Number=SeqID_33708
MGKNNKRKREPTPPSEDFGDSEYSEEEFSSESEGSPAPIPLRESSDDSDDSQGFAAEVWTYIRAVERSGLEGSDESEYSSDEEDSSEEDGGGDGEDDDDDDEGGGGGDGDGRGRGGSSGSKDGDGGSSRGGSGRGSNRASG

SEQ ID NO: 75488 - protein, 141 aa, Zea mays
  Coding DNA Sequence Number=SeqID_33709
MGKNNKRKREPTPPSEDFGDSEYSEEEFSSESEGSPAPIPLRESSDDSDDSQGFAAEVWTYIRAVKRSGLEGSDESEYSSDEEDSSEEDGGGDGEDDDDDDEGGGGGDGDGRGRGGSSGSKDGDGGSSRGGSGRGSNRASG

SEQ ID NO: 75489 - protein, 157 aa, Zea mays
  Coding DNA Sequence Number=SeqID_33710
  Subcellular localization annotation: CTP_CleavageSite=40; ConfidenceScore=5.30e-01
METPNSKTGKGQDQPRQAPDPQNNSSAAQIPSAIFAGWVMGSSASNRQKTSWAGGDSSSVLGDAIDPLSVVMERDKCALVWILNEREMVGLDSLIDGGRLCRGVNDRLGALALGGDHRCCSDSSPVDTAAGWKQPQLNLPRVKKMVEDRWMRDEELR

SEQ ID NO: 75490 - protein, 90 aa, Zea mays
  Coding DNA Sequence Number=SeqID_33711
MERDKCALVWILNEREMVGLDSLIDGGRLCRGVNDRLGALALGGDHRCCSDSSPVDTAAGWKQPQLSLPRVKKMVEDRWMRNEELRINLF

SEQ ID NO: 75491 - protein, 151 aa, Zea mays
  Coding DNA Sequence Number=SeqID_33712
  Homolog annotation: Hit_ID=Q6QP51; Match level="QueryCoverage=34%, HitCoverage=28%, E-value=3e-17, Identity=87%"; Hit description =Putative growth-regulating factor 1
MQVACNRTAVAHPFGFVASGMEAQAHTSCNRRAGYYMQETTPPLAPMPRLLDRGTGAATRGSPARDPTVPIECKDHGDRERGYFERDPSQRRKRAPSPPTDQGFEGWPLRRVRQPPQSTRAPSPLLIRGSKAGPSEGFDSRPRAPGLHAHY

SEQ ID NO: 75492 - protein, 455 aa, Zea mays
  Coding DNA Sequence Number=SeqID_33713
  Subcellular localization annotation: CTP_CleavageSite=64; ConfidenceScore=5.30e-01
MLDATKPQGCATVVRLHATCFARSGLASSVSASRIFIILAGEEGRQVGACPRVGRRPASSSSIRGMKTSSSSAEEASSSHAGEGKLLLPGQGAAFCPLSGRLWAAAPGVAQHVVRREGGTRVLGRSRSRSRGENGSEDLSVRFGAAAARRCGVGGQVVAVVSAEVVVTRGGFSADGTVSATCAPGLQLFGFNGWFSSPARGHERGPSSGSVRTRAIAVAVLPSETEVVAALLFENLRPLCDELEPEAVVSAWTEAESAQKEASSAKERVASQGEEVQQRRLEPGQVIREWDQPQSHAAEAVSRADVLGGQLGEAMERLAEVEILPPVSPSEARPNLAEGGNDAKGAAAPSVDDLFVGSRIAYPSESYFSRKVMSEDPAIEAVEKRERRSSKRPFSRKILMQRGFPPSSPRGRVGLCRGKADPSLTPKYQISHLEASGPNPSGVVASHGLLIPRRV

SEQ ID NO: 75493 - protein, 71 aa, Zea mays
  Coding DNA Sequence Number=SeqID_33714
MRKEMVAALTAAQQANRESITPVDPPLVIPTETFELIPADPLAPTPRSENNKAGYGSKTDCVFPTSSPFRS

SEQ ID NO: 75494 - protein, 222 aa, Zea mays
  Coding DNA Sequence Number=SeqID_33715
MELRPPAWDPSSPHKGAATARPLDWGPPPPAWEPLPPHVEVGEPRPPQALAGLLRKARKGRLVPCSYGNVTKPSPQVKAECFNRRYTKLPPFVSAQLHTEQHISSLLSRQLSQPVHSISNLAAATYDTKKALQLPTSSRSAPAAAMASTTAATDDAKPAPAAGGPQLKLLVGRRSQRACVERAQGARRGLAVLGQCARRQARGHAQQSGQEVHRVLAGLRVF

SEQ ID NO: 75495 - protein, 134 aa, Zea mays
  Coding DNA Sequence Number=SeqID_33716
MRFPCLTMDSAVQPLWTASKWRLRWSLPPTVAAPDPEGERRQRPCAATMDPRPVAATPLPRRAVAEVPRSAARPLCGQAAASPKPRGGGTSKADEQATPVDVRVATATHEARCSSERRHGRGEMRAAMIARDIL

SEQ ID NO: 75496 - protein, 145 aa, Zea mays
  Coding DNA Sequence Number=SeqID_33717
MDPMGVLLTLPSRSCVQVQVSVEAVSWGPQPTLLGMLVSSLDTSSLHPRGARYDLLDISRVALEARGRHLRDLLYDLPGGVFSSQASDHHWRRHRSHQSQRDGGAKDGTAAQLASRLHKAGEHPFLRMLEEEAGRSVAPTDILQR

SEQ ID NO: 75497 - protein, 122 aa, Zea mays
  Coding DNA Sequence Number=SeqID_33718
MALLDPPERLQPKVALNLVRNLLGWGMSAFAGKIRVGASLHGDLAAGEFVFFVSNLPSGLALSIPSFFVLLLEGLGLQPQHFMPCFILQAAIVAYLCKMSVGATLLPTSSSSIRRIGCSPAL

SEQ ID NO: 75498 - protein, 266 aa, Zea mays
  Coding DNA Sequence Number=SeqID_33719
MTYRLRDVGHQDDGPHEHESICFRAKARYGESAPPLEVLTVSPELYPDITDHYGKQTRSDHPRPSGTGAPDPPRSGPLRKNPHSTRQEPRPRRRPGTAPPPRNRAATRSPGTAPPPRNRARHAKPIFLVPVSSARPELASVLGSLSFPAPTSLLCPCTRAFPAPISNAGAQLLCSAGARLRAQFSLFPSSDLSSLPLHACPLLASALELRPPLAYFVPAHLATGDGNAPAPAAEASCSWSGGLLRSGVDVNSINLDSDTALHIAAC

SEQ ID NO: 75499 - protein, 128 aa, Zea mays
  Coding DNA Sequence Number=SeqID_33720
  Homolog annotation: Hit_ID=Q5JLW4; Match level="QueryCoverage=48%, HitCoverage=11%, E-value=4e-14, Identity=79%"; Hit description =Putative ankyrin-kinase
MEGSTKARSEGSIIATEEGTIEAAEEGTIEAAEEGTTEAAEEGMTEEGHELREMAMACGRLTVLPQRSRASMLAFQLSSTNSSKKAEQHPDDVAVALARGDVQGGVAVEVNAVDVDAAAQQALDSIRQ

SEQ ID NO: 75500 - protein, 1134 aa, Zea mays
  Coding DNA Sequence Number=SeqID_33721
  Homolog annotation: Hit_ID=Q10N52; Match level="QueryCoverage=99%, HitCoverage=100%, E-value=1e-145, Identity=34%"; Hit description =Expressed protein
MSLAKKEEVCSHRLVPRLDEPAVGVPIKKRPFFLSDRSVASAIPLSTKPPSPTNTMPVAATGSGCREEPFFNIANSDRKVITKGKGIPDTQIQDHVNTSLTALSMTNGNGVLFNASSEIPSIADSATRTSAPDDELQLQNFLALDLQLPSRQSGKNNNYSSLRKDEKLGQSRSEHYNNVPVANEINASGNSIVGRLPNLDLNIPPDPADSLEGLPKMHESGSGFYHHRTIQHQKAQVTPAAAISTINSGIGRNMCSTLNMSNSYGLSHKSGPADVTLDLQLKPPTRPELGINWKGLAPAPELSLSLFGKPMDEPEFPSTPNALFHSGTAGSSKKVSGEAAATLGSDKAPVEKIVTPVPCNVNPLNTTSATVSGIDQLPSNNLVKKEPEEISQQHIIDGAKKPNPLERQSVGQVIGCAESEKTDSAPQGARKIGFDLNSDIFANSSIHNESDVAAVDAPIPAKTLPDTCHDTSMPAVPEVDKFVKHEESTSATLSPVVETGNGHTTLLVEAKSQRSQGSAEMDCSDDDVNTVSRIPTTNKPHDESLGNVPISKDGINTNNNLSIELKKEHDSDMHQDCSSMTNKVTIDAIDGDKCIKTKVGVFSHAGQQGFRNEVSASENSKDKRSLNSEKNTPVNNTDHSMQDAKTAAGSSTTDLQKSSALPKSASPKMQPTKQPPKTLDSRLGKTRSPDIKSEMSQNGMQAGSCSENHAKLAALKTEHQNESEEVGRHSDLHPRDSVLGEDSELDGASSSQQHSEYSKKTASEKSERDKSKPDSCNISVQNEKDGQLGANLRELGYAYVNRNERWERFMESEREKSNGECHGGRHASDVMNKRMTNHRGGWRGAGSRGHLRNFRGPRMRNEFADESIGGNRHSFEDEPGHTRGPHRRRHSPPHGCLMRDTDIDEFYGREIPEYRLPARGQIEDLPDSMMDDRFFMPYSHRHRGQGDHGFIHRDRDRSHSPAAQRRVGHVHFHRGRSPEAMRRSPPPVMRTDRTYMPHRHHNGSHDERGAMQRNDRRCAMEGDASGFEPPLHPSHLAEFHTVEELVGRRKYRERRPYLHSTVSDEDEMLPYRTEDDMEFAEGGAGPREHNGGFRNRMGHDRARGEQEDGYRHRRGGHQGWRDSDTNDRPKRRRY

SEQ ID NO: 75501 - protein, 494 aa, Zea mays
  Coding DNA Sequence Number=SeqID_33722
  Homolog annotation: Hit_ID=Q10N52; Match level="QueryCoverage=89%, HitCoverage=42%, E-value=2e-56, Identity=35%"; Hit description =Expressed protein
  Subcellular localization annotation: CTP_CleavageSite=52; ConfidenceScore=5.57e-01
MQDAKTAAGSSTTDLQKSSALPKSASPKMQPTKQPPKTLDSRLGKTRSPDIKSEMSQNGMQAGSCSENHAKLAALKTEHQNESEEVGRHSDLHPRDSVLGEDSELDGASSSQQHSEYSKKTASEKSERDKSKPDSCNISVQNEKDGQLGANLRELGYAYVNRNERWERFMESEREKSNGECHGGRHASDVMNKRMTNHRGGWRGAGSRGHLRNFRGPRMRNEFADESIGGNRHSFEDEPGHTRGPHRRRHSPPHGCLMRDTDIDEFYGREIPEYRLPARGQIEDLPDSMMDDRFFMPYSHRHRGQGDHGFIHRDRDRSHSPAAQRRVGHVHFHRGRSPEAMRRSPPPVMRTDRTYMPHRHHNGSHDERGAMQRNDRRCAMEGDASGFEPPLHPSHLAEFHTVEELVGRRKYRERRPYLHSTVSDEDEMLPYRTEDDMEFAEGGAGPREHNGGFRNRMGHDRARGEQEDGYRHRRGGHQGWRDSDTNDRPKRRRY

SEQ ID NO: 75502 - protein, 223 aa, Zea mays
  Coding DNA Sequence Number=SeqID_33723
  Gene Ontology: Mol. function=cysteine-type peptidase activity; Biological process=proteolysis
  Homolog annotation: Hit_ID=Q53MK8; Match level="QueryCoverage=50%, HitCoverage=13%, E-value=5e-09, Identity=33%"; Hit description=Ulp1 protease family, C-terminal catalytic domain, putative
MKSVDRPPSNPKRLTIESSQEVFSIDISRRTRSSSSAHQDDIPQNQEQNEPQPAPIHRFRRKALACRLKRKPSAPSTLSDDDFMDAPSLKRQFRSASPSPSEQISAKKLKKLNIRCIPYDVIVSSWIMSDRQRDAVARLGFSSIFDLRTDALESRSLNRWLMDKLDPHDMTIRPGAGKELKITKDTVHLILGLPCAGGGREFTDWYGEVDAAAKLRRDLNVGK

SEQ ID NO: 75503 - protein, 463 aa, Zea mays
  Coding DNA Sequence Number=SeqID_33724
  Gene Ontology: Mol. function=cysteine-type peptidase activity; Biological process=proteolysis
  Homolog annotation: Hit_ID=Q53MK8; Match level="QueryCoverage=82%, HitCoverage=43%, E-value=3e-32, Identity=26%"; Hit description=Ulp1 protease family, C-terminal catalytic domain, putative
MKLNIRCIPYDVIVSSWIMSDRQRDAVARLGFSSIFDLRTDALESRSLIRWLMDKLDPHDMTIRPGAGKELKITKDTVHLILGLPCAGGGREFTDWYGEVDAAAKLRRDLNVGKEEFDVVKLQDKIVLGNDDELSIRCFFLILFNRLLFPSASWGITNNEVLMTSNMARMSDIDWCQLVYTDLCDAAARWHKRNKTNITATIYGCSLIVLIYYLDHLHHPASPVNKYGTPRIKFFDNETIRELARGDRRPPVKLFRSRSETCYVIAPERSVSAVFNIYVPRIKNLIGNKLQCLPSQQRPMFQSLFDARDKEVDKYCDSIQLSHQMIVSKQIELSETFGEMIDEVLRAATQRDSQPEDNPPTTSMPPTNAPVSSPTVPTPDKQQHDQESHVPIDHIKVSDDEGQKSVTHDTPVSGAPQFDKTPLTDGFIDCIREDDVLYNPDSVINTLILNVNVGTVLNIEEFE

SEQ ID NO: 75504 - protein, 210 aa, Zea mays
  Coding DNA Sequence Number=SeqID_33725
MATATAAPASVARRRIWGPARDGGSLRRDGGSGDTLAMADSCGATANLGTRCGIGSRGHARGGGPMRLYIRSSELPLVIGSPGQTVQSGRARPGPDVYKRKSVVLGIRFYAPSRFISDGCQAGGGGGFQAGGGGPRSRGRAAAASLCGGGDSQAGGRNSITSTRDGGGSSIHSEALVQASGGVPEAPRRRHFQGRRASDARRRASSDGDA

SEQ ID NO: 75505 - protein, 257 aa, Zea mays
  Coding DNA Sequence Number=SeqID_33726
  Homolog annotation: Hit_ID=Q9ZQY0; Match level="QueryCoverage=29%, HitCoverage=19%, E-value=1e-33, Identity=92%"; Hit description =Pyruvate dehydrogenase E1 alpha subunit
  Pfam annotation: Domain name=E1_dh; Domain location=111-256; Score= -128.4; E_value=0.012; Accession=PF00676.10; Description =Dehydrogenase E1 component
MPSSLAPREIRRLDRWHIAVIRRRATDAGAAVAVAIAETDGTTAVVTGPREVMFFNFYLPQPYLFSLFSHLSQNLSVSRLSRAPFSHARPAPPPPPPPPTASPRPHPAPEEPAPAAARPSRHRGRLSRPRPRPVPVEPAAAASPALGSTRPRGARPSRCHELTNTYACAQKYKKEETAMFALYGDGAANQGQLFEALNISALWKLLAILVCENNHYCMGTAEWRAAKSPAYYKRGDYVHGLKVLCVATFSYSIGLVH

SEQ ID NO: 75506 - protein, 639 aa, Zea mays
  Coding DNA Sequence Number=SeqID_33727
  Gene Ontology: Mol. function=unfolded protein binding; Cellular component=chaperonin-containing T-complex; Biological process =cellular protein metabolic process
  Homolog annotation: Hit_ID=P28769; Match level="QueryCoverage=85%, HitCoverage=100%, E-value=0.0, Identity=84%"; Hit description=T -complex protein 1 subunit alpha
  Pfam annotation: Domain name=Cpn60_TCP1; Domain location=31-538; Score=605.6; E_value=4.4e-179; Accession=PF00118.14; Description=TCP- 1cpn60 chaperonin family
MAITAPTPDILGERQSGQDVRTQNVMACGAVANIVKSSLGPVGLDKMLVDDIGDVTITNDGATILKMLEVEHPAAKVLVELAELQDREVGDGTTSVVIIAAELLKRGNDLVKNKIHPTSIISGYRLAMREACKYVEEKLAVKVDKLGKESLINSAKTSMSSKLINSDSDFFATLVVEAVQAVKTTNAKGDVKYPIKSINILKAHGKSAKDSYLLNGYALNTGRAAQGMPTRVTPARIACLDFNLQKTKMQLGVQVLVTDPRELEKIRQRESDITKERIEKILKAGANVVLTTKGIDDMSLKYFVEAGAIAVRRVRKEDLRHVAKATGATMVSTFADMEGEETFDSSFLGHADEVVEERIADDDVILVKGTKNTSAVSIILRGANDYMLDEIERSLHDALCIVKRTLESNMVVAGGGAVEAALSVYLENLATTLGSREQLAIAEFAESLLIIPKVLSVNAAKDATELVAKLRAYHHTAQTKADKQHYSSMGLDLSKGIIRNNLEYGVIEPSMSKVKIIQFATEAAITILRIDDMIKLTKEEEGNEDLEAKHSSTIEATLRIPSDLKIHLLAERKKRAPRYVMTLVQRRPQRPLKAMSWWPRSCSSSSMTHQLRLLLLDPLALQGTMWRNDGFQEGWWGRC

SEQ ID NO: 75507 - protein, 222 aa, Zea mays
  Coding DNA Sequence Number=SeqID_33728
ARPEARRLGSALRNQQDDSSEEDGNGCPLLSSSSFSNAANDDEPSDEQCSLSLSLGLDTKGARAMATSSPSGESSCILTAASPARRSSSDCCCSGHSGCFVGPGVSLELSLSISGSYLDHSDSPWWPRNPSSLDRSLTSPVSEQAVDEAEVSRPACVTVVWLRPHRSSVTATVLLPRVVELMACGAVANIVKSSLGPVGLDKEEGYVVLFIGSTLPHYLVPC

SEQ ID NO: 75508 - protein, 158 aa, Zea mays
  Coding DNA Sequence Number=SeqID_33729
MSTHLIGLFPAEKEDDPMWKDRVEHTKDVWALYPRHTAHLTIRCMSALYRLQALQGEAMSQLTGLMANHITRARGSGEARENTIKVLEDQLQNTQQQLEGANQHLDMHHQEIEDMEAEGANEDIDIEGGEEPEPASSLDTAGSRGPPSPESSVASFAR

SEQ ID NO: 75509 - protein, 233 aa, Zea mays
  Coding DNA Sequence Number=SeqID_33730
MAVGVSEVLYAKAGPGYATPPQYAVQLFEEHRVPRCRVRMTLEPHPLQPGWRSLDLESFGFRVDDTIEATAPHVLTTFYGFHPLEMSTHPIGLFPTEKEDDPMWKDLSHPVLEGKPNANHDRVDHAKDVWALYPRHTAHLTVRCMSAMYRLQALRGEAMSQLMGLVESTKITLDNREDLVVDLSTELVEKDLQVEQMANHIQELEDQVEARENTIEVLEDQLQNTQQQLEEAN

SEQ ID NO: 75510 - protein, 168 aa, Zea mays
  Coding DNA Sequence Number=SeqID_33731
  Gene Ontology: Mol. function=aspartic-type endopeptidase activity; Cellular component=lysosome; Biological process=sphingolipid metabolic process
  Homolog annotation: Hit_ID=Q42456; Match level="QueryCoverage=59%, HitCoverage=12%, E-value=4e-25, Identity=58%"; Hit description =Aspartic proteinase oryzasin-1 precursor
MGTGSGAAPGAPPRVVGGPGGDDDSDVIALKNYMNAQYFGEIGIGSPQQKFTVIFDTGSSNLWVPSSKCYFSVRPGSSPSLAEVFLFQDLDVFCAKTRVCFCADVMQIACYFHSRYKSGQSSTYKKNGLTLPFLSWDLMVVANAADSRVVLDTASDDGAVTPSSSSSP

SEQ ID NO: 75511 - protein, 202 aa, Zea mays
  Coding DNA Sequence Number=SeqID_33732
  Gene Ontology: Mol. function=aspartic-type endopeptidase activity; Cellular component=lysosome; Biological process=sphingolipid metabolic process
  Homolog annotation: Hit_ID=Q42456; Match level="QueryCoverage=84%, HitCoverage=33%, E-value=5e-65, Identity=73%"; Hit description =Aspartic proteinase oryzasin-1 precursor
  Pfam annotation: Domain name=Asp; Domain location=84-202; Score= -111.5; E_value=5.1e-07; Accession=PF00026.14; Description=Eukaryotic aspartyl protease
MGTRGVALLLLAAVLLLQALLLASSEGLVRVALKKLPVDQNGRVAARLSAEERQRLLLRGANALGSGGDDDSDVIALKNYMNAQYFGEIGVGSPQQKFTVIFDTGSSNLWVPSSKCYFSIACYFHSRYKSGQSSTYKKNGKPAAIRYGTGSIAGFFSEDSVTLGDLVVKDQCYYVCYGRYIGEGLEKGIGEGLERGRLPAPV

SEQ ID NO: 75512 - protein, 224 aa, Zea mays
  Coding DNA Sequence Number=SeqID_33733
MAAARAKVAARERQRGSSSSLPDGELLGGCGGGTGAGDGGAERRKLEACPLDSFAVPADCPRLYARLPTPARHPARMPQSCRRRRREPPARMPYAHPPPAYLRPPAIQPACRNPAVAAANRPHALRPSACPHDANPAATMANRPIARPTARLGQSACQSSRSTGTQDAADGEAEENLHLGSRSARSRRSASGDGGTDGVDIGGGLLFLWTYRRLDRDLNCWFGV

SEQ ID NO: 75513 - protein, 109 aa, Zea mays
  Coding DNA Sequence Number=SeqID_33734
MAAARAKVAARERQRGSSSSLPDGEFLGGCGGGTGAGDGGAERSPLQVFIGAGASMAVSTCRKLEACPLESFAVPGGPFVSMICGSGGKIEKSTTESDKIANSPLGDEL

SEQ ID NO: 75514 - protein, 159 aa, Zea mays
  Coding DNA Sequence Number=SeqID_33735
  Homolog annotation: Hit_ID=Q9AV81; Match level="QueryCoverage=18%, HitCoverage=5%, E-value=2e-08, Identity=90%"; Hit description =Putative WD-repeat containing protein
MTSSLLCRKSYLALLHMVPCVPLSRLLDNIQEVLVATRLTLLFPVVLLAFAAYLVDSQDVATGGIDTNAVIFDRSSGQILCTLTGHSKKDLGNQKVLLSGINLDEDAKPRGDNCEQWSLFVGTAQASLTLALASSVQGQGCTDPKAGAVDPKAENKVLD

SEQ ID NO: 75515 - protein, 467 aa, Zea mays
  Coding DNA Sequence Number=SeqID_33736
  Gene Ontology: Mol. function=ubiquitin-protein ligase activity; Cellular component=ubiquitin ligase complex; Biological process =protein ubiquitination
  Homolog annotation: Hit_ID=Q9AV81; Match level="QueryCoverage=85%, HitCoverage=79%, E-value=0.0, Identity=82%"; Hit description =Putative WD-repeat containing protein
  Pfam annotation: Domain name=Prp19; Domain location=69-94; Score= -16.7; E_value=0.026; Accession=PF08606.2; Description=Prp19Pso4-like
  Pfam annotation: Domain name=WD40; Domain location=172-210; Score =11.7; E_value=1.6; Accession=PF00400.22; Description=WD domain, G -beta repeat
  Pfam annotation: Domain name=WD40; Domain location=239-277; Score =33.4; E_value=8.1e-07; Accession=PF00400.22; Description=WD domain, G-beta repeat
  Pfam annotation: Domain name=WD40; Domain location=284-321; Score =18.0; E_value=0.035; Accession=PF00400.22; Description=WD domain, G -beta repeat
  Pfam annotation: Domain name=WD40; Domain location=325-362; Score =32.2; E_value=1.8e-06; Accession=PF00400.22; Description=WD domain, G-beta repeat
  Pfam annotation: Domain name=WD40; Domain location=415-452; Score =20.4; E_value=0.0066; Accession=PF00400.22; Description=WD domain, G- beta repeat
  Pfam module annotation: Pfam domain module=Prp19::WD40::WD40::WD40::WD 40::WD40; Domain location=69-94::172-210::239-277::284-321::325 -362::415-452
MVEEAGMLSGGGEAGTTCGCVGTSGDGRGGGHVERRRRSRDNRRMRQGRGAVGGVEETGTGGSGRGGGHDAACRVIARLKKERDEARALLAQAERQIPASVAGAAPAAVVSNGKRAMEDEIGPDGKKIRPGINPVMIDELTECNTMLSAQRKKRQVPPTLAPLDALERYTQISSHPLHKTNKPGILSMDVHPSKDVVATGGIDTNAVIFDRSSGQILCTLTGHSKKTVRIWQENENGNYNCVHTLKDHTAEVEAVTVHATQKYFVSASKDNSWCFYDISTGSCLTQVGEASGQEGYTSASFHPDGLILGTGTTDAVVKIWDVKTQSNVAKFEGHVGPVTAMSFSENGYFLATAAHDGVKLWDLRKLRNFRTFSPYDSDTPTNTVEFDFSGNYLAIGGSDIRVYQVANVKAEWNLIKTLPDLSGTGKVTSVKFGADAKYIAVGSMDRNLRIFGLPGDDQMEESTTAAE

SEQ ID NO: 75516 - protein, 153 aa, Zea mays
  Coding DNA Sequence Number=SeqID_33737
  Subcellular localization annotation: CTP_CleavageSite=71; ConfidenceScore=5.47e-01
MHTPHLISRSFTISRALPSRPDAVGDPLPRSRPSSSSKIAPNLPELRPRGETPVLVPNFLYHALCLVNFTVAGARPRRFDVLAQWPVDLARFSSPELVPKVHLSLLKLAKDLPRLKSPPQGRNGSPEFLLPARDLLTAVLPSLPVDSWPLPRH

SEQ ID NO: 75517 - protein, 436 aa, Zea mays
  Coding DNA Sequence Number=SeqID_33738
MAHRSFSGPPEIFSPPFSPLCLWIHGLFLAIEFVVVPSPSMPNSDDPGATLARANLNSGDLTAVERSGTARSRLISPGPIPYIRFRSNDTDPHNRLFPPGPILSVRFRSNGSDPRSRLFPQVPILSVRFRSNDSDPRSRLFPPDNEQSEVPECVVGDLPEQQPANWRDCIVACTRSRSADARSRSRSSRTLPPRLRGRWSLRGRLPLHLSQRCPPAPPHGIPAAGGDPNGDGDDDAGGSSSHDTERSEEPEPKGWIARPITRDAAHGCHFHDALDTLLRRAFDRHTWSIEGFSEHYSITERDTAEAAMQDAARRALSQYCSLFSGVADGLDPKYYPRRSTGSARVVIVSPVGEGNPRLNNMVNLVVVLNIELDHAIDELGKVQAEVVELRAECAARHYLDGGSLAPVGIQHPYRSPPHGRFDYGTPDCRTRINLDS

SEQ ID NO: 75518 - protein, 235 aa, Zea mays
  Coding DNA Sequence Number=SeqID_33739
  Gene Ontology: Mol. function=ATP-dependent helicase activity
  Homolog annotation: Hit_ID=Q6S4Y1; Match level="QueryCoverage=32%, HitCoverage=13%, E-value=2e-35, Identity=96%"; Hit description=DEAD box RNA helicase
  Pfam annotation: Domain name=DEAD; Domain location=46-235; Score= -11.9; E_value=5.7e-05; Accession=PF00270.19; Description=DEADDEAH box helicase
MRRTRARSTAAPSFTPSGRGWAGTGIRSGDGDGDEAEDEKAFLVPSVVAFPHGMSTIVAGLSLAEAKKEEFSKSSSTFATTSPAPGPVSAPVPATPPPKSTLQARQSSGSSPPLRRASETARAGGRGGFHIYLQGLRAQGLQRFGGVVEMLGCSSSCAQEESIKFGSYSRTRSTCVYGGAPKGPQIRDLRGGVEIVIATPGRLIDMLEAGHTNLRKVTYLVLDEADRMLDMGFEP

SEQ ID NO: 75519 - protein, 179 aa, Zea mays
  Coding DNA Sequence Number=SeqID_33740
MTTRRRTDPRAPPRSAAATPTQLLLARSMCRSGDGDGDEAEDEKAFLVPSVVAFPHGMSTIVAGLSLAEAKKEEFSKSSSTFATTSPAPGPVSAPVPATPPPKSTLQARQSSGSSPPLRRASETARAGGRGGFHVKHYLQLTLNMPNGETSLTFDDHVLQNDLSFIRSNSPPLLTPTGV

SEQ ID NO: 75520 - protein, 76 aa, Zea mays
  Coding DNA Sequence Number=SeqID_33741
MPGFAPCSPRSDRDFDFPTDAGAAKPTKSANGQVCQICGDSIGDYKDKDGVKGLCVVGAINNCTSQLPTYGRSYPP

SEQ ID NO: 75521 - protein, 76 aa, Zea mays
  Coding DNA Sequence Number=SeqID_33742
MSRFAPCSPRSDRDFDFPTDAGAAKPTKSANGQVCQICGDSIGDYKDKDGVKGLCVVGAINNCTSQLPTYGRSSPP

SEQ ID NO: 75522 - protein, 263 aa, Zea mays
  Coding DNA Sequence Number=SeqID_33743
MPRSPNAIRRTNENALCCFLASHLTSSCVITTKATIFDRNGGTTHDETGVEAEGRSRRVEIPPQSQRHDGANVVAGVENGVCSKKTIAPRCRGSRSRGGRGRKTRSKSLIFGRGRRSSVNDRQGDTAKRHQQTDLPASSIVRASRSPAREADGSARVCASHGVRARGRIEGETTDPAGKATAATDPVGKTRSSQRDGRSSRKGRSNVDPAGKAAAATDPTKAKKGVGGGACPAGQGPAPDLAEGVDGTGDGRSSKWEALLLGR

SEQ ID NO: 75523 - protein, 220 aa, Zea mays
  Coding DNA Sequence Number=SeqID_33744
MAKTGEPGLEHHGSLYHLTHRNGGTTHDETGVEAEGRSRRVEIPPQSQRHDAEVEVVAGRKTRSKSLIFGRGRRSSVNDRQGDTAKRHQQTDLPASSIVRASRSPAREADGSARVCASHGVRARGRIEGETTDPAGKATAATDPVGKTRSSQRDGRSSRKGRSNVDPAGKAAAATDPTKAKKGVGGGACPAGQGPAPDLAEGVDGTGDGRSSKWEALLLG

SEQ ID NO: 75524 - protein, 133 aa, Zea mays
  Coding DNA Sequence Number=SeqID_33745
MAHWEWRDGESGTYSPGKGPPKRGEIPLQKCWCDLCLLNLVILVTVSHPDFGAPRPGREHNHQFIGSSNAGIPCRTAIAAKSSRGPPYTDHSPTALAPFGLNKLWTGRTISRELKGLGVRIQRHREQALWMAG

SEQ ID NO: 75525 - protein, 116 aa, Zea mays
  Coding DNA Sequence Number=SeqID_33746
MARVARTLLAKDRLKGVWFIWGPWDTQTVSHPDFGAPRPGREHNHQFIGSSNAGIPCRTAIAAKSSRGPPYTDHSPTALAPFGLNKLWTGRTISRELKGLGVRIQRHREQALWMAG

SEQ ID NO: 75526 - protein, 100 aa, Zea mays
  Coding DNA Sequence Number=SeqID_33747
MYKGSSSLISCKKQTIRIKFLNLARAHRLGIQCSTDPGCRRAVTALVPTIASMGDPVSGQVRRKVRARLHSENQACVQMLGLRGDPLWQARELSPDIPRG

SEQ ID NO: 75527 - protein, 225 aa, Zea mays
  Coding DNA Sequence Number=SeqID_33748
MACHGIHISHSLHLLDYNLAGGEYVFIPEQRAVHEENQEPAPEPATEDLPTAPAFEDKPRYGWYKCGHSTAGAGVSGALYAKAVHFRIWLMMTSPTPANGGDTRFSSDFLSHEGFPSILWEVLNSAGYPTPPLYTVQLYEEHQVPRCRVWLTLEAHPLQLGWRSLDSKTVGFRSENTTEGTALKTLTTFCGYHPLEMVMHPLEFFPAEKRDDPVWCNHVSHVKDV

SEQ ID NO: 75528 - protein, 126 aa, Zea mays
  Coding DNA Sequence Number=SeqID_33749
MDGIRDHAQGVRSTGRSVECRGEKGRPATSHGMGKATVELRSGARDIHVEITAIASDLGKEFLTSRPHKSFFYTDFGLYKSYPLNRNLVLEICVYVDAIVDITPQLITLNQRSKSDKYHKNKHSSS

SEQ ID NO: 75529 - protein, 103 aa, Zea mays
  Coding DNA Sequence Number=SeqID_33750
  Subcellular localization annotation: CTP_CleavageSite=26; ConfidenceScore=5.21e-01
MAKLPRGLPKTKAKVGEPATTNSGTRRSTISGERIERSARGGQGRSRRGGEGFFQKRVYKFYPLNRNLVLEICVYTDAIVDITPQLITLNQRSNSDKYHKNKH

SEQ ID NO: 75530 - protein, 60 aa, Zea mays
  Coding DNA Sequence Number=SeqID_33751
  Subcellular localization annotation: CTP_CleavageSite=26; ConfidenceScore=5.21e-01
MAKLPRGLPKTKAKVGEPATTNSGTRRSTISGERIERSARGGQGRSRRGGEGFFQKRLAT

SEQ ID NO: 75531 - protein, 217 aa, Zea mays
  Coding DNA Sequence Number=SeqID_33752
MYTVQLYEEHRVPRCRVWLTLESHPLQREWCSLDSETIRFRADGTTEATALKALTTFCGYHPLEMMMHPLGLFPAEKRDDPMCCNRVSHAKDVWAMHPDQVGRITVQCMSALYRLQALQGDAMTHLTGLAQATKITFDNREDFVVDLSSKLVEKDLQEELAEANAHLEMHHQDMEANEAGNEGEEDPEEIELASGLNVAPSRVPPTPASSVALTNHG

SEQ ID NO: 75532 - protein, 138 aa, Zea mays
  Coding DNA Sequence Number=SeqID_33753
MNQCRSYSWKSFGSAVHLRTSPQHWVSHASYGGYKCGHCKAAAGASGALYAKAMTSSTPINGGDTRFNFDYLSHEGFPSILWEVLCSAGYPTPLSVHGAVVRGASGATLQGLADPGVGVPLTPRLSGSGWMTPLRPQR

SEQ ID NO: 75533 - protein, 121 aa, Zea mays
  Coding DNA Sequence Number=SeqID_33754
MARLACTLRGKRLDGGVSVLSVSVNLIWFKNPGGNETDGFGYDYGAGKWYSFRLERVVSIATTTQEKMKLWKETSRSSKTTTSSRCGLAATPSRLPVKAAFIYVSFPHFDHCKDYVDVSDT

SEQ ID NO: 75534 - protein, 58 aa, Zea mays
  Coding DNA Sequence Number=SeqID_33755
MERVACTLCGKRLDGRVSVLSVGYSFVLLMMVLSAGGLGLLISLSNPSILLNEDGHLS

SEQ ID NO: 75535 - protein, 41 aa, Zea mays
  Coding DNA Sequence Number=SeqID_33756
MAQCSVSTILFGKPYTSRELSPLVKNRYRRMRRMEDAVTSS

SEQ ID NO: 75536 - protein, 41 aa, Zea mays
  Coding DNA Sequence Number=SeqID_33757
MAQCSASTILFGKPYTSRELPPLVKNRYHRMRRMEDAAMCS

SEQ ID NO: 75537 - protein, 41 aa, Zea mays
  Coding DNA Sequence Number=SeqID_33758
MAQCSALTILFGKPYTSRELPPLVKNRYRRMRRMEDAVMSS

SEQ ID NO: 75538 - protein, 100 aa, Zea mays
  Coding DNA Sequence Number=SeqID_33759
  Subcellular localization annotation: CTP_CleavageSite=45; ConfidenceScore=5.24e-01
MRGTPKTPKSQLVTPISTKLQKPDGRDPGQGSVHSRDTIPPRPSLASGKGSRPRRIHASPEDLLKQRTHLRLARGPARAGFVEKQPWPDRYANRPYRRSI

SEQ ID NO: 75539 - protein, 270 aa, Zea mays
  Coding DNA Sequence Number=SeqID_33760
  Homolog annotation: Hit_ID=Q6QP51; Match level="QueryCoverage=25%, HitCoverage=33%, E-value=5e-14, Identity=65%"; Hit description =Putative growth-regulating factor 1
MKLLKKYVTLLKTSKTEGPSTGSFIKRACSTTMDELKTPETEYRPGLKRLLETTHLELDGKLFVNTQQAPTWRANCRRFDTGGSLDRRGRCACSRGLQAFARERERLSASPFSRAATFSYESPGPSFYRRKERAQVYNGESEPWGRVRRSPSSGAEVEPEPWGRARRSFLWRPRLDLAAVSLTLSSGTAVGAGQAALFSCQVGLWSGKVTAVTSALLTEERALGQAIRLRLLLGEACPSWASGESKLSADGGYQLRFRSLVGTPNYGPRQ

SEQ ID NO: 75540 - protein, 65 aa, Zea mays
  Coding DNA Sequence Number=SeqID_33761
MSRTAGLFWKKTGALMQNCHGERPAVQRRCGDDRGSDKVRRAITRTLANYELQRLVPYHPQAMAT

SEQ ID NO: 75541 - protein, 148 aa, Zea mays
  Coding DNA Sequence Number=SeqID_33762
  Subcellular localization annotation: CTP_CleavageSite=73; ConfidenceScore=5.13e-01
MSRTEGLFWKKTGALMQNCHGERPYNPRSTTPALSSNQAANPAAPPHQTTTKLTGNAPNPISSAQTTNCDYLRDADKKAKRTMDNLLPSRQGHGLAAAMADAASADQHQREIGEAPLEHHGVTGCNPRRKHQAAIPIPPEDPERPPER

SEQ ID NO: 75542 - protein, 106 aa, Zea mays
  Coding DNA Sequence Number=SeqID_33763
MGHGASQEHGGPSWRLVKCSDGSVLRQLLAVADLPSRGRMVPWREGCAADSVFGTRRFLPVRVDTSEVLHLEHLDEPCEDVKDAGDCTALLDAFVYIETSSAALRV

SEQ ID NO: 75543 - protein, 986 aa, Zea mays
  Coding DNA Sequence Number=SeqID_33764
  Homolog annotation: Hit_ID=Q5NAR7; Match level="QueryCoverage=16%, HitCoverage=11%, E-value=3e-75, Identity=89%"; Hit description =Putative FUSED serine/threonine kinase
  Pfam annotation: Domain name=KOW; Domain location=943-979; Score =29.1; E_value=1.5e-05; Accession=PF00467.19; Description=KOW motif
  Pfam annotation: Domain name=U-box; Domain location=398-460; Score= -11.0; E_value=0.0077; Accession=PF04564.6; Description=U-box domain
  Pfam module annotation: Pfam domain module=KOW::U-box; Domain location=943-979::398-460
MKCKLVVQIGPQSVVVARGQAYPPKDVVTVHGIERRDDHTKVQVDFVFDNFLEFPLPIPIAGGDMFTLGEAKNSFVLWPKSGIQLAEETTVHAKPQQVPDTSPQVLHHTPEKDKMPTPTMDTENIDVTHSASNVSKKRKHKHKKHSKSKEKEQKTSQQKNIEDDGLDPLWTPPFHQRSPPPVPNNKQFVLGQPLVSSALLKRMGKQSQCFHKWYFAMTTPISRRQSATHFMVRYEEHDFLEKSWVYAVEFSDVFHIYNDLALDISLHRSWMLCMRKIDKYRGIVGFLDPEMIILKRINEEADEVEAYIVKALLAQQDKECIFVVCQEGAFGAYADKKGRHNKNFGRTVIWKHFQGHAGFATCPLLPDEIANVRERLLDFFMNEVIDIGGSCRVEVSGEVPDEPVVSKKSGLLFERRLIERYIEDHGKCPITKEELTMDDIVSVKTNKTTATPLLLASPHQSTSVSTSLHTGFLRSRSTSGLPRQPSYTTGFGIALNIETLVAVTEQRDTPIETPPPEVQDKILFMINNISISNMEVKAKEFNEVIQEQYYPWFAQYMVMKRASIEPNFHDLYLKFFDKVNSKSLNKEILKATYENCKVLLRSDLIKSSSEERSLLKKPRQLVGKVHHWCTIHFNVNNQMTNTVTNMNRYILSLSDDKQLVPGLISLIEQGTDVLRVKALLFVALLCKNSRRWLPHFFCNAKLISAVDRLGKEKEGFIHHCTEAFVQLVASLVPGILDTVSSDIQQVMVGKRHGPVTALAGRAHPKSTIHLFPVILHLLGSASFKHRVVTGHVLLQLANLIKILEAPFQVLFKNLTVDIKDVKPTSLLKDRLREVEGNPDFSNKDVTASQTPVVAEVPSGTIPSLTHMEQQPEINITSRAMSLPNILNQYAAPVRLPTNNTVEDDKVALMMPEQVPSLTQVSPAQTQSTSPSPFSVNQARIIKFDVGNVVMVTGGRNTERVGVIKNREKHKGSFETIHVLLGAFCYV

SEQ ID NO: 75544 - protein, 85 aa, Zea mays
  Coding DNA Sequence Number=SeqID_33765
MVQCLLKIRPTARLTYRQRPIAVVIRATAGPTCAREREEEVEVTEERTPPPSDSQAGNCFYFDICGSEPDSPVNEGKPRCICHLP

SEQ ID NO: 75545 - protein, 92 aa, Zea mays
  Coding DNA Sequence Number=SeqID_33766
MVQYSVVDQIDRGRKIFTADDPRRDSRHLCRIRVADDLIRPPEREEEVEVTEERTPPPSDSQAGNCFYFDICGSEPDSPVNEGKPRCICHLP

SEQ ID NO: 75546 - protein, 107 aa, Zea mays
  Coding DNA Sequence Number=SeqID_33767
MVHCMLKIRSTARLTYRRRPIAAVIRATAGPTCAREREEEVEVTEERTPPPSDSQAGNCFYFDICGSEPDSPVNEGKPRIHFSKHFCKTESLIIEKPYLDSLKPAYP

SEQ ID NO: 75547 - protein, 37 aa, Zea mays
  Coding DNA Sequence Number=SeqID_33768
MVEAPWVRYLSQEYVPMLTWAANTTAPPLAHISGKAK

SEQ ID NO: 75548 - protein, 223 aa, Zea mays
  Coding DNA Sequence Number=SeqID_33769
MVEAPWVRYLSQEYVPMLTWAANTYRSPSCPYFRDELDEGEWFGGQGTSAIVWPGCVDGEAPAGNADGEHELRRGSTDSKTDSDGVDELQRRHGKQESEERVRERELREEKSSVVEGRRDPSPIYRGRGEGERGSAGVMPLMAFKELERREGLTNAVKVHNEGETDTATRLRGQGPRRGAESGSRAQAASQSESGLLASGAVLRSVLGAGGHGGLGRGTEAGS

SEQ ID NO: 75549 - protein, 166 aa, Zea mays
  Coding DNA Sequence Number=SeqID_33770
MAVRPFTRWFGRRWRSACNRWAVTRSARGGAQLRGGWHLSAIARLQGFSSGSLAASPHQWSPKTVTTSSMVGRSKPGCGLCPALGFKDLHHPCWGRGRAELELYLPYKPAGHLFLQHSGERALTGLAEGADSDNEGPIGRQRRQLQHAWFAGSAGSGAASGATSHR

SEQ ID NO: 75550 - protein, 235 aa, Zea mays
  Coding DNA Sequence Number=SeqID_33771
  Subcellular localization annotation: CTP_CleavageSite=47; ConfidenceScore=5.12e-01
MPGLLAQLALAQLPDPPPTAGQSVAIYPPYGQLLRRVHRGTAQDVARCRGGVRVLGMSCPRSGTMPPRGGRCSPVREDLSGDLPVGRWLLPSVLRWWPPEKASPPTRSSAPSTLRASGSLALIACPRPSCGDAGEGLVAAASVLRHRSPSARSALPLKASLAQLRNPRLLCDEPEPEAAVSACTEAELARKGGFVGPGAGDFPGRGGVAAADGTWPGRPLAGPTPESGCRGHEPG

SEQ ID NO: 75551 - protein, 124 aa, Zea mays
  Coding DNA Sequence Number=SeqID_33772
MGTAAHSALGLGGARARGWGRRRLASETVALGLGDGEGDGGALGDGHGGALGARARRRSGSGTGTTTLGLGDGGARGRGRAPSSETVAVGLGLGDVVAGAHGSETGTGTAAQQPGGVVSAPGEN

SEQ ID NO: 75552 - protein, 124 aa, Zea mays
  Coding DNA Sequence Number=SeqID_33773
MGTAAHSALGLGGARARGRGRRRLASETVALGLGDGEGDGGALEDGHGGALGARARRRSGSGTGTAALGLGDGGARGRGRAPSSETVAVGLGLGDGVAGAHGSETGTGTAAQQPGGVVSAPGEN

SEQ ID NO: 75553 - protein, 124 aa, Zea mays
  Coding DNA Sequence Number=SeqID_33774
MGTAAHSALGLGGARARGRGRRRLASETVALGLGDGEGDGGALGDGHGGALGARARRRSGSGTGTAALGLGDGGARGRGRAPSSETVAVGLGLGDGVAGAHGSETGTGTAAQQPGGVVSAPGEN

SEQ ID NO: 75554 - protein, 139 aa, Zea mays
  Coding DNA Sequence Number=SeqID_33775
MHCALPPSEPPDGERPCCFRLTGVGGAQLRGSWYLLAIARLQGFSSGSPAASPCRWSPKTVTTSLMVGRSKPGCGLCSALSFKDLHHPCWGGGQAEPELYLPHGFVGHLLLQHSGEKALTGLAEGADFDNEGPSGHKRH

SEQ ID NO: 75555 - protein, 267 aa, Zea mays
  Coding DNA Sequence Number=SeqID_33776
MGSARVAFVLLLLEERNFTEVGTFQPSLGFKDFHQAARLHPLADGEKVLTGLAEGADFDNAGPSGRKCPGSGTASGATSHRWAECGYLPAIQAAVALRAPGDRPRRRALLGRRSCSWAVLPLLQHDAFAWRSVLARPGVPEWGSVGGQMAAVVGAEVLAAEEVLVTDKIAAAIRAPGLGSLALIACPSPSSGDAGEGLITAASALRSSLLLFGRPERRSLSLLPENPRLLCDEPKPEAAVSAWTKAELAGEETSSAQEQVTSQAKEA

SEQ ID NO: 75556 - protein, 119 aa, Zea mays
  Coding DNA Sequence Number=SeqID_33777
MVDVESEPWGRARQSFLWRPRLDLAAVSLTLVGGTAVGAGQAALFSCQDRGHLASAYSTGSGRLDTGIGPKALPCGLDYKLVTKFADEVMIVRSMDASLVIPPVIFLWMDVLVSLYFDE

SEQ ID NO: 75557 - protein, 73 aa, Zea mays
  Coding DNA Sequence Number=SeqID_33778
MGNKAIGQIIAQRKQLPMPLPGRMCCNKEATTVGSLVPSTESEAWTSIHGKMTGGITRLASMELNIITSSANF

SEQ ID NO: 75558 - protein, 723 aa, Zea mays
  Coding DNA Sequence Number=SeqID_33779
MPSLGEQLVRSPAFALDLRGRDPAAFVREVEEGVVRIVGRYVSRTEALRSWDICGSNVRLNRVFGLNCLPYGGYPEDDAVVAVDRRGKGPVVVTEEGPSQEAAPAAKKRKIALGGGMSSPELRESSARMLKVTGGRWPKNVLIPRTAGKDFFTSRMAHDLKVFPYGQNIVVVVSVVMEKDRQDAAQKHRAVIRIGDPFREAKKARGATKSATPGSSKPLPVAKPTAPGPSKASTGAKAAASGAGKPPSGGPAKGRRLPSLARTDEAAARVADFNTDICVGDYFVGSDVGQLAVVPPPVAATSPTAVIGAKGATRDSWAAFCASGEILSAAAAKDVAGSMSQQLRQASQQPKHAADFADHVTSGALTAEFAAEVESLRAQHADAVREKSAVKSKSRRLSEKVATMEAEKADLWRQLAEERREANQAISDAQAAQAEAKLTRAEGSLAHQLAEELEARLDVLRNRVDKGEASTRAEVERTHAQFVDSYRELGARTAAFEALGQEAGLLFLEWMQEELGVLPTIMTGLMSFASLVTYEGAVNDLSREECRHFEVFDQSDENFEREIFKVEDPVLKQSARALFDRMWGPHGRETVRERSDRAIDQMAHAEGVEDLGGLDGALPEAAGVDPAPPSDAGEGPSSTPSPTGAGEDPAPAPAVTPGFKEQSRVHLIHAPKKTTYIITECIEINVIKHQSIYYIAEDLLQNKSITIKRTKDRRRQCRPRNAT

SEQ ID NO: 75559 - protein, 238 aa, Zea mays
  Coding DNA Sequence Number=SeqID_33780
MARYPEVTGVDPAQPSDAGEGPSSTPTLTGAGEDPAPAPAPTCEDASKAVVEPATEDPPAADEPSQVPAFGPAQATTTDNTDFAVETSIVVPADDSVLGSMSECFESNGESGSLFPWTEESSDEGLDYFVALDVAAVEISPRVEGAEDLPGMSTGCRRRRVLGKQCVGEFSRSGRRRRMGMERGRLRVGGIGKRELLSSPIGAGIGEGDLWELFEGEELRIMLFNYRKMGIIPKVEPM

SEQ ID NO: 75560 - protein, 154 aa, Zea mays
  Coding DNA Sequence Number=SeqID_33781
  Homolog annotation: Hit_ID=Q4VDM4; Match level="QueryCoverage=25%, HitCoverage=6%, E-value=4e-08, Identity=65%"; Hit description=Cyclic nucleotide-gated ion channel 2
  Pfam annotation: Domain name=TFIID_30kDa; Domain location=37-67; Score=-7.5; E_value=0.057; Accession=PF03540.4; Description =Transcription initiation factor TFIID 23-
MDYNPTVWCCRFPLAFSTFCERLILDSLMLCLVVRKIPDELVEHYLGHRSGFHCPDLRFHSYMWMKGIELQFRWDQVATSIKLPYGSPVQLERTVLLLPLLIYDILVLMWYFKPCLYMEVGLASAVIALRTCTDVAHLAHVLLQLRLAWYGKLV

SEQ ID NO: 75561 - protein, 207 aa, Zea mays
  Coding DNA Sequence Number=SeqID_33782
  Subcellular localization annotation: CTP_CleavageSite=60; ConfidenceScore=5.40e-01
MQCPRLPPPASCPRLAFVTFSAPTPLLCLRLTSPRSVLLLKPAPPAPKFFDLDGGGVWVRLTNVGAVVTSSPPPNEVKKHGQHNGSNSKKHVHPLVRCNVPKAKSTQQSMPNGGHGYIVKWTEYVIRGNVRAIDKANETALTRFLSSLMDYNPTVWCRRFPLAFSTFCERLILDSLMLCLVVRKIPDELVEHYLGHRSGFHCPYLRL

SEQ ID NO: 75562 - protein, 128 aa, Zea mays
  Coding DNA Sequence Number=SeqID_33783
  Subcellular localization annotation: CTP_CleavageSite=55; ConfidenceScore=5.22e-01
MQRQQAPRVEALPRLGQQPSCCRSRRRLYLSLPSSLCPHLSPPFPHNRLLVFIPEAAARSAGVSRRLVVRADVKVISMGEACRRGLAAGIDKLADAVSVTLGPKAVASISSGNDEHVGNLIADALKIF

SEQ ID NO: 75563 - protein, 248 aa, Zea mays
  Coding DNA Sequence Number=SeqID_33784
MAVNQFQQHGGRATPQGPHETTYLEFSETRPPLFIKAEEPLEADEWYAIDQVNTDLKKKNCFMRGLNDRLQRKMATCLDLTYSRAVSTALAVEAKTAGHGKSKGFGGFPAAQRTHTISTGEACRRGLAARIDKLADAVSVTLGPKDPFGPKMFELTVHYDSPVAAGVMRAKLAESWSLPYLDAFGAAKNMHVYEVSFIDSWVLSLSPMRRAFLKAMRKSNNPRRHVVYAFGDHYDFRKKLQIINLLTR

SEQ ID NO: 75564 - protein, 62 aa, Zea mays
  Coding DNA Sequence Number=SeqID_33785
MKHKTAALKLTQRCLSKDLKWERQEMRENPSSTARRQVQLVYGQRGSQLKLSSAEVEKAQLS

SEQ ID NO: 75565 - protein, 60 aa, Zea mays
  Coding DNA Sequence Number=SeqID_33786
MKHKTAALKLTQRFLSKDLKWERQEMRENPSSTAQRQVQLVYGQRGSQLKFSPAEKLSCS

SEQ ID NO: 75566 - protein, 66 aa, Zea mays
  Coding DNA Sequence Number=SeqID_33787
MMKTICVTEYLNYEGDYMPLQPLEDENDTVISFLYPLEPPVKQGRTRRGRFQSQSGQLFAVALFDS

SEQ ID NO: 75567 - protein, 274 aa, Zea mays
  Coding DNA Sequence Number=SeqID_33788
  Homolog annotation: Hit_ID=Q5N7Y0; Match level="QueryCoverage=21%, HitCoverage=17%, E-value=2e-15, Identity=68%"; Hit description =Leucine zipper factor-like
MASSAGGVLSSLGKNESYLCANKVSMDDAPYLKMVDIKMYSSYEDLSMALEKMFNCFITCEYCSVLCFCLMHFPLVSTVSSNAISVRELSSYRCFQIMFPSTLQGTGENWTMMKTICVTEYLNYEYLNYEEDYMPLQPLEDENDTVISFLYPLERPIRFLIYSNCYHYRFFDGHGEAGQNKKRQRIGDTLDFEIKRWSTGKQGNLRALLSTLQCIRPSDKKVDYQIQKLTNAADNATAREKSGNAEANGKDGHSNEEDLLKYRPNPDMMDTDWS

SEQ ID NO: 75568 - protein, 70 aa, Zea mays
  Coding DNA Sequence Number=SeqID_33789
  Subcellular localization annotation: CTP_CleavageSite=28; ConfidenceScore=5.54e-01
MGHRLVASVAALVLPSPGSSPKLPAASRVAHRSECAASRPRPVLLSLRCFAALPASGHSGAAVLGSEGAK

SEQ ID NO: 75569 - protein, 53 aa, Zea mays
  Coding DNA Sequence Number=SeqID_33790
MGHHTAPPVIPAPGGAYAGEGATPVENPNPLHDFVNEFFASRGSGHNSNDPDM

SEQ ID NO: 75570 - protein, 191 aa, Zea mays
  Coding DNA Sequence Number=SeqID_33791
MVTGQSAVGIGIAVGMTIDGPAVIASTGTQEQQSNRQSDSGHTESGTRPHHMGRTRGTTWQGKIIRPVVHRWIRTSEGYQTPMRTVPELPRRHAGSLEYSSFTGVIDSTELRSHGGSSSQAGCGSSRSRHSVSSMEDAMRKLQERFREELRQQQMGIPPTAIRGSRVMGHNTAPPVIPALGGAYAGEGATT

SEQ ID NO: 75571 - protein, 310 aa, Zea mays
  Coding DNA Sequence Number=SeqID_33792
MARLRHTARKSVIPFLPSRLAERPLRRPVAGQSSHLERLHHRLHEEQERRRQAQQGSSFSLHQEIESVRSCSPVLPLEARPAPPLGAPASGVAAGGDPDDGGGDDSSSHDIDFSANHEPEGWVARPITRDAARGCHFHDALDTLLRRAFNRHTWSVEYRCVGAEACSEHYSISERDSAEAAMQDAARRALSHYCSVFGGAADGLDLKYYPRRPSGSTGGVIVSPVGEGNPRLSSTVNLAAVLNTELDHALDELSRARAEIALLRAERAECRHLDGGSPAPVGTQHPYRSPQRGHQSYGNPDCKTKITLEP

SEQ ID NO: 75572 - protein, 129 aa, Zea mays
  Coding DNA Sequence Number=SeqID_33793
  Subcellular localization annotation: CTP_CleavageSite=38; ConfidenceScore=5.21e-01
MGQTTHPSGSWSAEKSVSWLELSSPPPSSGSPPAATPEAGAPSGGGGAASPSGWTVRPWDGEADAQQGGRLYLLLSSGCNADNLGRGGLVCRARLRAPNSTLMVALFSQAVIQRIGPYGEALEKPLEPP

SEQ ID NO: 75573 - protein, 117 aa, Zea mays
  Coding DNA Sequence Number=SeqID_33794
MGQRTLAFTKLLIRDFLCNFLGKHRLPVVYVKAIRSEMDGGDGAAGFCPLLQPAEAAAAAPAAEKLTGGEGAGALRVLRATGVAWEVGEGAGNPLAGARSGQGHRRGAVHGEVARRR

SEQ ID NO: 75574 - protein, 220 aa, Zea mays
  Coding DNA Sequence Number=SeqID_33795
MGRWISGAPEGGGPRRSGSAAALRDSGEQLSAAESHRGEGRGQRRFLTSRRTPGTPRRRRIRGDGSGRRWWTTAAARRTAGESGQRELERGRGNWSASRVADVGAELTVAEGTAELQRRRGNVLGRRRFNGGGALACAQRGEVGEGSASAQMREGERACEALGSSDRGEVVASSTRDVGAESAACEDRGGGYAKTEELTARAREQRERRKRARARRRRPR

SEQ ID NO: 75575 - protein, 131 aa, Zea mays
  Coding DNA Sequence Number=SeqID_33796
  Subcellular localization annotation: CTP_CleavageSite=73; ConfidenceScore=5.04e-01
MLAAGANPHVHCRRGLNTGLGGLLGHPNSTGDLATLRARAVAPQFLAGARSPSQTGIPPWRVSTQHKIRVGVSCSGMGATGPGARHRLWKAGVEEEIGSQSFKIQTIDPRSNGSDRITIRSEVVLIMAVDF

SEQ ID NO: 75576 - protein, 148 aa, Zea mays
  Coding DNA Sequence Number=SeqID_33797
MGEISPDFMLRRHPPRWYAGLRWRSGAGEKLRRDSSSSEGSKVTGTIGMPQQSPKPCVETPTAVNMWIGASGQHPTLCSLSLRDFCKHGADSSALWYGGAGVVHELWLERQGVTGFSETWTSIHRKMTGGITRLASIEFTIKIFICNF

SEQ ID NO: 75577 - protein, 290 aa, Zea mays
  Coding DNA Sequence Number=SeqID_33798
  Subcellular localization annotation: CTP_CleavageSite=70; ConfidenceScore=5.34e-01
MDHAAHHASVAAPWAPSVISNLYETTSPLDPISFSLCMPRNWSLPAPFNPLASFLYLKNRRMPLPSTSVLVSTDEPLAKLPLHRSELSCPAHSSMAEGTPAHRPRALLGLCPTPRLARRPPASAARGVQPARPARLACTAASRRSSPARMPHRAHVQQPHAGSSSARPARFVVRRRRKVRSHPPTPFFLVVCRVPAPLCTIPFVARRRSLARPNQSRPRHCVVVPDRPRSSRALCTLLLSALVSVGCRRRGENAVYPGVDEDDVYDYGNGKEEGVEADLQEFQDFDEFED

SEQ ID NO: 75578 - protein, 96 aa, Zea mays
  Coding DNA Sequence Number=SeqID_33799
  Subcellular localization annotation: CTP_CleavageSite=64; ConfidenceScore=5.09e-01
MEECAGQESSDRWRGSFASDSSGLTKTLVAGCGGVGVTGTSPVSSRERERVEGRNSAAGLLFAEASAGRGEANSRSEWIERKRSLRGKERGRMGSP

SEQ ID NO: 75579 - protein, 84 aa, Zea mays
  Coding DNA Sequence Number=SeqID_33800
MFGLPVAMRLLVLVLTLVMVVSITTTAQEKMKPWKETSRSSKTTMSSRCGLAVTPSRLPVKAACIYVSFPHFDYCKNYVDVSDI

SEQ ID NO: 75580 - protein, 269 aa, Zea mays
  Coding DNA Sequence Number=SeqID_33801
DALLDHLGNGQWGVALSGQKGNHGLWVKDVRITGGNEIVGFGIDSGNAGDRVCEELLPRASHRGAPAPPLDALAPGVAAGGDPDDGGGDSSSSHDTDFSADQEPEGWVARPITRDAARGCHFHDALDTLLRRALDRPEAAMQYAARRALSHYCSVFGGVADGLNLKYYPRRPFDSTGGVIVSPVGEDNPRLSSTVNLAAVLNTELDHALDELSRAHAEIAQLRAERVERRHLDDGSPAPVRTQHPYRSPRRGHQSYGNPDCKTKIDLYP

SEQ ID NO: 75581 - protein, 101 aa, Zea mays
  Coding DNA Sequence Number=SeqID_33802
MAALLCCAGAGARAGGRRLGGHAGEVPHEQGVAVLGSAGARVQWLPRGRVRAVPGEDHGRRWPGLGAGRCLRLIDAILEDPLDLWVRTHTRFPLLHFDLVG

SEQ ID NO: 75582 - protein, 109 aa, Zea mays
  Coding DNA Sequence Number=SeqID_33803
MTHGEEKRGQQVHEAPVEKVLGVGVSSTARQGLPVALGMRRLPCLRPIDAILEDLLDLWVRTHTRFRCTTLILLVDVDRIVFIGVRGKPLNRSFDMHLVKMLPILILTD

SEQ ID NO: 75583 - protein, 260 aa, Zea mays
  Coding DNA Sequence Number=SeqID_33804
  Homolog annotation: Hit_ID=Q94KS6; Match level="QueryCoverage=19%, HitCoverage=17%, E-value=1e-16, Identity=82%"; Hit description=Beta -expansin 8 precursor
  Pfam annotation: Domain name=DPBB_1; Domain location=26-187; Score =10.2; E_value=0.0017; Accession=PF03330.8; Description=Rare lipoprotein A (RlpA)-like double
  Subcellular localization annotation: CTP_CleavageSite=44; ConfidenceScore=5.02e-01
MKTMRSTSTNKIRVAQRKRVWVLTHRSKGSSRIASIGFEYLKVKATTQRAMPAQPSSCPKQPCHARPGEERHAPCSLARASPTPNPWPGELPPLPARESRPSSRNLGRDPPPLSPCAEAPGRGPEPPGMASPMAPAPTITKTMIITDMNYYPVSKCHFDLSDTVFGKLAKPDLNDKLRPSGIIDIEFTRIHRRHWGSSLVWLRGGMLYGDLQIYVADVVLHLGNRKVVMRMVGFDYDYGNGKEGVEADFHEFQDIDEFKD

SEQ ID NO: 75584 - protein, 392 aa, Zea mays
  Coding DNA Sequence Number=SeqID_33805
MYRVLPPSEPPDGEHSRCFRLVVVGGTQLRGSWYLSAIARLQGFSSGSPTTSPRRWSPKTVTTSLMVGRSKPGCDLCPTLSFKDLHHPGWGGGWTEPELYLSRGFVGHLLPQHSGERALTGLAGGSNFDYAGLVGGERRQLQRVGLAGSAGSGSAPSAHSRRESSCRAACTGGPPKTSRAARAAFVFLGCPAFAPVRRLYAEVGARPPGRIRVGICRWADGFRRWRGGGAFALRPSLLLFGHLERRSLSLLPERAAESLGSVGLAARGFSCLVKGTLGRSAMSRSRRQQCKHGQRQSWLEKRLRRPEPGRAVHWRDQRQSRVAEAMSRAGVLGGQLAEASGRPAEPSARTGFLEETLAAMARSDFAEGGVDAEAGAAAPPPSTSEPAGSVRL

SEQ ID NO: 75585 - protein, 375 aa, Zea mays
  Coding DNA Sequence Number=SeqID_33806
  Homolog annotation: Hit_ID=Q6QP51; Match level="QueryCoverage=13%, HitCoverage=22%, E-value=4e-14, Identity=75%"; Hit description =Putative growth-regulating factor 1
MAERYQLPRSCFPPTTTRRKRRERSPSGGSESGRTRYMEREDMVAIQGGHPPFKGDSPHLRPQPARTESSPTCSKVLPLRHGGWVPRVMQAGPGQKEPKPPRAVRATAQRLQAFLHYRPDQRVRGRTAMQAACNRTKGAHPFDFDASSMEAQAHTSCNRRAGYYVRETAPPLAPVPRLLDCGTGGRKQQSSRQQAHAPSWDSERTLSHGDRRHLWQAKQATLHLRHNDRVKKGTGKGDTPKGILLCEGSGPRAPLLIRGSKAGPSEGFNSRLRALGLRAHYWSEVRRLAPRKGSTAASGHSGSAPTTDQGFVGWPPKGSTAASEHAERGITLGSGAALANPAPAKPLTASTYQPENLGLDYAPGLRPIRMREQPD

SEQ ID NO: 75586 - protein, 249 aa, Zea mays
  Coding DNA Sequence Number=SeqID_33807
MAEELFNQPFDYENCLRDNRYCSLSPFGFLPSLRHAHEGIYSQFRHFTIMHRFCGVLNSFVKRTSNGKHEQFVTARRQDLPVSSKQGADTKSEKDNSTILDKAGNGPVDKEQSVDAYASKSKAQNGKAMPSNGGSLANMWGRASAKPMPPSTTNSTAVASVAATADAQICAKEEADGNSSDDEHGINYKRGSTNANNRKRTVVFDYSDDEEDDNIVSIASPELPKQHTPDLVVGIVTISVTKSPMIEVV

SEQ ID NO: 75587 - protein, 286 aa, Zea mays
  Coding DNA Sequence Number=SeqID_33808
MAEELFNQPFDYENCLRDNRYCSLSPFGFLPSLRHAHEGIYSQFRHFTIMHRFCGVLNSFVKRTSNGKHEQFVTARRQDLPVSSKQGADTKSEKDNSTILDKAGNGPVDKEQSVDAYASKSKAQNGKAMPSNGGSLANMWGRASAKPMPPSTTNSTAVASVAATADAQICAKEEADGNSSDDEHGINYKRGSTNANNRKRTVVFDYSDDEEDDNIVSIASPELPKQHTPDLVVGIVTISVTKSPMIEVVSLLFVIYHYATVEEIGSIPFSEPLTHIIIAFKCVYKL

SEQ ID NO: 75588 - protein, 203 aa, Zea mays
  Coding DNA Sequence Number=SeqID_33809
MVASRRWRQSRPPWVQQGAGGREGSRSRRNQVCLAGAAKARELPSPGKRVADFGTDIRVDDYLVGSGEGQLVVVPPAVATVVSAAVPGAKGSALSAGGEIPALTAVKDEAGVVSRRLKEASQQLSQAADFADRVASGALTVVVSAKVERLRAQHADAVREKSAVDSKCRKLAEKVVALEGERTDLRRQLAEERREANQALAKA

SEQ ID NO: 75589 - protein, 103 aa, Zea mays
  Coding DNA Sequence Number=SeqID_33810
MEAQAHASCNRRAGCYVRATAPPLAPLPRLLDCGTSTVTRGNPAYDPAVPARGSGAALANPAPAKPLTASTYQPENLRPDRAPGLRPARMREQPNQPKCCETH

SEQ ID NO: 75590 - protein, 100 aa, Zea mays
  Coding DNA Sequence Number=SeqID_33811
MAERYQLPRSCVPPTMRRKDGGYPPSGGLEGGKTRCIREREDMVAFRRGGSGAALANPALAEPLTASTYQPENLGPDRTPGLRPARMREQPDQPKHYTRH

SEQ ID NO: 75591 - protein, 398 aa, Zea mays
  Coding DNA Sequence Number=SeqID_33812
  Homolog annotation: Hit_ID=Q6QP51; Match level="QueryCoverage=10%, HitCoverage=19%, E-value=2e-10, Identity=76%"; Hit description =Putative growth-regulating factor 1
MEAQTHASCNRRAECFVQATAPPPAPPPRLLDCGINTVTRGDPAHDPAAPAWRDDNAPVFRSSNGSRTRNGCPANHSPRHINSAAGQAGPGKGDTPKRTLPREGTRLRASLLIRGSKAGPSEGFNSRLRARGLHTHYWSEVRRPAPRKGSTAASGYSGSAPTTDQGGNDLVMESHQREASSPRTPSPGDRVRQITRSSPETPCSAPTEGNMALSPLLLAERRRRGVCKKVEYVRDRPLALRRGSGAALEYVRDRPLALPKPLTASTYQPENLGPDRISPFEGLDHASPEPSLGQGQPTPEDLRLARGPPPAANTFPARPRPCLRQEATPTKSQGHLMQRWPDTFILTRAPQLTESKARTRAKPRKTANSAPPDPGLGLGLSPGRRRTPLRPTQGSDSG

SEQ ID NO: 75592 - protein, 121 aa, Zea mays
  Coding DNA Sequence Number=SeqID_33813
  Subcellular localization annotation: CTP_CleavageSite=23; ConfidenceScore=5.05e-01
MAHVGHHHYSSPGRFVWRPLRVRAVRGTGHGRVVFTPWERALPLLQEGTRACRRLDRCLRSSAAALTTGPLLTMPTIVPTPRLTGPWPSPLTALLGPAQGYLESRYRFRSRGGAALARVAV

SEQ ID NO: 75593 - protein, 229 aa, Zea mays
  Coding DNA Sequence Number=SeqID_33814
MLPSEGAEHGVSSELLTDPFDRVRGLDASLRRFVWRPLRVRAVRGTGHGRVVFTPWERALPLLQEGTRACRRLDRCLRSSAAALTTGPLLTMPTIVPTPRLTGPWPSPLTALLGPAQGYLESRYRFRSRGGAALARVAVGRTLEDVSGDFACDAKGCNAALLLLSLEERDLVEIGTFQPSLGFKDFCRAARLHSLTNGQFGGEKQAGLRPPLRPQLQGSSSSLLRRRES

SEQ ID NO: 75594 - protein, 290 aa, Zea mays
  Coding DNA Sequence Number=SeqID_33815
METRFGGLRDRLDKAEASTRAEVDRTHAQLVDVYRELGARTAPFEASSQEVGLRFLGWLLEVLPTIVTGLMSFASLITCEGAVNALSREGCEHFEVFDQSDEDFERRILQVEDPVLKRSAGALYDRMWGPHGRETVRERSDRAMEHRTARGIEVELAPPSDAGEGPLVTPALTGAGEDPVPAAAPTGEDTSMVAGEPAAEDPVVSANPSQVATQVSTYGPTQATAADNTIFVAAATVVPANDNLSGSGSECFESNGESGSLFSWTEESSDEGLDYFAALDVAAGGGWRGG

SEQ ID NO: 75595 - protein, 246 aa, Zea mays
  Coding DNA Sequence Number=SeqID_33816
  Subcellular localization annotation: CTP_CleavageSite=35; ConfidenceScore=5.12e-01
MARARAYKTLPDLDCTLPRTLKPHRSLARRRLPVRSESAAAQSLGHRRPASGAIPNSVQPSEKTVHTPVKLPERGIEVCFAGEAGPRSPELSTPPEYVDRVIHSTILRFLVHTVATLPRKAHHALGLNQFAVVWPVHSPPTRTPACTRGPDDSGHPRRQAVPRRDRQSLPEPTPPFARPPSPLTIPIHYVTLKENLNLKDCNLADGEYILVPEQGAAQEVAPDPAPEPAPEDLPATALEGKPRFYA

SEQ ID NO: 75596 - protein, 67 aa, Zea mays
  Coding DNA Sequence Number=SeqID_33817
MGVKTIPIHYVTLKENLNLKDCNLADGEYILVPEQGAAQEVAPDPAPEPAPEDLPATALEGKPRFYA

SEQ ID NO: 75597 - protein, 147 aa, Zea mays
  Coding DNA Sequence Number=SeqID_33818
MTVRIGGSLTTLRRSGRGQFIVLAGGGREFRARRAAVGDGEEHWRTRISVLRRGNLTGVDLTAVASYSDAVEGLSHAADGREAAVDGELIGFYRGDTVRWPEFFIGGSLSTAAYTGVTHLPENNVDRLPHESRRQSVAGGEVAALAA

SEQ ID NO: 75598 - protein, 70 aa, Zea mays
  Coding DNA Sequence Number=SeqID_33819
MTRHVTSKRVLGQQAYIDKITERPFPFYFFSRYVLDDGSAWRSSGEPLHRPIEAMTGAPEWRTPNPSYPE

SEQ ID NO: 75599 - protein, 334 aa, Zea mays
  Coding DNA Sequence Number=SeqID_33820
MPHNICEEGLRSDTSCDGTSQGSDQVFITAKGFKEGNQDQGSKQVRKILKTSREVANAPGLAFVNSPVAQHKGRKRPRARWRSCGKITERPFPFYFFSRYVLDDGSARRSSGEPLHRPIGGDDRRHPSGGHQIQATPSNSPKLIAQIVNYCGLATVKRADEPRIPCVPDGQWTFSSIGRVNKHRRHVRMLKRGRGRVGLTGKGAGLGERPTVVTVNFGRYRAAVGSEEEHGCSEYVFHDVAVTPVIDGKLEGVTAMRWRGWDTRRKAGRRLSPAFLSASTVVTQYGGRSSLTVEAYPRRRTPVLPTYPENNVDRLPHESRRQSVAGGEVAALVA

SEQ ID NO: 75600 - protein, 127 aa, Zea mays
  Coding DNA Sequence Number=SeqID_33821
MPLHHHMASRLLEETLTETETTTTVAVRATPQSSWRSRSRRDGSPDPSLVTPLAAVISMTLSTPYCVGPSTNTLSPLSIVVWSTSIFVGHTRTNGRLLAWCGVRTMISEVQRPSQSIILSLRGILPR

SEQ ID NO: 75601 - protein, 134 aa, Zea mays
  Coding DNA Sequence Number=SeqID_33822
MISGVQRPSQSITLSLRGILPSGVAGDLDLKYYTRRSTGSARGVIVSPIGEGNPRLNNMVNMVAVLNTELDHVLDELGKVRVEVVKLRAERAVRHYQDAGSPAPVGIKHPYCSPPCGHFDYGTPDCRTQIDLES

SEQ ID NO: 75602 - protein, 64 aa, Zea mays
  Coding DNA Sequence Number=SeqID_33823
MASAMWPGVYLEKKQSSEDLENEEEIEVTKEKTPPPSESQAGNCFYFDICGSEPDSPTNEGKPR

SEQ ID NO: 75603 - protein, 70 aa, Zea mays
  Coding DNA Sequence Number=SeqID_33824
MASAMWPGVYLEKKQSSEDLENEEEIKVTEEKTPPPSESQAGNCFYFDICGSEPDSPTNEGEPWCICHLP

SEQ ID NO: 75604 - protein, 194 aa, Zea mays
  Coding DNA Sequence Number=SeqID_33825
MADLEVGSIWSEEVGRGLPAGRWRSFAAGLPPVSSGRAVEVGGRGVLCSRQGEEAARLTQLLAGLTEREGEEGEGLTGEGEDGGASRLGLGRGEEGGGRGWCEEEGARGELFIGARGRGERWSSLTPASFPVPPLMAHSAAEGTLRRGSTGEDAGQGEEDGAVPNFPVRRGDGDEETAVKDGGEGTAGRRMRGG

SEQ ID NO: 75605 - protein, 207 aa, Zea mays
  Coding DNA Sequence Number=SeqID_33826
MADLEVGSIWSEEVGRGLPAGRWRSFAAGLPPVSSGRAVEVGGRGVLCSRQGEEAARLTQLLAGLTEREGEEGEGLTGEGEDGGASRLGLGRGEEGGGRGWCEEEGARGELFIGARGRGERWSSLTPASFPVPPLMAHSAAEGTLRRGSTGEDAGQGEEDGAVPNFPVRRGDGDEETAVKDGGEGTAGRRLTALAYNAPVTPAATVQ

SEQ ID NO: 75606 - protein, 86 aa, Zea mays
  Coding DNA Sequence Number=SeqID_33827
MAELAQASIAVGLLAPEERHPVFYVEKKASRSTLVDVRSDAQIGIAIVLTNADWDRVCDWRTKGYVMYAICSLSNYVLVDVVYSGV

SEQ ID NO: 75607 - protein, 170 aa, Zea mays
  Coding DNA Sequence Number=SeqID_33828
MAPGSLLPAAVLLKRALLELCRTCYFPARGRGTWPCSSYLHHQNNKPPPRPGVLAAQLGRASSLRDALAAARLNHISMAELTPSLLQPLLLLLFAVRRVFDTMPARKICCHSTIDAHRVFCCFCAAPSLSSFTPERNPVFCVEKKASRSTLVDVRSDAQIGIAIVLTNTD

SEQ ID NO: 75608 - protein, 188 aa, Zea mays
  Coding DNA Sequence Number=SeqID_33829
MQATLQKVEQELLQIKAAVQHEQHQLALFARLQTLAAVCIQAAACGFLARRRVREMRRQMLEVALVTVDLGTRGRNLTLSDGHQQRHRAAISKCEHDGVHGIQVAAHMQVQCAEGVRLILSYGRPRSTFLPIDTPLQSLTDLAAITATLRTSRVWRPIHSTPIPHRSSGHNSHIPNTAGVAPESAAVP

SEQ ID NO: 75609 - protein, 202 aa, Zea mays
  Coding DNA Sequence Number=SeqID_33830
MGDLWTNIRADLAKMQATLQKVEQELLQIKAAVQHEQHQLALFARLQTLAAVCIQAAACGFLARRRVREMRRQMLEVALVTVDLGTRGRNLTLSDGHQQRHRAAISKCEHDGVHGIQVAAHMQVQCAEGVRLILSYGRPRSTFLPIDTPLQSLTDLAAITATLRTSRVWRPIHSTPIPHRSSGHNSHIPNTAGVAPESAAVP

SEQ ID NO: 75610 - protein, 123 aa, Zea mays
  Coding DNA Sequence Number=SeqID_33831
MVTTNSVVGRSEPGCNLGPALSFKDLHHPGWGGGRAEPELCLLHGSAGHLLPQDSRERALTGLAGGPDFDNEGLLAWFGSGVSSRRESGCRAARTGGPPKTSRAARAAFVFWGYPAFAPVRRL

SEQ ID NO: 75611 - protein, 255 aa, Zea mays
  Coding DNA Sequence Number=SeqID_33832
MGSTRVAFVLLLLEERNFAEVGTFQPSLGFKDFHQAARLHPLAGGERALTGLAGGSDFDNAGLEDRPRRRALLGQCSCSWAVLPLLRYGASMRRSVLTRPGGSEWGSAGGQMASVVGAEVVAAKEVLVTDGITATIRAPGLRLFGFDSLSSPLEWGHGRGPCCSSVRPEAIAAAIWPAGAEVVVAAARAGGGEPPGVSSPRRPSNVGGYSYLRGWNQSSVCNGTLGAGVCSLWLSGPEHVGIFGCNTLFFPHFEH

SEQ ID NO: 75612 - protein, 240 aa, Zea mays
  Coding DNA Sequence Number=SeqID_33833
  Subcellular localization annotation: CTP_CleavageSite=35; ConfidenceScore=5.48e-01
MARARAYKALPGFDCTLPRTLKPHRSLARRRLPVRSVSAAAQSLCHRRPANRAIPNPVQPSEKTVHTSVKLPERGIGVCFAGEASPRSPELSTPLEYVDRVIHSTILRFLVHTVTTLPREAHRALGLNQFAVVWPDNLEKPYKNNPKDTRAIQIPYVYPQQKPKPKDCNLADGEYILMPEQGAAQEVAPDPAPEPAPEDLPATALEGKPRFMHNHYICYFTALNDCRIDCALKCRNCLKP

SEQ ID NO: 75613 - protein, 94 aa, Zea mays
  Coding DNA Sequence Number=SeqID_33834
  Subcellular localization annotation: CTP_CleavageSite=40; ConfidenceScore=5.31e-01
MQGHSVPTHINRPHRFPGNRSGLTALAYNAPLTPTGRRAVTALVPTITGMGDHVSGRVRGKVCGQVHSGNPEIMQLGFQPIPTLKCTINPTIIK

SEQ ID NO: 75614 - protein, 261 aa, Zea mays
  Coding DNA Sequence Number=SeqID_33835
MGCTCVAFFLLLLEERDLVGVGALQSSLGFKDFHHAAWLQSPSAVTQDDDRRPRGGEERAGPWPPPALSFKDLPRVWLPGLSGSSAASGPSCAAGCTGGSHNTSYAARGGVRVLGQSCPRSCGEDGSEDLLVRAGAATVRRCGVGGQVAAVVGAEVVVAIGEASPAEAVASADETVSATYAPDLRLFGFNGCPSGVEVVHSCGNGAGVPFVMDLRALCDELKPEAAVARTEAVSARTEASSAREQVASQAEEMQQRQLELG

SEQ ID NO: 75615 - protein, 263 aa, Zea mays
  Coding DNA Sequence Number=SeqID_33836
  Homolog annotation: Hit_ID=Q6QP51; Match level="QueryCoverage=23%, HitCoverage=39%, E-value=9e-19, Identity=69%"; Hit description =Putative growth-regulating factor 1
MTEEHQPPRGRAPPTTARKRQHMCTPSGGSKGIEKRGYFERILLSEGSGPRALLLIRGSKVVPCEVRQPPQSTRAPSPLLIRGSKAGPSEGFDSRPRARRVRDDPGYVRYMTKARAMLPRGRHRALGPYQMGLGPANHLQVLLERASGPLADPYRMGLGRPLRSPDSNSLETPCSASTEGNMACSPSSLRKGDEGAYNKKPRQSSIVLSLRAEARRLLSHQATAKLSTTLTKQLENSEPDHAPGLRPGRMREQQGRPRHHKKN

SEQ ID NO: 75616 - protein, 393 aa, Zea mays
  Coding DNA Sequence Number=SeqID_33837
MHRTLPPSEPPDGERPRFFRLVVVGGTQLRGSWYLLAIVRLQGFSSGSPAASPRRWSPKTVTTSSMVGRSKPGCDLCPALSFKDLHHPGWGGGRAEPELYLQHGFVGHLLPQHSGERALTSLAERADSDNAGLVGRERRQLQRVGLAGSAGPGSAPGAPSRRMSGRRAARTGGPPKTSHAARAAFVFLGCPAFAPVRRFCAEVGAHPSGRIQVGICRTDRDRVGSKRSFVGRSLAGPSTGGTDAGVGLSRPRAGLMSSGDSWLRLQSDRSSHLLGPGSRRRPRRRWPRRGADRFLRGGDPPTVLPFEAGSDSAEGGVDAEGAAAPPMMSDPAGTVYLVVIVCPSESYFSRKVMSEPTISTISGGFFFSGRRLDAGARPGDGQFLLPHDVVLAA

SEQ ID NO: 75617 - protein, 538 aa, Zea mays
  Coding DNA Sequence Number=SeqID_33838
  Homolog annotation: Hit_ID=Q6QP51; Match level="QueryCoverage=40%, HitCoverage=92%, E-value=6e-26, Identity=38%"; Hit description =Putative growth-regulating factor 1
  Subcellular localization annotation: CTP_CleavageSite=22; ConfidenceScore=5.11e-01
MTRKKNRGRSPSGGSEGGRPSRAESSPTRSKVLPLRHGGWVPRVMQAGSGQKEPNRRAWSVQLPNGYKHSSTFAQTSGRKGGPPCRRHATTPRGRTLSTPTHPAWRPRPTRHVTGAPVTTCEKLHRHLRQCHAFSTAKPVPRLEATLRMAQQCQPGASITGQSAVGEGVTIDMAKSEPTLTLRRDRRHLWQAKQATLHLRHNDRVKKGAPRRSISYPFPLPLSLSCYRDRERGYSEKDPSPEGSGPRAPLLIRGSKAGPSEGFDSRLRALGLRAHHWSEVRRLAPRMGSTAASSHSGSAPTTDQGFVGWPPRGSTAASEHAERGMTLGTFDTQPRLGLRSRGSGAALANPAPAKPLTASTYQPENLELDYAPRLRPENSAACPAPTVVPLDRVRLTAAKSSLGRHGKLCLARPRARTQPRPRKTDSASPDPRARTQPRPRKTVSASPDPGLGLSLGLRRRSLPRPTQGSDSALTPKDELRLSRPRTWTQPRHRRSLRLARPQARTRHVTGKAIITLPLASSGYGEQDRCPIWLAPVNK

SEQ ID NO: 75618 - protein, 53 aa, Zea mays
  Coding DNA Sequence Number=SeqID_33839
MERNGGPQHAMGGILCYEIANNTWPTEFAPALTSHSINGRVSGVRIHRMAMCR

SEQ ID NO: 75619 - protein, 70 aa, Zea mays
  Coding DNA Sequence Number=SeqID_33840
MERNGGPQHAMGRILCYEIANNTWPTEFAPALTSHNINGPSVFRKPTRRPGALFTESVESCTVAPALSGN

SEQ ID NO: 75620 - protein, 56 aa, Zea mays
  Coding DNA Sequence Number=SeqID_33841
MERNGGPQHAMGGILCYEIANNTWPTEFAPALTSHSINGRVSGVRIHRMAMCRKFI

SEQ ID NO: 75621 - protein, 88 aa, Zea mays
  Coding DNA Sequence Number=SeqID_33842
MAYDPLRTHLERRAAEQLDIFKEMVSLRVFERIFSELLYCEHWTTHYVFLQDYKFILFFRCSKLSMIRKYLLFLCTKSKLQLQVDVNL

SEQ ID NO: 75622 - protein, 249 aa, Zea mays
  Coding DNA Sequence Number=SeqID_33843
  Homolog annotation: Hit_ID=Q10QW3; Match level="QueryCoverage=42%, HitCoverage=61%, E-value=1e-14, Identity=43%"; Hit description=ZIM motif family protein, expressed
  Pfam annotation: Domain name=Zim; Domain location=28-63; Score=58.2; E_value=2.8e-14; Accession=PF06200.4; Description=ZIM motif
MPGADVGADEQQEPAAARAEEMPEPTPAPAAAPPLTIFYGGTVVVFEDFPAEKTAEVMRPAAGDDLPIARKASLPWFLAKRKDRLVERAPYARPSSPAKGAGEEDGIAYDPLRTHLERRAAEQLDIFKEMVSLRVFERIFSELLYCEHWTTHYVFLQDYKFILFFRCSKLSMIRKYLLFLCTKSKLQFEMMMCLCEVNADNNTIGCLRRPRSKWSSTSSTEILGASTTPVNIDKWIKQQAIWIKSRGQS

SEQ ID NO: 75623 - protein, 544 aa, Zea mays
  Coding DNA Sequence Number=SeqID_33844
  Gene Ontology: Mol. function=signal peptidase activity; Cellular component=integral to membrane; Biological process=signal peptide processing
  Homolog annotation: Hit_ID=Q6Z329; Match level="QueryCoverage=59%, HitCoverage=47%, E-value=1e-145, Identity=84%"; Hit description =Putative protease IV
  Pfam annotation: Domain name=ECH; Domain location=250-398; Score= -67.9; E_value=0.034; Accession=PF00378.10; Description=Enoyl-CoA hydrataseisomerase family
  Pfam annotation: Domain name=Peptidase_S49; Domain location=309-463; Score=165.2; E_value=1.6e-46; Accession=PF01343.9; Description =Peptidase family S49
  Pfam module annotation: Pfam domain module=ECH::Peptidase_S49; Domain location=250-398::309-463
MLGGLGISSFPELCWALRMRWLWLQKTDPTRPWSDLHIKVPGKASAFFMEVIITEVGDDTNTKFWKDKWLYVWQLQPEVEDKHVFSIAPNGIYSAKIAYEGLFLGEFWYLLLRNFGLHSLAPQPDVGSYLGCYLRDDDESRAAAELRCPLSQWRRGRVNPMTPVAHRIVACEVGAVGYWVFFAWAEEVKNTREFRFVLGKERGVGTVSPPLDSAPAHSEDSLYSKYSRVSKKTLGLQGGGEQIAIIRASGSITRTRSPLSAPSSGIVAEQLIEKIRTVRESEKYKAVILRIDSPGGDALASDLMWREIRLLANSKPVVASMSDVAASGGYYMAMAAPVIVAEKLTLTGSIGVVTGKFCLQKLYERIDFNKEIISKGRYAELNVNDQRPLRPDEAELFEKSAQNAYALFRDKAAMSRSMSVDQMESVAQGRVWSGHDAFSRGLVDSVGGLSQALAIAKQKANIPKDKKIQLVEVSKPSPSLPEILSGIGGSLLGVDRAVKGVLQDMTSLSGVQARMDGILFESLGDMSGENQLLLLVKDIMNYFD

SEQ ID NO: 75624 - protein, 425 aa, Zea mays
  Coding DNA Sequence Number=SeqID_33845
  Gene Ontology: Mol. function=signal peptidase activity; Cellular component=integral to membrane; Biological process=signal peptide processing
  Homolog annotation: Hit_ID=Q6Z329; Match level="QueryCoverage=75%, HitCoverage=47%, E-value=1e-146, Identity=84%"; Hit description =Putative protease IV
  Pfam annotation: Domain name=ECH; Domain location=131-279; Score= -67.9; E_value=0.034; Accession=PF00378.10; Description=Enoyl-CoA hydrataseisomerase family
  Pfam annotation: Domain name=Peptidase_S49; Domain location=190-344; Score=165.2; E_value=1.6e-46; Accession=PF01343.9; Description =Peptidase family S49
  Pfam module annotation: Pfam domain module=ECH::Peptidase_S49; Domain location=131-279::190-344
MGAQFSCAFEKKNYLRDDDESRAAAELRCPLSQWRRGRVNPMTPVAHRIVACEVGAVGYWVFFAWAEEVKNTREFRFVLGKERGVGTVSPPLDSAPAHSEDSLYSKYSRVSKKTLGLQGGGEQIAIIRASGSITRTRSPLSAPSSGIVAEQLIEKIRTVRESEKYKAVILRIDSPGGDALASDLMWREIRLLANSKPVVASMSDVAASGGYYMAMAAPVIVAEKLTLTGSIGVVTGKFCLQKLYERIDFNKEIISKGRYAELNVNDQRPLRPDEAELFEKSAQNAYALFRDKAAMSRSMSVDQMESVAQGRVWSGHDAFSRGLVDSVGGLSQALAIAKQKANIPKDKKIQLVEVSKPSPSLPEILSGIGGSLLGVDRAVKGVLQDMTSLSGVQARMDGILFESLGDMSGENQLLLLVKDIMNYFD

SEQ ID NO: 75625 - protein, 91 aa, Zea mays
  Coding DNA Sequence Number=SeqID_33846
  Homolog annotation: Hit_ID=Q69JV9; Match level="QueryCoverage=29%, HitCoverage=10%, E-value=7e-07, Identity=88%"; Hit description=Zinc finger (C3HC4-type RING finger)-like protein
MVECRICQEEDLRKNLESPCACNDSLKLPQVLPKYPASRIRVPSSRKFRFVAREVDKVYWPQALEKIRERYEHSSSSSSSTAASRTMPVSG

SEQ ID NO: 75626 - protein, 65 aa, Zea mays
  Coding DNA Sequence Number=SeqID_33847
MVECRICQEEDLRKNLESPCACNDRLKVNLLRDALKGQFITILSNLSWGRVGLHYHLHGVNRLDY

SEQ ID NO: 75627 - protein, 485 aa, Zea mays
  Coding DNA Sequence Number=SeqID_33848
MDRLNYFDDIARPFGWPIRVVIDSGVSFFCYKLLPHFIWKLDSTEFTNEERFQVMQSVAEELSVSFDAKELELKLWASLQTEHDMLEKGSRKPAELAMPSSSKQICVENASCEEQEDILEKSLTKPTEPAMSLFDKTKYNGDAPCERKNKDMLENYSTKLIELATDSSNNQKVTENVPCKRNYDAEPAHHTEKVEIQLIQKNIQSVADAHHTIDENSRKQQPYVSDEKEHLQKPMSPVDTNRTQKDVQKLNRRAVRHLEKELMEAVELDLNGLTKNGFGAVRFPEAEGNKTVQLNVKPNEVARDFHIEKENDEVLHCSRLHGGSEHNEGHADSGLRAQRLENQGHPVSPLSGNTRKKAPYTKPNVVNIKNPTKKQANNGFLHDKPQHLADLGYPVQKGQGDPERALTMLSPYVEPKSNMQPVNDDPEKQTSNGYRKSNIPGQTDHLENKNVLRPVSVRRRTAKLPAPVDAYVECRTMRRSQPKHP

SEQ ID NO: 75628 - protein, 556 aa, Zea mays
  Coding DNA Sequence Number=SeqID_33849
MDRLNYFDDIARPFGWPIRVVIDSGVSFFCYKLLSHFIWKLDSTEFTNEERFQVMRSVAEELSVSFDAKELELKLWASLQTEHDMLEKGSRKPAELAMPSSSKQICVENASCEEQEDILEKSLTKPTEPAMSLFDKTKYNGDAPCERKNKDMLENYSTKLIELATDSSNNQKVTENVPCKRNYDAEPAHHTEKVEIQLIQKNIQSVADAHHTIDENSRKQQPYVSDEKEHLQKPMSPVDTNRTQKDVQKLNRRVVRHLEKELMEAVELDLNGLTKNGFGAVRFPEAEGNKTVQLNVKPNEAARDFHIEKENDEVLHCSRLHGGSEHNEGHADSGLRAQRLENQGHPVSPLSGNTRKKAPYTKPNVVNIKNPTKKQANNGFLHDKPQHLADLGYPVQKGQGDPERALTMLSPYVEPKSNMQPVNDDPEKQTSNGYRKSNIPGQTDHLENKNVLRPVSVRRRTAKLPAPVDAYVECLTMRRSHSSRRNGAKDDQNRKCNGTDDVGSKTNAQITPSSQSKHIGRRNGALNHKNNSGRLMQRMQPEAAETAIDCGNLLLT

SEQ ID NO: 75629 - protein, 95 aa, Zea mays
  Coding DNA Sequence Number=SeqID_33850
MESHDLRAERESRLVGGYEIDDSGYGYGAGKWYSFRLERVVSIATTAQAKMKLWKETSRSSKTTTSSRCGLAATPSRLLVKAAVIYVSFPHFDLL

SEQ ID NO: 75630 - protein, 104 aa, Zea mays
  Coding DNA Sequence Number=SeqID_33851
MESHDLQAEWESRLVGGYEIDDSGYGYGVDSRGGGSQFDHDVLAAGDREEHGGYNRGVHWCNGARIILLRVPQLLPHGTKLGLGVTEVTDASTTTPVVRPRCHG

SEQ ID NO: 75631 - protein, 250 aa, Zea mays
  Coding DNA Sequence Number=SeqID_33852
  Subcellular localization annotation: CTP_CleavageSite=35; ConfidenceScore=5.34e-01
MARARAYKALLGFDCTLLRTLKPHRSLARRRLPVRSVSAAAQSLCHRRPANRAIPNPVQPSEKTVHTSVKLPERGIGVCFAGEASPHSPELSTPPEYVDRVIHSTIPRFLVHTVTTLPREAHRALGLNQFAVVWPGTRAIQIPYVYPQQKPKPKDCNLADGEYVLVPEQGAAQEVAPDPAQESAPEDLPATALEGKPRCRNPSCMISGILFEMNTSSLEEMVAGVTWPSILPPGWTVEWDPASAEEEHEE

SEQ ID NO: 75632 - protein, 179 aa, Zea mays
  Coding DNA Sequence Number=SeqID_33853
MSAAAQSLCHRRPANKAIPNPVQPSEKTVHTSVKLPERGIGVCFAGEASPHSPELSTPPEYVDRGTRAIQIPYVYPQQKPKPKDCNLADGEYVLVPEQGAAQEVAPDPAQESAPEDLPATALEGKPRCRNPSCMISGILFEMNTSSLEEMVAGVTWPSILPPGWTVEWDPASAEEEHEE

SEQ ID NO: 75633 - protein, 56 aa, Zea mays
  Coding DNA Sequence Number=SeqID_33854
MSSDSTTYCKDGALGSVAVSTTYTRPDLQIAIEAAPHILSPEYSQQRRQDQEAALF

SEQ ID NO: 75634 - protein, 335 aa, Zea mays
  Coding DNA Sequence Number=SeqID_33855
  Gene Ontology: Mol. function=selenium binding
  Homolog annotation: Hit_ID=Q5NKQ4; Match level="QueryCoverage=92%, HitCoverage=75%, E-value=1e-177, Identity=96%"; Hit description =Putative selenium binding protein
  Pfam annotation: Domain name=SBP56; Domain location=18-330; Score =179.5; E_value=8.5e-51; Accession=PF05694.2; Description=56kDa selenium binding protein (SBP56)
METAAAAAAANGKACCHAAKGPGYATPLEAMEKGPREKLVYVTCVYNGTGINKPDYLVTVDLDPSSPTYSKVIHRLPVIHIGDELHHSGWNSCSSSHGDPSAKRRFLILPSLLSGRVYVVDTATDPRAPSLHKVVESEDIAENTGLGFPHTSHCLASGDIMISCLGDKEGNAAGNGFLLLDSEFNVKGRGSNRLFPISKERTHLYENYAWGLFWSWIQCCSLFYTTGAELMCLTASGVHVISCLDNYIMRVIDASLPLQGANNPILCLRSIHWKNINQDYDVVEVSFSGRGGSDPDAYAVVLKRKLDLYYAVIAKFGVVSLSNEFPPAWIFSQIF

SEQ ID NO: 75635 - protein, 164 aa, Zea mays
  Coding DNA Sequence Number=SeqID_33856
  Subcellular localization annotation: CTP_CleavageSite=65; ConfidenceScore=5.37e-01
MTTSLVVGRSKPGCGLPPALSFKDGRRVFAVYGAISCRVSGFLAWAAPVPPPTARAERGCPSTARAMVTPCAGWPHPRLLLRHQSYWEVVQDVVRRAGGGGVLGWSCPHSRSEDGNEDLFVRAGAAAVRWYGTGVQAVAVVGAEVVAAAGEAPHCRGGCLRRRD

SEQ ID NO: 75636 - protein, 183 aa, Zea mays
  Coding DNA Sequence Number=SeqID_33857
  Subcellular localization annotation: CTP_CleavageSite=44; ConfidenceScore=5.38e-01
MAQGHISLSVSPTEATTSAVGSLTSGGDHLSTNDSNRLHTSAVPANGGRTSAHEEVFVPVLTTGVRTRPSKNAAPTRTAYDVLYDLPVRLVPQEKPWVWPTSAWRDHRPCGGRTATLCPSAVKEATRRARGVQPSHGCAPPQLRHNWQSNSGDQAHTSCNQHAGYRVQRNLLGAFVFRRSSKT

SEQ ID NO: 75637 - protein, 254 aa, Zea mays
  Coding DNA Sequence Number=SeqID_33858
MRHSEQPVDIVAPLLHGPRRCRGARGWRNNSVAADSAVGATLDGVRDACAGVCCCMACTAAVPESGRLGAHGAEDATSCSIMKSSEVSAWCSMIRTIMLSEKTSKNLKPCPLPGAPNVGEEISPAGWQIAPALNPEERRGLSVLLSTRLVDQHTRAHEGLEWFGPPERNTLLHSERGMHKKNWAPTCGPRDIKNIELGSSNVCCRGNLPVPCRSRLVSQEFMGEAGVNERESVRGYIKDPQKLAAVGRKEVKIG

SEQ ID NO: 75638 - protein, 178 aa, Zea mays
  Coding DNA Sequence Number=SeqID_33859
  Subcellular localization annotation: CTP_CleavageSite=43; ConfidenceScore=5.28e-01
MGQSAVGIGTAVGMVIGGPAVIAAIGARKQRSNRQSDSGPTCRLTSSPETGTGFTVGTQNQGYPILQHEGTAPMRRPLATRRTAPDPTGWDGQRAPRGMERHHTPVRPDPHRGTPDPYIHTSLEPPGGAPAGSAGKTVCPCRAAHYTHLLFRKKLPLHAKDTQTSSDRAQEDCLGNRH

SEQ ID NO: 75639 - protein, 217 aa, Zea mays
  Coding DNA Sequence Number=SeqID_33860
  Homolog annotation: Hit_ID=Q5Z9P5; Match level="QueryCoverage=36%, HitCoverage=19%, E-value=5e-24, Identity=72%"; Hit description =Putative brain and reproductive organ-expressed protein
  Pfam annotation: Domain name=Kinesin; Domain location=5-163; Score= -173.5; E_value=0.0019; Accession=PF00225.13; Description=Kinesin motor domain
MSIFRTSDYLSELYIEYQKERVHMVDDAILAFELSTVLSKEGIEVCMVPSADRPDDATFVVPLLESDFDFAKLVPGCPWRLPQKIHLQKKSGSAGKQLKEAQSINKSLSALANVIGALSSDGQHIPYRNHKLTMLTSDYLMWVVCKKRLKCSMTFTEKMVLAVFRDLTILWMTKSLMDDIHGWGILFDGRVGDRTITGGNWKPFESNTIPPPLTLGD

SEQ ID NO: 75640 - protein, 61 aa, Zea mays
  Coding DNA Sequence Number=SeqID_33861
MARPKRLSSCKSCVRKRERKNLLTMFEQLGPGDCYSPKIELYIEYQKERVHMVDDAILALN

SEQ ID NO: 75641 - protein, 208 aa, Zea mays
  Coding DNA Sequence Number=SeqID_33862
  Homolog annotation: Hit_ID=P42895; Match level="QueryCoverage=20%, HitCoverage=9%, E-value=1e-07, Identity=80%"; Hit description =Enolase 2
  Subcellular localization annotation: CTP_CleavageSite=63; ConfidenceScore=5.03e-01
MAPDLAMAFMIWKPHNLHCRFGKHDLGTAITTTIPQMSRPPTTRTPRFGNAPFGTIALDLAIVCMIFVADLESARSTTLIWKVPCQTIPAQIPQIVHPPSLKRSQLPSCSNLPTTTEILRSHSSSSSCVSGTRLLDILSSLLRISLRGETEDTFVVDLAVGLSTGQIKTGAHPADQSVLPNTTRQLKCHNNNYECQVLDEVQQQHMLV

SEQ ID NO: 75642 - protein, 297 aa, Zea mays
  Coding DNA Sequence Number=SeqID_33863
  Subcellular localization annotation: CTP_CleavageSite=36; ConfidenceScore=5.65e-01
MPPPRKIRHASVSASPPCSRLTRRPTRRKTAMPPPRLALRADPQPPDPPGPASPSPRRSNNQAEEMHPQMWKLRAATRTAMQPPRTICHAPASHDPPCLRLGFSSVQPPDPSGPRLSFPSALKQPIRENAPTNLEAAAMAPDLAMAFMIWKPHNLRCRFGKHDLGTAITTTIPQMSRPPTTRTPRFGNATFGTIALDLAIVCMIFVADLESARSTTLIWKVPCQTIPAQIPQIVHPPSLKRSQLPSCSNLPTTTEILRSHSSSSSCVSGTRLLDILSSLLRISLRNALKIIVFNDSI

SEQ ID NO: 75643 - protein, 183 aa, Zea mays
  Coding DNA Sequence Number=SeqID_33864
  Subcellular localization annotation: CTP_CleavageSite=61; ConfidenceScore=5.18e-01
MNCAAPVVVTLEAGSGQPHRRQQPPLHQQRQPPPVRATCQRRRPPQGVRHCEEVLAPVLLRGATTRPLKPKSRGLGEKSHRRSRQCHASSGPSRKTEKISFQNHCGDSRHPAHDPTVTLSTKVMGQSTVGIGVADDMTIGGPAVSASTDVQEQQANRQSDSGPTCRLASSLEAGPGATVGTPN

SEQ ID NO: 75644 - protein, 467 aa, Zea mays
  Coding DNA Sequence Number=SeqID_33865
  Gene Ontology: Mol. function=oxidoreductase activity; Cellular component=vacuole; Biological process=response to oxidative stress
  Homolog annotation: Hit_ID=Q5U1Q4; Match level="QueryCoverage=77%, HitCoverage=98%, E-value=1e-136, Identity=70%"; Hit description =Class III peroxidase 39 precursor
  Pfam annotation: Domain name=peroxidase; Domain location=50-333; Score=412.4; E_value=6.4e-121; Accession=PF00141.13; Description =Peroxidase
MASRGSMTCSLQLAVLVSAAIALGFGVRAGEAQLSSEYYGQTCPVVHRVARRVLKKAHEADVRIYASLTRLHFHDCFVQGCDGSILLDNSSSIVSEKFATPNNNSARGYPVVDAVKAALEEACPGVVSCADILAIAAKISVELSGGPRWRVPLGRRDGTTANITAANNLPSPFDNLTTLQQKFGAVGLDDTDLVALSGKKKRGGEKTGDACLVILAPAQHDTWRHNDGGCIAGAHTFGRVQCQFVTARLYNFSGTNRPDPTLDRGYRAFLSLRCPRAGNASALNDLDPTTPDTFDNNYYTNIEARRGTLQSDQELLSTPGAPTAPIVGRFAASQKEFFRSFARSMVNMGNIQVLTGSQGEIRKNCRMLAASGERPDGEDAGAGRWDLETWVPTALVHVYDFLFGMGPYVSLGPLAYVTGHKPRGNSGGPVSLCGGPDPMMHPGVVPIVAPGPASGEDASLQVGPESD

SEQ ID NO: 75645 - protein, 121 aa, Zea mays
  Coding DNA Sequence Number=SeqID_33866
MVRERRTQTNTMSKNTRDTRFIPRFGHTTKVPYFLVEAPTKSRVSFNPNPPFADHKDYRSEVRGVRDQLNCPSGPVQPVLTNEFRRENPSSTARRQVQLVYGQRGSQLKLSSAEVEKAQLS

SEQ ID NO: 75646 - protein, 121 aa, Zea mays
  Coding DNA Sequence Number=SeqID_33867
MVRERRTQTNTMSKNTRDTRFIPRFGHTTKVPYFLVEAPTKSRVSFNPNPPFAYHKDCRSEVRGVRDQLNCPSGPGQPVLTSEFRRENPSSTARRQVQLVYGQRGSQLKLSSAEVEKAQLS

SEQ ID NO: 75647 - protein, 121 aa, Zea mays
  Coding DNA Sequence Number=SeqID_33868
MVRERRTQTNTISKNTRDTRFIPRFGHTTKVPYFLVEAPTKSRVSFNPNPPFADHKDCRSEVRGVRDQLNCPSGPVQPVLTSEFRRENPSSTARRQVQLVYGQRGSQLKLSSAEVEKAQLS

SEQ ID NO: 75648 - protein, 135 aa, Zea mays
  Coding DNA Sequence Number=SeqID_33869
MDYAAPRRVALEAGSGLPHQRQRPPLHQRIAGDSNHLCTSSDNDLRLGRLDSSSDRLRASAATNWASPPSSYGGGAVRPLKPKSRGTQRQVALMVLAAEATTSARGSLTSSSHHRSTDNRSHLRIRGPRSCPPTE

SEQ ID NO: 75649 - protein, 309 aa, Zea mays
  Coding DNA Sequence Number=SeqID_33870
  Subcellular localization annotation: CTP_CleavageSite=59; ConfidenceScore=5.50e-01
MGVLVFKTIVLCVQRTGGPVLKNRHLSPGGSGSHVATQPSPVSNGLRCTKKSRAGSWLRAASPAAATTSASTDRRRQQPPLHQQRQRPPPRAARQQQRSPQGKRCYELGLAPVLLRRGSSEAIKAKEPRDSAAGGPDGPGSGGNHLCKGQPHQQQPPPQHRQPQPPPHKRSSLLSSHGVRTRPSKNAAATPAAYDVLDSPPVRPVAQEKPWMWRTRAWRDLRSYGGRTVTPRPNGRRQRRRRRRGHPGQEPGTRQLSAPAPGRPRIAEVRLLRVAGEPLSSPECWRKKRAAGPRGRQNPGSTHLPPQRG

SEQ ID NO: 75650 - protein, 74 aa, Zea mays
  Coding DNA Sequence Number=SeqID_33871
MAYVMGHKQRAFSCAGSGDQSLHTCQHRTPAHPKVLVLGPCRGSDLPWGSGPEALALGSLIDDKKKLGDCQFDL

SEQ ID NO: 75651 - protein, 202 aa, Zea mays
  Coding DNA Sequence Number=SeqID_33872
  Subcellular localization annotation: CTP_CleavageSite=33; ConfidenceScore=5.26e-01
MQGLHGFTSGSARWLTSWATSSGPSPTQGAEIKACTRVSTGPLHTPRSLFRDPAGVQTYPGAPDLYVYRGPVTFRGGPVLLRHGAFPRHVTPFGLPIRWSWARSSARPEGVAWVRCLYAVGEGTPDLGYRQWPRSYLRGGCEPAGLQMGCAGGGVADLVFFLPPLEECNPIGVGILSPPFGFKDFHHAARLQPLAGGHPGLG

SEQ ID NO: 75652 - protein, 62 aa, Zea mays
  Coding DNA Sequence Number=SeqID_33873
MAAVGALQRGVGGGSALQRGRGAVVVRMEAGTRAGAWLVPGFKGKLPSIFLGKALFSSDGLR

SEQ ID NO: 75653 - protein, 62 aa, Zea mays
  Coding DNA Sequence Number=SeqID_33874
MAAVGALQRGVGGGNALQRGRGAVVVRMEAGTRAGARLVPGFKGKLPSIFLGKALFSSDGLR

SEQ ID NO: 75654 - protein, 72 aa, Zea mays
  Coding DNA Sequence Number=SeqID_33875
MTNEEKEVATERRMDSPPRCDCGDRAVIDEDYDKQFCCPNIDYPYGWRKCRFREWLYGPLSHWPEPERLEAA

SEQ ID NO: 75655 - protein, 271 aa, Zea mays
  Coding DNA Sequence Number=SeqID_33876
MSSSGINIRTYLVRMLLFLLNFMCLTVTVADWLGYINPNIQTRLLAASTFVAVLTHTGGLSVISESGCMVLCPISQRQSPKRAKQRRLKAANEKRAQDAREWEATRAEKQMLDNLADRLKGKIGCGVNYMADEAHARYVQEKMATVELMEEEDDDTSRLSELIALAEAGLHGEEEDDTSRLSELIALTEAGLRAQEEEDEFMSQAAEEVEAAYYKQKSDEAEDELFSQAADEQKPIITRELLTSVMRDNATSGTRLSLRIARRMAPKMSYL

SEQ ID NO: 75656 - protein, 392 aa, Zea mays
  Coding DNA Sequence Number=SeqID_33877
  Subcellular localization annotation: CTP_CleavageSite=50; ConfidenceScore=5.43e-01
MVDVDSPTSLSTSTFDPPSTASIAPAQQVSDISDGRFVFPLLPSFWEDFSSFASTGLESALSVFALLACRYGRMAVGLLLPMSMFAGFQFYLDAESMKPSSDYLLHVVPGQIKATMQAAYYAKVLFIFYYFPSSTWNSTFDKQFADEVYTERSIYNGSSSSKCYNFRSNINPKGEEENKRMVKARPKPTPVKAAPEVIFDPMASGARKPRRPGAPSASKEWHSFMGSSLSDMYRKPVLEKSADTSDEEPDIDIMKLLKDVEIIGAPTFKGRKQIENRRVVELGGKSVKKHRTPLSVAKPALKNQKKREQKKMEEEKLLGIFRKRDKDTKPHKTRPEDRVLRATEGRFRNGILNVKHLLAPPKPSGKDMSEPKMRKDKHKGKGKQKGGRRKRR

SEQ ID NO: 75657 - protein, 150 aa, Zea mays
  Coding DNA Sequence Number=SeqID_33878
MDYDPSYDSEIGTGFGAPTFKGRKQIENRRVVELGGKSVKKHRTPLSVAKPALKNQKKREQKKMEEEKLLGIFRKRDKDTKPHKTRPEDRVLRATEGHFRNGILNVKHLLAPPKPSGKDMSEPKMRKDKHKGKGKQKGAEERDVEESTLL

SEQ ID NO: 75658 - protein, 71 aa, Zea mays
  Coding DNA Sequence Number=SeqID_33879
MELRPPAGGPPSRTLWGQPPSSHAEALALASLIDDEKKLGDCQFDLWKQYYVTACVAVFGKFRRSRRLDAV

SEQ ID NO: 75659 - protein, 71 aa, Zea mays
  Coding DNA Sequence Number=SeqID_33880
  Subcellular localization annotation: CTP_CleavageSite=53; ConfidenceScore=5.48e-01
MVAQSVRGGGPPAGGRNSMTSTRGGGGSSIQSSGGGSQVGGGGFPIQRVSDPCAGKRRRPRGPEEAALPRP

SEQ ID NO: 75660 - protein, 59 aa, Zea mays
  Coding DNA Sequence Number=SeqID_33881
MARRSNWRRCGSLRAVAEGHPNSNHCRRQPGRRRGWARHRPARAEKVDKRLAVGLIASG

SEQ ID NO: 75661 - protein, 66 aa, Zea mays
  Coding DNA Sequence Number=SeqID_33882
MGEKLELAQRMEEGCDELGQWLDGAIGAAVDRSAPWPRATPTPTTAAVNLGAAAVGQGTAQLGLRK

SEQ ID NO: 75662 - protein, 49 aa, Zea mays
  Coding DNA Sequence Number=SeqID_33883
LGQWLDGAIGAAVDRSAPWPRATPTPTTAAVNLGAAAVGQGTAQLGLRK

SEQ ID NO: 75663 - protein, 86 aa, Zea mays
  Coding DNA Sequence Number=SeqID_33884
MEGENATKVRIGKTPFSNRDGKDDILKGRHKITSWKDLEITKVQDKHHGKDQGMTRVKVITDKHNQGCILDKTCEASKKGKQSMVK

SEQ ID NO: 75664 - protein, 205 aa, Zea mays
  Coding DNA Sequence Number=SeqID_33885
MDGRGMSIIKDGDKVMIVTDKGENATKVRIGKTPFSNRDGKDDISKGRHKITSWKDLEITKVQDKRHGKDQGMTRVKVITDKHNQGCILDKTCEASKKGKQSMVKVGEALSSNNDEKEVALKGRFKVGMWQGHRYHEGLKVITDKDVGEEDGVKTRPAIGKGGGTSKGLLGSCFGAPKVSHEEAASAEVVSKRWPKVPFHGASAF

SEQ ID NO: 75665 - protein, 147 aa, Zea mays
  Coding DNA Sequence Number=SeqID_33886
  Homolog annotation: Hit_ID=Q01DW1; Match level="QueryCoverage=44%, HitCoverage=54%, E-value=7e-07, Identity=40%"; Hit description=[S] KOG3410 Conserved alpha-helical protein
  Pfam annotation: Domain name=DUF1754; Domain location=45-147; Score =89.2; E_value=1.2e-23; Accession=PF08555.1; Description=Eukaryotic family of unknown function (DUF17
MQLPGTLKIKAAYPDFQLIHQVEHDQRRWLRVIQSAQCAYPYLIRDSQMQTRPFFSTGKGWWSKEKEEKVPESSQTESDKNGDERNPHSDYDHLTPAERRYMEQKQKIGMKKMGKVANKSYKDRMQDFNQYLANLSEHYDIPKVGPG

SEQ ID NO: 75666 - protein, 157 aa, Zea mays
  Coding DNA Sequence Number=SeqID_33887
  Gene Ontology: Cellular component=nucleolus
  Homolog annotation: Hit_ID=Q6GQN4; Match level="QueryCoverage=68%, HitCoverage=96%, E-value=5e-10, Identity=34%"; Hit description =Protein FAM32A-like
  Pfam annotation: Domain name=DUF1754; Domain location=48-157; Score =161.8; E_value=1.8e-45; Accession=PF08555.1; Description=Eukaryotic family of unknown function (DUF17
MAGGGGSRWVRGETSSDSDTNTDTAWNRRSGSDTDTLNDAIPFALMLEYQNVVGGRLKLKGKALDVKYGGVMKKKKKYQREESSQTESDKNGDERNPHSDYDHLTPAERRYMEQKQKIDMKKMTKVANKSYKDRMQDFNQYLANLSEHYDIPKVGPG

SEQ ID NO: 75667 - protein, 165 aa, Zea mays
  Coding DNA Sequence Number=SeqID_33888
MTAATSAPVGGGCLSTREEVLAPVLTTGVRTRPTKNAAAAPATYDVLYAPPPGAAAGVGEAVDAADLRTVRPSPVRWTSSHGPNQTAGGSVGGGTEAIQAGEPGTWRPAAPAVGRSRVPKVRLLRKAGERPSPPNAGGRSGPLAHAEGGTPTRLALLPSADDEHP

SEQ ID NO: 75668 - protein, 93 aa, Zea mays
  Coding DNA Sequence Number=SeqID_33889
MAITSTRAPLRKGPRPRLPTGGDNEAIKAKESKGSATGGTDGLASGGNHLCNGQPHQRWRPPQHRRQRPPLHRWAVAASTHAKRSSLPSSLRE

SEQ ID NO: 75669 - protein, 115 aa, Zea mays
  Coding DNA Sequence Number=SeqID_33890
MTGSVREEPEVEHHLHVEKARDSLRSYSTEVLGPRVDFHLRRGTNEDYSGPYMVPDTSRNWGVVRFAVVPLMGLGVCGSLCQGGDEDDGYDYDYGNGEDEVVEEDFQEFQEYDEF

SEQ ID NO: 75670 - protein, 134 aa, Zea mays
  Coding DNA Sequence Number=SeqID_33891
MAPRILYDDGGSQPPYECKRTSSIVETAGSVREQLEVEHHLHVEKARGSLQSYSTEEHMALVGDGGGAGRTWGTRVVPVEEVVAPVAVPAVLGIVIGGEGAEGGNDRLIGAAVGGGGRGRAEGGHRERRRSWAE

SEQ ID NO: 75671 - protein, 136 aa, Zea mays
  Coding DNA Sequence Number=SeqID_33892
GGPRDAREDMSERNWAETHWIARSTRGGGRPKSGEVDLGPPVKSGRVRGLGKLYGLLAELAEALARPEDGWGGLSTVAEALAAMAGGNKLAGAKGKWLAGEGDMPDPDPFDRVRGLDASLWWDSITKSLLLVSEMS

SEQ ID NO: 75672 - protein, 63 aa, Zea mays
  Coding DNA Sequence Number=SeqID_33893
MAGGNKLAGAKGKWLAGEETLGDTGVSQPSPLKGISSRDSGQSPPGVKRRVRLDRKKGGDCYY

SEQ ID NO: 75673 - protein, 357 aa, Zea mays
  Coding DNA Sequence Number=SeqID_33894
  Homolog annotation: Hit_ID=Q94JJ0; Match level="QueryCoverage=31%, HitCoverage=28%, E-value=1e-55, Identity=96%"; Hit description =Putative plastidic aldolase
  Pfam annotation: Domain name=Glycolytic; Domain location=1-281; Score= 37.8; E_value=4e-15; Accession=PF00274.9; Description=Fructose -bisphosphate aldolase class-I
KSVASPGRGILAIDESNATCGKRLSSIGLDNTEVNRQAYRQLLLTTVGLGEYISGAILFEETLYKSTTDGKKFVDCLKDQNIMSGIKVDKGLVPLPGSNNESWCQGLDGLASSWVDVVCEDGVSVLALPAFRPAVPLDRFMPLADRIRDLEVGVAFSKPTLLPSPSGSGLFADRLLNDGFSTNITMPECQVAEPALNQKEEVMKECRPPAPAVHSRPAPYWICPVSFIEFSKTTFPSPLIVSSMDVFKTFLLFGEVEVTFFQQGTIPCVCHDGRFIMETPYKVRVADPTFLGYFIDRGVSAVAKVVRKAYPQEKVGVFVQRGKGGPLSVVEYSEMDAAMTTEINQTTGRLRYCWSNV

SEQ ID NO: 75674 - protein, 312 aa, Zea mays
  Coding DNA Sequence Number=SeqID_33895
  Gene Ontology: Mol. function=fructose-bisphosphate aldolase activity; Biological process=metabolic process
  Homolog annotation: Hit_ID=Q94JJ0; Match level="QueryCoverage=47%, HitCoverage=38%, E-value=2e-58, Identity=77%"; Hit description =Putative plastidic aldolase
  Pfam annotation: Domain name=Glycolytic; Domain location=143-311; Score=-7.8; E_value=1e-12; Accession=PF00274.9; Description=Fructose- bisphosphate aldolase class-I
MEQHLNTFALVAGMGVAMAMDVDRRKGHPMLARVAEARLGLLIAILMLIPGYKWIKAEIGYPDYVLKEGEGGTIISDEVFGMSSILIFSPQELDYLICGQQEIWEEYVVWHTDGKKGSPSPTKAKWQASQTEEKNRATSPKKKSVASPGRGILAIDESNATCGKRLSSIGLDNTEVNRQAYRQLLLTTVGLGEYISGAILFEETLYKSTTDGKKFVDCLKDQNIMPGIKVDKGLVPLPGSNNESWCQGLDGLASSCYDYRLSTAGLMSFVRMKISTYYIYDYVTGESAFIYVHDKASPTVQVILVLNWKSRN

SEQ ID NO: 75675 - protein, 72 aa, Zea mays
  Coding DNA Sequence Number=SeqID_33896
MVGTSAVTARRPVGVSEALYAKAVLLRVIGCWCDLAFIPATGIDGRVGYCFRRRGPGGVAWPGFAMLLGFLR

SEQ ID NO: 75676 - protein, 72 aa, Zea mays
  Coding DNA Sequence Number=SeqID_33897
MVGTSAVTARRPVGVSEALYAKAVLLRMIGCWCDLAFIPATGIDGRVGYCFRRRGPGGVAWPGFAMLLGFLR

SEQ ID NO: 75677 - protein, 153 aa, Zea mays
  Coding DNA Sequence Number=SeqID_33898
  Subcellular localization annotation: CTP_CleavageSite=78; ConfidenceScore=5.15e-01
MATAREIDPFLKAALPTRIPKRHGQSLHRCVSGPSPYDTGAGSRTSGGLTQNRRSQIVAREACIRPAVISVPPSSPKPAGKKADRHAGGMQPHHGCASFRLHRIRRASVKVWAHMSCNRRDGYCAQGNRTATLANVASPRLQNQCRDSRQPCA

SEQ ID NO: 75678 - protein, 194 aa, Zea mays
  Coding DNA Sequence Number=SeqID_33899
  Homolog annotation: Hit_ID=Q6QP51; Match level="QueryCoverage=83%, HitCoverage=77%, E-value=3e-22, Identity=45%"; Hit description =Putative growth-regulating factor 1
MPRLLDCKTSAATRGSPARDPTVLIKCKDHGGSKPSPSEGFNSRPRACSVRDDPGYVRYMAEAWATLLRYPRTFPRPTGTICNGIPTEGGIEPSDPIEWVRVRQITCRVKLSHDLPRVRPRAQQGAPPRPTSGLDLSVGLGRRSPPCPTPGLSLGLGRSHILARPRPRPLEKSPLARPQPRTDYATGDASLPYS

SEQ ID NO: 75679 - protein, 131 aa, Zea mays
  Coding DNA Sequence Number=SeqID_33900
  Gene Ontology: Mol. function=protein phosphatase type 2C activity; Cellular component=nucleus
  Homolog annotation: Hit_ID=Q2HW33; Match level="QueryCoverage=89%, HitCoverage=38%, E-value=7e-25, Identity=48%"; Hit description =Protein phosphatase 2C-like
MYDKLRRSRRLDAVQSGCSALSIVKQGDLMVIANVGDSRLIVHLKPNLPQEYRIRWCNGQGYYLADEPGVHFVLQPNQESSVLDMSRAFDDYYIEDCGVILAPEVTQGRTDNNDQFVILATVEVAFVPTCL

SEQ ID NO: 75680 - protein, 144 aa, Zea mays
  Coding DNA Sequence Number=SeqID_33901
  Gene Ontology: Mol. function=protein phosphatase type 2C activity
  Homolog annotation: Hit_ID=Q2HW33; Match level="QueryCoverage=83%, HitCoverage=35%, E-value=2e-13, Identity=46%"; Hit description =Protein phosphatase 2C-like
MNSCFLLENPEQTPLAGGTRVGVAHRRQEETWRLPVRPLETVLRGCMCRYVRQAPAQPPLGRGAERLLRAVHRQAGGPHGRHQCRRLSGCSGHRIRRRHHHVVQLIVHLKPNLPQEYRIQWCNDQGYYLADESGVHFDSRLEGG

SEQ ID NO: 75681 - protein, 48 aa, Zea mays
  Coding DNA Sequence Number=SeqID_33902
MARARQRRPDVIVDITPQLITLNQRSKSDMYQTFKHTNIYKNTFDFVP

SEQ ID NO: 75682 - protein, 158 aa, Zea mays
  Coding DNA Sequence Number=SeqID_33903
MAHADPEVVLLEREEEEGGHGRGGRRGAEKGWRGPRSRLERTPYALGLMGEGDLGSVRVATDDTRKKLRRIRLGGCGAWPPGPTGYGRAERENGDGLAQKGIREVGQGVGKAGSGRLGEYRYPATIYVGYKLNRLRCNCGHYSTTHHTKSKIQIRQIS

SEQ ID NO: 75683 - protein, 412 aa, Zea mays
  Coding DNA Sequence Number=SeqID_33904
  Homolog annotation: Hit_ID=Q2QXC0; Match level="QueryCoverage=61%, HitCoverage=35%, E-value=1e-14, Identity=26%"; Hit description =Expressed protein
  Pfam annotation: Domain name=DUF1618; Domain location=217-354; Score =47.7; E_value=3.8e-11; Accession=PF07762.4; Description=Protein of unknown function (DUF1618)
MSGTSSFTTGESSRAGEQPERDEVVEFKARTWVALSSIIVVHSANDEGRRMLALRASDIFLDLQPPQVGASYLVLPDRIVKHPRYADHPVVLSACSDHFLFRATPAEGPSNLICFFVGDVNARTVVRLPEVPFHMAVNTIPHPQYSIGLIADPRSRHGGHYMVAQLHPTFTTHHTTLLCYSSVTDQWTARPLASTESEEHHRWGAHGVLAHGGLLWWIDLFYGMLVCDPFAADDNLHLRFVPLPVGSIRTGRRVPGPENIGRERFIRPSQGKLRYVEIQGAPSGMRTSNYQPPSNPQVRMFTLVSQEGQHHWVHEYTATFLDIWSHRSYAEAGLPQGVVPWLALIDPNNANTLYFFRGTTLFAVDGQTRQVLFRVRCLVLESARGGHRFQNSRFIGAWELPPALEPDDCTCQ

SEQ ID NO: 75684 - protein, 601 aa, Zea mays
  Coding DNA Sequence Number=SeqID_33905
  Homolog annotation: Hit_ID=Q2QXC0; Match level="QueryCoverage=42%, HitCoverage=35%, E-value=2e-14, Identity=26%"; Hit description =Expressed protein
  Pfam annotation: Domain name=DUF1618; Domain location=317-454; Score =47.7; E_value=3.8e-11; Accession=PF07762.4; Description=Protein of unknown function (DUF1618)
RANGDCMTCLGSGDKRIRWCCGASVRACGHVVDADGIDALLGGDREVRREEPGAERSSVRSVGRGDAAAWVGEAGEERTEEAYGDGSVHAAACRQSVPRAMSGTSSFTTGESSRAGEQPERDEVVEFKARTWVALSSIIVVHSANDEGRRMLALRASDIFLDLQPPQVGASYLVLPDRIVKHPRYADHPVVLSACSDHFLFRATPAEGPSNLICFFVGDVNARTVVRLPEVPFHMAVNTIPHPQYSIGLIADPRSRHGGHYMVAQLHPTFTTHHTTLLCYSSVTDQWTARPLASTESEEHHRWGAHGVLAHGGLLWWIDLFYGMLVCDPFAADDNLHLRFVPLPVGSIRTGRRVPGPENIGRERFIRPSQGKLRYVEIQGAPSGMRTSNYQPPSNPQVRMFTLVSQEGQHHWVHEYTATFLDIWSHRSYAEAGLPQGVVPWLALIDPNNANTLYFFRGTTLFAVDGQTRQVLFRVRCLVLESARGGHRFQNSRFIGAWELPPALEPDGGGSSIWGSDSEGTDGSDREQAISDQATNSDICPLGNLRPVLGTEPVANSVRRYDFVTIHQTLFGFTGTLSDLGFASFLVLAAIAHAGIIQGSF

SEQ ID NO: 75685 - protein, 100 aa, Zea mays
  Coding DNA Sequence Number=SeqID_33906
MWQGKIIHPRMHHWVRTSIEGHQTPVRTSPELPRRHAGSLGRRQGHPPDGAPDQSVDKQCARRAVYCAHHPFYKKLPLHAEDKQISDVRAREDCPSSEHL

SEQ ID NO: 75686 - protein, 177 aa, Zea mays
  Coding DNA Sequence Number=SeqID_33907
MEEHRTPVRTTRTFDYSLGLPRRWRPAAAAWLVARDISQRAKPDARPLKSHSLCIYYGEDTPPATTLTDDVPSQHLMRPVHSVGRRRQGNLAGGTPVRSFPSTPRIRRSWVSGHEKIAPAANISSSKRHIHFVPGPTCRGSVPLYMPPSAIKGEACDVTTHVHSDSQASTAIQHTVE

SEQ ID NO: 75687 - protein, 120 aa, Zea mays
  Coding DNA Sequence Number=SeqID_33908
  Subcellular localization annotation: CTP_CleavageSite=61; ConfidenceScore=5.43e-01
MDAQAPTPCLRSSTTPFLPAGSLFLLPYFFLKSIGCSLCCPGRRRASLAPALPWPDRPLARAGEAAVAHGRCPAQGMNPAPPMLHLQPVFVPLLSDQQPATRSTTPSSGSNLHGAPASIP

SEQ ID NO: 75688 - protein, 159 aa, Zea mays
  Coding DNA Sequence Number=SeqID_33909
MPVHRTSNSTCPVCTGHLGGPTSQKLQRSESNGSDDVAGAPDCPFLEHHKRRKNSEDNGVLTEGRRHHGRGCAQHIISHGYSVEQPRGIEENNKGAQLWDGSRGAMEVAAAAWCCAARCWLLVGKQGNENRLEMQHRGRRIHPLSRASAMGDGGLTCSS

SEQ ID NO: 75689 - protein, 85 aa, Zea mays
  Coding DNA Sequence Number=SeqID_33910
MGDHVSGRVRRAICGQVHSGIRTLILIPISSRRPRVPMDPCPQTITIMALFGTAYFQLLHKFKPKFCQTDSFSSSLSVQLLLRMN

SEQ ID NO: 75690 - protein, 168 aa, Zea mays
  Coding DNA Sequence Number=SeqID_33911
MAKPGHTTPPGPLLRKQQPTRPSIPVAGTKAKSHHQLKQGGTCKNYATSKAEYTNTQLDLPGYNGSSSLISCEKQTIRIEFLSLQVTALVPTITGMGDHVSGRVRRAIYGQVHSGIRTLILIPISSRRPRVPMDPCPQSITILLSKWIQPIPDLARVLEKSLDFYRDP

SEQ ID NO: 75691 - protein, 105 aa, Zea mays
  Coding DNA Sequence Number=SeqID_33912
MEENGAAQGLLLGGDEQGTGKKTGRWELLPRERVGAGAPWGASTGEFGHGQRGASCRGWRSLCRGGQPWSTTSSLLELGADPARGEQGRAKLACALDSRGSGLRT

SEQ ID NO: 75692 - protein, 194 aa, Zea mays
  Coding DNA Sequence Number=SeqID_33913
  Subcellular localization annotation: CTP_CleavageSite=93; ConfidenceScore=5.28e-01
MDGAQALLPPLAGSLPSAIPFSPWPAHRKPVAMDAQAPTPCLCSSTTPFLPAGSLFLLPYFFLKSIGRSLCCPGRRRASLAPALPWPDRPLARAGEAAVAHGRCPAQGMNPAPPMPHLQPVYVPLLSDQQPATRSTTPSGGSNLHGAPASIPQLSALAVLFNAPWLFNGIPLVVDAAFRAWLVRRNAKPCGQPM

SEQ ID NO: 75693 - protein, 828 aa, Zea mays
  Coding DNA Sequence Number=SeqID_33914
  Homolog annotation: Hit_ID=Q7RGM8; Match level="QueryCoverage=24%, HitCoverage=7%, E-value=1e-08, Identity=25%"; Hit description =Rhoptry protein, putative
  Pfam annotation: Domain name=zf-CCHC; Domain location=82-99; Score =8.9; E_value=0.034; Accession=PF00098.13; Description=Zinc knuckle
MTKMSHLPRERIWLSKQIKKEKGKAKIQIEEESSSDDDLDANIALMVRKTTKMLKKLNREGIKFNSRKKKFFSSKRKPISEMDCYTCGELGNLAHQCNKPKKNKFKGKKEDDNDDEKKEKRFFKRKDGKQKRFHKKKNGKAYIVGDWLTDIESSSGSSSSEEENDEKVAAIAGDFSSPPPSPSSTSHLCLMARGERKVQNDIDITDDSDRDSDEEFASPSYDELADLLKEYTQIIRKSKAKCDKLKNENESLNAKYDIVMKASDEMKEENKTMSSTVNELTTSLKDAKDKCDKLNEANRELQDRLVKIKEDYTKIKFDHDNLLVENELLSCKTHEAINPVVKIDVATSCDDLSQGEQTSLHDELTEKVDVLTLDNQKLKRYLTDATTRGKVAIENNDFNNELAVDNERLKMRSRNLRVKMNILQQVRMSRTKNVSAPGGGDDEDPRRPFRQVKGKTVYLEQQEGRKKRRMDRAARAAAAATAAAAEQAELGDQPQTPSDQIAYRVRRLASQPRSSTPTTTSTPPPTLPAPITPAAPSTTSTTPASTAPPPAPVSAPPIPPARFRERDETEVRPLAADPRLFNLQRATAAQVRRFRYVPVESWLPAQRDPAAVDLFSTRIQESFFRAQMSAQIALRVHRLLDLPAFLLAAGADSEDTVRDGLHARRQLPYAHYLCHIFAQLIWPPQFQGTLEASRLIFGSYRPAPEDPVRAPAPVFDSQAEDTTLHQFEAQDAAVDDDDDDDDDDFGIPPPPPPPMPPRSHDHEAGSSRATPTAPPAIDPALASILQTLTQQQAHLAAEQTRQAAAHQQLSERMLSMFQTIQDRQDSLQ

SEQ ID NO: 75694 - protein, 401 aa, Zea mays
  Coding DNA Sequence Number=SeqID_33915
MSRTKNVSAPGGGDDEDPRRPFRQVKGKTVYLEQQEGRKKRRMDRAARAAAAATAAAAEQAELGDQPQTPSDQIAYRVRRLASQPRSSTPTTTSTPPPTLPAPITPAAPSTTSTTPASTAPPPAPVSAPPIPPARFRERDETEVRPLAADPRLFNLQRATAAQVRRFRYVPVESWLPAQRDPAAVDLFSTRIQESFFRAQMSAQIALRVHRLLDLPAFLLAAGADSEDTVRDGLHARRQLPYAHYLCHIFAQLIWPPQFQGTLEASRLIFGSYRPAPEDPVRAPAPVFDSQAEDTTLHQFEAQDAAVDDDDDDDDDDFGIPPPPPPPMPPRSHDHEAGSSRATPTAPPAIDPALASILQTLTQQQAHLAAEQTRQAAAHQQLSERMLSMFQTIQDRQDSLQ

SEQ ID NO: 75695 - protein, 358 aa, Zea mays
  Coding DNA Sequence Number=SeqID_33916
MQVACDRTTVAHPFGFVASSMEAQSHTSWTGKGDILKGILLRKGSGPRALLLIRGSKAGPLKGGSKAGPSKGFDSRPRARRARDDSGYVQYMAEAQATLPRGSGAALANPATAKLLTTSTNQPKNLEPDHAPVLQSETDGHDSGQGFVYSRDAISPRPSPASGGNRSPRRIHASPEGLLKQRTHPRLARSLARAGFAVKQPWPDHLTNRPYRRHFQCEDRLTPYPDTRASVGKVEEEVSTSPDPRAGPPPRPQEEVSTLPDPRARPRPRPRKEDAASPDPRVRPQPRPRKVVSASPDLGLGLYLDLGKNRVLARPRPRPQEESPPRPILGSDRPHHGGYIITLSLASSGYGEQDRCPI

SEQ ID NO: 75696 - protein, 346 aa, Zea mays
  Coding DNA Sequence Number=SeqID_33917
AKRASLNLRHNDRVKKGTGKGDILKGILLRKGSGPRALLLIRGSKAGPLKGGSKAGPSKGFDSRPRARRARDDSGYVQYMAEAQATLPRGSGAALANPATAKLLTTSTNQPKNLEPDHAPVLQSETDGHDSGQGFVYSRDAISPRPSPASGGNRSPRRIHASPEGLLKQRTHPRLARSLARAGFAVKQPWPDHLTNRPYRRHFQCEDRLTPYPDTRASVGKVEEEVSTSPDPRAGPPPRPQEEVSTLPDPRARPRPRPRKEDAASPDPRVRPQPRPRKVVSASPDLGLGLYLDLGKNRVLARPRPRPQEESPPRPILGSDRPHHGGYIITLSLASSGYGEQDRCPI

SEQ ID NO: 75697 - protein, 228 aa, Zea mays
  Coding DNA Sequence Number=SeqID_33918
  Gene Ontology: Mol. function=GTPase activator activity; Cellular component=intracellular; Biological process=signal transduction
  Homolog annotation: Hit_ID=Q10L77; Match level="QueryCoverage=66%, HitCoverage=18%, E-value=7e-59, Identity=77%"; Hit description =Pleckstriny domain-containing protein, putative, expressed
  Subcellular localization annotation: CTP_CleavageSite=11; ConfidenceScore=5.12e-01
MSLGLGESTISASSVLAMPMVSSRTTGFRGIENDRPKILKMMHTIASHTSENRMTASAVATCMAPLLLRPLLAGESEMDEVFDMDGDDSAQLLAAANAANSAQGIVATLLEEYEGIFHDEHLRCSLSPESQIEDSGIEASTVDGNLEAKGNGFHDVDQELDDDNGVERILSGKLSESSGYAGSDLYDYKNGNIMIDEKTNVLTIIIFFWCLKYQFYDYNVDNCEMGIS

SEQ ID NO: 75698 - protein, 156 aa, Zea mays
  Coding DNA Sequence Number=SeqID_33919
  Gene Ontology: Mol. function=kinase activity
  Homolog annotation: Hit_ID=Q1KL28; Match level="QueryCoverage=83%, HitCoverage=29%, E-value=2e-19, Identity=43%"; Hit description =Choline kinase
MGRVYLPCPMVRRGKNMWKALVASKLREFHNLDMPGPNLCSFGGKLSLENQITTLENKCSCDYQWTGFCHNDLQNGNIIIDEKTNVLTIIIFFWCLKYQFYDNNVDRTVKWEYLEHGVFASYQPFITVSSFMSLDYEYASFNLVAYDIANISFSAP

SEQ ID NO: 75699 - protein, 458 aa, Zea mays
  Coding DNA Sequence Number=SeqID_33920
  Subcellular localization annotation: CTP_CleavageSite=56; ConfidenceScore=5.02e-01
ATAATAALLLVPALLHPSPATSVHRGRYTHPPHFCPSNQKRRHLKPDGALFSILCVPSTKTDDDVALLHRCSALSLHQRRSTDARRAPPAGAGQILSAVIHLARRIARASVGSPTAARPSPSAPGDPDRTRLLGLTTGSCPAAAEAPSVLLQAELKVQRAGGVRRRNSVTSYLSASRLQSGLPASRRRGAARHGGCGEEGSCPIPTQLAAAQGGGDPIGVRASARGGRLPFSSGELHEGADEGMDAQPNWRGGPAATRISYKNATIVMCAFNLFVAALLLHNYYSSWTRIAGGNKLDSAQLRYIWESEELRRAMEPVDLIRRVKEIEQEAYGEHGMATDEDPKQTAAVDLSKRLKDLRAGNDGSSQKALEEWRKRKMERARQRAIEKNGTSSDGHAEEPEGQDVNVQAISTLQAEVEESNEQVAEIGEAESTIAEVEALVKPTQPLQFYRVEPSYCYL

SEQ ID NO: 75700 - protein, 1682 aa, Zea mays
  Coding DNA Sequence Number=SeqID_33921
  Homolog annotation: Hit_ID=Q10RW7; Match level="QueryCoverage=49%, HitCoverage=94%, E-value=3e-52, Identity=26%"; Hit description =Expressed protein
MNARRRRTSVRGALPCPRGDVRGWDRGRARHTRAIPPSTRGRERPVPRAAAHNGASRDLPRPHRPAELYSPSQPSSSTTTFPFRVRASATPPLTHCAPPLASLPRQSPPHLVKLPFAFLLLLPIGPPSPPLTTVVGFAIFGLAVHPGAACRGGGLVVVPLSLLPKVPFQPRFRLGLGLGLGLDYGAPPFLILTLIRPNRSHLLAYRDIVITSLLLTSLCLAAFMGTSAIASFPSAALIGSGVGAVAVAARLRPVPRPPPRWRDKRWLRPRQPPLHRCVSSDEMRFGWALFPASVTVRSGRREKEKAGAFPPPLPQPAAPAVAAFLAHLRDGVNERGSGYKAQEEAGPPGSRALPRMPGEDDRHIDSQTRRNSPTKRSNSPTKRSGAAPVKMIMEQGMWKEGMPDEEPLNVVARLMGLHDAPVQQSNFHLARQLDKEYQRGGFEENYRNLKPNKESKCHQNQKAGHTWNGSGDQPSRINSSRSKHQGNEPCCEKRMSLVREKFAEAKRLATDEKLLHSKEFQDALQFLSSNRDLFLEFLDEPNPLLSSNRYEFQPVAPPSQAKQITILKPSELAKRKGSILVGRQLFSDGDERGLNRYRRHQSLDVCPANSNLSEPTKIVLLKPGRLSKPHDSRIARSSLSSAENSEDESMTTVDETVCSRRLAKEVTWQTRMRLKDKQDEKSTLSCEYLDFYIGDDSFSKSEVEISKEMPGETSEELEFGTPTSGRSWDFLSRSGSPYSASCSSQASHRREPSVVREGKKKILERWSMVSSTVSSEEEMEGRRSTGTLGDILTIPKVKDQEGIGAETLGSPAPELEPEEPFSCLPRSRSLPLSLSCGVAESNGGVASGSTQEAERERIRKSSSFREKVSSLFSKNKKPVREKADLSVSNRLEVYGGAETTADVKKGLNRLALDNLQKQSTSRVNTDGKKNAAQGLVTSSCGTNDTANTTPAKDNIASIPSLGAPGILGDPQDQPSPVSVLDGPFIIRDNSRNVLYSSPSPQALSRSPLIGSFPRSLPVSWEDPPPEATSPNSLRLSRLFSKADEDLDSLTFIQKLVRSCGMDRASCVLAGPLDPDLLEKVSEHEDDGTRFGRRRLLFDAVNEALAELAWTAELAAYPWGGGRSRLDCNCKNGSGGDSAAEEIWRVIRNWSTLDKYPPCETIEGNVLLEMILRREADSGETARLEVFGLGASVCAVVLEELVEETVVDLLTDCYRFSHPRGPAGQATAATAALLLVPALLHPSPATSVHRGRYTHPPHFCPSNQKRRHLKPDGALFSILCVPSTKTDDDVALLHRCSALSLHQRRSTDARRAPPAGAGQILSAVIHLARRIARASVGSPTAARPSPSAPGDPDRTRLLGLTTGSCPAAAEAPSVLLQAELKVQRAGGVRRRNSVTSYLSASRLQSGLPASRRRGAARHGGCGEEGSCPIPTQLAAAQGGGDPIGVRASARGGRLPFSSGELHEGADEGMDAQPNWRGGPAATRISYKNATIVMCAFNLFVAALLLHNYYSSWTRIAGGNKLDSAQLRYIWESEELRRAMEPVDLIRRVKEIEQEAYGEHGMATDEDPKQTAAVDLSKRLKDLRAGNDGSSQKALEEWRKRKMERARQRAIEKNGTSSDGHAEEPEGQDVNVQAISTLQAEVEESNEQVAEIGEAESTIAEVEALVKPTQPLQFYRVEPSYCYL

SEQ ID NO: 75701 - protein, 111 aa, Zea mays
  Coding DNA Sequence Number=SeqID_33922
ELLFPLIEIGKRLLALAGWEEPCKSYVFLLCFLYMAYRYCFLNFIFSTREEHSPMKIIDFGLSDFIRPVFLAADQCPIGYSLKMVELELLRFLCERIVKREKVKVFEIELK

SEQ ID NO: 75702 - protein, 407 aa, Zea mays
  Coding DNA Sequence Number=SeqID_33923
  Gene Ontology: Mol. function=protein serine/threonine kinase activity; Biological process=protein amino acid phosphorylation
  Homolog annotation: Hit_ID=O81088; Match level="QueryCoverage=27%, HitCoverage=32%, E-value=3e-44, Identity=70%"; Hit description=CDPK -related protein kinase
  Pfam annotation: Domain name=Pkinase; Domain location=148-407; Score=- 9.9; E_value=5.6e-08; Accession=PF00069.15; Description=Protein kinase domain
MDALNFDYHDYEKLDKGVEGVKRKRVVSILSRQAARMVKEDEKFSKKTKSTPESKATVSKKRKAEALEPKVTEVTEETPSTPPTTEIAEILKLKQHYSRFRGGQDLGQSSSEEMMLDDPFPLSAYTMVTMGLLKLKEEDNAEERDFAVRDVQIGGTSSVQMALERSVGYSGRVEAARATLDQVRVEDIDTNVVGLKELLFPLIEIGKRLLALAGWEEPCKSYVFLLCFLYMAYRYCFLNFIFSTREEHSPMKIIDFGLSDFIRPVFLAADQCPIGYSLKMVELELLRFLCERIVKREKVKKFLFSTREGHSPMKIIDFGLSDFIRPDERLNDIVGSAYYVAPEVLHRSYSTEADMWSIGVITYILLCGSRPFWARTESVSPQAKDFVKRLLNKDYRKRMTAAQALYS

SEQ ID NO: 75703 - protein, 53 aa, Zea mays
  Coding DNA Sequence Number=SeqID_33924
  Gene Ontology: Mol. function=protein serine/threonine kinase activity; Biological process=protein amino acid phosphorylation
  Homolog annotation: Hit_ID=Q1SHH6; Match level="QueryCoverage=94%, HitCoverage=17%, E-value=1e-17, Identity=67%"; Hit description =Protein kinase; Calcium-binding EF-hand
MWSIGVITYILLCGSRPFWARTESVSPQAKDFVKRLLNKDYRKRMTAAQALYS

SEQ ID NO: 75704 - protein, 84 aa, Zea mays
  Coding DNA Sequence Number=SeqID_33925
  Subcellular localization annotation: CTP_CleavageSite=39; ConfidenceScore=5.29e-01
MATASCARLQPAPAAWPVTVVTVSTGSTSRTSAPEEARRAEAEGGEQGRAEAVLPCAGEGRAWRKKGLAAYGARTSGSRDGGRS

SEQ ID NO: 75705 - protein, 400 aa, Zea mays
  Coding DNA Sequence Number=SeqID_33926
  Homolog annotation: Hit_ID=Q10MR5; Match level="QueryCoverage=28%, HitCoverage=55%, E-value=2e-21, Identity=46%"; Hit description =Expressed protein
  Pfam annotation: Domain name=DUF588; Domain location=244-354; Score= -12.1; E_value=0.029; Accession=PF04535.3; Description=Domain of unknown function (DUF588)
  Subcellular localization annotation: CTP_CleavageSite=60; ConfidenceScore=5.09e-01
MDTFHTVERLLGPTLQAQSSASRYPPYLRRNPFLPSVGNGGTGESCLPLHGSPETGTAPPSQSAVERKGDETRRGSVGGRPRLPLRPPSVSRTRGPSSVGGKPLLPPRPPLTGAGQHRLSPALLSALRFRPPRLLGCARPGRRGQVLQQRLRPRVGARGAGPGTGAPPLRDARRILWPRRRPARAPRANGHDRHGPRRGRRLQSGARRRRHVRLPWVLPADAGGDMAGGRTGAVGALLRWWRTQDLLDWSGSALRAGAWAFSLLAFLVMACNEHGDWRQFDRYEEYRYIVAIGLLAFVYTTLQLLRHGVCLTGGQDLEPKTGLLVDFAGDQSSVLHSQPKSTVGTPAYIAPEVLLKKEYDGKRITIPEIGNHPWFLKNLPADLMDDSTMSKQYKEPEQPM

SEQ ID NO: 75706 - protein, 253 aa, Zea mays
  Coding DNA Sequence Number=SeqID_33927
MSKTPAEPLRARAASPPSSDVFGTSRWSDRDKTGRDTLRSIRHQTKACDGVIPQCGLVQLRGPRVIRPIVAEGTCVLSSRRWALRVSEPNDGSAEQRLPAHEAAGVHWPAPTSLSHRSQSPCRLPVVAVAVPAASAAATRRSTISARSSGPSASTARSSIRDRDASYVVVAVSYEDRMDQPSSSQAQSIKPGGTPEFNGLHRKVKLPRSFVTVGRLLVSSTPPSAALSHLNLYCVPWLLGAKMSLEEYGSKSI

SEQ ID NO: 75707 - protein, 93 aa, Zea mays
  Coding DNA Sequence Number=SeqID_33928
MAMGRVRIGYGVQQCCYCSKQGTSDADEEQGRHFGSCTPTRSRAVRQVAGAAVRQRQVAGAAGRQLDAVCRRGEGQELSAFWRRCVRRLVLLA

SEQ ID NO: 75708 - protein, 705 aa, Zea mays
  Coding DNA Sequence Number=SeqID_33929
  Homolog annotation: Hit_ID=Q6QP51; Match level="QueryCoverage=7%, HitCoverage=22%, E-value=3e-07, Identity=60%"; Hit description =Putative growth-regulating factor 1
  Subcellular localization annotation: CTP_CleavageSite=61; ConfidenceScore=5.61e-01
MVAFQGGHPPFKGNSPHLRPQPSRAESSPTRSKVLPLRHGGWVPRVMQAGPGLKKPNRRARCAQLPSGYKHSSTFAQTSGATRHATGAPVATCKQLHRHSRHYRASSTADPAGGSSGYVVSQAHVPSWDSERTLSHGVKTARPCSVPRTARARATAAPRTTRLVALTPRQDRRHLWQEKRATLHLYHNDRVKKVCHVIRFRILFLFLFLSLTTGTGKGDTLKGILLREGNGPRAPLLIRGSKAGPSEGFNSRLRALGLRAHYWSEIRRPTPRKGSMDASGHSGSAPTTDQGGSGAALANPAPAKLLTASTYQPENLGPDRLGLGLGPGRRRTPPRPTQGSDSASAPEDDELRLARPRARNRPRPQKTTNSASPDPGLGLGLGPERQRTPRDGNFTRGPPETGRPSPMRQYSLFNHQQGSNPTLVSLSPQPHAQHKLKRSSHQPPAAARIFARKQKLLVGVRRRALSCRPAALSPQQPIAATLPPQPPAALPPQPSAALPCSSSAYDCRSPFLPVRHHHSASEERDPGDQVRVPSPPSTTVHTPYVRRPSLLPVWILPGPLLCAHFICLRANIRRYPGDWTGGGSQISSPSMAPTSGSGSGTQANRPPLSSRGAATRRGRVTSNRSTINRVDAAAAQPQSGIDNVIVEDDDTVIVGTKRKLKSDVWLEFEQVTVGVAALLSAARLSPEQPAGDSVSQQPVAALLHA

SEQ ID NO: 75709 - protein, 209 aa, Zea mays
  Coding DNA Sequence Number=SeqID_33930
MGTKLCQLDHAVNQAKDFDENLQHALQRTTLVYEMHEQKEPSIGDNRCSHSTLPKRMDLMAFRWKVHHNMVKVQKEGENLCIKSYLDLRGKLILRVKISSGYSCGSGALNWYLNALIVLPSITKKGEIESSLVGFGGLDDNPIIGLTSVLSVEQTTDQAKDGGKKIFEVPSAREKVKETRNPKPGVKKKTCKVKVDRVKKSYGASRITT

SEQ ID NO: 75710 - protein, 60 aa, Zea mays
  Coding DNA Sequence Number=SeqID_33931
MRCMSKRSPQLVTTGALTPHYLKEWISWHSVSRWKREDEQEMEQLGLGYLHKSSNWYLEL

SEQ ID NO: 75711 - protein, 105 aa, Zea mays
  Coding DNA Sequence Number=SeqID_33932
  Subcellular localization annotation: CTP_CleavageSite=52; ConfidenceScore=5.22e-01
MPAPTPVPAIPATTAPPPPDALCAQCLLTKATTPGARGRMSALHGPGEGGPCADAAPGLSPSCEKQKLLTGVVQLRIIPGVYADGDSSVSTYERRASLRQFYGSL

SEQ ID NO: 75712 - protein, 200 aa, Zea mays
  Coding DNA Sequence Number=SeqID_33933
  Gene Ontology: Mol. function=monooxygenase activity; Cellular component=nucleus; Biological process=electron transport
  Homolog annotation: Hit_ID=Q10KD1; Match level="QueryCoverage=83%, HitCoverage=35%, E-value=3e-69, Identity=74%"; Hit description=IQ calmodulin-binding motif family protein, expressed
  Pfam annotation: Domain name=Ank; Domain location=112-144; Score=0.4; E_value=28; Accession=PF00023.20; Description=Ankyrin repeat
  Pfam annotation: Domain name=Ank; Domain location=145-177; Score =24.7; E_value=0.00033; Accession=PF00023.20; Description=Ankyrin repeat
  Pfam module annotation: Pfam domain module=Ank::Ank; Domain location =112-144::145-177
MVACSEVREFEYRDSEAHYMETSHSQANGVNEMHLHIRLEKLLTLGPDDHQMLAINSLMLDGKWSNQESSVKEVVSTTRVQSLKKLVQEKLHQWLICKVNDDGKGPNVLCKEGQGVIHLVAALGYDWAIRPIIIAGVNVNFRDAHGWTALHWAASLGRERTVSVLIANGHKIPMRQWRTATGAQRHRASCEPMVRCVVSI

SEQ ID NO: 75713 - protein, 349 aa, Zea mays
  Coding DNA Sequence Number=SeqID_33934
  Gene Ontology: Mol. function=monooxygenase activity; Cellular component=nucleus; Biological process=electron transport
  Homolog annotation: Hit_ID=Q10KD1; Match level="QueryCoverage=64%, HitCoverage=46%, E-value=2e-94, Identity=75%"; Hit description=IQ calmodulin-binding motif family protein, expressed
  Pfam annotation: Domain name=Ank; Domain location=227-259; Score=0.4; E_value=28; Accession=PF00023.20; Description=Ankyrin repeat
  Pfam annotation: Domain name=Ank; Domain location=260-292; Score =28.3; E_value=2.7e-05; Accession=PF00023.20; Description=Ankyrin repeat
  Pfam module annotation: Pfam domain module=Ank::Ank; Domain location =227-259::260-292
MRLSFSSLAPLFLYFIQWLDCGCCYALPSYLGLFHILICKVKLQFMLMEIAQCRHMKGGQALGNSMQLESSLIERDLKGKGRCKDIVYLLLTVPCFIECRPNITLLLEMLFDLTVWVACSEVREFEYRDSEAHYMETSRSQANGVNEMHLHIRLEKLLTLGPDGHQMLAINSLMLDGKWSNQESSVKEVVSTARVQSLKKLVKEKLHQWLICKVNDDGKGPNVLCKEGQGVIHLVAALGYDWAIRPIIIAGVNVNFRDAHGWTTLHWAASLGRERTVSVLIANGAAAGALTDPTSEFPSERSPADLAPVNGHKGISGFLAESALTCHLSALTIRESNDSTVEVCGTTPK

SEQ ID NO: 75714 - protein, 79 aa, Zea mays
  Coding DNA Sequence Number=SeqID_33935
MERGRGGAHHGRMETNDMGDMASGGRRAKRGKAPMARGGRGREVRGGGSERGGMREGSWARDLQLRRCTTWAPKGRLFL

SEQ ID NO: 75715 - protein, 114 aa, Zea mays
  Coding DNA Sequence Number=SeqID_33936
MAFGGRRAKRGKAPMARGGRGREVRVVFPSKGKLLFKVVEVQGEDQDMQDRGTSIIKDEAEVRIVIGKGEDASKARIGKTPFSSRDGKDDNSKEAALKYGYMISMKVKTRDNKG

SEQ ID NO: 75716 - protein, 53 aa, Zea mays
  Coding DNA Sequence Number=SeqID_33937
MAAPRTTRPVALTPRRDRQRLLQEKRATLRLRHDDRVKKGTGKGGYPEKDPSP

SEQ ID NO: 75717 - protein, 445 aa, Zea mays
  Coding DNA Sequence Number=SeqID_33938
  Homolog annotation: Hit_ID=Q6QP51; Match level="QueryCoverage=44%, HitCoverage=80%, E-value=1e-14, Identity=33%"; Hit description =Putative growth-regulating factor 1
MGGPAEQRKTDERRAVTRSGSGDDDDFCSGGPNSSGDDLRADAAARRPPPMPKLVRQGRAEGRRIGGRSVGGPGYLVSGRTSSSCRGRSRRRERLRSHSGPRARHAAAASATDDNRPSPRSLREGAGHHPRRGRPQLGTLPSPALVMKILKAEGGAEAAARGRKGGQPCRRFCNSAKWAHFSDFQHAQHGSPGPRVLRRLWQEKQATLRLRNNDRVKKRLRASLLIRGSKAGPSEGFNSRLRARGLHTHYWSEVRRSAPRKGSTVASGYSGSAPTTDQGIPSEGGIEPSDPVDRGPGPADHPQRLGGYSRKPGSGQTVDNVNIPARELGTRPYTRATASSHEGTTRPAKALREALRPRRSQTTPPRPQGLHPADALARTHRNKTQPRKAGPLAKKCDESLQASANTPFEARGLLSGTIIRGTLKAPNSQLVTPISIKLQRSDGCD

SEQ ID NO: 75718 - protein, 184 aa, Zea mays
  Coding DNA Sequence Number=SeqID_33939
  Pfam annotation: Domain name=BSD; Domain location=98-163; Score=26.8; E_value=7.8e-05; Accession=PF03909.7; Description=BSD domain
MTVGGGCLFDGAPDSPVHTGTVRCTPDSPVHTGQSGAHRTVRCPLPRHHCRWILTVGASDLWARLGVRCTPDRRLRPQLRLRDPRPADPATFTSDPEDDEDFAAWSKGFILDEKEEEIEALCYDSDALEAMADRLVPDAVPREVFWPRLVPDILVPYARSATAMLGQRPRRTLRSPSSSRGDAG

SEQ ID NO: 75719 - protein, 118 aa, Zea mays
  Coding DNA Sequence Number=SeqID_33940
MLREDDPRERHIPRRLGGTPAWNRAPTGVRGVSAAKSWSRLRTKHDRWWRPSVRWRTGQSGAPATSPVPLEIDRWSSDFWARLDVRWRTGHALFTVRCAGMGVSDFCARCARIKCHRR

SEQ ID NO: 75720 - protein, 331 aa, Zea mays
  Coding DNA Sequence Number=SeqID_33941
  Homolog annotation: Hit_ID=Q7F9X0; Match level="QueryCoverage=20%, HitCoverage=47%, E-value=1e-23, Identity=75%"; Hit description =Elicitor-responsive protein 3
MAQRLIKKNVDTLISTNPPGFIPKEITNLLEKSFEWNVSFTESTIIYSNVSFQVNAINAEMDGGNILPTTPSSQPSSIVLSQGQGSGVTQNTGASFIREPSLTPESHKVSSIAKCDIQTAPHQGDNLLQGTEIVTSPPNMQAPSGAAYSVLDGSTNKAHKSVTGKSEYGFMLVRYEQRYAVCLTRLWYFSYSTGNTQRSSSYVPFKKGGNSILNDKKYTKVVSGIQRGCFWLFFLWPCKGCEPEWNKTFVFTVSDGAAALFIQIMDSDGGTDDDFVGEATIPLEAVYTEGSIPPTVYNVVKDEEYRRNNNNGHRTPLFDVLYYCINLACLS

SEQ ID NO: 75721 - protein, 694 aa, Zea mays
  Coding DNA Sequence Number=SeqID_33942
  Gene Ontology: Mol. function=helicase activity; Biological process =viral genome replication
  Homolog annotation: Hit_ID=Q6YTQ6; Match level="QueryCoverage=57%, HitCoverage=27%, E-value=1e-144, Identity=62%"; Hit description =Helicase-like protein
MLTEWFQINLKYGDAHHLTYCDFPKEWSWDISTRCWRRRRLTSAKIGRMYYVHPTAGELYYLRMLLMFVSGATSFVDVRTFQDTVYETFREACEARGLLEGDNEWNLLFDEAVVSASSFQLRHLFVTIVVHCPVCNVRALFDKYWIYFTDDIHHGLREALGNPRYTAPHEQLLTLLLRKLADTFANSGANIVDYDLPILSACGDEVFGNRLINDELRSEPVLWRAHAAVAVSQLNADQRFIFKKLTESALSCSPGIFFVCGHGGTGKTFLWNAILTHLRSRQKIVLAVASSGVASLLLPKGRTAHSRFKIPFDLDERGVCGVKRGTMLSELIQRTSLVIWDEAPMTHRHCFEALDRTMCDILSEHRAENANIPFGGKPIVLGGDFRQILPVVRKGSRLWEFLDPQDDSRLLHTDLVLLDEEGNNIHAQVYPPLCQQFNVLGVVSVISHVSSLRTRGRQAEVMKRTVTISNARDTGPTVDVVLWGERATAFPAEQIHRDSGSSPQIIIFVGTLVRSYADNVSLSGGSSCKWYINAPVPEGKAAAEGAVIAVPEHRKLKDIKYLHPFENKKKEWLVIVKILKIDRSWWYNACKKCLRTTKPHGDTYKCTNSSCDSIGSPTPRYKISLTAEDDTDTAEFIFFGRMAQRLIKKMWTPSSRLIHPVSFQKRLQIYWKSLSSGMLASPKAQLFIAMFPSK

SEQ ID NO: 75722 - protein, 405 aa, Zea mays
  Coding DNA Sequence Number=SeqID_33943
HQFRMPRTKNVSVPGGGDDEDPRCPFRQVKGKTVYLEQQEGRKKRHTDRAARAAAAAAAAQAELGDQSQTPSDQIAYRVRRLASRPRSSTHTTASTPPPTLPAPVTPVAPSTTTTIPATSTMPTSTAPPPAPASAPPVPPPQFWEHDETEVRPLAADPRLFDLQSATAARVRRFGYVLVESWLPAQRDPAAVDLFSTRTLLTLLVALMAVWLRTLLPRMGYREATTHIQLWLLGALVSHSEFDIMDFLICEIEDTVLDGIRAHRQLPYAHYLCHIFAQLIQPPRFQGTLEASRLVFGSYRPAPEAPVPASAPVFDSQAKDAALRQFDTQDTAAVDDDDDDDDFGVPPPPPPPMPPRSHDHEAGSSSAAPAAPPAMDPAFASILKSITQQQAHLAAEQARLSERML

SEQ ID NO: 75723 - protein, 371 aa, Zea mays
  Coding DNA Sequence Number=SeqID_33944
MSRCTGCRVLELHFSCALSGGFTGTATVRCLVCTGQALYTVRHQFRMPRTKNVSVPGGGDDEDPRCPFRQVKGKTVYLEQQEGRKKRHTDRAARAAAAAAAAQAELGDQSQTPSDQIAYRVRRLASRPRSSTHTTASTPPPTLPAPVTPVAPSTTTTIPATSTMPTSTAPPPAPASAPPVPPPQFWEHDETEVRPLAADPRLFDLQSATAARVRRFGYVLVESWLPAQRDPAAVDLFSTRTLLTLLVALMAVWLRVQLTSRFCSARSFQMGRDVHRQNYYNSQAKDAALRQFDTQDTAAVDDDDDDDDFGVPPPPPPPMPPRSHDHEAGSSSAAPAAPPAMDPAFASILKSITQQQAHLAAEQARLSERML

SEQ ID NO: 75724 - protein, 778 aa, Zea mays
  Coding DNA Sequence Number=SeqID_33945
  Homolog annotation: Hit_ID=Q53MK8; Match level="QueryCoverage=31%, HitCoverage=28%, E-value=3e-21, Identity=29%"; Hit description=Ulp1 protease family, C-terminal catalytic domain, putative
  Pfam annotation: Domain name=TolA; Domain location=162-496; Score= -117.8; E_value=0.0023; Accession=PF06519.2; Description=TolA protein
MAKAHHECYTGIQKLIADAIVEKRAAKERRRKVKNDPRAGAGAGTSSIAPEDQSRGGDGEEIIRSPVAIDPRAGAGSGTTSNVPEDQPGGGDSEEIQLDCSGGDLDDSLDFTRTPSCGDDIDLEEGNLNRTPPDLRGSIRSIDDILQMMYSPEHFASIDGESPPNSQPTRAPRIAVRKRKASSNPPGNDQRPVGPPETEEEPLSRDTGMQHPTAQDHITYSRRSDRSIQVANTQKAEAEKKKAEIEMKNAKAEEAEKRKAEAEQADKKKAEEAENKRKAEAEVAEIKRKAAAEEAEKKKEVEAENKRKAEAEVAEIKRKAAAEEAEKKKEEEAEDKRKAEAEEAEIKRKAEAEEAEIKRKAEAEEAEIKRMAAAEEVVKKKADAEKKVDADEKRIQVAIQKQLKDNIKALKKPVPAAKLKKMFQLQMSKEYAEQRQQYEDRLNMLRQEAKAEIDSLEKSIDGQAGPSSSFDDIQFPAESDDDINNLTQPIRLSQDEVSVGQADFSEFQRMIFKRLGDRVLKKPREYISPFKIPRNRPEIPLAKAVALRRKIASDPELKRRILLEFGLLVGLTGEEILTYFSNDTLGESGIIDFFVHCMRHDDIVHKVDSCGYRAFLTTGFYVFVPIKDGAHYFVYCFNFIHKRIDVLDSNDYFLNCSNQEERHKAVFAKIPIIDAAFQKVSNLKLPRVSKWRRSFIDVPKQAGQSDCLFFVWKYMEYYDGDKMTKEINPFKGLIYRCELLHYEIFHPLNQAEIPGSLDKFRIGGRPLPIEWDSSQSNN

SEQ ID NO: 75725 - protein, 564 aa, Zea mays
  Coding DNA Sequence Number=SeqID_33946
  Gene Ontology: Mol. function=cysteine-type peptidase activity; Biological process=proteolysis
  Homolog annotation: Hit_ID=Q53MK8; Match level="QueryCoverage=47%, HitCoverage=26%, E-value=3e-21, Identity=30%"; Hit description=Ulp1 protease family, C-terminal catalytic domain, putative
MDKDQNVSGQQGAHAVRRSPRVENKRKQLDKNELKERKKRLRLKVPPIQDAESDDEKDTEFVPGGDGSGDDNVGIVGGDENKGITKTRAIRCSPGKFIKLVNSLSDELKSEVVAKGFGGLLRFKPHLLSRKLLSWLMRKLNPETMKLEIGGGKEIQITEHSVWCVLELPNVGSDPPTMSDADARALRDELGVQICGKSYRRISGINISVITDRLQKRTLNGELGLRAFFMAAFQCLLFSNTDTRIRIDDVKYTQDIQNIGNKNWCKALVDRLSIAARLYRKDFAEKGINAPISGCGIFVAMFYVDNLQHGLDTSPFSIPRCAFLDSKMIDAIANMDLRGDVPPGTTEFGHLRLRSISDTCSGVPIGALAILHAPVPAPAPVAVPNPTAAPNPVAAASVPVATAAPTGTSADVLGTSHDPVGHASFNIQPPVFYQYPSFRSSFGQSITDLVGRSRKSDALNILKAFDESTSEAQSYAQKAVKYSTISRDLMAKAHHECYTGIQKLIADAIVEKRAAKERRRKVKNDPRAGAGAGTSSIAPEDQSRGGDGEEIIRSPVAIDPRAGA

SEQ ID NO: 75726 - protein, 157 aa, Zea mays
  Coding DNA Sequence Number=SeqID_33947
  Gene Ontology: Mol. function=sequence-specific DNA binding; Cellular component=nucleus; Biological process=regulation of transcription, DNA-dependent
  Homolog annotation: Hit_ID=Q2QM96; Match level="QueryCoverage=51%, HitCoverage=9%, E-value=2e-26, Identity=72%"; Hit description=Class III HD-Zip protein 4, putative, expressed
MYEMHPALFLKTGCYMHPQRDANNLAGLLAIAEETLAEFLSKATGTVVDWVQMVGMKPGPDSIGIIVVSHNCSGVVAQADQGLVPEPQIIPDRRSFLEKQTKRGPFGPLRRTVRDTRMTLGQNQCKNPSLHYGPSGGQASTVRDHARTVWPQARTVR

SEQ ID NO: 75727 - protein, 238 aa, Zea mays
  Coding DNA Sequence Number=SeqID_33948
  Homolog annotation: Hit_ID=Q2QM96; Match level="QueryCoverage=21%, HitCoverage=5%, E-value=2e-12, Identity=76%"; Hit description=Class III HD-Zip protein 4, putative, expressed
MSRGSALTGHKVEELAAIGPSLGADHVNTSAGEEDVENDLSTQYHPTCRVVVLARSPLARPSLNFDSSSFHLLLFLSKSPLKLVLSVLLNRFLDLNKPGTKIRKITKHGGFCWLMVIGDHMLLLLAIAEETLAEFLSKATGTAVDWVQMVGMKLGPDSIGIIAVSYNCSGVAAQADQGLVPEPQVVAHFGASWCVMSLSMNYKFEELAQTHPEVLFLYVDVDDVQVSCLGFSYVLSDS

SEQ ID NO: 75728 - protein, 127 aa, Zea mays
  Coding DNA Sequence Number=SeqID_33949
  Gene Ontology: Mol. function=protein transporter activity; Cellular component=cytoplasm; Biological process=intracellular protein transport
  Homolog annotation: Hit_ID=Q2QP84; Match level="QueryCoverage=93%, HitCoverage=17%, E-value=2e-51, Identity=70%"; Hit description =Vesicle tethering family protein, putative, expressed
MARYLMTGGFPILLNILKEDREDVELVRGALETFVSALTPIETSQGPNTEVQPALQEAILLIPRGITVLMDMLMDREVIRNEALLLLTYLTRDAEEIQKIVVFEGVFEKIFSIIREEGYSDGGVVVQ

SEQ ID NO: 75729 - protein, 253 aa, Zea mays
  Coding DNA Sequence Number=SeqID_33950
  Homolog annotation: Hit_ID=Q9LU25; Match level="QueryCoverage=40%, HitCoverage=22%, E-value=7e-34, Identity=62%"; Hit description =Arabidopsis thaliana genomic DNA, chromosome 3, P1 clone: MYA6
MARYMKTGGFPILLNILKEDREDVELVRGALETFMSALTPIETSQGPNTQLQSAESCNKDVSIVHVDMHNYSLDEKIRMTLEAHIVEKTDEEATNQQCSGCRATPHIWTASVCVSNLFSTKKLFKQKDRITEKDVTVMRLSGGGHSCFRDSDKARLRFKRKFWEKVVEIDDLCGKDGAWWGIKGYMRDNFNHSNKVTSQKEHFQNSRLVKFVLDMYWELRPVTGSSLTHQTRYDPTCAVDPSLKMVTTPCFEA

SEQ ID NO: 75730 - protein, 193 aa, Zea mays
  Coding DNA Sequence Number=SeqID_33951
  Homolog annotation: Hit_ID=UPI0000E467A0; Match level="QueryCoverage =84%, HitCoverage=33%, E-value=4e-07, Identity=24%"; Hit description =PREDICTED: similar to P1725, partial
MGSSSKQQEINAPLDKDEVDKAPEKEEEINKAGEKDENWISMIVRKISLVPKNLSLGSSKEEIKSNLKSIKEMEKDRQINKILELESRMKRVDQDSDKLLDNDCEERIEEMIQSLLESGTEKEDEGPLDKEKKIKEEKNYTLRKKEKNSTNIRCKLNKGTTLAQKQQKSATSSPKNNEGINPEYGITQQVLPD

SEQ ID NO: 75731 - protein, 83 aa, Zea mays
  Coding DNA Sequence Number=SeqID_33952
MAMMGPTSKKMYLCQVPNFGFEMIKLRPGSTLVSISAKTESLNIEKPYLDSHITSIPLRVFFFSRVRLAEYSILRVYPFVVFR

SEQ ID NO: 75732 - protein, 115 aa, Zea mays
  Coding DNA Sequence Number=SeqID_33953
MCSTWYRRGPSVVKKQKSRGLCATVSEIEHEEETVVEEEVVSQAENPLAENNFYFNICEVDPEPPTTQGQAPQKVMLHTGWEFYKGKNYDGGSIMAMMGSTSKKKYLCQVPNFGL

SEQ ID NO: 75733 - protein, 201 aa, Zea mays
  Coding DNA Sequence Number=SeqID_33954
  Subcellular localization annotation: CTP_CleavageSite=97; ConfidenceScore=5.29e-01
MHKGSAKTWLPFKGVTLLLKATLPTYQRVKGQTAKQAACNRTKWAHPFNSNASSMDAQAHTSCGRKQRSRRQPSSRPLLGQRENPLPQREGGAPVFRSSNGSRTRNGCPANHSSRRINFAAGQAAPLAGEAGDASPPTISYPFPLPLSLSYNRDRERGYPERDPYPRRKRAPSPLLIRGSKAGPSEGFNSYLRPLGLRAHY

SEQ ID NO: 75734 - protein, 101 aa, Zea mays
  Coding DNA Sequence Number=SeqID_33955
MASPVRAELASGQGARGGFDGARRAEAARVERRSPEQGLPGEAALVERRLPEQGLSGEVMELPLDAQSSGRRLDVDERVEQCRAVAGVLHVLARFVQVLQM

SEQ ID NO: 75735 - protein, 122 aa, Zea mays
  Coding DNA Sequence Number=SeqID_33956
MGFGVRGEETVPLSSPPGITFSRMVADPDAARPHHWSTPQGGGEMASPVRAELASGQGARGGFDGARRAEAALVERRSLEQGLPGEAALVERRSPEQGLSGEVARRLRSAMAGRCMNDAGAA

SEQ ID NO: 75736 - protein, 86 aa, Zea mays
  Coding DNA Sequence Number=SeqID_33957
MARLGLASGGQGDSLSRNEPRRLGANEVGRALYPAARPNLLLVPRIRPRITAAIPAESVLCGMVKTTYRPRYPTQRLVELVVVVKI

SEQ ID NO: 75737 - protein, 307 aa, Zea mays
  Coding DNA Sequence Number=SeqID_33958
  Homolog annotation: Hit_ID=Q6QP54; Match level="QueryCoverage=41%, HitCoverage=32%, E-value=9e-19, Identity=50%"; Hit description =Putative kinase
  Subcellular localization annotation: CTP_CleavageSite=27; ConfidenceScore=5.08e-01
MPQSTDSAGMAAVILGRIRGTRRRLGLAAGYKALPTSFAPSLRGSLRLRESPWPPEANPSRAIDCASTVDLPSHLRSVPVGWHGITTTRRGHRVLPQLARIWPTVGTIPYQSRGSAIDLGAAASIVERLCASISEDGELCSARPRARTWAQPQKTTNSASPDPRGSDSALASAVGLRLARPRGSDSTSAMEDRLDLGFGGAYTSPNLGRRPATSTRGAIITLPRADSGHGNKTGVPSGSLRQIGNNGAPHTLRRRRLSAPLRKQEDVSKDSTAPTAVPPPGSGTPPTATTSHQLGAKISPAATTACT

SEQ ID NO: 75738 - protein, 124 aa, Zea mays
  Coding DNA Sequence Number=SeqID_33959
MGRRPFIFGRSAEEHYWDDGYFGYVKQKDDSGMPWNLRGTYLGAKIYGAYLGAIVLGAEILSKFRKGPLTGTAFDPLHLPTGVPVPMCFCGDPCKVDKSEDHDTYRQRLLHRYVILSSGLKVGC

SEQ ID NO: 75739 - protein, 168 aa, Zea mays
  Coding DNA Sequence Number=SeqID_33960
MRLQEIGAMVLPMWTQRMSRRGKSAKQRKGPLTGTAFDPLPLPTGVPVPMCFCGDPCKVDKSEDHDTYRQRLLHPLYDFKQWIDTEISQKYKKWLENLKKWDAEDKERMEKRQEELAAEQQREDEQEMRRVAECREEKEKKLEHARRAKEAMENPDAFRKGKWPRCTQ

SEQ ID NO: 75740 - protein, 163 aa, Zea mays
  Coding DNA Sequence Number=SeqID_33961
  Gene Ontology: Mol. function=protein phosphatase type 2C activity
  Homolog annotation: Hit_ID=Q2HW33; Match level="QueryCoverage=81%, HitCoverage=54%, E-value=5e-12, Identity=43%"; Hit description =Protein phosphatase 2C-like
MVVANVDDAITPSSSSSTLSPTCHPNQESSVLVMSCAFDDYYIENCGIILAPEATQRRIDNSDQFVILATHEALALASLIDDEKKLVDCQFDLWKQSYVAACAAMYGKLRRSRRLDAVQSGCTTLSIVKQGDLMVVANADDSRVVLGIATDDGAITPSSSSST

SEQ ID NO: 75741 - protein, 75 aa, Zea mays
  Coding DNA Sequence Number=SeqID_33962
MATTLGLFWAPQPTTAPSRRSAHHPPEAQPAIQESSVLTMSRMFDDYYIKDCGVISALEVTQRRTDNNDHSPSSR

SEQ ID NO: 75742 - protein, 284 aa, Zea mays
  Coding DNA Sequence Number=SeqID_33963
MAPGEAVELGGWRNHSRAADSAPGAALDALDASTGRGRRAAGRAISTQQSCTVLWDVDAGVGRPSTGRAVAGSRALDAAVAAAGMWTTTTARLDGSRQRPAGSGCWEPEPGMWTAGDVLDAPCAAAGLAGLLDGEFEMEGATAGHSPPDLNHLMGLLFNSGTGFGLIGFGFGFFGFGIRNLETPSLVARTPHRGVRDPYQGSGSYPWRFWTLPEGPVRIYGGPTLSMGSGPTVDTLEDIVFSGHVAALELSTWWDRVLFTTRLEIAAWTPRLHAVVRGTPVSGY

SEQ ID NO: 75743 - protein, 58 aa, Zea mays
  Coding DNA Sequence Number=SeqID_33964
MATSALGAIAYVVELCYVGAIAYGTDLEESCLNLNSVGTLKQGYPYYSMKTRCPRGYL

SEQ ID NO: 75744 - protein, 109 aa, Zea mays
  Coding DNA Sequence Number=SeqID_33965
  Gene Ontology: Mol. function=endonuclease activity; Biological process=DNA catabolic process
  Homolog annotation: Hit_ID=Q9ZR88; Match level="QueryCoverage=78%, HitCoverage=34%, E-value=4e-20, Identity=50%"; Hit description =Bifunctional nuclease
  Pfam annotation: Domain name=S1-P1_nuclease; Domain location=1-109; Score=-114.5; E_value=0.00017; Accession=PF02265.7; Description=S1P1 Nuclease
MVLYTYNYDGDYKDKDGVKGLCVVGAINNYTSQLPTYERSSPPECNVATQLLPLHVGFTSDKGGNTVDFHWYARKTVLHHVWDASIIQPTEDDFYGDRVAGYIDTLKKT

SEQ ID NO: 75745 - protein, 175 aa, Zea mays
  Coding DNA Sequence Number=SeqID_33966
  Gene Ontology: Mol. function=protein dimerization activity; Cellular component=nucleus; Biological process=regulation of transcription, DNA-dependent
  Homolog annotation: Hit_ID=Q9LLI9; Match level="QueryCoverage=54%, HitCoverage=8%, E-value=4e-43, Identity=95%"; Hit description =Cellulose synthase-1
  Pfam annotation: Domain name=PHD; Domain location=87-136; Score=0.5; E_value=0.05; Accession=PF00628.19; Description=PHD-finger
MPGFAPYSRRSDRVSDFPTDVGAVGLTGRDPSSYGRLLVWFADQNGDGGGLTQPQRVRHDPPRRRCAGPAMLPLRRAKPTKSANGQVCQICGDSVGVSATGDVFIACNECAFPVCRPCYEYERKEGNLCCPQCKTRYKRHKGHYKDKDGVKGLCVVGAINNCTSQLPTYGRSSPP

SEQ ID NO: 75746 - protein, 403 aa, Zea mays
  Coding DNA Sequence Number=SeqID_33967
  Pfam annotation: Domain name=SlyX; Domain location=313-380; Score= -8.2; E_value=0.054; Accession=PF04102.3; Description=SlyX
MTSPEARDRLHRTSVARLRAWTKLSGKIRKVFESHEQTSYTDGEYVLIPEQGSVQEEDQEQASEDTVEDLPAAPAIEGKPRYGGYKCGHCTAAAGVSGALYAKAVPFKKWLMMNSPTPASGGDTRFSSDFLSRDGFPSILWEVLNFAGYPTPPLYTVQLYEEHRVPRCRVWLTLEAHPLQPGWRSLDSETIGLRTDDTVEAAAMKTLTTFCGYHPLEMVMHPLELFPAEKKDDPMWCNYVSHVKDVWAMYPDLVGRVTVQCMSALYRLQALQSDAMALLANTAQTAKLTLDSREDFVVDLSTELVEKDLQVERLSQRITTLEQQVEIRDNTIDVLENQLHNVQRELEEANDHLDMHHLEMEANEAGSEGEEAPEELGPAPGAHGTTSAMPPSPVSSVASIAQG

SEQ ID NO: 75747 - protein, 109 aa, Zea mays
  Coding DNA Sequence Number=SeqID_33968
MAHRRAWSTRAGGRPKSGEVDPGLPVKSCRVRELGKLHGPLAELAEALARLRGGWSGLATVAEALAVVAGGKELAGAKEGWLAGDEIWSPEIRSVSLLKPEANPGFCRV

SEQ ID NO: 75748 - protein, 57 aa, Zea mays
  Coding DNA Sequence Number=SeqID_33969
MAGEKELAGAKEGWLAGDEIWSRKPGLSPCSNPRQIQGFVVSRARVPMPSSGTRQRG

SEQ ID NO: 75749 - protein, 367 aa, Zea mays
  Coding DNA Sequence Number=SeqID_33970
MRKTIQVDPKRGLIRKMKLMDQPEDAALAGFFSAELVFYAPSLGVFKYQRSASIPFNGAHRNLPSRSRSCPSSSTSPGCIFLMTLLHCVPPRRSAARSLAPLRRSPVPFPQARVPLLLFPYRAAPWLAEFPCALWSSPLQAPMAPSSPSSDDAQLPAFPLSSLFPGHASSEPSLLPISIAAPLKLGRELSSSLVRGSLLAPGAARAALRSALLLPARVNQLGPSALTFACRSASSPARPLPPAKVVAPISLALARIPLGALTPAPRAASSLPISLLGKLPCELQLGFFSLAARFLRLSPVRSTSGSGVELCFGVLGGSSGADGFSAVTPGGGTLLLGGSDSFGNSNVGARQALNKRPETKVRRHRSR

SEQ ID NO: 75750 - protein, 91 aa, Zea mays
  Coding DNA Sequence Number=SeqID_33971
MRVTCVELQSPCRALPLKAAFEHNPCHVFDGKSEPMLIVDLRLSNHSGHGTLINHVIRKTIQVDPKRGIIRRIKLMDQPEDGQWSEYQNKG

SEQ ID NO: 75751 - protein, 194 aa, Zea mays
  Coding DNA Sequence Number=SeqID_33972
MVVEGCQSPLGCTPPTAAGRRQDQRHHHERTFSDGEVAGRDDLDADPSREHRRTPSGGPEGERARWSQEERGMSTALGIDPFLKADPPLAPLKCHRTSAATRGSPAHGPTVPLRTTVTGQSAVGIGTAAGMIIGGPTVIATTGTRKQRSNHQSDSGPTYKLASSPDAGPGPLSVPRIRGTLSYSMKTPHPCDVP

SEQ ID NO: 75752 - protein, 162 aa, Zea mays
  Coding DNA Sequence Number=SeqID_33973
MAPTIGVEAEAAREVPVTDGITTTIRASGLRFFVLVLAPRASVGARANSPVDYLNRFTKHESPCVKVMSEHEQRRSWLENENLVGRSLTGLSVSGADAGVDQPRPRIGLAPLEDGWPRPQGSPWTASPSEAGSDLAEGVVDAEGATAPFQREDPSLQDQIVL

SEQ ID NO: 75753 - protein, 239 aa, Zea mays
  Coding DNA Sequence Number=SeqID_33974
  Gene Ontology: Mol. function=aspartic-type endopeptidase activity; Cellular component=lysosome; Biological process=sphingolipid metabolic process
  Homolog annotation: Hit_ID=Q42456; Match level="QueryCoverage=77%, HitCoverage=38%, E-value=1e-78, Identity=74%"; Hit description =Aspartic proteinase oryzasin-1 precursor
  Pfam annotation: Domain name=Asp; Domain location=22-209; Score= -198.0; E_value=0.065; Accession=PF00026.14; Description=Eukaryotic aspartyl protease
  Pfam annotation: Domain name=SapB_2; Domain location=30-77; Score =34.2; E_value=4.6e-07; Accession=PF03489.7; Description=Saposin-like type B, region 2
  Pfam module annotation: Pfam domain module=Asp::SapB_2; Domain location=22-209::30-77
MADSGTSLLAGPTAIITEINEKIGVAGVVSQECKTVVSQYGQQILDLLLAELCGNSTCYWVILQTQPAKICSQVGLCTFDGTHGVSAGIRSVVDDEAGKSNGGLKSDPMCNACEMAVLCERLPSPMGESAVDCGSLASMPDIAFTIGGKKFKLKPEQYILKVGEGQAAQCISGFKAMDIPPPRGPLWYFRIQNYGYEARPGRRLSQTKVGGSRSCTQGSFGAMAQGGTDLKMKRLRGPQ

SEQ ID NO: 75754 - protein, 290 aa, Zea mays
  Coding DNA Sequence Number=SeqID_33975
  Gene Ontology: Mol. function=aspartic-type endopeptidase activity; Cellular component=lysosome; Biological process=sphingolipid metabolic process
  Homolog annotation: Hit_ID=Q42456; Match level="QueryCoverage=99%, HitCoverage=58%, E-value=1e-137, Identity=77%"; Hit description =Aspartic proteinase oryzasin-1 precursor
  Pfam annotation: Domain name=Asp; Domain location=1-289; Score=83.8; E_value=5.3e-22; Accession=PF00026.14; Description=Eukaryotic aspartyl protease
  Pfam annotation: Domain name=SapB_2; Domain location=106-153; Score =34.2; E_value=4.6e-07; Accession=PF03489.7; Description=Saposin-like type B, region 2
  Pfam module annotation: Pfam domain module=Asp::SapB_2; Domain location=1-289::106-153
MVKQGLISDPVFSFWFNRHADEGEGGEIVFGGMDSSHYKGDHTFVPVTRKGYWQFNMGDVLVDGKSTGFCAGGCAAIADSGTSLLAGPIAIITEINEKIGAAGVVSQECKTVVSQYGQQILDLLLAELCGNSTCYWVILQTQPAKICSQVGLCTFDGTHGVSAGIRSVVDDEAGKSNGGLKSDPMCNACEMAVLCERLPSPMGESAVDCGSLASMPDIAFTIGGKKFKLKPEQYILKVGEGQAAQCISGFTAMDIPPPRGPLWILGDVFMGVYHTVFDYGKLRVGFAESA

SEQ ID NO: 75755 - protein, 735 aa, Zea mays
  Coding DNA Sequence Number=SeqID_33976
  Gene Ontology: Mol. function=cysteine-type peptidase activity; Biological process=proteolysis
  Homolog annotation: Hit_ID=Q109R5; Match level="QueryCoverage=58%, HitCoverage=47%, E-value=3e-62, Identity=30%"; Hit description=Ulp1 protease family, C-terminal catalytic domain containing protein
  Pfam annotation: Domain name=Peptidase_C48; Domain location=123-294; Score=-29.6; E_value=0.09; Accession=PF02902.9; Description=Ulp1 protease family, C-terminal catalytic domain
MVKNFGSKTVQIAVNAVVTSHLLVCLYSAAESEDSKVSVGNAAKQSHDVVGVGIDCIFNHVKVSTEADLGPQPDVIHLTSLDVPNESSQISSDADMCTPEDVQLIEYIKTLPGKQVVVNIDSAWLNRNDMECLFHGDMQLSDKALNAYIHCIRGEEHLLHREGGKVFLENTFISSLLKRDGDPKVFLPMNIEDFHWYLAVLNAKKSELKGLERQIKLAAKHKELYQGKWSNLDVASWPVIEKITTQMQTDGVSCGLWMINYMEYWTGSSLSDNVTQDDITMFRFKLPAILWDSRLNTKKGHQNLDHNMDEDGESSSDVQIIDTPLTSTNTQELMFVLCTYIMGIDNDKYLKKHWIQSTKPYPISLSLQKLKDILDVNKPMDTDCFNMVVRMIACNDVLFLLEDKFHYMDLQFCSITKFGRDPRLRAKPDINMLAKLLECWPDMEYDVSDCKQILLPFSFMGHFTLYVLNMDTRSIYIMDSMPIPSWFKGDHPSMHYIHNIHYIANNMNAAMELANPTWKDDIYMWRRLVPTWVPRILNWDLSGFLVINFMHDWNGIRLPCICTHCSLSPLPAYEPAFDWENERSLIFGQRVPESIPAISNSGLKITVKSVCVKMIAAGAEHTAAVTEDGDLYGWGWGRYGNLGLGDRNDGLLPEKVSSVEEEGKIMNTTQCFSDPVFSFWFNRHADEGEGGEIVFGGMDSSHYKGDHTFVPVTRKGYWQFNMGDVLVDGKSTGTV

SEQ ID NO: 75756 - protein, 133 aa, Zea mays
  Coding DNA Sequence Number=SeqID_33977
MGKSKKGSGSSPRSGDKRKREPTPPSEDFGDSEYSEEEFSSESEGYPAPVSPPASSDDSDDSQGIAAEVWTYIRAAERSGLEGSDESEYSSDEEDSSDSSEEDSDNDGGDGGGDSGSNGGHGSGNKGSNKASG

SEQ ID NO: 75757 - protein, 138 aa, Zea mays
  Coding DNA Sequence Number=SeqID_33978
MGKSKKGGSSSHHSDDKRKREPTPPSEDFGDSEYSEEEFSSESEGSPGFAAERTGLEGSDELEYSSNEENSSDSFEEGVGGDGSDGDDDGGDGDGGEGDGNGGDGGGKGGSGDGGNGSKGSNRGSNKGSSKGSNRASG

SEQ ID NO: 75758 - protein, 325 aa, Zea mays
  Coding DNA Sequence Number=SeqID_33979
MRGPRGKDVFARAPGVFGTDAGGSGEGQLVVVPPALATTASTAVQGVKGGAFNAGGEISAATAVKDEAGTMSRRLREASQQLSQQLSQAADFADHVASGALTADVSTEVERLRAQHADAVREKSAAESKSRRLEEKVAALEGERTDLRRQLVEERREANQSIAKAQAAQAEAKLARAEGSLASQRAEEWEVRFNALHARMERAEASTCSEVERTRNQLVDSYRELGARTADFEVPDREAGLRFLEWLQEELLALPTIMEGFMSFASLVTCEGAMNALSREGCNHYEGFDRSDEDFGREIFKVEDPVVKDSAGALFDRMWGPHGRE

SEQ ID NO: 75759 - protein, 731 aa, Zea mays
  Coding DNA Sequence Number=SeqID_33980
  Gene Ontology: Mol. function=cysteine-type peptidase activity; Biological process=proteolysis
  Homolog annotation: Hit_ID=Q53MK8; Match level="QueryCoverage=21%, HitCoverage=16%, E-value=2e-16, Identity=33%"; Hit description=Ulp1 protease family, C-terminal catalytic domain, putative
MKNVDRPPSNPKRIIIQSTQECFSVDIPRVLAETVRQKTRQAADEDDDFMPLSKKRNMDDSPPKVLKKIVTKRRKVVDPPPPDRCKCLRYSLYTFFQQRLNVRCNPQDVLVSIQILNDRQRQAIARRGFSSILDMRVDALGSRSHLAWLMEKLDHNDMTIRAGPRKELKITKDAVHLILGLPNAGGGTALGIDEAIAANNLRAELGLSKEDFGVAALQDRLRKGSDDDLSIRSFFLILFNRLLFPTASWGITNHELYYLDHLHDSATPQNKRGTPRIKYFDRNIIQALTRADKGKHTIHIELPLIRDLISSKLNQLLSRHRLGFIEKLSHYDTELIDEVLRAESGDNEDGYDVQKTTTKSDDILPQTAESCPDEADIHPLVQTNVTKQIKTPTTPVGKHGDGGKNMPINTNVTPKATPHTKSSAPIFDATPQIKSTGGVQQAAETDLPDSGPCFDQTPSEHVPVETDPATNTPQVEQVSLDSEMQTMLALREYLCGTQSDTSRTILDYGEYSSTCSDIYESFADGKCLNNVFMQCFIQCVDHDAKNQQPSMSSNRLILDVNVGSLLNFEEQERHSRNPQPFDESVLHTLLDNALPETDEMDKCKAIMVPMVSRGHWTLYVVNTVKKCIHILDSNPYGATLGGTTWKDYHFAGLDLGGRNIPWAKVIMSRLNKAIQHVRLRTCFPKFGNFTVGLCPNCPNMLAGSNDCRFYVMGYILFYDCVEGSLRSDIEA

SEQ ID NO: 75760 - protein, 66 aa, Zea mays
  Coding DNA Sequence Number=SeqID_33981
MAAVSNDCGFYVMGYILFYECDEGSLRSDIEEGNTSEIRSLALHYITFHPKNKALSLLQDIQRFKV

SEQ ID NO: 75761 - protein, 113 aa, Zea mays
  Coding DNA Sequence Number=SeqID_33982
YVLVPEQGAAQEVAPDPAPEPAPEDLPTTALEGKSRMKIGIRIKIALLTRPETWSPIPGYGGYKCGHCTTTVGVSEALYAKADMVAGVTWPSILPPGWTVEWEPTSAEEEHEE

SEQ ID NO: 75762 - protein, 128 aa, Zea mays
  Coding DNA Sequence Number=SeqID_33983
MAEPCWAARATLASCEIAQGSNSHAAGRANRSLATVPRIMPCRGHAPHQLSRASQPWRAGHAWPLGGPPRRVPGAVPAPAGHGPPRAGRSWRLPNEQVQEERIARKGNNYSLRLSKDKEKNKMSKIGA

SEQ ID NO: 75763 - protein, 135 aa, Zea mays
  Coding DNA Sequence Number=SeqID_33984
MGQGEDSWEERCSRSTEIILEDPLDFKWWSFLTKGKLLSKVVEGQGEDQDMQDRDTSIIKDEPEVRIVTGKGEDASKVRIGKTPFSSRDGKDDNSKGVKEGGAINDEIDEALSPNRDGNEEASKGRFNVSRKARE

SEQ ID NO: 75764 - protein, 277 aa, Zea mays
  Coding DNA Sequence Number=SeqID_33985
  Homolog annotation: Hit_ID=Q8TGM6; Match level="QueryCoverage=27%, HitCoverage=62%, E-value=2e-08, Identity=51%"; Hit description =Protein TAR1
MAHLELPIPWHGSPKQPRCPTYLKFENRSRALRPRCLYSLALPDRTRVGSSYPEGNFGGNQLLDDGSDGELAGRCGAAPRGACQRRADTVRADDGCRGRLGPPGLWPPARATTVHAPSRSADQQEPFRIRPGRVASPHPLPSRQFQALFDSLFKVLFIFPSRYLFAISLSPVFSLGRSLPPDLGCIPKQPDSLTAPRGAIGSGPDGALTLPGVPFQRTWARSVAEDASPDYNSGDEAARFSSWAAPGSLAVTRGILRVVPTDLVSRSEGKLGRSMGP

SEQ ID NO: 75765 - protein, 184 aa, Zea mays
  Coding DNA Sequence Number=SeqID_33986
MAIWHARSEGEGEREGRLNPANHRVFERKLRPKPSGGGHVCLGVTPKDTPNTPPRGEGRGVWPPTSQGEGSGWGLATRPGRMRNGSCWSADRLGAWTVVARAGGQSPGALGAPGSRRRRGRYPRASGAPLGALRCNGLRAPHPTRLETWTKESDMRASRRVQKPEMRKEADEREALTGRTAGRP

SEQ ID NO: 75766 - protein, 169 aa, Zea mays
  Coding DNA Sequence Number=SeqID_33987
MGENPANHRVFERKLRPKPFGGGHVCLGVTPKDTPNTPPRGEGRGVWPPAPQGEGSGWGLATRPGRMRNGSCWSTDRLGAWTVVARAGGQSPGALGAPGSRRRRGRYPRASGAPLGALRRNGLRAPHPTRLETRTKESDMRASRRVQKPEMRKEADEREALTGRTAGRP

SEQ ID NO: 75767 - protein, 109 aa, Zea mays
  Coding DNA Sequence Number=SeqID_33988
  Subcellular localization annotation: CTP_CleavageSite=81; ConfidenceScore=5.42e-01
MAPEEISLNSSPAGPPIGSGRGRGARAGGQSPGALGAPGSRRRRGRYPRASGAPLGALRRNGLRAPHPTRLETRTKESDMRASRRVQKPEMRKEADEREALTGRTAGRP

SEQ ID NO: 75768 - protein, 280 aa, Zea mays
  Coding DNA Sequence Number=SeqID_33989
MGGSEPGSFAEKDPFRATGAPVARRVGLGSRLACQESEKRVHLARLHAACMAARPFCPLVWAKMGVASSGLPVFQAPGWGVSAAFPPPRWRNATPWELVPLSHRSASRIFITQPGRTPSPAVTRDGDLQLDGGGKRAGLRPLPLPQPQGFSSPRPGRGECRVGVGPCVGGGPLLHSVMGGEAGIARGVRQLQRAWSSAASGFGATCGVGVCHGSRKRFFRRRGGRDRPRADLQLLRPSARPCLTSFGTGGSLLAAASTLRSALPLFGPPEQKSPSSPLLE

SEQ ID NO: 75769 - protein, 129 aa, Zea mays
  Coding DNA Sequence Number=SeqID_33990
MAERYQLPWSCVPPTRRRKGGGYPPSGGLEYGKTRRLREEEDMTNGQKGRAALQAACNRARDRERGMPRKGSFSAKEPGSEPPTTDQGFEGWPSEGFNSRLRSRGPDTHYWLAPEGFTVASDTERGMTR

SEQ ID NO: 75770 - protein, 350 aa, Zea mays
  Coding DNA Sequence Number=SeqID_33991
  Homolog annotation: Hit_ID=Q6QP51; Match level="QueryCoverage=24%, HitCoverage=30%, E-value=1e-17, Identity=71%"; Hit description =Putative growth-regulating factor 1
MKILEAEGGAEAAAQLASPHHRTGGHRLGTEEVEPPRAERTTAQRLQAFLHYRPDQRVKGRTAAQAACNRTKGTHPFDFDASSMEAQAHMSCNRLVDYHVRETAPPLAPVPRLLDCGTGAATRGNPAHDPTVPTEHISHGSVSRGRRRDGRYSQKWAGINGGGRRAKAAVKSDRERGHSERDPSPRRKWAPSPPTDQRFEGWPLGRVQQPPQSTRAPSPLLIRGSKAGPSEGFNSRLRALGLRAHYWSEVQRLGPRKGSTAASGHSGSAPTTDQGFVGWPPKGSTAASEHAERGMTLESHQREASSPRTPSKGDRVRQITRRGSGAALANPAPTKPLTASTYQPENLGPD

SEQ ID NO: 75771 - protein, 320 aa, Zea mays
  Coding DNA Sequence Number=SeqID_33992
MTTSSMVGRSKPGCDLCPTLSFNSAEEAPSSHAGESELLLPSQGRSHSRFHGEDGSEDLPVRFGAAGARWCGVGGQVDAAAGAEVVAAGESFSADETVSTTRGLTSGSLALMSGSRPSSGDTNESLPVVASALGPSLLLQRSPASHQEFVVSQALQCGGCSYPREWNQSSVCNGTLSAGESLGLVGLATQGFSCLVKGKPRLLCDEPEPEAARLEPGQVVHWRHQPWSRAAEAMSRADVLGDPPTVSPSEVGPDSAEGGVDAEGAAAPLLMSEPDLFVGSRIAYPSESCLSREVMSEESLGSVGLAAYVYSVVFRIPLSK

SEQ ID NO: 75772 - protein, 188 aa, Zea mays
  Coding DNA Sequence Number=SeqID_33993
  Homolog annotation: Hit_ID=Q5EXM1; Match level="QueryCoverage=21%, HitCoverage=18%, E-value=4e-09, Identity=73%"; Hit description=Pg4
MWSVATLQFYGHLVLLVIVGSVAYATVLSRANRPPERVQCCGQGVEIDPATITDQMEVKRRVQSGNVQKAIEKINDLNPTILARRDSNFKCSIIFDKKTFHIMHTPLFSPSSDVPFVFPAFALFFLPNLLSSPTVAAASQPKLVDVGTGRVGHAPSLSPCVPSRRTWWRLSRLGYLSDEESRPEILDN

SEQ ID NO: 75773 - protein, 153 aa, Zea mays
  Coding DNA Sequence Number=SeqID_33994
MMVLASVVTTSFVILLLFSLLSCLHLRATPFSVEDVGAGASSPYSSDTSPDTDSRSGYCTFTGTFHIMHTPLFSPSSDVPFVFPVFALFFLPNLLSSPTVAAASQPKLVDAGTGRVGHAPSLSPCVPSRRTWWRLSRLGYLSDEESRPEILDN

SEQ ID NO: 75774 - protein, 127 aa, Zea mays
  Coding DNA Sequence Number=SeqID_33995
  Subcellular localization annotation: CTP_CleavageSite=27; ConfidenceScore=5.03e-01
MMVLASVVTTSFVILLLFSLPSCLHLRATPFSVEDVGAGASSPYSSDTSPDTDSRSGYCTFTRTFHIMHTPLFSPSSDVPFVFPVFALFFLPNLLSSPTVAAASQPKLVDADVQVFVVSFSGNAQRH

SEQ ID NO: 75775 - protein, 338 aa, Zea mays
  Coding DNA Sequence Number=SeqID_33996
MKTPHPCDVSRPRGGRRLTPPHGQAKGRHVARKDNTSQYVSWGGVKVIQQALGLLANSTLGKEAVVSELSKVLLSVTTTFAESRTLDTGIHSAKGGSRQRVVSRRLKLTAVTFAESRVLALRKEFSLLSAPRLTLDRASFVECPRWTPGKKAVVSELSKVLLSVTTAFAESRTLDTGIHSTKGGSRQRVVSRRLKLTVVTFVESRVLAVRKEFSLPSAPRLTLDRASFVECPCWTLGKEAVVSELSKVLLSVTMAFAESRTLDTGIHSVKGGSRQRVVSRRLKLTAVTFAENRVLALRKEFSSLSAPRLTLDRASFAECPRWTLGKRLALGKGNDHQL

SEQ ID NO: 75776 - protein, 63 aa, Zea mays
  Coding DNA Sequence Number=SeqID_33997
MVSHSGYDGYKCGHFTTASGVSGALLSECVSTLNQGYPLLQHEDAAPMRRLQATRKTAPDPTA

SEQ ID NO: 75777 - protein, 56 aa, Zea mays
  Coding DNA Sequence Number=SeqID_33998
MDALNFEYPDYERFDKGAEDTRETTGDFLQVWAALRCVTPYFLVWIFMWWVTREVS

SEQ ID NO: 75778 - protein, 170 aa, Zea mays
  Coding DNA Sequence Number=SeqID_33999
MECREIIELAKHVSKRHEQTSKDGSPPRRRPGKERVDSGEVAAGEPDLGYQSPEGVLKDVFTGDSKSVSICSGMMTSELSSQACSLGPLYESRGSGSLGAGSKEQELVPWGGPEQCSRLVWFRTQSLHTPPLCDGHPSIWSYSPMGLTTWGPALENGYLSPGVVRSRVAT

SEQ ID NO: 75779 - protein, 52 aa, Zea mays
  Coding DNA Sequence Number=SeqID_34000
MELGLRLKGDVITFAFCKDTRRRVVERVGLWYGTRLSGYTAPDHPRRQVSIL

SEQ ID NO: 75780 - protein, 164 aa, Zea mays
  Coding DNA Sequence Number=SeqID_34001
MVCLGLGGRRKHTLQDNPILQARILTFEGSSSTLGVNYTIAARVFSRNPARADGSGRSPRSLSQPSPEDIGSICGLGNSTPASVPPVDDPVRLRPTKSSFRANSASVRADTATSGFGSSESGRGFPLTKQEKPRTARPTEPRDSYASGIRIPHSSPLHEATHAW

SEQ ID NO: 75781 - protein, 138 aa, Zea mays
  Coding DNA Sequence Number=SeqID_34002
  Homolog annotation: Hit_ID=Q6QP51; Match level="QueryCoverage=35%, HitCoverage=22%, E-value=1e-09, Identity=63%"; Hit description =Putative growth-regulating factor 1
MVCLGLGGRIKHTLQDNPILQARILTVEGSNSTLGVNYAFGEGPGKGDTPKRILLREGNRLRASLLIRGSKTGPSEGFNSRLRARGPRTHYWLEVRRPAPRKGSTAASGHSGSAPTTDQGFVGWPSKGSQPPQTQSEG

SEQ ID NO: 75782 - protein, 52 aa, Zea mays
  Coding DNA Sequence Number=SeqID_34003
MARVACTLRGKRLDGESLIIDKPYLDSLKASITLRVFLLCRVKKRQTFVASV

SEQ ID NO: 75783 - protein, 48 aa, Zea mays
  Coding DNA Sequence Number=SeqID_34004
MGVERCQHILESLLLCRVKKQQTFVASVQRWYPKMNNKTIAAGGKALH

SEQ ID NO: 75784 - protein, 299 aa, Zea mays
  Coding DNA Sequence Number=SeqID_34005
MPEAVAAAVSAWGIASGEDGVGARLRAVETAGTCWHSETGPKPMEGLPGATLCSLSYGHKEKEGTSGRHRFHRMGWRMFEYDDTQGGGGDHVLCKVHRSSSSLAKNKSKAKRTATGDHPEAPPTKVIHDVQDPAGAIFTGAYPTMDDPLMVGGEEASEADLGKFNLGDLLNIDNVDWKALLDYADGKQQQQQPCAEPAKQSSDVQVHVDPAATLMPYVHGHEQGEDSMMVGGEEEQRRRIEGFNVDDLFDVNNVDWKALLEMLGDDEEQGLPLQQQPRAEPAAEQSQSSRIEGPSVPPV

SEQ ID NO: 75785 - protein, 276 aa, Zea mays
  Coding DNA Sequence Number=SeqID_34006
LRAVETAGTCWHSETGPKPMEGLPGATFCSLSYGHKEKEGTSGRHRFHRMGWRMFEYDDTQGGGGDHVLCKVHRSSSSLAKNKSKAKRTATGDHPEAPPTKVIHDVQDPAGAIFTGAYPTMDDPLMVGGEEASEADLGKFNLGDLLNIDNVDWKALLDYADGKQQQQQPCAEPAKQSSDVQVHVDPAATLMPYVHGHEQGEDSMMVGGEEEQRRRIEEAFNVDDLFDVNNVDWKALLEMLGDDEEQGLPLQQQPRAEPAAEQSQSSRIEGPSVPPV

SEQ ID NO: 75786 - protein, 364 aa, Zea mays
  Coding DNA Sequence Number=SeqID_34007
  Gene Ontology: Mol. function=DNA binding; Biological process =regulation of transcription
  Homolog annotation: Hit_ID=Q8RV35; Match level="QueryCoverage=67%, HitCoverage=84%, E-value=2e-17, Identity=30%"; Hit description =Putative OsNAC protein
MAANDHVFRATNEASVALLRDLRAGTVDPRFKAFIHHADVYTAVPEELVADLEPVPGTDVTEDGYNRQWYIYCPKRYKNGEGRTSGHRLRAVETAGTCWHSETGPKPMEGLPGATFCSLSYGHKEKEGTSGRHRFHRMGWRMFEYDDTQGGGGDHVLCKVHRSSSSLAKNKSKAKRTATGDHPEAPPTKVIHDVQDPAGAIFTGAYPTMDDPLMVGGEEASEADLGKFNLGDLLNIDNVDWKALLDYADGKQQQQQPCAEPAKQSSDVQVHVDPAATLMPYVHGHEQGEDSMMVGGEEEQRRRIEEAFNVDDLFDVNNVDWKALLEMLGDDEEQGLPLQQQPRAEPAAEQSQSSRIEGPSVPPV

SEQ ID NO: 75787 - protein, 255 aa, Zea mays
  Coding DNA Sequence Number=SeqID_34008
MAGIARSTCAGGCPRRRRVCRPNYGDLVQSLGTWLARSTLADGRRESGDRGLASPAKQTPIPCSGSFTEVCSVFSEGRTGLGKAWLAGLRRQGLGWPRTRRARANDGEFELRVWLTLEAHPLQPSWRSLDSETIGFKVDDTTKAATMKTLTTFCGYHPLEMVMHPLGLFLAEKRDDPMWCNRVSQVKDVWAMHPDQVGRITVWCMSALYRLQALQCDAMAHLTNLAQTTKLTLDSREDFVVDLSSKLVEKDLQVE

SEQ ID NO: 75788 - protein, 120 aa, Zea mays
  Coding DNA Sequence Number=SeqID_34009
MAHLTNLAQTTKLTLDSREDFMVDLYSKLVEKDLQDYVGTMSRDNDGQNFYFQMAARQRRGQNEQYDQAFNDLCQYAGYHADSDEKKRDRFRRGLNTKLCECLNTVRADSFNELVNLAIS

SEQ ID NO: 75789 - protein, 151 aa, Zea mays
  Coding DNA Sequence Number=SeqID_34010
MARLRHAAQGRTTAIIGVLIGFYRGDTGNDGPSRDVVGPSPGLGEAEAPPRSRSSLSSEVEVESEPLGQARRRPSVEAEVESEPWVGRGGVRCLPGPSPSPSPGSGEAEFVVFRGRARVRALGRARRSSSSSRAEPESEPWVGRGGVSYGA

SEQ ID NO: 75790 - protein, 54 aa, Zea mays
  Coding DNA Sequence Number=SeqID_34011
  Homolog annotation: Hit_ID=UPI000065E45A; Match level="QueryCoverage =69%, HitCoverage=13%, E-value=3e-09, Identity=71%"; Hit description =UPI000065E45A related cluster
MARLGHAAQGRTTAITGVLIGFYQEFKWDDVKVDKHRENYLGHSVKAPVGRWQK

SEQ ID NO: 75791 - protein, 162 aa, Zea mays
  Coding DNA Sequence Number=SeqID_34012
  Subcellular localization annotation: CTP_CleavageSite=36; ConfidenceScore=5.31e-01
MSRLPSTPASTPVPTRDAGRAISALPQAAFNAVTTRGASREPSSPQILAAVDDHLPSTPASTLVPTRWLSSPTHSLSKCVRHPGPWADFGVKRLRLHGHIEGSIDDARAKPKVEDLVVPTSSHGAIGWCLPIHLAIHLFEREWVWAGGGSRYFLDVGTKRHI

SEQ ID NO: 75792 - protein, 226 aa, Zea mays
  Coding DNA Sequence Number=SeqID_34013
MAPSYANVMFRAQPLQEDDRSTHALRLCAFSLTQGWCLPHSTLPSTCSKGNGSGLVAAADTSSTSAQKGIFENYCDPGILVKAPSTQGTRSRLTRAQPRAKAADPGGFTSRPRIPSSNGRTFDSPEAQLGQASRRSNLGQIATPTDRIAGAFNENSAACAAPTAVPPVRVRLTAAKTGLRCHRKLRLARPLSSDSALTPEGGLRLARPQGSDSTSTSEDRLRLARP

SEQ ID NO: 75793 - protein, 164 aa, Zea mays
  Coding DNA Sequence Number=SeqID_34014
MRKWARPSPLLLMLLSCRSNIPLDRPTRWQGGRPSHTINYILHGTCKNGATSKAEYTNTQLDLTGYKESSSLISCEKQTIRIEFLNLARPHRLGIQCSTDPDCRRAVAALVPTIASMGDPVSGCMRDKVRARLHSGILPGSKSTDQHISHYQDEYNQFLTSREC

SEQ ID NO: 75794 - protein, 122 aa, Zea mays
  Coding DNA Sequence Number=SeqID_34015
MRKWARPSPLLLMLLSCRSNIPLDRPTRWQGGRLSHTINQILHGTCKNGATSKAEYTNTQLDLTVTALVPTIASMGDPVSGRMRDKVRARLHSGILPGSKSIDQHKSRYQDEYNQFLTSREC

SEQ ID NO: 75795 - protein, 88 aa, Zea mays
  Coding DNA Sequence Number=SeqID_34016
MDTAELQRRPGTELGTAGFTAAALWRARSEREVEEGGRLGVTKEDLAVPANEAQAATSMRPTEETKRINLGFADERKAAIISSSLNDK

SEQ ID NO: 75796 - protein, 209 aa, Zea mays
  Coding DNA Sequence Number=SeqID_34017
  Subcellular localization annotation: CTP_CleavageSite=62; ConfidenceScore=5.59e-01
MVKGYPPISAVGSDPKAESAAAVNPAVPSLVPGRRWSSAVSIATVSFASTRPPSPRAAVGVSVATRGVPGGRFEVARGPAGPPRPSSPASSPPRDGRRRLSWLGKETGASRPISAVHLRSDGPVSNSPNPASAVRLRSNGPEPFPPRPASLPTGPRLPVARARAANWAPPVSPAPSLPARPRLSAAHAAARPRARPQDLILVVRLRSNG

SEQ ID NO: 75797 - protein, 68 aa, Zea mays
  Coding DNA Sequence Number=SeqID_34018
MRVEWDTLSCFIRGTRGVVGFTVGPSMGSGHSTCSAEAGYVVRPYQVTLVVINGEARTPGRMGITACG

SEQ ID NO: 75798 - protein, 105 aa, Zea mays
  Coding DNA Sequence Number=SeqID_34019
MEALKQMKGGKVMAPDGIPMEYISPKEEWLTKPNQEPLQPASAEQVLYPDPIDGPTAKPTTPLGPLINQLRASHSTLMVALLSQVVTPQQVLTERYSGNSLSPLK

SEQ ID NO: 75799 - protein, 164 aa, Zea mays
  Coding DNA Sequence Number=SeqID_34020
  Homolog annotation: Hit_ID=Q8LR65; Match level="QueryCoverage=25%, HitCoverage=13%, E-value=3e-17, Identity=92%"; Hit description=RING zinc finger protein-like
MFINPCIYRKWEDSPFPPNGRTGTQSLQMAAKPDACGRRNPWSLSILQQFHILSHRIAHNDVALAGSMVAWRVGQQSRVSGCQERQSERARGDDPEPPVHALEMEHVRARQLPNLLLLPVLRKADAALLQLQFQTGFYKTAMLRDFKQFSSDHSFNMIAIMVLS

SEQ ID NO: 75800 - protein, 431 aa, Zea mays
  Coding DNA Sequence Number=SeqID_34021
  Homolog annotation: Hit_ID=Q2QVG9; Match level="QueryCoverage=29%, HitCoverage=14%, E-value=4e-62, Identity=89%"; Hit description=ATP -dependent Clp protease ATP-binding subunit clpA CD4B,chloroplast, putative, expressed
MELAASSSSSAAGCGDLEVHDANDAPGNRSYLMNKARAFLELFFAMWFVMGNVWVFDARLGSFQRAPRLSAASALRSTGRRRRFGSCRAHTCFISSAYTGGSGSSPLALSASKSSSELYIHYTHDILAYSLDQVPANKGNQGRIDLYISRRMQSLIKTTMQGLIMTRGFSAHMHQVSLPFAATVFQFDRLGKRQGNRICHGRRFPFLSDVDVLYSCIFGFNNMPLDAVCCQASYLQEINGLRPRGLFFLIMDSVSLGETNALAYFHYNCAIFLIQCCSKIKKWNTCSKGPKLGGGGGKRFQCIGATTLDEYRKHIEKDPALERRFQPVKVPEPTMDETIQILRGLRERYELHHKLRYTDDALIAAAQLSYQYISDRFLPDKAIDLIDEAGSRVRLRHAQLPDEAKELDKELRQISKQKNEAVRGQDFEKNL

SEQ ID NO: 75801 - protein, 92 aa, Zea mays
  Coding DNA Sequence Number=SeqID_34022
MSHAFDDYYIMDCGVISAPKVMQRRTDSNDQFVILPTVGVAFCAASAYGGTCLMTDDVRGNFFRQAWGVLTNDETMKIVAYIEVGMILMVAM

SEQ ID NO: 75802 - protein, 171 aa, Zea mays
  Coding DNA Sequence Number=SeqID_34023
  Homolog annotation: Hit_ID=Q1SGL9; Match level="QueryCoverage=43%, HitCoverage=19%, E-value=1e-12, Identity=52%"; Hit description =Protein phosphatase 2C-like
MMYVEELRIRWCNDQVYYLANESEVHFVWQPNQESSVLDMSHAFDDYYIMDCGVISAPEVTQRRTDNNDQFVILPTVGVAFCGGLPLILFANAHNCFFFEQARMVLNDDQFEDADSASGTYRRYDPKPGDFAVEVEVSGTEVCLDVVIGTDCFATLLAKELLPLDHDSSNF

SEQ ID NO: 75803 - protein, 145 aa, Zea mays
  Coding DNA Sequence Number=SeqID_34024
MRRRPPASPCPAFTDDFGDSPVIPCCITSSTPTKMDSADSIADKAIGRMQEVADKIFSVARETIRPGRGLTSFDATKLRVALEDIACMLEQDSLVLQENLDNVNNVNNPDDEYLSPDWDFTEHFANFWGVEYDSDHMPSFSDNEV

SEQ ID NO: 75804 - protein, 135 aa, Zea mays
  Coding DNA Sequence Number=SeqID_34025
MSVRLICVDSPHVWYTNDLINPHQMDSADSIADKAIGRMQEVADKIFSVARETIRPGRGLTSFDATKLRVALEDIACMLEQDSLVLQENLDNVNNVNNPDDEYLSPDWDFTEHFANFWGVEYDSDHMPSFSDNEV

SEQ ID NO: 75805 - protein, 157 aa, Zea mays
  Coding DNA Sequence Number=SeqID_34026
  Gene Ontology: Mol. function=selenium binding
  Homolog annotation: Hit_ID=Q5NKQ4; Match level="QueryCoverage=45%, HitCoverage=17%, E-value=1e-31, Identity=87%"; Hit description =Putative selenium binding protein
  Pfam annotation: Domain name=WD40; Domain location=32-70; Score=24.8; E_value=0.0003; Accession=PF00400.22; Description=WD domain, G-beta repeat
MHNGKGFCPLEVVAVGPELRVFDLRAGHPVSLSDDCGGHSHSDAIRAICFSVSGALFASAGDEKLVKVWKTDSWRCIQTITSEKRINLVLFGTGINKLDYLATMDLDPDSPTYSQVIHRLPVTHIGDELHHSGWNSCSSCHGDPSAKRRFLILPSLL

SEQ ID NO: 75806 - protein, 88 aa, Zea mays
  Coding DNA Sequence Number=SeqID_34027
  Gene Ontology: Mol. function=selenium binding
  Homolog annotation: Hit_ID=Q5NKQ4; Match level="QueryCoverage=96%, HitCoverage=20%, E-value=1e-42, Identity=91%"; Hit description =Putative selenium binding protein
  Pfam annotation: Domain name=SBP56; Domain location=2-88; Score= -312.9; E_value=0.036; Accession=PF05694.2; Description=56kDa selenium binding protein (SBP56)
MSLETIEKGPREKLVYVTCVYNGTGINKLDYLATMDLDPDSPTYSQVIHRLPITHIGDELHHSGWNSCSSCHGDPSAKRRFLILPSLL

SEQ ID NO: 75807 - protein, 155 aa, Zea mays
  Coding DNA Sequence Number=SeqID_34028
  Subcellular localization annotation: CTP_CleavageSite=82; ConfidenceScore=5.85e-01
MASSPVLAVSSIPLPPPSAYKSTRPDPVLTTPAPAISTAFPRAIRASAAVLPSSLRGRGIRSFGTYSSERRAWIMGWESNCMVSMREPAFTITLIKRYGSVSTGMDESGMVWQLVFLLQPGIGKGVYVLERKSCHGSGKLSGGQASVISIVLGKP

SEQ ID NO: 75808 - protein, 60 aa, Zea mays
  Coding DNA Sequence Number=SeqID_34029
  Subcellular localization annotation: CTP_CleavageSite=45; ConfidenceScore=5.60e-01
MASSPVLAVSSIPLPFPSAYKSTRPDPVLTTPAPAISTAFPRAIRASAAVLPSSLRGRGI

SEQ ID NO: 75809 - protein, 227 aa, Zea mays
  Coding DNA Sequence Number=SeqID_34030
MWRGRPERGGDFSEVEAESEPRGLGEAETFFRSRGRVRALGLTLAGGIAVGAAQAALFSCQDKVSGAILALNSPAIRSAGEAIWPRLLLREAYPSWALGESKLCADGGYQLRLGALGVPLITVPDISDEKVDFDPNEDDLLSSQELEEFAKDMEEDQTDFQTKIDAMISIPPNDEVLQDVKGKKSLDMPSNISDGIRKSSRLEKNDDMKVADKAISRAEAKDAFLNK

SEQ ID NO: 75810 - protein, 179 aa, Zea mays
  Coding DNA Sequence Number=SeqID_34031
MASPCGVVGPSEVDKVSGAILALNSPAIRSAGEAIWPRLLLREAYPSWALGESKLCADGGYQLRLGALGVPLITVPDISDEKVDFDPNEDDLLSSQELEEFAKDMEEDQTDFQTKIDAMISIPPNDEVLQDVKGKKSLDMPSNISDGIRKSSRLEKNDDMKVADKAISRAEAKDAFLNK

SEQ ID NO: 75811 - protein, 184 aa, Zea mays
  Coding DNA Sequence Number=SeqID_34032
MAEATGFPSGRNAAEAAATKDAAAVTSPDQPEIYRREGISGRGFWNPMESGSARRPEARMAAGRTRDGAIPGEADCRGGLELDGKWIGVDAARGGGQVGAPRSERARAPRDWRAGFLEARMEGAMDGGWGLAEIAAGERGALAEGDRRGGRGRLPRHGQKKGGNARHGQAEAGHEGLWTPSLRS

SEQ ID NO: 75812 - protein, 125 aa, Zea mays
  Coding DNA Sequence Number=SeqID_34033
MAAGRTRDGAIPGEADCRGGLELDGKWIGVDAARGGGQVGAPRSERARAPRDWRAGFLEARMEGAMDGGWGLAEIAAGERGALAEGDRRGGRGRLPRHGQKKGGNARHGQAEAGHEGLWTPSLRS

SEQ ID NO: 75813 - protein, 162 aa, Zea mays
  Coding DNA Sequence Number=SeqID_34034
  Subcellular localization annotation: CTP_CleavageSite=61; ConfidenceScore=5.50e-01
MAQQAAVPCTTVAQCRRVGGPAHKWVRSYTGVSYTYRGMSRSGRGSSHRVFCSPELCPRPSAAQRRSKKCGEKSRQPPPPAQRLRASIDFGMTRRLAETFHKPSTAHSAWSDHGDGASQARSLFLWFSALELMLGARIVGMVIAAEGGVASLRLYSTATESG

SEQ ID NO: 75814 - protein, 153 aa, Zea mays
  Coding DNA Sequence Number=SeqID_34035
  Subcellular localization annotation: CTP_CleavageSite=61; ConfidenceScore=5.54e-01
MAQQAAVPCSTVAQCRRVGGPAHKWVRSYTGVSYTYRGMSRSGRGSSHRVFCSPELCPRPSAAQRRSKKCGEKSRQPPPPAQRLRASIDFGMTRRLAETFHKPSTAHSAWPDHGDGASQARSRSAAPSSTQVARSPEERDKGRENPRHGFIDG

SEQ ID NO: 75815 - protein, 106 aa, Zea mays
  Coding DNA Sequence Number=SeqID_34036
MRHRTTEGSRARVGRLLPLPRDATAEGSRVRVGRLLPLPRDATAEGSLGDVEDSARGNAEDGEDGGRHRAVSPSVGEGADAAVGWAGSRRRCAMWGWGVAASWGRG

SEQ ID NO: 75816 - protein, 288 aa, Zea mays
  Coding DNA Sequence Number=SeqID_34037
  Homolog annotation: Hit_ID=O80413; Match level="QueryCoverage=32%, HitCoverage=25%, E-value=1e-24, Identity=65%"; Hit description =Mitochondrial phosphate transporter
MGFRGVSGTWERLQPQIHSEKLLLEAFWLTVPPTYVNYNYVLCSIVLRYCLLGAPRPAKGTSSARSFAATGATARLHASAPAPAAAGAGGVVSFSIQAPNEKIEMYSPAFYAACTAGGIASCGLTHMAVTPLDLVNCNMQHQQVKLLDLELLSGVLHPALFGNLTSLLNAYVHNRALILKSCNIGIVRPNIVSEKSLGADLRIGQPLSRPHLVRFCLPRPRRPIPHTAHRHLLPAHPAAASAPSPTEGIPADSAPAPQNAIHSTLSLNPRFLSWIGISRRRSPGTCPT

SEQ ID NO: 75817 - protein, 138 aa, Zea mays
  Coding DNA Sequence Number=SeqID_34038
MGKPVPSLLMLLLSRGRVPLDSPTRWQGGRPSDPSNHLLQRTCKNYATSKAEYTNTQLDLPVTALVPTITGMGDLVSGRVRGKVYCQVQSGTRLTDLPYFSGRFELQQGFKNFQKFCKNYSGLSLAILAYFKNLRLKV

SEQ ID NO: 75818 - protein, 138 aa, Zea mays
  Coding DNA Sequence Number=SeqID_34039
MGKPVPSLLMLLLSRGRVPLDSPTRWQGGRPSDPSNHLLQRTCKNYATSKAEYTNTQLDLPVTPLVPTITGMGDLVSGRVRGKVYCQVQSGTRLTDLPYFSGRFELQQGFKNFQKLCKNYSGLSLAILAYFKNMRAKV

SEQ ID NO: 75819 - protein, 575 aa, Zea mays
  Coding DNA Sequence Number=SeqID_34040
  Homolog annotation: Hit_ID=Q8T1P1; Match level="QueryCoverage=55%, HitCoverage=33%, E-value=9e-57, Identity=37%"; Hit description =Similar to Arabidopsis thaliana (Mouse-ear cress). Hypothetical 80.1 kDa protein
MAEEASPPPPPPKLLYIAVADGGGRRAFRYTRPVLQSTLHLMGCKPRHAFKGSRLGITTVVSTDSIRHMMRGFADQKQNPLLYASTYHAGEYLDPIAVAQAKAKHKANKPTVVSHPNTCGGTSSDDKSQQGSSELPPRAELIGSKQMAVEGYKAQSEMVIDSLDRLITSWEEQKESVIVEGVHLSLNFVMGLMKKHPSIIPFMVYITNEEKHMERFAVRAKYMTLDPAKNRYIKYIRNIRAIQEYLCNRADKHLVPKINNTNVDQSVAAIHATAFSCLRRRAAGEQLYDLNTNTAAVVDEEYRNQRAANTLGSKGMFQLIQRQGSSRNLMALLNTDGSVTKAWHVGATDGGGENLGGNTSSGKKPDENRVLDASQIGKAEAVNLQFGPFGISAWMSDTGGTSHAGSVEDLRADGVETGGRNYSSCCSSPKTSDSTSKEMLSPRQLMEDYSVYVSEEEEEEEADDPCDAETDEDLSDEERDMHEIDAGSVDEHSTKSDEEYEDLAMRDVMESGDWSDDEQQGVSKTKNSPTLECSIHGSGAAEDDGINGRYHHNLDLFLKMSKEVVASNRMPCASS

SEQ ID NO: 75820 - protein, 262 aa, Zea mays
  Coding DNA Sequence Number=SeqID_34041
  Gene Ontology: Mol. function=nucleotide binding; Cellular component =nucleus; Biological process=regulation of transcription, DNA -dependent
  Homolog annotation: Hit_ID=Q53WP4; Match level="QueryCoverage=57%, HitCoverage=21%, E-value=1e-65, Identity=82%"; Hit description =Putative auxin-independent growth promoter
  Pfam annotation: Domain name=DUF246; Domain location=77-262; Score =40.1; E_value=5.6e-17; Accession=PF03138.5; Description=Plant protein family
MEWTEENLSALCAPLASAAGSIWAPKTIKFLTGSFEFFLVGSSSEFHGSHFGTFGYAFLNQDMLTPGKNNATAGYLVVDANGGLNQMRMGISDMVAVAKIMNASLVIPTLDHQSFWTDPSDFRDIFDIDHFKESLKEDIVIVDSLPLDYRRAKPYVRAPTSWSRASFYRDCAKVLRKFKVVRFTHTDSRIVNNGLAPSLQKLRCRANYRALPYRKEIQGLGSTLVDRLRNGVRRALHRAPPKGTGLKLPERLIRDRLGPRSF

SEQ ID NO: 75821 - protein, 614 aa, Zea mays
  Coding DNA Sequence Number=SeqID_34042
  Gene Ontology: Mol. function=nucleotide binding
  Homolog annotation: Hit_ID=Q53WP4; Match level="QueryCoverage=60%, HitCoverage=51%, E-value=0.0, Identity=86%"; Hit description =Putative auxin-independent growth promoter
  Pfam annotation: Domain name=DUF246; Domain location=224-568; Score =628.4; E_value=6.1e-186; Accession=PF03138.5; Description=Plant protein family
MAAAATTSTTTATIPPGPHRRRQPNDIERDDDTCCGGAGVDRRFPHACGAQHDDDAERGLHHAAAATPCGGTRALLLARRRRAWATAAAAAAGAPPRTAWAWTRGVVLCLLALAAVVVGFQLGSHRGGGSTDAGAGGDGGVRLLHLHRVETADADVVMEWTEENLSALARRSPQPPESFAFWYPWSLAESASEQTGGHIWFGYAFLNQDMLTPGKNNATAGYLVVDANGGLNQMRMGISDMVAVAKIMNASLVIPTLDHQSFWTDPSDFRDIFDIDHFKESLKEDIVIVDSLPLDYRRAKPYVRAPTSWSRASFYRDCAKVLRKFKVVRFTHTDSRIVNNGLAPSLQKLRCRANYRALQYRKEIQGLGSTLVDRLRNGSAEHYIALHLRYEKDMLAFTGCNHNLTLREAAELTGMRFKVRRWKEKDIDSEEKRLQGGCPMTPREAAVFLKAMGYPSATNIYIVAGEIYGEHSLDALKAEYPNTYTHYSLATVDELEPLELYQNRLAAVDYIVALQSDVFVYTYDGNMARAVQGHRRFEGFRKTINPDRLKFVELIDKLDEGSMSWSEFQIVVRKHHENRLGGPYERLRGASPRQEEYFYSNPVPGCLCKRVQSR

SEQ ID NO: 75822 - protein, 88 aa, Zea mays
  Coding DNA Sequence Number=SeqID_34043
  Homolog annotation: Hit_ID=Q53WP4; Match level="QueryCoverage=94%, HitCoverage=11%, E-value=2e-39, Identity=86%"; Hit description =Putative auxin-independent growth promoter
MARAVQGHRRFEGFRKTINPDRLKFVELIDKLDEGSMSWSEFQIVVRKHHENRLGGPYERLRGASPRQEEYFYSNPVPGCLCKRVQSR

SEQ ID NO: 75823 - protein, 278 aa, Zea mays
  Coding DNA Sequence Number=SeqID_34044
  Homolog annotation: Hit_ID=Q6QP51; Match level="QueryCoverage=37%, HitCoverage=37%, E-value=2e-31, Identity=73%"; Hit description =Putative growth-regulating factor 1
MNILEAEGGAEAAARLASPHHKAGFPPSDAGAGSHMSCKLTRNRRSQTAAREADAPRIARPVALTPRQGKRHLWQAKRASFHLRHDDRVKKGTGKGDISKRILLSKGNGPPEPSYLSGVQRLAPRKAAPEHSGSEPITDQGFKGWPLGRVRQPPQSTRAPCPLLIRGSKAGPSEGFNSRPRARRVRDDSGYVRYMAEARATLLRYPRTFSRPAGAICNGIPPEGGIEPSDPIEWVRVRQITCRLRRESNLGQIALPTDRVAGTFNAKIAWHLILTRAP

SEQ ID NO: 75824 - protein, 339 aa, Zea mays
  Coding DNA Sequence Number=SeqID_34045
  Subcellular localization annotation: CTP_CleavageSite=101; ConfidenceScore=5.36e-01
MASGQTLLLKGLRSRPLTGDENQPLKPKSRRPGAQVALTVSPAEATTAAMGSLSSGGRRFSTGDTSRLRTARPSPRWRTDSCTLARQQQFTFPRMAGGRLLCTARGCPSPPNAGGRSGSPAHAEAGPNSMRPPSPPRMMNILEAEGGAEAAARLASPHHKAYGHHPGWLSPLAFQAPRAKSPPTSSRVPTLRRGGWVPHVMRADRKQKKPNRYTRSRDRERGYFEKGSFSVKEAGPRALLLIRRSKAGPSKGGSKAGPSKGFNSHPRACRVRDDSGYVRYMAEARATLPRSDFVMESHQREASSPWTLSNGSGKSPAEAQGLLPQPGYGQTVDSVNKLA

SEQ ID NO: 75825 - protein, 93 aa, Zea mays
  Coding DNA Sequence Number=SeqID_34046
MSSKSNDVPVIFLWKIAHNGVILEDSLEEQLPTPTPLVESPAFAARSSTSAPPAPAVQAPAPGGDDPDDSGNDDEDDDDENEEEHVNEEANYA

SEQ ID NO: 75826 - protein, 105 aa, Zea mays
  Coding DNA Sequence Number=SeqID_34047
MEARKALRYQVHGRRSRRLRNPKPRVKKKACKVKGHFETESSIPLQPTRRVFSFHCVLSLRVERHPDPVPGSRGTFTLSATADNSEWSRCMDLRDPGLAERKYPS

SEQ ID NO: 75827 - protein, 581 aa, Zea mays
  Coding DNA Sequence Number=SeqID_34048
  Gene Ontology: Mol. function=nucleic acid binding
  Homolog annotation: Hit_ID=Q2QU58; Match level="QueryCoverage=74%, HitCoverage=87%, E-value=8e-18, Identity=22%"; Hit description=Zinc knuckle family protein
  Pfam annotation: Domain name=zf-CCHC; Domain location=424-441; Score =22.1; E_value=0.00022; Accession=PF00098.13; Description=Zinc knuckle
  Pfam annotation: Domain name=zf-CCHC; Domain location=449-466; Score =10.8; E_value=0.016; Accession=PF00098.13; Description=Zinc knuckle
  Pfam annotation: Domain name=zf-CCHC; Domain location=495-512; Score =8.7; E_value=0.036; Accession=PF00098.13; Description=Zinc knuckle
  Pfam module annotation: Pfam domain module=zf-CCHC::zf-CCHC::zf-CCHC; Domain location=424-441::449-466::495-512
MEGKKLGTGQCAVCTGLSGHFETGSSIPLQPTRRVFSLHCVLSLRVERHLDPVPGSKGTFNWYQSAFMSVDPDLRQIFSRSIFPSNVSKNPSNEELRCLSLNHHACNILVDSLSRNAYFAIMSSDSDLFVDAHDLWNRIKEKYFVANCDAPTPYITCETNHSKGEEQERWHPNDESTSSTGLFSTSDKCFIADNDGGDESHDEENYEDDSEDESSSSQGTFSYIASTDINDRENETDDVEEGEIRRFYNHLNKADKALLVKLLRRNKEQGETLLRLEETLIRTNDSLVKMTKEHEELKYSHGNLVQRTHLDNSSPCANPCCSKESQCLNKHQAAGSQKKLCGNKKQRQLRRRHIAQLSQDIHGRVVKKLEKGKTAASVKLNKKNVPKDEEINMSLKKGKDSVNHVVCTDLLSMSFKYKKGKGKRRCFKCKKLGHLIASCPYKDKNEGTRSCFGCKNKDHTITSCPVMKNQGCASSKVTLTKENDTQQASCQVERRFCYKCGEQGHLSKVPLRHALLYLVNLSFSLQLVLSGFSFDIQIGIFCDESDKVCLDQGGKEKMCKKWSNQDLGTSVSQEIGISGHE

SEQ ID NO: 75828 - protein, 242 aa, Zea mays
  Coding DNA Sequence Number=SeqID_34049
MYGQSLNLNSYDPNPRVMMAREHQEDKEGECFGHGGGLTHSGITIKRRRSLIGHFNSSLVSPTRQKTIQITLNLDDSSLSEQRKVVIKEQKTVVASRYMLGVSSNNGKITSLNSSIDSDKSNGGSTISEPNKKFVAPKVRQEAKPQERPNNTSTGNTKSVSTKQEISKDTLKNGGASPSPNGCVVVKKQMPKESKKESATERRSPPKLYKSSPTPAMTSPTKLDPAAKQNGPFASAVNQLSI

SEQ ID NO: 75829 - protein, 141 aa, Zea mays
  Coding DNA Sequence Number=SeqID_34050
MATVRWLSEEKKNQSSTVYHNQATAKTQHEMNLASAGMPNNTSTGNSKLVSTKQEISKDTRKNGGASPSPNGCVVVKKQMPKESKKESATERRSPPKLYKCSPTPARTSPTKLGPAAKQNGNSSPVHSISTIKRRVTETIY

SEQ ID NO: 75830 - protein, 86 aa, Zea mays
  Coding DNA Sequence Number=SeqID_34051
MSWRSTWRVATMLCQVEKANEDMLNQLYSSIKLMFCTLIVPVFSNTRHSEQDVVELLKLHPSVYKILFSLQIEEPCGVEKSEIEQS

SEQ ID NO: 75831 - protein, 226 aa, Zea mays
  Coding DNA Sequence Number=SeqID_34052
  Homolog annotation: Hit_ID=Q84T85; Match level="QueryCoverage=35%, HitCoverage=8%, E-value=6e-36, Identity=86%"; Hit description =Expressed protein
  Subcellular localization annotation: CTP_CleavageSite=58; ConfidenceScore=5.83e-01
MTSPQRRNTSSSKGRGSPASSPSCTPSSSPYWRDHSVTFFSETSTMSWRSTWRVATMLCQVEKANEDMLNQLYSSIKLMFCTLIVPVFSNTRHSEQDAVELLKLHPSVYKILFSLQIEEPCGVENSTFIDAKEEYSSLRIVKDKFEGWKAQYPSAYRDAHVALSAPSVFNPYVRLELLKWDPLHETTDFFDMDWHKVLFDYGVQDDESPSGAFCVCIWVFYCDTEG

SEQ ID NO: 75832 - protein, 266 aa, Zea mays
  Coding DNA Sequence Number=SeqID_34053
  Subcellular localization annotation: CTP_CleavageSite=67; ConfidenceScore=5.20e-01
GLQFAPFPFTGILFLLLSPPDSFSLPLNGWAPYGGILPRSRCLRTQARALGILRRGSSRRTKGDGTAAGQGSCGSALGRDFFVLLRAASSSGRPRRGSTGQLRGPATRPIRPKTPPPVVSVRRFVVCGVEVKGSSSIRRQIYAQPICVIRASRSKPRSYCLRIGIKMSSHDAKVLQNLVLNLASSVETGAFNIRSFLEEAFRHLGDEHYLLNALLAIRKEVDQMEQDALESKARSDPEKERMEEQINLAEAVKPVPRQFTFTPFLT

SEQ ID NO: 75833 - protein, 179 aa, Zea mays
  Coding DNA Sequence Number=SeqID_34054
MDGHPTAESSPAAAAFAHKRARSEYSDEGAPGEPRATEPPPDKVKGSSSIRRQIYAQPICVIRASRSKPRSYCLRIGIKMSSHDAKVLQNLVLNLASSVETGAFNIRSFLEEAFRHLGDEHYLLNALLAIRKEVDQMEQDALESKARSDPEKERMEEQINLAEAVKPVPRQFTFTPFLT

SEQ ID NO: 75834 - protein, 192 aa, Zea mays
  Coding DNA Sequence Number=SeqID_34055
MNECELTLAVSHPPHMSRTEKLHRRSRQYRASSRPSQKTEKINFQNQYSDSRHRAHGPSKTLSAEVTSQLAAGTGVTVGVTMGGPTVIASTGTQEQRANRQSNFGPTCRLASSPEAGLGATVGTLNQGYALLWRRQGHPADGAPVQSIVETVRPCCAAHCAHHPLYEKLPLHTDTTQISDVRAQGDCSNSKH

SEQ ID NO: 75835 - protein, 147 aa, Zea mays
  Coding DNA Sequence Number=SeqID_34056
MAATRGMNPFLKEDFPARAPKRHEQGLPRCAPRFPSYGMGARPHMSYKLARSAKKAYHRTRSAQPPRGYAPLHLRRNQRSRRRTAAQEACNHPAVVRPFVLAATSGPTSGMGAQATCHAPGALVSGCRKVAPPLAPIPRLLEAVAED

SEQ ID NO: 75836 - protein, 445 aa, Zea mays
  Coding DNA Sequence Number=SeqID_34057
  Homolog annotation: Hit_ID=Q6QP51; Match level="QueryCoverage=53%, HitCoverage=98%, E-value=2e-42, Identity=50%"; Hit description =Putative growth-regulating factor 1
  Subcellular localization annotation: CTP_CleavageSite=58; ConfidenceScore=5.20e-01
MATAWGIDPFLKAALPTRILKRHGQSLHQCAPGSSSYDTGAGSHTPCKLTGNRRSQTTAREAGNRPTVISVPPFSLKPTGERADRHAGGVQPHHGCAPFRLHRIRWVSVKALAHTSCNRCAGYYVQETAPPLAPMPRLSTAEPMPRLEATLRMAQQCQSSTTITGQSAAGGGVTLDMAKSGPAGKRHLWQAKRASLHLRHDDRVKKRLAPRKGSTAAPEHSGFKLITDQGFKGWPLRRVRQPPQSTRAPRPLLIRGSKAGPSEGFDSRPRARRVRDDFGYVRYMAEARATLPRYPRTFSRPAGAIFNGIPPEGGIEPSDPIERVWVRQITCSHFALSLTDLTGKQRRSLRSDCCATHQDDADNNQVQPQAQQEAPPRPTSGLGLNHGLGRWSPPRPTPGLGLNLGLGRWSPPRPTSGLGLGRSLRLARPWARTDRAMGDTSLPYA

SEQ ID NO: 75837 - protein, 439 aa, Zea mays
  Coding DNA Sequence Number=SeqID_34058
MKTLPTTLEDASGESRLLKRDRSPGRSTTSRRLAPFSHRSASRIFIMQPGCIPSPMVIQDDDHQFDGGEKQAGLRPLPRPQLQGSSSSLLGRRAGQVGACLRVSSGPLLPSAIGGERRSPSGELAAAACLAPRSERLWRCFRCHLPPLGLSVAARLPHGCRLRRVRAGHVQALPAPSAAQHVVRREGGTHVLGWSRSRSRGENGSEDLPVRFGAAAACWCGVGGQVAAVVGAEVAATREGFSVDEIVGATCGRTSGSSTLTACPRPSCGDRSPVSHPEFAVPQAIRCGGCSYPREWNRSSICNGTLSTIFEILRPLCDELEPEAAVSAWTEAESAQKEASSDREHMASLAEEVEILPPVSSSEAGPDSVEGGNNAEGAAAPSVDDLFVGSRIAYPSESYFSRKVMSEDPAIEAVEKRERRSGRKTFTEENFDVEGVPPF

SEQ ID NO: 75838 - protein, 87 aa, Zea mays
  Coding DNA Sequence Number=SeqID_34059
MPEPCVHANVAVGEVLEPCVHDNVAVGEVSEPCRSTAGGLGPDPGFPSAFDEGGLTFGCGHSWTNLSESWTRGESRWVSGGRQASAP

SEQ ID NO: 75839 - protein, 97 aa, Zea mays
  Coding DNA Sequence Number=SeqID_34060
MNKNTRDTRFIPRFGHTTKVPYFLVEAPTKSWVSFNPNPPFADHKGQAHTLIFAQTSGEFRRENPSSTARRQVQLVYGQRGSQLKLSSAEVEKAQLS

SEQ ID NO: 75840 - protein, 134 aa, Zea mays
  Coding DNA Sequence Number=SeqID_34061
MAKLSFSAGAELQLNSTSAVNLFDHTPAETCLWAVELEFSLLNSLSASQTGKTGRQELSGAVQLVLVNFDQSALWYYIEFFVDSLLLELLAPRRLGVSCESPNLVEDHKKVCITRSFEQRLLCELDLCGRQRED

SEQ ID NO: 75841 - protein, 104 aa, Zea mays
  Coding DNA Sequence Number=SeqID_34062
  Subcellular localization annotation: CTP_CleavageSite=68; ConfidenceScore=5.09e-01
MNKNTRDTRFIPRFGHTTKVPYFLVEAPTKSQVSFNPNPPFTDHKGPDTGLNRPRAGSTAWGSDWQSVCQSGGETGQVTLTPVEPPLGPVQPVLTSEVRGKYPG

SEQ ID NO: 75842 - protein, 94 aa, Zea mays
  Coding DNA Sequence Number=SeqID_34063
  Subcellular localization annotation: CTP_CleavageSite=69; ConfidenceScore=5.55e-01
MAKLNFNFNRGPGQVQPGSREVQPGSRASSTGVQRGSTGVQGKFSRGIFPGPHWSKPVEPVLGEVQPVSGSPDRSDLLTGRLTASVTPRRLKRP

SEQ ID NO: 75843 - protein, 54 aa, Zea mays
  Coding DNA Sequence Number=SeqID_34064
  Subcellular localization annotation: CTP_CleavageSite=34; ConfidenceScore=5.06e-01
MAKLNFKFNRGPDRFNRGPGQVQSVSREVQPVSRESSAGVFSPDLTGQNWLNRS

SEQ ID NO: 75844 - protein, 101 aa, Zea mays
  Coding DNA Sequence Number=SeqID_34065
MKSYNMLMHQQGDLKPCFELIHGDMVQVTGFDLCLLQKESSYYKEGSKKKLNFNFNRGPERFNRGPGQVQPGSSEVQPVSRESSAGVFSSDLTGQNRLNRS

SEQ ID NO: 75845 - protein, 54 aa, Zea mays
  Coding DNA Sequence Number=SeqID_34066
  Subcellular localization annotation: CTP_CleavageSite=34; ConfidenceScore=5.14e-01
MAKLNFNFNWGPGRFNWGPGQVQPGSREVQPVSRESSAGVFSPDLTGQNRLNRS

SEQ ID NO: 75846 - protein, 54 aa, Zea mays
  Coding DNA Sequence Number=SeqID_34067
MAKLNFKFNRGPDRFNRGLGQVQPGSREVQPVSRESSAGVFSPDLTGQNRLNRS

SEQ ID NO: 75847 - protein, 54 aa, Zea mays
  Coding DNA Sequence Number=SeqID_34068
  Subcellular localization annotation: CTP_CleavageSite=34; ConfidenceScore=5.06e-01
MAKLNFKFNRGPDRFNRGPGQVQPGSREVQPVSRESSAGVFSPDLTGQNRVNQS

SEQ ID NO: 75848 - protein, 176 aa, Zea mays
  Coding DNA Sequence Number=SeqID_34069
MGNRPMYRGASFPFTSKRVTPFIGDTFSSREAHTRILSPDMWAQRQNGRDACGSMDVPPANGMDRHAACEVAQSRGLTSGSARWLTSRVPCHMAASGLCLSREQKCAKGSHLANKKTKKWVQQKEQGIIEGSPEALRYNSPDMSGAHRTVSGAPEESDSELASFRLPLRYNSPDMS

SEQ ID NO: 75849 - protein, 126 aa, Zea mays
  Coding DNA Sequence Number=SeqID_34070
MEHLAPSSAFDLPKDAYGKCIYNTNKLAREQLLSWCFKDLRKKKAPNSSPSCSCFPKNPKVVLIVMPIVFRLFSNAVSQGQGNTIIKGQGSSSYEALSPLGYNDLQTKLKGGTYKDAEPRHVGPGA

SEQ ID NO: 75850 - protein, 103 aa, Zea mays
  Coding DNA Sequence Number=SeqID_34071
MSRRGKSAKQRKGPFTGTAFDPLPLPTNVDKSEDHDTYRQRYWMCANFAFEPTIVQRRLNLMTPPPLCDFEQWIDTEISEKDKKWLENLKKWDAEDKKRMEKR

SEQ ID NO: 75851 - protein, 173 aa, Zea mays
  Coding DNA Sequence Number=SeqID_34072
MSRRGKSAKQRKGPLTGTAFDPLPLPTGVPVPMCFCGDPCKVDKSEDHDTYRQRYWMCANFAFEPTIVQRRLNLMTPPQLCDFEQWIDTEILEKDKKWLENLKKWDAEDKERMEKRREELAAEQQREDEQKMRRVAECKEEKEKKLERACRAKEAIEENPDAFRKGKWPRCTQ

SEQ ID NO: 75852 - protein, 222 aa, Zea mays
  Coding DNA Sequence Number=SeqID_34073
  Homolog annotation: Hit_ID=Q5VQW7; Match level="QueryCoverage=29%, HitCoverage=37%, E-value=4e-11, Identity=81%"; Hit description =Putative DNA-directed RNA polymerase II 23K chain
  Pfam annotation: Domain name=RNA_pol_Rpb5_C; Domain location=117-185; Score=0.4; E_value=0.00068; Accession=PF01191.9; Description=RNA polymerase Rpb5, C-terminal domain
MPPPTQPPLPPVRHQHELAFFSGCSDAAGPHHPIPKLIFLKALAEALQIPQEQVTLAYLRARPPCALTARHHRVSAIPGRLAFALLQEASRALSVRGPHAPPCVPPAILASEVEMFINIKEHVLVSEHHVLTNEEKKTLLERYTLKETQVLWPQTRSGHEDHQASETAANTSHTTMLYDNVRTQVMVKELLSLGEQIGTVNTGLSDDVLSTCLNMSLYMPQL

SEQ ID NO: 75853 - protein, 270 aa, Zea mays
  Coding DNA Sequence Number=SeqID_34074
  Homolog annotation: Hit_ID=Q40082; Match level="QueryCoverage=24%, HitCoverage=13%, E-value=8e-23, Identity=74%"; Hit description =Xylose isomerase
MASNFSTLFFGNRFYEQILTSASCQIFTHVMEPASLCLGHTDAYQRKPSGAFQVLWPQTRSGHEDHQASETAANTSHITMLYDNVRTQRGEELLAYWWREDHWLKAMFLHMRSIIKVEEELVGVPMKGGLDEVCNYFFCYALSLLERIIPEVKVYAYSAAQVKKALEVTHYLGGENYVFWGGREGYQSLLNTDMNRELDHLLTFFKLMLTTRRRLDSTLASEYLLPIKEPLLELERPPIFSAQDWLRKSGVHWSYFVEAASFCAVIHSNL

SEQ ID NO: 75854 - protein, 224 aa, Zea mays
  Coding DNA Sequence Number=SeqID_34075
MARAIHGEPTWRWGCARWETRRRQLGERDGSGRDVECGRDGSAAIQSERLTDPGASPKDRDRPGWGFGHTSGYSRTAIARRRQRRWMCTVPVLARLVRCHGHTHPAPRTNQGKADPISAEDRPDGRPEKSEKGDEDKGCYKSNPLNRISPPRFKKKLARKQAANPLSRSIDTHLVKMLPTLILTDLEELEVAKWIGARGKNSEKRDGNEEASKGRCNGSIKVRE

SEQ ID NO: 75855 - protein, 72 aa, Zea mays
  Coding DNA Sequence Number=SeqID_34076
MTHGEARLKTLALACGALQATSARRLTLARAINDEPTWRWGCARWETRRRQLGERDGSGRDVECGRDGSVAI

SEQ ID NO: 75856 - protein, 50 aa, Zea mays
  Coding DNA Sequence Number=SeqID_34077
MAKAGKMNGTSDDGKNDATVLVSVGAGVRRIRGGGACSHAREWGGVKAEA

SEQ ID NO: 75857 - protein, 104 aa, Zea mays
  Coding DNA Sequence Number=SeqID_34078
MSGLVSDEYGEEVPAPTPSAENGTGGSLGPTSECRRVPQPRWVERVGEREGGKGVRRPETGVREVGIPRPSCSSRAQVERKERIQVYNGGVAECYVSSGGELAP

SEQ ID NO: 75858 - protein, 47 aa, Zea mays
  Coding DNA Sequence Number=SeqID_34079
MKLTIVAQKVIKDQMLRVFDLIELEEFDHLVAMLDRRFLKAQKRTAI

SEQ ID NO: 75859 - protein, 75 aa, Zea mays
  Coding DNA Sequence Number=SeqID_34080
FEESTIKHGDQVIELFEFYEIKDPEHLFGEGNDTLPDHLGSDQWGVMIPGQNGNHGSWVKDGWFTDDDDGYDYGN

SEQ ID NO: 75860 - protein, 92 aa, Zea mays
  Coding DNA Sequence Number=SeqID_34081
MQFFEFHKIEDPEHLFGEGNDTLPDHLGSDQWGVMIPGQNGNHGSWVKWFNIQWFYLWFWLDDDNDVPRGGNGKEGVEADLQEFQVFDESED

SEQ ID NO: 75861 - protein, 134 aa, Zea mays
  Coding DNA Sequence Number=SeqID_34082
MEDEASRGAASVGVGCPLLPLASGGERHPPASRRLPPAMPGEAGRRHSARAQRYVLRPDDGCAAHREGSAHALGGPGKGEDLPARFEASAAGDGFSTDEIANSASSPRSPSPDLNGWLSSSGCLCEWESLLAER

SEQ ID NO: 75862 - protein, 291 aa, Zea mays
  Coding DNA Sequence Number=SeqID_34083
MGAEHGVSGELQAGPTRSEAAVEPFGGPPFEPLISREARSLVPSRGRIPFGHLARRLCDAWAWASVLACRESEKRVHLARSHAACMAARLFRPLVWAKVEGHFPAAPLHRWSPKMVTSSLMVGKASRAAASAPTSASRIFVIQAKMEDEASRGAASVGVGCPLLPLASGVERHPPASRRLPPAMPGEAGRRHSARAQRYVLRPDDGCAAHREGSAHALGGPGKGEDLPARFEASAAGDGFSTDEIANSASSPGSPSPGLNGWLSSSVGESPSAVAPAPKPLLKLLRRSGRG

SEQ ID NO: 75863 - protein, 41 aa, Zea mays
  Coding DNA Sequence Number=SeqID_34084
MANTEGRFLPAIEGVASSSTVRGGSAVEQHTDFGPYTLKVG

SEQ ID NO: 75864 - protein, 88 aa, Zea mays
  Coding DNA Sequence Number=SeqID_34085
MANTEGRFLPAIEGVASSSTVRGGSAVEQHTGERFPEFSASPVLHCLGLIESGSVSIIEVGGIWLRCNHGHYSTTHHTQSKIQIRQIS

SEQ ID NO: 75865 - protein, 257 aa, Zea mays
  Coding DNA Sequence Number=SeqID_34086
  Gene Ontology: Mol. function=metal ion binding; Biological process =ubiquitin cycle
  Homolog annotation: Hit_ID=Q1SR15; Match level="QueryCoverage=72%, HitCoverage=82%, E-value=5e-35, Identity=45%"; Hit description=Zinc finger, RING-type; RINGv
  Pfam annotation: Domain name=zf-C3HC4; Domain location=207-247; Score= 21.8; E_value=0.00087; Accession=PF00097.15; Description=Zinc finger, C3HC4 type (RING finger)
MGDWGWSRNPNEVPLESLGYKQAGIPHLKWFSVEGQYNVMVIDLLGPSLKGLFNYCSRKFSLKTVLMLADQIYTATFQRLESRPNNPAQGVAPLGSTNPSVNINDNSLNLVSRSPLYDTNPRYARVQREGLVSRHEKSINLAQEESLALRRNASSSGIEHLAAQKKRNSTENEGEYKVHRSESTKSLSTKAYSSSYAVVASEDEDVCPTCLEEYTPDNPKIITKCCHHFHLGCIYEWMERSDTCPICGKEMEFCESP

SEQ ID NO: 75866 - protein, 143 aa, Zea mays
  Coding DNA Sequence Number=SeqID_34087
MGKPVPSLLMLLLSRGRHNGSSGLISCEKQTIRIEFLSLQGYVHKESKNGAEDYPVYVHRRSGEVRRPWTGFSGEAKSDSLLGELHRGVHSRFRWSGMAGKGSVGRSTVAEARMAAGTPCTGQTPMVSGSGEVERARRSTVNA

SEQ ID NO: 75867 - protein, 95 aa, Zea mays
  Coding DNA Sequence Number=SeqID_34088
  Subcellular localization annotation: CTP_CleavageSite=67; ConfidenceScore=5.07e-01
MGKPVPSLLMLLLSRGRVPLDSPTRWQDGRPSHSSNHVLQRTCKIMPQARLMTALVPTITGMGDHVSGRVRGKVCGQVHSGLGFVRDKHSGLYFP

SEQ ID NO: 75868 - protein, 67 aa, Zea mays
  Coding DNA Sequence Number=SeqID_34089
  Subcellular localization annotation: CTP_CleavageSite=34; ConfidenceScore=5.09e-01
MGKPVPSLLMLLLSRGRSHSTVQPGGKMDGQVTPATMSSREPYNGSSSLIGCEKQTIRIEFLNLARI

SEQ ID NO: 75869 - protein, 221 aa, Zea mays
  Coding DNA Sequence Number=SeqID_34090
MHLILWYLFFTWEDVSTARVNSHTFIAQQVVGNNVHELTNEHPQQQQQQQQQQQQQERRSPRFQGHWKVQGPNCYQGSASGFQCPSRGSGGSGVVVAEEVPAGGFTPTPDTGGDTGGASSSNPPPAPEEMEVVFGRRLRSGVEQEAAPVPLPRMLSRAPTVDSLDPIQGVRIPFQGSELTGDTSEFVTFSGHVVAPDLPMWWGQVLLLAQSSYLRLGRVMA

SEQ ID NO: 75870 - protein, 133 aa, Zea mays
  Coding DNA Sequence Number=SeqID_34091
MAPSPLDKGKGAANSASAPGSSGGSEEERRHRLHCADGSLISEPAQKRQKAADGTEEASSQAHDAQRRVSPSIPPPPPPSGGDHPQEHQQQQQQQEGQQQRPQQQQPQQQQPQPVQQQQQEQRSPRFQGHWKV

SEQ ID NO: 75871 - protein, 866 aa, Zea mays
  Coding DNA Sequence Number=SeqID_34092
MPSHGGKLVRSPAFALYLQSRDPAAFVRETEDGAVRIVGRYVPRTEGQRSWDIRGWNDRLNRVFELNRLPYNGYPSQDDVDRRGKKPVVESGDDPAPAAAPSSKKRKLGTAMGGLGVSDGFARELMRTCAAPGGRMSSPELQESSARMMRVTGGWWPRNVPIPRAAGEDFFTSRMVREWRVFPYGRNIAAVVSAVMDKDRQGAAQKRQAVVRLHEARPKRQRGAAKAAAPGGGKPPLAAKSAVPVSSKAAEVAADAGGSKSAKTVPPSSRAPEVAKAARGLPSPGKRVADFATDISVDDYLGGSDEGQLVIVAPAAATTAAAVVPKAKGGALSAGGEMPALAAVRDEAGAVSRQLKEMKEALSQAADFVDRAASGALTAVVSAEVERLRTQHADAVREKSAADSKCRKLADKVAALEGEKTDLRRQLVEERREANEALAKAQAVLAEANLARAEGSLARERVAQLEERLNALQSRVERTEAATRAEAERTRKQLMDSYHELGARTRDFEVPDREPGLRCLEWVQEELQALPTIVEGFMSYASLVTSEGAMNALSREGCRHFEVFDQADEDFERDIYKVEDPIVKESTGAIYDRMWGPHGRGVVRERAETARAQAARGERVDDFGALNSALPDPESNPAEAVSEAALEPSPETAEGAPDAPAAAAAGGGPPPETAGGAPDAPAAAAPRAEDPAMVAAEATAEAPAMAGSSQVQDFGPAHATATTNFLAASTVDGGNKYDGSASEFSDFADCGSSVEWTEESSEEDLDYFAALDVAAAEASPHAADTEDVSGPSIGRRRRRAVAKRRVSGAEGGRLRVSRASRQELLSLPAAASTGEGELRSLFAGEELRIMLFNYREMGIIPKVEPM

SEQ ID NO: 75872 - protein, 120 aa, Zea mays
  Coding DNA Sequence Number=SeqID_34093
MGRLEPRAEWESRLVGKVCNLCRGLETGISAVLMMARIRCTARKSVIPFLPSRLVERPLRRTVSGQSSHLERLHRRLYKEQERRHQEQEQQDSSPSPQREVESERSPSPAPQPKMPPAPP

SEQ ID NO: 75873 - protein, 200 aa, Zea mays
  Coding DNA Sequence Number=SeqID_34094
MAHIRCTARKSVIPFLPSRLAERPLRRTEQEQQDSSPSPQREVESERLPSPAPQPEMQLAPPQGIPAAGGDPDGDGDDDDAGGSSSHCTERSEESEPEGWIARPITRDAARGGVAEGLDLKYYPRRSTDNAGGVIVSPVGEGNPRLSSMVAELRAECAACHYLDGGCPAPVGIQHPYRSPPRGRFDYGTPDCKTRIDLDP

SEQ ID NO: 75874 - protein, 304 aa, Zea mays
  Coding DNA Sequence Number=SeqID_34095
MGATGILCDSTHDAITKECVAPVSNNTFAEWYSTENKDGLPGCSDAGIDFLLAGYSDSTAAAVEETAAGTTAAGSDADASADDEPYQHPAHTPRLISHSFALSRALPMLPAAAGDPRPCSRPSSSPEIAPSLPELHPKTAAAHAVLPLVLHGDQQGAQLLLAMALGTHVAGTAPFLPAPPLRRPASAESPSSRHSAAGRLSSHGCSKQLCSPPPHGASTSLRALCPFCLGELKLSHGVAEQQLPLPSPLLSSGRTDPPVRAAGSPCLDSSHGIQVLYAAMPIDRLRVSRRRICAAPSAMPSKPV

SEQ ID NO: 75875 - protein, 156 aa, Zea mays
  Coding DNA Sequence Number=SeqID_34096
  Subcellular localization annotation: CTP_CleavageSite=55; ConfidenceScore=5.45e-01
MDCLSRSSLSFPTTAAAPNPRQHLPHRRPWRPAQGAPSLSNAAARELAPFLLFPSAAAGSPCLDSSHGIQVLCAAMPVQKQQPRIPCASRARSICVVPTRTVAMVFETAPCRVVDLRSACEPSSKILGEPLASIPLFLDLKCLIKMFEPLSDVNHS

SEQ ID NO: 75876 - protein, 154 aa, Zea mays
  Coding DNA Sequence Number=SeqID_34097
MNALSREGCGHFEVFDQSDEGFERKIFQVKDSVLKHSAGALFDRMWGPHCRETVWERSDRAIDQMAHDEEVEDLGDLDSMLPDSTLPEASGVELAPPSDAGKGPSATPAPNAPTGAGKDSAPAPALMGEDASKAMGEPAAEDPAAAVGPSQVAE

SEQ ID NO: 75877 - protein, 435 aa, Zea mays
  Coding DNA Sequence Number=SeqID_34098
MSSLELRESLMRMLKVTGGRWPSNVPITWAAGEDIFTSHLAREMKIFPYGRNIAAVVSAVMDKDRQDAVRKRRAFARVGDPIREVKSARGDAKSTAPGSGNPPLAAKPVVPRPSKSSVGARAVASGAGKPPSAEPTKERRPSSPVRTDEEVAGGADFDTDICVDDYLIGYDAGSDARQLAVVTGSVVATLPTMAVGAKGTLHDSWSKFCTSGEISSVAAAKYVAGSVSQQLRHASEQLKHAAAFTDHVASGALTSEFTAERQRLEGRIERSMWMLLGTSQLRKIGATGCWRGWRLRRPRRRISGSSWHRRGGTQTDPMLRRRLHKLRPNLRGQRAVSPANASRRWRRGSVACATAWTKWRPRRARRSSGCIHSLWTRTRSWEELEVLLTTVTGLMSFASLVTCEGAANALSHEGCGHFEVFDQSDEGFEREIFQV

SEQ ID NO: 75878 - protein, 166 aa, Zea mays
  Coding DNA Sequence Number=SeqID_34099
  Pfam annotation: Domain name=zf-BED; Domain location=92-144; Score =50.8; E_value=4.6e-12; Accession=PF02892.5; Description=BED zinc finger
MTARRLPPPATRLAASLCLAGGCWPAAWPSAQSAICHLTESNSFDKNDDMSEDEMTVLGGREIDVVESNNDDKRKAKKMHKGVKVKDNNSKSKVWEVFDKVTIGDASEDGKKTLKAKCKYCKKMYAYMQGSTTSTLSRHMKSCGAYSKHLEKKLDQSLLNFAPSNA

SEQ ID NO: 75879 - protein, 521 aa, Zea mays
  Coding DNA Sequence Number=SeqID_34100
  Gene Ontology: Mol. function=transferase activity, transferring groups other than amino-acyl groups; Cellular component=cellular _component; Biological process=biosynthetic process
  Homolog annotation: Hit_ID=Q6ZIJ3; Match level="QueryCoverage=65%, HitCoverage=83%, E-value=8e-98, Identity=55%"; Hit description =Putative Chalcone synthase
  Pfam annotation: Domain name=ACP_syn_III; Domain location=161-249; Score=18.1; E_value=1.9e-05; Accession=PF08545.1; Description=3 -Oxoacyl-[acyl-carrier-protein (ACP)
  Pfam annotation: Domain name=Chal_sti_synt_C; Domain location=242 -389; Score=53.0; E_value=9.9e-13; Accession=PF02797.6; Description =Chalcone and stilbene synthases, C-te
  Pfam annotation: Domain name=Chal_sti_synt_N; Domain location=6-232; Score=397.3; E_value=2.2e-116; Accession=PF00195.10; Description =Chalcone and stilbene synthases, N-te
  Pfam annotation: Domain name=FAE1_CUT1_RppA; Domain location=45-314; Score=-219.0; E_value=0.061; Accession=PF08392.2; Description =FAE1Type III polyketide synthase-lik
  Pfam module annotation: Pfam domain module=ACP_syn_III::Chal_sti_synt_ C::Chal_sti_synt_N::FAE1_CUT1_RppA; Domain location=161-249::242 -389::6-232::45-314
MGSAPVNVCVSRRGQQAEGPAAVLAIGTANPPHCVHQDEFPDYYFRMSRSEHLTDLKVKLKRICEKSGIEKRFFHINEEILAAHPDFNDREKPSLQARIEMTVTEVPKLAARAAAKAIAEWGRPATDITHVVFSTYSGARSPSADLRLASLLGLRPSVCRTTLSLHGCSGGVRALHLAKDIAENNHGARVLVVCAEVSLISYSGPTDGCVDSVLGLALFGDGAGAVILGAGPVSGSERPLFETVCAAQTTVPMTEAAITTQFAPGGMEYRIGKQVPGIVEQTIRQCLLDVTGPLGIDVVTWNDLFWAVHCGGRAILDSVEAALGLGSQKASSQSPCAERVMESGVQGEGVNQSNEIDSESNSFDKNDDMSEDEMTVLGGREIDVVESNNDDKRKAKKRRKGVKVKDNNSKSKVWEVFDKVTIGDASEDGKKTLKAKCKYCESGSGLPTITSPRDYNHEQVRKLIAKMIIVHEYPFRMIEHTWFNIVMKYLNPQYEFIGRKTIRAECLKVYESEKEKLSTGV

SEQ ID NO: 75880 - protein, 299 aa, Zea mays
  Coding DNA Sequence Number=SeqID_34101
  Gene Ontology: Mol. function=helicase activity; Biological process =viral genome replication
  Homolog annotation: Hit_ID=Q1EPC6; Match level="QueryCoverage=87%, HitCoverage=18%, E-value=5e-96, Identity=65%"; Hit description=DNA helicase homolog, putative
MATVAEDIISDAEEGDDWTQPHMTAKINNNVDDDDGVVFEDDADENEGYLFAGQYEDTDEDIKIDGSQDESSAIDVPDPYDKVYNNIPEETHMLKTVPNCGYCTAKKFEYETPGFCCRGGKVELAPLETPPQLKRLWDSTDSDARHFRDNIRFFNGHFSFTSLYCCLDSMTTNVRDSGIYTFRAQGMMYHNIKSFGRDGGAEHKHLELYFYDDDPTLEHRYRKCREEHQQKDKEVIRQIVDILRGNPYSEHLRTMGHVENLDDYRIALNLDQTLNQKTYNTPLTSEVATVWIEGSEGRG

SEQ ID NO: 75881 - protein, 1595 aa, Zea mays
  Coding DNA Sequence Number=SeqID_34102
  Gene Ontology: Mol. function=helicase activity; Biological process =viral genome replication
  Homolog annotation: Hit_ID=Q1EPC6; Match level="QueryCoverage=88%, HitCoverage=89%, E-value=0.0, Identity=63%"; Hit description=DNA helicase homolog, putative
  Pfam annotation: Domain name=DUF889; Domain location=1431-1592; Score= 146.1; E_value=9.5e-41; Accession=PF05970.5; Description=Eukaryotic protein of unknown function (DUF889)
GFFMENGEPTETDQMEHNDGRTPLTNISNTITIADENGSKRLGPNVDAKELSLSDGCSTIDFTNFATQVPNVNRDDDSDWLHRNETFKSDDVFTTRDLLTPGGVHETVGNTPNHNLGRTAYFRERYKNLTPAERELNRERLRLYNNTPKRKGSKIEYIRKRRALLADTLSQESIAMESPTYTPEVVHPTTDAIEPNGSALTPCDWVIPDIASNPFLPASTQTEDADSLRMSTRPLRRKQHVPRGERQAILARRNRQFEASISRNMATVAEDIISDAEEGDDRTQPHMTAKINNNGNYYHFYPPFYPECPVDDDDGVVFEDDADENEGYLFAGQYEDTDEDIEIDGSQDESSAIDVPDPYDKVYSNIPEETHMLKTVPNCGYCTAKKFEYETPGFCCRGGKVELAPLETPPQLKRLWDSADSDARHFRDNIRFFNGHFSFTSLYCCLDSMTTNVRDSGIYTFRAQGMMYHNIKSFGRDGGAEHKHLELYFYDDDPTLEHRYRKCREEHQQKDKEVIRQIVDILRGNPYSEHLRTMGHVENLDDYRIALNLDQTLNQKTYNTPLTSEVAAVWIEGSEGRGQFSKSVMLHGKESSSHCIRSYHGCYDALSYPLFFPRGELGWHGNIPKVGVSMDEVDAYRATHRASNANDEDAESPSHLCVSVRDYYCYKFQIRPGVFNPILHGKRLFQQFAVDTYIKIENSRLDYIRKNQDRLRADLYQGLVDSMLDGDIRGEKVGKRTVLSTSFIGGPRDMRRRYMDAMALVRKFGKPDIFLTMTCNPNWDEIRRELLPGQTPQDRADLVVRVFHAKLQELKHRLTKQDILGKVRAYVYVVEFQKRGLPHAHFLLIMQRKYKLTCPEQYDLLISAEIPSNKYPELRKMVIKHMMHGPCGSLNPNCPCTKGRKSCKNHYPRPFSDTTLQGKDSYPIYRRRDDDRKEKVRGCELDNRWVVPYNPYLLRLFNCHINVEACGSIKAVKYLFKYIYKGHDRAFVVMRDASKADDDVDEIKQYRDARWVTPPEALWRIYGFELSQISPPVMQLQLHLPNMHMVAFHERQMVERVVNRPGVDRSMLTSYFEANRFNKEACGILYRDFPEWYTWQSGKGKVWQRRKRDTGGQVGRIVSAHPAEGERYYLRVLLNHVTGAASYVDLRTVDGVTLPTFREAAERRGLLESDNTLDECLTERALFQMPSSLRRLFATILVYCEPSDVAVLWQKHKDSMSEDYQHKSQNKTHVEQMVLIDIRNMLQSMGKDIKTFPLPPMIDAYDDAIGTAREVYEEESIQPTVEDVALKDSLNEEQRAAYDKIMSTVDTDQGGLFFVDGPGGTGKTYLYRVLLATLRNQGKIAVATATSGVAASIMPGGRTAHSRFKIPLAIDDGAVCSFTKQSGTAELLRKASLIIWDEASMTKRQAVEALDNSMRDIMGRPALPFGGKTIVFGGDFRQVLPVVRKGSRAQVVASSLRMSYLWESMSHLKLVSNMRAKNDPWFAEFLLRVGGGTEETNSDGDIRLPDDVCVPYSGSDNDLDNLIDFAFPNLNENMSDSTYITSRAILSTRNDWVDMINVKMIDRFQGEHMVYHSFDSAVDDPHKLLPTRVPKHIDA

SEQ ID NO: 75882 - protein, 1960 aa, Zea mays
  Coding DNA Sequence Number=SeqID_34103
  Gene Ontology: Mol. function=helicase activity; Biological process =viral genome replication
  Homolog annotation: Hit_ID=Q1EPC6; Match level="QueryCoverage=70%, HitCoverage=85%, E-value=0.0, Identity=71%"; Hit description=DNA helicase homolog, putative
  Pfam annotation: Domain name=DUF889; Domain location=1060-1296; Score= 452.6; E_value=5.1e-133; Accession=PF05970.5; Description=Eukaryotic protein of unknown function (DUF889)
  Pfam annotation: Domain name=Peptidase_C48; Domain location=1407 -1628; Score=49.9; E_value=8.7e-12; Accession=PF02902.9; Description =Ulp1 protease family, C-terminal catalytic domain
  Pfam module annotation: Pfam domain module=DUF889::Peptidase_C48; Domain location=1060-1296::1407-1628
MLKTVPNCGYCTAKKFEYETPGFCCRGGKVELAPLETPPQLKRLWDSADSDARHFRDNIRFFNGHFSFTSLYCCLDSMTTNVRDSGIYTFRAQGMMYHNIKSFGRDGGAEHKHLELYFYDDDPTLEHRYRKCREEHQQKDKEVIRQIVDILRGNPYSEHLRTMGHVENLDDYRIALNLDQTLNQKTYNTPLTSEVAAVWIEGSEGRGQFSKSVMLHGKESFSHCIRSYHGCYDALSYPLFFPRGELGWHGNIPKVGVSMDEVDAYRATHRASNANDEDAESPSHLCVSVRDYYCYKFQIRPGVFNPILHGKRLFQQFAVDTYIKIENSRLDYIRKNQDRLRADLYQGLVDSMLDGDIRGEKVGKRTVLSTSFIGGPRDMRRRYMDAMALVRKFGKPDIFLTMTCNPNWDEIRRELLPGQTPQDRADLVVRVFHAKLQELKHRLTKQDILGKVRAYVYVVEFQKRGLPHAHFLLIMQRKYKLTCPEQYDLLISAEIPSNKYPELRKMVIKHMMHGPCGSLNPNCPCTKGRKSCKNHYPRPFSDTTLQGKDSYPIYRRRDDDRKEKVRGCELDNRWVVPYNPYLLRLFNCHINVEACGSIKAVKYLFKYIYKGHDRAFVVMRDASKADDDVDEIKQYRDARWVTPPEALWRIYGFELSQISPPVMQLQLHLPNMHMVAFHERQMVERVVNRPGVDRSMLTSYFEANRFNKEACGILYRDFPEWYTWQSGKGKVWQRRKRDTGGQVGRIVSAHPAEGERYYLRVLLNHVTGAASYVDLRTVDGVTLPTFREAAERRGLLESDNTLDECLTERALFQMPSSLRRLFATILVYCEPSDVAVLWQKHKDSMSEDYQHKSQNKTHVEQMVLIDIRNMLQSMGKDIKTFPLPPMIDAYDDAIGTAREVYEEESIQPTVEDVALKDSLNEEQRAAYDKIMSTVDTDQGGLFFVDGPGGTGKTYLYRVLLATLRNQGKIAVATATSGVAASIMPGGRTAHSRFKIPLAIDDGAVCSFTKQSGTAELLRKASLIIWDEASMTKRQAVEALDNSMRDIMGRPALPFGGKTIVFGGDFRQVLPVVRKGSRAQVVASSLRMSYLWESMSHLKLVSNMRAKNDPWFAEFLLRVGGGTEETNSDGDIRLPDDVCVPYSGSDNDLDNLIDFAFPNLNENMSDSTYITSRAILSTRNDWVDMINVKMIDRFQGEHMVYHSFDSAVDDPHNYYPPEFLNTLTPNGLPPHVLKLKIGCPVILLRNIDPANGLCNGTRLVVRGFQRNSIDAEIVLGQHVGKRIFLSRIPLCPSDEEMIPFQFKRKQFPVRLSFAMTVNKAQGQTIPNVGVYLPEPVFSHGQLYVALSRATARSNIKILVIPAVDGRKKLRKGVKKTPTVDCGTYIKNIVYKEEIPCEPRVEVVLIDDAFVERKWMECLFQPSAYLGDEVIDCYINLIKAQKHLKCRSGGRVHIENAFQFNFLKRDGDLEIKTEELYPIKDMTHICSAERRVLLYLDHDMVFIPINIRETHWYLAVIHARNMEIQVLDSLGTSQDRKDLTDSIKGLQRQIDMISQRKELKDHRWPDLQVASWSLREIDMGYAKQTDSSSCGLFLLNYIEYWTGDELSDSFTQDDMSHFRKKMAAILLSSDLNKRRGCLLYKNEKEVDSGSPSDVEILENPTDSNKRKLLHVLDDSEVVFEDEEGPITQADLQRWFVDDWDKRAPVKVSNDGCTNDFLMVGLSTKDMPVTKADSIDVLCDYIMAIEDDTTLERTWVRSFNPFKIEISVKDLQNILTTTQDMILRCFDMAVRLLANKESRKPKEEIINNRKHYMDMRFWRMVGFGKIPKYHQDPTTEELAKTLDCWPSMNYYITGCRYVLMPWKFNGCHALFVIDHVKKHVTFIDFTPTQDWCKHMPYKRFNTSYLVLQAMAMWGNDRRLKFVGDAKTLRRNFVIDLLSYEDNSCRYAIPANIQQRLVDIARKD

SEQ ID NO: 75883 - protein, 63 aa, Zea mays
  Coding DNA Sequence Number=SeqID_34104
MAHRSSSGPPEAFLPPFSPICPWIHGPFPAIEFAVAPSSSLPNSGDLGATLARAYLNSGLNMN

SEQ ID NO: 75884 - protein, 82 aa, Zea mays
  Coding DNA Sequence Number=SeqID_34105
MEFAVAPSSPLPNSGDPGGTLARACLNSGDLTAAERSDTAHSHLFSLDNEQSEVPKCVVGDLPEQQPGEGKCPLTYYVLHTL

SEQ ID NO: 75885 - protein, 79 aa, Zea mays
  Coding DNA Sequence Number=SeqID_34106
MTSAMQATEIARKILTMQAPIYMFRAPQFGGSRSISYHRKLRLQDTSFSLMTKAHKMKTSKEDKSKRRSYHQMDNFDSQ

SEQ ID NO: 75886 - protein, 54 aa, Zea mays
  Coding DNA Sequence Number=SeqID_34107
MDLPISLTKLDPNLLSVPQKSSVDMVDGVTWPTTLPLDWTVEWDAAPAGEEQEK

SEQ ID NO: 75887 - protein, 68 aa, Zea mays
  Coding DNA Sequence Number=SeqID_34108
MAADGVSGALYAKATQLVLWQTKPLSQIVAWSRGMLQDMVDGVTWPTTLPLGWTVEWDAAPAGEEQEE

SEQ ID NO: 75888 - protein, 139 aa, Zea mays
  Coding DNA Sequence Number=SeqID_34109
MGLGVCGSLCQGGYEIDGSGYGYGAASPLQPNRILAEYVDVYSPLLYTPNPPHPQVVSIATTAQAKMKLWKETFKSSKTTMSSRRGLAATPSRLPVKAAFIYVSFPHLGVKTGGYGRILAHPVSYPNVFKTDSGSDTDS

SEQ ID NO: 75889 - protein, 101 aa, Zea mays
  Coding DNA Sequence Number=SeqID_34110
MSESARPAVARKIVKSLQRCTRHSLERPPFETALGEYCQFPRPSLSPAAAAAATSGGRGEVDEGIFVRTPAAMSCAGFYKYVHRGENGRIRTDISSSCILP

SEQ ID NO: 75890 - protein, 181 aa, Zea mays
  Coding DNA Sequence Number=SeqID_34111
MANGEARLKTQLALARGALQASSDRRLTLARAINDEPTWRWGCTRWETRRQRLSERDGSRRDVECGRDSSAVIQSRRLALDRRRGITGGPRSAGMGLAAAMATARGWSRPAAVRRDPTLPCRARGGDLRSGLRACGTQARRGGTRNETAHARKKSLGAREDDRHGWGGLGAAPASTARAMG

SEQ ID NO: 75891 - protein, 37 aa, Zea mays
  Coding DNA Sequence Number=SeqID_34112
MANGEARLKTQLALARDALQASSARRLTLARAINDEP

SEQ ID NO: 75892 - protein, 160 aa, Zea mays
  Coding DNA Sequence Number=SeqID_34113
  Gene Ontology: Mol. function=ubiquitin thiolesterase activity; Biological process=ubiquitin-dependent protein catabolic process
  Homolog annotation: Hit_ID=Q9SSX1; Match level="QueryCoverage=36%, HitCoverage=21%, E-value=7e-19, Identity=76%"; Hit description=OSEYA1
MTKQPMKVYKWDLDETLILLKSLLVGSYARDFEGLKDREKSTQTRKRWENLILELCDVHFFYEERSAGPREIHQAFSVMPGASSKVFQDKLELQPMFVAQWKFAHVTFSKPEYLQDSDIVMNRFHKQRPVYGGWEQHHGLEHTSTTQKRSYLGNNQMNRI

SEQ ID NO: 75893 - protein, 119 aa, Zea mays
  Coding DNA Sequence Number=SeqID_34114
  Gene Ontology: Biological process=multicellular organismal development
  Homolog annotation: Hit_ID=Q9SSX1; Match level="QueryCoverage=50%, HitCoverage=21%, E-value=3e-20, Identity=78%"; Hit description=OSEYA1
MTNQPMKVYKWDMDETLILLKSLLVGSYARDFEGLKDREKSTQTRKRWENLILELCDEHFFYEEMFLVWFTGFFDSGFAAECRSKRDSPSLFSHARSIMYTLKEKGIDMVIASRSPPRT

SEQ ID NO: 75894 - protein, 351 aa, Zea mays
  Coding DNA Sequence Number=SeqID_34115
  Homolog annotation: Hit_ID=Q40082; Match level="QueryCoverage=43%, HitCoverage=32%, E-value=3e-19, Identity=45%"; Hit description =Xylose isomerase
  Pfam annotation: Domain name=DUF947; Domain location=27-148; Score= -55.9; E_value=0.02; Accession=PF06102.2; Description=Domain of unknown function (DUF947)
  Subcellular localization annotation: CTP_CleavageSite=18; ConfidenceScore=5.25e-01
MTPSARSTTTTAPASPSRSSTGRAGRARRHHHNFLGGIQRVHIIKGCVDGSLLLELFTGDGEGTMIARFRKIYNFLFDEDFLAEKEDKQLTSHPPKNIESKILREHIKKEREAAKAGKRSYYLKKSELCERKLVNKYNELKVKSTRFKGMLVNIDTNNGDPQVGWTCIVASGGFNFDAKLSVPLSYDSCSVKKWNSTNIGFFCGNRQRESTNVEDMFVAHISEIDTLAHGLHNVAKLIEMISSASGTRASGSEIGALIEERRLDMLEKKALECSEPTVPSSKQNCQRFYFSPLYRWCHVHSSRHSGKRRCQGWNSGLTTVYPRMTYLGFVFYTPQHMVQFVSLYVNGLQKY

SEQ ID NO: 75895 - protein, 351 aa, Zea mays; identical to SEQ ID NO: 75894
  Coding DNA Sequence Number=SeqID_34116
  Homolog annotation: Hit_ID=Q40082; Match level="QueryCoverage=43%, HitCoverage=32%, E-value=3e-19, Identity=45%"; Hit description =Xylose isomerase
  Pfam annotation: Domain name=DUF947; Domain location=27-148; Score= -55.9; E_value=0.02; Accession=PF06102.2; Description=Domain of unknown function (DUF947)
  Subcellular localization annotation: CTP_CleavageSite=18; ConfidenceScore=5.25e-01

SEQ ID NO: 75896 - protein, 232 aa, Zea mays
  Coding DNA Sequence Number=SeqID_34117
MKAEDPQILEGHPVSTRGEKKTWELPEGAIVLEGIPVSPQAMDKQEHPESSQDPPPELFEPLTMKKILAPSLEVKEEAASTPPAPPPSEEQQEPVQLEEEFDPVLPSQSPPEEVINISSLLTHPGDVSDCSCAPALPEEKLPGLKLVIPSPLRALGSEVFLHFGQSPACMRDLILTLCFHSHLNPPQEKSALPKKIPRSLPLKPGTSYRRNQSSRSVKRTDRENQSTAPESK

SEQ ID NO: 75897 - protein, 80 aa, Zea mays
  Coding DNA Sequence Number=SeqID_34118
MEQVLRGSGCDKGRGPGVAGDDGGGGCAAKGEWGGGSALQKGAWGGGSAHGGGHECEGHGALAKVKKNFTTQCTQRTGYN

SEQ ID NO: 75898 - protein, 327 aa, Zea mays
  Coding DNA Sequence Number=SeqID_34119
  Homolog annotation: Hit_ID=Q2QP98; Match level="QueryCoverage=24%, HitCoverage=9%, E-value=1e-08, Identity=40%"; Hit description=HAT family dimerisation domain containing protein
  Pfam annotation: Domain name=zf-C2HC_plant; Domain location=63-118; Score=64.1; E_value=4.5e-16; Accession=PF07567.3; Description =Protein of unknown function, DUF1544
MVGSASQSAFVPHVASNADSTGLASALSAAADCKTLAEKAIAALPPELSAQANDPKRKARSQDPGWQFGWWPDTTKKDFVQCVFCKKIVPSGIKRFKQHLAGGFGDTMKCARVPEVVSKEMHTYLRRNMRVMITADGDEGEEEGEQIDVCPLPSSGTKTKQAKKQIAQASMSSFVVAAPIKPNTQKASKSIQTKKRNRLEHQRLNKLVYASYNRKMENRFQTLRELGSKGKRRNPLMLEEFMWENEWVEENEDDGAGSSSQPQRTYVRTRKHSRNTAAQDIGEEDSDDQEDGVAAAQAEQQQTQEATGYMDEDGAAADAFCLDADLL

SEQ ID NO: 75899 - protein, 119 aa, Zea mays
  Coding DNA Sequence Number=SeqID_34120
MVPAARPDCLSASLCQVALQSERRRRRCLSVRPLYADGGYQLRISRLEGTPNYGPRQLDFNGGCGRANNVEVLFPESNMVSSASQSAFVPHVASNADSTGPALKKTSAMQAAGMAQKSL

SEQ ID NO: 75900 - protein, 148 aa, Zea mays
  Coding DNA Sequence Number=SeqID_34121
MDDFEEFQEYNEFQFTLLANPQSAAYEQEQQDSSPSPQREVESGRPPSPAPQPEMPPAPPQGIPAVGGDPDGDGDDDDAGGSSSHGMKRSEEPEPKGWIARPITRDAARGYHFHDALDTLLHRAFNRHTWSIEYRCVVYQHRCGLYPD

SEQ ID NO: 75901 - protein, 80 aa, Zea mays
  Coding DNA Sequence Number=SeqID_34122
MGRQRGILAQLRGKAASQTPPAAEARGKSHAAPGVGVPAPRAGDDAVSPDDWTDLAPCDAVDAPPDEKAKRGSLTYVSCI

SEQ ID NO: 75902 - protein, 263 aa, Zea mays
  Coding DNA Sequence Number=SeqID_34123
MQESLAGPPSQQNPPEGLPRNPLQDRHHSKILPRASPGIPCRTAITAKSSRGPPYTDHSPTALAPFRNKNGSIWTSLWTEHMKTGKYRGLTIKLSQTQNVPVTDGGLITVKYRGSYVKCGGEGVRVNPSRPMKNQESRLDREPRRGKRTQQRDPYRRINSAVTPTTTRGGVAAERRFRREIPRAPVEPRLQAEAEGDVGGTLCSQFPPRFGVGSRFQRWRRTGFFFLTALMAEAQGLHLSTGAAFVTENAGKKIGPGEFGAGG

SEQ ID NO: 75903 - protein, 116 aa, Zea mays
  Coding DNA Sequence Number=SeqID_34124
  Subcellular localization annotation: CTP_CleavageSite=71; ConfidenceScore=5.22e-01
MDLTRWPPPGSDTVKKKKKRGRKWAARERRRRWARMGTVGPGLLFLKVTLGTGFQSVKSIFVFRRKRTAITAKSSRGPSQESLAGPPSQQNPPEGLPRNPLQDRHHSKILPRASLH

SEQ ID NO: 75904 - protein, 334 aa, Zea mays
  Coding DNA Sequence Number=SeqID_34125
  Homolog annotation: Hit_ID=Q6Z901; Match level="QueryCoverage=23%, HitCoverage=13%, E-value=3e-12, Identity=54%"; Hit description =Kinesin light chain-like protein
MHISLSAEFDYSVGPTIVLLSRLISQPPDTRHAAGVGQRQPPGRRGSDFQRRAPPGNRPHPPPPGWLGRVDTKVSSSAPLLRILFCSETPAEAGSLPLAAAIHCGLDRHADAIPVLERAVTVRHKNRMLTASLRPVQPTATTTSSCSLSSPTRGVSGAAPDEIAGGLMEIPVIYEALGDLDEAQKLLHRALRRGLIEGVEHCCRCCGTNGRSVLHGGRYANSGNSFKGAVAKSRAIVQIDGVHSDIFSPGAERGSHTLLIQVLFTRYEFKVGTHDGLGHNPEQQDVEILFGPGYTGLADLGNRYFEKQSLKAAFATALADPTVDLNMQMHRRDL

SEQ ID NO: 75905 - protein, 102 aa, Zea mays
  Coding DNA Sequence Number=SeqID_34126
  Homolog annotation: Hit_ID=Q5VRV7; Match level="QueryCoverage=44%, HitCoverage=8%, E-value=4e-11, Identity=56%"; Hit description =Putative Ubiquitin isopeptidase T; Ubiquitin-specific protease-5
MPWEVQIDGVHSDIFSPGAERGSHTLLIQVLFTRYEFKVGTHDGLGHNPEQQDVEILFGPGYTGLADLGNRYFEKQSLKAAFATALADPTVDLNMQMHRRDL

SEQ ID NO: 75906 - protein, 54 aa, Zea mays
  Coding DNA Sequence Number=SeqID_34127
MADKGKGKGIVIGDPRMSIISQKEIARKASDEKAKKSEDARGLWDTSILFILIH

SEQ ID NO: 75907 - protein, 122 aa, Zea mays
  Coding DNA Sequence Number=SeqID_34128
MADKGKGKGIVISNPRMSDISQKEIARKASDEKAKSKKTVPRDRSTKKPRSPAKTKRSNKTTRKATQQASPIHSMRPGYFPPIYSSSVYYPVQTWNGMTMNPWYMYSPFVYPGWGAPPFYSF

SEQ ID NO: 75908 - protein, 122 aa, Zea mays
  Coding DNA Sequence Number=SeqID_34129
MADKGKGKGIVISNSRMSDISQKEIARKASDEKAKSKKIVPRDRSTKKPRSPAKTKRSNKTTRKATQQASPIHSMRPGYFPPIYSSSVYYPIQTWNDMTMNPWYMYSPFVYPGWGAPPFYSF

SEQ ID NO: 75909 - protein, 162 aa, Zea mays
  Coding DNA Sequence Number=SeqID_34130
MIYLMLHDRQSREDAIVGAVVEDHAGDDDGDDVGDIAGDDVGGYSTGVDSGAGGDSVAGFGSSRVRRTRKLHSVGPPPELPPESQALIKPSEKTWINDSFTGTGHYRHVNMVLGILVRLHWPGLVTLSSGKSVATTTWENYRYGICRMFHNTHTLDWDAFWV

SEQ ID NO: 75910 - protein, 221 aa, Zea mays
  Coding DNA Sequence Number=SeqID_34131
  Subcellular localization annotation: CTP_CleavageSite=24; ConfidenceScore=5.36e-01
MKGRMSKKMRSFARSLLGTRSRSRSSSRSSLRSEDLVFQGTGSSMSRHRALVEHLPLDDQHDDAKIKRQSREDAIVGAVVEDHAGDDDGDDVGDIAGDDVGGYSTGVDSGAGGDSVAGFGSSRVRRTRKLHSVGPPPELPPESQALIKPSEKTWINDSFTGTGHYRHVNMVLGILVRLHWPGLVTLSSGKSVATTTWENYRYGICRMFHNTHTLDWDAFWV

SEQ ID NO: 75911 - protein, 181 aa, Zea mays
  Coding DNA Sequence Number=SeqID_34132
  Subcellular localization annotation: CTP_CleavageSite=81; ConfidenceScore=5.05e-01
MGKPVPSLLMLLLSRGRVPLNSPTRWQGGRPSYPSNHLLQRTCKNYATSKAEYTNTQLDLPGALRPHPYQPSPSIPRQQIRAHRLGVQCLTDPDWPSCSDRTCTHHNRNGRPRLRSREGQSLLPGSIRLCIKPGLAFQSSGRQVLWCRLGCWIWGYLLSSTVYRNAMNIYVMIMQDLIILC

SEQ ID NO: 75912 - protein, 271 aa, Zea mays
  Coding DNA Sequence Number=SeqID_34133
  Subcellular localization annotation: CTP_CleavageSite=70; ConfidenceScore=5.15e-01
MEETHLHVFDAFCSRQSTLTRAPACPAPRLSQTSVVARARAYKTLPGFDYTLPRTPKPHRSLARRRLPVRRESAAAQSPCHRRPAIRAIPNPAHPSEKTVHTSVRLPERGIGVCFAGEASPRSPELSTPPEYVDRVNHSTILRFLVHTVATLPREAHRALGLNQFAVVWPVYSPPTRTPACARGPGDSGHPRRQAVPRRDRQSLPEPTPPSAGPPSPPDNLEKLYKNNPKTVTFADGEYIPRARSKESASGGSPRSSTRACTRGPARPLLW

SEQ ID NO: 75913 - protein, 135 aa, Zea mays
  Coding DNA Sequence Number=SeqID_34134
MGYENTQTREQKVWADLNRASHGEAVSTVAETGFGGNSKLGRTSDQLRMILGGWVLDYPMELAASGFVASTVAVIPVINGEARGSHGDAVVRLGHAVDNGDGTTAMRSNPRALRKGRGITAGQGGIQLTGGKDLY

SEQ ID NO: 75914 - protein, 173 aa, Zea mays
  Coding DNA Sequence Number=SeqID_34135
MAEARATLPRYPRTFPRPVGTICNGIPPEGGTEPLDPIKWDRVQQITCRNVSPVLQTLQNIGDEEMRKRLHNLHLLKTVLCIEKHFCKIRVSRKVIKFKEGGASGGREFGRDTRRLEERKLYWRKGFVASTVAVIPVINGEARGSHGDAVARLRHAVDNGDGTTTVNSFTRGR

SEQ ID NO: 75915 - protein, 170 aa, Zea mays
  Coding DNA Sequence Number=SeqID_34136
MKLWKETSRSSKTTTSSRCGLAATPSRLPMKVAVIYVSFSHFDLLWLDLDTLHESPSSPSYPPALLSVRFAVPWPAPPAPPLGAPASGVAAGGDLDDGGGDDSSSHDTDFPADQELEGWVARPITRDAARGCHFHDALDTLLRQALNRRTWSIEYHCVVYQHSRGVYPDR

SEQ ID NO: 75916 - protein, 86 aa, Zea mays
  Coding DNA Sequence Number=SeqID_34137
MKLWKETSRSSKTTTSSRRGLAATPSRLPVKAAVIYVSFSHFDLLWLDLDTLHESPSSPSYPPALLSVRFAVSNGRSKDYRPLSLP

SEQ ID NO: 75917 - protein, 367 aa, Zea mays
  Coding DNA Sequence Number=SeqID_34138
MKLWKETSRSSKTTTSSRRGLAATPSRLPVKVAVIYVSFSHFDLLWLDLDTLHESPSSPSYPPALLSVRFAVPWPDSPATWRDCTTACMRSRNEIESVRSCSPVLPLEAPPAPSLGALASGVAAGGDPDDGGGDDSSSHDTDFSANHEPEGWVARPITRDAARGCHFHDALDTLLRRALNRRTWSIEYRCVVYQHSRGVYPDRWEATCLVRRPENSLQGAEVCSEHYSISERDSAEAAMQDAARRALSHYCSVLGGVADGLDLKYYPRHPSGSTGGVIVSPVGEGNPRLSSTVNLAAVLNTELDHAPDELSRAHAEIALLRAERAERRHLDDGSPAPVGTQHPYRSPRRGRQSYGNPDCKTKINLEP

SEQ ID NO: 75918 - protein, 284 aa, Zea mays
  Coding DNA Sequence Number=SeqID_34139
  Homolog annotation: Hit_ID=Q6QP51; Match level="QueryCoverage=83%, HitCoverage=87%, E-value=1e-27, Identity=43%"; Hit description =Putative growth-regulating factor 1
MEARAHMSCNRRNGYYVQGNRTATRANVASTRLQNQCRDSRQPCAWPNSDKRHLRQKKRAPFRLCHDDRVKKGSKAGPSEGFDSRLRARRVRDDPGYVRYMVEARATLPRTSKRVPALPLRLGATVRYRNWGYPQCSLIRLENIFRTNHTRLMKRGSSQGLVYQGTRPHPSPASGGNNSPGRIHASPEASDATGSSASPDLRPWPQPRPREKVSASPDPRPRPQPRPRDKVSALPDLRPWPQPRPREKVSTSPDLRLGLRRSLRLARHGPRTDYATGDTSLPYS

SEQ ID NO: 75919 - protein, 92 aa, Zea mays
  Coding DNA Sequence Number=SeqID_34140
MGSARVAFVLLLLEERNFAEGGGQAEPELYLPYGPAGHLFLQHSGERALTGLAEGANFDNAGPIDRKRRQLQHAWFAGSAGSGTASGATSHC

SEQ ID NO: 75920 - protein, 325 aa, Zea mays
  Coding DNA Sequence Number=SeqID_34141
MHCALPPSEPPDGERPRCFRLAAVGGAQLRESWHLSAIARLQGFSSGSPAASPHRWSPKTVTTSSMVGRSKPGCGLCPTLSFKDLHHPCWGGGRGEPGPAFAWAGVPLLPLASGGGNHPPALRRRRPPAMPGKVNCCCPARVQHSILCPSDGGQPHRGVSQHVVRREGGTRVLGWSHSRFRGEDGSEDLPVRFGAAGARWCGVGGQVDAAVGAEVVVAGESFSADETVSATRGPTSGSLALISGSHPLSGDANKSLLAAASVLGPSLLLQRSLASRPEFVVPQAVRCGGCSYPREWNRSSICNGTLSAGVCSLWLSGPEHVCFWA

SEQ ID NO: 75921 - protein, 215 aa, Zea mays
  Coding DNA Sequence Number=SeqID_34142
  Gene Ontology: Mol. function=transferase activity; Cellular component= mitochondrion; Biological process=isoprenoid biosynthetic process
  Homolog annotation: Hit_ID=Q653T6; Match level="QueryCoverage=59%, HitCoverage=30%, E-value=4e-62, Identity=95%"; Hit description =Putative geranyl diphosphat synthase
  Pfam annotation: Domain name=polyprenyl_synt; Domain location=2-215; Score=-4.9; E_value=5.1e-09; Accession=PF00348.8; Description =Polyprenyl synthetase
MGVARPKELTANMCRAARRHDRAPPNDLSVLAGDFLLSRACVALAALGNTEVVSLMATAVEHLVTGETMQISTSREQRRSMEYYLQKTYYKTASLISNSCKAVAILAGHTTEVSVLAYEYGRNLGLAFQLIDDVLDFTGTSASLGKGSLSDIRHRGGYAENPNVTGIDTLADEVQVDLHVLHVLMLHGIGGEVDRANIVTVDEGGALKGVVELVE

SEQ ID NO: 75922 - protein, 104 aa, Zea mays
  Coding DNA Sequence Number=SeqID_34143
  Homolog annotation: Hit_ID=Q653T6; Match level="QueryCoverage=48%, HitCoverage=11%, E-value=1e-18, Identity=96%"; Hit description =Putative geranyl diphosphat synthase
MEQIPQTVKDLKRMIILFVDLKNCRLLSVLAGDFLLSRACVALAALGNTEVVSLMATAVEHLVTGETMQISTSRNKRVFKRTVSGLVGALFNIILHLQSPYYTA

SEQ ID NO: 75923 - protein, 158 aa, Zea mays
  Coding DNA Sequence Number=SeqID_34144
MPILLGAIPNPIRASTSGRGEGGGEEHHRLVGFAPAVGKWTAIGPFGGGWVPNGAPGGVNRSSVDGSAGGIPRRSCVFATSPPCAAGSCVRRRIPIRARALGHQEAVFRRCSAALGVLGPSRGVSGGKKRRGYLILIQRPRLDAGKSDLSHRFQGVRS

SEQ ID NO: 75924 - protein, 158 aa, Zea mays; identical to SEQ ID NO: 75923
  Coding DNA Sequence Number=SeqID_34145

SEQ ID NO: 75925 - protein, 299 aa, Zea mays
  Coding DNA Sequence Number=SeqID_34146
  Gene Ontology: Mol. function=catalytic activity; Cellular component =cytoplasm; Biological process=glutamine metabolic process
  Homolog annotation: Hit_ID=Q9AUL0; Match level="QueryCoverage=88%, HitCoverage=82%, E-value=1e-113, Identity=75%"; Hit description =Putative glutamine synthetase
  Pfam annotation: Domain name=GATase; Domain location=54-230; Score= -12.7; E_value=3.7e-06; Accession=PF00117.18; Description=Glutamine amidotransferase class-I
  Pfam annotation: Domain name=Peptidase_C26; Domain location=53-213; Score=-72.3; E_value=7.4e-05; Accession=PF07722.3; Description =Peptidase C26
  Pfam module annotation: Pfam domain module=GATase::Peptidase_C26; Domain location=54-230::53-213
MGPLDNAASAALEAAAAAAAAPSRAGSYAVLQCGEDSEYVRQKYGGYFAVFRALLEEDGERWRVYSAVRGELPADAEAAGFDGFVISGSCADAHGDEPWILALVDLTRRVHAAGKRVLGVCFGHQILCRALGGRTGRSAKGWDIGVSCIHPTAAAARLFAPLKLPVHMPVIEFHQDEVWELPPGAEALARSDKTRVEMFRLGGRAMGVQGHPEYSKDVLMSIADRLLRHNHILDCQVEVAKTSFDVRQPDKELWSKDCQVEVAKTSFDVRQPDKELWSKVCRGFLKGRLQSSQQQGVAL

SEQ ID NO: 75926 - protein, 326 aa, Zea mays
  Coding DNA Sequence Number=SeqID_34147
  Homolog annotation: Hit_ID=Q9AUL0; Match level="QueryCoverage=10%, HitCoverage=11%, E-value=5e-07, Identity=81%"; Hit description =Putative glutamine synthetase
MAATIAELDDAGSGGGCGGGERMKLLFSLGDRILPRPGDGTLWTSSCGSLTHTTQAIVRLQPSIDSSGDGTSFHLQQPMEVDGGASRRSLRVPVDKRLLGMVVEVDARWEPMGAQEYYDYWRAMYNARGNRVLHAPPATHVIYDSRSLANKLSQTFGPWAPTYRPAQENTRRDDVPVSEARRRIGRNTKDLEQEQAQAHRTKPEASIGYRCTNYSGHTVGDHRRRRGERWSVVEWSAWEGTPVAHEFDVDGRCTHIALLETHMQRPLRLSPTTPLDNVASAALEAVAAAPSWAGSYAVLQCGEDSEYGRQKYGGYFTVFCALLEED

SEQ ID NO: 75927 - protein, 105 aa, Zea mays
  Coding DNA Sequence Number=SeqID_34148
MPTLDESDMAVRQTGGRDPHHGIQIFDAPAGGPQPAGVAPSAPVVAPSAPAAAPHPLDEGKGAASSSFAQGGTGGSEEERRRRLRRTDGSFVSDPPEASEDCWWG

SEQ ID NO: 75928 - protein, 416 aa, Zea mays
  Coding DNA Sequence Number=SeqID_34149
  Homolog annotation: Hit_ID=O40947; Match level="QueryCoverage=37%, HitCoverage=13%, E-value=1e-09, Identity=25%"; Hit description=ORF 73
MPTLDESDMAVRQTGGRDPHHGIQIFDAPAGGPQPAGLAPSAPVVAPSAPAAAPHPLDEGKGAASSSFAQGGTGGSEEERRRRLRRTDGSFVSDPPEASEDCWGTSGSSNNNSNNSSSSNSNGSNSRGRPASRVTGRASSPSAPKVAPPSLDSMPAGGSGSQQEASAGSGTGEPPTATAASTMAMPSSTPSVAAEEVPATPTPAMEGDAGGASSSIPPPTPKETEVVFGRRLQSGAEPEAAPVPLLQVLSRAHQALHETEAAIQQEWEALESEHQRLSDWRTQLEERTKAASHQFAFERSELARDRKDYKKDLQKVYALELEVSRKEKMLAKREEALNQREALMTELRAKLKALDQTLEAQRTQQVEAIEKIKKWEQELEDKASDIALAEENLKAKDASLDRRVTDLARREADLAF

SEQ ID NO: 75929 - protein, 209 aa, Zea mays
  Coding DNA Sequence Number=SeqID_34150
  Homolog annotation: Hit_ID=O40947; Match level="QueryCoverage=74%, HitCoverage=13%, E-value=4e-10, Identity=25%"; Hit description=ORF 73
MRGARPSSIPPPTPKETEVVFGRRLQSGAEPEAAPVPLLQVLSRAHQALHETEAAIQQEWEALESEHQRLSDWRTQLEERTKAASHQFAFERSELARDRKDYKKDLQKVYALELEVSRKEKMLAKREEALNQREALMTELRAKLKALDQTLEAQRTQQVEAIEKIKKWEQELEDKASDIALAEENLKAKDASLDRRVTDLARREADLAF

SEQ ID NO: 75930 - protein, 127 aa, Zea mays
  Coding DNA Sequence Number=SeqID_34151
MNKTPALKVPLQMELRFHLRRYEQPHTIGGPTERQKTDERLAVARSSSGDDDDFCSGGPNSSSDDLRADAAAMRPSPMPSLERQGWAEGRRAGEGGAGSGSEATRLRESGTRQLPTPRTANALPPDH

SEQ ID NO: 75931 - protein, 329 aa, Zea mays
  Coding DNA Sequence Number=SeqID_34152
MQPGCTPSPAVTQDGDLQFDGGEKQAGLRPLPLPQLQGFSSSVLGRGVCRVGVGSCAGGDPLLPSVIGGKGVRRSWRWQLPRAWLSDPSGFGAAPGAAFRHGSWKRFFHRRDSWCRPRTGIQLYGLLPVLASRESLGSVGLAVRGFSCLVKGTPRPLFDEPKPGVAVSAQTEAELAQKEDLVGQSLAGSSTGGTDAGIELPRPRAGLMSSGDSWPRPRGDRSSRLLEPDSWRRPWRRWSGHGDDVVLQSRDSPTASPSEARLDLAEGVVDVEGAAAPFNYQDPSLQDRIILYREGPKNRFGRGAFKREDLFGPRNHLSERELLIAEGDE

SEQ ID NO: 75932 - protein, 336 aa, Zea mays
  Coding DNA Sequence Number=SeqID_34153
MPLPIESSNVFNELQRIARLANGSVGGRRADLYAPGRSHEGNGCSPRTPALESDRGNPTRVPLSVWGLLRGRRKIFGAGHWQRHYANAYARNIQGAEEGSDPPELIAPEEGQEPDPSEINLLCQESFDEGKSILPLMHYLPISLYHCLSLEYGMGIELHVLPVAWAILPFTALYDFRLTLELVSPGLACITFESQRIGTLQVVSEPIGLAIDRNPDLKSCLNKKTPLTPRSTLPPFPNINRPFFSSTRWKAPGLLGHPIAQRRKAFLTFYESCALRMGIRKKSEYVWKEYCENGIEKCSMAVYLGESRNYPNHPPFQVTFIGHRFPDTCQCCPKSP

SEQ ID NO: 75933 - protein, 69 aa, Zea mays
  Coding DNA Sequence Number=SeqID_34154
MKFTRGDAPSLVWRQALLVPGGSIEGVGAQAEEGSDPPEFIASEEGQEPDPSEINLLCQESFDEGKSIP

SEQ ID NO: 75934 - protein, 197 aa, Zea mays
  Coding DNA Sequence Number=SeqID_34155
MAAGPSRELAGRNTAEARAGHGGFLARAGPEEHPRRGRRHGRVGAVGSQLVPGACTWRKWRSGGAAEGIHGKAGMAGLEKGRGPARATAAHLLELGPVRPWPATERAERGEKTKMEQRPGGSRTPKGEEKPAVGGSSVRWREGTPGHGSPCALGKELQLYVLEGAHSWKMVEEEEKGVGGCGGNGKFQNAREGNPYL

SEQ ID NO: 75935 - protein, 165 aa, Zea mays
  Coding DNA Sequence Number=SeqID_34156
MWGGSRESTARRGWPDLRKAEREEKQKLEQRPGGSRTPRGEGKPAVGGSSATREEKLLLTGLGKKEQGRHAKGLKTGSAGVEGGGVQRRGGWGRTPCWMGAGRHGKEPSSGVRGACGWKMAEEEEKRCWRLGSEKANRDILKSLSMRGFEFGSDMRYLVESDKVD

SEQ ID NO: 75936 - protein, 113 aa, Zea mays
  Coding DNA Sequence Number=SeqID_34157
MERLLATCREGAPWGSSSLSHGAGEEKGYSAGASLREGEGAGRALGHGGKLGCLSYAGTMGGAALACVRSRKEDGMGRRSQSKKVNRDILKSLSIRGFEFGSDMRYLAKSDNN

SEQ ID NO: 75937 - protein, 455 aa, Zea mays
  Coding DNA Sequence Number=SeqID_34158
  Gene Ontology: Mol. function=cysteine-type peptidase activity; Biological process=proteolysis
  Homolog annotation: Hit_ID=Q53MK8; Match level="QueryCoverage=55%, HitCoverage=27%, E-value=2e-22, Identity=27%"; Hit description=Ulp1 protease family, C-terminal catalytic domain, putative
MKSVDRPPANPKHITIESSQEFFSVEIPRPASIGVPPNTKHSDQCPAPVEKPSVIYEANEQTGSGNDDDDFMTPTKKRNAAGSHMNILRKTCTKRPKVVETPRQKLNVRCNPQDVIITIKILNERQRQAVARKGFSNILDMTLDALGSRSHLRWLMDKLDHKDMTIRPRVGKELKITKETVHLILGLPNAGGGKPLGIDEAVAGNNLRAELGLPKDEFVVASLQDRLRKGNDDDLSIRCFFLILFNRLLFPTSSWGISNHEVLLTEEMDRFHEIDWCHLIFNDLCEAAQKWHTRSTSNVSTTIYGCSVVILFRIFSETCYSAVPSVQFQSEHRDRTNIFYVPRPDPCGHHTIHIQLPLIKDMLSSKIKQLQPRDRPKFIEKFVEYDSEVGKACSIIKSTLTKMVVKQYELADTFAELIDDVLRAESGDPDNVAEAPQTDKPPDISQHMSSEEQIP

SEQ ID NO: 75938 - protein, 202 aa, Zea mays
  Coding DNA Sequence Number=SeqID_34159
  Gene Ontology: Mol. function=DNA-directed DNA polymerase activity; Cellular component=nucleus; Biological process=DNA repair
  Homolog annotation: Hit_ID=Q5JLR9; Match level="QueryCoverage=59%, HitCoverage=24%, E-value=3e-43, Identity=62%"; Hit description =Putative DNA polymerase
MNVFLEGRVLGMPVARPEPQEPRVIAHVDMDCFYVQGPCAGDEAKRVCSGINLVQVPVARGKADLNLYRSAGAEVVAILASKGKCERASIDEVYLDLTDAAKEMLLQAPPDSPEGIFMEAAKSNILGLPADDLGVETIGDLLSFTEEKLQEQYGVNTGHGMVAAFARAAWLKEYHEKVLVEIYGYIPYLRDATPLDFYSLDF

SEQ ID NO: 75939 - protein, 110 aa, Zea mays
  Coding DNA Sequence Number=SeqID_34160
  Gene Ontology: Mol. function=hydrolase activity; Biological process =metabolic process
  Homolog annotation: Hit_ID=Q67J04; Match level="QueryCoverage=59%, HitCoverage=22%, E-value=3e-07, Identity=42%"; Hit description =Putative PrMC3
MVAAFARAAWLKEYHEKVLVEIYRSTVSSASTALRSSCRPPNGNSTNDVMSKDFTTGISSHLYLPAGVDPEKKLRIVVFFHDGAFMVHNASFPLYHIYVAFVDAAVPTSR

SEQ ID NO: 75940 - protein, 769 aa, Zea mays
  Coding DNA Sequence Number=SeqID_34161
  Gene Ontology: Mol. function=translation initiation factor activity; Cellular component=cytoplasm; Biological process=multicellular organismal development
  Homolog annotation: Hit_ID=Q75HC2; Match level="QueryCoverage=95%, HitCoverage=69%, E-value=1e-122, Identity=37%"; Hit description =Putative piwi domain containing protein
  Pfam annotation: Domain name=DUF1785; Domain location=82-132; Score =70.7; E_value=4.6e-18; Accession=PF08699.1; Description=Domain of unknown function (DUF1785)
  Pfam annotation: Domain name=PAZ; Domain location=136-270; Score =123.6; E_value=5.7e-34; Accession=PF02170.12; Description=PAZ domain
  Pfam annotation: Domain name=Piwi; Domain location=435-736; Score =346.3; E_value=5.1e-101; Accession=PF02171.8; Description=Piwi domain
  Pfam module annotation: Pfam domain module=DUF1785::PAZ::Piwi; Domain location=82-132::136-270::435-736
  Subcellular localization annotation: CTP_CleavageSite=44; ConfidenceScore=5.40e-01
MARVEPIGSTLAATSSVNTRVPMQRPDSGGLFRVRVRSKTYIVSVDLKKQLPLSQLSDLPVPREVLQGLDVVVREASRWNKIILGRGFYSPSSSIDIGQGAVAMKGTQQSLKSTQQGLILCVDYSVMPFYKAGPVMDLVQKLVRYLDYRTTLNKRQMENLVDELKGRRVTVIHRRTNQKYTVQGLTPLPASQMTFVDAESGQTRRLVDYYAQKHGKVIEYQMLPCLDLSKSKDKPNHVPIELCTLLEGQRFPKANLNQNSERILKGSALIRASDRRKEIQNLVNASDGPCRGEIAQQFGISLDVRMTEVTGRILPPPNLKLGASNGQTSKLSIDHGCQWNLVKKRLVEGRVLQCWGIVDFSAEPSGSGARQEPLDTRMFVEKIVRKCCELGIRMNPNPCFVHITRMAVLFDPHGLHEELNKAKQAAVSKKQRLQLLFCPMSEQHSGYKTLKLICDTQLGILTQCLLSDRANNRKGQDQYMTNLALKINGKLGGSNVQLFDSLPRVGGGVPFMFIGADVNHPSPGNVESPSIAAVVASVNSGVNKYVTRIRAQPHRCEVIQQLGEICRELIGVFEKQNRVKPQKIIYFRDGVSDGQFDMVLNEELADLEKAIKVNGYAPTITVVVAKKRHHTRLFPRDEQQPQTKTGNVPPGTVVDTGVVDPSAYDFYLCSHTGILGTSRPTHYYTLVDEHGFGSDDLQKLIYNLCFVFARCTKPVSLATPVYYADLAAYRGRLYYEAAMMASQAQRGGSFDVTNFPRLHKDVEDNMFFI

SEQ ID NO: 75941 - protein, 856 aa, Zea mays
  Coding DNA Sequence Number=SeqID_34162
  Gene Ontology: Mol. function=translation initiation factor activity; Cellular component=cytoplasm; Biological process=multicellular organismal development
  Homolog annotation: Hit_ID=Q75HC2; Match level="QueryCoverage=97%, HitCoverage=80%, E-value=1e-127, Identity=35%"; Hit description =Putative piwi domain containing protein
  Pfam annotation: Domain name=DUF1785; Domain location=169-219; Score =70.7; E_value=4.6e-18; Accession=PF08699.1; Description=Domain of unknown function (DUF1785)
  Pfam annotation: Domain name=PAZ; Domain location=223-357; Score =123.6; E_value=5.7e-34; Accession=PF02170.12; Description=PAZ domain
  Pfam annotation: Domain name=Piwi; Domain location=522-823; Score =346.3; E_value=5.1e-101; Accession=PF02171.8; Description=Piwi domain
  Pfam module annotation: Pfam domain module=DUF1785::PAZ::Piwi; Domain location=169-219::223-357::522-823
  Subcellular localization annotation: CTP_CleavageSite=33; ConfidenceScore=5.09e-01
MARVEPIGSTLAATSSVNTRVPMQRPDSGGSLSQATVKLLVNHFIVSYRKVTTIFHYDINIKLDEASSNASGKELSKAEFLSVKDELFRESSLRRLSSCVAYDGGRNLYTSAELPAGLFRVRVRSKTYIVSVDLKKQLPLSQLSDLPVPREVLQGLDVVVREASRWNKIILGRGFYSPSSSIDIGQGAVAMKGTQQSLKSTQQGLILCVDYSVMPFYKAGPVMDLVQKLVRYLDYRTTLNKRQMENLVDELKGRRVTVIHRRTNQKYTVQGLTPLPASQMTFVDAESGQTRRLVDYYAQKHGKVIEYQMLPCLDLSKSKDKPNHVPIELCTLLEGQRFPKANLNQNSERILKGSALIRASDRRKEIQNLVNASDGPCRGEIAQQFGISLDVRMTEVTGRILPPPNLKLGASNGQTSKLSIDHGCQWNLVKKRLVEGRVLQCWGIVDFSAEPSGSGARQEPLDTRMFVEKIVRKCCELGIRMNPNPCFVHITRMAVLFDPHGLHEELNKAKQAAVSKKQRLQLLFCPMSEQHSGYKTLKLICDTQLGILTQCLLSDRANNRKGQDQYMTNLALKINGKLGGSNVQLFDSLPRVGGGVPFMFIGADVNHPSPGNVESPSIAAVVASVNSGVNKYVTRIRAQPHRCEVIQQLGEICRELIGVFEKQNRVKPQKIIYFRDGVSDGQFDMVLNEELADLEKAIKVNGYAPTITVVVAKKRHHTRLFPRDEQQPQTKTGNVPPGTVVDTGVVDPSAYDFYLCSHTGILGTSRPTHYYTLVDEHGFGSDDLQKLIYNLCFVFARCTKPVSLATPVYYADLAAYRGRLYYEAAMMASQAQRGGSFDVTNFPRLHKDVEDNMFFI

SEQ ID NO: 75942 - protein, 245 aa, Zea mays
  Coding DNA Sequence Number=SeqID_34163
MWNGVSLLLGTDFKDTCQVVARKALRALCQIYEEVVDTPLRFFPPFQRNRPVWMARMRALEEDAEKHNRKLHVDLTTAQARVAALESREVIAVEALKQAKDEHVQKLMEAYLVTQNQRRALWIQEPVSSNPVQPMRAEDPHILEGHPISTKGEKKAWELPEGAIVLEGIPVFPRAMDKQEHPESSQDPLPELFEPLTMKKIPAPSLEVKEEAASTPPAPPPSEELQELVPLEEEFNPVLPSQSPP

SEQ ID NO: 75943 - protein, 130 aa, Zea mays
  Coding DNA Sequence Number=SeqID_34164
MRSDPRVMKVGEHREDKEGESFVRFGHGGGLTPSGITVKKKEIGSQMEVRCQTSFCQKEDGFPKLLRACTVRLGIRSQPEYDGREFVEHGTEKCVMTVYIGSSPHHVEMECHCWWAQISKTPAKSSLTRH

SEQ ID NO: 75944 - protein, 198 aa, Zea mays
  Coding DNA Sequence Number=SeqID_34165
  Gene Ontology: Mol. function=cysteine-type peptidase activity; Biological process=proteolysis
  Homolog annotation: Hit_ID=Q6H486; Match level="QueryCoverage=69%, HitCoverage=24%, E-value=5e-15, Identity=38%"; Hit description =Epstein-Barr virus EBNA-1-like protein
MESLFVGLSHNKPKKSVATAIVREVLSHDWLLLDYICTQGDLALIDFIKEIPCEPRVEVVLIDDAFVERKWMECLFQPNAYLGDEVIDCYINLIKAQKHLKCRSGGRVHIENAFQFNFLKRDGDVEIKTEGLYPIEDMTQICSAKRRVLLYLDHDMVFIPINIRETHWYLVVIHARNMEIQVLDSLGSSQDRKDLTDS

SEQ ID NO: 75945 - protein, 536 aa, Zea mays
  Coding DNA Sequence Number=SeqID_34166
  Gene Ontology: Mol. function=cysteine-type peptidase activity; Biological process=proteolysis
  Homolog annotation: Hit_ID=Q109R5; Match level="QueryCoverage=77%, HitCoverage=38%, E-value=3e-39, Identity=29%"; Hit description=Ulp1 protease family, C-terminal catalytic domain containing protein
  Pfam annotation: Domain name=Peptidase_C48; Domain location=65-285; Score=30.2; E_value=3.2e-06; Accession=PF02902.9; Description=Ulp1 protease family, C-terminal catalytic domain
MESLFVGLSHNKPKKSVATAIVREVLSHDWLLLDYICTQGDLALIDFIKEIPCEPRVEVVLIDDAFVERKWMECLFQPNAYLGDEVIDCYINLIKAQKHLKCRSGGRVHIENAFQFNFLKRDGDVEIKTEGLYPIEDMTQICSAKRRVLLYLDHDMVFIPINIRETHWYLVVIHARNMEIQVLDSLGSSQDRKDLTDSIKGLQRQIDMISQRKELKDHRWPDLQVASWPLKEIDMGYAKQTYSSSCGLFLLNYIEYWTGDELSDSFTQILENPTDSNKRKLLHVLDDSEVVYEDEEGPITQADLQRWFVDDWDKRAPVKVSTDGCNNDFLMVGLSTKDMPVTKADSIDVLCDYIMAIEDDTTLERTWVRSFNPFKIEISVKDLQNILTINQDMILRCFDMAVRLLANKESRRPKEEIINNRKHYMDMRFWVLMPWKFNGCHALFVIDHVIKHVTFIDFTPTQDWCKHMPYKRFNNSYLVLQAMAMWGNDKRLKFVGDAKTLRRNFVIDLLSYEDNSCRYAIPANIQQRLIDIAKKD

SEQ ID NO: 75946 - protein, 302 aa, Zea mays
  Coding DNA Sequence Number=SeqID_34167
MGYAKQTYSSSCGLFLLNYIEYWTGDELSDSFTQILENPTDSNKRKLLHVLDDSEVVYEDEEGPITQADLQRWFVDDWDKRAPVKVSTDGCNNDFLMVGLSTKDMPVTKADSIDVLCDYIMAIEDDTTLERTWVRSFNPFKIEISVKDLQNILTINQDMILRCFDMAVRLLANKESRRPKEEIINNRKHYMDMRFWVLMPWKFNGCHALFVIDHVIKHVTFIDFTPTQDWCKHMPYKRFNNSYLVLQAMAMWGNDKRLKFVGDAKTLRRNFVIDLLSYEDNSCRYAIPANIQQRLIDIAKKD

SEQ ID NO: 75947 - protein, 141 aa, Zea mays
  Coding DNA Sequence Number=SeqID_34168
  Subcellular localization annotation: CTP_CleavageSite=44; ConfidenceScore=5.40e-01
MARGAACLRGGPAWQPALRGPGSAACGCAPRRAGSPDAQARGPPAARRGQRGSQPARRPSRVLPGRGLERFLECPSVRTCSLDDHPGKQCNHEGGMRYLIGDGWFIGGDEDDGFDYGNGKEREEGIEVDLQEFQDIDEFED

SEQ ID NO: 75948 - protein, 167 aa, Zea mays
  Coding DNA Sequence Number=SeqID_34169
MAELPSCAAGPACPRLAQERPRHGTRCPRAASAARAAPAQPLAPLRVAQDWFVDRELFTGFEESTIKHGDQVIELFKFYEIEDPEHLFGEGKGLERFLECPSVRTCSLDDHPGKQCNHEGGMRYLIGDGWFIGGDEDDGFDYGNGKEREEGIEVDLQEFQDIDEFED

SEQ ID NO: 75949 - protein, 65 aa, Zea mays
  Coding DNA Sequence Number=SeqID_34170
MKLVYQPCSRLRAALGSSLIRDTSIRDGWFTDDDEDGYDHAYGNGKEEVVEADLQEFQDFDESED

SEQ ID NO: 75950 - protein, 311 aa, Zea mays
  Coding DNA Sequence Number=SeqID_34171
MEMIKDLPEELKQDIKRYLCLELVNGPGLSARPPSAYPPLSLSVRPAPPVGARFPRARSLPRSLSARGPGLSAPSSSPATVDPGPRRVPVAAEESPEPALRPPIRSPPFNPDRAALIQLARTQSWPSVGDPAAQAHYPLTPSLCPLGPACQPARALALPFGPSLSARPARALSARPRLSACPRPALSARPRLSACPRPALPARPRLSAAQAAARPRARPQDLILIVRFRSDGYTEQSVFPEAVAEEVPDQQFGEGKGLRLFPEYLSVRTAVVPSMGSRHSACSAEAECREGSETGISVVLTVKSSLGILFD

SEQ ID NO: 75951 - protein, 69 aa, Zea mays
  Coding DNA Sequence Number=SeqID_34172
MSSFFVTTYLHGSCIIPSLDRTAAASDEILAVDTPSEGGDVVIVSSSDNSTSTASAVSWRARFVGQGYK

SEQ ID NO: 75952 - protein, 93 aa, Zea mays
  Coding DNA Sequence Number=SeqID_34173
  Homolog annotation: Hit_ID=Q9FN84; Match level="QueryCoverage=88%, HitCoverage=25%, E-value=6e-11, Identity=68%"; Hit description =Arabidopsis thaliana genomic DNA, chromosome 5, P1 clone:MVA3
MNYVEENCAPAVYTPELRYVCIAGRYIQGAPLLGNSAAASDEILTVDTPSEGGDAVIVSSSDNSTSTPSAVSWRARVRWARLQAVGLTTVEGI

SEQ ID NO: 75953 - protein, 116 aa, Zea mays
  Coding DNA Sequence Number=SeqID_34174
MGPQFTRPSQSGQTPNTNETQGSETGQGNPQMDIQWSMPPRGQILPPPQPGMGYWPPPPWGYPTHPMGPWGRPPWPTQPLPSHAIQQKSDYQTRKSNYLKSNYRFSKKVKTASDAH

SEQ ID NO: 75954 - protein, 145 aa, Zea mays
  Coding DNA Sequence Number=SeqID_34175
MTTDQYICFLCCELCYVFVQMYSAQMGSPMGPQFTRPSQSGQTPNTNETQGSETGQGNPQMDIQWSMPPRGQILPPPQPGMGYWPPPPWGYPTHPMGPWGRPPWPTQPLPSHAIQQKSDYQTRKSNYLKSNYRFSKKVKTASDAH

SEQ ID NO: 75955 - protein, 151 aa, Zea mays
  Coding DNA Sequence Number=SeqID_34176
  Subcellular localization annotation: CTP_CleavageSite=73; ConfidenceScore=5.48e-01
CHRNRKAPPRHRQHAAPPRHRQQAAPPLHRPGSPPRLPFSSFRQLRRVAALPNLVGLGAATSQLVVASPSERRAAAPQPKLGLGVSSTVSLKMYSAQMGSPMGPQFTRPSQSGQTPNTNETQGSETGQGNPQMDIQWSMPPRGQILPPPQP

SEQ ID NO: 75956 - protein, 51 aa, Zea mays
  Coding DNA Sequence Number=SeqID_34177
MNAVVTSHLPVCLYSAAVENESPTVGTLRGSGYLGKNTGVIHESLHLYLAL

SEQ ID NO: 75957 - protein, 149 aa, Zea mays
  Coding DNA Sequence Number=SeqID_34178
  Homolog annotation: Hit_ID=Q8SA97; Match level="QueryCoverage=36%, HitCoverage=12%, E-value=2e-09, Identity=53%"; Hit description =Ornithine carbamoyltransferase
MTPVFLPRYPEPRKGEDAIPPEVEVEAETWGRARRRPPSEAEVEAEPYGRARRRPPSEAEVEAEPWGQARRRPPPEDEAQGRARRSFLLCLRLNLAVVSLILTGGTAVGAGRAAILALNAPAIRLVGEAIWPRLLHNEACPSWASGESR

SEQ ID NO: 75958 - protein, 222 aa, Zea mays
  Coding DNA Sequence Number=SeqID_34179
  Subcellular localization annotation: CTP_CleavageSite=57; ConfidenceScore=5.07e-01
MAWRSRALLQKVGNTGKDGTALAQGRSLPAAWTLVTPYCKRTRPGRGANTKAAALPLAFMGKLIPVPKRPLGKVFACCYKRSKQVATTFAPIVKATIYAALSSSDAFTSTKFIWVDSCKCSAAQFTTTNVSSAAVTTNKVVLDLVISLAAAKKPARTNTYAELRERKLMNKYNELKVRCCNRRFKGIDVGSMDEHSTKLDEEYESLAMRDVMVTGLTMSSKL

SEQ ID NO: 75959 - protein, 61 aa, Zea mays
  Coding DNA Sequence Number=SeqID_34180
ELRERKLMNKYNELKVRCCNRRFKGIDVGSMDEHSTKLDEEYESLAMRDVMVTGLTMSSKL

SEQ ID NO: 75960 - protein, 260 aa, Zea mays
  Coding DNA Sequence Number=SeqID_34181
  Subcellular localization annotation: CTP_CleavageSite=49; ConfidenceScore=5.04e-01
MGKPVPSLLMLLLSRGRVPLNSPTRWQGGRPSYPSNHLLQRTCKNYATSKAEYTNTQLDLPGYNGSSSLISCEKQTIRIEFFILASPSPYANSNRGKEKGSAAYRRRGRSGEGWGRLGETLAVTSRYGSTSEMAGIARSTRAGGCPRRRRVYRPNHGELVQSEGMVSFTGSRSDCVHKESKDGGVVYPVHVLRRGRELRRAWTGFSGEVNSDSLLGEPHEGVHSLLRGLDGVGNGSTGRSMVTEGLGGRGLAAHGQTATS

SEQ ID NO: 75961 - protein, 296 aa, Zea mays
  Coding DNA Sequence Number=SeqID_34182
MGKPVPSLLMLLLSRGRVPLNSPTRWQVQWIKQSHYLREADDSNRVFILARSGLTALAYNASLTPTGRRAVTALVPTITGMQVLWCGLGCWIWGYLLSSSLLRHEDVLSVSKITVYRNAMNIPSPYANSNRGKEKGGAAYRRRGRSGEGWGRLGETLAVTSRYGSTSEMAGIARSTRAGGCPRRRRVYRPNHGELVQSEGTVSFTGSRSDCVHKESKDGGVVYPVHVLRRGRELRRAWTGFSGEVNSDSLLGEPHGGVHSLLRGLDGVGNGSTGRSMVTEGLGGRGLAAHGQTATS

SEQ ID NO: 75962 - protein, 198 aa, Zea mays
  Coding DNA Sequence Number=SeqID_34183
MVRPTPISCPPLGEPNRSPNRPVCTLAGAPPRAADVRDLTCGEIEPQGPRNGEESEVTEGKTQPPLDSRARTWLYFDICESKPDSPVNKGKPRKDGFYLQEYFHLEQWWDLTAKFPVMLFSSLGTETILRMEHTLESLFLSRVRKRQSFVAFAPRWYLMKKNKNEDTGGLGPPHRIFLFDNYWEEFLPPLICVLSTRL

SEQ ID NO: 75963 - protein, 207 aa, Zea mays
  Coding DNA Sequence Number=SeqID_34184
MDAIARLLLDHQTTTLLLADPLVAIENRKKISAKLARSVQLNTIRHGTVTERIWLPAWLARRRRPLCAKIHAAAVIRVHWRLDNYGREKISRRGRDRIAPWIFSGCHGLAVPRPRASTTWPCGRHRSLHPPPRLCHSSENEEESEVTEGKTQPPLDSRARTWLYYDICESKPDSPVNKGKPRCMQPLPCVFKYFSHTLSLVKCALSL

SEQ ID NO: 75964 - protein, 179 aa, Zea mays
  Coding DNA Sequence Number=SeqID_34185
MAPLARPDCLSVSLCQVALQSEWRRRRYPSVRPHLYLEAVIVCLVLSADCRWSVTLYELSGAKKWSFSLPLICTEIHGSRRGAGNVEVIFPESHVVGGAPASSVADSIEPVSTSLAAADSSALAEKDIAALSPELRAQAIDPKSRQGHRTLDGSLGGGQTLSHCKGLCSVYFLFEDSSF

SEQ ID NO: 75965 - protein, 185 aa, Zea mays
  Coding DNA Sequence Number=SeqID_34186
  Homolog annotation: Hit_ID=Q8SA97; Match level="QueryCoverage=43%, HitCoverage=23%, E-value=2e-11, Identity=43%"; Hit description =Ornithine carbamoyltransferase
MALPVDVAGPRPRSGDVGAPPRLGSSLSSVAEAEPEPLGRARRRSFGRGQGGVRALGSGEAEPLQLYADGGYQLRIRRLEEIHGSRRGAGNVEVIFPESHVVGGAPASSVADSIEPVSTSLAAADSSALAEKDIAALSPELRAQAIDPKSRQGHRTLDGSLGGGQTLSHCKGLCSVYFLFEDSSF

SEQ ID NO: 75966 - protein, 152 aa, Zea mays
  Coding DNA Sequence Number=SeqID_34187
MGKSKKGGSSSHHSGDKRKREPSPPSEDFGDSEYSEEEFSSESEGSPVYTSPPASSDDSDDSQGIAAEVWTYIRVVERSGLEGSDESEVSSNENSSSSEGRAAVTATTRATTTMEATVMVTVTAARATATVATTRATVAAARPVAKHQWLKY

SEQ ID NO: 75967 - protein, 152 aa, Zea mays
  Coding DNA Sequence Number=SeqID_34188
MGKSKKGGSSSHHSGDKRKREPSPPSEDFGDSEYSEEEFSSESEGSPVYTSPPASSDDSDDSQGIAAEVWTYIRVVERSGLEGSDESEVSSNENSSSSEGRAAVTATTRATTTMEATVMVTVTAARATATVATARATVAAARPVAKHQWLKY

SEQ ID NO: 75968 - protein, 105 aa, Zea mays
  Coding DNA Sequence Number=SeqID_34189
MCEFSKENAFQNVYDEGFSPLSPLSRDDQGLPGLGEGLRVMKAGEHREDKEGESFVRFGHGGGLTPSGITVKPPGTSNCITFESQRIWGASGGIRAVRLAAGRNP

SEQ ID NO: 75969 - protein, 172 aa, Zea mays
  Coding DNA Sequence Number=SeqID_34190
MAQPEKVNADRPPGTSNCITFESQRIWGASGGIRAVRLAAGQDAEKRNRKLHVDLTTAQARATALESHEVIVVKALKQAKDEHVQKLMEAYLVTHNQRRALRIQEPAPSNPVQTMRVEDPQILEGHPVYIRGEKKAWELPEGAIVLEGIPVFPQAINKPEHPESSQDPSPEL

SEQ ID NO: 75970 - protein, 96 aa, Zea mays
  Coding DNA Sequence Number=SeqID_34191
MKHKTAALKLTQRFLSKDLKWERQEISEVRGVRDQLNCPSGPVQPVLTSEFRRENPSSTARRQVQLLKKLNSAEVKFSWKAQLQLKKFSCFSARTL

SEQ ID NO: 75971 - protein, 121 aa, Zea mays
  Coding DNA Sequence Number=SeqID_34192
MKHKTAALKLTQRFLSKDLKWERQEMCVREREAWQPVCQSDWQTDAQTDLQTEVRGVRDQLNCPSGPVQLVLTREFRRENPSSTARRQVQLLKKLNSAEVKFSWKAQLQLKKFSCFSARTL

SEQ ID NO: 75972 - protein, 123 aa, Zea mays
  Coding DNA Sequence Number=SeqID_34193
MSKNARDTRFIPRFGHTTKGRLNLPLGRLNLPWQAWQPVCQSDWQTDAQTDLQTEVRGVRDQLNCPSGPVQLVLTREFRRENPSSTARRQVQLLKKLNSAEVKFSWKAQLQLKKFSCFSARTL

SEQ ID NO: 75973 - protein, 56 aa, Zea mays
  Coding DNA Sequence Number=SeqID_34194
MVVPLVSGEPSPRDRAAPPRSDNEQPVVPECVAEDLPEQQPPEGKCPQTYHILFTL

SEQ ID NO: 75974 - protein, 126 aa, Zea mays
  Coding DNA Sequence Number=SeqID_34195
MDCAEFVPGNAVLTVGRQIRRLGPTINGVYERQTHGEWTRQRRCLSALHAKWAVARVLGLVVKEIYSAEDDPFCHYAYNEQQYAHDYEVDLDNEQPVVPECVAEDLPEQQPGGGKCPQTYRVLFTL

SEQ ID NO: 75975 - protein, 50 aa, Zea mays
  Coding DNA Sequence Number=SeqID_34196
MARVACALRGKRLDGDNEQPVVTECVAEDLPEQQPGGGKCPQTYHVLFTL

SEQ ID NO: 75976 - protein, 152 aa, Zea mays
  Coding DNA Sequence Number=SeqID_34197
MAFTPAREHQRALHAERRTNGGARLLRRAIARTTGQYTRKLGAHTGFSPRGEVMVSRSNDGGAGTRRTTVSQLRLRENHSGCERDGGRRTGGGRRRAVAGLSARVGRARERGRASLAEGANGRGEVGKQGTMFKRGAGARTWPENAWTWARP

SEQ ID NO: 75977 - protein, 145 aa, Zea mays
  Coding DNA Sequence Number=SeqID_34198
MTGDKQRQKPTSKISNTYINKVDKKAATPYLIKKKKNGKVIAIKANKQANKGKGAKHIWVPKEIISTMKSTKKVWIPKGNSLDARITWTKEFRKATPQKKTLRRSKKSPRMKMCVACGLSVRGAPNCLVPTRRTVWCTRNLSPNG

SEQ ID NO: 75978 - protein, 59 aa, Zea mays
  Coding DNA Sequence Number=SeqID_34199
MAARRAGRAVLSSLARSLGLQKPKRQAGSGAKNRHRTLSWVYKDQGEDGSNVPPGPIHI

SEQ ID NO: 75979 - protein, 196 aa, Zea mays
  Coding DNA Sequence Number=SeqID_34200
  Homolog annotation: Hit_ID=Q6QP51; Match level="QueryCoverage=20%, HitCoverage=18%, E-value=1e-07, Identity=67%"; Hit description =Putative growth-regulating factor 1
  Subcellular localization annotation: CTP_CleavageSite=98; ConfidenceScore=5.07e-01
MAARRAGRAVLSSLARSLGLQKPKRQAGSGAKNRHRTLSWVYKDQGEDGSNVPPGPNAGFKNARRNSRSSNGSRTRNGRPANYSPRRIDSAAGQAALLAGAAGDASPLPKQPRQKRNQAPGLLTDQRFEGWPPRRVQQPPQIAWALHLLLVRGSKAGPPKGSTAASGYSGSMPITDQGFEGWPPKRSQPPQTPSEG

SEQ ID NO: 75980 - protein, 153 aa, Zea mays
  Coding DNA Sequence Number=SeqID_34201
MNREMVKGFTRSTCAGEFLNSGERDLASLVMRALGSSLGKAHGLTRKLSGGLNRTEGDWRGVGHGGGSRAALAGCGEVAGGKGWLGRVRRGTEEAMGKATERWGGFYRRGRGRGAGSTVWRDAGTRGARGRALASSERVEHVARCFCPCSSLC

SEQ ID NO: 75981 - protein, 153 aa, Zea mays
  Coding DNA Sequence Number=SeqID_34202
MNREMVKGFTRSTCAGEFLNSGERDLASPVTRALGSSLGKAHGLTRKLSGGLNRTEGDWRGVGHGGGSRAALAGCGEVAGGKGWLGRVRRGTEEAMGKATERWGGFYRRGRDRGAGSTVWRDAGTRGARGHALASSERVEHVARCFCPCSSLC

SEQ ID NO: 75982 - protein, 34 aa, Zea mays
  Coding DNA Sequence Number=SeqID_34203
MGVERCISLRVFYFVGWYPKRRTKTRAARGKALR

SEQ ID NO: 75983 - protein, 58 aa, Zea mays
  Coding DNA Sequence Number=SeqID_34204
MARVACTLRGKRMDESLIIDKPYLDSLKASISLRVFYFVGWYPKTRTKTKAAGGKALR

SEQ ID NO: 75984 - protein, 68 aa, Zea mays
  Coding DNA Sequence Number=SeqID_34205
MARVACTLRGKRLDGGVSVLSVESLIIDKPYLDSLKASISLRVFYFVGWYPKTNTKTRAAGGKALRFY

SEQ ID NO: 75985 - protein, 184 aa, Zea mays
  Coding DNA Sequence Number=SeqID_34206
  Gene Ontology: Mol. function=zinc ion binding
  Homolog annotation: Hit_ID=O22402; Match level="QueryCoverage=45%, HitCoverage=19%, E-value=9e-41, Identity=91%"; Hit description=GDP dissociation inhibitor
  Pfam annotation: Domain name=GDI; Domain location=1-174; Score= -201.1; E_value=3.6e-06; Accession=PF00996.9; Description=GDP dissociation inhibitor
KYGLSDDTVDFVGHALALHRDDRYLDEPALDTVKRMKLYADSLARFQGGSPYIYPLYGLGELPQGFARLSAVYGGTYMLNKPDCKDLSLLLLTSERDPGIIPRNAHPPEPEGFDGNAEVGANQTPPIRNAEQITIWKAMTKTPASIALIIYTFIAVWFVGGLSVFHLYLMSTNQLSYFCFVDNI

SEQ ID NO: 75986 - protein, 335 aa, Zea mays
  Coding DNA Sequence Number=SeqID_34207
  Gene Ontology: Mol. function=zinc ion binding
  Homolog annotation: Hit_ID=Q6Z1H3; Match level="QueryCoverage=78%, HitCoverage=75%, E-value=1e-102, Identity=58%"; Hit description =Putative DHHC-type zinc finger domain-containing protein
  Pfam annotation: Domain name=zf-DHHC; Domain location=51-115; Score =123.0; E_value=8.4e-34; Accession=PF01529.11; Description=DHHC zinc finger domain
DLSLLLLTSGRDPGIIPRNAHPPEPEGFDDNAEVGANQTPPVRLPRVKDVVVNGITVKIKYCDTCMLYRPPRCSHCSICNNCVERFDHHCPWVGQCIGLRNYRFFYMFVFSTTLLCLYVFGFCWTTYENFRYRYDQRANPYNRGIMVNIKQILFTTIPPSKNNFCGRVQQEHGLRPRPTNGFMSPNMGRAVGDIEMGRKPVAWDEPRMAAEIGDLGAGLSNLLEDKDGRFRSASPDLSRDALAVGGGLEEEGSSAMNAGRSSWGVEAVWITYSPPLGALKTAFRSRPLSVVTITLLRSNLPSDKVNRSNKTAAPSDFTNYDDARDHCSLALPANS

SEQ ID NO: 75987 - protein, 94 aa, Zea mays
  Coding DNA Sequence Number=SeqID_34208
MGQAFSGRRVATRNTDAEKETRRALLPLFLRPVVRFAARVVEGGPAVAVATILHRAGALPRNRGLERLVRDDALHGRGQDCIASFVVGVMRCLC

SEQ ID NO: 75988 - protein, 1043 aa, Zea mays
  Coding DNA Sequence Number=SeqID_34209
  Homolog annotation: Hit_ID=Q3LHL2; Match level="QueryCoverage=46%, HitCoverage=92%, E-value=5e-17, Identity=22%"; Hit description =Hypothetical protein PPS5
  Pfam annotation: Domain name=DUF292; Domain location=191-312; Score =123.9; E_value=4.6e-34; Accession=PF03398.5; Description=Eukaryotic protein of unknown function, DUF292
MSCAYDDYYIKEYGVILALEVTQRRTDSNDHSSSLGVYGGAYLMTDNVRENFYRQSRVCPPPSPFSTTWSVPPPTAHSPPSPPRPSRSSCPGDAIGSFASSVGRSAGEARGGRARALGGEGGVRRSSGKMFDSLLNSKFYNKWYPKIASSSSGFLVLRSLCSRSQLDSFLLAPAVPRLLGSFFAGKHAFKCIRTRMALIRRKKHAMIRFLKKDVADLLANGLDTHAFRRIDGLLVELNHASCYDMIEGFCHYIGKQLGSLQKQRDCPPEFREAVSTLIFAAARYPDLPELCDLRHIFTERYGNFVEHFVSQEFIRKLDSTEFTNEERFQVMQSVAEELSVSFDAKELELKLWASLQTEHDMLEKGSRKPAELAMPSSSKQICVENASCEEQEDILEKSLTRPTEPAMSLFDKTKYNGDAPCERKNKDMLENYSTKPIELATASSNKQKVTENVPGKRNYDAEPAHHTEKVEIQLVQKDIQSVADAHHTIDENSRKQQPYVSDEKEHLQKPVSPVDTNRTQKDVQKLNRRAVRHLEKELMEAVELDLNGLPKFGFGAVRFPEAEGNKTVQLNVKPNEAVRDFHIEKENDEVLHCSRLPGGSEHNGGHADSGLRAQGLENQGHPVSPLSGNTRKKAPYTKLNAVNIKNPTEKQANNGFLHDKPQHLADLGYPVQKGQGDPERALTMLPPYVEPKSNMQPVNDDPEKQTPSGYRKPNIPGQTDHLENKNVLRPVSVRRRTAKLPAPVDAYVEVPNNAKVTSQTPKSHRSHSSRRNGAKDDQNRKCNGTDDVGSETNAQITPSSQSKHVGRRNGALNHKNNSGRLMQRMQPEAAETAIDCGNLLPRNANGQMRHNSGRGGDMDEEERMMDKLLMHYSKKGSDLTNNETHTDAAQKVSLHPTGRAISLPPESVGPSKDAKVPARCTSLQPEGPRSAHVHPKMPDFDELAARGCFLFNCLYRSVRLFAGEAAHDADDEAGDAVLSAAVERVVSDEALQAPVPGQCAGAVQDRCHRDRRPTFHHARREPNHRPEEQREQGLHEHECRQTT

SEQ ID NO: 75989 - protein, 80 aa, Zea mays
  Coding DNA Sequence Number=SeqID_34210
MAGGNTLAEAKERWLAGEGFELGIKVNIPDLWLKDWSKNYIIAYLAIKHSHRIYQTLSMSYSNNHNPCLAYVLGAISILI

SEQ ID NO: 75990 - protein, 111 aa, Zea mays
  Coding DNA Sequence Number=SeqID_34211
  Homolog annotation: Hit_ID=Q6Z7T4; Match level="QueryCoverage=40%, HitCoverage=7%, E-value=2e-07, Identity=62%"; Hit description =Putative AAA family ATPase
MCNASCRAPLDMEIEDTILLALQKPEVHDDIARDTCCKFGIDRPQVVPMQGLPQILVEENVVGLGFSMVLGFYKAIVFTNPLINSIRMLNCKICNDVILAPILMNQFFTIG

SEQ ID NO: 75991 - protein, 164 aa, Zea mays
  Coding DNA Sequence Number=SeqID_34212
  Homolog annotation: Hit_ID=Q6Z7T4; Match level="QueryCoverage=25%, HitCoverage=6%, E-value=2e-07, Identity=66%"; Hit description =Putative AAA family ATPase
MDAEPPLFSAFLYSPCVAVRSNYDDNTKVVEDFLSFLESLSSRFLDEYFEQWNQNTGHFPTSRLDAIQLISSLRYCNGRDCSYVLLVLFRLYGQRNRSYYTREIEDTILLASQKPEVYDDIARDTCCKFGIDRPQVVPVQGLPQSLNHTYGMHVKGKDEMELKF

SEQ ID NO: 75992 - protein, 86 aa, Zea mays
  Coding DNA Sequence Number=SeqID_34213
MAQAAYQMWLVRVLIYTLGTLQIGGSRLSLTVAILAKGRYLRTQVKSIHDEKSMIVTKVAVVPKLRVRELRLNHGKRNRLKEETAI

SEQ ID NO: 75993 - protein, 71 aa, Zea mays
  Coding DNA Sequence Number=SeqID_34214
MDNIELHLYLRLDRSISVGGLRPPKVLKNVKSIHDEKSMIVTKVVVVLKLRARELRLNHGKRNRLKGEKAI

SEQ ID NO: 75994 - protein, 108 aa, Zea mays
  Coding DNA Sequence Number=SeqID_34215
MQGSWLTAIAAKSTRDLPTLTTPLLPLPLSGKAIANYPSESGVNKNYGLGLNFCKCQGPRDKKPETQSTVTMDRGLFSPKSEGFMCKHARPKGYPMILAVRLGTDAPD

SEQ ID NO: 75995 - protein, 87 aa, Zea mays
  Coding DNA Sequence Number=SeqID_34216
MSTEKRHLDQIILLALWLLLNHLFFSCGGCKAIANYPSESGVNKNIIGYKVVKGTTCLALENPVWTARQIIESAGANSEDSPDPGAL

SEQ ID NO: 75996 - protein, 163 aa, Zea mays
  Coding DNA Sequence Number=SeqID_34217
  Homolog annotation: Hit_ID=Q10NC7; Match level="QueryCoverage=40%, HitCoverage=14%, E-value=1e-14, Identity=51%"; Hit description =Oxysterol-binding protein, expressed
MRFRKTFRLEDQFTPRWFNVTDAVASTPWGDLQICEYSGKYTEHRAAIDSSSTTDDETDVTSVQFDPWQYGADMGQYRGNEILAAEGVFYFQQVTPGTPIRTRFCNHDSHNVVKVAANSRVMLPVEQGSECKPAFCISAFCSVLTSSSRVLACAMAEWQAQHC

SEQ ID NO: 75997 - protein, 332 aa, Zea mays
  Coding DNA Sequence Number=SeqID_34218
  Homolog annotation: Hit_ID=Q8L4B1; Match level="QueryCoverage=42%, HitCoverage=35%, E-value=4e-27, Identity=48%"; Hit description =Putative apoptosis antagonizing transcription factor
MEERRPWEEKQQPAPRRDFNEDRAQGNDRAEGELGEHQGFADNLFKEAKTKLDSLNGIIYSNIIHAHCSFKAIWDKTLEMRFLLQKAFSTSNKLPQEPIRTRFCNHDKQIEQAYDDLLNSSKHTLRSMMELQEALLESNQATKDANVAYVFGQSVAISARGERPKDWVPPEDVSAVYYAKCDDIDETLPMGADGNDGIVDIFSAHSYYDAAGHNCDESFYYLFYGEKLKLSRNLKILDLPTDVIVPRTLDSLAGAPNSLIGPDSCISTIPPKSVHPISQTLHISRGQPWNRSSKTRQFLHLQQFLFENPEYGVYFRKCYPTKRKDSQGYVGL

SEQ ID NO: 75998 - protein, 120 aa, Zea mays
  Coding DNA Sequence Number=SeqID_34219
MTGDKKRQKLKQKPTSKISNTYIKKVDKKTATPYLIKRKKNGKVIVIKANKPANKGKGAKCIWVPKEIISTMKSTKKVWMPKGNLIVRKMKSPEKDNNLPLQIFKTSSFYIIYMSSPTFG

SEQ ID NO: 75999 - protein, 256 aa, Zea mays
  Coding DNA Sequence Number=SeqID_34220
  Gene Ontology: Mol. function=translation initiation factor activity; Cellular component=membrane
  Homolog annotation: Hit_ID=Q6ZGV8; Match level="QueryCoverage=90%, HitCoverage=16%, E-value=5e-73, Identity=62%"; Hit description =Eukaryotic translation initiation factor 3 subunit (EIF-3)-like
MAGKTKGGKNKGKAQGAGQSASAEPEVPATDGAEVVNPENGEVNEPPVTEDGVKNVEKGDGDALEVVQPARKPAEGELHLYAVPVRTQSGEKLELQLSPGDSVIDVKQFLLDAPETCFYTCYNLILHTEDGSAHQLEDYNEISEIADITSSGCSLEMVAAIYDERSIRSHLRRVRELLSLSSLYVSLSTSLALHQESAQGKSAGPEKGPIQELDGLNFMEDSAGALTNLLASAPAEIKCVGSIVFSSFNPPPSYRR

SEQ ID NO: 76000 - protein, 198 aa, Zea mays
  Coding DNA Sequence Number=SeqID_34221
  Gene Ontology: Mol. function=translation initiation factor activity; Cellular component=membrane
  Homolog annotation: Hit_ID=Q6ZGV8; Match level="QueryCoverage=90%, HitCoverage=12%, E-value=3e-63, Identity=69%"; Hit description =Eukaryotic translation initiation factor 3 subunit (EIF-3)-like
MAGKTKGGKNKGKAQGAGELHLYAVPVRTQSGEKLELQLSPGDSVIDVKQFLLDAPETCFYTCYNLILHTEDGSAHQLEDYNEISEIADITSSGCSLEMVAAIYDERSIRSHLRRVRELLSLSSLYVSLSTSLALHQESAQGKSAGPEKGPIQELDGLNFMEDSAGALTNLLASAPAEIKCVGSIVFSSFNPPPSYRR

SEQ ID NO: 76001 - protein, 52 aa, Zea mays
  Coding DNA Sequence Number=SeqID_34222
  Subcellular localization annotation: CTP_CleavageSite=31; ConfidenceScore=5.24e-01
MTKGPFGTAPAPDSKRGSGGVVPNGRIRRISSSRGSGSGAKEAGVGALPNGP

SEQ ID NO: 76002 - protein, 459 aa, Zea mays
  Coding DNA Sequence Number=SeqID_34223
  Gene Ontology: Mol. function=phospholipid binding; Cellular component= coated pit; Biological process=endocytosis
  Homolog annotation: Hit_ID=Q9FRH3; Match level="QueryCoverage=69%, HitCoverage=81%, E-value=6e-48, Identity=35%"; Hit description =Putative clathrin assembly protein At1g25240
  Pfam annotation: Domain name=ANTH; Domain location=88-365; Score =158.7; E_value=1.5e-44; Accession=PF07651.6; Description=ANTH domain
GQERLWRGVELATVVDLIFPGRLEHSGAGEGGDARWWRCAGGQKMTTARQWWRRAAAAVKDRRSLYLTRVVALRPRPVSGVATPALRSPKLEAAVIRATSHDERSVDHGSAARVFALARASPPSLQPLMWALARRARRTRCWAVALKALVLAHGLLLRSDVAPRAARLGRVPFDLADFRDRSSPPSKSSGFSAFVRAYFRFLDTRSLFTAQELDAANSGEADGEDARLDSVTKLQHLLDLLMQIRPYGDGVQQGLILEAMDCVVIEIFEVNSQICTGIARFLVAVLGSAPTTPRARPGETLAAARRRRGVQGMRVLRKAAEQSAQLSSYLELCRDLGVLNAAEFPAVERVSDDDIRDLEKIIMNHVVEERGKDVEKETKALVAVEETRLASKTVVTKEWVVFDDDDNDAAGARPRARLAQLQLLILSEDLEEPCQTGESGGSAPHEDQDLELKKQELEL

SEQ ID NO: 76003 - protein, 83 aa, Zea mays
  Coding DNA Sequence Number=SeqID_34224
  Homolog annotation: Hit_ID=Q6H486; Match level="QueryCoverage=77%, HitCoverage=13%, E-value=4e-07, Identity=42%"; Hit description =Epstein-Barr virus EBNA-1-like protein
MVFILINIRETHWYLVVINARNMEIQVLDSLGTSQDRKDLTDSDAKIIRRNFVIDLLSYEDNSCRYIIPANIQQRLIDIAKKD

SEQ ID NO: 76004 - protein, 662 aa, Zea mays
  Coding DNA Sequence Number=SeqID_34225
  Homolog annotation: Hit_ID=Q109R5; Match level="QueryCoverage=47%, HitCoverage=29%, E-value=1e-36, Identity=30%"; Hit description=Ulp1 protease family, C-terminal catalytic domain containing protein
  Pfam annotation: Domain name=Peptidase_C48; Domain location=65-286; Score=48.1; E_value=3e-11; Accession=PF02902.9; Description=Ulp1 protease family, C-terminal catalytic domain
MESLFVGLSHNKPKTSVATAIVREVLSHDWLLLDYICTQGDLALIDFIKEIPCEPRVEVVLIDDAFVERKWMECLFQPSAYLGDEVIDCYINLIKAQKHLKCRSGGRVHIENAFQFNFLKRDGDLEIKTEELYPIKDMTHICSAERRVLLYLDHDMVFIPINIRETHWYLVVIHARNMEIQVLDSLGTSQDRKDLTDSIKGLQRQIDMISQRKELKDHRWPDLQVASWPLREIDMGYAKQTDSSSCGLFLLNYIEYWTGDELSDSFTQDDMSHFRKKMAAILLSSDLNKRRGCLLYKNEKEVDSGSPSDVEILENPTDSNKRKLLHVLDDSEVVFEDEEGPITQADLQRWFVDDWDKRAPVKVSNDGCTNDFLMVGLSTKDMPVTKADSIDVLCDYIMAIEDDTTLERTWVRSFNPFKIEISVKDLQNILTTTQDMILRCFDMAVRLLANKESRRPKEEIINNRKHYMDMCFWRMVGFGKLPKYHQDSTTEELAKTLDCWPSMNYYITGCRYVLMPWKFNGCYALFVIDHVKKHVTFIDFTPTQDWCKHMSYKRFAEAIIMASKKYKIAYSKKRSAWAEDIFKWEHTIQTGVLIDLRGFNTGYLVLQAMAMWGNDRRLKFVGDAKTLRRNFVIDLLSYEDNSCRYAIPANIQQRLIDIAKKD

SEQ ID NO: 76005 - protein, 176 aa, Zea mays
  Coding DNA Sequence Number=SeqID_34226
MSAQMTNPVLLCNNPLFEHYTHIQQIVLMPWKFNGCYALFVIDHVKKHVTFIDFTPTQDWCKHMPYKRFAEAIIMASKKYKIAYSKKRSAWAEDIFKWEHTIQTGVPIDLRGFNTSYLVLQAMAMWGNDRRLKFVGDAKTLRRNFVIDLLSYEDNSCRYAIPANIQQRLIDIAKKD

SEQ ID NO: 76006 - protein, 738 aa, Zea mays
  Coding DNA Sequence Number=SeqID_34227
  Gene Ontology: Mol. function=zinc ion binding
  Homolog annotation: Hit_ID=Q5N7K2; Match level="QueryCoverage=80%, HitCoverage=74%, E-value=1e-180, Identity=67%"; Hit description=Zinc finger protein-like
  Pfam annotation: Domain name=Hemerythrin; Domain location=111-172; Score=11.4; E_value=1.1; Accession=PF01814.13; Description =Hemerythrin
  Pfam annotation: Domain name=Hemerythrin; Domain location=230-296; Score=3.6; E_value=10; Accession=PF01814.13; Description=Hemerythrin
  Pfam annotation: Domain name=Hemerythrin; Domain location=392-453; Score=32.7; E_value=1.3e-06; Accession=PF01814.13; Description =Hemerythrin
  Pfam annotation: Domain name=Hemerythrin; Domain location=463-554; Score=22.7; E_value=0.0013; Accession=PF01814.13; Description =Hemerythrin
  Pfam module annotation: Pfam domain module=Hemerythrin::Hemerythrin::H emerythrin::Hemerythrin; Domain location=111-172::230-296::392 -453::463-554
MELEDFIRLDSIWMRWTLLAEDRTPKPGSQPRKPGDRRRQVENTLGGRSQAASESRGGVAVLAHGGGHSRRRSGMATPTPMPGSEGTLVAVMPRSPSPTPAEAGTSATETPVLIFLYFHKAIRAELEALHGAAVLLATERTGDVAALAERCRFFFSIYKHHCDAEDANSIQSAAVMHFKEVVDLKGQRTGGRTGVLAVVVKHKEQGGKRVRDATLRNIAEDQVVFPAVDSELSFVQEHAEEEHRFNNFRCLIQQFQIAGAKSTALDFYSKLCSHADKILETIEKHFSNEETKLQTENGSRPGKRGKDAVSFPGTNGSYCSQTADIDASPCSKKPCCIPGLRVKSSNLGIGSLASVKSFRSLPYNSTAPSIYSSLFSWETDASLSCSDGISRPIDTIFKFHKAIRKDLEYLDVESGRLIDGDESCLRQFIGRFRLLWGLYRAHSNAEDEIVFPALESRETLHNVSHSYTLDHKQEEQLFEDISDVLFQLSQLHDSQGHAQTKVNEVKQSCFHSSNDVDFTRKYNELATKLQAMCKSIRVALTNHVHREELELWPLFDKHFSVEEQDKLVGRIIGSTGAEVLQSMVPWVTSALTQEEQNKMLDTWKQATKNTMFGEWLNEWWKGAGTSDSSAEAPSAPEDSHLQDKLEQNDQMFKPGWKDIFRMNQSELEAEVYFGMLDALLAAEELPEEYRDRCQDILCNDCERKGRCRFHWLYHKCGSCGSYNTRVIKTDTADCSTPN

SEQ ID NO: 76007 - protein, 159 aa, Zea mays
  Coding DNA Sequence Number=SeqID_34228
  Homolog annotation: Hit_ID=Q5N7K2; Match level="QueryCoverage=59%, HitCoverage=7%, E-value=2e-32, Identity=73%"; Hit description=Zinc finger protein-like
EEARVPGDRRRQVENTLGGRSQAASESRGRVAVLAHGGGHSRRRSGMATPTPMPGSEGTLVAVMPRSPSPTPAEAGTSATETPVLIFLYFHKAIRAELEALHGAAVLLATERTADVAALAERCRFFFSIYKHHCDRDLRPLFFVFLAIFPCHFLLGGGP

SEQ ID NO: 76008 - protein, 397 aa, Zea mays
  Coding DNA Sequence Number=SeqID_34229
  Gene Ontology: Mol. function=peptidase activity; Cellular component =integral to membrane; Biological process=aromatic compound metabolic process
  Homolog annotation: Hit_ID=Q6YUU0; Match level="QueryCoverage=72%, HitCoverage=72%, E-value=8e-99, Identity=63%"; Hit description =Putative Cgi67 serine protease
  Pfam annotation: Domain name=Abhydrolase_1; Domain location=125-368; Score=-7.0; E_value=0.028; Accession=PF00561.10; Description =alphabeta hydrolase fold
  Pfam annotation: Domain name=BAAT_C; Domain location=152-318; Score= -82.4; E_value=0.04; Accession=PF08840.1; Description=BAAT Acyl-CoA thioester hydrolase C t
  Pfam annotation: Domain name=Peptidase_S9; Domain location=119-293; Score=-82.9; E_value=0.08; Accession=PF00326.11; Description=Prolyl oligopeptidase family
  Pfam module annotation: Pfam domain module=Abhydrolase_1::BAAT _C::Peptidase_S9; Domain location=125-368::152-318::119-293
  Subcellular localization annotation: CTP_CleavageSite=26; ConfidenceScore=5.42e-01
MGGVTSTIAARFAFFPPTPPSYTVVVADAATGRLAIPEISRALSRRRRRDGAGAGGSSSASSVAAAENEEGAEVVRLRTRRGNEIVGVYVRHARASATLLYSHGNAADLGQMYGLFVELSRRLRVNLFGYDYSGYGRSTGKPTECNTYADIEAAYNCLKEKYSVADEDIILYGQSVGSGPTIDLASRLPDLRAVVLHSPILSGVRVLYPVKRTFWFDIYKNIDKIGLVNCPVLVIHGTSDDVVDCSHGKQLWEHCKVKYSPLWLNGGGHCNLELYPDYIKHLKQFVSSVSKKTSKPDQKEIMAKDGTTSKEREEAYSEKPQPAAKCSQSQISRKSIDSRVGKSKTVDVPDKSRMSSDDIDKFRRRRCLPYYTDRAPLINCDTAASGSCSTYQLETVG

SEQ ID NO: 76009 - protein, 410 aa, Zea mays
  Coding DNA Sequence Number=SeqID_34230
  Gene Ontology: Mol. function=peptidase activity; Cellular component =integral to membrane; Biological process=aromatic compound metabolic process
  Homolog annotation: Hit_ID=Q6YUU0; Match level="QueryCoverage=65%, HitCoverage=73%, E-value=3e-97, Identity=63%"; Hit description =Putative Cgi67 serine protease
  Pfam annotation: Domain name=Abhydrolase_1; Domain location=125-389; Score=-1.6; E_value=0.011; Accession=PF00561.10; Description =alphabeta hydrolase fold
  Pfam annotation: Domain name=BAAT_C; Domain location=152-318; Score= -82.4; E_value=0.04; Accession=PF08840.1; Description=BAAT Acyl-CoA thioester hydrolase C t
  Pfam annotation: Domain name=Peptidase_S9; Domain location=119-293; Score=-82.9; E_value=0.08; Accession=PF00326.11; Description=Prolyl oligopeptidase family
  Pfam module annotation: Pfam domain module=Abhydrolase_1::BAAT _C::Peptidase_S9; Domain location=125-389::152-318::119-293
  Subcellular localization annotation: CTP_CleavageSite=26; ConfidenceScore=5.42e-01
MGGVTSTIAARFAFFPPTPPSYTVVVADAATGRLAIPEISRALSRRRRRDGAGAGGSSSASSVAAAENEEGAEVVRLRTRRGNEIVGVYVRHARASATLLYSHGNAADLGQMYGLFVELSRRLRVNLFGYDYSGYGRSTGKPTECNTYADIEAAYNCLKEKYSVADEDIILYGQSVGSGPTIDLASRLPDLRAVVLHSPILSGVRVLYPVKRTFWFDIYKNIDKIGLVNCPVLVIHGTSDDVVDCSHGKQLWEHCKVKYSPLWLNGGGHCNLELYPDYIKHLKQFVSSVSKKTSKPDQKEIMAKDGTTSKEREEAYSEKPQPAAKCSQSQISRKSIDSRVGKSKTVDIVEQYLSEDTIAWKSSNFITYIMLRGMASAVPAVERKELLNKKRNQKATIIIHQRQSHLTESW

SEQ ID NO: 76010 - protein, 195 aa, Zea mays
  Coding DNA Sequence Number=SeqID_34231
GFPDGIPCKGPCGDQRPREACQRPTKRRHPDGPEIPRKKGRVPPRGPEIPRRSGWGRFPQRVQGGPAPDGLTPEQPGAGDPVPGDWAPQEAKRRQARGRESAPRAAAPGWAATSKPQQPTAQRRAKIRAGRNAGRRSAQRRRRRDCSGGWVAATDPQPTAERRAEIRAGRSAGRRSAQGRRRRDCSGGWGDRDGG

SEQ ID NO: 76011 - protein, 347 aa, Zea mays
  Coding DNA Sequence Number=SeqID_34232
  Homolog annotation: Hit_ID=Q5VP32; Match level="QueryCoverage=35%, HitCoverage=33%, E-value=4e-38, Identity=56%"; Hit description =Lipase-like
  Pfam annotation: Domain name=Lipase_GDSL; Domain location=141-340; Score=-18.5; E_value=0.058; Accession=PF00657.12; Description=GDSL -like LipaseAcylhydrolase
  Subcellular localization annotation: CTP_CleavageSite=57; ConfidenceScore=5.15e-01
MAPQKPTAQRGAESAQEPPQKPTAQHGAEFAQERRHRVAATAGRSSRRRSAGRRSARAATRDGDPRRDGGAATAAEDGWPRRIRSRRRSAGRRSARAAARDEDPRRDGGAATAAEDGGTATAAEDGRPRRRTTAEDREAATAARRLRMGRPRRRPAAEDGKAATAAKKLGKTLILVQRGRQPLCGGGDWMGVVDDGGEVGGNDYNHLIVRDKSVDELHEVVPNVVGAISSAITDLINLGAKKLVVPGNFPIGCVPLYLAIFQSQKEDYYEEQTGCIKWLNDFAEYHNKMLQEELEKLRNLHPDVTIIYADYYGAALNIFRAPLQFGEYHFQIKTNKTYNITDVDFLF

SEQ ID NO: 76012 - protein, 82 aa, Zea mays
  Coding DNA Sequence Number=SeqID_34233
MANSPIEAEAVFSSKGIDEYAKLFSKPLSDSQISALAALFGWSVPDSHGESDYNADNLVFCGKARMSTHQRTQQMSRLAEVD

SEQ ID NO: 76013 - protein, 73 aa, Zea mays
  Coding DNA Sequence Number=SeqID_34234
MVRETRIMLWFWFNYDDVFLDEEMPNGTFAEYVDVYSSLLYHKTPGCPHCNHCSGGDEVVEGDFQEFQDYDEF

SEQ ID NO: 76014 - protein, 66 aa, Zea mays
  Coding DNA Sequence Number=SeqID_34235
MGSHDPQAKQESRLMGKPNGAFAEYVDVYSSLLYHKTPGCPHCNHCSGEDEAVEGDFQEFQDYDEF

SEQ ID NO: 76015 - protein, 38 aa, Zea mays
  Coding DNA Sequence Number=SeqID_34236
MSTEKRHLDQVECLSVRRLLFDHLFFSCGGCETARMPN

SEQ ID NO: 76016 - protein, 208 aa, Zea mays
  Coding DNA Sequence Number=SeqID_34237
MSTEKRHLDQVECLSVRRLLFDHLLFSYGGARLATENGGSAAAMRHRRGIAHAPQVPTSNSGRGRLPQVPMALLGPTPRTEARQRQGSPAAQKEKNPRRRRSSRETLTQSYGGGAGGKFEQEARPNRVIYPRELVFAPGSERSWRRKPRRDPRGVVEDESDLWAPHGRQPRASKGLRRGPRLSARVELNLGRAVYIHWWAEIRGQFNL

SEQ ID NO: 76017 - protein, 204 aa, Zea mays
  Coding DNA Sequence Number=SeqID_34238
  Gene Ontology: Mol. function=sequence-specific DNA binding; Cellular component=nucleus; Biological process=regulation of transcription, DNA-dependent
  Homolog annotation: Hit_ID=Q6Z6W2; Match level="QueryCoverage=41%, HitCoverage=36%, E-value=2e-16, Identity=55%"; Hit description=MADS -box transcription factor 57
  Pfam annotation: Domain name=SRF-TF; Domain location=76-126; Score =71.0; E_value=3.9e-18; Accession=PF00319.9; Description=SRF-type transcription factor (DNA-binding and dimerisation domain)
  Subcellular localization annotation: CTP_CleavageSite=66; ConfidenceScore=5.37e-01
MASKVKDDSVLRVFSWIFNHLKKSSSWPRAPSRTLSLLSAWRSPLPTTATPHDCELVKSIKRHRVLFDEEGKIVVRRIDNSMSRHVTFSKRWNRLLKKMKELSILYDADIGLIIISSTSRLYEFANTKTYRLTFESTKELIDTRSMAFDINILERQTCKSLTTSGTKTEKLRQECLRKGTKLAHGVADALFAVPHTEDKGIEEH

SEQ ID NO: 76018 - protein, 237 aa, Zea mays
  Coding DNA Sequence Number=SeqID_34239
  Homolog annotation: Hit_ID=Q10QW3; Match level="QueryCoverage=44%, HitCoverage=65%, E-value=2e-21, Identity=51%"; Hit description=ZIM motif family protein, expressed
  Pfam annotation: Domain name=Zim; Domain location=5-40; Score=60.7; E_ value=4.8e-15; Accession=PF06200.4; Description=ZIM motif
  Pfam annotation: Domain name=zf-DNL; Domain location=177-223; Score =18.3; E_value=1.4e-05; Accession=PF05180.3; Description=DNL zinc finger
  Pfam module annotation: Pfam domain module=Zim::zf-DNL; Domain location=5-40::177-223
MPGPAPAVAPPLTIFYGGMVVVFEDFPAEKAAEVMCLAAGDDLPIARKASLQRFLAKRKDRLVERAPYARPSSPAEEPEKKTVKPASALASWLGLDSTEADCLTITLFCHRLVLRFCPPPTVRGYGPGGVRRLGERLDDGVRNGGATDVFTKSPRWHMRVVLTLPWSLLTKSPRWHMRVAFACSVCGQCTTRAINPHAYTNETVFVQGVQKHEEASKVKDDSVLRVFSWIFNHLKKR

SEQ ID NO: 76019 - protein, 280 aa, Zea mays
  Coding DNA Sequence Number=SeqID_34240
MGCTCAAFFLLLLEERDLVGVGSSLGFKDFHHAAWLQSLAGGCSSSVLGRRASRVGALPSAWAGDPLLPPAFGGEGRSPAYAEEANCHLLPRRGVVVRPPHGRRSRRAQAGHVHGPSRAAGRTGGSHNTSYAARAVFVFLDSLVLAPVAKTGVSTCGCALGRPPFAGGVGAQVAAVVGAEVVVVIVVAGEPLGVSYLAAPLVWRLGKPLRALPTFKSRYHSYPKITYSSVSYLSQKVMSEDSVIDAVERHAQAMALKQRARAEGLETALNESVENCKALA

SEQ ID NO: 76020 - protein, 96 aa, Zea mays
  Coding DNA Sequence Number=SeqID_34241
  Subcellular localization annotation: CTP_CleavageSite=69; ConfidenceScore=5.68e-01
MALMLQHSGVSVPPVQSAPPPPLHAPVVPAIQSGPPAPTVGPSSPLRPVTLAFTSPVLSSVCPQPPVPPASAVTTTAVAVSVTTSVPRQMVTVGAK

SEQ ID NO: 76021 - protein, 296 aa, Zea mays
  Coding DNA Sequence Number=SeqID_34242
MPRTKNVSAPGGGDDEDPRRPFRQVKGKTVYLEQQECRKKRRTDRAARAAAAAAAQPSLRSATDSVRSDCIPLGGRVTGIRWIADTRRVRVWVEIHTHERLWVRGTLEASRLVFGSYRPAPEAPVPASAPVFDSQAEDAALRQFDTQDTTVDDDDDDDDFGVPPPPPMPPRSHDHEAGSSSATPAAPPAIDPAIASILQSLTQQQAHLAAEQTRLSQKGCSRCFRPYRTGRIRFSSSYSKIGLRAGHSRLLCYNIMVSQFLRFSLLHLLRFTLLLCQRFSQGPLFLLLVLLLRSGR

SEQ ID NO: 76022 - protein, 494 aa, Zea mays
  Coding DNA Sequence Number=SeqID_34243
  Pfam annotation: Domain name=MAP7; Domain location=32-157; Score= -83.2; E_value=0.082; Accession=PF05672.2; Description=MAP7 (E-MAP -115) family
YVVCSADSQTARHRGPYGSCVCRSRETQTQHADAVREKSTTDSKCRKLADKVAALEGEKTDLWRQLAEERKEANEALAKVQSAQAEANLARAEGSLARQRAEQLEERLSALQTRVERAEASTRSEAERTRKQLMDSYHELGTRTADFEVPDREPGLRCLEWIQEELLALPAIVEGFMSYASLVTCEGAMNALSREGCQHYEVFDQADEDFERDIYKVEDPVVKESAGALYDRMWGPHGREVVRERAETARGQAACGERVDDFGALNSALPDPEPNPTAAVSEAALEPPPETAKGVPDAPAATTASGGPSPTAAPRAEDPVKVAAEPTAEDPATSGSSQVQDFGPAHATATTNFLAASTVDDGNKSDGSASKFSDFGDSGSSVEWTEESSDEDMDYFAALDVAAAEASPHAADAEVVPGPSTGRRRRRAVAKRRVSGVDGDRLRVSRAGRQELLSLPAAVSSSEGELRSLFAGEELRIKLFNYREMGIIPKVEPM

SEQ ID NO: 76023 - protein, 591 aa, Zea mays
  Coding DNA Sequence Number=SeqID_34244
MPTSSSSAAATPPANASSEETLSTVAAEELRAGDTVDFGVSQMSSVRVQDMQQLGYFGGGVARVLGTEEVPEPEGELVLTPNAVVALSKYVWATTSYGRQPSVEVFAKYYCLHWQKRMIGNEVAQFGSFEEHPGFPVSEMCSHYYSAYPPFEVAEEDADEGSLRCAAGLGSGRDLVEEFVAYGVWPLAHGWALGEVCPRQMPSHGGKLVRSPAFALDLHSRDPAAFLREAEDGAVRIVGRVFELNRLPYGGYPGQDDVDRRGKKLVVETGDDPAPAAAPFSKKRKLGIAMGGLGVSDGFARELMRTCAAPGGGMSSPELRESSARMLRVTGVMDKDRQGAAQKRQAVVRLHEARPKRPRGTAKAAAPGGSQLPLAAKSAAPVSSRAPEATKAAAAGGTKSAKAAPGSSKAPEAAKASRELPPPGKRVADFATDISVDDYLVGSDEGQLVVVPPAVATAAAAVVPRAKGSALSAGGEIPALTVVRDEAGAVSRRLKEMKEALSQAADFADRAASGALTAVVSAEVERLRTQHADAVREKSAARQQAEANLARAEGSLPRQRAEQLEERLSALQTRVDRAEASTRSEAERTRK

SEQ ID NO: 76024 - protein, 103 aa, Zea mays
  Coding DNA Sequence Number=SeqID_34245
MQYKGSSSLISCEKRMIRIEFLNLAREILGGRLGSWLLVFLVDSSLLGNEHYKGSSSLISCEKQTIRIEFLSLQGILPGSKSIDHYRSRYQDEYNQFLTSREC

SEQ ID NO: 76025 - protein, 60 aa, Zea mays
  Coding DNA Sequence Number=SeqID_34246
  Subcellular localization annotation: CTP_CleavageSite=30; ConfidenceScore=5.03e-01
MAEVKRRPLRLPKVLGLPCRRVNATGRVVYGAAGSPRVAAPVPQSRRRGTGASGGAVSRT

SEQ ID NO: 76026 - protein, 427 aa, Zea mays
  Coding DNA Sequence Number=SeqID_34247
  Gene Ontology: Mol. function=protein binding; Cellular component =spliceosome; Biological process=mRNA processing
  Homolog annotation: Hit_ID=Q6QP51; Match level="QueryCoverage=50%, HitCoverage=81%, E-value=2e-15, Identity=33%"; Hit description =Putative growth-regulating factor 1
MQAACKCTKGMHLFDFDASSMEAQAHTSCGRKQQSNRLQAHVPSWDSERALSHGVKTTRPGSVPRTARACTMAALRTTRPVALTLRQGRRHLWQAKRATLHLRHDDRVKKGPRKGILRKGSFSAKEAGPEPSHRSEVRRLAPRKGSTATSKHSGSAPTTSQRLAPPEGFDSRLRTRRARDDSGYVRYMVEARATLPRLGGSSRKPGSGQTVDNVKAPSPQGTRSRLARAQPRAKTANPGGFTSRPRVPSSNGHTFDSPEAQLGQASRRSNLGQDRLASRPDRRSIQCKDRLTSYPDARSSVDRAKPPSPASGAIRSSASPDPKARTQPRPRETISASPDPRARAQPRPWKTISASPDPRARAQPRPRKTISASPDPRARTQPQPRKTISASPDPRARTQPRPRTTVSASPDPRARTQPRPRRSLHLA

SEQ ID NO: 76027 - protein, 156 aa, Zea mays
  Coding DNA Sequence Number=SeqID_34248
  Homolog annotation: Hit_ID=O80401; Match level="QueryCoverage=28%, HitCoverage=9%, E-value=2e-13, Identity=80%"; Hit description=SAR DNA binding protein
MDGIEAFRSRTRSSPAKTVTKRLFTDVDGGNTGSKDAADSDAAPRSSPSSNQHVIDRFVVQLKAFDRFENTSDAQSAATLIIDSRPSKGLHRFLQKHCEGERVKDYTICGISLIDIGRNLMAKQDMSELGFRTVDEAGTSPDKNNKLENPPNQPKD

SEQ ID NO: 76028 - protein, 657 aa, Zea mays
  Coding DNA Sequence Number=SeqID_34249
  Gene Ontology: Mol. function=helicase activity
  Homolog annotation: Hit_ID=Q8H862; Match level="QueryCoverage=65%, HitCoverage=95%, E-value=4e-45, Identity=29%"; Hit description =Putative DNA binding protein
  Pfam annotation: Domain name=DUF889; Domain location=23-236; Score= -27.3; E_value=1.2e-09; Accession=PF05970.5; Description=Eukaryotic protein of unknown function (DUF889)
  Subcellular localization annotation: CTP_CleavageSite=40; ConfidenceScore=5.19e-01
MRDILSEHTPSNALLPFGGKPVVLGGDFRQTLPVVRKGCRSSIVNASITNSNLWRHVVLLRLRTNMRLFDPSLQVHARNELDMFAKWVLSFGDGTLPAERRASEREATWITIPKDLLLWVEGDKDETKLLHCDMVLLDEEVQHLHDYLFGKGKLALGTGIHAAIFPPVIQKFKPLIKGVVYNITYFWVRASNNLYKPVFNENMITFTNWTKLEEVVEVPPAFPVLTYSLTPIDQLHLCVDHREYYTDAIGIVTSISAVAPHRSRGQHTTSSKRTISLCNVSARKAHSPIKWNEVLSSNQHMPHVPEEQKITYIRDLHPFENKDREFLVTVTVKKIGDRWRYNACKKCTRTTVAHGDSYKCSDQVCATIGMPNQRYKLLLTAGDETGDTDFILFGRMAQRIIKKPCDMLIANNLIGFIPDPITDLLEKTYIWNVNTVVAEIGTTKDSIQASSSGPKKSQLVLLQGAPSGIEDTPSKASNLVMPLTPLTPQSSATSVQDKTIGIGSSAVVPGATPAITKELTTTPRKRTRSSPAKTVTKRLFTDVDGGTTSSKDATDSGAAPRRHSFTQATCASHLICASPPLSQGFSQVATLHDIQVATSAYGNLRDRYTSSTLLYMISHIVYSGWTSLEVLIHVHVHDHRLTTTNVPKVTDMKYVVD

SEQ ID NO: 76029 - protein, 137 aa, Zea mays
  Coding DNA Sequence Number=SeqID_34250
MKIFEKNCPRTWLSGALNELSHGTVPGWDQNASAAALTADDSLHRDSCHRRQDSCLRGWITSRGKRIFAAGSTFSKHFCKIASLIIEKPYLDSLNQHALESLFFSRVRKRQIFVASALRWYPRKSARNEVREERILH

SEQ ID NO: 76030 - protein, 68 aa, Zea mays
  Coding DNA Sequence Number=SeqID_34251
MGSTFSKHFCKTESLIIEKPYLDSLNQHALESLFFSRVRKRQIFVASALRWYQRKNARNEVQEERIIH

SEQ ID NO: 76031 - protein, 194 aa, Zea mays
  Coding DNA Sequence Number=SeqID_34252
MPPRTRRTTRKHTGPIGVPSHQLAPRHDNSSSGSNDPIGDLEAEVSRLQAELRHRTAIWVVDGDHINELRRDIRHLRDQLADRDLALDWVVQSRLLAWDKMQKAQARVAKLNLAVEDLQTYCNTLHEEVHVLYSQLHPSEPTNPVESEAGPSHVAGHTLGGELDLFQPPPSMRLVDEWSPTPDDEAAKSNGKQE

SEQ ID NO: 76032 - protein, 81 aa, Zea mays
  Coding DNA Sequence Number=SeqID_34253
MADISSQLIYAVAIYDPDSRPVAEFRLEPTYFSFEIPYRIIASATTIIMPWGQLVTRHTNRSKSTLVDSHLLYVALLLPGL

SEQ ID NO: 76033 - protein, 145 aa, Zea mays
  Coding DNA Sequence Number=SeqID_34254
MSSCPNSRSICRGKRGVRSAQDGICCDPGRLIDKWDPRVSDVDRRPRLRQQNGPNRGETTHVATRSGVWIEQPEQRLQQQEPLSRQSEELSYRFLPIRLPIEFVASPLVLAPPLLPLPPLLPLQVVPHPNHLLPGRSSAKRLSSQ

SEQ ID NO: 76034 - protein, 79 aa, Zea mays
  Coding DNA Sequence Number=SeqID_34255
MTRTLLAPLGSSSPRLSSSLLRSYHSHHCYHSTTHFACSSHSCAIHHLSHTHYLHYSSFHCSSSRFRSSYPTCSLPRAR

SEQ ID NO: 76035 - protein, 459 aa, Zea mays
  Coding DNA Sequence Number=SeqID_34256
  Gene Ontology: Mol. function=cysteine-type peptidase activity; Biological process=proteolysis
  Homolog annotation: Hit_ID=Q53MK8; Match level="QueryCoverage=63%, HitCoverage=31%, E-value=2e-31, Identity=29%"; Hit description=Ulp1 protease family, C-terminal catalytic domain, putative
MKQVDRPPNNPKRITIQSSQECFSVDIPSAEQPNPCPEVENPPNADSQNLTNETVQIDSDEDDFMPALKKRNVSESHTRVLRKVVTKRIKHEELSRQRLNVRCNPQDVIASINILNERQREAIRRKGFSSILDMTVDALCSISHLQWLMDKLDPKDMTIRPGPGKELKITKDIVHLILGVPNHGGGKPLGIDEAVAASNLRAELGVAKDEFNVAFLQDRLRKGEDDDLSIRCFFLILFNRLLFPTASWGITYHEVLLTEEMHRFHEIDWCQLIFNDLCEAAKKWHNRITTNVSTTIYGCSIVVLLYYLDHLHTAAAPQNKTGTPRIKFFDKNSIKALTKADKRKPECRTNIFDAPRPAPMPRPTFNIKLPSIKEMMSSKINDLPHRHRSKFTDILAAYDLEVDKSCVAIKDSIDKIIEKQYDIADKFIELIDEVLRAESENLENETDEPQQRGNSADSA

SEQ ID NO: 76036 - protein, 333 aa, Zea mays
  Coding DNA Sequence Number=SeqID_34257
  Gene Ontology: Mol. function=cysteine-type peptidase activity; Biological process=proteolysis
MPRPTFNIKLSSIKEMMSSKINDLPHRHRSKFTDILAAYDLEVDKTCVAIKDSIDKIIEKQYDIADTFIELIDEVLRAESENLENETDEPQQPGNSAHSAGHTVDATQPTPDMPSQASQLETQLGGTQFEEIHERQQHIRRVLETCPDESDVVSDQQRGEMATEEMEHNDSGPVFDPTPTPHDDTLKGTTNSGSDPPLTEQECVRSLWDLICSKDIDQSRVVIDYGEYSANCMDIYESFAEGKCLENVFMQCFIECVRDDSKNHRRTLTSNRLILDVNVGNCLHNTLPALVNLDKCKSVSYLLSIKQTIPETYVLMPFINSHSIASTRRCHFH

SEQ ID NO: 76037 - protein, 134 aa, Zea mays
  Coding DNA Sequence Number=SeqID_34258
  Gene Ontology: Mol. function=nucleic acid binding
  Homolog annotation: Hit_ID=Q6AU28; Match level="QueryCoverage=37%, HitCoverage=7%, E-value=2e-07, Identity=41%"; Hit description =Putative FAR1 protein
MAENVEAVGSAESEGAEPSPEKDTPVILQRHEVTIDPRLVPKVGMTFSGVDEAYKFYSRYAYEVGFPLKKYRERKNYTEKNQLQCNKTHDPEYMEFISSMQESRIPQHCIMDYVSEMHGGPESVPVTAQDMYNL

SEQ ID NO: 76038 - protein, 88 aa, Zea mays
  Coding DNA Sequence Number=SeqID_34259
  Homolog annotation: Hit_ID=Q9LLI9; Match level="QueryCoverage=42%, HitCoverage=3%, E-value=6e-16, Identity=94%"; Hit description =Cellulose synthase-1
  Subcellular localization annotation: CTP_CleavageSite=13; ConfidenceScore=5.08e-01
MSLLPAMSVPSLSAAHAMSMSARGTNAAPSARLDTRDKNVGFLATSLRDYKDKDGVKGLYASENIIASCHWAYKGVEEDSILEDPYFL

SEQ ID NO: 76039 - protein, 396 aa, Zea mays
  Coding DNA Sequence Number=SeqID_34260
  Gene Ontology: Mol. function=catalytic activity; Cellular component =mitochondrial matrix; Biological process=metabolic process
  Homolog annotation: Hit_ID=Q9LW70; Match level="QueryCoverage=54%, HitCoverage=35%, E-value=1e-83, Identity=68%"; Hit description=Long -chain-fatty-acid-CoA ligase-like protein
  Pfam annotation: Domain name=AMP-binding; Domain location=1-354; Score=37.1; E_value=3.6e-09; Accession=PF00501.18; Description=AMP -binding enzyme
MRRQMLEAALVTVDLGTRRRDLTLSDGHQQWHQAAISKCEHDTCPAGDELQLYGSGGREGTHLVINKGALFSATTFRYRPPRGRLRWLLLRPIPGPRSAFLPIDIPLQSLTDLATITIDLFTFDLGDVEFIPKFSVSGIWQRWRESYPNDASKSTEAITVFTGVPTMYTRLLQGYDSMDPDQKSASSYAAKHLRLMMCGSSALPSPLMKRWEEVTGHRLLERYGMTEFVMALSNPLHGIRKEGTVGKPLPRIEAKIIMEDGAETTTGVGELCIRSPSLFKEYWKRPEVTAESFIDGGFFKTGDTVTVDEEGYFIILGRTNADIMKFGGYKLSALEIEAVLLESNKWMHNMSCAVAHKRAAGVHAMFAAPLNAQCARWNSQAIRISCLVGCLEFRSD

SEQ ID NO: 76040 - protein, 174 aa, Zea mays
  Coding DNA Sequence Number=SeqID_34261
  Pfam annotation: Domain name=IQ; Domain location=34-54; Score=21.8; E_ value=0.0025; Accession=PF00612.17; Description=IQ calmodulin-binding motif
MQATLQKVEQGLLQIKAAVQHEQHQLALSARLRTSAAVGIQVAARGFLARQKVREMRRQMLEAALVTVDLDTRRRDLTLSDGHQQWHQAAISKCEHDTCPAGDELQLYGSGGREGTHLVINKGALFSATTFRYRPPLGRLHWLLLRPIPGPKEVHGGATVAAAMGPQGGLDKDS

SEQ ID NO: 76041 - protein, 247 aa, Zea mays
  Coding DNA Sequence Number=SeqID_34262
  Gene Ontology: Mol. function=binding; Cellular component=ubiquitin ligase complex; Biological process=regulation of transcription, DNA -dependent
  Homolog annotation: Hit_ID=UPI000060EDDB; Match level="QueryCoverage =80%, HitCoverage=18%, E-value=2e-38, Identity=39%"; Hit description =Cullin-associated NEDD8-dissociated protein 2 (Cullin-associated and ...
  Homolog annotation: Hit description=neddylation-dissociated protein 2) (p120 CAND2).
  Subcellular localization annotation: CTP_CleavageSite=27; ConfidenceScore=5.54e-01
MTSKTSGSITTSLSTTGKLCSVGSSFMASAELSPVPMHHSVLLCSPRWLLKQEVPKVVNSINRQLREKSIKTKVGAFSVLKELVVVLPDCLADHFGSLVPGIEKALNDKSSTSNLKIEALVLTRLVMASHSPSVFHPYIKALSAPILSAIRDRYYKVTTEALRKTAVDFKPYIGPIYNVILGRLANQDQDQNYQHAFPYSLTGWVRNEITRLTAVKAFSVIANSPLRIDLSCVLDHVVSELTAFLRK

SEQ ID NO: 76042 - protein, 219 aa, Zea mays
  Coding DNA Sequence Number=SeqID_34263
  Homolog annotation: Hit_ID=UPI000051A8F0; Match level="QueryCoverage =66%, HitCoverage=14%, E-value=1e-09, Identity=31%"; Hit description =PREDICTED: similar to Cullin-associated NEDD8-dissociated protein 1 ...
  Homolog annotation: Hit description=(Cullin-associated and neddylation-dissociated protein 1) (p120 CAND1) isoform 1
KTAVDFKPYIGPIYNVILGRLANQDQDQNYQHAFPYSLTGWVRNEITRLTAVKAFSVIANSPLRIDLSCVLDHVVSELTAFLRKANRGALRQATLGTLNSLVVTYAHADPRRPNKFDGHVAPSNLTIRTWVPSNLWEQIRRPPSNLKTHVLNVKFDGTHVLYVKFDGTHVLNVKFNGVVELTSLSSSKNCRRLYSSINPRSYGLQQCGFPLPYNCSGAV

SEQ ID NO: 76043 - protein, 59 aa, Zea mays
  Coding DNA Sequence Number=SeqID_34264
MAVRRGIPALELPINCSGFSEASGTLESSCSVTLPRLLGRGEEQVVEEEPPNTEAFDLI

SEQ ID NO: 76044 - protein, 107 aa, Zea mays
  Coding DNA Sequence Number=SeqID_34265
MAVRRGIPALELPINCSGFSEASGTLHYKFVVGAEIHGTEVGAEIHGAKVLPHQIHGRARRGRGADSDEFNGVGVDSSGDSGACDEAGLGTANGEARRGSGERGEIQ

SEQ ID NO: 76045 - protein, 140 aa, Zea mays
  Coding DNA Sequence Number=SeqID_34266
MQESLAGPPSQQNPPEGLPRNPLQDRHHSKILPRASLGIPCRTAMTAKSSRGPPYIDHSPTALAPFGGLCANKPKTQQTPAVDGGFISLELRDSLAIVTRRRGTGHREPSDPRRAHQIRSGRPRSGTPHGPSILRSTARI

SEQ ID NO: 76046 - protein, 104 aa, Zea mays
  Coding DNA Sequence Number=SeqID_34267
MQESLAGPPSQQNPPEGLPRNPLQDRHHSKILPRASLGIPCRTAMTAKSSRGPPYIDHSPTALAPFGTSKYYPESSVVNKKYRGLGAKIPRHREQGPWTAGLFK

SEQ ID NO: 76047 - protein, 317 aa, Zea mays
  Coding DNA Sequence Number=SeqID_34268
MVGVGRVHVRRAEMLVGGARSSACSWRDSSIERGQRASPGNKEGGRPKSGEVDLGLPVKSCRVRGLGKLHGPLAGLAEALARLGDGWSGLATVAEALVAVAGGKELVGAKEGWLAGDGEREVNPRAPPVPDRRAPPVGASLSAHSPSLSLPRGPKLSAPSSRTRARFSLCPAVPTCQPSSTFCPRSSRRGRTHDRAFSGHIRALALLLSPTPCSPTAHPSSLICALCPTLSLCPRKQGAPPLPADDHCLFRGRRCARAPSSATSPAAVDPRLHRTFAVLHALGVRTQASPLARLAKVCALWCPCAGVRAMAEPARLP

SEQ ID NO: 76048 - protein, 127 aa, Zea mays
  Coding DNA Sequence Number=SeqID_34269
  Subcellular localization annotation: CTP_CleavageSite=41; ConfidenceScore=5.31e-01
MAWSHIQLFYHATKDSRVGTASLYSSKGYPSFRVPTTAFAECSALGKDVFAECISVPRVLHSVNELVTESMTLPSAALGKGSFAECSTKSTRQISWHSAKARIPVVIEGVPLVDLESPKGSRAPTEA

SEQ ID NO: 76049 - protein, 239 aa, Zea mays
  Coding DNA Sequence Number=SeqID_34270
MARRLPVEWTSARLIRNECEGTRSPEASCQVPPVGLCRAVCHVAASGLRLSGELECMRIGPDHTRPGLDTCQLWTPAWALIKARVCSVLEPWDPTVGGPDPIRGEGPDPILVFWSVHVGVLDQHGCLDCISRDPGPTWRIKLYIQGSGTFPWESGLTVDVLEYITFSGHVAAPEPPTWWGQVLLLAQSSRPGLGRVMTWSHVQLLYHATKDSRVGTASSYSSKGYPSFWVPTVYIINWS

SEQ ID NO: 76050 - protein, 264 aa, Zea mays
  Coding DNA Sequence Number=SeqID_34271
MAAPPTTRTVALTPRRDRRRLWQEKRATLRLRHNDRVSKGTRKGGYPKKDPSPGRNQAPSLPTDQRFEGWPLEGFDSRLRSRGPYTHYWSERLGGCSRKPGSGRTVDSVNIPARELGTRPYTRATASSHEGTTRPAEALREALRPRRSETTPPRPRGLHSAGALARTHRNKMQPRKAGSLAKKCDESLQASANTPFEARGLLSGTIIRGTLKTPNSQLSETDRQSGPAEGTTGNSAPPDPGLGLGLSPGRRRTPLRLTQGSDSG

SEQ ID NO: 76051 - protein, 93 aa, Zea mays
  Coding DNA Sequence Number=SeqID_34272
MAKAKRRPLLLAKAPPVTEPPNPAAQDQGGKRPRAAAPWRLCTGDLGVLVNLKQGKVPDHGSARRGSGEPLYRPFGAVTGAPERRTPNPSYPE

SEQ ID NO: 76052 - protein, 342 aa, Zea mays
  Coding DNA Sequence Number=SeqID_34273
  Homolog annotation: Hit_ID=Q6Z750; Match level="QueryCoverage=30%, HitCoverage=23%, E-value=1e-37, Identity=72%"; Hit description =Ankyrin-like protein
MLVMEEYHTKVVCMHKQNSEEVPFPGHLTSKSNVCSFRVVLLELMIGRRSMDKSRSAGYYAPALGFLMFAVGVNSSAKDLIETIKRPDAIAAGYIRQFVKLVTVDDPFITTDYMVSGGSTGSWPGSPSRNVGKIDEASELRRTVSDIKHNVQTQLSENAKTNKRVIGIHKELQKLLREAIQNTINSVTMVATLIASIAFVVIFNLPGQYFQDVNSGGDIGEAQTTMIVSEAVVVDTRRTGRTKHLPSRGRALSKQPATKAFAGAAGGVQRRGNQGIAVDRLVGSQDLRSKDDFLTRALEHILILKTKGIIDEKKKDDEDDDEESEAKNRRVRSSTAQASDSD

SEQ ID NO: 76053 - protein, 249 aa, Zea mays
  Coding DNA Sequence Number=SeqID_34274
  Homolog annotation: Hit_ID=Q6Z750; Match level="QueryCoverage=31%, HitCoverage=15%, E-value=1e-24, Identity=75%"; Hit description =Ankyrin-like protein
MAREREKKRREKEREKERKDLLLIFEIRSFYMHAFALSKQSKEMQGSAWCIKQHKNSEEVPFPGHLTSKSNVCSFRVVLLELMIGRRSMDKSRSAGYYAPALGFLMFAVGVNSSAKDLIETIKRPDAIAAGYIRQFVKLVTVDDPFITTDYMVSGGSTGSWPGSPSRNVGKIDEASELRRTVSDIKHNVQTQLSENAKTNKRVIGIHKELQKLHREAIQNTINSVTMVANLMPPLPSLSYQLPDESLGS

SEQ ID NO: 76054 - protein, 236 aa, Zea mays
  Coding DNA Sequence Number=SeqID_34275
  Homolog annotation: Hit_ID=Q8GU72; Match level="QueryCoverage=21%, HitCoverage=4%, E-value=2e-09, Identity=68%"; Hit description=MDR -like ABC transporter
MAEQHQSVVAGLPISSPLSYHEDYEDHSISNGTNDDWLPIVMPAKKLISDENLKSILRKWRQHAADKRLLREQKNALAVAALCSLSLGPPVHKSTTVSKLAVEELDIGHAFKERQARKQRASDQQVIDNDIWSCFGQYDMAAVGPSFLYLAPALAIINSQEFFGINDNVDKSSGDELHLLLLIRFNGGIGTRLLVDALNVRHLAGDNLALIMQSIATLITRFAIRLAGDNLALIMQ

SEQ ID NO: 76055 - protein, 366 aa, Zea mays
  Coding DNA Sequence Number=SeqID_34276
MGKGYPRDEDVENLLEYHGFGLRQYEELYLVKEGPFLNSESDFPSGCSQLVHSKKSQRVVDDVSYGPDCAPTSKEKTVFPYTGQPVAGKRDLFLPQNAPAIPPDGRMDLDPSFPGPISITPDRQISPLFSDPFSPRAASKLFSSTHPKPLSPTDGRKDRFSSVLTVVSPRTGKRDILSKTPKVASPKAEGKTKLVNGLIAEDQDSGVAEIPQKVEMQTDILWSQANTQNTNALAEPIVSHPLADRMSLNYSSMYGAEDDFRAHVSGIGADMDEGTPSDHECLVIGAGLPISSPLSYHEEYEDHSISNDTNDDWLPIVMPAKKLISDENLKAILRKWRQHAADKRLLREQKNALAVAALCSLFFKPF

SEQ ID NO: 76056 - protein, 86 aa, Zea mays
  Coding DNA Sequence Number=SeqID_34277
MAPRPVRGRGPRPGVARPQRGVPAPARIWMYVCIHIDNGLVTESEELAGEDPEQQLVGGGKCPLTHLCPTHSYNSLPVFTQFIPKD

SEQ ID NO: 76057 - protein, 73 aa, Zea mays
  Coding DNA Sequence Number=SeqID_34278
MARLRRGARRVLPHPEPFFLPARHLGAVCPTCVPRRENGLVTESEELAREDPEQQLVGGGKVSLDPTYVLYIP

SEQ ID NO: 76058 - protein, 126 aa, Zea mays
  Coding DNA Sequence Number=SeqID_34279
  Gene Ontology: Mol. function=DNA-dependent ATPase activity; Cellular component=nucleus; Biological process=DNA replication initiation
  Homolog annotation: Hit_ID=Q6KAJ4; Match level="QueryCoverage=52%, HitCoverage=10%, E-value=7e-17, Identity=78%"; Hit description =Putative minichromosome maintenance deficient protein 5
  Pfam annotation: Domain name=MCM; Domain location=11-126; Score= -214.6; E_value=0.00081; Accession=PF00493.13; Description=MCM235 family
MRHIGYLFECPQREGSALSASGGLIDLQFMRPWSSRQYVDAGITTVLNSRTSVLAAANPILGRYDDLKMTILSRFDLIFIVKDIRLYAQDKVLNKLYIDFLYVFHCFGKINQRHAMLVTVNVANRK

SEQ ID NO: 76059 - protein, 480 aa, Zea mays
  Coding DNA Sequence Number=SeqID_34280
  Homolog annotation: Hit_ID=Q10L59; Match level="QueryCoverage=30%, HitCoverage=10%, E-value=1e-53, Identity=73%"; Hit description=PWWP domain containing protein, expressed
  Pfam annotation: Domain name=DUF212; Domain location=260-400; Score= -36.1; E_value=0.0018; Accession=PF02681.5; Description=Divergent PAP2 family
MPTLFVPVLRWGLPGAATAYDAMSWAVAVAQVAYVTRHCRERGWDGLSWDALGTLALHQTLHPLEEDRRKIKELKNKSADWQLDLLQFGSNTSELVLNVHSIPYHPRDRTMWRVKMLPKDPHLNRNKRKFSRLSSWKFLVMGSFMLDCGCDGRVILRDDALQIGSKKSISSFRHTFSSLALKELNHRKNKDRSTSPDSMPMKKLIAVAQARRFSRSTSFPDNFLNAKYIPETSINIPSKEGPHRQFSPSNRIIMSTSGNDNVNSRSPFDNIQQKKLAAHGANAARRSFKDFLSTLTRTKESISRATRVAMECAKFGIAGELCPLPNMTPNYGACQVMYDAFGVRLHAGKQAKVLNQIVYELPLEHPLAETRPLRELLGHTPPQETIKNVEISIEFNLSSLDDLQFMRPWSSRQYVDAGITTVLNSRTSVLGAANPILGRYDDLKIDKSITAMYRRLPKTLAFDVFHSLWDKCKDSHLTII

SEQ ID NO: 76060 - protein, 529 aa, Zea mays
  Coding DNA Sequence Number=SeqID_34281
  Homolog annotation: Hit_ID=Q6QP54; Match level="QueryCoverage=24%, HitCoverage=45%, E-value=4e-28, Identity=75%"; Hit description =Putative kinase
MTERYQLPRSCVPPTMRRKDGGPTRHVTGAPDAACKRLHRHLRHHRASSVAEPIPRLEATQQRQPGAAANAAESGPAVMTVAGGWEQRSRRQPNSRPIRGQQENLLSRREDNVPVIRSSNGSRTRDDRPANHSPRRINSAAGQAALLAGEAGDASPSPLRASLLIRGSKAGPPKGFNSRLRSRGPYTHYWSEERSCNGIPSEGGIEPSDPVARGLGPADHPQLIGDTMFGAHRGLGGCSRKPGSGRTVDSVNGPARELGPRPYTRATASSHEGTTRPAEALRKALSPRRSETTPPRPRGLHPAGALARTHQNKMQPRKAGPLAKKCDESLQASANTPFEARGLLSGTIIRGTLKTPNSQLVTPISIKLQRPDGARTRARSRKTANSAPLDSGLGLGLGPGRRRTPLRPTQGSDSDQVPEDGELRSARPRARTRAQPRKTTNSASPDPRARTPPWPLPNDLRLARPRGSGSASAMEDRLDLGFGGASTSPNLGRMPATSTGSAIITLLRADSGRREQDRHPIWLAPPDRQ

SEQ ID NO: 76061 - protein, 272 aa, Zea mays
  Coding DNA Sequence Number=SeqID_34282
MGGYPSVFSPHRWRNATPWGVGYLSAIVRLPGIFIMQPGCTPPPAVTQDGDLQLDWVGESEPGCGLCPSLSLKDFHHQGWGGDCSVPGFRTRVASEPLAAPASATTAGRGSSAGEIARAAHGPTSNSTAFCPSLPHKFGHGRGPPSSSIRPEVSAAAVRPPGAEVVAVAAAGAGDGAPFVGLLLLRRPTPIEWGYSPVDYLNRFTKHESPRVKVTSERWPGRGDDVVLRSGGLRTASPSEARSNLAEVVVDAEGAAAPFQRQDPSLQDQIVL

SEQ ID NO: 76062 - protein, 84 aa, Zea mays
  Coding DNA Sequence Number=SeqID_34283
MSGEGDLGLPVKFCQVLGLGKLHGPMAELTEALARLGRDWRELATAAEALKAWRAVAQRVRGNFWTCSREFGTTFIFGSPGFEF

SEQ ID NO: 76063 - protein, 80 aa, Zea mays
  Coding DNA Sequence Number=SeqID_34284
MAHRSAQSMRGGGRPMSGEGDLGLPVKFCQVLGLGKLHGPMAELTEALARLGRDWRELATAAEALKAWRAVAQRVRGNFW

SEQ ID NO: 76064 - protein, 121 aa, Zea mays
  Coding DNA Sequence Number=SeqID_34285
  Homolog annotation: Hit_ID=Q9XE83; Match level="QueryCoverage=83%, HitCoverage=12%, E-value=5e-07, Identity=40%"; Hit description =Serine carboxypeptidase-like protein
MSEEKVRTKDPCWSVETIYDPRELPGVSTAGPWIGRGVTSGIRADPRGFMGVCGLGVWAYGAWHLWAWSGHMAWHMTTLDIQTWLRGEVPGLGLTDEDVGLLRGVDYDILAPGMVISWPKA

SEQ ID NO: 76065 - protein, 830 aa, Zea mays
  Coding DNA Sequence Number=SeqID_34286
  Gene Ontology: Mol. function=nucleic acid binding; Cellular component= spliceosome; Biological process=nuclear mRNA splicing, via spliceosome
  Homolog annotation: Hit_ID=Q7XIR8; Match level="QueryCoverage=54%, HitCoverage=39%, E-value=0.0, Identity=66%"; Hit description =Putative DEAH-box RNA helicase
  Subcellular localization annotation: CTP_CleavageSite=48; ConfidenceScore=5.84e-01
MAHAGRSGTGAQAQGAPRPSSHQVPSKTSAVAAGGSSSAPTPTSAAANAMPSSSAQAPPSEGKVSRLWLTDEDVGLLRGVDCDILAPCDGDFLAQGLIELIEYPLPTRKFSWVRMSEGKECTKDPSWSVGMIYDPRELPKSRRQELETAECTCDVMKRGRGGEGRDQRQPSDDEFMSSVITLSSSLLTSAGLETTAHWCWSGDNAGDLESWRRRTTDQAVPVRSGTQALRDSGCVAVWPLGTRSADYEFVKPEHTAGPDTLADKKRAAGGGSVFKPPPPMVAVAVGSIDEDEKPGPTENDATSLSTTIRSNSLRRYRGSGSDDKTSLNESTVTDEDERAPSPNHQDEPHRQEAHISRSSQGSRPHGTPRGYGYYDDRGSHDKHGDRERSASIGYSNSGRRRYHDDRESHTRRAERERSTSNEYTNKRSRHEHSSRSSRTSARSDWDDGRWEWEDTPRRDYRDNRPGSRRQHPTRSPMLAAASPDARLRTYFMLSNIIDADRSPSNPDRNSEITEEMMQEMDYNADRAWYDCEEHTTMFDGDHSMYLGDDNSYKKREAEMPKKLTRRDGSLMTLAQSKKMSQMTADNAQWEDRQLLRSGAVKGTEVQTEFDDEEERKVILLVHDTKPPFLDGRVVFTKQAEPVMPLKDPTSDMAIIARKGSSLVREIREKQSMNKSRQRFWELAGSKLGNILGVEKTAEQVDADTAVVGDQAQLGKNFDPLVLEDFDWDNEWVDPSANSSVVGDDPLFTWEHVDHAIDASTQLQGRYFPRRAHGTQVPILEDDEDGLDVGDENEDDDDFVLDDLDMDEEEETNNTTTVVAVVMSKTRMMLV

SEQ ID NO: 76066 - protein, 130 aa, Zea mays
  Coding DNA Sequence Number=SeqID_34287
MSLSESLKDHVDVGLLTEDPLTGHMPRHGALGQNGEGTVPNLLSDYVHLQGCPRSLGQGQLCPTPLIGACAGFGTPDHPSPWPRLLAGVPSTCPERRPQTPGARACLVSGNFTVTNGSSANHRVVNPPCA

SEQ ID NO: 76067 - protein, 232 aa, Zea mays
  Coding DNA Sequence Number=SeqID_34288
  Subcellular localization annotation: CTP_CleavageSite=68; ConfidenceScore=5.17e-01
MAPRKTCDDGDSQLSYGSRRTAFLEKVGRAGTRTRQALSWGRSLSSPAWTLVTPYCKRTRPGRGTNTKAAGFPPLSRPSPATSLPTFALAHALDPSRLGHAAHSLVGLGTPRSRNADSQDRVNVGLMTEDPLTGHMPRHGRGRIGLDHCSASDPCPCPGACRREVHSPITYVYGEAARIREPEAHAFRHASLQVSVPAPGASVEPDITTAEVAPACPASSTEAIIVFSVVLS

SEQ ID NO: 76068 - protein, 55 aa, Zea mays
  Coding DNA Sequence Number=SeqID_34289
MAGEIKLAGAKERWLAREEIWSEEIWSVSLPKPEANPRKTLSDTGVSQYATRAIG

SEQ ID NO: 76069 - protein, 168 aa, Zea mays
  Coding DNA Sequence Number=SeqID_34290
MAGGIKLAGAKERWLAGEEIWSQEIWSVSLPKPEANPRKTLSDTGVSHSVSKFFEPDDSGSSVVWTEESSDEDLDYFAALDVAAAEASPRVMGAEVPGPSAGRRRRRAVTKRRVSEVEGGRLRVDRAGKRELLSSPARASVGEGELRSLFEGEELRIMLFNLGRWVSS

SEQ ID NO: 76070 - protein, 71 aa, Zea mays
  Coding DNA Sequence Number=SeqID_34291
MGGMVLLAAVGALQRGSGAVVVRMEARHECGGHGGRIEFFQSTDYSDSGAKHNYYCSAPELRTMLNTTYKH

SEQ ID NO: 76071 - protein, 71 aa, Zea mays
  Coding DNA Sequence Number=SeqID_34292
MAAVSALQRGRGAVVVHMEVSTQAGGTTYSRLQGGRIEFFQSKDYSDLRAKHNYYCSAPELRTMLNATYEH

SEQ ID NO: 76072 - protein, 61 aa, Zea mays
  Coding DNA Sequence Number=SeqID_34293
MAVGALQKGAWVAVVRCTGGVGRWGRIEFFQSTDYSDLGAKHNYYCSTPELRTMLNATYKH

SEQ ID NO: 76073 - protein, 185 aa, Zea mays
  Coding DNA Sequence Number=SeqID_34294
  Homolog annotation: Hit_ID=Q6QP51; Match level="QueryCoverage=44%, HitCoverage=26%, E-value=4e-12, Identity=50%"; Hit description =Putative growth-regulating factor 1
MEAQARTSCNRHAGYYIQETAPPLAPVPRLLDCGTCTATRGDPAHDSTVPIEHIDLGPDRRHLWQAKQATLHLRHNDRVKKGVRKGDTPKGILLREGSGPRAPLLIRGSKAGPTKGFNSRLRALGLRAHYWSEVQRPAPRKGSTTASGHSGSAPTTDQGFEGWPPKGSTAASYAERGMTLGTFDT

SEQ ID NO: 76074 - protein, 308 aa, Zea mays
  Coding DNA Sequence Number=SeqID_34295
  Subcellular localization annotation: CTP_CleavageSite=88; ConfidenceScore=5.25e-01
MAPRMLCDDGGSQPPYGSKRTIPTSLTPVSGRLALPPFALALALDPSGLGHAATFTRRPRDPPVSKRRQVGGSGPASFAEKDPFRIIMAEVKRRLLCLPKVPPVPLQSSPAASPRRWSPKTVTTSSMVGRSEPGCGLCPALSFKDLHHPCWGGGRAEPELYLPHGFVGHPLLQHSGERVLTGLAEGADSDNAGLVGRERRQLQRVGLAGSTGSGLAPGAPFRRTRGRRAARTRGPPKTSRAARAAFVFLGYPAFAPVRRLLRGGRCSPVREDPSGDLPVGIWLPSSTLRWWRLKKSSLPTRSPPPSAL

SEQ ID NO: 76075 - protein, 87 aa, Zea mays
  Coding DNA Sequence Number=SeqID_34296
MDILLGHLLCPAGTVGVGMFSVAPYPLPDGGTTHQAPGQPPDGPSGFQASKPSSHPPPPLRQPTTRSLGRTAAARNRRLEVGQLPSP

SEQ ID NO: 76076 - protein, 169 aa, Zea mays
  Coding DNA Sequence Number=SeqID_34297
MADFDTHGYFIGSFVMPIGYGGRGYAGTYYCDSNDHVYRNVNGYGYSMGTRYPCRHYAMFSRGTDPQFPSMDRPSLNAAENFDAKGTVHALELAGGVPVQAIAKQYARAARCTVSTITYALPGKLPLHANTTQIMDIRVQEDCSSNSKYYIHYIPGPTCRGSAPLYAPP

SEQ ID NO: 76077 - protein, 103 aa, Zea mays
  Coding DNA Sequence Number=SeqID_34298
MAAVVRAEVVAAEEVLVADEIAATICAPGLQLFGFDSLSSPLEWGRGRGPYRSSVCPEVIAAAVWLPGAEVAVAAAGVGGGPPMWGVVHTCGGGTRVPSVMAP

SEQ ID NO: 76078 - protein, 205 aa, Zea mays
  Coding DNA Sequence Number=SeqID_34299
MASVVGAKVVAAEEVLVADGITATIRAPGLRLFGFDSLSSPLEWGRGRGPCCSSVRPEAIAAAVWPPGAEVIVAAAGAGVGEPPGVSSPRRPSNVGGCSYLRGWNRSSVCNGTLSAGVCSLWLSGPEHDSAIDIVEKARKIVSAERFPSIKTCSVSGIAYPSVSYLPQKVMSEDPTFEVVKKHERRSGRKTFSEENFDAEGVPPF

SEQ ID NO: 76079 - protein, 116 aa, Zea mays
  Coding DNA Sequence Number=SeqID_34300
MARRRSWCISSWSGQFAAPTIGETPLCRFTIFPSKFSADQFQGWGGWASSYVSSGDVLRRECVNPFGLIKPGSLGSDPRAKALSWCGAFLSVDHESCGNGCVLVHIWADLFWSVRL

SEQ ID NO: 76080 - protein, 99 aa, Zea mays
  Coding DNA Sequence Number=SeqID_34301
MARRRSWCISSWSGHFAAPTIGETPLCRFTIFPSKFSADQFQGWGGWASSYVSSGDVLRRDCNRTAENQRYLFGSPLLLMSPCSFCESTRDPFLGVAES

SEQ ID NO: 76081 - protein, 148 aa, Zea mays
  Coding DNA Sequence Number=SeqID_34302
MARRRSWCISSWSGHFAAPTIGETPLCRFTIFPSKFSADQFQGWGGWASSYVSSGDVLRREPPGKTVLPQGFNGDALGRLIRKASGKTTLPERGKGSRGVVSVGRPSGGFCCDGGPARDSWEGPRGGFCCDGGPARDSWGRPSGRILL

SEQ ID NO: 76082 - protein, 114 aa, Zea mays
  Coding DNA Sequence Number=SeqID_34303
MTEEKGGGAYRWQGCSGEGSGEVQESLAITPWCGSSVMVVGAGLGKLHGPLAKLTEGQAQLGRGWSKLAAVVEAWTVMAGGGELARAKEGCLASEGFAEWIKRYGGVKLGLSHC

SEQ ID NO: 76083 - protein, 61 aa, Zea mays
  Coding DNA Sequence Number=SeqID_34304
MAGGGKLAGAKEGCLASEGFADWIKRYGGVKLGLSHCRTQREDPGFDVSRARVPIPSSGMR

SEQ ID NO: 76084 - protein, 264 aa, Zea mays
  Coding DNA Sequence Number=SeqID_34305
MMIVGLVVGRSKPGYGLCPTLSFKDVRHPRCGGGQAEPGFYLPHVPASRLFLQHLGERALIGLAEGANFDNAGPVGRKRPGSGAASDVASCRLVRAWPSVHRTGDCCAMRTGGSSKTSLVQPPFVGVALARRWPLSSVLRWWQSEEVVSADETFGGTCGRTSGSLALMACPRPSCGDVGEGLFTAAFALRPSGVEVVHTRGSVTGVPFVMNLRSLCDELKPEAAVSAWTEAESARKEVLSARKHVASQAEEVQQRRLELGQVVR

SEQ ID NO: 76085 - protein, 133 aa, Zea mays
  Coding DNA Sequence Number=SeqID_34306
MNAALPACDVLDDPPVRMVQQSPVRWTDGHARIERQEAASEAATEPAEPGTLELTTLAADRCQRFIYNYTKSTVRNTVDYSGQEKLFGKTGQARTVRAPAADRPQHQDDPRSEPMQKSKSALRTVRRKGKDRP

SEQ ID NO: 76086 - protein, 70 aa, Zea mays
  Coding DNA Sequence Number=SeqID_34307
  Homolog annotation: Hit_ID=Q6QP51; Match level="QueryCoverage=51%, HitCoverage=16%, E-value=7e-07, Identity=86%"; Hit description =Putative growth-regulating factor 1
MKHNQFTTRTELKSLTRSIKCVEAECGRLIMLKENSAARPAPTAVPTTWARLTIAKFSLGRNRKLRLARP

SEQ ID NO: 76087 - protein, 242 aa, Zea mays
  Coding DNA Sequence Number=SeqID_34308
MAPPVDVAGPRPRLGDVEAPPRSRSSPSSVAEVESEPLGRARRRPLAEARAEFESWGRAKRSSSSSGLSPRLLLGEDRASGEPEICSPLEGGLGRGGDPPGSAALLYADGGYQLRIRSLEAVYDYNSPDCLVVHWTVRARCANCHKFATVGCARNGKKSRTGHEKWLSGGTPDYPVRHPTDDKISLPRMPPTAPSCLGAIKGTPKRMEEIPKHTLSILSLPHSVSAHLIDRVSDLSSVLVVN

SEQ ID NO: 76088 - protein, 285 aa, Zea mays
  Coding DNA Sequence Number=SeqID_34309
  Homolog annotation: Hit_ID=Q2R0W7; Match level="QueryCoverage=10%, HitCoverage=9%, E-value=1e-07, Identity=89%"; Hit description =Phosphoserine phosphatase, putative, expressed
MATRQLLRLVMAQLIWRLGNLAEQTCSSVTAINVFTTENQISYTSTNEINDWIGAPNTSHRRELMPPGDGWSHPQDLGVQQQRLSFFSSPTSIAYNISSWDPLSIWRGIQEIMDEEMEEDVIVKAVDCSNQSEFNIPLLDLRAPLILVGSPKEMNEERKVNLLGLADILSASIGGFSWAPLISKICKNKVKAEAWFTGLSALICRGQHGSQVQHIDGIRIAGIPFDGARESSLSGSSTFTSDSFENKLSSLARLAKMEVEYRCIQIIEIGLPMGKHIRMRDTPGV

SEQ ID NO: 76089 - protein, 134 aa, Zea mays
  Coding DNA Sequence Number=SeqID_34310
MEMNEERKVSLLGLADILSASIGGFSWAPLISKICKNKVEAEAWFTGLSALICRGQHGSQVQHIDGIRIAGLPFDGARESSLSGSSTFSSDSFENKLSSLARLAKMEVEYRCIQIIEIGLPMGKHIRMRDTPGV

SEQ ID NO: 76090 - protein, 115 aa, Zea mays
  Coding DNA Sequence Number=SeqID_34311
MASGIELVGAKERGLAGEGECGAKWGALGEALYARRGARAVVDRLGTGSCSVTKVPVSECLVPRSSCAKTMSNEFGLSSNFSRMCSREFGTTLIFGSPGFEFRKTENTDDLWEEV

SEQ ID NO: 76091 - protein, 138 aa, Zea mays
  Coding DNA Sequence Number=SeqID_34312
MAGVGRSTRAGGDARRRRGDRPGHGEIVQSNGSGRSTGCQRRYERKELGGDSLDSSVHARRRKTEVRLGTGSCSVTKVLVSECLVPRSSCAKTMPNEFGLSSNFSRMCSREFGTTLIFGSPGFEFRKAENTDDLWEGV

SEQ ID NO: 76092 - protein, 138 aa, Zea mays
  Coding DNA Sequence Number=SeqID_34313
MAGVGRSTRAGGDARRRRGDRPGHSEIVQSDGSESFTGCQRRHERKELGGDSLDSSVHARRRKTEVRLGTGSCSVTKVPVSECLVPRSSCAKTMSNEFGLSSNFSRMCSREFGTTLIFGSPGFEFRKIENTDDLWEEV

SEQ ID NO: 76093 - protein, 146 aa, Zea mays
  Coding DNA Sequence Number=SeqID_34314
MGKNNKRKREPTPPSEEFGDSEYSEEEFSSESEGSPAPIPLRESSDDSDDSQGLAAEVWTYIRAVERSGLEGSDESEFSSDEEDSDGGGDEDDDDDDGDDDDGGDGDGDGGNDGGGSGGQGSTRGGSSKGSTKGGSSTGSGGKASG

SEQ ID NO: 76094 - protein, 146 aa, Zea mays
  Coding DNA Sequence Number=SeqID_34315
MGKNNKRKREPTPPSEEFGDSKYSEEEFSSESEGSPAPIPLRESSDDSDDSQGLAAEVWTYIRAVERSGLEGSDESEFSSDEEDSDGGGDEDDDDDDGDDDDGGDGDGDGGNDGGGSGGQGSTRGGSSKGSTKGGNSTGSGGKASG

SEQ ID NO: 76095 - protein, 74 aa, Zea mays
  Coding DNA Sequence Number=SeqID_34316
MARVACTLRGKRLDGGVLYSRKHGGHHGESNVYQPGQWLDEFPLQMLVCDLCLLNPAILAVSRSINFSDDKDTA

SEQ ID NO: 76096 - protein, 60 aa, Zea mays
  Coding DNA Sequence Number=SeqID_34317
MARVACTLRGKRLEGGVLYSRKHGGHHGESNVYQPGQWLDGYNFVLLWMLLSAGGLGLLI

SEQ ID NO: 76097 - protein, 155 aa, Zea mays
  Coding DNA Sequence Number=SeqID_34318
MSGAPATSPKPLGFDRWSTVFWARLDVRWHTGHVLLSVWCASMGVPDFCARWRAINALQVAVGAEIVVAPQLHRTFPVNYSGTPVANSRGCQVPEPRPLGAPDSPVNYSAPALKIPEAEEFSAKSPGAPDTVRWHTGQSGAPDQGAFRDAFSSLF

SEQ ID NO: 76098 - protein, 461 aa, Zea mays
  Coding DNA Sequence Number=SeqID_34319
MSGGTPDSAVRQTWEPFGMPLALYFEPNIGLFNWLVVNLWHLCKPNSLSPPFEVAEDDEDEGALRGWRSENCGGYVPRMETLRSWDIRGSNVRLNRVFELNHLPYGAEGLGVSYRFAVDLMGTCAAPGGRMSSPELRESSTRMLEVTRGRWPRNVQIPRAVGEDMFTSLLAHEMKIFPYVSLSPREYCQDATRKCRAFTRVGDPSREVKKAWGIAKSAAPGSSKPPPAAKSAVPVPSKPSSGARAVAPGSSKPPSAEPTQERGPPFPLCTAEAVAGGGDLSMDICVDDYRVGGVMMFDARMGRGLVGKFLFFFSRGLGLGQDCDAGSDAGQLAIVPAPVVAAPAVATTEAKGASQDPWSKFCASGEITSAAAAKDVAGSVAQQLKHATQQLKHAAAFADHVASGALTSEFAAERQRLEGRIERLWTQHTEAVRDKSAAENKSRRLMEKLAAAEAEKEDLSR

SEQ ID NO: 76099 - protein, 121 aa, Zea mays
  Coding DNA Sequence Number=SeqID_34320
  Subcellular localization annotation: CTP_CleavageSite=87; ConfidenceScore=5.23e-01
MAEQPPCSELLLFPRCAAPWRNAAVPAATASKSLRPALRSKNSSPTQSSFPCSFPIEQHAVKPRRWFAVFAQPRRRRCSPPERNLVFCVEKASRSILVDVRSYAQIGIAIVLTNVDWVCLW

SEQ ID NO: 76100 - protein, 125 aa, Zea mays
  Coding DNA Sequence Number=SeqID_34321
MPMRNRTRIYVASPGVNNDDDGAAQKQQTTDGHHGVLLTAQQNSKPAARGAVEAAAHFVEHPARIGKEQGKGLCAGLLFLDRRAGRRDLDVVAAGTAAFRRGAAQRGKRRSSLQGGCSAMEMWSG

SEQ ID NO: 76101 - protein, 334 aa, Zea mays
  Coding DNA Sequence Number=SeqID_34322
MPPASPQGILAAGGNLDGDGDDDNAGGNSSHITERSEEPEPEGWIARPITRDAARGCHFHDALDTLLRRAFDRHTWSIEYCCVVYQHRRGLYPDQWEATCLVRRLDDDLWGAEAFSEHYSITERDTAEAAMQDAARRALSQYCSLFSGVADGLDLKYYPRCSTGSAGGVIVSPVGEGNPRLSIMVNLVVVLNTELDHALDELGKVRVEVVELRVECAACHYLDGGSLAPVGIQHPYHSPPRGRFDYESDLICMWFLQMFENRRRGARRAQPEQQAPQEEAAPQQHLPPPPLMTIEQMFLMQTQAVQAIGQTLAAMQQVQQQPPPPQPPVQAQMS

SEQ ID NO: 76102 - protein, 147 aa, Zea mays
  Coding DNA Sequence Number=SeqID_34323
MELGAGGDAGMPGAGFLVGDGAGAGEGVGDGIAEEILGLALGSDEEQSNRGALSRRANAGEPPRWRAAEQEIRTSVAVQTQVLKCENMPKDDQSANHKLSQGAASVWGTGLSGGAPDSVRWCTGQCPVRQAASAEEAALGFFSGDFG

SEQ ID NO: 76103 - protein, 103 aa, Zea mays
  Coding DNA Sequence Number=SeqID_34324
MSDRIQMDIDIINRFICSDMDAIPQNPHPSLERQEGGITENCQWTLVQAAVGIWPMELGAGGDAEMPGAGFLVGDGAGAGEGVGDGIAEEILGLALGSDEEAE

SEQ ID NO: 76104 - protein, 358 aa, Zea mays
  Coding DNA Sequence Number=SeqID_34325
  Subcellular localization annotation: CTP_CleavageSite=62; ConfidenceScore=5.17e-01
MAQITGPVFVGLPRDRNASVDMLSRGAVRLLLYRLRPPPLRLSWNPSGAMPSAAANRSCLCRFAYSTARVERGRTLPGKAVFLDLGAGRRFTPSGALSLRGCLGWRDGGGDGEFRRRVDGEAAGMKAQVLTTQRQLMRDPEVLPLEEAATGKSMNVNGACRRGKRLGFPEQAAAKMVVAVDVDEVLGSFLAALNKFIADRYSWNHSVSEYHVYEFFKVLIDDNPRYALECANDGMRVLLFDYESSYPWCKTGADELHPLVTKAVTQGCPELDSWSVMAREQERVSEMASRRRYWGWRWGRTRRQSNQGGTAASSQRWRAPEVASSRAGDPDAGGRCLGSWPSLRITESGEGEGRIDLG

SEQ ID NO: 76105 - protein, 463 aa, Zea mays
  Coding DNA Sequence Number=SeqID_34326
  Gene Ontology: Mol. function=protein binding; Cellular component =nucleus; Biological process=regulation of transcription, DNA -dependent
  Homolog annotation: Hit_ID=Q8L8G4; Match level="QueryCoverage=99%, HitCoverage=100%, E-value=0.0, Identity=73%"; Hit description =Nucleosome/chromatin assembly factor group C
  Pfam annotation: Domain name=WD40; Domain location=109-148; Score =4.4; E_value=11; Accession=PF00400.22; Description=WD domain, G-beta repeat
  Pfam annotation: Domain name=WD40; Domain location=181-219; Score =14.1; E_value=0.53; Accession=PF00400.22; Description=WD domain, G -beta repeat
  Pfam annotation: Domain name=WD40; Domain location=254-293; Score =29.4; E_value=1.2e-05; Accession=PF00400.22; Description=WD domain, G-beta repeat
  Pfam annotation: Domain name=WD40; Domain location=299-354; Score =19.0; E_value=0.017; Accession=PF00400.22; Description=WD domain, G -beta repeat
  Pfam module annotation: Pfam domain module=WD40::WD40::WD40::WD40; Domain location=109-148::181-219::254-293::299-354
MKERGGSRAAVDERYAQWKSLIPVLYDWFANHNLVWPSLSCRALVGMASEGAGMMGLYGGLAFCDARVYERTDGSVPNTLVIANCEVVKPRVAAAEHISQFNEEARSPFVKKYKTIVHPGEVNRIRELPQNSKIIATHTDSPDVLVWDVEAQPNRHAVLGASESRPDLMYYFLAQGLLASTVCQILTGHQENAEFALAMCPAEPYVLSGGKDKFVVLWSIQDHISALGDSSSSPGASGSKQSGKIANEKESPKVDPRGIFHGHDSTVEDVQFCPSSAQEFCSVGDDACLILWDARTGTDPAVKVEKAHSGDVHCVDWNPLDVNYILTGLGLQWSPDRASVFGSSAEDGFLNVWDHEKETCTTIGEGDWVQLPVIPHVGKKKNSNVPAGLFFQHAGHRDKIVDFHWNSSDPWTIVSVSDDGESTGGGGTLQIWRMSDLIYRPEDEVLTELENFKAHLASCAPRN

SEQ ID NO: 76106 - protein, 1624 aa, Zea mays
  Coding DNA Sequence Number=SeqID_34327
  Gene Ontology: Mol. function=helicase activity; Biological process =viral genome replication
  Homolog annotation: Hit_ID=Q1EPC6; Match level="QueryCoverage=66%, HitCoverage=68%, E-value=0.0, Identity=71%"; Hit description=DNA helicase homolog, putative
  Pfam annotation: Domain name=DUF889; Domain location=777-1013; Score =458.9; E_value=6.4e-135; Accession=PF05970.5; Description=Eukaryotic protein of unknown function (DUF889)
MDEVDAYRATHRASNANDEDAESPSHLCVSVHDYYCYKVQIRPGVFNPILHGKRLFQQFAVDTYIKIESSRLDFIRKNQDRLRADLYQGLVDSMLDGDIRAEKIGKRTVLSTSFIGGPRDMRRRYMDAMALVRKFGKPDIFLTMTCNPNWDEIRRELLPGQTPQDRPDLVVRVFHAKLQELKHRLTKQDILGKRKYKLTCPEQYDPLISAEIPSNKYPELRKMVIKHMMHGPCGSLNPNCPCTKGRKSCKNHYPRPFSDTTLQGKDSYPVYRRRDDGRTEKVRGCELDNRWVVPYNPYLLRLFNCHINVEACGSIKAVKYLFKYIYKGHDRASVVMRDASKADDDVDEIKQYRDARWVTPPEALWRIYGFELSQISPPVMQLQLHLPNMHMVAFHERQMVERVVNRPGVDRSMLTAYFEANSLHKEARGILYRDFPEWYTWQSGKGKIWQKRKRDTGGQVGRIVSAHPAEGERYYLRVLLNHVTGATSYVDLRTVDGVTLPTFREAAERRGLLESDNTLDECLTERALFQMPSTLRRLFATILVYCEPSDVVVLWQKHLDSMSEDYQHRNPCKTHVEQMVLIDIRNMLQSMGKDIKTFPLPPIMDAYDDAIGTAREVYEEEIIEPAAEDVALKDCLNKEQRAAYDKILSAVDTDQGGLFFVDGPGGTGKTYLYRVLLATLRSQGKIAVATATSGVAASIMPGGRTAHSRFKIPLTIDDGAVCSFTKQSGTAELLRKASLIIWDEASMTKRQAVEALDNSMRDIMGRPRLPFGGKTIVFGGDFRQVLPVVRKGTRAQVVASSLRMSYLWESMSHLKLVTNMRAKNDPWFAEYLLRIGGGTEDTNSDGDIRLPDEVCVPYSGSDTDLDNLIDFVFPNLNKNMSDSTYITSRAILSTRNEWVDMINVKMIDRFQGEHMVYHSFDSAMDDPHNYYPPEFLNTLTPNGLPPHVLKLKIGCPVILLRNIDPANGLCNGTRLVVRGFQRNSIDAEIVLGQHAGKRIFLPRIPLCPSDEEMFPFQFKRKQFPVRLSFAMTVNKAQGQTIPNVGVYLPEPVFSHGQLYVALSRATARSNIKILAIPPVDGKKTLRKGLRSGMLTSLRQFESKPRGMGVHQLLLRALPELEGFVSNKDQSYEDPIEELLYAVFVVSSENATVAELATTLQADLYQLQAAASFACRLGWAVKLLDTDSVLRDSSTPALSNNILSDEVESSRTSVASEKSGHELLSSDSDGHKNSGMAYVGFIVDANVTSYLMMGSLSPGLKSHAVTLYEAGKLGDSCKADLCNDLASLEGKRFEGVVSVGRLASDRAGGARAAWGHGIAPAPPSIALVNPVMEGPSSPPRARRLPGSSPPSSPLGAWGFPGSSSPPVNKTKGNTTASYHLFPRLPFLLLPCTATPNSKSEEEDSGTAALVEEEAVKQAEGFEAVEARAKNVDKFDLSYLDNQVFFWSVRDIFNRDLLNKKGDLALIDFIKEIPCEPRVEVVLIDDAFVERKSMECLFQPNAYLGDEEEAPLLSLLAAQGLGLRDGRPTSASTLETVPWEWEVPQVLSSRRRRPPVSEMKERSGSRAAVDERYAQWKSLIPVLYDWFANHNLVWPSLSCRWGPQFEKATYKNRQRLYLSEQASASA

SEQ ID NO: 76107 - protein, 100 aa, Zea mays
  Coding DNA Sequence Number=SeqID_34328
MTRKTLRLKLLYMLGGRFYSDVWMKGDHEMADEAIRKNEKNLTTLKKKPTELSPPLEPYNPEADPAMKEALDMIRIANEAVDEAVDRLLNEAAEKVLKKE

SEQ ID NO: 76108 - protein, 408 aa, Zea mays
  Coding DNA Sequence Number=SeqID_34329
MKEALDIIRIANEAVDEAVDRQLNEAAEKVEDALLTADHDLGQALVVVMVATEPMKLESGVKVIQQAARLLGLLANSAPVPGDTLYLSFSSARSFPGRVQSAHPAGEISSPTFGAPARGCILRATSARPPRLWDYCCACHAVAHASAGILDSIEGSAYGAVYGQRIAAPPPSSTASPGAMKQWRDDVDRLLGMAHSTSSRSRPRSSWRQREATASVRSPSVRGAQTDDLRAELNRRRTGEDARVSLERQPGPACRDLRPRPCLTGAFAADRLTPRRFAINARTGLSDHPTTVPEPSTHPAPARAVSSPFAPSPGSSALTVPSIPLPLPGAYKRGRSSSVSTTPALATSSTSPRANRASAAAPPRRSVLVLRHKLTVTRHPSPPPIAPGCLTGDLTAVSTRHRAADRPP

SEQ ID NO: 76109 - protein, 50 aa, Zea mays
  Coding DNA Sequence Number=SeqID_34330
MRLHTLRGIVDAGKCYTTYRGCSRNEMVFVTHHGEWEVAAHPLHSHNNAA

SEQ ID NO: 76110 - protein, 34 aa, Zea mays
  Coding DNA Sequence Number=SeqID_34331
MRLHTLRGIVDAGKCYRTYCGCSRCLLLIKESGK

SEQ ID NO: 76111 - protein, 49 aa, Zea mays
  Coding DNA Sequence Number=SeqID_34332
MKHYLRLVLYLKADEALFEVLLTQGSVIQPIVVVRGNEMVFVFLKGSGK

SEQ ID NO: 76112 - protein, 164 aa, Zea mays
  Coding DNA Sequence Number=SeqID_34333
  Homolog annotation: Hit_ID=Q6J9W0; Match level="QueryCoverage=45%, HitCoverage=18%, E-value=2e-20, Identity=73%"; Hit description =Putative RNA-binding protein
MKTEPVVDGLDDEVVHKITKTIARVQIAASANDVDLDPGVAGKGAPSPRCAPRPLPTLVVVTEGATTSQRMSAAIPLEQSITPVLQDFMNLNIFYLPVYYCEETYHLSGVKVLHGLDKVLEGGAVVMTLRDHSIPSNGDINESKVSYLFPRYLFSICPSPTICF

SEQ ID NO: 76113 - protein, 128 aa, Zea mays
  Coding DNA Sequence Number=SeqID_34334
  Homolog annotation: Hit_ID=Q6J9W0; Match level="QueryCoverage=44%, HitCoverage=15%, E-value=4e-20, Identity=87%"; Hit description =Putative RNA-binding protein
  Subcellular localization annotation: CTP_CleavageSite=24; ConfidenceScore=5.10e-01
MNYFPGKGAPSPRCAPRPLPTLVVVTEGATTSQRMSAAIPLEQSITPVLQDFMNLNIFYLPVYYCEETYHLSGVKVLHGLDKVLEGGAVVMTLRDHSIPSNGDINESKVSYLFPRYLFSICPSPTICF

SEQ ID NO: 76114 - protein, 350 aa, Zea mays
  Coding DNA Sequence Number=SeqID_34335
  Homolog annotation: Hit_ID=Q75GI4; Match level="QueryCoverage=26%, HitCoverage=29%, E-value=2e-21, Identity=60%"; Hit description =Putative inositol 1,3,4-trisphosphate 5/6-kinase
  Pfam annotation: Domain name=Ins134_P3_kin; Domain location=8-171; Score=-132.0; E_value=0.00049; Accession=PF05770.2; Description =Inositol 1, 3, 4-trisphosphate 56-kinase
  Subcellular localization annotation: CTP_CleavageSite=21; ConfidenceScore=5.41e-01
MAGGGGAATAAAAGAAVGMPSQAMLPVRRRCEGMTMGASTLDLRSGLGVDPFTLARVMFKVYIVGDAIRVVCRFSLPNVDEGSLVLQPVQMMQIAASANDADLDPGVAGFSVALENTGLRLFNIDMIREHITRDRFCVIDMNYFPGKGAPSPRRAPRPLPTLVVVTEGAATSQRMSVAIPLEQSITPVLQDFMNLNIFYLPVYYCGETYHLSGVKVLHGLDKVLEGGAVVMTLRDHSIPSNGDINETKLSEYSEKIEALASRLAASLPENEKPITESGDEISYEGAKAKSPISLLSGLQRRSIQQMELNRAHAKFGPSHHERKESIGAPIKSDVEAHAHIQKHSFIVIIV

SEQ ID NO: 76115 - protein, 521 aa, Zea mays
  Coding DNA Sequence Number=SeqID_34336
  Subcellular localization annotation: CTP_CleavageSite=40; ConfidenceScore=5.10e-01
MKPKGCTTVVRLHASCMAVRPFACWFQREWGNAYNRGVVTCFARSGLASSVSAIARLQGFSSCSPVAFPHQWSSRMMTTSSVVGRSKPGCGLCPALSFKDLHHPCCGGGRAEPGPASAWAGDPLLPPAFGGERHPPALRRRRRPAMRGKANYCCLDSVQLSVLHPGDSRRLHQGVAQHVVRRKGGTRVPGWSRSRSCGESGSEDLPVRFGAAAARWCGVGGQVVAVVSAEVVVAIGEAASDEAVAPVDETVNATCAPGLRLFGFNGWFSSPMRGRERGPSSGSRSPASHLEFVVPQALWCRGCSYPREWNRSPVCNGTLSMGNLRLLCDELEPEVAVSAWTKAESARKEASSAQAQVASQAEEVQQRRLELGQVIREWDQPRSHAAEAVSRAEVLGGQLAEATERPTEMSTRPGALAETRAAMAQARCWRPPSRWRSFRPCRRPRPGQIPPMVETTPRVLMLPLSMSEPAGTNLFVGSRIAYPSESYFSRKVMSEDSVIDIVEKARKSFWHKSFRALGLVR

SEQ ID NO: 76116 - protein, 68 aa, Zea mays
  Coding DNA Sequence Number=SeqID_34337
MQEACNRTTVVHPFGFIASGIGKGDTLKGILLHEGSGPPSPPTDQGFKGWPLGRVRQPPRALRLQAYY

SEQ ID NO: 76117 - protein, 249 aa, Zea mays
  Coding DNA Sequence Number=SeqID_34338
  Gene Ontology: Mol. function=protein binding; Biological process =ubiquitin cycle
MESAKAVAAFHRALGSAWARHGTALAGPAGTVLVLTDLPALSYTPSGSAKWVKHPLSLSSKPRSPILASDAVFAGKREEHLASEELVGAGGRGGRRRRARRRPLLLSGVDAGEEGVDLAELHREAVPERAGLAERAREAVPLKAEVVQRHKRGERRRERPRQAGVLEVEVVDVALLPQLGFAWARHGTTLVGPAGMVLVLTELAALSYTPSGSAKWMKHPLSLPSKPRSPILAPDAVFALCDVDTPWRS

SEQ ID NO: 76118 - protein, 317 aa, Zea mays
  Coding DNA Sequence Number=SeqID_34339
  Homolog annotation: Hit_ID=Q75LL5; Match level="QueryCoverage=30%, HitCoverage=23%, E-value=2e-27, Identity=71%"; Hit description =Putative strictosidine synthase
  Pfam annotation: Domain name=SapB_1; Domain location=141-179; Score =27.0; E_value=6.5e-05; Accession=PF05184.5; Description=Saposin-like type B, region 1
  Pfam annotation: Domain name=SapB_1; Domain location=55-94; Score =28.5; E_value=2.4e-05; Accession=PF05184.5; Description=Saposin-like type B, region 1
  Pfam annotation: Domain name=SapB_2; Domain location=96-129; Score =18.4; E_value=0.024; Accession=PF03489.7; Description=Saposin-like type B, region 2
  Pfam module annotation: Pfam domain module=SapB_1::SapB_1::SapB_2; Domain location=141-179::55-94::96-129
MGSKAPFCLTLLLLLAAACGPAAHAHDAVELPHHGSALKEQISSTKIPARLKSGSGLCSACENFTSEAVTYLGKEQTQDRIMEFLHDACSQSFSFEQKCVELMDSYATLLFAKITEIRPEAFCKRYGLCRDTALLSGVGSDSTCVFCHHLLDEIMSKLKDPDAEFEIIQILVKECNKIEGHVQQVEQIVVERSEGWHCGYFCYLAWIPRQCEDEPEGRVLGGDPLSEKYVSSANELPCQAEEVFAQLPNPCQGQPDGQMLHIMEDDKGEVVRVIIEVEDTGPWLMLYASLRRPVIPIIWFWSNLELYTDLASFSNKF

SEQ ID NO: 76119 - protein, 125 aa, Zea mays
  Coding DNA Sequence Number=SeqID_34340
  Gene Ontology: Mol. function=strictosidine synthase activity; Biological process=biosynthetic process
  Homolog annotation: Hit_ID=Q75LL5; Match level="QueryCoverage=85%, HitCoverage=22%, E-value=1e-32, Identity=67%"; Hit description =Putative strictosidine synthase
MAVMTTTIKNYGFMQYVLSEDRLSRQWLKGLKVGIVDIFAILHGFPDNVRTNQKGEFWVAIHYRRSMYPRLMSCHVKQRKFLLSFPIPTKYHYLMYFDSKLYALIIRYSPMARCFTSWRTARERW

SEQ ID NO: 76120 - protein, 62 aa, Zea mays
  Coding DNA Sequence Number=SeqID_34341
MAELTEALARLGGDWSGLATVAEALAAKAGGKELAGAKEGRLAGDGFELGIKVKTPDLWLKV

SEQ ID NO: 76121 - protein, 128 aa, Zea mays
  Coding DNA Sequence Number=SeqID_34342
MAGGKELVGAKEGCLAGDGFELGIKVNTLDLWLKHLRETLGDTGVSQRAKGRCFSDLRHSEAFEFFVDRARYEKRSSTTKGLLLGAFFSAKGPLRKNTFGKAICKQAQHEGIYRSCNQGSFGMMTRLK

SEQ ID NO: 76122 - protein, 83 aa, Zea mays
  Coding DNA Sequence Number=SeqID_34343
  Gene Ontology: Mol. function=small protein conjugating enzyme activity; Cellular component=cytoplasmic ubiquitin ligase complex; Biological process=autophagy
  Homolog annotation: Hit_ID=Q8SBA4; Match level="QueryCoverage=91%, HitCoverage=31%, E-value=4e-36, Identity=93%"; Hit description =Autophagocytosis protein AUT1-like
  Pfam annotation: Domain name=Autophagy_N; Domain location=6-83; Score= 43.8; E_value=7.3e-12; Accession=PF03986.4; Description =Autophagocytosis associated protein, N-terminal domain
MQVKQKVYEFYKGTVERVTAPRTVSAFLEKGVLSVPEFILAGDNLVAKCPTWSWEAGDPSKRKPYLPANKQFLVTRNGMLLLN

SEQ ID NO: 76123 - protein, 379 aa, Zea mays
  Coding DNA Sequence Number=SeqID_34344
  Gene Ontology: Mol. function=N-acetyltransferase activity; Biological process=metabolic process
  Homolog annotation: Hit_ID=Q84NP5; Match level="QueryCoverage=65%, HitCoverage=32%, E-value=3e-59, Identity=52%"; Hit description=PHD -type zinc finger protein-like
  Pfam annotation: Domain name=Acetyltransf_1; Domain location=263-340; Score=23.0; E_value=0.001; Accession=PF00583.14; Description =Acetyltransferase (GNAT) family
  Pfam annotation: Domain name=Autophagy_N; Domain location=6-151; Score=186.2; E_value=7.7e-53; Accession=PF03986.4; Description =Autophagocytosis associated protein, N-terminal domain
  Pfam module annotation: Pfam domain module=Acetyltransf_1::Autophagy _N; Domain location=263-340::6-151
MQVKQKVYEFYKGTVERVTAPRTVSAFLEKGVLSVPEFILAGDNLVAKCPTWSWEAGDPSKRKPYLPANKQFLVTRNVPCLRRAISVEEEYDAAGAEVVLDEDGEGWLATHGVQAEGFTDKTIIYCEQCERESEWCRRLSESEGPEEEWRPWLCSHECGEVFQHLQGLAASSRARSIPTTVEGVSLSTLRRWRYMSTVTRITRWQHEEEDTADHGQLCAALDVLHECFDDMVEPRTQTDLAADIVFNQESGLRRLNFRGYYVVGLEKVGELITVGTLRVFGNQVAELPLVGTRFAHRRQGMCRLLVTELEKMLRQVGVRRLVLPAVPELLPMWTASLGFHAMTRSDVMEMAVEHAILSFKGTTMLTRSRMVRKEVLNYK

SEQ ID NO: 76124 - protein, 417 aa, Zea mays
  Coding DNA Sequence Number=SeqID_34345
  Gene Ontology: Mol. function=N-acetyltransferase activity; Biological process=metabolic process
  Homolog annotation: Hit_ID=Q84NP5; Match level="QueryCoverage=60%, HitCoverage=32%, E-value=1e-58, Identity=51%"; Hit description=PHD -type zinc finger protein-like
  Pfam annotation: Domain name=Acetyltransf_1; Domain location=263-340; Score=22.9; E_value=0.0011; Accession=PF00583.14; Description =Acetyltransferase (GNAT) family
  Pfam annotation: Domain name=Autophagy_N; Domain location=6-151; Score=186.2; E_value=7.7e-53; Accession=PF03986.4; Description =Autophagocytosis associated protein, N-terminal domain
  Pfam module annotation: Pfam domain module=Acetyltransf_1::Autophagy _N; Domain location=263-340::6-151
MQVKQKVYEFYKGTVERVTAPRTVSAFLEKGVLSVPEFILAGDNLVAKCPTWSWEAGDPSKRKPYLPANKQFLVTRNVPCLRRAISVEEEYDAAGAEVVLDEDGEGWLATHGVQAEGFTDKTIIYCEQCERESEWCRRLSESEGPEEEWRPWLCSPECGEVFQHLQGLAASSRARSIPTTVEGVSLSTLRRWRYMSTVTRITRWQHEEEDAADHGQLCAALDVLHECFDDMVEPRTQTDLAADIVFNQESGLRRLNFRGYYVVGLEKVGELITVGTLRVFGNQVAELPLVGTRFAHRRQGMCRLLVTELEKMLRQVGVRRLVLPAVPELLPMWAASLGFHAMTRSDVMEMAVEHAILSFKGTTMMESPLTTPRLRLTVVVLFLAHEIKDGEKREEVDEEYAKRMPETSQVQNECPYI

SEQ ID NO: 76125 - protein, 595 aa, Zea mays
  Coding DNA Sequence Number=SeqID_34346
  Homolog annotation: Hit_ID=Q8RVT7; Match level="QueryCoverage=35%, HitCoverage=68%, E-value=8e-91, Identity=57%"; Hit description =Multidrug resistance protein 1 homolog
  Pfam annotation: Domain name=ABC_membrane; Domain location=65-391; Score=-34.4; E_value=0.033; Accession=PF00664.13; Description=ABC transporter transmembrane region
MDIFKTFIELLRQTGNVTKGQGDIDESSPRWLLKQEVPKVVKSINRQLREKSIKTKVGAFSVLKELVVVLPDCLADHFGSLVPGIEKALNDKSSTSNLKIEALVLTRLVMASHSPSVFHPYIKALSAPILSVIRDRYYKVTTEALRKTVVDFEPYIGPIYNAILGRLANQDQDQCTLIYHANLCSPKRELPACLPILVDRMGNEITRLTAVKWMNMPNLLEVIDFKDTFLDANHVQQSFPDYQSRNNMADGEPQKEKLIVETYIPADPGPYPQDKPKQNSVRFTPTQEMYEDASQVAVDAVGSIRTVASFCAEKIVVAAYRDKCEALRKQGIRNGVIGGLGYGFSFLMLFFTYGLCFYVGAQFVRQGKTTFPDVFKVFFALVLAAIGVSQASALASDATKARDSAISIFSVLDRESKIDSSSGDGMTLEDVSGKIDFRNVSFKYPLCLDVQIFSDFTLRIPSGKTVALVRESGSGKSTIIALLERLYDPDSGRISQDGVECTQMTNLTCSYWVQCPSGSSYGLTETCAGAAFTEWDDTSVGRVGPPLPCCYVKWLARGEAVVGGHSTTKGYRTNCISSQTHAGHISSTATWPRRT

SEQ ID NO: 76126 - protein, 148 aa, Zea mays
  Coding DNA Sequence Number=SeqID_34347
MNMFSVLGAGGGLGGRNASNALTDPGTTHKFDGHVAPSNLRLRTWVPSNLWEKIRRHPSNLKTHVLKLKFDGTHVLNLKFDGTHVLNLKNVGGRRTYFFKFVQKSPSAMFVGKPTFLWYPQGGYGFWVDLAVHLATGLDSRVEPRLSR

SEQ ID NO: 76127 - protein, 114 aa, Zea mays
  Coding DNA Sequence Number=SeqID_34348
MDRHAACRTAWSLPVSGVDRAHLMLRQHITYQRSGQGSFNADAAHHPPVEWTGGVQHFSWGSRPNVDTLEYIVSSGHVAAPEPPTWGGGSGAVCRVTKDSRLDIVPLYCSKGYP

SEQ ID NO: 76128 - protein, 402 aa, Zea mays
  Coding DNA Sequence Number=SeqID_34349
MDDELDDMMAPSLDVHACRTAWSLPVSGVDRAHLMLRWHITCQQGGQGSFNAEAGSGTFPWGSGPIVDTLEYIASSGHVVTPELPTWWGSGAFYRTTKDSRMDIVPPYCSKGNRHPWRMTHGPGPPCSDWVVGFSGGEEVHYRRRWRAPHAAVRLLRTRRPTPKEYDSWAQAPVSETGPLLVSAEVKRRTTAGGGVLFTRWFAFSAHGGRSPRSMTRGPRGPAPEAGSPWHVSGEIFCGISGRQWGNLSLKRDSLERVAMALLDLPECFQSEVALDLVRNLLGWGAPAFAGRIRVGASPHGDLAAREFVLFVSNLSCRLALSIPSFFVLLLEELGLQPQHFTPCFILQAAIIAYLCRMSVGATLLPASSSSIRREGYAAWEVVQDVAEMVAACYQHDPTDVE

SEQ ID NO: 76129 - protein, 663 aa, Zea mays
  Coding DNA Sequence Number=SeqID_34350
  Gene Ontology: Mol. function=CTP synthase activity; Cellular component=cellular_component; Biological process=pyrimidine nucleotide biosynthetic process
  Homolog annotation: Hit_ID=Q5VPD3; Match level="QueryCoverage=91%, HitCoverage=100%, E-value=0.0, Identity=73%"; Hit description =Putative CTP synthase
  Pfam annotation: Domain name=CTP_synth_N; Domain location=56-337; Score=570.2; E_value=2.1e-168; Accession=PF06418.4; Description=CTP synthase N-terminus
  Pfam annotation: Domain name=GATase; Domain location=361-608; Score =251.3; E_value=2.1e-72; Accession=PF00117.18; Description=Glutamine amidotransferase class-I
  Pfam annotation: Domain name=Peptidase_C26; Domain location=397-590; Score=-114.5; E_value=0.1; Accession=PF07722.3; Description =Peptidase C26
  Pfam module annotation: Pfam domain module=CTP_synth_N::GATase::Peptid ase_C26; Domain location=56-337::361-608::397-590
  Subcellular localization annotation: CTP_CleavageSite=48; ConfidenceScore=5.26e-01
MALLFNKTKTASQQLAYVDLPLMSLKATLLRSFFPGAEPERTTAVGVRGASERAAMKYVLVTGGVVSGLGKGVTASSIGVVLKACGLRVTTIKIDPYLNTDAGTMSPFEHGEVFVLDDGGEVDLDLGNYERFLDIKLTRDNNITTGKIFQAVINKERRGDYLGKTVQVVPHITDEIQDWIERVAVVPVDGKEGPPDVCVIELGGTIGDKIFSPHNDSGILDAGDIESMPFIEALGQFSYRVGPGNFCLVHVSLVPVLNVVGEQKTKPTQHSVRGLRGLGLAPDVLACRSTEPLEEHVKAKLSQFCHVPDQKAHEAILKVLDLQYDGKVPREPELTKWTKRATKFDKLKTPVKIAMVGKYTGLSDSYLSVIKALLHASVAMERKLVVEWVPSCDLEDSSAKETPEAHKKAWKLLKSVSRNSIPSQGADGVLVPGGFGDRGVQGKILAAKYARENNVPYLGICLGMQIAVIEFARSVMKLRGANSTEFDPATTSPCVIFMPEGSKTQMGATMRLGSRRTYFHVSGCKSAKLYGNASSVDERHRHRYEVNPDMVPDFEKAGLQFVGKDESGKRMGIVELPSHKFFIGAQFHPEFKSRPGKPSPLFLGLIAAASGQLEPLLQRSNPTTKACSISKVPKLKLYPTGPVNNPLNSLVNGYYPNGTGIHT

SEQ ID NO: 76130 - protein, 513 aa, Zea mays
  Coding DNA Sequence Number=SeqID_34351
  Gene Ontology: Mol. function=CTP synthase activity; Cellular component=cellular_component; Biological process=pyrimidine nucleotide biosynthetic process
  Homolog annotation: Hit_ID=Q5VPD3; Match level="QueryCoverage=99%, HitCoverage=84%, E-value=0.0, Identity=75%"; Hit description =Putative CTP synthase
  Pfam annotation: Domain name=CTP_synth_N; Domain location=1-187; Score=156.4; E_value=7.5e-44; Accession=PF06418.4; Description=CTP synthase N-terminus
  Pfam annotation: Domain name=GATase; Domain location=211-458; Score =251.3; E_value=2.1e-72; Accession=PF00117.18; Description=Glutamine amidotransferase class-I
  Pfam annotation: Domain name=Peptidase_C26; Domain location=247-440; Score=-114.5; E_value=0.1; Accession=PF07722.3; Description =Peptidase C26
  Pfam module annotation: Pfam domain module=CTP_synth_N::GATase::Peptid ase_C26; Domain location=1-187::211-458::247-440
AVINKERRGDYLGKTVQVVPHITDEIQDWIERVAVVPVDGKEGPPDVCVIELGGTIGDKIFSPHNDSGILDAGDIESMPFIEALGQFSYRVGPGNFCLVHVSLVPVLNVVGEQKTKPTQHSVRGLRGLGLAPDVLACRSTEPLEEHVKAKLSQFCHVPDQKAHEAILKVLDLQYDGKVPREPELTKWTKRATKFDKLKTPVKIAMVGKYTGLSDSYLSVIKALLHASVAMERKLVVEWVPSCDLEDSSAKETPEAHKKAWKLLKSVSRNSIPSQGADGVLVPGGFGDRGVQGKILAAKYARENNVPYLGICLGMQIAVIEFARSVMKLRGANSTEFDPATTSPCVIFMPEGSKTQMGATMRLGSRRTYFHVSGCKSAKLYGNASSVDERHRHRYEVNPDMVPDFEKAGLQFVGKDESGKRMGIVELPSHKFFIGAQFHPEFKSRPGKPSPLFLGLIAAASGQLEPLLQRSNPTTKACSISKVPKLKLYPTGPVNNPLNSLVNGYYPNGTGIHT

SEQ ID NO: 76131 - protein, 306 aa, Zea mays
  Coding DNA Sequence Number=SeqID_34352
  Pfam annotation: Domain name=IQ; Domain location=122-142; Score=21.3; E_value=0.0036; Accession=PF00612.17; Description=IQ calmodulin -binding motif
  Pfam annotation: Domain name=IQ; Domain location=80-100; Score=25.0; E_value=0.00027; Accession=PF00612.17; Description=IQ calmodulin -binding motif
  Pfam module annotation: Pfam domain module=IQ::IQ; Domain location =122-142::80-100
  Subcellular localization annotation: CTP_CleavageSite=32; ConfidenceScore=5.31e-01
MDRRSMTPGISSRFSSPPPAAHPSPPPAAAPSAAATPSHPPSPTPDAFTRLEESFGRLEEKWDQFVVMFHRYKEKTEKELQAAVRLQAAARGFLARRQVQSLRGEKHLAVASRATPWPSSHEQTVVRLQAAVRGFLVRRAVRKLHLLISSSLHQLAACAPNHQVSSILFEPPAEVEIWVCSPPARPKRVVSFIRATALVLDRPNIRTGWFLLRLSSNVKSAVQLFPWDPGGQEDIAAVQIYILVSKLFCIFVLNNKGKPRCKRLNLKSCQVSLWQLEDELVLKGGGDVMGIIGSERQQPGWDKARE

SEQ ID NO: 76132 - protein, 143 aa, Zea mays
  Coding DNA Sequence Number=SeqID_34353
MKETTLFGRAGGLHTQISTSAGGSKSIDETWWLGAQAASWCSDELISKCSFRTARLTRKPRTTACRRTTACSCDDGHGVALEATASRVNASGVGEGGWEGVAAADGAVAGGGEGWAAGGGEDNLELIPGVMDLRSMGIAVFSG

SEQ ID NO: 76133 - protein, 145 aa, Zea mays
  Coding DNA Sequence Number=SeqID_34354
MNVCELTLAVSHTPQVKTRTPVIYKDVTFDPVPLYIICVRLGPSIPVTPVYDINVLNECKTDISAVLTVMSSLDSSHDNLYYLLIKTEALMLASLIDDEKKFGDCQFDLWKQYYVVACVTVFGKLRRSRRLDAVQSGCTALSIFK

SEQ ID NO: 76134 - protein, 132 aa, Zea mays
  Coding DNA Sequence Number=SeqID_34355
MRHCVRQAPPQPPLGRGLERLHRTVHLKQGDLMVVINAGDSWVVMGTTSDNGAVTPSSSSSLEAQPATFNTSYLVLQAMTMWGNGRRMKFVGDAKILRRNFVIDLLSYEDNSCQYAIPANIQQRLIDIAKKD

SEQ ID NO: 76135 - protein, 374 aa, Zea mays
  Coding DNA Sequence Number=SeqID_34356
MWEQQGCGCKESDVETMPWIHSATRHSGAAWIEQRTGIKVDDVVLDTVLHTDSLTTPKRGEQGCAQHKQDNTQSATHIVEQVVCVVEQRHGKGQRRPGKQGGHWLGEGLGLQPPWLGAAALIRSLLLDVWDKEKAGKCHEHMGSPASRSPARPRRRPAGDPRRATPWQGGDQHREQRLIQSTEKGRARQGETAMDGKAPAPLLLRPSHRKGARRRAQWRRKGVVPCTEVELSSPAARTPSAGSRGSAMGERGARRGNRHGCWPYFLRVAAARGTRSRGRLEIRRRHGRQGGASAPRKKEQGRQLAARHGGEHGSLLLLPWDACCAMEKKTGRLRWRLEKNEGWECKIAQGQGERAPIYRHGLGLGFQMGLIGPG

SEQ ID NO: 76136 - protein, 500 aa, Zea mays
  Coding DNA Sequence Number=SeqID_34357
MACCWQGREKLVALWTAEGMACWLEEEIGEEEEGSRLEFSGRHPWVSCCAARQQGAGKGWSLGRRPWKLCARTGKQRGGEGRAGDTPAPMDAREELQRRGRRSRGASLLLAMEGSTAPCALCQEQRRKKGRWWSAAGGRRRGAGGTAPWLAEGRSRPGRHGRKGAELPAAREGEATAVGKKGCWKMAAAGAGGSKSTKAVPPSGRVLEVAKAVRELPSSGKRVADFATDISVEDYLGGSDEGQLAIVAPAAATMAAAVVPKAKGGALSAGGEMSALATVRDEAGAASRRLKEVADFANRTASGALTAVVSAEVERLRTQHADAVREKSAADSKCRKLADKVAALEVEKADLRRQLAGERRETNEALAKAQAAQVEANLARTEGNLARERAEQLQERLIALESRVERAEAATCAEAERTRKQLLVSYHKLGARTGDFEVPDRESGLRCLEWVQEELQALPTIVEGFMSYASLVTYEGAMNALSREGCRHFEVFDQADEDFE

SEQ ID NO: 76137 - protein, 221 aa, Zea mays
  Coding DNA Sequence Number=SeqID_34358
MGNKPSGSIGSPPERGAQAHRIKPGHMSVPDPCLGQVIPCPGTSLWVARTSLRGVRTLPKGSGSLAWEPWTILGDPGREYRGPALSRGVRGTPNSGYQQHRNSKPNVTKPCPCPGKTPVGHITLEWGRSTQSVDKIRRPPHLISSLEYKQQIVYKDLAQIGLEQATKWQRKGLGEHLPGVRRRLTEAERALSACPCANQRACPLLCHDRGNRSIVSARAYK

SEQ ID NO: 76138 - protein, 194 aa, Zea mays
  Coding DNA Sequence Number=SeqID_34359
  Subcellular localization annotation: CTP_CleavageSite=34; ConfidenceScore=5.70e-01
TQPRPRKTDSTSPDPRARTKPRPRKTVSTSPDPRARTQPRPRKTNSASPDPKARTQPRPQKTDSASPDPRARTLPRPRTTVSASPDPGARTQPRPRRSHRLARPRARTDHITGEAIITLPLASSGYGEQDRRPIWLAPGPPGVETPTPGVACQRSGQDALNAEGAHRLSAGGQAATSHAAATGLRLSGERKRTG

SEQ ID NO: 76139 - protein, 116 aa, Zea mays
  Coding DNA Sequence Number=SeqID_34360
  Subcellular localization annotation: CTP_CleavageSite=24; ConfidenceScore=5.06e-01
MVRERRTQTNTMSKNTRDTRFIPRFGHTTKVPYFLVEAPTKSRVSFNPNPPFADHRDKNRLSVRLNQYFQKGEQCKNRLNLFFQKTILAKIDLKRLYYILSLRINKGKMEVLDQGF

SEQ ID NO: 76140 - protein, 72 aa, Zea mays
  Coding DNA Sequence Number=SeqID_34361
MVRERRTQTNTMSKNTRDTRFIPRFGHTTKVPYFLDEAPTKSRVSFNPNPPFADHKDKNRLSVRLNQYFPKR

SEQ ID NO: 76141 - protein, 196 aa, Zea mays
  Coding DNA Sequence Number=SeqID_34362
  Gene Ontology: Mol. function=DNA binding
MVHIVEHHDFVPEDFPMEEEAASSTPRAVNRPAPSAAAVHSTRQHTATQTSRASRAAPGALSAARELLCHPPSFTASPRAMKQWRDDVDRLLGIAHSSSARSRPRSSRHQHEASASVRSPSVRAALTEDLRAEHNRQRAGEDAPVSLERSSDLRAELNHRRAGEDARVSLERARERRLNFEGRNLNYDFAAILFFI

SEQ ID NO: 76142 - protein, 271 aa, Zea mays
  Coding DNA Sequence Number=SeqID_34363
MTAAALSSLTEADGRQQGLDRSDSCPSAKLRCSSDSHDITPAGCQDLSGCHIGMAFLEKVGRAGPRTGQALSWGRSLPSPAWTLVTPLLQAHPTWARDEHEGRETSTSLTPVSGHLASPPFALAHALDPSGLGHAAHSLVGLGTPRSRNVDSVGPLVPRFWGKEYPGLNQGQTGVRSRHVSGPYRIRFCSPLRRRPDAATWPTARDGECVPPPGQRISSPTFGAPSRGLGIRFLLVFLLDTMVHIVEHHDFVPEDFPIVGVSTPGGPWTDE

SEQ ID NO: 76143 - protein, 83 aa, Zea mays
  Coding DNA Sequence Number=SeqID_34364
MSRVFDDYYIKDCGVISAPEPRWVGARPSAKGGERWPESGVREVEIPRPSCSSRAQVGRKERIQVYNGGVAECYVSSGGELAP

SEQ ID NO: 76144 - protein, 101 aa, Zea mays
  Coding DNA Sequence Number=SeqID_34365
  Gene Ontology: Mol. function=kinase activity; Cellular component =ornithine carbamoyltransferase complex; Biological process=amino acid metabolic process
  Homolog annotation: Hit_ID=Q6QP54; Match level="QueryCoverage=94%, HitCoverage=31%, E-value=7e-11, Identity=43%"; Hit description =Putative kinase
MGVREVEIPRPSCSSRAQVGRKERIQVYNGGVMMVPPVDVAGLRPRLGDVEAPPKPRSSLSSVAEVESEPLVRARRRPSAEARAESEPWGQAERSSSSSGG

SEQ ID NO: 76145 - protein, 311 aa, Zea mays
  Coding DNA Sequence Number=SeqID_34366
MAPALPAGGVACPAKELMRRDGAALSRCAGFAVEKTQHWRKRWCSFLARSDRRAGYMTCGTGPPCWTTGCDEAERVHNRGAVACSLCGGTRPRGGWRSPVTARLQGFSSCSPAAFPHRRSPRMMTAGLVAGKSEPGRGLPPTLSFKDVHHPCWGGGCTETGSASTWVAACFFLQHLGEQGILQLCEGDILQPSGGRRTAAAWSGCSCPSSTRVMVVRVRRWLLSPVLKWWPLLVRLPTAAVASADETVSATCAPDLRLLPVKGRERGPFHSSVFPEAIATAVYPPETEVVVALLVQWSLASRLELVIPQVF

SEQ ID NO: 76146 - protein, 130 aa, Zea mays
  Coding DNA Sequence Number=SeqID_34367
  Homolog annotation: Hit_ID=Q6QP51; Match level="QueryCoverage=57%, HitCoverage=30%, E-value=6e-13, Identity=60%"; Hit description =Putative growth-regulating factor 1
MDPGTHMVGGSSGHVVSQAYVPSTDSKGTLSPRREDGVPGDRERGIPRKGILLREGNKPRASLLIRGSKAGPSEGFNSRLRALGLHAHYWLEVRRPAPRKGSTAASGNSGFAPTTDQGFVGWPSKGSQPP

SEQ ID NO: 76147 - protein, 166 aa, Zea mays
  Coding DNA Sequence Number=SeqID_34368
MAVTGGQEQRSRRQPSLCPIQGQRGSPLPRREDGAPVIRSSNGSRTRNDRLANYSPRRINSAAGQAAPQAGEASNRFAFAIMTASKKGPGKGDTPKRTLLREGNRLRASLLIRGSKAGPSEGFNGRLRSIGFHTHYWSEVRWPAPRRVQRPPQATQAPRPLLIRGS

SEQ ID NO: 76148 - protein, 75 aa, Zea mays
  Coding DNA Sequence Number=SeqID_34369
MRLRSVLWFRILVCLIFSVLLQHGYVGSAGAESEAHLTYLPGLLSLLTISGRYVEEWVRVFYASVWIDPDHHWMS

SEQ ID NO: 76149 - protein, 99 aa, Zea mays
  Coding DNA Sequence Number=SeqID_34370
MRLRSVLWFRILVCLIFSVLLQHGYVGSAGAESEAHLTYLPGLLSLLTISGRYVEEWVRVFYASVWIDPDHHWMRPRMQLYDSLTLRVQQLMMMMMMMI

SEQ ID NO: 76150 - protein, 217 aa, Zea mays
  Coding DNA Sequence Number=SeqID_34371
MAELGALVRTRRLRCPIYTPVAKSERGTRSDIPDEDVHQPRGGGERAELWLRLPHGLVTRLFLQHLEEKDDHQPCEGGKLREGRGEGLFAMARTLRWLPPLGRLPGVEVAAAAGKPFGAEVVATAGEPLGASYPRDPTSVETSIPKKELAMAPRRPTVRDQAERLHGSGPPQETSVHSLVPDPRLSGHRLQTTPWNGLPFFRTAPRLSGPPAFAKRS

SEQ ID NO: 76151 - protein, 258 aa, Zea mays
  Coding DNA Sequence Number=SeqID_34372
MPEVGPLVMAKTRGALPRGSSTLPVRRFAFMTIGHGKDEGGALPRGGSMLLMWRFSFFALEDQRASCMTCGTRSSCHRMDTPVCIGGDFSRRFEAGAGESAFKEGFIPRVAAMPCFSPTRGALSPSSSLRPFAFKVSALCHHSLPWPYKFIPSVPILSECSTWYTAYLDGMRWRSAEGFAPAPSSPTNLPPESSCLLSSPAGWCCRSCLSFAGGVWPCGSGALPPMLGFKDVHQPRGGGERAEPRLRLPHGLVTRLFL

SEQ ID NO: 76152 - protein, 58 aa, Zea mays
  Coding DNA Sequence Number=SeqID_34373
MAKRGSGSGGSSRLHGNIFLAKKFVDEDMMLNSMDASLVIPPIIFLWKDVHVSLYFDE

SEQ ID NO: 76153 - protein, 84 aa, Zea mays
  Coding DNA Sequence Number=SeqID_34374
MGSLMLGAGRGRQERGHLASSYSSGSGRLDTGIVPKALPCSLDYKLVTKLADEDMMLNSMDASLVIPPVIFLWMDVLVSLYFDE

SEQ ID NO: 76154 - protein, 84 aa, Zea mays
  Coding DNA Sequence Number=SeqID_34375
MGSLMLGAGRGRQERGHLACSYSSGSGRLDTGIVPKALPCSLDYKLVTKLQMKIMMLNSMDASLVIPPVIFLWMDVLVSLYFDE

SEQ ID NO: 76155 - protein, 121 aa, Zea mays
  Coding DNA Sequence Number=SeqID_34376
MPLPKFLAVVLSQLLLCLPPSDTAVCHRARRIDIFLFTGSLMLGAGRGRQERGHLASSYSSGSGRLDTGIVPKALPCSLDYKLVTKLQMKIMMLNSMDASLVIPPVIFLWMDVLVSLYFDG

SEQ ID NO: 76156 - protein, 72 aa, Zea mays
  Coding DNA Sequence Number=SeqID_34377
MERGHLASSYSSGSDRLDTGIVPKALPCSLDYKLVTKLADEDMMLNSVDASLVIPPVIFLWMDVLVSLYFDE

SEQ ID NO: 76157 - protein, 84 aa, Zea mays
  Coding DNA Sequence Number=SeqID_34378
MGSLMLGAGRGRQERGHLASSYSSGSGRLDTGIVPKALPCSLDYKLVTKFADEDMMMNSMDASLVIPPVIFLWMDVLVSLYFDE

SEQ ID NO: 76158 - protein, 84 aa, Zea mays
  Coding DNA Sequence Number=SeqID_34379
MGSLMLGAGRGRQERGHLASSYSSGSGRLDTGIVPKALPCSLDYKLVTKFADEDMMLNSMDASLVIPPVIFLWMDVLVSLYFDE

SEQ ID NO: 76159 - protein, 66 aa, Zea mays
  Coding DNA Sequence Number=SeqID_34380
MGTYSWLSLDPHMIIELEDENKSWSFMVQVKFADEDMMLNSMDASLVIPPVIFLWKDVHVSLYFDE

SEQ ID NO: 76160 - protein, 41 aa, Zea mays
  Coding DNA Sequence Number=SeqID_34381
MALALKFADEDMMLNSMDASLVIPPVTFLWMDVLVSLYFDE

SEQ ID NO: 76161 - protein, 70 aa, Zea mays
  Coding DNA Sequence Number=SeqID_34382
MAEARDAVVRVPSLALAVGEPLADHFALTLEVSREVADEDMMLNSMDASLVIPPVIFLWMDVLVSLYFDE

SEQ ID NO: 76162 - protein, 63 aa, Zea mays
  Coding DNA Sequence Number=SeqID_34383
MFDHFQHLRNEDSREKPRSETLAIHLGKVADEDMMLNSRDASLVIPPVIFLWMDVLVSLYFDE

SEQ ID NO: 76163 - protein, 148 aa, Zea mays
  Coding DNA Sequence Number=SeqID_34384
MTFLKDIIFNKSLPLMILMFQMGSLMLGAGRGRQERGHLASSYSSGSGRLDTGIVPKALPCSLDYKLVTKFADEDMMLNSMDASLVIPPVIFLWMDVHVRCTLMNKGGNEIVGFGIDSGNGCPHCNHCSGEDEAVEGDFQEFQEYDEF

SEQ ID NO: 76164 - protein, 125 aa, Zea mays
  Coding DNA Sequence Number=SeqID_34385
MKAKSHHQPIILRNTCKNYATSKAEYTNTQLDLPGYNGSSSLISCEKQTIRIEFLSLQVTALVPTITGMGDHVSGRVRGYVCGQVHSGIRTLILIPISSRRPRIPMDPCPQTNHPYDMKVGTTNS

SEQ ID NO: 76165 - protein, 134 aa, Zea mays
  Coding DNA Sequence Number=SeqID_34386
MEAKSHQQPIILRSTCKNCATSKAEYTNTQLDLPGYNGSSSLISCEKQTIRIEFLSLQVTALVPTITGMGDLVSGRVRGYVCGQVHSDCNLADGEYILVPEQGAAQEVAPDPAPEPAPEDLPATALEGKPRFYA

SEQ ID NO: 76166 - protein, 102 aa, Zea mays
  Coding DNA Sequence Number=SeqID_34387
MEAKSHQQPIILRSTCKNGATSKADYTNTQLDLPGALRPHTHQPSPSIPRQQIRAHRLGVQCLTDPDWPSCSDRTCTHHNRNGRPRLRSREGICPLPGSLRY

SEQ ID NO: 76167 - protein, 57 aa, Zea mays
  Coding DNA Sequence Number=SeqID_34388
MEAKSHQQPIILKSTCKNCATSKAEYTNTQLDLPGRPPTASCGWHHITARSSSLGPI

SEQ ID NO: 76168 - protein, 70 aa, Zea mays
  Coding DNA Sequence Number=SeqID_34389
MEAKSHQQPIIIRSTCKNCATSKAEYTNTQLDLPGLTALAYNAPLTPAAAVQWPHLYPPYLEWETQSHVA

SEQ ID NO: 76169 - protein, 71 aa, Zea mays
  Coding DNA Sequence Number=SeqID_34390
MAPKRKISSSSAAVIPPIDPNSQLPFAGMKAKSHHQPIILRSTCKNYATSKAEYTNTQLDLPGVRSLLLYL

SEQ ID NO: 76170 - protein, 70 aa, Zea mays
  Coding DNA Sequence Number=SeqID_34391
MKAKSHHQPIILRSTCKNYATSKAEYTNTQLDLPGLTALAYNAPLTPTAVVQWPHLYPPYLECETQSQVA

SEQ ID NO: 76171 - protein, 149 aa, Zea mays
  Coding DNA Sequence Number=SeqID_34392
MGLGVCALLYQGGDEDDGFGYDYGNGKWYSFRLERMVRLRHTARKSIIPFLPSRLAECPLRRLVTVGDRVYEELLSCAPAGGAPAPPLDAPAAGVAAGGDPDDGGGDSSSSHSTDLSEEQELEGWVARPITRDATRGCHFHDALDTLLR

SEQ ID NO: 76172 - protein, 472 aa, Zea mays
  Coding DNA Sequence Number=SeqID_34393
MANCHARSEPPRLFISAESSGPASDTGARVHESFSWGIGLRRSRTAARASATPPRGHRRGQRRHGSWRDQGRAGSDYVSKRTKAARQSSFGPTYRLVSSPEHPTPPRGRLRGCHVAEKDDTLQGINDGSGPPWESVGSLHIRTGPPGRVQDLHGFRRDPRDGSPTSLYGVRATLSRVPGFWDKEYLGLNQGHTGVRSQHVSGPYHVRFCSPPRRRPDEATWPTACDVSQRAEPDTMCCLSIKCAMSTPLTDGDQTILQATCLSILLRKWGVVRFTVVPLMGLGVCGSLYQGGDEDDGFGYDYGNGKWYSFRLERFLSERSQLERDCKEYKRDLQKVCARELEASRREKKVTRREEAVSQREVLATEFWAKLSALDQTLEAQRVHQTQAVERLQKWQQELEGKASDAALTEENLKAKEQSLDRRETDLSRRETDLVFREEMLTRRGKLLVEHELEAEEKEKKLEERIWQFQAA

SEQ ID NO: 76173 - protein, 166 aa, Zea mays
  Coding DNA Sequence Number=SeqID_34394
MTGHGKASHCDKVLRLGTWHLSGKRPTPARCQRFIYNYTKSTVRNTVDYSGQEKLFGKTGQARTVRALAADRPRHRNTPRTEPMQKHKFPLQTVRRKSKDRPSPRADRPASGADRPVGKKPKNPKPLINKGGPSGPDSRTVRAHQKGATARKWLGAKNTTPTTSIQ

SEQ ID NO: 76174 - protein, 180 aa, Zea mays
  Coding DNA Sequence Number=SeqID_34395
MTGHGKASHCDKVLRLGTWHLSGKRPTPARCQRFIYNYTKSTVRNTVDYSGQEKLFGKTGQARTVRALAADRPRHRNTPRTEPMQKHKFPLQTVRRKSKDRPSPRADRPASGADRPVGKKPKNPKPLINKGGPSGPDSRTVRAHQKGATARKWLGAINTTPTTSIQYIQAFQPFNIQYKS

SEQ ID NO: 76175 - protein, 61 aa, Zea mays
  Coding DNA Sequence Number=SeqID_34396
MQYNGSSSLISCEKQTIRIEFLSLQGLTALAYNAPLTPTAAVQWPHLYPPYLEWETQSQVA

SEQ ID NO: 76176 - protein, 93 aa, Zea mays
  Coding DNA Sequence Number=SeqID_34397
MGKPGPSLLMLLLYRGRVPLDCPPRCQDGRPSHASNHVLQRTCKNYATTIILAINIFCQVNIFPLVTQCCSMDQAVLISCEKQTIRIEFYPCQ

SEQ ID NO: 76177 - protein, 174 aa, Zea mays
  Coding DNA Sequence Number=SeqID_34398
  Gene Ontology: Mol. function=cysteine-type endopeptidase activity; Cellular component=endoplasmic reticulum; Biological process =proteolysis
  Homolog annotation: Hit_ID=O22500; Match level="QueryCoverage=45%, HitCoverage=16%, E-value=4e-40, Identity=96%"; Hit description =Cysteine proteinase Mir3
  Pfam annotation: Domain name=Peptidase_C1; Domain location=57-174; Score=10.3; E_value=2.2e-12; Accession=PF00112.13; Description =Papain family cysteine protease
MAADGDVPVAASCTFLLERWRRFLASSIGKGRRNTLLGQASFKRLMLKQQGMRTTWEYPFAVAGSCWAFSTIAAVEGINQIVTGDLISLSKQELVDCDTSYNQGCNGGLMDYVFEFIINNGGIDTEKDYPYKGTDGRCDVNRVFFSLPYTTAKLNTPVGHNNSRRFLGLPTGVN

SEQ ID NO: 76178 - protein, 359 aa, Zea mays
  Coding DNA Sequence Number=SeqID_34399
  Gene Ontology: Mol. function=cysteine-type endopeptidase activity; Biological process=proteolysis
  Homolog annotation: Hit_ID=O22500; Match level="QueryCoverage=87%, HitCoverage=65%, E-value=1e-65, Identity=89%"; Hit description =Cysteine proteinase Mir3
  Pfam annotation: Domain name=PADR1; Domain location=224-259; Score= -3.0; E_value=0.0029; Accession=PF08063.2; Description=PADR1 (NUC008) domain
  Pfam annotation: Domain name=Peptidase_C1; Domain location=38-262; Score=157.1; E_value=4.5e-44; Accession=PF00112.13; Description =Papain family cysteine protease
  Pfam module annotation: Pfam domain module=PADR1::Peptidase_C1; Domain location=224-259::38-262
MGNRANAINLDFSDVIVDIYASFKRLMLKQQGMRTTWEYPFAVAGSCWAFSTIAAVEGINQIVTGDLISLSEQELVDCDTSYNQGCNGGLMDYAFEFIINNGGIDTEKDYPYKGTDGRCDVNRKNAKVVTIDIYEDVPANDEKSLQKAVANQPVSVAIEAAGTTFQLYSSVHETRSRVHAAAQEQGKLALKKQKPNNEIQERDQNGPSKNKKSADNEGQDREPELEFKEWKYKCTGNCTGNYTEWARCTFRTDDPSRRSGPIKVPDDIKDDFIRKWLKQQEGKGKEFPKHDVDEEAHILSSMMIDFCCPHDYPICNVRQGTCLMGKDSPLLSVKATKRTRAKPHCAFSGNTADGMKSSA

SEQ ID NO: 76179 - protein, 551 aa, Zea mays
  Coding DNA Sequence Number=SeqID_34400
  Homolog annotation: Hit_ID=Q2R0M9; Match level="QueryCoverage=65%, HitCoverage=58%, E-value=5e-19, Identity=24%"; Hit description =Expressed protein
  Pfam annotation: Domain name=DUF594; Domain location=436-487; Score =57.1; E_value=5.6e-14; Accession=PF04578.4; Description=Protein of unknown function, DUF594
  Subcellular localization annotation: CTP_CleavageSite=25; ConfidenceScore=5.31e-01
MAPSSPPMVDARCKLGGLAMCRRVRSRTRGGNSGFIPARLQVRISVSILVPAMLVFVSGIIKYGERESYALWTVLIARGFFVGRTMLLMGQGPASTLWFYLKTKYQGREEKLKMVMMVMMELGMMFDLLYTKANVLQRRIGVLFRCASQALMVVALVLFMIRREEGAHNNKVNVAITYTLFSGAIFVETCCVAAAIASPWTRAHLKESSCLHGLSDSLFEVVHLCKSTANNMAQFNLLDHCISVNSKPRVFSKALSAIGLDKQWYVHHMDKQCYWWIINRVLEHLATLPDEFSGLATVHFTINAPTEHPVWFNQLSTSFEQVLYGLHLYTDLHLSRHFNNCSTGSVVQPPPPEIMRLKEECETLSNYMMYLMVVHPSMLPVNTVAAGDLVQQLIGWVTNHPGHGATTTKLAILRGYSRTFYILVIDEPGQHRSFYYLHHLLTQIKEMWVRLLMYAAGKCSGEVHARQLGEGRELITFVWLLMLHHGLGDMAAEFKLLRSNDPNVAERGAWIVSPPGNYQEPTCAFNHVTFVVHCKRNVSMLFTHTLQQFFL

SEQ ID NO: 76180 - protein, 488 aa, Zea mays
  Coding DNA Sequence Number=SeqID_34401
  Homolog annotation: Hit_ID=Q2R0M9; Match level="QueryCoverage=74%, HitCoverage=58%, E-value=8e-19, Identity=24%"; Hit description =Expressed protein
  Pfam annotation: Domain name=DUF594; Domain location=379-430; Score =57.1; E_value=5.6e-14; Accession=PF04578.4; Description=Protein of unknown function, DUF594
MLVFVSGIIKYGERVWALKTRGFFVGRTMLLMGQGPASTLWFYLKTKYQGREEKLKMVMMVMMELGMMFDLLYTKANVLQRRIGVLFRCASQALMVVALVLFMIRREEGAHNNKVNVAITYTLFSGAIFVETCCVAAAIASPWTRAHLKESSCLHGLSDSLFEAVHLCKSTANNMAQFNLLDHCISVNSKPRVFSKALSAIGLDKQWYVHHMDKQCYWWIINRVLEHLATLPDEFSGLATVHFTINAPTEHPVWFNQLSTSFEQVLYGLHLYTDLHLSRHFNNCSTGSVVQPPPPEIMRLKEECETLSNYMMYLMVVHPSMLPVNTVAAGDLVQQLIGWVTNHPGHGATTTKLAILRGYSRTFYILVIDEPGQHRSFYYLHHLLTQIKEMWVRLLMYAAGKCSGEVHARQLGEGRELITFVWLLMLHHGLGDMAAEFKLLRSNDPNVAERGAWIVSPPGNYQEPTCAFNHHTLKDSVLYIFSVSSNVL

SEQ ID NO: 76181 - protein, 295 aa, Zea mays
  Coding DNA Sequence Number=SeqID_34402
  Subcellular localization annotation: CTP_CleavageSite=37; ConfidenceScore=5.26e-01
MDPSVSSSPLRLSVGTRASPGAGPAPAPTPRPPSLVVAAGRQQPAKIYRSAWDHGVCADAHLYNALMKASVAAYDPGPSSGDFSPFRVAANAWEIRPMSSDPSPHLPSPVYMLLRPVQFMDEDEADLQMTRVGFDDVVIDMAFLLDIMSNSLRALRRKARSTDYGLQEMVVFAAGDLRRRAAAGPSKGAGHSTSAKGELAGIEGEARNARRPRRARYNGPDRTWASGLDEAALWDDFVAGLRLVPIKRRVSLPVLSVRPAAAAKTSSEGWRLCLRPNICPPRDQFDKVTWCRRRR

SEQ ID NO: 76182 - protein, 235 aa, Zea mays
  Coding DNA Sequence Number=SeqID_34403
MEEGKREEAIEVDDPRGVALSDFSPFRVAANAWEIRPMSSDPSPHLPSPVYMLLRPVQFMDEDEADLQMTRVGFDDVVIDMAFLLDIMSNSLRALRRKARSTDYGLQEMVVFAAGDLRRRAAAGPSKGAGHSTSAKGELAGIEGEARNARRPRRARYNGPDRTWASGLDEAALWDDFVAGLRLVPIKRRVSLPVLSVRPAAAAKTSSEGWRLCLRPNICPPRDQFDKVTWCRRRR

SEQ ID NO: 76183 - protein, 80 aa, Zea mays
  Coding DNA Sequence Number=SeqID_34404
  Subcellular localization annotation: CTP_CleavageSite=36; ConfidenceScore=5.23e-01
MPTYGMPPPEFALPMPMLAPPPPPPSQFPTGFQTPPASVAASGDESGQDDASHSWVNNIFNTHSPVGGGGYSNHPGDGYD

SEQ ID NO: 76184 - protein, 165 aa, Zea mays
  Coding DNA Sequence Number=SeqID_34405
MGRSTIGGASQSTLRQHMLAQEDKPMDDSTIDSRELRRRGRQSTSSSSQSSRSRSSAQEIELAVLRQQRQQSEYQRQQAEYQKKRDEYYANLQTQNQALLSQLAQQRASRCPPMGCRLRTLHCRCQCLRLHLRLRHNSLRDFRHPLLQLQHQEMGLVKTTHRILG

SEQ ID NO: 76185 - protein, 492 aa, Zea mays
  Coding DNA Sequence Number=SeqID_34406
  Gene Ontology: Mol. function=DNA binding; Cellular component=nucleus; Biological process=regulation of transcription, DNA-dependent
  Homolog annotation: Hit_ID=Q8RY95; Match level="QueryCoverage=35%, HitCoverage=19%, E-value=1e-20, Identity=35%"; Hit description =Squamosa promoter-binding-like protein 14
MVNKGKVISLPCHAIIHVVHPKGHYSEVDIQTRNDQGGEDDNFAIVFAAMGVNMEKTQFLQRGFEENNSMERDTLFLNLGKASLAERLLHPPTGLPRTGFYFLDSNSKDNDGKEDGDSQNSMSYSASQGVFSITRFKYRLLFSSERDWCSLTKTLLDILAKRSLVSEELSKETMEMLAEIHLLNRAVKRKSRRMVHLHVQFVVLCLDNSKVYPFLPNFPGHTHRYKQTEQETGPYLSLQLFGSTQEDFPPKMDSVNKYLSYESSNPLDERSPSSLPITRKFFPIHSVDEEVRHPHITDYGEDAMMGEVSTNQAWLAPPLDHFKDSERPIKNGSPPNPGYQSCYASTSCSDHSTSTSNSDGQLEENLLQRVNSLVQSSDLDFWRKGRFLVRTNSQLVSYKAGVETFDLTGKPDLIIGRCFVEVENRFRGNSFSVIGGLCTLCFFEEDVVLTITTPRELNNYPRKDTFYLCLTVQVAIVQQFTDIFIKDRLFTV

SEQ ID NO: 76186 - protein, 106 aa, Zea mays
  Coding DNA Sequence Number=SeqID_34407
  Gene Ontology: Mol. function=hydrogen ion transporting ATP synthase activity, rotational mechanism; Cellular component=proton -transporting two-sector ATPase complex; Biological process=energy coupled proton transport, ...
  Gene Ontology: Biological process=against electrochemical gradient
  Homolog annotation: Hit_ID=Q40079; Match level="QueryCoverage=46%, HitCoverage=10%, E-value=4e-12, Identity=70%"; Hit description =Vacuolar ATP synthase subunit B isoform 2
MVTNFGTKTVQIAVNAVVTSHLLVCLYSAAAFENKSPTSDQGGEDDNFAIMFAAMGVNMEKTQFLQRGFEENNSMERDTLFLNLDSHSKDNDGKEDGGRFSEQTNL

SEQ ID NO: 76187 - protein, 153 aa, Zea mays
  Coding DNA Sequence Number=SeqID_34408
  Gene Ontology: Mol. function=hydrogen-translocating pyrophosphatase activity; Cellular component=integral to membrane; Biological process=proton transport
  Homolog annotation: Hit_ID=P21616; Match level="QueryCoverage=51%, HitCoverage=10%, E-value=8e-24, Identity=67%"; Hit description =Pyrophosphate-energized vacuolar membrane proton pump (EC 3.6.1.1) ...
  Homolog annotation: Hit description=(Pyrophosphate-energized inorganic pyrophosphatase) (H(+)-PPase) (Vacuolar H(+) -pyrophosphatase)
MAAAAILPELGTHVLIPVAAAVGISFSVVQWVLVSKVRLAPERRADGGGAVKSGPSDYLIEEEEGLNDHNVVVKCVEIQNAISEVSPPSSSRSQAHIKPWSPQPRTPHLLCQTRGRADIDGHMSRLILSACRVSSSLDLAFSMKKTVTFVTRG

SEQ ID NO: 76188 - protein, 153 aa, Zea mays; identical to SEQ ID NO: 76187
  Coding DNA Sequence Number=SeqID_34409
  Gene Ontology: Mol. function=hydrogen-translocating pyrophosphatase activity; Cellular component=integral to membrane; Biological process=proton transport
  Homolog annotation: Hit_ID=P21616; Match level="QueryCoverage=51%, HitCoverage=10%, E-value=8e-24, Identity=67%"; Hit description =Pyrophosphate-energized vacuolar membrane proton pump (EC 3.6.1.1) ...
  Homolog annotation: Hit description=(Pyrophosphate-energized inorganic pyrophosphatase) (H(+)-PPase) (Vacuolar H(+) -pyrophosphatase)

SEQ ID NO: 76189 - protein, 360 aa, Zea mays
  Coding DNA Sequence Number=SeqID_34410
MYREALWQKRGRPRELYPDVSSKDAPVPPELPVPNCDCGRLAWGHQKCFFFQWIDGPDKFDPRYLLFVNWLSGKTSHERFKRWVPPPPNPPPMTDEEKEVATERRMDSPPRCDCGDRAVIDEDYDKQFCCPNIDYPYGWRKCRFREWLYGPLSHWPEPEVKEKRYMGWAAEEVKFDPVLCKCGIEAKYGLVPSELGVGYFCGHMVDYDEETRKCSWESYDDKGEVMRTIESKRIMGQKMRCGSQLVDSYINDRIRDMRREAKSAFYDSPKRAEYRRLKAADEKRAQDAREWEAAQAEKQMLDNLADRLKGKIGSGVNYLADEAHARYVQDKMATVELMEEEDDDTSRLSELIALAEAGLH

SEQ ID NO: 76190 - protein, 270 aa, Zea mays
  Coding DNA Sequence Number=SeqID_34411
MGCSSAALLLLSLEERGLMEIGTFQPSLGFKDFRRATQLHSLTNGQFGGEKQVGLQPPPRPQLQGSSSSGLRRRSAPSGGLPPRGPVTLFFPQRLGEKGILQPCGGVLQPCGGRRTAAPWTGCSFPSFARAALVPQAGRPRPGPPRTVNRTGGSPSTSYAARAVLVFWGGLGEDGSEDLPVRFGATVVRRRGVGGFEPTVGALRLFGLSGFSSPLRSPASRLEFVISRAPCFWDSRLLCDEPEPEAAVLARTDTESARKETLSAREMAVS

SEQ ID NO: 76191 - protein, 426 aa, Zea mays
  Coding DNA Sequence Number=SeqID_34412
  Homolog annotation: Hit_ID=Q6QP51; Match level="QueryCoverage=14%, HitCoverage=36%, E-value=1e-17, Identity=62%"; Hit description =Putative growth-regulating factor 1
  Subcellular localization annotation: CTP_CleavageSite=56; ConfidenceScore=5.33e-01
MRPRSSNDSKSKAALEHPIRGLKRNRWSKGWTATRQASNCTTTVRPFGSVHIRRTSAKEAGPHVMTQQCQLKVTATGRSAAGDRERGRCGKNPSRRRKRAPSPPTDQGFEGWPLGKVSTAAPEHSDFKRITNQGFEGWPLGRAGPSEGFDSRPRARRVRDDSGYVRYIAEARATRPRYLRTFPRPAGTICNAIPPEGGIEPSDPVEGVWVRRITCRYFWSVPLGHQPTPNEWGTGVHSDHPLAAHWKHHVRRPPRATWRFPPPPCGKATQGRIIKVGKENSAARSAPTAVSATPATTDNKSRSTTEFSLGRNRKLRLARPHAPAFGGGLRLTRPPDSASTPVSGGIASSPDPGLGLKRSLRLDRPWARTDRANRGCIISLFLACSGYKEQDRCPIWLTPATGLRRSSDGHAITCTGPKLSSNGHVG

SEQ ID NO: 76192 - protein, 273 aa, Zea mays
  Coding DNA Sequence Number=SeqID_34413
  Homolog annotation: Hit_ID=Q6QP51; Match level="QueryCoverage=63%, HitCoverage=57%, E-value=7e-18, Identity=46%"; Hit description =Putative growth-regulating factor 1
MCVGPFSRVATFSYESPGPSFYRRKERAQVYNGGCSNVLTCLAERSQSPKYMPSWLSERFWRPVHVMSWPSEERLSPVEVQLSGLSDPCLRLLASGNDGPPCDVVGPSPRSGEAEAPPRSRLSSGPGVGRGGDRRPRLRLSPSPGGRARRRPYSEVEAESEPWDRARRSPSSEVEAESGPGGRARRRPSSEVEVEFELRGPGEAETAFRGRGGVRAQGSGEAEILMAPEAGLGGCQPHPNGWHSSRSRAGGAVFLSGRSVERRSDCGHFGPVD

SEQ ID NO: 76193 - protein, 325 aa, Zea mays
  Coding DNA Sequence Number=SeqID_34414
  Homolog annotation: Hit_ID=Q40699; Match level="QueryCoverage=19%, HitCoverage=6%, E-value=1e-16, Identity=67%"; Hit description =Leucine-rich repeat/receptor protein kinase precursor
MTVTGVGGTLADASEEWLTLNSSTMNLKLRDMDNRKGKLQRARTDSLFLDIERAQNLERRHGVPYLSGESVPAEVDGAEGAATHELPWDSARERVASGVEPAKVPEPADLRMCEMNIGMNVCRKKKKLGATVWSVCVLFPQSYVVFGSPKYNVNGLYRCRRFDPRGSLDRRVNCRCVSQPRWVGARQNTKGGRTAKGKPRPSCCPAPRADALAVGGYKRSRGRERERLSASPFSRVATSSYESPGPSFYWRKERAQVYNGGCSNVLTCLAERSQSPKYMPSWLSERFWRPVHVMSWPSEERLSPVEGQLSGLSDPCCRLLASVRG

SEQ ID NO: 76194 - protein, 463 aa, Zea mays
  Coding DNA Sequence Number=SeqID_34415
MDKDRQGAARKRQATVRVHEARPKRQRGTAKAEASGGGKPPLPTKVGASAPGKAPETTVGAGGPKLSKVVPSVSGVAEAAKAARSLPPPGNRVADFGTEIDVEDYLGGSDEGPLALVVPGAAIAMAAPAPKAGGETLGAGGEVSALALVRDEAGVATRRLKGATEALSRATEALSQVADFTSRTASGALTAALSAEVERLRTQHADAVREKSASDSKCRKLAEKVAALEKEKADLRRQLAGERREANEAIAKEQAAQAEARLARAEGNIAKELAGELQRRLTAQESRAEGAEAAMRAEAERTRTQLMTSYRELGVRTGDFEVPEREAGLRCLEWVQEELQELPTVLAGLMAFTSLVTCEAAMNALSREGCRHFEALDQVDEDFGRDIFEVEDPAVKESAGALYDRMWGSYGREVVRARAEAARAQAERGERVDVILKSVIKVDREKKLICCGLYYSLHVIDTS

SEQ ID NO: 76195 - protein, 217 aa, Zea mays
  Coding DNA Sequence Number=SeqID_34416
  Gene Ontology: Mol. function=hydroperoxide dehydratase activity; Cellular component=chloroplast; Biological process=fatty acid biosynthetic process
  Homolog annotation: Hit_ID=Q7Y0C8; Match level="QueryCoverage=63%, HitCoverage=26%, E-value=1e-57, Identity=81%"; Hit description =Cytochrome P450 74A1, chloroplast precursor
MEDAPIGLGVALAVAAAVQQKTTCGKVSASPATMATVQKPKDEDFGAGPRADQQMATATYLSSSFSSPPPPSSRARLRRQTTRAGASAATDRPREVLSPKRRLPLREVPGDYGPPVLGAVRDRFEYFYGPGGRDGFFASRVRAHGSTVVRLNMPPGPFVARDPRVVALLDAASFPVLFDTSLVDKTDLFTGTFMPSTDLTGRLPHALVHRAPPSPGQ

SEQ ID NO: 76196 - protein, 280 aa, Zea mays
  Coding DNA Sequence Number=SeqID_34417
  Subcellular localization annotation: CTP_CleavageSite=42; ConfidenceScore=5.13e-01
MAFGHSFSVSFSCINIKSNKGYRAPFHFILAQQFPFYTLSARAFTKERKGQNKNSGGKKFFIKRKKTVGYVMIYKDLSVALLTFILRFLNGGHRRRRGADLVARRLLRAAHRHGRHHAKKRSKKDGRATLDPERVRRTGGDPGADPSNVVAPAAPSQQPPAPRQDRWVRPPSPSPERVAERLRESETQQPLRPDAVLPPPWMGVVSCSPTAGSSNGCRHHRPRCSIKRTARSSRLSCAPSCPDTADCAEINRPSRSPRRPDRIHVHCDGCRRRHLFLLRR

SEQ ID NO: 76197 - protein, 277 aa, Zea mays
  Coding DNA Sequence Number=SeqID_34418
  Subcellular localization annotation: CTP_CleavageSite=37; ConfidenceScore=5.58e-01
MSRRCLCKPPRAEVAPSSSVAENPRRPGLPSCRSGRRASARPRVWASRRGPCQGRAACCRAWASSRAACCRGGQSRAGQGEPPRALPRPRRLLPGRAEPRRPRQAAAVPTEAEPPVAGRGRAAAPPAAGAVHARRAEHAVAERGHTHGRRRGGERERSRTSSSDGLAVADHDPGALGRGERWCASRRTTLLPLGLKSAGGETVPDGPSSGVGVGSRCCTPSPRTKAILSSSEEEEVASTATAAVDVDAIWPTGRPRGPVDFRAVSRVRARGRAGEVT

SEQ ID NO: 76198 - protein, 220 aa, Zea mays
  Coding DNA Sequence Number=SeqID_34419
  Homolog annotation: Hit_ID=Q6QP51; Match level="QueryCoverage=34%, HitCoverage=25%, E-value=4e-08, Identity=51%"; Hit description =Putative growth-regulating factor 1
  Subcellular localization annotation: CTP_CleavageSite=68; ConfidenceScore=5.25e-01
MQAACNRTKGAHPFDFDASSMEAQAHTSCGRKQQSNRLQAHVPSWSSRRALSHGVKTTRPCSVPRTARARTTAAPRTTRPVALTLRQDMRHLWQAKQATLHLRHNDRVKKGTEKGDTPKGILPCEGSGPRALLLIRGSKADPSEGFDSRLRALGLRAHYWLTPEGFDSRLRTRRARDDSGYVRYMAEARATLPRLGGCSRKPGSGQTVDSVNIPARELGT

SEQ ID NO: 76199 - protein, 175 aa, Zea mays
  Coding DNA Sequence Number=SeqID_34420
MTLGTSITWPRLGLRSRGTLGYFRDQRERFVMESHRREAPSLRTLSNGSGSSESPAEPDYAPGLRLGRMREQQGRPRNNKKSIKTSEESNHSSEASGATPRRDNDTIHPVPTTVPTTGVRLTTVSYRLSRVQPRAQQGVPPRPTPASASGGIVTMPDPGLGLSLDLGRRSSPRPT

SEQ ID NO: 76200 - protein, 250 aa, Zea mays
  Coding DNA Sequence Number=SeqID_34421
  Homolog annotation: Hit_ID=Q6QP51; Match level="QueryCoverage=23%, HitCoverage=38%, E-value=4e-14, Identity=55%"; Hit description =Putative growth-regulating factor 1
MWGSATALEHSGSEPSTDQGFEGWPFGRVRQPPRACRVRDDPGYVRYMAEARAMLPRLRPGRMREQQGRPRNNKKSIKTSEESNHSSEASGATPDGRTSKRVPTLPLRLGGYCRDNDTIHPVPTTVPTTGVRLTTVSYRLSRVQPRAQQGVPPRPTPASASGGIVTTPDPGLGLSLDLGRRSSPRPTSASGGDLRLARPRPRLREKSPPHPRWPRTDYTNREYNTILPLASHLRLRRNRTGVTSNYSSNM

SEQ ID NO: 76201 - protein, 176 aa, Zea mays
  Coding DNA Sequence Number=SeqID_34422
  Subcellular localization annotation: CTP_CleavageSite=30; ConfidenceScore=5.10e-01
MALGSARPLCAVAMRMVVLALAMVMMARLRHTARKSVIPFLPSRLAERPLRRPVTDQSSHLERLHHRVHEEQERRRQELEQQGSSFSLQQEIESVWSCSPVQPLEAPPAPPLSAPATGGDPDDGGDNDSSSFSTDLSADQEPEGWVAQPITRDAARRCHFHDALDTLLRQALDRRT

SEQ ID NO: 76202 - protein, 140 aa, Zea mays
  Coding DNA Sequence Number=SeqID_34423
MFGLQVAMRMMVLALAMVMMACLRHTARKSVIPFLPSRLAERPLRRPVTAGDIVCEELFPVLPLEAPPAPPLSTPSPRVAARGDPDDGGSDDSSSFSTDLSADQELEGWVARPITRDAARGCHFHDVLDTCGRTTRIIPA

SEQ ID NO: 76203 - protein, 121 aa, Zea mays
  Coding DNA Sequence Number=SeqID_34424
MTAFEPEIESLRVPNLPGRRARLLSRELAIMEMKSVIVSVVQSFDIETLVPTNTTSATTDERNGGRGKKGNQPWPCSTKGISSRRGRSGLLAVLDEGREAVVDWRLLLDGGQRRPGATARG

SEQ ID NO: 76204 - protein, 203 aa, Zea mays
  Coding DNA Sequence Number=SeqID_34425
  Homolog annotation: Hit_ID=Q65WU0; Match level="QueryCoverage=21%, HitCoverage=8%, E-value=9e-09, Identity=69%"; Hit description =Putative cytochrome P450
  Subcellular localization annotation: CTP_CleavageSite=70; ConfidenceScore=5.25e-01
MEMKSVIVSVVQSFDIETLNRSSHRPKFAPSLATTFVGGVLVRAHPLSGGNGGAPPPPSLVVGGRPGCVRSRRRMGKDAGEAQQQPDGAGGGAGGGAGGNRGGRFCFCGGGGAARVVRLQCVAALVLGVAVLLSALFWLPPFAGWGGGKEGPDPGDEFGGEPPLRIARSRSRSPVVAEWCSICVCSALGARWWTVGFGSGCVR

SEQ ID NO: 76205 - protein, 123 aa, Zea mays
  Coding DNA Sequence Number=SeqID_34426
MGRRETEHEEGRNSKGETRGLRVVLRPGRPEVGRGGGSSEVEAESGPGGRARRSPSSEVKAESEPWGRARRSPSSEVEAESEPWGRARRSFLWRLRLDLAVVSLTLSSGTAVEAGQATLFSRQ

SEQ ID NO: 76206 - protein, 293 aa, Zea mays
  Coding DNA Sequence Number=SeqID_34427
  Homolog annotation: Hit_ID=Q6QP54; Match level="QueryCoverage=23%, HitCoverage=27%, E-value=2e-14, Identity=79%"; Hit description =Putative kinase
  Subcellular localization annotation: CTP_CleavageSite=24; ConfidenceScore=5.56e-01
MGAIKVKTQSTQGTRSRLARAQPRAKAADPGGFTTRPRLSLASGAIGSSASPDPRARAQPRPQRTVSASPDPRVRTQPRPRTTDSTSPDPRARTQPRPRTTDSASPDPRARTQPRPRKTVSASPNPRAQTRPRPRRSLHLARPRARTDHVTGGAIITLPLASSGYGEQDRRPIWLAPGSRTRRLAARENGLADSLSLPPADACNPLLQAHLTWAQDNMEAAGFPFAVSPPFVLRLARDPSGLGHAATIYSSVQGPSGVKTPTEGLCPIASIGVNVGVGADLAPITRISHETKN

SEQ ID NO: 76207 - protein, 193 aa, Zea mays
  Coding DNA Sequence Number=SeqID_34428
  Subcellular localization annotation: CTP_CleavageSite=74; ConfidenceScore=5.35e-01
MFGLQVVMKMMVMIMLMVMVVHIATTAQERMKPWRRTARSSKSTMSSRRGRSFLEKQAKRGPSGPLRRTVRDTRMTLGQNQCKNTSFHYGLSEGKAKTVRALARTVRPQARTVRSPLIYRGGPSGPGSRTVRAQQNGPTARKWLVAINTTPTTSIHFIQAFQPSTFNTRASNPFQDTFKASISPSFTIEKRDH

SEQ ID NO: 76208 - protein, 59 aa, Zea mays
  Coding DNA Sequence Number=SeqID_34429
MCIGPTKKSKATYNVVLKNVVLLPKPVEKKGEAPALRVLGTKATFYNCTIEGGQGALYD

SEQ ID NO: 76209 - protein, 275 aa, Zea mays
  Coding DNA Sequence Number=SeqID_34430
  Gene Ontology: Mol. function=pectinesterase activity; Cellular component=cell wall; Biological process=cell wall modification
  Homolog annotation: Hit_ID=Q2QZJ9; Match level="QueryCoverage=53%, HitCoverage=41%, E-value=2e-24, Identity=34%"; Hit description =Pectinesterase family protein, expressed
  Pfam annotation: Domain name=Pectinesterase; Domain location=34-264; Score=-196.0; E_value=8.6e-07; Accession=PF01095.10; Description =Pectinesterase
MEAAPGVDLDGMETYHGHPYRNISHVAFIKKSLSRVVSPNGWVAWNMNKVIEDTTWTVVYLKYGNDSVVADTSNHVKWLGFHVLNATEAVAYTVDTFINASKWVPEPIHFMRCIGPTKKSKATYNVVFKNNVPLPKPGEKKGEAPALRVMGTKATFYNCTIEGGQGALYDQTCLHYFKACAIKGTIDYIFGSAKSFYEECKIVSVLKEVVALPTAPPEQDRSRNPIKIAQARAGWHSRLAQSRGKEKKFTWAIPFIGIHYISGESWTPSLPPAEE

SEQ ID NO: 76210 - protein, 882 aa, Zea mays
  Coding DNA Sequence Number=SeqID_34431
  Gene Ontology: Mol. function=cysteine-type peptidase activity; Biological process=proteolysis
  Homolog annotation: Hit_ID=Q53MK8; Match level="QueryCoverage=85%, HitCoverage=87%, E-value=3e-36, Identity=22%"; Hit description=Ulp1 protease family, C-terminal catalytic domain, putative
MAHPPLILGIRRKGADGVLMGRTRNRGGGCAAPAFSYSLETETSIFSTTAAERRVPYPVARGVSNSAALQAHPHSGTSVMKNVDRPPSNPKRIIIQSTQECFSVDIPRAPAGTVRPETRHVADEDDDFIPLSKKRNLDDSPGKVLKKQRLNVRCNPQDVLVSIQILNDRQQQAIARRGFSSILDMRLDALGSRSHLAWLMEKLHHNDMTIRAGPGKELKITKDTVHLILGLPNAGGGTALGIDEVVAANNLRAELGLSKEDFGVTALQDRLRKGSDDDLSIRCFFLILFNRLLFPTASWGITNHEVLLTEEMDSFHQMDWCQLIFNDLCQAAKKWHNRSVTNVSTTIYGCSIVILLYYLDHLHDSAAPQNKRGTPQIKYFDSNIIQALTRADKGKIRKGEEAFGHCSHKTRTNTFDVPRPDPSGQHSIHIELPLIRDLISSKLNQLPSRHRMGFIEKLSHFDAEVGKACSVIKQTLQQIVEKQFNLSDVFGELIDEVLRAEAGDNEDAYDVQKTTSKSDDILPQTAEGCTCPAPPTVPNMSTPVSQLDTQFTDTQGKHGDGGKNMPTNTNVTPKATPHMDPDAPIFDATPQIKSTGGVQQVAETDLPDSGPCFDQTPSEHVYVETDPATNTPQVGQASLDSEMQTVLALREYLCGLQSDTGRTIIDYGEYSATCSDIYESFADGKCLDNVFMQCFIQCVIDDAKNQQTSMSSNSLVLDVNVGIMVPMVSRGHWTLYVVNKVKKCIHILDSNPYGPTLGGTTWKDYHFAHLGSGGRKLPWAKVIMSRLNKAIQHVRPSTCFPKFGNFTIDLCPNCPNMAAGSNDCGFYVMGYILFYQCDEGSLRSDIEAGNTSEIRSLALHYITFHPKNKALSLLQDIQRFKV

SEQ ID NO: 76211 - protein, 251 aa, Zea mays
  Coding DNA Sequence Number=SeqID_34432
WRAWRGRDEFGYGSRVAYFIFGTCDDDLAKLLEEYDEATKNRLQSLKIRYPFYVSLLNSKSNEQQKKIWLDEQARCRDCVGQHRNRSVRSQNPCLVINNDRNKEAKGYRHKVVKFWDLLSLVYNKDQANGEGAKTAAESSKEMAKENDTGGKDAPYSVSSSSSLKRQRSDDSFNSIWCDKFDMLTSALKDDGPKLPSSAEVLAALQEVEGLDEDTELELYDILTSNARKFESMMALPMERRKRWLMMQLRK

SEQ ID NO: 76212 - protein, 276 aa, Zea mays
  Coding DNA Sequence Number=SeqID_34433
  Homolog annotation: Hit_ID=Q6QP54; Match level="QueryCoverage=32%, HitCoverage=33%, E-value=8e-19, Identity=54%"; Hit description =Putative kinase
MAPPVDMVGPRPRLGDVEAPPRPRSSLSSVAEVESEPLGRARRRLSAEARAESEPWGRAKRRAEPESEPWVGRSGVHRLQGLSPRAEPKSEPWVGRSGVRRLPGLSPSSSPGSGEAEFPTVPEAGPDCLSASLCRVAQQSERRRRRCPSVRLATFALNAPAIWSVGVTTWPGLLLGEDWASGEPELCADGGYQLRIRSLEAWRAWRGRDEFGYGSRVAYFISDTCDDDLAKLLEEYNEATKDRLQSLKIWYPFYVSLLNSKSNKQQKKIRYPVAQE

SEQ ID NO: 76213 - protein, 227 aa, Zea mays
  Coding DNA Sequence Number=SeqID_34434
  Homolog annotation: Hit_ID=Q69NN2; Match level="QueryCoverage=85%, HitCoverage=21%, E-value=7e-49, Identity=57%"; Hit description =Hydroxyproline-rich glycoprotein-like
MPFLNVILALCVQEPVQQVNEGDSLDDGNDDMDEQARSSQHLSSSTAEISLPPSEDSDRMSGQVENDDGLGLVQSDTPVGAADGDSTQITSTLTTFSAYCHKDPNIHTTNEAQLYELVEPNVHPQALASSSQALKVPYSHQGYPSENPEADNVVQVYRMPDSNVHSQVLPSTSELPSGGWGESYLSSQDQACSYMTNILKTTNLYIRFCIFLEDNQFLLNGNPFLQS

SEQ ID NO: 76214 - protein, 191 aa, Zea mays
  Coding DNA Sequence Number=SeqID_34435
  Gene Ontology: Mol. function=zinc ion binding
  Homolog annotation: Hit_ID=Q9C8E0; Match level="QueryCoverage=66%, HitCoverage=20%, E-value=7e-23, Identity=43%"; Hit description=RING zinc finger protein, putative
  Pfam annotation: Domain name=zf-C3HC4; Domain location=11-67; Score =34.2; E_value=4.5e-07; Accession=PF00097.15; Description=Zinc finger, C3HC4 type (RING finger)
MVFPVPAEFACSICRAVIKEPLTTPCAHNFCKTCLLGAYDSQSSVRERSCGGRTLRAQKIVKTCPSCPTDICDFLENPQINREMELIETLQHKAVEESKMVQMMLRNVVMSVDEDARKVDAEAGTNGGKRMKSSNIVEELTQLLTETGGMQGQLKSKCSATSEWTIGEQLESGILKTCTTLSASGFSKGYP

SEQ ID NO: 76215 - protein, 106 aa, Zea mays
  Coding DNA Sequence Number=SeqID_34436
MARGASLEFKDVVGTSNRQMAYRVARSTCDGGRLKSGDVNPASPAIGADIKPGPWVTPGVLQRFSVRRPRPVSAGVGVQFPVNEELEVIVTPRDPQTPQNATKLHI

SEQ ID NO: 76216 - protein, 155 aa, Zea mays
  Coding DNA Sequence Number=SeqID_34437
MVKRNLRYETWLHTTLSHELKRQLYRRTQSGTFDASLLLEVQVNVDPILDFNIFKCSSATFPFIATQKKPWRLALPMSTSSSDSSASFVSHSSSREPTPEWDPIAAYEKQAPLHWDADGWDFEVALESNGDLTDGDDLQFLVDGELDSDTSTEWS

SEQ ID NO: 76217 - protein, 143 aa, Zea mays
  Coding DNA Sequence Number=SeqID_34438
MAQRLTRSTCAGGVPNSGERDYAFPVARVPGSSSGKLHDLLGKEGRKRFSHGGCPRAALAGRGEVAGARGELRGVWRGTEDATGKIVGHWGGLYSRGAGVVTGGRGHAGVRARACSERAPECQPASNTCVFASAMVQRPIGAP

SEQ ID NO: 76218 - protein, 97 aa, Zea mays
  Coding DNA Sequence Number=SeqID_34439
  Subcellular localization annotation: CTP_CleavageSite=53; ConfidenceScore=5.38e-01
MARAWSRAAAGARGFVHGRALSAPPSVSPRRTRVCLLLPWFNGRLEHLSVQILAKPLWGALGFWAISPPSMCMVSQGKEEGVEADLHEFQDFDEFED

SEQ ID NO: 76219 - protein, 617 aa, Zea mays
  Coding DNA Sequence Number=SeqID_34440
  Gene Ontology: Mol. function=helicase activity; Cellular component =intracellular; Biological process=regulation of transcription, DNA -dependent
  Homolog annotation: Hit_ID=Q1S6K1; Match level="QueryCoverage=56%, HitCoverage=90%, E-value=7e-66, Identity=39%"; Hit description =Pentatricopeptide repeat
  Pfam annotation: Domain name=PPR; Domain location=323-357; Score =16.3; E_value=0.088; Accession=PF01535.11; Description=PPR repeat
  Pfam annotation: Domain name=PPR; Domain location=359-393; Score =30.6; E_value=5.4e-06; Accession=PF01535.11; Description=PPR repeat
  Pfam annotation: Domain name=PPR; Domain location=394-428; Score =32.2; E_value=1.8e-06; Accession=PF01535.11; Description=PPR repeat
  Pfam annotation: Domain name=PPR; Domain location=429-463; Score =17.0; E_value=0.066; Accession=PF01535.11; Description=PPR repeat
  Pfam annotation: Domain name=PPR; Domain location=501-535; Score =12.4; E_value=0.25; Accession=PF01535.11; Description=PPR repeat
  Pfam annotation: Domain name=PPR; Domain location=536-570; Score =14.9; E_value=0.13; Accession=PF01535.11; Description=PPR repeat
  Pfam annotation: Domain name=PPR; Domain location=571-605; Score =29.0; E_value=1.6e-05; Accession=PF01535.11; Description=PPR repeat
  Pfam module annotation: Pfam domain module=PPR::PPR::PPR::PPR::PPR::PP R::PPR; Domain location=323-357::359-393::394-428::429-463::501 -535::536-570::571-605
MPYSVPLAAGPPCPQWRCPARRLGFGDYQQSIMAPDEAGATTNALDVAGGPPDAGVGCCLGAAAELMIVETFDTRLRVGSDSRILGPCNLLVGPAWPVSFIVLLERLACKPEASLWNGRSQPFPLHRRTMAASRRLARKLPSLISRYERLISPETDAPELTEAPTTSASIPFDPSLPVLPLAVSHLSPPNPLPVLPSAHASSPASLFRLLRRARHHPRLVALDLHILLAAADASSAFRPDHSLTSLVAARLAASRRLPSLQRLLELVLTRPCPCADDSIFACPELLPTFRKAIVAFAASGDIPSASHALASLRRVADSPLPAEFYNIILQALSRLRRHDDAIRFYGEMTSVYRVAPDVHTFNILISSSCRVEGVDAAMRWFGEMQRRSCAPTVVSFNTLMRGFIREGRYKEGTKVAREMLELGVGLSVASMEILIGGLCRGSKALEAAELFVEFLGDGVVPEGFDCFEVVEALCRGGKVDRAVEAVDMVLERNTKCCMSAPAGATVLECLMEAGKLDEVYRLMWRMIDQGIVPDSISCNCIFEALCEAGRTADANQLRVFAKEKGFEADGETYRMLVQGFGRQGKRKEGKAVLDEMLDLGFIPNIASYNRLLGGLHK

SEQ ID NO: 76220 - protein, 328 aa, Zea mays
  Coding DNA Sequence Number=SeqID_34441
  Gene Ontology: Mol. function=nucleic acid binding; Cellular component= ribonucleoprotein complex; Biological process=morphogenesis of embryonic epithelium
  Homolog annotation: Hit_ID=Q2RAY1; Match level="QueryCoverage=69%, HitCoverage=76%, E-value=5e-93, Identity=75%"; Hit description =Heterogeneous nuclear ribonucleoprotein, putative, expressed
  Pfam annotation: Domain name=RRM_1; Domain location=154-224; Score =20.9; E_value=0.0017; Accession=PF00076.12; Description=RNA recognition motif. (a.k.a. RRM, RBD, or
  Pfam annotation: Domain name=RRM_1; Domain location=35-102; Score =11.5; E_value=0.012; Accession=PF00076.12; Description=RNA recognition motif. (a.k.a. RRM, RBD, or
  Pfam module annotation: Pfam domain module=RRM_1::RRM_1; Domain location=154-224::35-102
  Subcellular localization annotation: CTP_CleavageSite=20; ConfidenceScore=5.02e-01
MGSNTGGASGGFYQPFNSNLAGAGASTGIQNFPGVRLRGLPFDCNDIDICKFFVGLDIVDCLLVNKNGRFTGEAFVVFPTAMQTESGLHHNRQNMGRRYVEVFRCKKLEYYRAIANEVSQGGYFESEYRRSSPPLRPPKKPAEDKGSMEYTEVLKLHGLPYSATTEDIIKFFLEYELTEENVHIAISSDGKATSEAFVEFPTAEVAKTAMCKDKMTIGTSRLLRSWESSPSTMPYSVPLAAGPPCPQWRCPARRLGFGDYQQSIMAPDEAGATTNALDVAGGPPDAGVGCCLGAAAELMIVETFDTRLVGVAFPIPMICFRCNARAST

SEQ ID NO: 76221 - protein, 161 aa, Zea mays
  Coding DNA Sequence Number=SeqID_34442
  Homolog annotation: Hit_ID=Q10MT4; Match level="QueryCoverage=84%, HitCoverage=61%, E-value=1e-10, Identity=32%"; Hit description =Expressed protein
MGMVPDASAAGGRKVELDGDMRWTSQVGPSSDPSQTLARARIMNDMKISGDDAKSSNGEAARGGSNGGEKQGDESNGGGILSAVASRIGVVVSSANGDRSGSAEDGAKTSAGDAGHGSKGEEKGRGVNGGRIVEQIISNLPSDDQAPDADEASLLIAIIED

SEQ ID NO: 76222 - protein, 199 aa, Zea mays
  Coding DNA Sequence Number=SeqID_34443
  Homolog annotation: Hit_ID=Q10MT4; Match level="QueryCoverage=71%, HitCoverage=78%, E-value=4e-11, Identity=36%"; Hit description =Expressed protein
KASYGTSPRRSLGLATSAEYPGGGIFRKLLHSSPPAPPHVSGAMETEEEVKDRDVAGGEQARILSAMATKIGMAMPGANSDDSHGGSGDDAKSSNGEAARGGSNGGEKQGDESNSGGILSAVASRIGVAVSGANGDRSGSAEDGAKTSAGNAGHGSKGEEKGRGVNGGRIVEQIISNLPSDDQAPDADEASLLIAIIED

SEQ ID NO: 76223 - protein, 111 aa, Zea mays
  Coding DNA Sequence Number=SeqID_34444
MELTSDGDGEGRVRTRRAPTDDGAPKQLRKVDEGASGDYWGEERGNGSASSYFWEMWARWTRTSRGGATNPLNRSVDMHLVKMLSTLILTDLEELEVDKWTGARGKNSEKS

SEQ ID NO: 76224 - protein, 73 aa, Zea mays
  Coding DNA Sequence Number=SeqID_34445
MKILPTLILTDLEELEVAKWIGARGKNSEKRTSKVSKKGGAVNDEIDVALSPNRDGKVEASKGRFNVSMWARA

SEQ ID NO: 76225 - protein, 54 aa, Zea mays
  Coding DNA Sequence Number=SeqID_34446
MSRLLDCRTSATIRGSPARDPTVPTKCDDHGDRERGYFEKGSFSAKETGLGPSY

SEQ ID NO: 76226 - protein, 298 aa, Zea mays
  Coding DNA Sequence Number=SeqID_34447
  Homolog annotation: Hit_ID=Q6QP51; Match level="QueryCoverage=88%, HitCoverage=98%, E-value=2e-16, Identity=51%"; Hit description =Putative growth-regulating factor 1
  Subcellular localization annotation: CTP_CleavageSite=41; ConfidenceScore=5.04e-01
MTASKKKGSGKGIFRKRILSQRRKRAPSPPTDQGFEGCALRGSATAPEHSGSEPFTDQGFKGWPLGRVRQPPRACRVRDDPGYVRYMAEARAMVLRYPRTFLRPAGMICNVIPPEGGIEPSDPIEWVRVQQITCRYFWSAPMGHYPTLIERGSGVHSDHPLATHWKHHVRCPPRENSAIHPVPTTVPTTRVKLSHDLPRVQPRAQQGATPRPTSGLSLSLGLGLGRRSPPRPTLGLGLGRSHNLARPQPRPQEKSSPRPTSASDRLRYRGSIITLPLASHPLLRWNKTGVTSNYSDSR

SEQ ID NO: 76227 - protein, 159 aa, Zea mays
  Coding DNA Sequence Number=SeqID_34448
  Homolog annotation: Hit_ID=Q6QP51; Match level="QueryCoverage=18%, HitCoverage=13%, E-value=3e-07, Identity=89%"; Hit description =Putative growth-regulating factor 1
MALTPWQGKRHLRQEKRVPFRLRHDDRVKKGSKAGPSEGFDSHLRARRVRDDPRYVRYMAEARATLLRPLADPYRTGLERPIGSPASNSLETPCSVPPRASASASASGEGLRLARPQASASGGVTSSPNLSLGLRRSLRLARPQARTDYATGDTSLPYS

SEQ ID NO: 76228 - protein, 206 aa, Zea mays
  Coding DNA Sequence Number=SeqID_34449
MAVMDSTSEKMYLCQVILLNLTNKIGFLRIHFSKHFCKTESLIIEKPYLDSHITSIPLRVFSLVGLCNRFRISLSPMFCNVCKTGETFLDQLADRDLALDWAVQSRLLVCAKEARAQARIKELSSTVDNLQVYCNTLHEEVHILYSQLHPSVPTHPAEAEAGPSHVAGRALGGELDLFEPPPSLRLVDVWTPTPDDEAAKSNGKQE

SEQ ID NO: 76229 - protein, 111 aa, Zea mays
  Coding DNA Sequence Number=SeqID_34450
MAVMDSTSEKMYLCQDLVDVGLLTEDPLTGHMPRHGSTAIRCMRKSIYYTHNYTLVCLHTLLRRKPDHLTLRDAALGGELDLFEPPPSLRLVDVWTPTPDDEAAKSNGKQG

SEQ ID NO: 76230 - protein, 146 aa, Zea mays
  Coding DNA Sequence Number=SeqID_34451
  Subcellular localization annotation: CTP_CleavageSite=26; ConfidenceScore=5.15e-01
MDAVGPPVSYLPSPSSSGCCPFLFLVAESSSMDVGRVALPGAHLCPLRWMIILMPGRGTTATAMKPHRVTPSTCSTEYRSTCRPDLQPWLRGRRTPLPSTLCLALHQCDEMSERIDDMRPEFDSARLFDVYFTHCDLVDDVFVCAR

SEQ ID NO: 76231 - protein, 420 aa, Zea mays
  Coding DNA Sequence Number=SeqID_34452
  Homolog annotation: Hit_ID=Q9M835; Match level="QueryCoverage=32%, HitCoverage=32%, E-value=1e-31, Identity=56%"; Hit description=L -allo-threonine aldolase, putative
  Pfam annotation: Domain name=Beta_elim_lyase; Domain location=108 -349; Score=27.9; E_value=1.1e-12; Accession=PF01212.11; Description =Beta-eliminating lyase
  Pfam annotation: Domain name=Ribosomal_S4e; Domain location=328-393; Score=64.1; E_value=4.6e-16; Accession=PF00900.10; Description =Ribosomal family S4e
  Pfam module annotation: Pfam domain module=Beta_elim_lyase::Ribosomal_ S4e; Domain location=108-349::328-393
  Subcellular localization annotation: CTP_CleavageSite=26; ConfidenceScore=5.15e-01
MDAVGPPVSYLPSPSSSGCCPFLFLVAESSSMDVGRVALPGAHLCPLRWMIILMPGRGTTATAMKPHRVTPSTCSTEYRSTCRPDLQPWLRGRRTPLPSTLCLALHQCDEMSERIDDMRPEFDSARLFDVYFTHCDLVDDVFTVSYMAERIVGQGSFGIVFQAKCLETGETVAIKKVLQDKRYKNHGIVISYFIAKKIRNSINVCTHCLKLHIDGARIFHASAALGVLVDRLVKAADSVLVCLSKGLGAPVGSVIVGSKAFIDKARILRKTLGGGIRQVGVLCAAAHVVVRDTVGKLADDHKKAKALAVWVLKLLCLVGFIFLEGLKKIEQITVDSASVETNMFKLCKVRSVLFGQKGIPYLNTYDGCTMRYPDPLIKANDTIKIDLETNKIMDFIKLYLLFHGLYQVIYLVRLNVSTNS

SEQ ID NO: 76232 - protein, 144 aa, Zea mays
  Coding DNA Sequence Number=SeqID_34453
MNELMCMKMKQDCSNIGTLRLLRRRSRPRLRAVSARHAVAEPEPKRHRLRAGRPPGRAVPEPNSAVPVPISKPLIPAFVAISILINGIGGMPESADPKKRLSPVVYHLPLFVGFTDGWKHLVISNDLRAEDVYELVKRPDDVEP

SEQ ID NO: 76233 - protein, 244 aa, Zea mays
  Coding DNA Sequence Number=SeqID_34454
MEKEPLDMVESSVRVIETHVDIIRSLVTDGVVDTSEPESVYTLKTTLFQIGDVCDMLEKCALSIKKYADSKRAKIIQDEALQYAEDDEAADDLEELPSPDLLTQADILEKYFGIEENVFCMNLLESAKSMNYLRNGIGGMPESADPKKRLSPVVYHLPLFVGFTDGWKHLVIANDLRVEDVCELVKGPDDADIREEKRTDEAGALNFGPHPDRVPAHPLLAHTSRADLCQESLMSRMRRALQKY

SEQ ID NO: 76234 - protein, 235 aa, Zea mays
  Coding DNA Sequence Number=SeqID_34455
  Subcellular localization annotation: CTP_CleavageSite=68; ConfidenceScore=5.39e-01
MNPSAVVPVPELERRRPRPRARAPPSPSPSPSAAVPERPSNTVPFTEPERRRPLHRARAPAVLVLRPSPSAVVPFTEPERPPSPEPELEPRRPRPRAQGLPSRSPSPKRRRPQALSSSSRKMEKEPLDMVESSVRVIETHVDIIRSLVTDGVVDTSEPESVYTLKTTLFQIGDVCDMLEKCALSIKKYADSKRAKIIQDEALQYAEDDEAAEDLEELPSPDLLTQADILEKYFGI

SEQ ID NO: 76235 - protein, 90 aa, Zea mays
  Coding DNA Sequence Number=SeqID_34456
MEKPAGGHGAKSREGRGQEEVRGADVLPGSSCSCGKKQREEERPPWEGACCRRRGAPCCSRGEEGRAAVAVGGLLREVEEGRGNRLEKRE

SEQ ID NO: 76236 - protein, 115 aa, Zea mays
  Coding DNA Sequence Number=SeqID_34457
MEKPAGGHGAKSREGRGQEEVRGADVLPGSSCSCGKKQREEERPPWEGACCRRRGAPCCSRGEEGRAAVAVGGLLREMRHDYDSMVKDYDVAYLGSSAYHGDTGDPTTLRGCRRG

SEQ ID NO: 76237 - protein, 188 aa, Zea mays
  Coding DNA Sequence Number=SeqID_34458
MTTQGGLQPTSNEANMCTNDNGSQLGTRIVDEIMAGKNVFFDLPDKLTVNIDKAYVAFYNVVYIKSKLGYSGRDFLFYKKRCGIDRSRLLALDYIHQEEAMLSDNMDERKISFVLTKDPPSDLEVSITPIKRPRQRTNVDEETIEVSIDAYKEWLAILQHDNPEMDLMDDFREDTIKTYKEWLRHESS

SEQ ID NO: 76238 - protein, 188 aa, Zea mays
  Coding DNA Sequence Number=SeqID_34459
MEWDSIKEYYYHTLEETKDYEPCATDFNPRITKHCDFRGEGVEKWSCLRFGRGNFYRECFALSGIGIEGAGGGLYRRALVPGFKGKLPGVFLGKCPTQVPKCKMVDKVQIKDKGKIQLKMPWLEQPSFCSVWKHRTVRWCTGQCPVRQAGLSEVAALGNSPATYVYNSPDCPCKGERLQVVEIPRKRD

SEQ ID NO: 76239 - protein, 188 aa, Zea mays
  Coding DNA Sequence Number=SeqID_34460
MEWDSIKEYYYHTLEETKDYEPCATDFNPRITKHCDLRGEGVEKWSCLRFGRGNFYRECFALSGIGIEGAGGGLYRRALVPGFKGKLPGVFLGKCPTQVPKCKMVDKVQIKDKGKIQLKMPWLEQPSFCSVWKHRTVRWCTGQCPVRQAGLSEVAALGNSPATYVYNSPDCPCKGERLQVVEIPRKRD

SEQ ID NO: 76240 - protein, 166 aa, Zea mays
  Coding DNA Sequence Number=SeqID_34461
  Subcellular localization annotation: CTP_CleavageSite=44; ConfidenceScore=5.40e-01
MVATYFQLHRPHSHRRPYFRKVFSLRPLPINCNSSGSNLFFCLPANSAAGQGSGVAQNKGTAFIREPSLTPESHKVSSSAKCDLQTASHQGANLLLGTEIITSPPNVQTPSGAAYSVLDGSTNKTHKSVTGKRSRTSPSKKVAKKLFRDDTTGDDDAAGSADVDAE

SEQ ID NO: 76241 - protein, 98 aa, Zea mays
  Coding DNA Sequence Number=SeqID_34462
  Homolog annotation: Hit_ID=Q8LHV4; Match level="QueryCoverage=57%, HitCoverage=9%, E-value=2e-12, Identity=62%"; Hit description =Replication protein-like
MAQRLIKKNVDALISTNPPGFIPREITNLLEKSFEWNVSFTESTIIYSTVSFQVNAINAEIDGGNILPATSSSQPSSTILSQGLFTAPSPHQLQLLWL

SEQ ID NO: 76242 - protein, 422 aa, Zea mays
  Coding DNA Sequence Number=SeqID_34463
  Homolog annotation: Hit_ID=Q5N801; Match level="QueryCoverage=22%, HitCoverage=75%, E-value=3e-42, Identity=76%"; Hit description =Putative immunophilin
  Pfam annotation: Domain name=FKBP_C; Domain location=97-189; Score =139.6; E_value=8.5e-39; Accession=PF00254.18; Description=FKBP-type peptidyl-prolyl cis-trans is
MGKKRQLICLAAAVAAAAILLTACGAEVTQLGAIGYGAEERHACGLLVVISPVKEWSKTTAIIELGAMIYGAELGTTSAPRRPFVPTQHDQNAKNSAASAKKSSDVTELQIGVKGALTDGSVFDSGYDRGDPFEFTLGNGQVIKGWDQGLLGMCVGEKRKLKIPAKMGYGERGSPPKIPATLVFDTELIAVNGKTSGGANPETERSEGNKLTARLLRHRLCFCCVLSSDASCGPEPGPVRSLSTLFSLHAMTRATVAIKLKRQNGCSPLTQHCSRLFHNEVRAAERMDQCRLIERAVLLTCQRRSNETPFSLRSARGFGVHDDARVTRPLGVSDVGTEDELEICALCPGAWRMLVALWAVAMWPVGLWDGCNFNGYSGIQGSSTINMVAGLVDGRLGDREYNEETVAAVEPASREVRVFEKG

SEQ ID NO: 76243 - protein, 355 aa, Zea mays
  Coding DNA Sequence Number=SeqID_34464
  Homolog annotation: Hit_ID=Q5N801; Match level="QueryCoverage=26%, HitCoverage=75%, E-value=3e-42, Identity=76%"; Hit description =Putative immunophilin
  Pfam annotation: Domain name=FKBP_C; Domain location=30-122; Score =139.6; E_value=8.5e-39; Accession=PF00254.18; Description=FKBP-type peptidyl-prolyl cis-trans is
MIYGAELGTTSAPRRPFVPTQHDQNAKNSAASAKKSSDVTELQIGVKGALTDGSVFDSGYDRGDPFEFTLGNGQVIKGWDQGLLGMCVGEKRKLKIPAKMGYGERGSPPKIPATLVFDTELIAVNGKTSGGANPETERSEGNKLTARLLRHRLCFCCVLSSDASCGPEPGPVRSLSTLFSLHAMTRATVAIKLKRQNGCSPLTQHCSRLFHNEVRAAERMDQCRLIERAVLLTCQRRSNETPFSLRSARGFGVHDDARVTRPLGVSDVGTEDELEICALCPGAWRMLVALWAVAMWPVGLWDGCNFNGYSGIQGSSTINMVAGLVDGRLGDREYNEETVAAVEPASREVRVFEKG

SEQ ID NO: 76244 - protein, 109 aa, Zea mays
  Coding DNA Sequence Number=SeqID_34465
MRCMSIRSPQLVTTGALTPHYLKRMNLIAFRWIGKMSKKWSNQDLGTSTSRVIETTDQAKDGGKKRLEVPSAWEKVKETRNPKPGVKKKTCKVKDDRVKKSYGASRITT

SEQ ID NO: 76245 - protein, 207 aa, Zea mays
  Coding DNA Sequence Number=SeqID_34466
  Pfam annotation: Domain name=zf-CCHC; Domain location=62-79; Score =22.1; E_value=0.00022; Accession=PF00098.13; Description=Zinc knuckle
  Pfam annotation: Domain name=zf-CCHC; Domain location=87-104; Score =14.4; E_value=0.0041; Accession=PF00098.13; Description=Zinc knuckle
  Pfam module annotation: Pfam domain module=zf-CCHC::zf-CCHC; Domain location=62-79::87-104
MVKNLEEEEIAARVKLHKKEVPKAISEAINMKQEKGKDSISHVFCTDHLSMSSKSKKGRGKRRCFKCKELGHFFVSCPHKDKDEGMRRCFGCNDKDHMITSCPLMKNQRRAPSKMNLTKKKDKQKVSCQVERRFFYMCDEHGHLPKTKSQGGKGKMRKKWSNHDLGTSTSRVIASKVVSNCVFKDCSCSIIVGDPRCLSLNIMELWQ

SEQ ID NO: 76246 - protein, 151 aa, Zea mays
  Coding DNA Sequence Number=SeqID_34467
  Homolog annotation: Hit_ID=Q6QP51; Match level="QueryCoverage=34%, HitCoverage=30%, E-value=5e-15, Identity=81%"; Hit description =Putative growth-regulating factor 1
  Subcellular localization annotation: CTP_CleavageSite=28; ConfidenceScore=5.27e-01
MQVACNPTTRAHPLGFVASSMKAQAHMSCNRRAGYYVQATASPLAPMPRLLDCGTGAASRGNPAHGPTVPIEHIDHRDRERGYFERDPSPRRKRAPSPPTDQGFEGWPFGRVRQPPQSTRASGSLLIRGSKAGPSEGFDSRLRALGLRAHY

SEQ ID NO: 76247 - protein, 316 aa, Zea mays
  Coding DNA Sequence Number=SeqID_34468
  Subcellular localization annotation: CTP_CleavageSite=19; ConfidenceScore=5.01e-01
MPDATKPRGCALAVRLHATCMAVLPFNRWFRRGWRSAWGGPWSTLVKTLSVTPEDASGESCLKKGVDPPGGSHVFALPSCIAPFHLPSPRMGSARVAFVLLLEERNLTEVGTLQPSLDFKDFHQAARLHSLTNGERALTGLAEGADFDNAGPVGRKRRQLQHAWLAGSAGSGAASGATSHRWGGAWLMTPPCGGRCLPVRENLSGDLPVQARAAAIRWRSAGAQVAAVVGVEVVVARGGFSADETIGATHGQTSGSLALTACPRPSCGDVGEDLPRAAFALRSSMLLFSRPRRRSLSLLLQWSPASHLELVIPQAL

SEQ ID NO: 76248 - protein, 95 aa, Zea mays
  Coding DNA Sequence Number=SeqID_34469
MAVEIRNFRVFKVVKEHEEEEEVTEEGTPPSSDPQAGNCFYFDICGSEQDSPDNKGKPRIHFSKHFCKTESLTIEKPYLDSLKASIPLRVFSLVR

SEQ ID NO: 76249 - protein, 176 aa, Zea mays
  Coding DNA Sequence Number=SeqID_34470
MAVEIRNFRVFKVVKEHEEEEEVTKEGTPPSSDPQAGNCFYFDICGSEQDSPDNKGKPRIHFSKHFCKTESLTIEKPYLDSLKASIPLRVFSLVGRTFGPERRHRTQPVTNYNYALYKSLQHYLRPLWIKRSFYLYVGLQRRSSIKRNLRPFPGDNFSRSCFFTQDLRRNEAWAQQ

SEQ ID NO: 76250 - protein, 97 aa, Zea mays
  Coding DNA Sequence Number=SeqID_34471
MDKKVILSLCRFATPKLYKKEPSAISWGQFQPKLLLHARPSAQRSMGPTTGKGDTPKGILLREGSGPRALLLIRGSKAGPSEGFDSRLRPLGLRAHY

SEQ ID NO: 76251 - protein, 136 aa, Zea mays
  Coding DNA Sequence Number=SeqID_34472
MVKNFGSKTVQIAVNAVVTSHLLVCLYSAAVDRKDQTVTLQGGTDTISGNESFLGNELREGVFRTFGFPKLERIFSRFKLVTKNDLAPRKGLLLGPCFVAPKVLREEAASAEIVPRKWPKVPFYRASALQTDIKIE

SEQ ID NO: 76252 - protein, 136 aa, Zea mays
  Coding DNA Sequence Number=SeqID_34473
MVKNFGSKTVQIAVNAVVTSHLLVCLYSAAVDRKDQTVTLQGGTDTISGNGSFLGNELREGVFWTFGFPKLERIFSRFKLVTKNDLAPRKGLLLGPCFVAPKVLREEAASAGIVPRKWPKVPFYRASALQTDIKIE

SEQ ID NO: 76253 - protein, 136 aa, Zea mays
  Coding DNA Sequence Number=SeqID_34474
MVKNFGSKTVQIAVNAVVTSHLLVCLYSAAVDRKDQTVTLQGGTDTISGNESFLGNELREGVFWTFGFPKLERIFSRFKLVTKNDLAPRKGLLLGPCFVAPKVLREEAASAEIVPRKWPKVPFYRASALQTDIKIE

SEQ ID NO: 76254 - protein, 144 aa, Zea mays
  Coding DNA Sequence Number=SeqID_34475
  Subcellular localization annotation: CTP_CleavageSite=36; ConfidenceScore=5.07e-01
ASRWELRSKPDKTSFGDGKKAKRQGFYTRRAVTCTRCAVDRKDQTVTLQGGTDTISGNESFLGNELREGVFWTFGFPKLERIFSRFKLVTKNDLAPRKGLLLGPCFVAPKVLREEAASAEIVPRKWPKVPFYRASALQTDIKIE

SEQ ID NO: 76255 - protein, 245 aa, Zea mays
  Coding DNA Sequence Number=SeqID_34476
  Gene Ontology: Mol. function=cysteine-type peptidase activity; Biological process=proteolysis
MPSQASQLETQLGGTQFEEIHERQQHIRRVLETCPDESDVVSDQQRGEMATEEMEHNDSGPVFDQTPTPHDDTLKGTTNSGSDPPLTEQECVRSLWDLICSKDIDQSRVVIDYSEYSANCMDIYESFAEGKCLENVFMQCFIECVRDDSKNHRRTLTSNRLILDVNVGALLNFEEQERHSKNPQPFDQNVLQNCLHNTLPALVNLDKCKSVSYLLSINQTIPETYVLMPFINSHSIASTRRCHFH

SEQ ID NO: 76256 - protein, 420 aa, Zea mays
  Coding DNA Sequence Number=SeqID_34477
  Gene Ontology: Mol. function=cysteine-type peptidase activity; Biological process=proteolysis
  Homolog annotation: Hit_ID=Q53MK8; Match level="QueryCoverage=80%, HitCoverage=37%, E-value=3e-28, Identity=25%"; Hit description=Ulp1 protease family, C-terminal catalytic domain, putative
RLNVRCNPQDVIASINILNERQREAIRRKGFSSILDMTVDALCSRSHLQWLMDKLDPKDMTIRPGPGKELKITKDIVHLILGVPNHGGGKPLGIDEAVAASNLRAELGVAKDEFNVAFLQDRLRKGEDDDLSIRCFFLILFNRLLFPTASWGITYHEVLLTEEMHRFHEIDWCQLIFNDLCEAAKKWHNRITTNVSTTIYGCSIVVLSAAPHNKSGTPRIKFFDKNSIKALTKADKRKVRHGAESFGHCENTKVDMDSYYFLLNNQPECRTNIFDAPRPGPMPRPTFNIKLPSIKEMMSSKINDLPHRHRSKFTDILAAYDLEVDKSCVAIKDSIDKIIVKQYDIADKFIELIDEVLRAESENLENETDEPQQPVNSADSAGHTVDATQPTPDMPSQASQLETQLGATQFEEIHERQQPP

SEQ ID NO: 76257 - protein, 292 aa, Zea mays
  Coding DNA Sequence Number=SeqID_34478
  Gene Ontology: Mol. function=nucleic acid binding
MPILSRWKDYKDDQKYYNNFVSQLNGRLSVNTEDKATKEACTDMLRSAVKNQRYRLKQKYFNGVPANEIRTTSPVSYMTDEQWRALVAKWSDPKNMEISEKNKQNRNQVKFHQATGSRCYVAHLHAYKQKRNREEPSLDQTEELDAVDAFKTCHTSSKRGLSEPAREALIKLSLALAIKLLPPFVCHQISEMKSSSHQFLKSVGIKTSATSKASSSNQSELREQLAAEATTAVQGELDQLRKKCEEAEEQQARTQRELEEYKKITEKNSKEMEETNVLIKKLLSLHGNSSST

SEQ ID NO: 76258 - protein, 248 aa, Zea mays
  Coding DNA Sequence Number=SeqID_34479
  Homolog annotation: Hit_ID=Q6QP51; Match level="QueryCoverage=82%, HitCoverage=90%, E-value=2e-27, Identity=53%"; Hit description =Putative growth-regulating factor 1
MQEACNRTTVVYPFGFIASGTRKGDISKRNLLDEGNGPPSPPTDQGFEGWPLGRVRQPPQSTRAPSLLLIRGSKAGPSEGFDSRPRARRVRDDSGYVRYMAEARATLPRDAISPRPSPASSGNSSPGRIHASPEGLLRQWAHPRLARGPARVGFDEKQPWPNRLTNRPYRRRIQCEDRLTPYPDTRASVGKVEPWAQQEAPPRPILGPALGGGLCLARPQDSASASASGGIASSPDLGLGLRRSLCLA

SEQ ID NO: 76259 - protein, 448 aa, Zea mays
  Coding DNA Sequence Number=SeqID_34480
  Homolog annotation: Hit_ID=Q6QP51; Match level="QueryCoverage=19%, HitCoverage=37%, E-value=3e-08, Identity=47%"; Hit description =Putative growth-regulating factor 1
MTVSTVDIPVLHFAEVARLYLSGQGLVYQGTQSRLARAQPRAGTVVPDEFTPRPRTSSGGGRTLDSSEAQLGQASFRQGRSDRSYFALSLTDLTGKQRRLPCSDCCATLRASASGGIASSPDPGLGLKRRLRYFSDGHVITYTGLKHFSDNHVGICRVSGSPARAASALLSVPPSATTVRRGFSADEIAGAAHGLTSNSTAFCSSSPLEWGHGRGPYGSSIRPEVIAAAVRPLGAGVVVAAAEAGGGEPSVGLLLLRRPSNRGGLFVPAEESLGSVGLAARGFSCLVKGNPRPLFDEPKPEAAVSAWTEAESARKEDLVGRSLAGPSTGGTDAGVELPRPQAGLMSSGDSWLRLRGGRPSCLFEPDSWMRPWRRWPGRGADVVLRSGDPPTTLPSEARSDFAEGVVDAEGAVAPFNCQGLSLQDQESLGSVSLGCLRVLRRFQDPLSK

SEQ ID NO: 76260 - protein, 117 aa, Zea mays
  Coding DNA Sequence Number=SeqID_34481
  Gene Ontology: Mol. function=bile acid:sodium symporter activity; Cellular component=membrane; Biological process=sodium ion transport
  Homolog annotation: Hit_ID=Q9SZ68; Match level="QueryCoverage=39%, HitCoverage=12%, E-value=2e-13, Identity=70%"; Hit description =Putative transport protein
MHRKAVSTLWTSFAEVSKYGISPLEAHHSLAFFSGTYGKGKETAGYYAPALGFLMFAVGVNSSVKDFTEAIKRPDAIAAGYIGQFVIKPLFGFLFGTLAVLVLIILLECKAAFLLLL

SEQ ID NO: 76261 - protein, 117 aa, Zea mays
  Coding DNA Sequence Number=SeqID_34482
  Gene Ontology: Mol. function=bile acid:sodium symporter activity; Cellular component=membrane; Biological process=sodium ion transport
  Homolog annotation: Hit_ID=Q9SZ68; Match level="QueryCoverage=39%, HitCoverage=12%, E-value=2e-13, Identity=70%"; Hit description =Putative transport protein
MHRKAVSTLWTSFAEVSKYGISPLEAHHSLAFFSGTCGKGKETAGYYAPALGFLMFAVGVNSSVKDFTEAIKRPDAIAAGYIGQFVIKPLFGFLFGTLAVPVLIILLECKAAFLLLL

SEQ ID NO: 76262 - protein, 74 aa, Zea mays
  Coding DNA Sequence Number=SeqID_34483
MSLRYGRIYTLGASKAERPHLSLNVAILAKGRYPRTKVGIAVDRNNTNVDSEPKVRAGKLRRDSKECNRLKDEK

SEQ ID NO: 76263 - protein, 263 aa, Zea mays
  Coding DNA Sequence Number=SeqID_34484
  Homolog annotation: Hit_ID=Q6QP51; Match level="QueryCoverage=23%, HitCoverage=38%, E-value=4e-12, Identity=57%"; Hit description =Putative growth-regulating factor 1
MGDTPKRILLREGNRPRASLLIRGSKAGPSEGFYSRLRARGLHTHYWSEVRSPAPRKGSTAASGHSGSVPTTDQGLELRSRGTLGHFRDQRERSYNRIPSEGGIKPSDPVDRGPSPADHPQRLGGYSRKPGSGQTIDSVNIPAREPGTRPCTRATASSHEGTTRPAEALRKALIPRRSQTTPPRPQGLHPVGALARTQWIISQPRKAGPLAKKSDKSLQASINTPFEARGLLSGTIIRGTLKAPNSQLVTPISTKLERPDGCD

SEQ ID NO: 76264 - protein, 181 aa, Zea mays
  Coding DNA Sequence Number=SeqID_34485
MLVSPMGMCTAGRALLRDSSGRRLTSGSLIAILSRTIIRGTLKAPNSQLPWARAADPGEYPYRPRPPSSDEHTSGSPEAQSSPRSNPGQIATPTDQITGAFNAKDDSAACAAPTAVPLDRGSDSGSALEDGELRSARPRARTWAQPRKMTNSAPPDPGLGLGLNPGRRRTPLRPTQGSDSG

SEQ ID NO: 76265 - protein, 196 aa, Zea mays
  Coding DNA Sequence Number=SeqID_34486
  Homolog annotation: Hit_ID=Q8LD08; Match level="QueryCoverage=29%, HitCoverage=15%, E-value=1e-07, Identity=48%"; Hit description =Protein phosphatase-like
MRMGMSFAGRGNENDRYRMVAGHGNGLCAGRRESERQNRNGGRTRNGQNREWPTTIAALISSRDYDPRNAQNNPRVTDVGDDHEVPLLDDGQRGAAALHRVQVAAAPELVVHNGTCGHIGLFLEVEVAVAKFLLVVDERPQRECLLLMVFVRGFQLGVGCTREYEWEWALRGEGMRMIDIEWWQNMRGEEGIGKAE

SEQ ID NO: 76266 - protein, 88 aa, Zea mays
  Coding DNA Sequence Number=SeqID_34487
MASSSNAMPRTTRESPTLATTMRCRHKHACGVAVTIAGICLRGPRRRLYGRMRIGMNFAGRGNENDRYRMVAGEKGIGKTEQEWWQNT

SEQ ID NO: 76267 - protein, 119 aa, Zea mays
  Coding DNA Sequence Number=SeqID_34488
MRVDWDALRLIIRGTGCSSLRRRAVNGARCMRLALPSLEKNVPKGELSDCFKSEIQTDKNKEEIEVEEARTSPPPPEEPQAGNCFYFDICGAVPDSPITQGKPRCICHLLVILESFSLT

SEQ ID NO: 76268 - protein, 87 aa, Zea mays
  Coding DNA Sequence Number=SeqID_34489
MAKFEFQWYRLNFEALYLPNYEDFALENKEEIEVEEARTSPPPPEEPQAGNCFYFDICGAVPDSPITQGKPRCICHLLVILESFSLT

SEQ ID NO: 76269 - protein, 288 aa, Zea mays
  Coding DNA Sequence Number=SeqID_34490
  Gene Ontology: Mol. function=transferase activity, transferring glycosyl groups; Biological process=sucrose metabolic process
  Homolog annotation: Hit_ID=Q8L5H0; Match level="QueryCoverage=95%, HitCoverage=41%, E-value=1e-80, Identity=91%"; Hit description =Sucrose synthase 3
  Pfam annotation: Domain name=Sucrose_synth; Domain location=1-248; Score=-107.6; E_value=2.4e-05; Accession=PF00862.10; Description =Sucrose synthase
MRLTDAGDGQVTRLIPDAKGTSCNQRLERISGTQHTYILRVPFRNENGILKKWISRFDVWPYLETFAELLLMKKNLRKVPYDFMDAAGEIATELQGTPDFIIGNYSDGNLVASLLSYKMGITHCNIAHALEKTKYPDSDIFWKNFDEKYHFSCQFTTDIIAMNNADFIITSTYQEIAGSGHLDDRSKPILFSMARLDRVKDITRLVEAFAKCAKLRELVNLVVVAGYNDVKKSKDREEIAEIEKMHELIKTHNLFRQFRWISAQTNRARNGELYRYIVDTHGAFVQAM

SEQ ID NO: 76270 - protein, 644 aa, Zea mays
  Coding DNA Sequence Number=SeqID_34491
  Homolog annotation: Hit_ID=O24301; Match level="QueryCoverage=31%, HitCoverage=34%, E-value=8e-52, Identity=46%"; Hit description =Sucrose synthase 2
  Pfam annotation: Domain name=LRRNT_2; Domain location=310-352; Score =11.2; E_value=0.058; Accession=PF08263.3; Description=Leucine rich repeat N-terminal domain
MERVHIKKRSNTQKDAAGEIAAELQGTPDFIIGNYSDGNLVASLLSYKMGITHCNIAHALEKTKYPDSDIFWKNFDEKYHFSCQFTTDIIAMNNADFIITSTYQEIAGSGHLDDRSKPILFSMARLDRVKDITGLVEAFAKCAKLRELANLVVVAGYNDVKKSKDREEIAEIEKMHELIKTHKLFRQFRWISAQTNRARNGELYRYIVDTHGAFVQISPALLPPVTACKEAAPTSADLACAAPARDSLYLTPSLGAALHRRRLLPMLHHALFSADLAVTVSELSRPLVATSFVVFSLMCHLLPHAVSGCAPSERMTLANFSNNLDTRTIDRRWPGAGNYSDDCCRWTGVRCRRFGVGAYHRQQQFQVVSLDLAGIGLAGPVVSRTLDRLDMLCVLNLSRNSLHGSVLSEVLRMLRLQPDEPGGNVFQWLPLLRNFSAESNRLTSVLPGSLLWSCPELEHLLVRCVVRIAETKETAAAAASSACGGLARPPAPRARPRQTSPPPHLTPPCSCSLRRDSEQIEAGEEDEKNTPDTNAAHRAAPGVEPRAGPGSPKPGVEHRLWHSARPDGSTCGREDSAPATGRGPSGPRPRTVRASAESTAARNIIEPAWETLPTEDQQEFEEHKERLIKEAQAKFLTNFKVDRN

SEQ ID NO: 76271 - protein, 113 aa, Zea mays
  Coding DNA Sequence Number=SeqID_34492
MVTAPAEDGQQQMSPTEVVSEVLSGSSLFLRNVGLQATSKKSFTTIYAKVQELQDQLESERQEKDGLREEVETLKAQAQASKETMDNMKRSMEENNVFLRQMISFNRSQVPPS

SEQ ID NO: 76272 - protein, 107 aa, Zea mays
  Coding DNA Sequence Number=SeqID_34493
MDKQPNVSLRKLFLKCYQALVWFLRNVGLQATSKKSFTTIYAKVQELQDQLESERQEKDGLREEVETLKAQAQASKETMDNMKRSMEENNVFLRQMISFNRSQVPPS

SEQ ID NO: 76273 - protein, 300 aa, Zea mays
  Coding DNA Sequence Number=SeqID_34494
  Homolog annotation: Hit_ID=P53443; Match level="QueryCoverage=26%, HitCoverage=10%, E-value=2e-19, Identity=71%"; Hit description =Phenylalanine ammonia-lyase
MFDFWIQVVEVPNVSWEDIGGLKNVKRELQEMLGSWNATSGTASGAGGRPGSRAHGAPLGGLVLVSKDLDNIREIDAFLPLLLQPCSWTELGKSKQATWGSSIRPIYTFSTVEELWGFLPLLLQPCSWTELGKSKQATWGSSIRPIYTFSTVEELWGIYMAEYRQPLVKIEGASLSIAQVAVVATSAGEARVELDESACSRVKASSDWVMNSMMNGTDSMMRGGAAGRIRVRSLRLLRSQTSSTSISRVFAATAYGCHSGPRQCRPSSSPRRRHPIAAPGSERCYMNRLSSYLAWFKMYI

SEQ ID NO: 76274 - protein, 207 aa, Zea mays
  Coding DNA Sequence Number=SeqID_34495
  Gene Ontology: Mol. function=nucleoside-triphosphatase activity; Cellular component=nucleus; Biological process=protein transport
  Homolog annotation: Hit_ID=Q9LZF6; Match level="QueryCoverage=84%, HitCoverage=48%, E-value=2e-67, Identity=62%"; Hit description=Cell division control protein 48 homolog E
  Pfam annotation: Domain name=AAA; Domain location=1-131; Score=76.6; E_value=8e-20; Accession=PF00004.19; Description=ATPase family associated with various cellular activities (AAA)
MVVGGRKLKGTMLVKRAGEREKTNGEVECRIVSQLLTLMDGLKSRSHVIVMGATNRPNSIDPALRRFGRFDREIDIGVLDEVGRLEVLRIHTKNMKLVEDVNLELISKDTHGYIVADLATLCTEAALHCIREKMDIIDLEDETIDTEILNSMAITNDHFKTALGTSNPSALRETFDFWIQVVEVPNVSWDKIKNRGWEGYSSKSHWN

SEQ ID NO: 76275 - protein, 117 aa, Zea mays
  Coding DNA Sequence Number=SeqID_34496
MAERYQLPRSCVPPTMRRKDGGYPPSGGLEGGETRCIREREDMGPGKGDTPKRILPREGTGLRASLLIRGSKAGPPRGSTAASDRVGPTPTTGQRFEGRPPEGFHGRLRLLGLRAHY

SEQ ID NO: 76276 - protein, 424 aa, Zea mays
  Coding DNA Sequence Number=SeqID_34497
  Subcellular localization annotation: CTP_CleavageSite=45; ConfidenceScore=5.02e-01
MNKHTSIQGAITNGTPVPPPQVRTTPLHGGRPAEQRKTDERRAVTCSSSGDDDDFCSGGPNSGSTDPRADAAARRPPPMPKLVRQGWAEGRRVGGQSVAGPSYHAGGRTSSSCRGRRRCREWLRSHSRPKAVHAAAASATDDNRSSPPSLSEGAGHRPRRGRPQLGTLPSPALVMKILEAEGGAEAAARLAFPHHQAGELRSSNDEAKRRQMPPIRGLGRGWVPHVMQTGSEQKKPKRRAWCTQPPSGYKRPPTFAQTNGRKEWATMQAACNRAKQLHRHLRHRRASSVAEPMPRLEATQRTTQRRQPGATVNAAERGPAVMTVAGGREQRSRRQPGSRPIQGQQESLLSRREDGAPVIRPSNGSRTRNGRPANHSPRRINSAAGQATLLAGEAGDASPSPDQERGIPRKGSFPVKEPGSEPPY

SEQ ID NO: 76277 - protein, 95 aa, Zea mays
  Coding DNA Sequence Number=SeqID_34498
  Gene Ontology: Mol. function=copper ion binding; Cellular component =cytosol
  Homolog annotation: Hit_ID=Q8L866; Match level="QueryCoverage=83%, HitCoverage=10%, E-value=1e-40, Identity=92%"; Hit description =Putative copper amine oxidase
MVDTKRVKWISTRGCLGYIKYFDAHFTNFTGGVETIENYVCLHEEDHGILWKHQDWRTGLAEVRRSRRLTVSFICTVANYEYGFYWHFYQKQKLV

SEQ ID NO: 76278 - protein, 117 aa, Zea mays
  Coding DNA Sequence Number=SeqID_34499
  Homolog annotation: Hit_ID=Q9XHP4; Match level="QueryCoverage=53%, HitCoverage=8%, E-value=2e-27, Identity=93%"; Hit description =Peroxisomal copper-containing amine oxidase
MPVHRTSNSTCPVCTGHPGGPTSQKLQRLESNGSDDVAGAPDCPDGKIEAEVKLTGILSLGALMPGESRKYGTTIAPGLYAPVHQHFFVARMDMAVDCKPNEAHNQVGGCHLFAPFF

SEQ ID NO: 76279 - protein, 302 aa, Zea mays
  Coding DNA Sequence Number=SeqID_34500
  Homolog annotation: Hit_ID=Q6QP54; Match level="QueryCoverage=36%, HitCoverage=42%, E-value=2e-15, Identity=54%"; Hit description =Putative kinase
MGSKTLSMKCTFASLTRLRKKTLKDMLAVGNQDQVHANREHRYTTVQPLAMEGQGSVHSRDTISPRPSPASGRNNRPRQIHASPEGILKSIQCKDRLTPYPNARSSDDKAEQPSPASGAIGSSASPDPRARTQPRPRRTDSASPDPRARTQPRPRTMVSASPDPRARTQPRPRKTVSASPDPRARTQPRPRTTVSASPDPRARTQPRPRRSLRLARHWAQTDHVTGGYIITLPLASSGYGEQDRHPIWLTPIKQVMMTPCMLHDDGGSQPPTEARRRQQGPDSPDSCASTGFKRSSDGHDIT

SEQ ID NO: 76280 - protein, 406 aa, Zea mays
  Coding DNA Sequence Number=SeqID_34501
  Homolog annotation: Hit_ID=O48956; Match level="QueryCoverage=15%, HitCoverage=12%, E-value=3e-20, Identity=80%"; Hit description =Cytochrome P450 98A1
  Subcellular localization annotation: CTP_CleavageSite=80; ConfidenceScore=5.60e-01
MGRATHPSGSWSAEKSVSWLGLSSPPPSSGSPPTATPEAGTPVVVQGAPPGEAQGSSSSQTLSPVGARRKSPAAPVVDVPAPHAGGGAVSPSGWTVRPRDGEADAQQGGRLGINLMAFMIGHLLHYFVWSLSEGIRPEDVNMMESPRLVTFMGTLLQAIAKPCLEKELYNRAHRCKIPSVHHGSASLPLAPSRMPRYLRNVVHASDATRSLETLSSPRSSASPIPAAVGLSVVPHYPTNVRQATAAHHPSAPRLSWRGRRGPLQGPTALDVRPPLRPRPSSPIGGSSAPRPSTVVASQMRATRTVVRTRLAGGTPCAASSTAEPAPVVSFEIDYEFMCLLAAGTSSWRGALVPVLDTVAGADRGAQAGGAVPHAGRVGARRAAEFMERTVQLFRADPNVTRYVTKY

SEQ ID NO: 76281 - protein, 93 aa, Zea mays
  Coding DNA Sequence Number=SeqID_34502
  Gene Ontology: Mol. function=triacylglycerol lipase activity; Biological process=lipid metabolic process
  Homolog annotation: Hit_ID=Q6I5X8; Match level="QueryCoverage=95%, HitCoverage=21%, E-value=3e-14, Identity=44%"; Hit description ='putative lipase class 3 family protein, PF01764'
  Subcellular localization annotation: CTP_CleavageSite=56; ConfidenceScore=5.39e-01
MKENTHTSATLSSPRDTLARVSTTLKAHNIASVLPRLWPLTVTLTYPPRMWYSSTSLRTLASTCYRVEYLHKRQNPLSAFTLGSRHDNPVSRR

SEQ ID NO: 76282 - protein, 111 aa, Zea mays
  Coding DNA Sequence Number=SeqID_34503
MKAKSHQQPIILKSTCKNYATSKAEYTNTQLDLPVTALVPTITGMGDHVSGRVRGYVCGQYVQTLDSRYHTLILIPIFIPWTTNPHGLLSTNQHHYDKKVDTINFLTSREC

SEQ ID NO: 76283 - protein, 106 aa, Zea mays
  Coding DNA Sequence Number=SeqID_34504
MAKPGPRYSSWSSPTEAITHSTVYPGGRDEGQVTPATNHPKEYLQKIMPQAKAEYTNTQLDLPVTALVPTITGMGDYVSGRVRGYVSCQVHSGNNMLLCQKSQKVT

SEQ ID NO: 76284 - protein, 323 aa, Zea mays
  Coding DNA Sequence Number=SeqID_34505
  Subcellular localization annotation: CTP_CleavageSite=30; ConfidenceScore=5.07e-01
MSSRSLMHRVFPPSRPPDGGYPPSFCLIVGGTQLRGSWYLSAIVRLQGFSSHSPVAPLRWWSPKTVTSSSWMGRGKPGCDPALSIGGVRHPRWGGERGEPGLYLLRGSAGHLFFQLLVVAIALPPCGRDVLQPCRGRRTVAAQLGCNIPPSPSHSRRGRQRGSAGALGSGPLFGFNSWFASLKRDREREPSGGRVHPGPWLLLQRSLAGPPTLVAPQARAGLSVSGTDAGVDQPRPRVGLAPLEDGWPRPQRDVCASESCFSRKVMSEKVKSEDPLFEAVKKHERYSGRRDLFSRKISTHRGFPPLLAPEGGSGFAEARPTLP

SEQ ID NO: 76285 - protein, 47 aa, Zea mays
  Coding DNA Sequence Number=SeqID_34506
  Homolog annotation: Hit_ID=Q8RY22; Match level="QueryCoverage=95%, HitCoverage=5%, E-value=1e-10, Identity=82%"; Hit description =Protease Do-like 7
MTGPMVAEAMFVNREEIPVYPLYRDPVPLSFLSMMRFSWHLKQHQSG

SEQ ID NO: 76286 - protein, 418 aa, Zea mays
  Coding DNA Sequence Number=SeqID_34507
  Homolog annotation: Hit_ID=Q8RY22; Match level="QueryCoverage=18%, HitCoverage=8%, E-value=8e-28, Identity=86%"; Hit description =Protease Do-like 7
  Subcellular localization annotation: CTP_CleavageSite=41; ConfidenceScore=5.72e-01
MGSLRPTPPPPEKVSARTRAGPLPPVAARPRRSCRLRSRVTAATAGRDGARAGPRSGRRAATVKVAAIEGRRLARERKAGGWERGGARRAGTCGAGGCECAQVAGFRGRTGAPPRRQQATGGEGQRVRVQAGDALPLSIRHTNLIFSTLFAASLVYLMRRWREKIRASTPLHVVFLAEIFAPPLYYTSRRIPGPDAINPLPPTRSSQPVPPPAHACPNYRSDLGAAGGAPSRGPRRQGGPEGGAAEMRRDTVPERAAAAAAAARAIAGLPPHERINLPSNSEDLVSIYGSNPQGQALEELEEVFYEEEFDPIKYILQSIPDEGSDATYFDEQDSMPYNLYAFDTEVAGASYATGFVVDMSRGIILTNRHVVKPGPVVAEAMFVNREEIPVYPLYRDPVPLSFLSMMRFSWHLKQHQSG

SEQ ID NO: 76287 - protein, 478 aa, Zea mays
  Coding DNA Sequence Number=SeqID_34508
  Subcellular localization annotation: CTP_CleavageSite=61; ConfidenceScore=5.56e-01
MPKLSCFTASALCQPSYLLSFSLSDTSPKIPVHTLYSRNTVKSCFLRTFGSRRPPTLTDRVAALEREKADLRRQLAAERREANEAVAKGQAAQAEAKLARAEGNLAKELAEHLQERLAALESRAKEAEAAEGAAGTSSRRGGGGLMSYASLVTCEGAMNALSREGCRHFEALDQVDEDFGRDIYEVEDPVVKESAGALYDRMWGLYGREVVRERAEAARAQAERGERVDDFGALNSALPGPEPTPAEAATGVALETTPEPAEDAPSVPTSAVAGEDLPPKVAEGAPDAPAAAAPSAEDSAAVVAETAAEETAEAPAAAGPSQVQDFGPAHATATTGFLAASTAEDGNEYGGSVSEFFDFTDSGSSVEWTEESSEEDLDYFAALDVAAAEASPHAADAPDVLGPSTGRRRRRAVAKRRVSAEEGARLRVSRGGRQELLSLPAATSTGEGELRSLFAGEELRIMLFNYREMGIIPKVEPM

SEQ ID NO: 76288 - protein, 71 aa, Zea mays
  Coding DNA Sequence Number=SeqID_34509
MEKKKKACSKLVKNQIIKAYKFLDEKWYLRTRIREGEAQKIRRLTQRRSCKAGKLRHVRRKRNRLEDEKAI

SEQ ID NO: 76289 - protein, 439 aa, Zea mays
  Coding DNA Sequence Number=SeqID_34510
  Subcellular localization annotation: CTP_CleavageSite=42; ConfidenceScore=5.06e-01
MNKHTGIQGAITNGTPVPPPQVRTTPLQGGRPAEQRKTDERRAATCSSSGDDDDFCSGGPNSGSTDLRADAAARRPPPMPKLVRQGLAEGRRVEGRSVAGLGYLAGRRTSSSCRGGRQRRERLRSHSRPRARHGAAASATDDDRPSLRSLSEGAGRRPCGGRPQLGTLPSPALVMKILEAEGGAEAAARLAFPHHQAEGHHLGSPYVRPQTPRAESSPTRSKALPCGMGAGPRMSCKPAQSRRSQSAARGAHNRPAVTSDPPLLPRPTGGRSGQPCRRDATAPSGHASSTPNAPAWKPRPTRHATGAPDAACRQLHRHLRHHRASSVAEPMPRLEATQRTTQRRQPGATVNAAESGPAVMTVAGEREQQLRRQPGSRPIQGQQESLLSRREDGAPVIRPSNGSRTRNGRPANHSPRRINSAAGQAALLAGEAGDASPSP

SEQ ID NO: 76290 - protein, 269 aa, Zea mays
  Coding DNA Sequence Number=SeqID_34511
  Homolog annotation: Hit_ID=Q6QP54; Match level="QueryCoverage=28%, HitCoverage=40%, E-value=4e-19, Identity=54%"; Hit description =Putative kinase
MAERYQLPRSCVPPMMRRKDGGFPPSGGLEGGATGRRSGRRFAFAVITAPEKPPQIAWALHPLLVKGSKADPPKGSTAASGYSGSAPITDQGFEGWPPKDHPQVLLGVPLGPKPTPNERGTDVHSDYPLAAHRRHHVRYPSRAKPRKTANSAPPDPGLGLGLGPGRRRTPLRPTQGSDSGSAPEDDELRFARPQGSDSALASAERPPPRPTQGLGLGLGHGRQTRPRLWRSLHVARPRAQASHVNRKRHHHPTPEPTRAAENKTGVPSG

SEQ ID NO: 76291 - protein, 110 aa, Zea mays
  Coding DNA Sequence Number=SeqID_34512
  Homolog annotation: Hit_ID=Q10CF6; Match level="QueryCoverage=49%, HitCoverage=7%, E-value=3e-11, Identity=68%"; Hit description =Expressed protein
MSPRSPPLRPPHPHYLAAPPARTDPQALHRPAPPSDRDRPGTSGLTAEETAAWFPDTLDDPLEKDLESYALPSNGRAIRGAHLGMSLDVMLIEIDERFNALKLLMGSVFR

SEQ ID NO: 76292 - protein, 182 aa, Zea mays
  Coding DNA Sequence Number=SeqID_34513
MTSSDMPRYPAHWACAFASKRYRLERDAVAQSGHSEEEEQFSGLELDIKDSSLGVTAGESSDVTDPLLNRVAQALVVSRKEPQRQQRRKVDDVAGERVEEAHDETPLVAHHQHALRRRGGSSRVSGNHAAVSSAVRPLVPGRSRSEGGAGLWSAWGCYDAPIVPQQLHDGQQYQRAQIHGHE

SEQ ID NO: 76293 - protein, 134 aa, Zea mays
  Coding DNA Sequence Number=SeqID_34514
  Gene Ontology: Mol. function=sequence-specific DNA binding; Cellular component=nucleus; Biological process=regulation of transcription, DNA-dependent
  Homolog annotation: Hit_ID=Q1G160; Match level="QueryCoverage=45%, HitCoverage=59%, E-value=6e-24, Identity=87%"; Hit description=MADS -box transcription factor TaAGL22
  Pfam annotation: Domain name=SRF-TF; Domain location=82-132; Score =98.4; E_value=2.1e-26; Accession=PF00319.9; Description=SRF-type transcription factor (DNA-binding and dimerisation domain)
MTRSVAAVGICYGVGGGVVSFRRVQGWEDTHILSPFSDCRLVRVPLDAQVFVVSFSGNEQPMAARIGADGKAMARRGRVELRRIEDRVSRQVRFSKRRSGLFKKAFELSLLCDAEVALIVFSPAGKLYEYASTR

SEQ ID NO: 76294 - protein, 136 aa, Zea mays
  Coding DNA Sequence Number=SeqID_34515
MYSAGKSGLCGGYSLDIVGPSGFAPIRPLDPGDFCPPHFPVLDPPKRHNTTTNSVVYVDCCHITGLGCPISQTLTPHRQDNLSVLGATISYSTARTEMARSMTDDERRWLAAATVGGQQVREEEQGEGQEDERDVR

SEQ ID NO: 76295 - protein, 130 aa, Zea mays
  Coding DNA Sequence Number=SeqID_34516
MRRKDGGYPPPGGLEDGKTRRIREEEDMVAFRKGSPETPCSVPIEGNMALSPLLLAERRRRGVCKKVESVPDRPLALCGGSGAALANPAPAEPLTASTYQPENLGPDRAPGLQPVRMREQPGQPKHYARH

SEQ ID NO: 76296 - protein, 267 aa, Zea mays
  Coding DNA Sequence Number=SeqID_34517
  Subcellular localization annotation: CTP_CleavageSite=2; ConfidenceScore=5.36e-01
MSSSSLMRRVFPSSKPPDGGTRRLFAHRGGTQLRGSWYLSAIVRLQGFSSHSLVAPLRWWSPKTVTSSSWMGRGKPGCDPALSIGGVRHPRWGGERGELGLSLLRGSADHLLFQLLVVAIVLPRCDGDVLQSCRGRRTVAAQLGCNIPSFPSHSRRGRQRGSAGALGSGPLFGFDGWFASLERDREPEPSGGRVHPGPWLLLQRSLASLPMFVTPQARGRSYPRGRNRSSVCKGTLNASVFVHCGCQGLNMYVILARSRVFFLIFEH

SEQ ID NO: 76297 - protein, 569 aa, Zea mays
  Coding DNA Sequence Number=SeqID_34518
  Gene Ontology: Mol. function=N-acetyltransferase activity; Biological process=metabolic process
  Homolog annotation: Hit_ID=Q5JJV7; Match level="QueryCoverage=77%, HitCoverage=57%, E-value=6e-85, Identity=59%"; Hit description=PHD finger transcription factor-like
  Pfam annotation: Domain name=Acetyltransf_1; Domain location=385-462; Score=18.1; E_value=0.026; Accession=PF00583.14; Description =Acetyltransferase (GNAT) family
  Pfam annotation: Domain name=PHD; Domain location=264-299; Score =26.5; E_value=9.6e-05; Accession=PF00628.19; Description=PHD-finger
  Pfam module annotation: Pfam domain module=Acetyltransf_1::PHD; Domain location=385-462::264-299
MPTTVGGEVAAAANGRVRKRAPKDKDGSKPEPSKKPSLPRQRAASKQRTAGDMNAVAADAKTPGVENQTPSNDLQIVPVVPPPTPTNRRKRKQKSPSSSVVARRSSAVAAAKRHTILAWLIDAGFLSDGEKVFYVPVDGKVVSGAVTRTGVHCGCCDAVVPLPSFEAHAGRDPGRQRRSWEKLLLVSGSSLLRRMQEAWEKERVKMFLVQEKARAALEQEQERSAQAKRRLLAKQKKGAVEGVVTPPRPRTKMRPGAKDSSDDACGVCGDGGELLCCDSCPSTFHPACLAMKVSARLSDMVGVTNHTEDGFSWALLKIQKDEAVSSQDTAAVLECNVKLAVALGVLNECFNPAKDRRTKIDMLHQAVYSLGSEFKRVSYEGFYTMVLDKDGETIAAALLRIHGTKVAEMPFAATLPAYRKQGMMRRLVNAVEQVLASVQVDKLVIPAIAALVDTWTRSFSFRPLLDPESREEIRRRSLVVIAGTTLLHKPVAAARPPSPHRHAEAAAPKNAGLPWWWKYTQQAPPLTDDERAFLDTAPLACSFTDLLVTGELRLCAGNSIACCSSASVR

SEQ ID NO: 76298 - protein, 393 aa, Zea mays
  Coding DNA Sequence Number=SeqID_34519
  Homolog annotation: Hit_ID=O24592; Match level="QueryCoverage=26%, HitCoverage=17%, E-value=2e-35, Identity=80%"; Hit description =Viviparous-14
MVLDKDGETIAAALLRIHGTKVAEMPFAATLPAYRKQGMMRRLVNAVEQVGGARHCLPACLSVCHCHCSPGVSVKQVLASVQVDKLVIPAIAALVDTWTRSFSFRPLLDPESREEIRRRSLVVIAGTTLLHKPVAAARPPSPHRHAEAAAPKNAGLPWWWKYTQQAPPLTDDERAFLDTAPLACSFTDLLVTGELRLCAGNSIACCSSASVRRPQVRHVLPRHPALAQSQESPPRAIIAPRAPSTFHRRSHRIPGIIHRLRAPSRNPRKRSIPAQCDVLMPRAPATDILPTSVSIHRHLPTGSRARASNSVRFSPRAVRSVSHECLQASFHADLPAPSKKPTAIAVPRHAAAPRKSSGGGKKQLNLFQRAAAVALDAFEEGFVANVDSRLEGG

SEQ ID NO: 76299 - protein, 99 aa, Zea mays
  Coding DNA Sequence Number=SeqID_34520
MAVTPLDLVKCNMQVSGQRPRSVSPGGINGERSEIAENEATSTGEAARLRAALRRAPPGAVRQPHQPFERLLKKEMSSLPSKNIVSHGLIYDISTCYGL

SEQ ID NO: 76300 - protein, 138 aa, Zea mays
  Coding DNA Sequence Number=SeqID_34521
  Gene Ontology: Mol. function=protein phosphatase type 2C activity; Cellular component=nucleus
  Homolog annotation: Hit_ID=Q8LD08; Match level="QueryCoverage=89%, HitCoverage=34%, E-value=5e-16, Identity=38%"; Hit description =Protein phosphatase-like
MASGHCCRSTSAHLRCRDDATIFDIIVVERARYGEYRSLLAGLPNEVHPGLISEVVHLVVAPPDVLLLYIHLVRGHSHNNNNGHHSSAQEVMVGCDAQNNPRVVDIGDDHEVPMFDDGSRSQAAAAPELAVHSGAWAM

SEQ ID NO: 76301 - protein, 190 aa, Zea mays
  Coding DNA Sequence Number=SeqID_34522
  Subcellular localization annotation: CTP_CleavageSite=31; ConfidenceScore=5.07e-01
MAVGSVLSYGAPDSSVRHRTLSDDRCARSSRCSAGTPDSPAAQAASGPQAVEAMQKTLEDLKAEQRAGVQPIAAWAGEASMALVPLVVSPIPVSEPPTSISDALPVLDSAADRLRRLDQILGARLEAEGGRLYQAVIEYILTCFRSHDPAISLEPVIAGPVADTEDVAREGVQGTVEVVAGRFQRDPADD

SEQ ID NO: 76302 - protein, 147 aa, Zea mays
  Coding DNA Sequence Number=SeqID_34523
  Gene Ontology: Mol. function=unfolded protein binding; Biological process=protein folding
  Homolog annotation: Hit_ID=Q43638; Match level="QueryCoverage=49%, HitCoverage=9%, E-value=1e-27, Identity=76%"; Hit description=Heat -shock protein precursor
MALLLKELPFFLLFAAGLWYWFLLLGFEDALQGIGTVLRLLSNQASTHILRYVSDLKYLFTTSLTTHILRYVWEAEADDSSYVIKEQTYPEKVLTRGTQTTLYLRDDDKYEFTDPARIESLVKNCSQFVSFPIYTWKEKSRTFGGVD

SEQ ID NO: 76303 - protein, 277 aa, Zea mays
  Coding DNA Sequence Number=SeqID_34524
  Homolog annotation: Hit_ID=Q43638; Match level="QueryCoverage=25%, HitCoverage=9%, E-value=3e-26, Identity=76%"; Hit description=Heat -shock protein precursor
MHPLRLLLHLLPILLKQGFEAKQPYFSLFSSPYLVIWRCPYNTPLWYVWEAEADDSSYVIKEQTYPEKVLTRGTQTTLYLRDDDKYEFTDPARIESLVKSCSQFVSFPIYTWKEKSRTFGDEVAKSKQSTVSTKTKKFKEIQFQKLQRLPDGCHPDFDNDHLCSVNNHDLLPEMSTPSADLHLLPETGVENMRTPKSLHAELKRELLKLNTVLKLPFLEYLLNNHLVVREPRSILHAFNIALCWRAASFLKYTELDRRESLSLASDGLNYECNEAPS

SEQ ID NO: 76304 - protein, 67 aa, Zea mays
  Coding DNA Sequence Number=SeqID_34525
  Gene Ontology: Mol. function=translation elongation factor activity; Cellular component=cytoplasm; Biological process=translation
  Homolog annotation: Hit_ID=P94007; Match level="QueryCoverage=60%, HitCoverage=33%, E-value=9e-15, Identity=95%"; Hit description=EF-1 for elongation factor 1-alpha
MGKEKLHINIVVNGHVDSGKSTTTGHLIYKLGGIDKRVIERCIVTYELEFVCHNFGHWICKFVKYVM

SEQ ID NO: 76305 - protein, 283 aa, Zea mays
  Coding DNA Sequence Number=SeqID_34526
  Homolog annotation: Hit_ID=P94007; Match level="QueryCoverage=14%, HitCoverage=33%, E-value=1e-13, Identity=95%"; Hit description=EF-1 for elongation factor 1-alpha
MGKEKLHINIVVNGHVDSGKSTTTGHLIYKLGGIDKRVIESSLSWSCRGTLCSMIHAQNFPATSMGGILFELVGPIHISRDPGTISRPAASLQRCCASDTRTSHYLGLFTPLKGKHTDEVAKSKQSTVSTKTKKFKEIQFQKLQRLPDGCHPDFDNDHLCSVNNHDLLPEMSTLSADLHLLRETGVENMRTPKSLHAELKRELLKLNTVLKLPDNVLFLANQFLEYLLNNHLVVREPRSILHVFNIALCWRAASFLKYTELDRRESLALASDGLNYECNEAPS

SEQ ID NO: 76306 - protein, 92 aa, Zea mays
  Coding DNA Sequence Number=SeqID_34527
  Subcellular localization annotation: CTP_CleavageSite=75; ConfidenceScore=5.18e-01
MAEASFHVFDASWHPGARSEHAPQSCSPEFKNPPTHVDRPWFGRSRSRRRLPPPVLVARVAPTTSDTDPHIGVTVATSRTSLTTPPELYCRL

SEQ ID NO: 76307 - protein, 88 aa, Zea mays
  Coding DNA Sequence Number=SeqID_34528
MAEAIFHVFDASWHPGARSEHAPQSRSPEFKNPPAHVDRELPTTPAACARGQSSSDHLRHRPAHRRDRRNLPDVTDHPAGALLPPIAK

SEQ ID NO: 76308 - protein, 204 aa, Zea mays
  Coding DNA Sequence Number=SeqID_34529
MRLHILSGMKAEVILAFADICTHEEYMKCDITMLLLWFLPARGCCRNFIYGRRKCSSVAFRVVCGTRSVTTPTTDQGFECWPPEGFDSRLRTRRARDDSRYVQYMAKARATLPSTKLQRPDGRDTGQSSVRSRDTISPRPSPASGRNSRPRQIHASPEGLLKQTGHTSDSPEAPAWAGFAEKQPWPKIASPADRIAGAFNARIA

SEQ ID NO: 76309 - protein, 92 aa, Zea mays
  Coding DNA Sequence Number=SeqID_34530
MAGVGRSTRAGGDARRRRGVRPGHGEIEQLDESERFTGCQRRYGCKELDGDSPRYGARKSSLSPCSNPRQIQGFVASRARVPMPSSGTRQRG

SEQ ID NO: 76310 - protein, 182 aa, Zea mays
  Coding DNA Sequence Number=SeqID_34531
MTTVPIDSPFASRPHRLGIQCSTDPGCRRAVTALAGMLVGGEESGLVTARWSNWMGQRGSRDAREDMGARNRSETHWIARSTRGGGRPKSGEVDLGPPVKSGRVRGLGKLHGLLAELAEALACPEDGWGGLATMAEALAAMAGGIELAGAKGKWLAGEEIWSQEIRSVSLLKPEANPRFCRV

SEQ ID NO: 76311 - protein, 229 aa, Zea mays
  Coding DNA Sequence Number=SeqID_34532
  Subcellular localization annotation: CTP_CleavageSite=53; ConfidenceScore=5.58e-01
MDRHAVCRMASSPPAVCLIRNKCSAALPRGLTSGSARWLTSRVVGHVAASGLRLSGEQNRTRPCTGGSGTHPRGPGTPVEVLDLTQRSGPYVQGSGTFPWGSGPTVDILEVPTVALGPTSREDTSLYVGPKLDWRLECCFRALADRPQGGVVLARAVVRLLCTEEPVPKEDDSWAWAPMSDTGLLISAEVKRRTTAGGGSLLTRWFVFLALGDRCPRSMTRGPGPRVRG

SEQ ID NO: 76312 - protein, 76 aa, Zea mays
  Coding DNA Sequence Number=SeqID_34533
MAKPSHATPPDPLLRKQQPTRPSIPVAGMEAKSHHQPNQGGLTALAYNAPLTPAAAVQWPHLYPPYPEWEITSQDK

SEQ ID NO: 76313 - protein, 62 aa, Zea mays
  Coding DNA Sequence Number=SeqID_34534
MVSHSGYGGYKCGHCTTTVGVSEALYAKAVSPVLLPGNRWGRLMYLLDLVDGVTWPSSLPPG

SEQ ID NO: 76314 - protein, 146 aa, Zea mays
  Coding DNA Sequence Number=SeqID_34535
MSGRAERAHHTGAAPPGTALTGAAPEAGSQPPGQGAPRPRTGHVAGVGGPRALDLGAVKILGGRLGSWLLDFLLDSSLLGNEHILSVSEVAIGGEMALMRRPGRSGRLRRSRRGTGWCQRWLESAGPRAQAGEFVDGEYFGLLTAR

SEQ ID NO: 76315 - protein, 335 aa, Zea mays
  Coding DNA Sequence Number=SeqID_34536
MPKLTNQSKSDRARKSKLEKIAQAFEMAHQMLSMRVPIYMPSALQLGGPYMSLTFAILAKGREKWKYFYTGLEKNCRAHTPIKLKERLKRCNSEQTNFYPITHDENHQEKYETKIATSLAESMYSFPNKELSKRKSRSQLPSLPPRISPQPQLLKASPSFMHNKFIYATLLHLMIVGTLQGMVDDDFTTPINGGDTRFSSEYLSHEGFPSILWEVLSSIGYPTPPLYTVHLYEEHRVPRCRVWLALEAHPLQPGWRSFDSETIGFRANDTTEAAAMNTLTTFYGYHPLEMVMRPLGLFPAEKRDDPMWCNRVSHMKDVSAMHPDQVGRITTITFV

SEQ ID NO: 76316 - protein, 80 aa, Zea mays
  Coding DNA Sequence Number=SeqID_34537
MARVARTLLATDRLKGVVYSRVAWTCSCSGGSVGIVDIKHTLESLFLSRVRKRQTFVAFAPRWYQMRKNKTEVRGTRSST

SEQ ID NO: 76317 - protein, 98 aa, Zea mays
  Coding DNA Sequence Number=SeqID_34538
MARVARTLLATDRLKGVVYSRVARTCSCSGGSVGIVDIKHTLESLFLSRVRKRQIFVAFAPRWYQMRKNKTEVREDSVLHIGSFVYSLSGGVCASLGL

SEQ ID NO: 76318 - protein, 180 aa, Zea mays
  Coding DNA Sequence Number=SeqID_34539
MISNYKCTFGLEEYKCDVKANDRHRTQPVTNYNYALYKSLQHYVRPLWIKRSFYLYVGLQRRSSIKRNLRPFPGDDFSRSCFFTQDLRRNEAWPQHYGLILDMMIYLWHLRGLGLFPEYLSYFLSEEVVHIATTAQEKTKPWKETSRSSKITTRSRCGLAENPQSAACEGPIFTAFLLAL

SEQ ID NO: 76319 - protein, 76 aa, Zea mays
  Coding DNA Sequence Number=SeqID_34540
MGISSPQTERESRLMGKYFLSEEVVHIATTAQEKTKPWKETSRSSKITTRSRCGLAENPQSAACEGPIFTAFLLAL

SEQ ID NO: 76320 - protein, 42 aa, Zea mays
  Coding DNA Sequence Number=SeqID_34541
MAEPSAQSSPRHRFLAEGPPCAPGSLDAVPAQHVDVDAMAVI

SEQ ID NO: 76321 - protein, 160 aa, Zea mays
  Coding DNA Sequence Number=SeqID_34542
MAEPSAQSSPRHRFLAEGPPCAPGSLDAVPAQHVDVDAMAGKTRRSRLSSMWCSFPGPWYFSLCRLAVASAGVVGRPGLARPATCTTTTSPPSRNLRKSPNPVPNRVVMLVLWTYPHPRVHKRVVLAVRVRRHLPLALFRECRTHDPRTLVNHFAIIAHA

SEQ ID NO: 76322 - protein, 363 aa, Zea mays
  Coding DNA Sequence Number=SeqID_34543
MGGSEPGSFAEKDPFRAVITAKVKRRAFLLPEAPPTGAPVARRVGLGSQAGVSEVGEARPSGAVACRLHGCPPLLPVGLGGNGGSPVTAGRSCAPHAAVWLLLPWAGLHDMRDPAPESQGRALERVGEDSARGAWGRTNATPWELVPLSHRSASRIFITQPGRAPSPAVTREGDLQLDGGGKRAGLRPLPLPQPQGFSSPRLGRGECRVGVGPCVGGGPLLHSVMGGEAGIARGVRQLQRAWSSVASGFGATCGAGVCHDSWKGFFRRRGGRDRPRADLQPLRPSARPCLTSFGMGGGLLAAASTLRSALPLFGPPEQKSSSPLLEQESLGPFGLVVWGSSSLVEETPRPPFGGPRPGVAISV

SEQ ID NO: 76323 - protein, 434 aa, Zea mays
  Coding DNA Sequence Number=SeqID_34544
  Gene Ontology: Mol. function=oxidoreductase activity; Biological process=metabolic process
  Homolog annotation: Hit_ID=Q9FF83; Match level="QueryCoverage=55%, HitCoverage=67%, E-value=2e-40, Identity=41%"; Hit description =Arabidopsis thaliana genomic DNA, chromosome 5, P1 clone:MUG13
  Pfam annotation: Domain name=adh_short; Domain location=103-288; Score=-37.7; E_value=0.0017; Accession=PF00106.15; Description=short chain dehydrogenase
GGDGDPLRPTRKRRKGPLYKLKAAIQGWGSLRAAEVYGGEYQYQRAVEKAEEAILLVTFSQVTTQLGRYVITMMSSGVVLGVGFQLSGGDSQMNELIWYSWLGGVIIGTMIGANSVLEEHCKAGPRNVVITGSPESVLQTIKELEENIQEGLSVAKKKQRNILSHAKVVGTDCDVCKPEDVKELVNFAINELGSVDIWINNAGTNKGFRPLVTFSDDDITQIVSTNLVGSLLCTREAMNVMQYQEKGGHIFNMDGAGSGGSSTPLTAVYGSTKCGLKQFQGSLLNESRRSKVGVHTASPGMVLTDLLLSGSSLRNKQMFNLICELPETVARTLVPRMRVVKGSGKAINYLTPPRILLALVTAWVRRGRWFDDEGRAVYAAEADRIRNWAESRARFSFTDAMEMYTENTWVSVFSLSVVCAFIILSSSGGPLPGT

SEQ ID NO: 76324 - protein, 325 aa, Zea mays
  Coding DNA Sequence Number=SeqID_34545
  Gene Ontology: Mol. function=oxidoreductase activity; Cellular component=cytosol; Biological process=metabolic process
  Homolog annotation: Hit_ID=Q9FF83; Match level="QueryCoverage=70%, HitCoverage=64%, E-value=2e-40, Identity=42%"; Hit description =Arabidopsis thaliana genomic DNA, chromosome 5, P1 clone:MUG13
  Pfam annotation: Domain name=adh_short; Domain location=17-179; Score= -39.4; E_value=0.0022; Accession=PF00106.15; Description=short chain dehydrogenase
MIGANSVLEEHCKAGPRNVVITGSPESVLQTIKELEENIQEGLSVAKKKQRNILSHAKVVGTDCDVCKPEDVKELVNFAINELGSVDIWINNAGTNKGFRPLVTFSDDDITQIVSTNLVGSLLCTREAMNVMQYQEKGGHIFNMDGAGSGGSSTPLTAVYGSTKCGLKQFQGSLLNESRRSKVGVHTASPGMVLTDLLLSGSSLRNKQMFNLICELPETVARTLVPRMRVVKGSGKAINYLTPPRILLALVTAWVRRGRWFDDEGRAVYAAEADRIRNWAESRARFSFTDAMEMYTENTWVSVFSLSVVCAFIILSSSGGPLPGT

SEQ ID NO: 76325 - protein, 157 aa, Zea mays
  Coding DNA Sequence Number=SeqID_34546
MQYKESSSLISYEKQTIRIEFYPCKGGPRDAREDMSARNWAGTHWIARSTRGGGRPKSGEVDLGPPVKSGRVRGLGELHGLLAELAEALAWLEGGWSGLATVAEALAAMAGGIKLAGAKERWLAGEGECGAKREIWSQEIWSVSLPKPEANPRFCRV

SEQ ID NO: 76326 - protein, 150 aa, Zea mays
  Coding DNA Sequence Number=SeqID_34547
MESTFLMHTVRAQLCDIGIQLSVEEAEKAGRDAKGKKYWCSPDANRAPTGGHRADDAQGRASCPGGLSCGKCAYGCMRLLSRVRPAFLYTSNTNAPKNLVFLLDHRSMYTMFANVIDSSQVRVQRGGSSRSAARSSHHSTQDPVEVEQLR

SEQ ID NO: 76327 - protein, 236 aa, Zea mays
  Coding DNA Sequence Number=SeqID_34548
MVLEATRVANEDLERLERLAARELQWEPANLRDHLFSPTVFATCSTTSSPPPASSYTMFANVIDLSQVRVQRGGSSRSAARSSHRSTQDPTEVEQLREEVRRHQDYLRQQAAQHEYYATQIQHHQTLIQQLAQAQGIHILVPPPPVHYPWSSPPSIEHQQYHLYMYIRPLQLPCQRKRDDVLDFVEALFAVELTILVRQWGYRAKIDPVLVLNAKGGENKAIAKGSATTCEIFEKE

SEQ ID NO: 76328 - protein, 114 aa, Zea mays
  Coding DNA Sequence Number=SeqID_34549
WLLSPVLKWWPPLVRLPTAAVVASADETVSATCAPDLWLFGFNGWFSSPPSETEVVVALLVQWSPASHLEFVIPQAFRSGQLPRALPTSKSRYHCYPKITYPSVSYLSRKVTSE

SEQ ID NO: 76329 - protein, 112 aa, Zea mays
  Coding DNA Sequence Number=SeqID_34550
  Homolog annotation: Hit_ID=Q7XDE0; Match level="QueryCoverage=42%, HitCoverage=9%, E-value=2e-09, Identity=63%"; Hit description=EF hand family protein, expressed
MELKYNKTGRENDCLPRVGHWNMMNKGPTKRDAIALDPELLQLVELAPGVLCENSIADVLYSHWLVLPETTKLLGSIAIGLKTKDGVVLAIEKRVTSPLLVLSHFLSGHGVK

SEQ ID NO: 76330 - protein, 189 aa, Zea mays
  Coding DNA Sequence Number=SeqID_34551
  Homolog annotation: Hit_ID=Q6K972; Match level="QueryCoverage=25%, HitCoverage=3%, E-value=2e-07, Identity=73%"; Hit description=AGO1 homologous protein
MGLSLPPSLALRTAPSATALLAAWLAPCAGEWRQGESRSHRWTAIPLSRTHFHKNPLGIRELTHGSSLLQTESGESCELAPGLLSIIARNPGTEESVLLIKEPNVGFNPGKNFTCSSVFYILLMMKLKYNKTGRENDCLPRVGHWNMMNKLGSTAIGLKTKDGVVLAIEKRVTSPLLVLSHFVSGYSVK

SEQ ID NO: 76331 - protein, 163 aa, Zea mays
  Coding DNA Sequence Number=SeqID_34552
MARAGAYKAPRDLDCTPPHALDLTGAQTHRCLPVHGVSAAARSPCHRRPASRTLPNAVRPSKKTEHTSVKHPERGIGVCFAGEASPWSPDSTRPPASVDRVKENRKDCNLADGEYVLVPEQGAAQEVAPDPAPEPAPEDLPATALEGKPRFMHNLLFMLFYYT

SEQ ID NO: 76332 - protein, 90 aa, Zea mays
  Coding DNA Sequence Number=SeqID_34553
MAHAYKTPRDFDRTPPHSLDLTGAQTHRRLPVHDCNLADGEYVLVPEQGAAQEVASDPAPEPAPEDLPATALEGKPRFMHNLLFMLFYYT

SEQ ID NO: 76333 - protein, 258 aa, Zea mays
  Coding DNA Sequence Number=SeqID_34554
  Homolog annotation: Hit_ID=Q5VQ77; Match level="QueryCoverage=17%, HitCoverage=13%, E-value=1e-14, Identity=84%"; Hit description =Coatomer protein complex, beta prime subunit-like
MIPSRASRRPPPPPASARPPAQPGNPHRDLSAIHPPASRMPHQALGDTAIYPSPTYLPTSSIDIHATVAKAAELHAALLQGGSAAASIVGAYASARRSLALICLQPAASWVPTITRSGLLAMAIVDYPVFALINPKAAESLADPSEYPNLFEDWQVALTVEKSVASQRGNYLPADQYDARVPLDTVFTASVMKIMNHQKCWQMNAGAPCVQLPCSMGFMPSFFCCFRSTCRGITSKMKLPPFHVEAHTLSIRNTTCIR

SEQ ID NO: 76334 - protein, 72 aa, Zea mays
  Coding DNA Sequence Number=SeqID_34555
  Homolog annotation: Hit_ID=Q9FJB4; Match level="QueryCoverage=76%, HitCoverage=14%, E-value=1e-15, Identity=68%"; Hit description =Arabidopsis thaliana genomic DNA, chromosome 5, P1 clone:MOK9
MALTVPIFLSYRMHVVFLILKVCASTWNGGSFILEVMPRQVERKQQKKLGMKPIEQGSWTQGAPAFICQHFW

SEQ ID NO: 76335 - protein, 128 aa, Zea mays
  Coding DNA Sequence Number=SeqID_34556
  Homolog annotation: Hit_ID=Q9FJB4; Match level="QueryCoverage=75%, HitCoverage=25%, E-value=8e-34, Identity=72%"; Hit description =Arabidopsis thaliana genomic DNA, chromosome 5, P1 clone:MOK9
MKKHKTQCLSYERFVRELSKKAQKANNIWWRLSGLLGDRNRQVMYILLQALFTVATMALTVPIFLSYRMHVVFLILKVCASTWNGGSFILEVMPRQVERKQQKKLGMKPIEQGSWTQGAPAFICQHFW

SEQ ID NO: 76336 - protein, 238 aa, Zea mays
  Coding DNA Sequence Number=SeqID_34557
  Homolog annotation: Hit_ID=O23372; Match level="QueryCoverage=81%, HitCoverage=8%, E-value=5e-39, Identity=43%"; Hit description =Probable histone-lysine N-methyltransferase ATXR3
MYAMLMSCQLIGVTWFPVLKDFTHPDQYNFGVNQGSSSFHELHPQFAGYTRGKLHELVMKYFKSRELTLAINEVLDPWISAKQPKKEFEAYFSHNSASRNFLPEDGGSAKRARLLPDQSDENIHLSQDIIASRKEDICFEELCDGASSVDNDSVNPRAGNASWGLLNDHLLARIFHFMRADLKSLISSAATCKSWNAAAKYYRNMCRFIDLSSVGPLCTDSVFCDIMMQYRSVFWGTG

SEQ ID NO: 76337 - protein, 2248 aa, Zea mays
  Coding DNA Sequence Number=SeqID_34558
  Gene Ontology: Mol. function=histone-lysine N-methyltransferase activity; Cellular component=nucleus; Biological process=chromatin modification
  Homolog annotation: Hit_ID=O23372; Match level="QueryCoverage=74%, HitCoverage=71%, E-value=0.0, Identity=45%"; Hit description =Probable histone-lysine N-methyltransferase ATXR3
  Pfam annotation: Domain name=SET; Domain location=1666-1829; Score =59.2; E_value=1.3e-14; Accession=PF00856.18; Description=SET domain
MPDKGEKAHGHHHQQQHWKNQQSASATDLEEGELLSGEAETNGLPERSMPPKKWRKVLAASAAAVEVEPGEIVSTKQAVPLKKARRNGEVDKVELLPERQRKVKSSGKSTRKSIKDDMEPGEIAPPEKRRDAKSQRADDNSRRPSSSAQKSSLRDSDEEPGEIKPESSTSGSLRKNQPTEPHSINHKHHTDTSDQSGSKSHRKGPKGEGKRSAARHLSGRNREISSPTRDRRDRHERSPGILGRFPHERSRHDRYDRSPSRLERSPHRERARHYESRDHSPYVSPRHRARQPHFRDNTPSRVDNFPRGRVQREDVRDRSPFLHDRSPSERFRPTDTHEASKKSRSGNNSEKSQHKSKSAKQSSKTKSGSNEKNEKISNEKPTESSKYTELPPPPPLPLPPPPPPPPPPPPLPPAVPPPLPPPPEPEPTGVLAEDMIEDMDICDTPPHTSAAPEPTDPIYDIGRWFYLDHFGIEQGPSKLAVLKKLVEDGYLLSDHLIKHADSNRWVTVENAASPLVPSDFPSFYSDTSTQMVNPPEAPGNLLDEALEEASNLASGSEDKQMVEASAEDSEEFYINDRVEALMDGSILVHGQELEIIGELLGADFQPADWQRLSHPEDFTRFHVHIEGDDEIIGGTEFLENRTTDAYGLVSVDNFHHYVESSEWFSGRWSCKGGDWRRNDELGQDTPFRKKLVLNEGYPLCQIPKGSYEDPRRPCKDELYYPVRGKKHDLPLWAFSSTEEDIDGVNDTTKNTVVPGRPGQTRQPPSEVKVMLQVVSINYHVIKDQSSVEPRTKPRGTDRPPSRSSRSHSIGAERSSIHDGSSHFRKHHDHDSQSFHKSKSVPNIPKDHVCTVDELSVNRGDWYYLDGTGHDQGPFSYSELQELVKKDTIIEQSSVFRKIDNTWFPVLKDLKPGSSVPSAAPSSNLIAAFTHPDQYNFGVNQGSSSFHELHPQFAGYTRGKLHELVMKYFKSRELTLAINEVLDPWISAKQPKKEFEAYFSHNSASRNFLPEDGGSAKRARLLPDQSDENIHLSEDIIASRKEDICFEELCDGASSVDNDSVNPRAGNASWGLLNDHLLARIFHFMRADLKSLISSAATCKSWNAAAKYYRNMCRFIDLSSVGPLCTDSVFCDIMAGFEKQNIRTLILAGCSNLSSHALGRVLEHLPQISYVHIQGCSHLGDLKNKFQHVKWIRSSLNPEGSYRKMKTLKQIGDGNNYASKVARNFDQLDDSDELDGYFADISKIEGASLFSFGQGFYKRSKLLDARKSSAVLSRDAEMRRLMQRQAENSYRKMEEFVINRLREIMRCNRFDFFIPKVSKIEGRLKNGYYARHGFRTIKHDIRTMCQDALRYKDGNDLDDVKQIVVSFIQLAKRLGNPRYISERNGAAAQDSLDISQYSFDTKLKKKQNKTRANLVAAGADNSSRAFDLEIKRSLSKLKKKDVCSGSETSDDDGYSEGDETESETTVSDTESDFDVNSGAWDLKGNCLKLTEHGESVIDDRILGARMTKASLVPPVTRKYEVIEEYLIVADVEEVQRKMRVSLPDDYSEKLLSQKNGTENLELPEVKDYQPRKVAGDEILEQEVYGIDPYTHNLLSDIMPSDLELSPTDKHIFIEELLLNALNKQVRHFTGLGNTPMTYNIRPVIEEIQRSAEDSGDRRTLKMCLGMLKSMRNRSDQNFVAYRKGLGVVCNKKGGFGVDDFVVEFFGEVYPSWRWYEKQDGIKHIQNNSEDQAPEFYNIMLERPKGDRHGYDLVFVDAMHKANYASRICHSCNPNCEAKKKRIYTYDYAKADMRAIVTAVDGKYQIGVYTLRPIAEGEEITFDYNSVTESKEEHEASVCLCGSQVCRGSYLNFSGEGAFEKVLMEFHGVLDRHSLLLQACETDSVSQQDLIDLGRAGLGTCLLAGLPVWLVAYTAHLVRFIYLERQKLPDEILRHNVDEKRQFLIEINMDSEKNDAEVQAEGVLNSRLQQIVHTLDKVRYVMRCIFGDPKNAPPPMVRLSGKSLVSAIWKGDSSIVAELLQSMEPHVEEEVLSDLKAKICAHDPSDSEDIEGGIRNSLLWLRDELRTLPCTYKCRHDAAADLIHLYAYTKCFFRVRDYKTVKSPPVHISPLDLGPKYADKLGPGFQEYCKTYPENYCLAQLIYWYSQNSEPESRLTRARKGCMSLPDVSSFYVKSLKPLQERVYGNRTVRFMLSRMEKQAQRPWPKDRIWVFKSDPRYFGSPMMDAVLNNSPLDKEMVHWLKTRPNVFLG

SEQ ID NO: 76338 - protein, 151 aa, Zea mays
  Coding DNA Sequence Number=SeqID_34559
MGKNMKGLGSPRHSDDKRKHELSPSSEDFGDSEYLEEEFSSESEGSPVYASPPASSDDSDDSQGIAAEVWTYIRSVERAGLEGSDESEVSSDKENSSDSSEEGSDGDGGDGDGGGDDGGKGGVGDDGGKDDSGDGKASGKAPLGLNISIDN

SEQ ID NO: 76339 - protein, 144 aa, Zea mays
  Coding DNA Sequence Number=SeqID_34560
MGKNMKGLGSPRHSDDKRKHELSPSSEDFGDSEYLEEEFSSESEGSPVYASPPASSDDSDDSQGIAAEVWTYIRSVERAGLEGSDESEVSSDKENSSDSSEEGSDGDGGDGDGGGDDGGKGGVGDDGGKDDSGDGKASGKAPLA

SEQ ID NO: 76340 - protein, 511 aa, Zea mays
  Coding DNA Sequence Number=SeqID_34561
  Homolog annotation: Hit_ID=Q84J55; Match level="QueryCoverage=48%, HitCoverage=62%, E-value=5e-22, Identity=73%"; Hit description=14-3 -3-like protein GF14-A
  Pfam annotation: Domain name=14-3-3; Domain location=185-479; Score =59.8; E_value=8.8e-15; Accession=PF00244.10; Description=14-3-3 protein
  Pfam annotation: Domain name=PHD; Domain location=142-187; Score= -2.1; E_value=0.092; Accession=PF00628.19; Description=PHD-finger
  Pfam annotation: Domain name=zf-C3HC4; Domain location=143-184; Score= 39.2; E_value=1.4e-08; Accession=PF00097.15; Description=Zinc finger, C3HC4 type (RING finger)
  Pfam annotation: Domain name=zf-RING-like; Domain location=143-184; Score=9.0; E_value=0.015; Accession=PF08746.1; Description=RING-like domain
  Pfam module annotation: Pfam domain module=14-3-3::PHD::zf-C3HC4::zf -RING-like; Domain location=185-479::142-187::143-184::143-184
  Subcellular localization annotation: CTP_CleavageSite=4; ConfidenceScore=5.12e-01
MSIPSMSSSSPSVGSPLPPARDGGPGPFVWRQKEQPQPQPQPQHPDYSFTGRVLLTAVVILAILTVVFVLIRLLLYQFVARGRGRLAVGVRRSFGSFARRSARHGLAASALAALPVATYRVRGADDDGPSSASDGAGTGTADCAVCLSELADGEKVRALPGCSHVFHVDCIDAWLRSRTTCPVCRAEVRPKATADTRPSPPPALIDAAGGTLVVTVVGGAAETGDAHRTSVLGSGQPAGAVGSSWSSLPAAARGYRARVEAELSGICTGILRLLDGRLVPAAAAVDARVFYLKMEDYHCYLAEFKTGAERKDAYSPRLLQSPHTLSLRKASRRAGNQPTNPTRLPLPRRCRRAPRRGFPVAMESAHKIGGGSVPGAGAGGEGVLCHACGYQYPNGHPSAKQRRAHRKHCGKPASAAAAAEGSGEREASELLLGLWFQAFDEAISELDSLGEESYKDSTLIMQLLRDNLTLWTSDMQYVSDANHAMYQEDGGDEMRDQYRIIYMYRNIQFVR

SEQ ID NO: 76341 - protein, 574 aa, Zea mays
  Coding DNA Sequence Number=SeqID_34562
  Gene Ontology: Mol. function=protein domain specific binding; Cellular component=nucleus; Biological process=intracellular signaling cascade
  Homolog annotation: Hit_ID=Q84J55; Match level="QueryCoverage=53%, HitCoverage=62%, E-value=2e-30, Identity=76%"; Hit description=14-3 -3-like protein GF14-A
  Pfam annotation: Domain name=14-3-3; Domain location=295-542; Score =0.4; E_value=0.0011; Accession=PF00244.10; Description=14-3-3 protein
  Pfam annotation: Domain name=PHD; Domain location=142-187; Score= -2.1; E_value=0.092; Accession=PF00628.19; Description=PHD-finger
  Pfam annotation: Domain name=zf-C3HC4; Domain location=143-184; Score= 39.2; E_value=1.4e-08; Accession=PF00097.15; Description=Zinc finger, C3HC4 type (RING finger)
  Pfam annotation: Domain name=zf-RING-like; Domain location=143-184; Score=9.0; E_value=0.015; Accession=PF08746.1; Description=RING-like domain
  Pfam module annotation: Pfam domain module=14-3-3::PHD::zf-C3HC4::zf -RING-like; Domain location=295-542::142-187::143-184::143-184
  Subcellular localization annotation: CTP_CleavageSite=4; ConfidenceScore=5.12e-01
MSIPSMSSSSPSVGSPLPPARDGGPGPFVWRQKEQPQPQPQPQHPDYSFTGRVLLTAVVILAILTVVFVLIRLLLYQFVARGRGRLAVGVRRSFGSFARRSARHGLAASALAALPVATYRVRGADDDGPSSASDGAGTGTADCAVCLSELADGEKVRALPGCSHVFHVDCIDAWLRSRTTCPVCRAEVRPKATADTRPSPPPALIDAAGGTLVVTVVGGAAETGDAHRTSVLGSGQPAGAVGSSWSSLPAAARGYRARVEAELSGICTGILRLLDGRLVPAAAAVDARVFYLKMEDYHCYLAEFKTGAERKDAYSPRLLQSPHTLSLRKASRRAGNQPTNPTRLPLPRRCRRAPRRGFPRRHGERPQDRRRERARSGSRRGGRPVPRVRVPVPERAPERQAAARAPEALRQAGVRRGGGGGLRGARSQRAASRYRGFRASVKELPRCRPHIPSGSPSPSTSLSSTTRSSARRTVPARWPNRFPFSPSPGDLRDDMLFYDWAFDEAISELDSLGEESYKDSTLIMQLLRDNLTLWTSDMQYVSDANHAMYQEDGGDEMRDQYRIIYMYRNIQFVR

SEQ ID NO: 76342 - protein, 91 aa, Zea mays
  Coding DNA Sequence Number=SeqID_34563
  Gene Ontology: Mol. function=protein domain specific binding; Cellular component=nucleus; Biological process=intracellular signaling cascade
  Homolog annotation: Hit_ID=Q84J55; Match level="QueryCoverage=65%, HitCoverage=18%, E-value=2e-16, Identity=75%"; Hit description=14-3 -3-like protein GF14-A
MGTGTNSGRQDERLWFQAFDEVISELDSLGEESYKDSTLIMQLFRDNLTLWTSDMQYVSDANHAVYQEDGGDEMRDQYMIIYMYRNIQSVR

SEQ ID NO: 76343 - protein, 195 aa, Zea mays
  Coding DNA Sequence Number=SeqID_34564
  Subcellular localization annotation: CTP_CleavageSite=93; ConfidenceScore=5.33e-01
MSSSSLKRRVFPSSKPPDGGYPPPFRLLVGGTQLHGSGYLSAIIQLQGFSSRSLATPRHRRSPKMVTSSSTVGKAGQAAASTPPLASRIFVIQAKMEDEASRGAAPAWVGCPFLPPAPGGLPPRRGVVRTCGGGNRSSVGSGISNASVLRSLRLSGPEHESLGPFGLVVWGSSSLVKETPRPPFGGPRPGVAISV

SEQ ID NO: 76344 - protein, 558 aa, Zea mays
  Coding DNA Sequence Number=SeqID_34565
  Gene Ontology: Mol. function=nucleic acid binding
  Homolog annotation: Hit_ID=Q1SM16; Match level="QueryCoverage=81%, HitCoverage=97%, E-value=1e-100, Identity=43%"; Hit description =Single-stranded nucleic acid binding R3H
MEPAAEDAAAAAPDSWETADIDGPMSRLILSARRVSSSPDFADDQDPPQPPPTLQPQGAPSAPSDAREDVVAQVDQFLREALEKPRERLSVLRMEQEILKFIHDPSRTEYEFNGLPTSYLRLAAHRLAQHYFLQSIAIPDNSLPDGTGSRIILRKTTFDCRLPAVRLADIPVNLPQEDISVAKVAIKQRPQKNLHGMNSSSAHSSRDNLQKSVEERKEEYNKARARIFNNSNSSTATDERSAEEVTLPSTLHRSTSLELNSSNRIGQGAEITLERSLTTTSASSRSNRSKIDKEPAVNRNKQNNRVAIFRDRESERKDPDYDRSYDRYMQRFDPGFGFSGGPYTIQPLYAPAVNYNTEFPQLGSAHRSPVAVEQQPRPIAQHMPASWSVAQASNAIGYGPDGVMGPYSPGAPVRSSVFMHASQQYAIPSRPGVPFAHPQESMGPFAQIFLLVQTHQQQPDASLRFARPRERVIGKGKDWDGPVCEQATGMWAYLLQKCLVLEQSDGVMILDLCVYAMDVFYLNRKNGFGSSKEVASSREPEPKPFLEKPEPCQRDPYT

SEQ ID NO: 76345 - protein, 159 aa, Zea mays
  Coding DNA Sequence Number=SeqID_34566
MTGKEREIPGSLVVMIPEATAGHIHQGEVLGIMIDLGVMNAVIGTRSKEASLKFRNGFSSSKEVASPREPEPKPFLEKPEPCQKGPKGPLNGFGSSKEVASPREPEPKPFLEKPEPCQKGPKGPLNGFGSSKEVASPREPEPKPFLEKPEPCQKGLAPL

SEQ ID NO: 76346 - protein, 143 aa, Zea mays
  Coding DNA Sequence Number=SeqID_34567
MGARIRRADIKTLINRLKIPARDARRNPRYDSEWPGLDHPPPSRRNPKDTLRRVRDYPQWRPALGFTGPSCDIISYDADVGGEEDAPRRRYGFISWRRWRPIDHVRVRRSRHATAMRGKPVAKDWLTARSRKAADVDVLTRGN

SEQ ID NO: 76347 - protein, 208 aa, Zea mays
  Coding DNA Sequence Number=SeqID_34568
  Homolog annotation: Hit_ID=Q6QP51; Match level="QueryCoverage=62%, HitCoverage=56%, E-value=1e-23, Identity=60%"; Hit description =Putative growth-regulating factor 1
MAVACRDLRTLTWSIGRHLRHDIKPYLRLGASSSPPTSASYEIMSHEGPVKPSAGRHCGHFALPLTDLAGKQRRPLRSDCCATRQSEAGNNQVQPQAQQEAPPHPTLGLGLNLDLRRRALPRPTPRLGLSLGLRGWSPPRPTPGLGLNLDLGRNRVLARPWPWPQEESPPRPTLGSDRPRHEGYIITPALASSGYRGTRPASHPGSPR

SEQ ID NO: 76348 - protein, 76 aa, Zea mays
  Coding DNA Sequence Number=SeqID_34569
MGSRHSACSAEAECRGSFVLLSLVTLLRGEVAFGAIYAQVSSDSDQSHCMKKHKEHEGTSFMTFVLDSLYPKGNND

SEQ ID NO: 76349 - protein, 71 aa, Zea mays
  Coding DNA Sequence Number=SeqID_34570
MGSRHSACSAEAECRGSFVLLSLVTLLRGEVAFGAIYAQVSSDSDQSHCMKKHKEHEGWRRAEAVCRRASK

SEQ ID NO: 76350 - protein, 109 aa, Zea mays
  Coding DNA Sequence Number=SeqID_34571
MKLWKETSRSSKITTSSRCGLAATPSRLPVKAAVIYVSFPHFDLLWLDLDTLHESQSSPSYPPALLSVRFAVPWPDSPATWRDYTTACARSRSVDDRSSRALPSRSTRR

SEQ ID NO: 76351 - protein, 56 aa, Zea mays
  Coding DNA Sequence Number=SeqID_34572
RAQGYERPRELQRLVVLDQRYFGTGGYEIDDSGYDYGAGEDEVEGDFQEFQDYDEF

SEQ ID NO: 76352 - protein, 155 aa, Zea mays
  Coding DNA Sequence Number=SeqID_34573
MQLAAQVGDGARCATRERELLLKHGREGALGKLLLPALNRIGGKLGVCCWRWSAGAEGPAPMEQGGAPREVPAARQKGAPAMERKGAVLPVAGVGNPGRKMAPAAARGKPGRRAPWGAAASPGHGPHRGRSKKLQRAREKGSLLQPLSRRSREDA

SEQ ID NO: 76353 - protein, 104 aa, Zea mays
  Coding DNA Sequence Number=SeqID_34574
MGMAACCRAAGGRRGGRHGELLCRQDMDLAEVDPRSSSAQGRKAPCCSRSPGGAGRTLDLQQRGAASGTGSLSSSMGKGRPRHGWKWSCRGEEEGGMGEMADGG

SEQ ID NO: 76354 - protein, 130 aa, Zea mays
  Coding DNA Sequence Number=SeqID_34575
MKDAKPAKTLMGIDGHLDLNKGENDLVEEPEELTGEAPEQQLVGGNENDGFGIDSGDGKWYSFRLERMARLRHTARKSVIPFLPSRLAERPLRRPVTGQSSHLERLHVHLHEKQERRRQEQEQQGSSFSL

SEQ ID NO: 76355 - protein, 473 aa, Zea mays
  Coding DNA Sequence Number=SeqID_34576
MPEHTARELHSSTRSWSSELYGADCFAVKTAVATRTTSPHHNTTTARLVPAIAEQREQGEVLEFEAGGPYRGAHGPKSFDGADSCNAQNLGGLEGNRRSLDPQRCGCMYVCARIENDLVEEPEELTGEAPEQQLMARHRHTARKSVIPFLPSRLAERLLRRLVTGQSSHLERLHHRLHEEQERLRQEQEQQGSSFSLQQEIESVRSCSPVLPLEAPPAPPLSAPAPGVAAGGNPDDGGGDSSSSHDTDFSADQELEGWVARSITCDATRRCHFHDALDTLLRRALDGRTWFIEYRCVVFQHRRGVYPDRWEATCLVHRPESSLLGAEVCSEHYSISERDSAEAAMQDVARRALSHYCSVLGGVADGLNLKYYPRRPSGSTGGVIVSPVGEDNPRLSSTVNLAVVLNMELDHALDELSRARAEIAQLRAERTERRHLDDGSPAPIGTQHPYRSPRRGHQSYGNPDCKTKINLEP

SEQ ID NO: 76356 - protein, 144 aa, Zea mays
  Coding DNA Sequence Number=SeqID_34577
MTVGGAEVSLDISVEDYLMGGVAIFDAHTRRGPAIAESGQLAIVPAGPVVAAAGMKGSTQDLWSRFCASGEIASSAAAKDVAGSVAQQLKHVRDEVLKLYDRMWGPHGRDTVRERSERALEQMVNDEEIDDFRGLESSVTRRKM

SEQ ID NO: 76357 - protein, 215 aa, Zea mays
  Coding DNA Sequence Number=SeqID_34578
MVQVLRQRRNCFDRRRYGHGWLSCTAAEAFFMTGGRLRRAHCIGGPDLRVHCRKEELELLPAIVMGVMSFASLITSEGAANALSHEGCRHFEVFDRSDEDFDRGIFQVEDEVLKRSAGALYDGMWGPHRRETVWERSDRAMEQLANDEEVDDFGGLESTEPLAEDARAGEQPVPPTGAGEDPVAAAAPSSEGTSVVSAPAAEDPAAPAAPSQVAG

SEQ ID NO: 76358 - protein, 95 aa, Zea mays
  Coding DNA Sequence Number=SeqID_34579
MEKKLSAEILGAIQGASTVGRLATGLLFVDSRGRHHGNLLLRQGARREHAGRWRRHGRGRAELLLSHGREGALGKLLLPALAARWRKKKAGKSGG

SEQ ID NO: 76359 - protein, 70 aa, Zea mays
  Coding DNA Sequence Number=SeqID_34580
MEKKLSAEILGAIQGASTVGRLATGLLFVDSRGRHHELLLSHGREGALGKLLLPALAARWRKKKAGKSGG

SEQ ID NO: 76360 - protein, 241 aa, Zea mays
  Coding DNA Sequence Number=SeqID_34581
MTENNVNAESNKERRGLTGVNDDDDGAAQKQQTTDGHHGVLLTAQQNSKPAARGAVGAAAHFVEHPAHIGRSKGRGSAQGCRFLDRSAGLLFSSTPWKLQRGTRRGGWDSRRGVVLLALMAAAGRRQEVILGAVAAGQSWSSAATEGRLAMEKKLSAEILGAIQGASTVGRLAAGLLFVDSRGRHHGNLLLRQGARREHAGRWRRHGRGRAELLLSHGREGALGKLLLAGGRRRQGKGSGG

SEQ ID NO: 76361 - protein, 656 aa, Zea mays
  Coding DNA Sequence Number=SeqID_34582
MRGPGGKDVFARAPGVFGSDAEGYRGIARELHKKRQAVVRLVEARPKKAAGVCEGCGSRRRQARRWRRSRASLHLAKRRRQRQAPEATAGAGGSKSTKAVPPSSRVPEVAKVARALPSAGKRVADFATDISVDDYLGGSDEGQLAIVAPAAATTTAAVVPEAKGGALSAGGEMSALTAVRDEAGAASRRLKEVTEALSQVAEFANRTASGALTAAVSAEVERLRTQHADAVREKSAADSKCRKLADKVAALEGEKADLRRQLAGERRETNEALVKAQAAQAEANLARAEGNLARERAEQLQERLIALESRVERAEAATRAEAERTCKQLMDTYHELGARTGDFEVPDREPRLRCLEWVQEELQALPTVVGGFMSYASLVTCEGAMNALSREGCRHFEVFDQADEDFERDIYKVEDPIVKESAGAIYDRMWGPHGREVVRERAETARAQAARGERVDDFGALNSALPDPEPTPAEAVSGAALEPPPTTAESAPDTSASAAAGGDLPPETAKGAPDAPATAAPSAEDPAMVAAEATAEATAEATAEATAKAPQVQDFGPAHATATTKFLAASTADGGNECGGSASEFSDFADSGSSVEWTEESSEEDLDYFAALDVAAAEASSHAADTEDVAGPSTGRRRRRAVAKRRVSGAEGVSFV

SEQ ID NO: 76362 - protein, 429 aa, Zea mays
  Coding DNA Sequence Number=SeqID_34583
  Gene Ontology: Mol. function=oxidoreductase activity, acting on paired donors, with oxidation of a pair of donors resulting in the reduction of molecular oxygen to two molecules of water; Cellular component=membrane; ...
  Gene Ontology: Cellular component=Biological process=fatty acid biosynthetic process
  Homolog annotation: Hit_ID=Q1T6Y2; Match level="QueryCoverage=82%, HitCoverage=100%, E-value=0.0, Identity=86%"; Hit description=Delta -12 fatty acid desaturase
  Pfam annotation: Domain name=FA_desaturase; Domain location=168-389; Score=290.5; E_value=3.1e-84; Accession=PF00487.14; Description =Fatty acid desaturase
  Subcellular localization annotation: CTP_CleavageSite=71; ConfidenceScore=5.69e-01
MAKRAGPARPGPGPVKPGQNRAGPAVPAGLSFCPSPARSGPKRAGPARLARKNGPKSGLNGPRTTSFVSVRSKMGAGGRMTEKEREKQEQLARATGGAAMQRSPVEKPPFTLGQIKKAIPPHCFERSVLKSFSYVVHDLVIAAALLYFALAIIPALPSPLRYAAWPLYWIAQGCVCTGVWVIAHECGHHAFSDYSLLDDVVGLVLHSSLMVPYFSWKYSHRRHHSNTGSLERDELTLGWPLYLATNASGRPYPRFACHFDPYGPIYNDRERAQIFVSDAGVVAVAFGLYKLAAAFGVWWVVRVYAVPLLIVNAWLVLITYLQHTHPSLPHYDSSEWDWLRGALATMDRDYGILNRVFHNITDTHVAHHLFSTMPHYHAMEATKAIRPILGDYYHFDPTPVAKATWREARECIYVEPEDRKGVFWYNKKF

SEQ ID NO: 76363 - protein, 338 aa, Zea mays
  Coding DNA Sequence Number=SeqID_34584
  Subcellular localization annotation: CTP_CleavageSite=68; ConfidenceScore=5.46e-01
MSPRSLMRRAFPPSKPPDGGNPPSFRLIVGGTQLRGSWYLSAIVRLQGFSSCSPAAPLHRRSPKVVTSSLMVGESEPGCGLCPSLSLKDFHHQGWGGECAELSVPGFRTRVASGPLAAPASATAAGRGSSAGVIAKAGHGPPSNSTAFCPSLPYEFWHGRGTPGSNIRPEVSAAAVRPPGAEVVVVAAAGAGDGAPFVGLPLLRRPSPMEWGYSSVDYLNRFTKHESPRVKVTSEPGCPLAGPTSELISRGLGLGWRPWKTVGRGPRGNRPSRLLGLDSRRSPWQRLPGRGDDVVLRDGQTGRPARPGPGPVKPGQKPGRACCASVPKFLSKPGPQRA

SEQ ID NO: 76364 - protein, 192 aa, Zea mays
  Coding DNA Sequence Number=SeqID_34585
  Subcellular localization annotation: CTP_CleavageSite=59; ConfidenceScore=5.55e-01
MNSRLPKRSSVPGWRGCWRLPIWSLTGSCSSTRSTSPTWRANCRRFDPGGSLDRRGGCACSRGFQAFARERESLLVSPSSHAATFSYDDPGPSFYRCKEKAQAILALNAPAIRSVGEAIWPKVASMRSLPELGLGRVEACADGVYQPSLGVLGAGKGSRLVGKVYNLYRVLKTGGDAGSMDDFEEFQEYDEF

SEQ ID NO: 76365 - protein, 66 aa, Zea mays
  Coding DNA Sequence Number=SeqID_34586
MKTNDPGHAQLCQYCTAVVGLDSAELRTVVDKPTQAADWGFATKKELELVIFLELLEISHVASITS

SEQ ID NO: 76366 - protein, 277 aa, Zea mays
  Coding DNA Sequence Number=SeqID_34587
  Homolog annotation: Hit_ID=Q6KAC4; Match level="QueryCoverage=92%, HitCoverage=66%, E-value=1e-65, Identity=67%"; Hit description =Putative X1
  Pfam annotation: Domain name=XS; Domain location=114-209; Score=33.9; E_value=2.6e-09; Accession=PF03468.5; Description=XS domain
  Pfam annotation: Domain name=zf-XS; Domain location=43-83; Score =85.0; E_value=2.3e-22; Accession=PF03470.5; Description=XS zinc finger domain
  Pfam module annotation: Pfam domain module=XS::zf-XS; Domain location= 114-209::43-83
MDCSSDESSELSETDIDDYADKSYSDLKSGKFVARLGSDRFRCPFCPGKKKQDYRYSELLQHAVGVGASNRAAKVKANHQALAKLLKEDHADAAATLPAWQAIALSNAPKPAQDQEAFVWPWTGVLANVPAGQAQEGGATLMEQLAEFKPVQITAVCGADGYAGYVVVLFTKDWIGFKNALAFQNCFKSRRLVFWMNADQNDSLNMARIEQQRADERALQLLEKHKKEKEDALNRILQLERQVDEKQKLELDIEQLKGKLEVVKHMAGEGVDVKKRF

SEQ ID NO: 76367 - protein, 810 aa, Zea mays
  Coding DNA Sequence Number=SeqID_34588
  Homolog annotation: Hit_ID=Q6KAC4; Match level="QueryCoverage=73%, HitCoverage=92%, E-value=0.0, Identity=66%"; Hit description =Putative X1
  Pfam annotation: Domain name=XH; Domain location=508-645; Score =197.4; E_value=3.4e-56; Accession=PF03469.5; Description=XH domain
  Pfam annotation: Domain name=XS; Domain location=114-223; Score =113.4; E_value=6.5e-31; Accession=PF03468.5; Description=XS domain
  Pfam annotation: Domain name=zf-XS; Domain location=43-83; Score =85.0; E_value=2.3e-22; Accession=PF03470.5; Description=XS zinc finger domain
  Pfam module annotation: Pfam domain module=XH::XS::zf-XS; Domain location=508-645::114-223::43-83
MDCSSDESSELSETDIDDYADKSYSDLKSGKFVARLGSDRFRCPFCPGKKKQDYRYSELLQHAVGVGASNRAAKVKANHQALAKLLKEDHADAAATLPAWQAIALSNAPKPAQDQEAFVWPWTGVLANVPAGQAQEGGATLMEQLAEFKPVQITAVCGADGYAGYVVVLFTKDWIGFKNALAFQNCFKSRRLGKQDWKETKGHVEQVFGWLAKEEDYRSDDPVGRFLSANGDLKTVSELEQEMSSKTDNLIDSLARQITAKSKYLQELECKCNQMNLSLQKAMEESDLLHKRYNEEMRNMQSAVREHTRRVFQETEELRNQLVEKESNIQRRSRELNELVAQTDMERRKLEEERKKNADQNDSLNMARIEQQRADERALQLLEKHKFSPTRNLIWVPNLKQKEKEDALNRILQLERQVDEKQKLELDIEQLKGKLEVVKHMAGEGVDVKKRSEELTAELNERIEEMEDLEALNQTLVVKHRMTNDEIQDAKKELITGLTDMLGPRSNIGIKRMGELDEKPFVLSCKQRYGQDAEMKAAELVSLWQEHLKDPNWHPFKIVTTGSTKEQIIDDKDEKLAGLKKQLGEKVYEAVATALLEINEYNASGSYVVSELWNNRENRKASKRNRRKAPIDNLNNDTPTQILSRVIVAELNTRDKHPRLSKKCCTQPKELDDAYTQTPAHKEEGCGIAIIAKPRHTPGEEAPILHQRAWIHNADHREQADAQSDKGPGTAEPSRVTKKLTLGAMDVLMIRYLGEDQQGLGKVQGVEEEQQGRPQQEGDQVRLGCDSISGISLRGEVIRVSRVITNGAVV

SEQ ID NO: 76368 - protein, 314 aa, Zea mays
  Coding DNA Sequence Number=SeqID_34589
MVVKRSNDGDTYTRRRSPSPGSRVRGGARASEQRQGAPAMDLGARVRRGSLGLLGYDRHGFYQEKKILANGADVVPHSDDMSRVVDQLLKLIATFIEDRDASGGIRAVRSQMEVRCQTSLCQNEDGFPKLLRACTVHLRIRSQPEYDGREFVEHGTEKCVVTVYIGSSPHHVEWSVTTVGHRFKDTCQVVARKALRALCQIYEEEVADTPLRFFPPFQRDRPVWMARMRALEGKQLLEDDPTVVHLTAYLLTLDAQYDFLARHQRQMIARAEDAEKRNRQLHVDLTTAQAHATALESREVIAVEALKQAKDEHV

SEQ ID NO: 76369 - protein, 176 aa, Zea mays
  Coding DNA Sequence Number=SeqID_34590
MKLPGDSTTAHDRIIRRRDSDEEFVALRSLIPHVEAPVILVAPRRVAKTPRRHRNDGGQAIQRRRHLYPTAESKSRKPSPRWSTCFGAATGSARHGSRRPIMVSLCPRQATLVPMDEGGRGRLVYIPRRPSLHERRVRRGSLGLLGYGRHGFYQEKKILANGADVVVRARHGRVSG

SEQ ID NO: 76370 - protein, 137 aa, Zea mays
  Coding DNA Sequence Number=SeqID_34591
MVSHSGYGGYKCGHCTVAAGVSGVLYAKADACALSYLGYPQNIPTKQDEAALWDAFVVGLRLVPNKRRVSLPALSLSEQRLSSGDFERRVAFLPSLQHLHSEGPVRQSHLVPKTSLDGGDAALARSGSAGVFDVTVD

SEQ ID NO: 76371 - protein, 381 aa, Zea mays
  Coding DNA Sequence Number=SeqID_34592
  Gene Ontology: Mol. function=calcium ion binding; Cellular component =integral to membrane; Biological process=multicellular organismal development
  Homolog annotation: Hit_ID=Q6K1Y0; Match level="QueryCoverage=81%, HitCoverage=45%, E-value=1e-115, Identity=66%"; Hit description =Putative leucine zipper-EF-hand containing transmembrane protein 1
  Pfam annotation: Domain name=LETM1; Domain location=94-328; Score =332.9; E_value=5.3e-97; Accession=PF07766.3; Description=LETM1-like protein
RTTSNTTAQGQVHIMDKKSEDEKQKQQKKEASPEECDQAVEGLSTAKAKAKAKLEEVQKTDQSVVQKLWAKLLGIGPALRIIASMSRADWAAKLKHWKDEFISTLQHYWLGTKLLWADVRISSRLLVKLASGKSLTRRERQQLTRTTADLFRLVPFAVFIIVPFMELLLPVFLKLFPNMLPSTFQDKMKEEEALKRKLKARMEYAKFLQDTAKEMAKEVQTSRSGEMKQTAEDLDEFLNKVRKGGHASNDEILSFAKLFNDELTLDNMSSIKNDDKMIQAEGVESLSEYELRQACRERGHLGLLSTEEMRQQVPERPAPCAKDACALSYLGYPQNIPIKRGYRLPAAAAKASSEGWRLCLRPNICPPRDQFDKVTWCRRRR

SEQ ID NO: 76372 - protein, 273 aa, Zea mays
  Coding DNA Sequence Number=SeqID_34593
  Homolog annotation: Hit_ID=Q6QP51; Match level="QueryCoverage=22%, HitCoverage=32%, E-value=7e-09, Identity=51%"; Hit description =Putative growth-regulating factor 1
MQAACNCTTGTHPFDFNASSVEAQAHTSWTGKGNTMKGILLCEGSGPRALLLIRGSKAGPSEGFDSHPRALRLRAPVLGFEGWPPEGFDSRLRTRRARDDSGYVRYMAEARATLPRGTISPRPSPASGRNNRPRWIHDSPEGLLKQWEHLRLARGPARAGFAEKQPWPDRLANRLYRRSIQCKDRLTPYPDARSSVDRAEENSAACPAPTAVPPTRVRLTAAESSLRRHRKLRLARPRGSAPASTSEDGLRLARPRGSTHASTSEDGLRFARP

SEQ ID NO: 76373 - protein, 699 aa, Zea mays
  Coding DNA Sequence Number=SeqID_34594
  Subcellular localization annotation: CTP_CleavageSite=65; ConfidenceScore=5.06e-01
MICLGLGGHKKHTHTTDKLLLQVQTSIGGAAAPSASAPPSTESDPASDGDTFGGSPPRRKMSAPRLGHRRRGLLQELGLSRRLDWPLRSLIQLPPEDISLAHGLGNPTPALVPPVDGPARLRPTKLLFEPTPPLSMLTLLPPALAHRKAVEGESGARKEEETRLYAQIHTCSGPDSHNEQTPALKVPLQTELRFHSRGYEQPPHRRACGTTNSGRLASDLCSSSDGPRTDATAGRLLFASPLEGREPDIKAKEPEVGPRVTLMVSSAEKLSPAATTSASTVTSTCPPTPHQRAPAAPKAHRQVLTPVLAMKTRMGPSQNTSTALAAYDMLGEPPSWRMVSTPKSWRKKGDADPREGRPRLSPASAPARMMKILEAKGGAEAATRLASPHISAKGTNFREAERWLKGTNFREVVFLQRQQDKNNAGAPHLGARKASRTESSPTRSKVFPLRHGGWVPHVMQAGPGQKKPKPPRAVRVTAQRLQAFLNLRLNQRAKGRTSMQAACNCTKGAHPFDFDASSMEAHTSYNRCAAAGEGATVDMAKSGPAVMAVAGGRKQQSNRLQAHVPSWDSERTLSHGVKMTRPCFIPQMARACTTAAPRTTRLVALTLRQDMRHLWQAKQATLHLRHDDRVKKGTGKGDTPKGILLREGSGPRALLIRGSKAGPSEGLAPEGFDSRLRARRARDDSGTSDTWPRLGLCSR

SEQ ID NO: 76374 - protein, 235 aa, Zea mays
  Coding DNA Sequence Number=SeqID_34595
  Gene Ontology: Mol. function=translation initiation factor activity; Cellular component=cytoplasm; Biological process=stem cell maintenance
  Homolog annotation: Hit_ID=Q69UP6; Match level="QueryCoverage=85%, HitCoverage=15%, E-value=2e-58, Identity=65%"; Hit description =Putative leaf development protein Argonaute
  Pfam annotation: Domain name=Piwi; Domain location=11-230; Score =72.4; E_value=1.4e-18; Accession=PF02171.8; Description=Piwi domain
MRKQLHEAREQLVRQRLLPPKTGPRWLTIMALSVHKVTVKSSSMGWKTLSSTIIITISEIQMAPHTRLREFLNLQNIFRELLLAFVERSKQRPKQLIFYRDGVSEGQFKQVLEQEIHEIEKAWTALYNEKPKITFVVVQKRHHTRLFPSKPKDRQYADKSGNIRAGTVVDNNICHPTEFDFFLCGHAGAKGTSRPTHYHVLRDDNKFTADAYGLNASSFLCVAILGTYLEAACSN

SEQ ID NO: 76375 - protein, 523 aa, Zea mays
  Coding DNA Sequence Number=SeqID_34596
  Homolog annotation: Hit_ID=Q2RBN7; Match level="QueryCoverage=43%, HitCoverage=13%, E-value=2e-99, Identity=80%"; Hit description =Clathrin heavy chain, putative, expressed
  Pfam annotation: Domain name=Clathrin; Domain location=248-412; Score= 66.5; E_value=8.9e-17; Accession=PF00637.10; Description=Region in Clathrin and VPS
  Pfam annotation: Domain name=Piwi; Domain location=11-203; Score= -8.2; E_value=6e-09; Accession=PF02171.8; Description=Piwi domain
  Pfam module annotation: Pfam domain module=Clathrin::Piwi; Domain location=248-412::11-203
MRKQLHEAREQLVRQRLLPPKTGPRWLTIMALSVHKVTVKSSSMGWKTLSSTIIITISEIQMAPHTRLREFLNLQNIFRELLLAFVERSKQRPKQLIFYRDGVSEGQFKQVLEQEIHEIEKAWTALYNEKPKITFVVVQKRHHTRLFPSKPKDRQYADKSGNIRAGTVVDNNICHPTEFDFFLCGHAGAKWGGRTARGGGGAVGGGGRLRGLLTAWHHAIADAVRGCAGIFCMFNTPDDQAQCDIIELLSVRPPIDAKLKLMKEIAEEHIPAGQLHLVKPYMVAVQSNNVSAMNEALNELYVEDEDYERLRESVDMHDNFDQIGLAQKLEKHELLEMRRIAAYIYKKAGRWKQSIALSKKDNMYKDCMETCSQSGDRELSEDLLVYFIEKGKKECFASCLFICYDLIRPDVALELAWMNNMVDFAFPYLLQFIREYTSKVDDLVKDKIESQKEERAKEKEEKDLAAQQNMYAQLLPLALPAPPMPGMGGPPPPMGGMGMPPMAGMGMPPMGPGPMPAFGMGGY

SEQ ID NO: 76376 - protein, 650 aa, Zea mays
  Coding DNA Sequence Number=SeqID_34597
  Homolog annotation: Hit_ID=Q41813; Match level="QueryCoverage=36%, HitCoverage=29%, E-value=1e-115, Identity=71%"; Hit description =Hox2b protein
  Pfam annotation: Domain name=Homeobox; Domain location=122-178; Score= 14.4; E_value=0.00016; Accession=PF00046.19; Description=Homeobox domain
  Pfam annotation: Domain name=zf-C3HC4; Domain location=328-366; Score= 26.9; E_value=7e-05; Accession=PF00097.15; Description=Zinc finger, C3HC4 type (RING finger)
  Pfam module annotation: Pfam domain module=Homeobox::zf-C3HC4; Domain location=122-178::328-366
MAEYMLNIQLFSNLYIPVFSSIVLQNESYEQESSDSSDEEWSTLSTPRKTKLQGNEKVSLTESVRSAKRCSRRAPAREQNNEHTQSEQLHGSASEQQAREQLHGSVSKQQTEVLRSNVSSSDASKCHFGPIVTQKLKEHFEKDPYPCHATKDGLAQELGLTFNQISKWFSATRYYSRVAVAKNQKYTGENTTENNSSAIFDGIQVIEPNFGLIDKPDADTNDMISEKLMVQINLNEGIEEDIPPSQYATRCEEKLTMTQAAISREVGPPGYDPGENFLQVLDEIHRQPASLSLSMVSVQAPESVVDSLPCKSYKKLETPQCSDDMEQCHICLTEYEDGDQIRTLPCKHEFHLQCVDKWLKEIHRYLSILGVPSVPWRRLRSRLVKTLALHPSVAAPVDRAPPPGASCSVVEAGSKDAEPNLPILEDKDGLILEMDDFELPLVWNFKYSMTVYLFAKEELNCNLTAVKENLMKPVTVSFKEGLGQKFRQPSGTGIDFSVFEESDLLKQGDMDVYPLAVKAETALPVDQPPEGDDQKMKTPNSQITQAVFEKKENGDYHGTPWKVMLMQMIQGKNVLFASQKPRDTTVLPCRHMCMCSECAKVLRYQTTRCPICRQPVERLLEIKVNNKSEDQQQMPQSPPLPALAPQQEEV

SEQ ID NO: 76377 - protein, 133 aa, Zea mays
  Coding DNA Sequence Number=SeqID_34598
  Gene Ontology: Mol. function=sequence-specific DNA binding; Cellular component=nucleus; Biological process=regulation of transcription, DNA-dependent
  Homolog annotation: Hit_ID=Q41813; Match level="QueryCoverage=91%, HitCoverage=19%, E-value=9e-38, Identity=63%"; Hit description=Hox2b protein
MTEYMLVVQSNLNQCNNEDILLSGTEIEMESYEQESSDSSDEEWSTLSTPRKTKLQGNEKVSLTESVRSAKRCSRRAPAREQNNEHTQSEQLHGSASEQQAREQLHGSVSKQQTEVLRSNVSSGDASRARTDI

SEQ ID NO: 76378 - protein, 315 aa, Zea mays
  Coding DNA Sequence Number=SeqID_34599
  Gene Ontology: Mol. function=protein transporter activity; Cellular component=cytoplasm; Biological process=intracellular protein transport
  Homolog annotation: Hit_ID=Q2QP84; Match level="QueryCoverage=55%, HitCoverage=18%, E-value=4e-65, Identity=73%"; Hit description =Vesicle tethering family protein, putative, expressed
  Pfam annotation: Domain name=Uso1_p115_C; Domain location=86-208; Score=131.5; E_value=2.3e-36; Accession=PF04871.4; Description=Uso1 p115 like vesicle tethering protein, C terminal region
MGLANYCVPAGEAYQKALDIAFEITQKDLLARNAMLAEELLRTGGGMTTDTSQKPSSGRERVQIEALRQELEGAKRQIGALKSEKSQIEAEANNQRNLSVKLESDLKSLSEAYNSIEQANYRLDAEVKALRQGGSVPYPDVEAIKAQAKEEAEKDSEAEWNDLLVCLGQEQTKVEKLSTRLTELGEDVDTLLQGIGDDTAIPDDDDEDEDDEEFISTLYNLLDGSSEEKPAAEKTTAGKKPKAEKRVPAGKSAGKEDGESKSGRKKGKKSVETSRPHLSSSKWREWSSSKREIVGGLQLEAAMEIVARGGGEPWR

SEQ ID NO: 76379 - protein, 226 aa, Zea mays
  Coding DNA Sequence Number=SeqID_34600
  Gene Ontology: Mol. function=protein transporter activity; Cellular component=cytoplasm; Biological process=intracellular protein transport
  Homolog annotation: Hit_ID=Q2QP84; Match level="QueryCoverage=77%, HitCoverage=18%, E-value=5e-66, Identity=74%"; Hit description =Vesicle tethering family protein, putative, expressed
  Pfam annotation: Domain name=Uso1_p115_C; Domain location=99-221; Score=132.1; E_value=1.5e-36; Accession=PF04871.4; Description=Uso1 p115 like vesicle tethering protein, C terminal region
MRRLRIRWTPLKLRGLANYCVPAGEAYQKALDIAFEITQKDLLARNAMLAEELLRTGGGMTTDTSQKPSSGRERVQIEALRQELEGAKRQIGALKSEKSQIEAEANNQRNLSVKLESDLKSLSEAYNSIEQANYRLDAEVKALRQGGSVPYPDVEAIKAQAKEEAEKDSEAELNDLLVCLGQEQTKVEKLSTRLTELGEDVDTLLQGIGDDTAIPDDDDEDEDDEE

SEQ ID NO: 76380 - protein, 181 aa, Zea mays
  Coding DNA Sequence Number=SeqID_34601
  Homolog annotation: Hit_ID=Q5ZC04; Match level="QueryCoverage=92%, HitCoverage=32%, E-value=3e-62, Identity=71%"; Hit description =Putative histone H1flk
MLRAVDLPDRFDRVAPPTDNGAGSEEAAVKDTGPKPVVPLLNVSAGGRVHEIQTFAHYVATQIGFEDLNECPHLCALSYDYLKKTEGYEQNLLAFFHNKMNPDALLVQLIEEMDKCILGYFSFHWKYATHIITQVLTHEQPRRKLRRMVMEATRKMRFERVTRELKVTRLFTTLVEELKAI

SEQ ID NO: 76381 - protein, 138 aa, Zea mays
  Coding DNA Sequence Number=SeqID_34602
  Homolog annotation: Hit_ID=Q5ZC04; Match level="QueryCoverage=90%, HitCoverage=24%, E-value=1e-56, Identity=84%"; Hit description =Putative histone H1flk
MAAAGRVAVRRAIISGRAVRVNSQLKSHKRFAGAFRKYCDLVDNARLYSTNTIAGAKLIGWKDKDSQLLVDVDEIGLLDRVSRINDDANCVHELYPDGHPTGGAGSVWDELMASPVRASIQRELKEAIFDSEACFPSP

SEQ ID NO: 76382 - protein, 626 aa, Zea mays
  Coding DNA Sequence Number=SeqID_34603
  Homolog annotation: Hit_ID=Q5ZC04; Match level="QueryCoverage=79%, HitCoverage=96%, E-value=0.0, Identity=70%"; Hit description =Putative histone H1flk
THMHFPLHSPRSQATPRSSSGPVDGPMLRAVDLPDRFDRVAPPTDNGAGSEEAAVKDTGPKPVVPLLNVSAGGRVHEIQTFAHYVATQIGFEDLNECPHLCALSYDYLKKTEGYEQNLLAFFHNKMNPDALLVQLIEEMDKCILGYFSFHWKYATHIITQVLTHEQPRRKLRRMVMEATRKMRFERVTRELKVTRLFTTLVEELKAIGVHCQHDHNRAGTDVMVPAAHSDRSPVLLLMGGGMGAGKSTVLKQIMKEVFWTEAAANAVVVEADAFKESDVIYQAISSRGHHTDMLQTAELVHQSSTDAAASLLVTALNEGRDVILDGTLSWEPFVRQTIAMARSVHRQRYRMGVGYKVAPDGTTTEKYWEPVEEDGEQQAGRAGRTRKPYRVELVGIICDAYLAVVRGIRRAIISGRAVRVNSQLKSHKRFAGAFRKYCDLVDNARLYSTNTIAGAKLIGWKDKDSQLLVDVDEIGLLDRVSRINDDANCVHELYPDGHPTGGAGSVWDELMASPVRASIQRELKEAIFDSEACFPSPYFFAVCSKHTATAILHSAKALPSVTLGNERSANCTSATASLPSTFCRALGKDFAECQMALGKEKSSSRRQVTVTDPLPSANGDTRQRLV

SEQ ID NO: 76383 - protein, 614 aa, Zea mays
  Coding DNA Sequence Number=SeqID_34604
  Homolog annotation: Hit_ID=Q5ZC04; Match level="QueryCoverage=80%, HitCoverage=96%, E-value=0.0, Identity=70%"; Hit description =Putative histone H1flk
THMHFPLHSPRSQATPRSSSGPVDGPMLRAVDLPDRFDRVAPPTDNGAGSEEAAVKDTGPKPVVPLLNVSAGGRVHEIQTFAHYVATQIGFEDLNECPHLCALSYDYLKKTEGYEQNLLAFFHNKMNPDALLVQLIEEMDKCILGYFSFHWKYATHIITQVLTHEQPRRKLRRMVMEATRKMRFERVTRELKVTRLFTTLVEELKAIGVHCQHDHNRAGTDVMVPAAHSDRSPVLLLMGGGMGAGKSTVLKQIMKEVFWTEAAANAVVVEADAFKESDVIYQAISSRGHHTDMLQTAELVHQSSTDAAASLLVTALNEGRDVILDGTLSWEPFVRQTIAMARSVHRQRYRMGVGYKVAPDGTTTEKYWEPVEEDGEQQAGRAGRTRKPYRVELVGIICDAYLAVVRGIRRAIISGRAVRVNSQLKSHKRFAGAFRKYCDLVDNARLYSTNTIAGAKLIGWKDKDSQLLVDVDEIGLLDRVSRINDDANCVHELYPDGHPTGGAGSVWDELMASPVRASIQRELKEAIFDSEACFPSPYFFAEYFLSGTRQRLCRVPNGTRQRKVIVTAPSDGDGSFTECQRRHSAKTGLVDPTASPCAESPSRHSAKEVSLPSV

SEQ ID NO: 76384 - protein, 132 aa, Zea mays
  Coding DNA Sequence Number=SeqID_34605
  Subcellular localization annotation: CTP_CleavageSite=47; ConfidenceScore=5.02e-01
MSLPSAVAKALGKGTGKGAHWRVLCRVPVHQTLGKETSFAECLLGLSAQRLAVGSTRPVFAECRRWHSVKDPSPSLGAVTVTFLCRVPNGTRQSLCRVPDKKYSAKKLLPMYSSPSVLCRVLHSAKALPSVK

SEQ ID NO: 76385 - protein, 136 aa, Zea mays
  Coding DNA Sequence Number=SeqID_34606
MEWVFLKRKILGDISVEYLGNISGKNLRGITGEISGQYFWKEFEGSEFEKILGFEFLGCYKSTPLKRNLVLEIWLRRVMGIALLQLHIFTLQTLRGDGTSTKSWPLRSIWLLIANADSGYSKIIFRLLAFAWQLAY

SEQ ID NO: 76386 - protein, 75 aa, Zea mays
  Coding DNA Sequence Number=SeqID_34607
MEKKKACSKLFKDQIIEAYKFLDEKWSYKVLLMKHRKTNQERNPCGSSQEEDAPQRPNFVEVPSPRRVCKVKICS

SEQ ID NO: 76387 - protein, 143 aa, Zea mays
  Coding DNA Sequence Number=SeqID_34608
SPKAMDKQEHLDSSQDPPPELFEPLAMKKILAPSLEVKEEAASTPPAPPPSEELQEPVQLEEEFDRVLPSQSPPEEVINISSLLTHPGDVSESTLCQSFLRILLKQQQQKKAPKVPAMEKKKKACSKLVEDEIIEAYKFLDEK

SEQ ID NO: 76388 - protein, 186 aa, Zea mays
  Coding DNA Sequence Number=SeqID_34609
  Gene Ontology: Mol. function=cysteine-type peptidase activity; Biological process=proteolysis
  Homolog annotation: Hit_ID=Q10KZ1; Match level="QueryCoverage=76%, HitCoverage=39%, E-value=1e-26, Identity=41%"; Hit description=Ulp1 protease family, C-terminal catalytic domain containing protein
  Pfam annotation: Domain name=Peptidase_C48; Domain location=24-186; Score=-18.7; E_value=0.014; Accession=PF02902.9; Description=Ulp1 protease family, C-terminal catalytic domain
MMFKVVLLLWCCLRIQRHRNSGGISGKKEEVIVIADDVGADQEHSMMEYNSQYEVEDLRKSFLGANSALKLHRSNKLYFSVCHANHWFLFIVDLKNKRFVFMDSYFDEEDPFQCIVRDKLIRVFKVLWLLYSDSNIDISSFKILYPAVPKQENTHDCGIFTLQYMEYWDISVDILLKFRTEDIPQI

SEQ ID NO: 76389 - protein, 622 aa, Zea mays
  Coding DNA Sequence Number=SeqID_34610
  Homolog annotation: Hit_ID=Q7XD58; Match level="QueryCoverage=21%, HitCoverage=17%, E-value=1e-15, Identity=32%"; Hit description=Ulp1 protease family, C-terminal catalytic domain containing protein
  Pfam annotation: Domain name=Peptidase_C48; Domain location=450-599; Score=-24.6; E_value=0.038; Accession=PF02902.9; Description=Ulp1 protease family, C-terminal catalytic domain
MAEGEEAPTGSMAGGEVAPMRYMARVEAAAIPTRSTSEGKEAPTGSMAGGELAVAGSMVEEGKVRRDPWPGGGGAGCDGIYDGGRGCPDGIHFRCPATATCGEAGRSGVPLREGCVPTSGGTVDPDIISSPMVKLIETFAVFCKSERAAYREKVLIEAEKQFMHDFTFFKEKLLVDFGQIVDVECIDSTCQVLCDKPVDVKSNEKGAGMGIVEASHGKGHVVITNPLITVSIQLETPIVNRLDGNNGTSLNPPAECAHPLNKRFHYSKTDKLGLFPRTKLFSPVGLFDLQITDDESDHNGRGRNTAAAICPHEPAGVPIGLGQLAPPITTHVVYGATSAAATGCVNNDVYSGVASVVLSQNPKAHAVGAFLAGNVTIYEPTLALNFSNRSKSAAAVDQMYNDMNIFNVESEAGGFFLGNQLEVGNVVRNDVGENWLQVQNAHARFPCSNVLLRYYNLCGMGRSQWKDLVAVRFSKTTTHSMMEYNNQYEVEDLRKSFLGANSALKLHRSNKLYFPVCHANHWFLFIVDLKNKRFVFMDSYFDEEDPFNALLETSLHDCGIFTLQYMEYWDISVDMMLKFRTEDIPQIRITLANDLYFSEKNTEDKSLVRNMFLQNIDPRIVN

SEQ ID NO: 76390 - protein, 201 aa, Zea mays
  Coding DNA Sequence Number=SeqID_34611
MGPEPEPLPTPLIRTSPREDKVAAPQDGPRFCASLLQGVGTSCSRRIGFLLGQWGRFPIADLERQRLDHLNIGGDGWLHGQNGNSLGRSRCQHRQPARWARGRGRASSLPRHDGRLDGGVSLGNSPHDNLCRLSPLLGGTLCRGRPADETRCGTGCRSWRRLKGLPRSQTGRIVPPFAGKKGKSRIRIHEEGAGTEVSSDT

SEQ ID NO: 76391 - protein, 110 aa, Zea mays
  Coding DNA Sequence Number=SeqID_34612
MATREDEVAAPQDGKRFCAPLLQGVRTPCSRRIGKRKSRIRTHEEGAGTEVSSYTYPLRTKANRACGEAPRASAPAGAAKVCPVAGFSTIPASGTRGTEGTIRPGAVMTT

SEQ ID NO: 76392 - protein, 247 aa, Zea mays
  Coding DNA Sequence Number=SeqID_34613
MLITQPSSAPRSVAPSSVPRRRHALEVCQRSTYLGAIAYGAELCYLGAISYSAEQRLIRLMLRPCDPSSTWLCLYYTPIARALWNPLHGVRDGGDDSATTADRRGTQDTHLLRLSSSGHAAPSTSPGRHMASTRTRGFNWEEGERGGRPGLALCVRCVGVGVGPLALALRPPTPRQGRSRKKAWKDARVSRKAEVLSARQGWHGSMGRDGNGYPLPETRWVFALLGYGFGSISLPMGLLMGSIRNPT

SEQ ID NO: 76393 - protein, 168 aa, Zea mays
  Coding DNA Sequence Number=SeqID_34614
MGEKERQLATPRLQGILLRHGRYCVYRDGNGYPLPETRWVFALLGYGFGSISLPMGLLMGSNENPAVGMGNPLGTRNPHGYGFGQNFIPVMGKDFLAGVFFLRGYGFRQYFLSEEVVHIATTAQEKMKPWKETSKSSKTTTSSRCGLAANSQSAACEGPIFTAFRLAL

SEQ ID NO: 76394 - protein, 163 aa, Zea mays
  Coding DNA Sequence Number=SeqID_34615
MSTVPIDSPFASRPHCLGIQCSTDPGCRRAMTALAGELVGGEESGLSRAQLTNLMGQRASPGIKEGGWPKSSEGDLGLPVMFCRVRKLGKLHKLMAKLTERLARLGSGWSGLATVAEALAVMAGGKEVAGAKEGRLAGEEIWSPEIRFVSLLKPEANLEFCRV

SEQ ID NO: 76395 - protein, 207 aa, Zea mays
  Coding DNA Sequence Number=SeqID_34616
MAATGVSGALYAKAMSPGRERGIDGDGTLQDMVDGLPVLLYFFCDSPSSEIVMNSPTLASGGDTRFSSDFLSHDGFSSILWEVLNSASYPTPPLYTVQLYEEHQPGWRSLNSETIGFRTDDTTEAAAMKTLTTFCGYHPLEMVMHPLGLFPAEKKDDPMWCNHASHVKDVWVMYSDLVGRVTVQCMSALYRLQALQRDAMAHLANLA

SEQ ID NO: 76396 - protein, 144 aa, Zea mays
  Coding DNA Sequence Number=SeqID_34617
MLVDYTTVLDRPSVSVEGPTQQGVESVVEVTPTSGVMSDGSSDPSLRLLRALCVVARTATGVVVVSGASLAEVQGKAASQTPPPAEARGKSPAAPTPGIGAPAPRAGDDAVSPGDWTDLAPCDAVDAPPDEKAKGGSQTYVQCT

SEQ ID NO: 76397 - protein, 186 aa, Zea mays
  Coding DNA Sequence Number=SeqID_34618
MQQGVESVVEVSPMSGVMSDGSSDPPPPAPAPPRAPCCGSNYHRHRRLLCLRQGLFQQPGSPEVVQGASLAKVQGKAAFQTPPSAGARGKSPAAPAYAPGIGAPAPRAGDDAVSPGDWTDLAPCDVVDAPPEDKPTQAADWGLPLRKTRTRRSPETPQSPPCCQHLLLSTEYSGDNLGWEWFVKQG

SEQ ID NO: 76398 - protein, 112 aa, Zea mays
  Coding DNA Sequence Number=SeqID_34619
  Subcellular localization annotation: CTP_CleavageSite=40; ConfidenceScore=5.50e-01
MHGLFRGSGVAGKGSAGRSTVAGARVAAGTPFAGQTPVVSGSGEVEHARRSTVDARGGFISVGRAGSGAGVLWRAQSASNTWKCSSARVQQLAEIASVRILAKIWRRPLPGT

SEQ ID NO: 76399 - protein, 95 aa, Zea mays
  Coding DNA Sequence Number=SeqID_34620
  Subcellular localization annotation: CTP_CleavageSite=60; ConfidenceScore=5.08e-01
MARRDVGRAGSGAGVLWRAQSASNTWKCSSARVQQLAEIASLRILAKIRRRPLPAPRAVSCSLEDMVAGVTWPSILPPGWTIEWDPASAKEEHEE

SEQ ID NO: 76400 - protein, 51 aa, Zea mays
  Coding DNA Sequence Number=SeqID_34621
MGKVRSADGKKNLVREDSIQGDVFVDITPQLITLNQRSKSDMYHKNKHSSV

SEQ ID NO: 76401 - protein, 75 aa, Zea mays
  Coding DNA Sequence Number=SeqID_34622
MARPVGLNKRAAARIYHTQVLTLREIRARKIMGAQLTVALPGSPPDVIVDITPQLITLNQGSKSDIYHKNKHSSV

SEQ ID NO: 76402 - protein, 67 aa, Zea mays
  Coding DNA Sequence Number=SeqID_34623
MKDATRGLWHELDAERASAETVLGCLPSQFCFTSGDTKIGGQKGAAQDYSEGEGQIKQETPRGCYRW

SEQ ID NO: 76403 - protein, 152 aa, Zea mays
  Coding DNA Sequence Number=SeqID_34624
  Homolog annotation: Hit_ID=Q6YXY3; Match level="QueryCoverage=24%, HitCoverage=3%, E-value=4e-10, Identity=81%"; Hit description =Putative splicing factor 3b, subunit 3, 130kDa
MSRPALAESRHKSLLGIGLLVLQNLSGINGVLFYASSIFKATGVTNSDLATCSLGAIEWRHGDWRTEGRSTGLQRGGKARSSRRQQEDVIDGDLCEQYPSLPADMQRKIADELDRTPTPAALLGEDCQGGRLEQARAALISDRACCHPDGTR

SEQ ID NO: 76404 - protein, 309 aa, Zea mays
  Coding DNA Sequence Number=SeqID_34625
  Gene Ontology: Mol. function=nucleoside-triphosphatase activity; Cellular component=outer membrane-bounded periplasmic space; Biological process=cytochrome complex assembly
  Homolog annotation: Hit_ID=Q287W7; Match level="QueryCoverage=70%, HitCoverage=93%, E-value=3e-84, Identity=71%"; Hit description=ABC transporter family protein
  Pfam annotation: Domain name=ABC_tran; Domain location=119-293; Score= 99.7; E_value=8.7e-27; Accession=PF00005.17; Description=ABC transporter
  Subcellular localization annotation: CTP_CleavageSite=80; ConfidenceScore=5.34e-01
MDDGPPNPRIRYIKRLGSLHGPTPSLPHSPVLSRSPHFGLSAGRTRSPPPSPSHRSSPPRPPTGPPNDLAAPTRTPPSSLAAPESQTSHMSPRLLLNNVSCMRNAQTVLRDINLSVHDGTALVLTGANGSGKTTLLRMLAGFSRPSAGEILWNGHDITSPGVFQQYKLQLNWMSLKDAVKEKLTVLENVQWFELLEGKDGSRSGPAIQLMELGRLMNEKARRMLSMGQRKRLQLARLLAIDRPIWLLDEPSIALDAEGTRLLEHIIAEHREKGGIVFVATHLPIQVEDSMSLRLPQRFPRRKTLVDLVH

SEQ ID NO: 76405 - protein, 399 aa, Zea mays
  Coding DNA Sequence Number=SeqID_34626
  Gene Ontology: Mol. function=nucleoside-triphosphatase activity; Cellular component=outer membrane-bounded periplasmic space; Biological process=cytochrome complex assembly
  Homolog annotation: Hit_ID=Q287W7; Match level="QueryCoverage=53%, HitCoverage=91%, E-value=1e-82, Identity=72%"; Hit description=ABC transporter family protein
  Pfam annotation: Domain name=ABC_tran; Domain location=66-240; Score =101.8; E_value=2e-27; Accession=PF00005.17; Description=ABC transporter
MDLSRSRPHDILMHPLASIPHATIVILAAPESQTSHMPPRLLLNNVSCMRNAQTVLRDINLSVHDGTALVLTGANGSGKTTLLRMLAGFSRPLAGEILWNGHDITSPGVFQQYKLQLNWMSLKDAVKEKLTVLENVQWFELLEGKDGSRSGPAIQLMELGRLINEKARRMLSMGQRKRLQLARLLAIDRPIWLLDEPSVALDAEGTRLLEHIIAEHREKGGIVFVATHLPIQVEDSMSLRLPQRFPRRKTLVYSRLACLREASSVGYSANLTKYGETFGQDQARWPAALRPHSLHPAITPYLADNVSFFNGLRSSQITQSPTQSQQKSPHGSPLTSDRPNDLLDIELPHPMGLPSVAGRTLVASPPGIVAGDFTNWSPDLSYHNRTAAQRGRTSSALNL

SEQ ID NO: 76406 - protein, 87 aa, Zea mays
  Coding DNA Sequence Number=SeqID_34627
MEDLSTMTPTIVIGKIVAFETSRKMGQEEPTSSRRYAFACDEKKARRRLPLQAPQVKKRKKNAMMIKMINSQHHPSRTKKQSDVSKS

SEQ ID NO: 76407 - protein, 130 aa, Zea mays
  Coding DNA Sequence Number=SeqID_34628
MTASKKRPGKGDTPKRILLHEGNRPRASLLIKGSKAGPSEGFNSCLRAPGFRAHFWSEREASSPRTPSKGDRVQQITRRGSGAALANPAPAKPLTASTYQPENLGPDRAPGLWPARMREQPDQPKCCEMY

SEQ ID NO: 76408 - protein, 388 aa, Zea mays
  Coding DNA Sequence Number=SeqID_34629
  Homolog annotation: Hit_ID=Q6QP54; Match level="QueryCoverage=29%, HitCoverage=37%, E-value=2e-08, Identity=45%"; Hit description =Putative kinase
MGRHETEHKGGRNSKGETRDLRVVLRPGRGNDGSPLWRGRSEPGVGRGGDSSEVEAESRPGGRARWRPSFEVEVESEPWGWARRSPSFEVEVESERWGRARRSLSSDVEVEPELWGQARQSFLWRLRLDLAAVSLTLSSGTAIGAGQATLFSCQSILALNAPAIRLVGVAIWLRLLLREAWASGEPKVPSSRAGMLTLSTVWPEPGVKGSHSANKKIKFGSNKGAKGQPKAPQVWRTGLSGVPPDSVRCTTGHVRCTRGLQRQLATFGNFQRHSRYNSPDCPVYTGQCPVRHGEAASGTRQLRETPTACPLKFTGLSGEHRTVRCDSGATAISAPTALCRAFNARSAHAEVRRAHTGTPDSKQYLSGVHRTLRRAHKSEAPTVRIQRQ

SEQ ID NO: 76409 - protein, 170 aa, Zea mays
  Coding DNA Sequence Number=SeqID_34630
MSEDKVRIKDSCWSVGTIYDPRELPGVSTVGPGFGQGVTVEKLYNFVASRQEDRDLVEAYFSRSYLTTLARRNRSKEEDEELGGDVEVESEVARVIEGVERLLCRWKGGHTDAVLWSLSLLFPSGSLFGEVCVATREDVSQKVHARMGTTVASIDFKNDDDVFDDEAEEA

SEQ ID NO: 76410 - protein, 349 aa, Zea mays
  Coding DNA Sequence Number=SeqID_34631
  Gene Ontology: Mol. function=DNA-directed DNA polymerase activity; Cellular component=intracellular; Biological process=DNA replication
  Homolog annotation: Hit_ID=Q8S9E2; Match level="QueryCoverage=83%, HitCoverage=29%, E-value=1e-143, Identity=83%"; Hit description=PolI- like DNA polymerase
  Pfam annotation: Domain name=3_5_exonuc; Domain location=1-195; Score= -31.4; E_value=0.017; Accession=PF01612.11; Description=3'-5' exonuclease
VANINAKEETPVGHGEVICFSIYSANSDVQAADFGNGKTCIWVDVLDGGRGVLMEFAPFFEDSSIKKVWHNYSFDSHVIENYGIKIAGFHADTMHLARLWDSSRKIDGGYSLEGLTNDRRVMDTVPEDLPKPGKTSMKTIFGRKNIRKDGSEGKVVSVEPVKKLQREDRELWICYSSLDSMSTLRLYDSLKSKLTTRRWILDGCPRGTMYDFYEQYWRPFGALLVKMETEGMLVDRGYLSEIEKAAIAERKLAADKFRKWASKYCPDAKYMNVNSDIQIRQLLFGGIENSNLGWVTDREVFSGAHEDKVHTKDLCWSVGTIYDPRELPGVSTAGPGIGRGVIGTNGPKP

SEQ ID NO: 76411 - protein, 75 aa, Zea mays
  Coding DNA Sequence Number=SeqID_34632
MELVGGEESGLSRAQLTNKTGQRASPGIKEGLEKLHKLLVKLTERLAQLGSDWSGLATVAEALAALAGGKRARRS

SEQ ID NO: 76412 - protein, 116 aa, Zea mays
  Coding DNA Sequence Number=SeqID_34633
MCGSPSRMVGVGWSTCADGGARRRRGVRPIQGTIDQSNRSESFTRDQGSDWSGLATVAEALVAMAGGKELAGAKEGRLAGEEIWSPEIRSVSLLEPEANAGFFVSRARIPMPSSGM

SEQ ID NO: 76413 - protein, 76 aa, Zea mays
  Coding DNA Sequence Number=SeqID_34634
MGGGQLVGEEEQGKGRENKRDVSECPASSVKDACALRHLGYPQNIPIKRARPAKASSEGWRLRLRPNICPPRDQFD

SEQ ID NO: 76414 - protein, 180 aa, Zea mays
  Coding DNA Sequence Number=SeqID_34635
MWAQEQNGRKLHPLAYVTGSRPRGSIGSPPERGAEAYAVWSGHVSAPDPRHTLIKAWVFFVLESRDPAASGPDPTQRGPEPILGVQFAPVEALDLTRRSSLYIHRGPTIGTCSPVQVDPTGECSDVSECPASSVKDACAPRHLGYPQNIPIKQARSAKALSEGWRLRLRPNICPPRDQFD

SEQ ID NO: 76415 - protein, 646 aa, Zea mays
  Coding DNA Sequence Number=SeqID_34636
MPRTKNASASGGGDDEDPRRPFRQVKGKTVYLEQQEGRKKRRTDREARAAAAAAVVAAQAALGDQPHVPSDQIAFRARRLTSRSRSSTHTSTSTPPPTLPAPVTPIAPSTSTAIPTTSTTPASTASPAPAPASAPPVPPPRFRERDETEVRPLVSDPRLFDLQRATAARIALRVHRLLDLPAFLLAAGAESEAHLTYLPGLLTLLSISGRYVEEWVRVFYASVWIDPDHHWMRFRFEREDVTITASQIRQLFGFPESTTRLHSLCYGTSDPPRRPHGGVAPGTAHVAALFRPPFTDGSRRSPADFTTAAKYLYELIRRTLLPRMGYREATTHIQLWLLGALVSHSEFDVVDFLICEIEDTVLDGIRARRQLPYAHYLCHIFAQLIQPPRFQSTLEASRLVFGSYRPAPEIPVPASASVFDSLAEDAALRQFDAQGTAADDDDDDDFGVPPPPPPPMPPRSHDHEAGSSSAAPPHPQAMDPALASILQTLTQLQQTLTQQQALLAAEQARLSDRMLSMFQSMQDRQDALQQQLLQDRAENRAFMTLMLQHSGISAPPVQSAPPPPLHAPVVPSILSGPPVGTSPLRPGHFGVHLSGSQLCLSAAASATSICCYHYRCGSICDRFCSGSSCSAASVRVSTSSSFYRRS

SEQ ID NO: 76416 - protein, 198 aa, Zea mays
  Coding DNA Sequence Number=SeqID_34637
MAHRTVRCATGAPTVRHRCANGHFQRLVLTASRWTHGAPDSEQSTVRCTPDSPVRCPVKTLPRTSLAPPGRGCTGQSGAHRTVRCPKARNRGGGGGASGRGRGSRANAGGGSESVSDPGSAVEAGAGTDSDGGRAAGATGTEAVTDTATTVVVTADAGGTGGCGQTELRTGEVNAKVTGPERRGSNRGSRQIEGTIGA

SEQ ID NO: 76417 - protein, 189 aa, Zea mays
  Coding DNA Sequence Number=SeqID_34638
MTKTETILNYKCTFGLIDGKKYKRDTKASTSQREQYGAVRFRESEGHPGTWNLESKASCVGDRYPPGPLEGKRTSRGVSGQLPRKAIPSWAGAKATSEMGRPEKATDSNPSIPSNCALSKETVRLSRAWHPQMSGRIKDKSAGFSGDQFSRFTIIQETCDRHHKPLSYNQKHRPTQKHRKGNPRCAVGL

SEQ ID NO: 76418 - protein, 159 aa, Zea mays
  Coding DNA Sequence Number=SeqID_34639
MQRLGDVSIENWEESGPKSWLSDTLNKHRHGTVPGQIRSIAPFTADDFAPGSSPPLRLALTGNEEEIEVTEEKASPPLESQYCSSQTKGFVLQNDDWQSGRDVLKIKLDDGSIMVVMGSTSEKMYLCQVRKQQISVAFVPRWFHMRKNKSEAAGGHGPL

SEQ ID NO: 76419 - protein, 54 aa, Zea mays
  Coding DNA Sequence Number=SeqID_34640
MAVTDSTSEKMYLCEVRKQQIFVAFVPRWFHMKKNKSEAAGGHDPPQKLLCKNL

SEQ ID NO: 76420 - protein, 203 aa, Zea mays
  Coding DNA Sequence Number=SeqID_34641
  Subcellular localization annotation: CTP_CleavageSite=28; ConfidenceScore=5.22e-01
MEKAARVFAQRGRVNFKTRRPPPPFIHRARRFGKPAVPQYGVNQRSCQKPPRNHFERGQRLRHLATSSALDDLVELVPRRANVGAKAKTPPFARGLRRKRRPNGDKTTGRDTLRPGLRRSCRPNGDKTTGRDTLRPIRHRTKTRGEVIPPGGLVQRGGPCEIRPIATGPAWPLRVTGLIYKGVPIIAFCNPALWEYSGDNLGV

SEQ ID NO: 76421 - protein, 75 aa, Zea mays
  Coding DNA Sequence Number=SeqID_34642
MLMSRTKDAGAADEWDPQAFVNVPSLAKGVPARFVSVGPAAAAKASSEGWRLCLRPNICPPRDQFDKVTWCRRRR

SEQ ID NO: 76422 - protein, 156 aa, Zea mays
  Coding DNA Sequence Number=SeqID_34643
  Subcellular localization annotation: CTP_CleavageSite=55; ConfidenceScore=5.22e-01
MEKTSAGPTETKRAGTPFASLGTLTKACGDVFPRRGLVQSQGPQSKFQHLAPTVRATTKPPAMAPKRANPKADEAAKAALLAARKGKALVLTQSTHQEPTEDNVPHTGEDDTIRTCGTEGQSQPPPGFALLEGADLTEDGEVLGVSTEEQLQLTNL

SEQ ID NO: 76423 - protein, 54 aa, Zea mays
  Coding DNA Sequence Number=SeqID_34644
MATWPRLLLGEDWASGEPKGAENHRRHGRTRGAIITRLPGRARWDAGLVPRSLS

SEQ ID NO: 76424 - protein, 421 aa, Zea mays
  Coding DNA Sequence Number=SeqID_34645
  Homolog annotation: Hit_ID=Q6QP51; Match level="QueryCoverage=44%, HitCoverage=97%, E-value=2e-27, Identity=39%"; Hit description =Putative growth-regulating factor 1
MKILEAEQWLKGANPREVVLLQQQQDEGDAGGSPHSRPQASRAKSSPMCSRVLPLRHGGWVPRVMQADLKRKKPNPPHAERVTTPRLQALLHPRRNRRSKGRTAMQVARDRTAVAHPFGFVASSMEAQAHTSCNRRAGYYVQETASPLAPMPRLLDCRTSTATRGNPAHGPTVPIEHIDHGSVSRERRDRERGYFERDPSPRRKRAPIPPTDQGFEEHMGFKLITDQGFEGWALERVQQPPQSTWAPRPLLIRGSKAGPRKGSTATPEHAERGMTLGMSDTWPRLGLRSRASGATVNSASPDLGPRPQEEVSTSPDPRAQPLPRPRKMVFASPDPRARPQPWPRKEDSASPDPRARPQPRARPLPRPREESRPRSTPASGGVSASPDIGLGSTAPWGIHHYPTPYLAQATGNKTGVPSGSP

SEQ ID NO: 76425 - protein, 96 aa, Zea mays
  Coding DNA Sequence Number=SeqID_34646
MARMYEMHPALSLKSVCDNMPIGAIKPKEDEEEVQNIDMPSSSNVPHNDGKDERHANEDTFVSYEQARVQAEDVDAPRSSSQVVDKRNSSLLQAHP

SEQ ID NO: 76426 - protein, 653 aa, Zea mays
  Coding DNA Sequence Number=SeqID_34647
  Homolog annotation: Hit_ID=Q6QP51; Match level="QueryCoverage=13%, HitCoverage=30%, E-value=2e-18, Identity=58%"; Hit description =Putative growth-regulating factor 1
MKATRALPIRGLGRWKGAMHEESAKTWLPSKGVALLLKVTLPTCVLSRRGLSLHQHAPRSSLYDTGAGSYASCKQAQDRRSQTAARAWRPRPTRHVTGAPVITCEKLHRHLRQYRAFSTAEPVPRLEATLRMAQQCQPSTSVMGHSAAGEGATVDMAKSGLVVMAAAVGRKQQSSRLRAHVPSWDSERALSHGVKTMCPCSVPRTARARTTAAPPTTRPVALTLRQNRRHLWQAKRATLHLRHNDCVKKGTGKGDTPKGILLREGSGPRALLLIRGLKAGPSEGFDSRLRALELRAHYWSEVRRLAPRRGSTAASDHSGSAPTTDQGFVGWPPKGSTAASEHAERGMTLGTSDTWPRLGLSSRGTLGHFRDQQERFYNGIPSEGGIEPSDPIKRDRVQQITCRAALANPAPAKPLTASTYQPENLEPDYAPGLRPVKAPSAQGTRSRLARAQPRAKENSVACAAPTDVPPVKVRLTAAKTVLRRHRKLHLARSQGSDSTSTSDDGLHLDRPQGSDSTSTPDDGLRLARPQGSDSTSTSDDGLRLARPQGSDSTSTPDDGLRLARPQGSDSASTSEDGLRLARPQGSDSASTPEGGLRLARPLGLGLNLDLGRRSPPRPTPGPRLSLDLGGASASPDLGLGPTTSQEGPSLPYP

SEQ ID NO: 76427 - protein, 113 aa, Zea mays
  Coding DNA Sequence Number=SeqID_34648
  Subcellular localization annotation: CTP_CleavageSite=48; ConfidenceScore=5.17e-01
METLSAKQEDMVDVILKPTSNQSNSSTRPRHVSGSGAAMCLEKMIYSKASTVVQTPRVGPGPPYIQSGPPRLVPDLHVGKLDPWNGIRTPLYGVRVTHSGVPRSQVGTYTGLE

SEQ ID NO: 76428 - protein, 65 aa, Zea mays
  Coding DNA Sequence Number=SeqID_34649
MAKFQSTLYKILKSKVVMQTLVDDAGIFTEVGAIVVPQDRLSPIENGDALGEAGGHGGCDPEADF

SEQ ID NO: 76429 - protein, 267 aa, Zea mays
  Coding DNA Sequence Number=SeqID_34650
MEQNPREEDDRPMGLTWGKCTATYGAWDPRISGRRSQVGKWSQMVSVQAAGVHRRRPRTSPPPRRPPDASEFALVRGDEGFARRVASSPSPQHFPSKGPVRLSHLVPKTSLDGGDAALARRGPAGVFEVTFDGDAAQHFPSEGPVRLLDCGFPEASCRVYKKGQRGSGCLLPFRALENPKLLKTLARSPALLVPLHRSSGPRQANRASPPTDMQQLGYFGNGVGRVPGAEEIPEPEGELVVFVAFFIAGLRLPAHRFVAEVLQRFEV

SEQ ID NO: 76430 - protein, 208 aa, Zea mays
  Coding DNA Sequence Number=SeqID_34651
MLLDLGLVEVLLLQRLCVKSPLGFVLAGGRHGEHNRGHHAGAGAPEGADRDGKVPQRRKLTPVSNCATTRTINGKIKVRVGCLPQAQTQERLEDGGEAVKSRVDGGGLRLHGKHSGECGLGKPEGLGANRGVSRVADGEAELTGATEATWTQRRSQNGGGLWGKWASETRGLKGQGREEVAEERAVMGASTVGERGREVRDVEGADGW

SEQ ID NO: 76431 - protein, 123 aa, Zea mays
  Coding DNA Sequence Number=SeqID_34652
  Subcellular localization annotation: CTP_CleavageSite=79; ConfidenceScore=5.56e-01
MPTPTFNHSALPLKRRPRVQSLGITSKMPTPTFNHSALPLKRRPRVQSLGITSKMPTPTINHSALPLKRRPRVQSLGITSKMPTPTINHSALHLKRRPRILSLGITSKMPMPTFYHSALPLKR

SEQ ID NO: 76432 - protein, 188 aa, Zea mays
  Coding DNA Sequence Number=SeqID_34653
  Subcellular localization annotation: CTP_CleavageSite=52; ConfidenceScore=5.48e-01
MPTPTFNHSAQPLKRRPRVRLLGITSKMPTPTFNRSALPLKRRSHVRLLGITSKMPTPTFNHSALPLKRRPRVRSLGITSKMPTPTFNHSALPLKRRSRVQSLGITSKMPTPTFNHSALPLKRRSRVQSPGITSKMPTSTFNHSALPLKRRPRVRSLGITSKNADADLQSLGAASKAPTTCSIARHYF

SEQ ID NO: 76433 - protein, 162 aa, Zea mays
  Coding DNA Sequence Number=SeqID_34654
  Homolog annotation: Hit_ID=Q6QP51; Match level="QueryCoverage=37%, HitCoverage=26%, E-value=2e-12, Identity=72%"; Hit description =Putative growth-regulating factor 1
MAERYQLPRSCVPPTTRRKDGGYPPSGGLEGGKTRCIREREDMVASQGDHPPFKGDSPYLRPQLSRSERRFAFAITTASKKGPGKGDTPKRILPHEGTWLRASLLIRGLKAGPSEGFNSRLRARGLHTHYWSEVRRPAPRKGSMAVSGYSGSAPTTDQGFEG

SEQ ID NO: 76434 - protein, 206 aa, Zea mays
  Coding DNA Sequence Number=SeqID_34655
  Subcellular localization annotation: CTP_CleavageSite=19; ConfidenceScore=5.05e-01
MGDIHRFFASSLEERNSVGVASPAAPPRRGSPKTVTTSPWVGRSKPGCDLGPTLSFKDVHHPRWGGGRAEPELYLPRGFVGHPLLRCSRERALTGPAGGSDFDNAGLADGGRCQPQRVGLVGLAPGAPSCRKAAAAPCAREDRPRCRALLGRRSYSGAVLPLHRYGAFARGSVPCSSGRIRVGICRRADGPCRRCRGGGGSRSPRR

SEQ ID NO: 76435 - protein, 202 aa, Zea mays
  Coding DNA Sequence Number=SeqID_34656
  Gene Ontology: Mol. function=protein transporter activity; Cellular component=cytoplasm; Biological process=intracellular protein transport
  Homolog annotation: Hit_ID=Q2QP84; Match level="QueryCoverage=84%, HitCoverage=18%, E-value=5e-57, Identity=69%"; Hit description =Vesicle tethering family protein, putative, expressed
  Pfam annotation: Domain name=Uso1_p115_C; Domain location=75-197; Score=133.1; E_value=7.6e-37; Accession=PF04871.4; Description=Uso1 p115 like vesicle tethering protein, C terminal region
  Subcellular localization annotation: CTP_CleavageSite=57; ConfidenceScore=5.03e-01
MDTGDPSNPSPLSSDPPIHSRSFHLREELLRTGGGTTTDTSQKPSSGRERVQIESLRQELEGAKRQIGALKSEKSQIEAEANNQRNLSVKLESDLKSLSEAYNSIEQANYRLDAEVKALRQGGSVPYPDVEAIKAQAKEEAEKDSEAERNDLLVCLGQEQTKVEKLSTRLTELGEDVDTLLQGIGDDTAIPDDDDEDEDDEE

SEQ ID NO: 76436 - protein, 72 aa, Zea mays
  Coding DNA Sequence Number=SeqID_34657
MARVACTLRGKRLDGESLIIDKPYLDTFQSQQPLESLFFSQVKKRHTFVASFRRWYRRKNTRSKAAGGKDPP

SEQ ID NO: 76437 - protein, 54 aa, Zea mays
  Coding DNA Sequence Number=SeqID_34658
MARVACTLCGKRLDGGVSVLSVDVRKQPTFVASVLRWYRRKNTRSKAAGGKDPP

SEQ ID NO: 76438 - protein, 193 aa, Zea mays
  Coding DNA Sequence Number=SeqID_34659
MESLSLVGWYRRKNTRSKAAGGKNPPSKLLFDTYREVFLPPLVKRSWERKMPPRTRGTARKHTGPIGVPRHQLAPRHEDSSSDPIGDLEAKVNQLQTELQRRIDIWVTDGDRINELRSDVRRLRDQLADRDLALDWAMPSQTRAQDGASTSRGREATPNPPPVPPTLAEAIAALVNATADNTRFLREMAGQQL

SEQ ID NO: 76439 - protein, 210 aa, Zea mays
  Coding DNA Sequence Number=SeqID_34660
  Subcellular localization annotation: CTP_CleavageSite=71; ConfidenceScore=5.22e-01
MHTMLGVNIGPPRLPKASAHHRQCRGTNPNHKFGGDDMVRKAKRMLRMAKSLVTLRSTRRAIKDETLTTLTCSAARQPRIGCSCSRRPNEQELEIMRMREEMRQQREFMDACNAHNQAMYQLMQQQCMTPNIPPPPQWSQFASTPTPGLGTQQFNTPPTHIPAPEDRVTPEAGGSGSDPTGTGFVKSLFAYPSPGGGSGQRSNHPSGGYP

SEQ ID NO: 76440 - protein, 169 aa, Zea mays
  Coding DNA Sequence Number=SeqID_34661
  Subcellular localization annotation: CTP_CleavageSite=58; ConfidenceScore=5.35e-01
MTLTSTGDMNWVDPSMVYTLFDGFIDSSSVRSQRTGSSSRSSCSRRPNEQELEIMRMREEMRQQREFMDACNAHNQAMYQLMQQQCMTPNIPPPPQWSQFASTPTPGLGTQQFNTPPTHIPAPEDRVTPEAGGSGSDPTGTGFVKSLFAYPSPGGGSGQRSNHPSGGYP

SEQ ID NO: 76441 - protein, 93 aa, Zea mays
  Coding DNA Sequence Number=SeqID_34662
  Subcellular localization annotation: CTP_CleavageSite=13; ConfidenceScore=5.17e-01
MSQGPRSGWQTPRASGSRRRRISRKPSTSCLQIEELPSSCNRIGELPSLRLRIEEPLLLRHEEPLLSRHVPPDQGATIVAPSDWRVVAVAPLN

SEQ ID NO: 76442 - protein, 214 aa, Zea mays
  Coding DNA Sequence Number=SeqID_34663
  Subcellular localization annotation: CTP_CleavageSite=15; ConfidenceScore=5.01e-01
ADPQWGPGGPRHTLSQAHRGPHLAILFTVGPFQLLLVSIVRHGFPVPDFLASARLFQGSSVPGAGGWKVETLAILLGLLLCSGCRWPTPTACGPALTSARTKTEVPFPAYSRTAKSAPDQRMSQGPRSGWQTPRASGSRRRRISRKPSTSCLQIEELPSSCNRIGELPSLRLRIEEPLLLRHEEPLLSRHVPPDQGATIVAPSDWRVVAVAPLN

SEQ ID NO: 76443 - protein, 83 aa, Zea mays
  Coding DNA Sequence Number=SeqID_34664
MKYYLRLVLYLKEVKYIDKCNMPYTLHDSLASEVGVVTYGPTVPVLLTHGSVIQTIVVVQGNEMVLVAHQGKWEVVAHPPSLS

SEQ ID NO: 76444 - protein, 87 aa, Zea mays
  Coding DNA Sequence Number=SeqID_34665
MGLGVCGSLCQGGDEDDGFGYDYGAGMWYSFRLERVNEVLFEVGINLYLKVNEVLFEVVLYVKEVKYIDKCSMPYALHDSLASEVGS

SEQ ID NO: 76445 - protein, 86 aa, Zea mays
  Coding DNA Sequence Number=SeqID_34666
  Subcellular localization annotation: CTP_CleavageSite=55; ConfidenceScore=5.05e-01
MDLTSPHTTGGTATNTNQPPPVSHPDLRAPKPRREIITKCARNKSYTYDDSWDVSTASVSSYTFIPQQVVGNNVHELTKGGSPCEV

SEQ ID NO: 76446 - protein, 61 aa, Zea mays
  Coding DNA Sequence Number=SeqID_34667
MAVDEGFLQLLFPETVAGFRKLVELCKGPQCSALTNLFGEPYTSHELQPLVSSCTLFPTTC

SEQ ID NO: 76447 - protein, 141 aa, Zea mays
  Coding DNA Sequence Number=SeqID_34668
MHRALPPSEPPDGEHPRCLRLAAVGGARLRGGWRPSAIARLQGFSSCSSAAFPHQWSSRMMTTSLVVGRSKPGYGLCPALSFKDLHHPCCGGGRAEPGFYLLHGPAGRLFLQHSGERALTGLAEGANFDNAGPVDRKRRQL

SEQ ID NO: 76448 - protein, 464 aa, Zea mays
  Coding DNA Sequence Number=SeqID_34669
MGSTRVAFVLLLLEERDLAGVGAFQPLLGFKDFHHAARLHSLTNASRIFIIRAGNEGRASWGLPPRGPATHFFLQHSGERALTGLAEGANFDNAGPVGRKRRQLQRAWLAGSAGSVAASDAAYCRLIRAGASAIRRHGAGAQVAAVVGAEVVAAREGFSADETVGAICGRTPGSLALMACPRPSSGDVGEGLVTSASALRSSLLLFSRPKRGSLSLLVQWSPASHLEFVVPQALWCGGCSYPRKWNQSSVCNGTLSMGVFSLWLSRPEHLEAELTQKEASSAQEKAACQADEVQQRRLELGQVICELDQPRSHAAEAASRADVLEGQLTEVTERPAEVPARAGTLAETLAAMAQALCWRPPSGWRSFRPCRRPRPGQIPPKVETTPRVLLLLLPMFLFVGSIIAYPSESYFSRKVMSEDSVIDIVVKARKSFWTPLSKQSKSAKDVLAKDFSEENFDAEGVPPF

SEQ ID NO: 76449 - protein, 117 aa, Zea mays
  Coding DNA Sequence Number=SeqID_34670
MGDDSSLPWMKRMSGKKGAGVALIANNLRCPEENPAVTPDFRSGLALCGVKVKQLLLVGQSEHYALAPIDGPPTKPTTPPGSSNYSAKGVPFHPHGRIVIPGGHSTNRSLRRVKAIA

SEQ ID NO: 76450 - protein, 125 aa, Zea mays
  Coding DNA Sequence Number=SeqID_34671
  Subcellular localization annotation: CTP_CleavageSite=59; ConfidenceScore=5.04e-01
MAHRSYSGPPEAFSPPFSPLYLWIHGPFPAIEFSVAPSSSLPNSSDPGTPLGSRLPQLRQPHRHGEEQRRPQSFTPPRTQQNKLIYDYVLGAQAFFLSTSPQGPIRGVTTRDNSTTMRVEWDALS

SEQ ID NO: 76451 - protein, 99 aa, Zea mays
  Coding DNA Sequence Number=SeqID_34672
  Homolog annotation: Hit_ID=Q6ZA50; Match level="QueryCoverage=48%, HitCoverage=40%, E-value=4e-18, Identity=87%"; Hit description =Putative DNA-directed RNA polymerase II 13.6K chain
MNAPNRYERFVVPEGTKKVSYERDTKIVNVASFTVEREDHTVGNILRIWYNTNRQMCTPRILETFQASIYTGGGGRKSFLSPVQHSPLAWRTTGTIEEH

SEQ ID NO: 76452 - protein, 91 aa, Zea mays
  Coding DNA Sequence Number=SeqID_34673
  Gene Ontology: Mol. function=DNA-directed RNA polymerase activity; Cellular component=nucleus; Biological process=transcription
  Homolog annotation: Hit_ID=Q6ZA50; Match level="QueryCoverage=53%, HitCoverage=40%, E-value=8e-18, Identity=85%"; Hit description =Putative DNA-directed RNA polymerase II 13.6K chain
MNVPDRYEHFVVSEGTKKVSYERDTKIVNAASFTVEREDHTVGNILRMRKDAQALAWRIQRLRSNGFQQHAHSDVHPLAEEMCIRMVDRTF

SEQ ID NO: 76453 - protein, 91 aa, Zea mays
  Coding DNA Sequence Number=SeqID_34674
  Gene Ontology: Mol. function=DNA-directed RNA polymerase activity; Cellular component=nucleus; Biological process=transcription
  Homolog annotation: Hit_ID=Q6ZA50; Match level="QueryCoverage=53%, HitCoverage=40%, E-value=9e-20, Identity=91%"; Hit description =Putative DNA-directed RNA polymerase II 13.6K chain
MNAPDRYERFVVPEGTKKVSYERDTKIVNAASFTVEREDHTVGNILRMRKDAHALAWRIQRLRSNGFQQHAHSDVHPLAEEMCIRMVDRTF

SEQ ID NO: 76454 - protein, 461 aa, Zea mays
  Coding DNA Sequence Number=SeqID_34675
  Gene Ontology: Mol. function=transferase activity, transferring phosphorus-containing groups; Cellular component=membrane; Biological process=two-component signal transduction system (phosphorelay)
  Homolog annotation: Hit_ID=Q5SML4; Match level="QueryCoverage=88%, HitCoverage=38%, E-value=1e-135, Identity=62%"; Hit description =Putative histidine kinase 1
  Pfam annotation: Domain name=HATPase_c; Domain location=181-335; Score=111.6; E_value=2.2e-30; Accession=PF02518.16; Description =Histidine kinase-, DNA gyrase B-, and HSP90-like ATPase
  Pfam annotation: Domain name=HisKA; Domain location=65-131; Score =41.5; E_value=2.8e-09; Accession=PF00512.15; Description=His Kinase A (phosphoacceptor) domain
  Pfam module annotation: Pfam domain module=HATPase_c::HisKA; Domain location=181-335::65-131
MQGHMLQALCIPVIVFASALVLVAAVLCAVAVRALRRAAAREMALNVDLARQKEALRQAERKSMNKSNAFASASHDIRSALSAIAGLVDMSRQEAQSLPAIMENLDQMGVCTNKLFDILNSILDTSKVESGKMQLEEAEFSMADVLQESVDMAYVTGVRRGVEVVWDPCDFSVLRCATVLGDSKRLKQILDNLLGNALKFTDEGHVVLRSWATRPIIGSNVRAPSRFVHPRHGGGSFLGCLFRARKGPGDQDHVQNDPNLVEFYFEVVDTGIGIPQEKRMSVFENYVQVNNGQGGTGLGLGIVQSFVRLMGGEISIKDKEPGERGTCFAFNVLLKISEVQQPQDIEEGPSVPLDTLNRSIYIASAFQEASNFKGVHCVLYVHGYETRRILKTWMESIEVKVWLVPQAEFIGSTLEKVQSNSTATATAECGSADRCFSSKEMVNLLRNNSSPRRAILGGIPS

SEQ ID NO: 76455 - protein, 737 aa, Zea mays
  Coding DNA Sequence Number=SeqID_34676
  Gene Ontology: Mol. function=transferase activity, transferring phosphorus-containing groups; Cellular component=membrane; Biological process=two-component signal transduction system (phosphorelay)
  Homolog annotation: Hit_ID=Q5SML4; Match level="QueryCoverage=94%, HitCoverage=64%, E-value=0.0, Identity=59%"; Hit description =Putative histidine kinase 1
  Pfam annotation: Domain name=HATPase_c; Domain location=181-335; Score=111.6; E_value=2.2e-30; Accession=PF02518.16; Description =Histidine kinase-, DNA gyrase B-, and HSP90-like ATPase
  Pfam annotation: Domain name=HisKA; Domain location=65-131; Score =41.5; E_value=2.8e-09; Accession=PF00512.15; Description=His Kinase A (phosphoacceptor) domain
  Pfam annotation: Domain name=Response_reg; Domain location=600-730; Score=113.6; E_value=5.7e-31; Accession=PF00072.14; Description =Response regulator receiver domain
  Pfam module annotation: Pfam domain module=HATPase_c::HisKA::Response_ reg; Domain location=181-335::65-131::600-730
MQGHMLQALCIPVIVFASALVLVAAVLCAVAVRALRRAAAREMALNVDLARQKEALRQAERKSMNKSNAFASASHDIRSALSAIAGLVDMSRQEAQSLPAIMENLDQMGVCTNKLFDILNSILDTSKVESGKMQLEEAEFSMADVLQESVDMAYVTGVRRGVEVVWDPCDFSVLRCATVLGDSKRLKQILDNLLGNALKFTDEGHVVLRSWATRPIIGSNVRAPSRFVHPRHGGGSFLGCLFRARKGPGDQDHVQNDPNLVEFYFEVVDTGIGIPQEKRMSVFENYVQVNNGQGGTGLGLGIVQSFVRLMGGEISIKDKEPGERGTCFAFNVLLKISEVQQPQDIEEGPSVPLDTLNRSIYIASAFQEASNFKGVHCVLYVHGYETRRILKTWMESIEVKVWLVPQAEFIGSTLEKVQSNSTATATAECGSADRCFSSKEMVNLLRNNSSPRRAILGGIPSGILVVIDVSGGETEEICQEMAKLARIKHQAPCKVVLLEDIKTPSNDLRRLKDMGCDLVLRKPVHGSRQFTLLMTLRDLQVLDAQAQSSHVGPEIAGNRQQQDLPDVVVPCVEDTAASTEASCLAQEQQKPGDDKPLAGMRILLAEDNLVLQSIQRKIMNQLGAFVTVAQNGAMAVNLLREALEQANASEEDIVSLPYHVIFMDCQMPGMDGYEATKLIREEEQRYGIHTPIIALTAHDMEEDLQKAIDAGMDLHLAKPISRKKIVDAVRSVCKCEN

SEQ ID NO: 76456 - protein, 1885 aa, Zea mays
  Coding DNA Sequence Number=SeqID_34677
  Gene Ontology: Mol. function=helicase activity; Biological process =viral genome replication
  Homolog annotation: Hit_ID=Q1EPC6; Match level="QueryCoverage=68%, HitCoverage=80%, E-value=0.0, Identity=70%"; Hit description=DNA helicase homolog, putative
  Pfam annotation: Domain name=DUF889; Domain location=1658-1866; Score= 309.1; E_value=8.3e-90; Accession=PF05970.5; Description=Eukaryotic protein of unknown function (DUF889)
  Subcellular localization annotation: CTP_CleavageSite=46; ConfidenceScore=5.00e-01
MLGGLMILFCALAAIWLVGQRIGQPIYMSHLCSFSLQLKATTVRMTSAYVAGGGNNANRIGMALCRCRNNVLMEPAVLNRERVALDKKNKMPVLFDDYSDEDFYGAQRKYSIVARVEVKFPIEPRYHDRQHYILSDINGAKIEAIATRYEIVKYFNSLLHEKHVYKMHNVWFGLNPGAFNFRHLNGTMELYFTHQTVVEPYTVPVQMPPFPKHIFLNLDDIAELPNRTLVDIMAIVVHLDTIHRTMWGTFRKIVIMDARWSLHTIKVWGDLLNKNALRWALANENYSIIIGTMFRRFRKQDQMGHNVDRKPFTDISSNIIRGDQNELLGPMLDAKERKRKRDRERYAAMSVEQKNEKNRKRREARQRNKGHNVIPNVSGGDQNEQLRLYNQTPRRKEGKLEYIRKRRALQASTLNQGSIAMEVPTYTSEVVHSTADVSEPDSSSDNACDWVIPEYTSTPFMPASTQTEDVGSPDMSTEPLRRKHHVLPGERQAILARQNKKFEANIARNVATLTEDTISDVGQMDDSTQPGSTIEINNTVDDDDEGVIFGEDNDENKGYLFADEDTNEDFEIDGTQDQSVVTDVPDPYDKVYSNIPEETHMLKHVPDCGYCTAKKFEYEPPGFCCRGGKVELAPLETPPLLRRLWDSADSDARHFRDNIRFFNGHFSFTSLYCCLDSMTTNMRDSGIYTFCAQGMMYHNIKSFGSECGAEHKHLELYFYDDDPSLEHRYRKCREDQIQKDQEVIKQIVGILRGNPYSEHLRSMGHVENLADYHIALNLDQTLNQKTYNTPLTSEVAAVWIEGSERRGQFIKSVMLHGKDRSSHGIRSYHGCYDALSYPLFFPRGELGWHANIPKVGVSMDEVDAYRATHRASNGNDEDAEPPTHLCVSVRDYYCYKFQIRPGVFNPILHGKRLFQQFAVDTYIKIESSRLDFIRKNQDRLRADLYQGLVDSMLDGDVRGEKVGKRTVLSPSFIGGPRDMRRRYMDAMALVRKFGKPDIFLTMTCNPNWDEIKRELLPGQTPQDRPDLVVRVFHAKLQELKHRLTKQDILGKVRAYVYVVEFQKRGLPHAHFLLIMQRKYKLTCPEQYDLLISAEIPSNKYPELRKMVIKHMMHGPCGSLNPNCPCTKGRASCKNQYPRHFHEATMQGKDSYPNYRRRDDGRKEKVRGCELDNRWVVPYNPYLLRLFNCHINVEACGSIKAVKYLFKYIYKGHDRASVVMRDASKENGDVDEIQQYRDARWVTPPEALWRIYGFELSQNSPSVMQLQLHLPNMHMVTFHERQMVERVVNRPGADRSMITAYFKANKLYEEARGILYRDFPEWYTWQQGKVWQRRKRNTGGQVGRIVSALPSEGERFYLRLLLNHVTGATSYVDLRTVDGDTLPSFREAAQRRGLLEADNTIDECLNEAALYQMPSALRRLFATILVFCEPNDVAELWQRHLDKMSEDYHRITQSKSHLQQMVLIDIRNMLQSMGKDIKTFPLPAIIDRYDDSQGIDREIYEEEIIEATAEDVALQETLNEEQKSAYEKILSVVDTSNGGVFFVDGPGGTGKTYLYKALLAVLRSQDKIAVATATSGVAASIMPGGRTAHSRFKIPLTIDDGAICTFTKQSGTSKLLQKASLIIWDEASMAKRQSIEALDNSMRDIMGRPDLPFGGKTIVFGGDFRQVLPVVRKGSRAQIVAASLRSSYLWESMCHLKLVRNMRAKSDPWFAEYLLRVGGGTEEVNNDGDVRLPDEVCVPYTGDDRDLDRLIDDIYPSLNENMSNTSYITSRAILTTRNDWVDMINMRMIDRFQREQMMYHSFDTAVDDPNNYYPSEFLNTLTPNGLPPHVLKLKIGCPFMLLRNIDPANGLCNVTDDKMNKGVEKKSTINGVTYTKNIVYKEVLTP

SEQ ID NO: 76457 - protein, 474 aa, Zea mays
  Coding DNA Sequence Number=SeqID_34678
  Homolog annotation: Hit_ID=Q1EPC6; Match level="QueryCoverage=36%, HitCoverage=12%, E-value=1e-78, Identity=73%"; Hit description=DNA helicase homolog, putative
  Pfam annotation: Domain name=DUF889; Domain location=1-112; Score =27.7; E_value=2.2e-13; Accession=PF05970.5; Description=Eukaryotic protein of unknown function (DUF889)
  Pfam annotation: Domain name=Peptidase_C48; Domain location=132-347; Score=2.8; E_value=0.00035; Accession=PF02902.9; Description=Ulp1 protease family, C-terminal catalytic domain
  Pfam module annotation: Pfam domain module=DUF889::Peptidase_C48; Domain location=1-112::132-347
MSNTSYITSRAILTTRNDWVDMINMRMIDRFQREQMMYHSFDTAVDDPNNYYPSEFLNTLSPNGLPPHVLKLKIGCPIMLLRNIDPANGLCNDTRLVVFLPRIPLCPSDDEMFPFHFKRKQFPVRLSFAMTVNKSQGQMIPNVAAYLPEPVFSHGQLYVALSRATTRLNVKGDLALIDWIKEIPCEPRVEVVLIDDAFVERKWIECLFQPDAYLGDEVFIPINIREMHWYLAMINARNMEIQVLDSLGTSSGRNDLIDTIKGLQRQIDMVSQRKELKDHMWPDLRVASWPLREIEMEYAKQTNSSSCGLFLLNYIKYWTGDELSDNFTQDDMSHFRKKLAAILLSSDINKRKGCPLYKYDKEVDAGCSSDVQILDSPTNPKKRKLLCVSEESEVLMEDDDGPITQEDLERWFVHDWDKRTPIKIPTDECTNEFLLSGLSTKDMPVTKADLIDVLCDYIMTIQDDTTLEMTWVRS

SEQ ID NO: 76458 - protein, 117 aa, Zea mays
  Coding DNA Sequence Number=SeqID_34679
MDREGAAAWRHGHGPRRGRPKELLRDQGGKQGRGNAVQGAVTAGRRWSSVCNRGGSTTARAGKGRLRASGRSGWSREGAAWGLGWGIFLGAMAGSRGRHGKLRVGEEQALCEVEQGT

SEQ ID NO: 76459 - protein, 128 aa, Zea mays
  Coding DNA Sequence Number=SeqID_34680
MAGSRGRHGKLRVGEEQALCEVEQGTGTSSHGAPMKGERAAMEMLDHGAKIKLLAALLWRPGRKKRCAGCSPVGSERPGRRAPWWPRGGAELPALCCSPEEENRWLLMSWKEKTGKEKGGGLGDFRRG

SEQ ID NO: 76460 - protein, 274 aa, Zea mays
  Coding DNA Sequence Number=SeqID_34681
  Subcellular localization annotation: CTP_CleavageSite=45; ConfidenceScore=5.56e-01
PLLSKFLRGSRAAAQRQRKPAATALHFSGSFKLSAVVAPASCCVVLDAVKTAASSSLLQRGRAGQGLDGILAAAGEGTWAHGAGGRWGLRRQRRWFGARVGAVGWRSLLRHPSPHDLDYCCGRGDNRASARSRGFGSSVVRLLPGMADERCGARGGWLRALGRVVGGPPAKAMLACGWTAVTPVGATPTLLRVPSLDLSPHAGSLASAFLRRAAMAFRHRFSFLKARPRRPPVCVFVRVVEALCHSAWFDGVRAFVAFGVCSLPGFGVVDLCSW

SEQ ID NO: 76461 - protein, 402 aa, Zea mays
  Coding DNA Sequence Number=SeqID_34682
  Gene Ontology: Mol. function=RNA splicing factor activity, transesterification mechanism; Cellular component=nucleus; Biological process=mRNA processing
  Homolog annotation: Hit_ID=Q5ZMJ9; Match level="QueryCoverage=63%, HitCoverage=26%, E-value=4e-09, Identity=28%"; Hit description =Serine/arginine repetitive matrix protein 1
MTLAIMIRETWLSGTKKNSWAGKELCLSIKKNGIGPVLRKTGPKTYTERTVEKPANELTNNLDNDSPHTQTHLESSLPSSNTRDEQLRLPKTSHTLSKQLDDAYIQTSTQGIRPQRAIVAKPQHTLTRQLRLFTTSKDPQRRTPRASRRLKRQKPGHHRAKRSDKEPPQHGRTRKLEVFWAAPSRRRNNVEKPSPPAWYKPSKVSSEDLAEQCRSPAPRRKLKGQPRRCHPAKPPRDVTFCRPPTHQPTSPNPQSPNAGRAPARDPKKAEARVPAWGERSKDGTLNRVGVAPAGVTAVRPQASMAFAGGPPTTRPNARSHPTLPTPQAETRGEMNLAGEAQDPAPSPRPNQRATDAPATTTVAKERRPPPPPAGPKGLVEQRQHLAPHPPPAIPGSSRCDAP

SEQ ID NO: 76462 - protein, 619 aa, Zea mays
  Coding DNA Sequence Number=SeqID_34683
  Gene Ontology: Mol. function=binding; Cellular component=integral to membrane; Biological process=phagocytosis
  Homolog annotation: Hit_ID=Q2QWZ9; Match level="QueryCoverage=88%, HitCoverage=92%, E-value=0.0, Identity=78%"; Hit description =Endomembrane protein 70 containing protein, expressed
  Pfam annotation: Domain name=EMP70; Domain location=91-577; Score =941.3; E_value=3.9e-280; Accession=PF02990.7; Description =Endomembrane protein 70
MLPSTVGGRGRYLMLGIALALAALLALASASESDHKLTNVRNSGLRTTTFYLSYFAILPNVMKGPLAELYKTEEPVKLWVNKVGPYNNPQETYNYYSLPFCQPSENPTHKWGGLGEVLGGNELIDSQLEIKFLKNVEKGFICTLELDAKKVQQFADAIESSYWFEFFIGFVGETDKNSENKHYLYTHKNILVKYNDNRIIHVNLTQESPTLLEDGKKLEMTYSVKWVATDVSFARRFEVYLDYPFFEHQIHWFSIFNSFMMVIFLTGLVSMILMRTLRNDYAKYAREDDDLESLERDVNEESGWKLVHGDVFRPPQSLMFLSALVGIGTQLAALILLVIVLAIVGMLYIGRGAIITTFIVCYALTSFISGYVSGGLYSRNGGKNWIKAMVLTASLFPFLCFSIGFALNTIAIFYRSLAAIPFGTMVVMFVLWAFISFPLVLLGTVVGRNWSGAPNNPCRVKTIPRPIPEKKWYLTPSVISLMGGLLPFGSIFIEMYFVFTSFWNYKVYYVYGFMLLVFVILLIVTICVTIVGTYFLLNAENYHWQWTSFSSAASTALYVYLYSIYYYHVKTKMSGFFQTSFYFGYTLMFCLGLGILCGAIGYLGSTLFVRRIYRNIKCD

SEQ ID NO: 76463 - protein, 379 aa, Zea mays
  Coding DNA Sequence Number=SeqID_34684
  Gene Ontology: Mol. function=binding; Cellular component=integral to membrane; Biological process=phagocytosis
  Homolog annotation: Hit_ID=Q2QWZ9; Match level="QueryCoverage=60%, HitCoverage=39%, E-value=1e-112, Identity=82%"; Hit description =Endomembrane protein 70 containing protein, expressed
  Pfam annotation: Domain name=EMP70; Domain location=176-379; Score= -93.5; E_value=6.4e-12; Accession=PF02990.7; Description=Endomembrane protein 70
MQSHREWLEQSPEWPPARFAGNCCHGSWPRPISGETESSPEAETVFGRGRVLFRGLDSGLSSCPRRVLARQKWSFRERGSCWARDPRRLGPTRAPNPKARDRDTLVSSCSPDLAVGGGMLPSTVGGRGRYLMLGIALALAALLALASASESDHKYKTEEPVKLWVNKVGPYNNPQETYNYYSLPFCQPSENPTHKWGGLGEVLGGNELIDSQLEIKFLKNVEKGFICTLELDAKKVQQFADAIESSYWFEFFIGFVGETDKNSENKHYLYTHKNILVKYNDNRIIHVNLTQESPTLLEDGKKLEMTYSVKWVATDVSFARRFEVYLDYPFFEHQIHWFSIFNSFMMVIFLTGLVSMILMRTLRNDYAKYAREDDDLESL

SEQ ID NO: 76464 - protein, 76 aa, Zea mays
  Coding DNA Sequence Number=SeqID_34685
MRVVWDALGQVIREVLCWVLVFGHSETKASIMAPIFSLRDLGTSIVPRLFREGRECYETDISVVLTVMSGLGILFD

SEQ ID NO: 76465 - protein, 54 aa, Zea mays
  Coding DNA Sequence Number=SeqID_34686
MVMEWSVEAVGVEGDGGGQERVVKRLDAQRRWTAATQFVVALQTFTVRGSSPVA

SEQ ID NO: 76466 - protein, 52 aa, Zea mays
  Coding DNA Sequence Number=SeqID_34687
MEWSVEVVGVEGDGGGQEQVVKRLDAQRSWTAATQFVVALQTFTVRDSSPVA

SEQ ID NO: 76467 - protein, 54 aa, Zea mays
  Coding DNA Sequence Number=SeqID_34688
MVMEWSVEAVGVEGDGGGQGRVVKRLDAQRRWTAATQFVVALQTFTVRDSSLVA

SEQ ID NO: 76468 - protein, 83 aa, Zea mays
  Coding DNA Sequence Number=SeqID_34689
MGERRTPGCTVRTLKNGPGPPDIQSGPLRLVPYLHAQSGADLSTYASAPRPGGDPMLPHGLPRVMRRACPFHWQAMCRLSEST

SEQ ID NO: 76469 - protein, 145 aa, Zea mays
  Coding DNA Sequence Number=SeqID_34690
MWQHRVSAWAGSRSVCGQVRTRLGLDTCRYRTPAWVLFKVRVHSVLGPWDPPVGDPDPIRGGPDPIPGVQLAHVEVQDQPWGSGLYIPGSRTNLGGPDCIFGGPALFRGGSEPTVDALEYITFSGHVAAPDSPMWWSRGAAVDPE

SEQ ID NO: 76470 - protein, 97 aa, Zea mays
  Coding DNA Sequence Number=SeqID_34691
  Gene Ontology: Mol. function=transferase activity, transferring hexosyl groups; Biological process=carbohydrate biosynthetic process
  Homolog annotation: Hit_ID=Q6Z5N7; Match level="QueryCoverage=65%, HitCoverage=17%, E-value=8e-29, Identity=87%"; Hit description =Putative Avr9/Cf-9 rapidly elicited protein 231
MKKCISNRPQDHPFTQQQLPACKTILATQTHGLGGDNVFGSCRPLHNGLVSLMHWSGKGKPWDRLDAGKPCALDHTWKAYDLYIGENDSSLASASSG

SEQ ID NO: 76471 - protein, 104 aa, Zea mays
  Coding DNA Sequence Number=SeqID_34692
  Gene Ontology: Mol. function=transferase activity, transferring hexosyl groups; Biological process=carbohydrate biosynthetic process
  Homolog annotation: Hit_ID=Q6Z5N7; Match level="QueryCoverage=55%, HitCoverage=15%, E-value=1e-26, Identity=87%"; Hit description =Putative Avr9/Cf-9 rapidly elicited protein 231
MTVSIRIAVEMEIIEIQDHPFTQQQLPACKTILATQTHGLGGDNVFGSCRPLHNGLVSLMHWSGKGKPWDRLDAGKPCALDHTWKAYDLYIGENDSSSASASSG

SEQ ID NO: 76472 - protein, 212 aa, Zea mays
  Coding DNA Sequence Number=SeqID_34693
  Homolog annotation: Hit_ID=Q6QP51; Match level="QueryCoverage=30%, HitCoverage=29%, E-value=3e-10, Identity=53%"; Hit description =Putative growth-regulating factor 1
MAEAITGVPDPVLQTTPYGPDACYMMRTAKRKFGEDSYLCPEGPMVHNGGEKMLAADPPPPSAPTRLQTTRLNPREGAPPAVLQSVERADFAVTVFQLTHVNPGAFKQVSARVDAQGPGKGDTPKRILLREGNMPRASLLIRGSKAGPSEGFNGRLKALGFCAHYWSEVRWPAPRKGSTAASGHSGSAPTTDQGFVGWPSKGSQSPQTQSEG

SEQ ID NO: 76473 - protein, 76 aa, Zea mays
  Coding DNA Sequence Number=SeqID_34694
MKGYDSFNLARPLRDQRSRPLFPTQRRSMAAPRATMAEAITGVPDPVLQTTPHGPDVCYTMRTAKRKFGEDSYRAQ

SEQ ID NO: 76474 - protein, 243 aa, Zea mays
  Coding DNA Sequence Number=SeqID_34695
MHRVLPPSEPPDGERPCCFRLAAVGGAQLCGSWYLSAIARLQGFSSGSPAASPCRWSPKTVTTSLMVGRSKPGCGLCPALSFKDLHHPCWGGGRAEPGPAFTWAGVPLLPPASRGGNHPPALRRRRPPAMPGKANCCCPARDGSEDLPVRFGAAGARWCGVGGQVDVTVGAEVVAARESFSADEIVSATRGPTSGSLALISGSRPPSGDANESLPAAASVLGPLLLLQRSLANRPEFVVPQAL

SEQ ID NO: 76475 - protein, 521 aa, Zea mays
  Coding DNA Sequence Number=SeqID_34696
  Homolog annotation: Hit_ID=Q5VSA6; Match level="QueryCoverage=17%, HitCoverage=22%, E-value=2e-40, Identity=87%"; Hit description =Transducin protein-like
  Pfam annotation: Domain name=WD40; Domain location=431-469; Score =39.5; E_value=1.1e-08; Accession=PF00400.22; Description=WD domain, G-beta repeat
  Pfam annotation: Domain name=WD40; Domain location=476-514; Score =7.4; E_value=5; Accession=PF00400.22; Description=WD domain, G-beta repeat
  Pfam module annotation: Pfam domain module=WD40::WD40; Domain location=431-469::476-514
MKATWALPIWGLGRWKDAMHEENRRVKGWTAMQAACNRTKGAHPFDFDASSMEAQAHTSCNRRADYYVRETAPPLAPVPRLLDCGTGAATRGNPAHGPTVPTEHIDHGSVSRGRRRDGRYGQKWADSNGGGRRRKQRSSRLQAHVPSWDSERALSHGVKTTRPCSVPRTTRARTTAAQRTTRLVALTLRQDRRHLWQAKQATLHLRHNDRVKKGTGKGDTPKGILLREGSGPRALLLIRGSKAGPSEGLAPEGFDIRLRARRARDDSGYVRYMAEARATLPRSGLRPVKGQRSRLTRAQPRAKAADPGGFTSRPRVSSSNGRTFDSPEAQLGQASRRSNLGRIATPIDRIAGAFNDDWASSSPRRRGRRTRPQAESPSSVPRGRPPAQSQPPRSCPGQAQLRPVPASVQHPGTTTRDEMAGLERPRRRPPPDPVAVLRGHRAAVNDACFHPSLPLLFSGAADGELRAWDTASHRTASSVWAHAGSVGVYSVAAGAGLGNKIISQGRDGTCKCWAIEEAGLS

SEQ ID NO: 76476 - protein, 322 aa, Zea mays
  Coding DNA Sequence Number=SeqID_34697
MGSPRVAFVLLSLEERNFAEVGTFQPSLGFKDFHQAAQPHPLAGGQPRRFKDLHHPGWGGGQTEPELYLPRGFVGHLLPQHSGERALTGLAGGSDFDNAGLRVGLAGSAGSGLASGAPSRRGSGCHAAGTGGPPKTSRAARAAFVFLGRPAFAPVRRLCAEVGAARPGGSEWGSAGGQMASVVGAEVVVAEEVLVTDGITATIWASGLRLFGFDSLSSPLEWGRGRGARCSSVRPEAIAAVVWPPGAGVVVAAARAGGGVPPGVSSPRTPSDVGGCSYPQGWNQSSVCNGTLNAGVCSLWLSGPKHVGIFGCNTMSFPYFEH

SEQ ID NO: 76477 - protein, 479 aa, Zea mays
  Coding DNA Sequence Number=SeqID_34698
  Homolog annotation: Hit_ID=Q6QP51; Match level="QueryCoverage=32%, HitCoverage=84%, E-value=1e-20, Identity=44%"; Hit description =Putative growth-regulating factor 1
  Subcellular localization annotation: CTP_CleavageSite=28; ConfidenceScore=5.25e-01
MAERYQLLRSCVPPTTAARQKQRGRSPSGGSEGGRAACIRGVRRHGCHPRGRPLFKRRLSPLASSAVATESSPTCSKVLPLQHGGWVSRVMQAGPGQKKPNPPRAERVTAQRLRALLHFCPDQRVKGRTAMQAACNCTKGVHPFDFDASSMEAQAHTSWTGKGDTPKGILLREGSGLRALLLIRGLKASPSEGFDGRLRALGLRAHYWSEVRRLAPRKGSTAASGHSGSAPTTDQGFVGWPPKGSTATSEHAERGMTLGTSDTLPRLGLRSRGTLGHFRDQQERFCNGIPSKGGIEPSDPIKRDRVQQITYRSRVHPLKGHDLASPEPSIGQRQPTQEDSGVARGVRLTAIKSGLRRHRKLRLARPQGSDSTSTLEDASTSDDGLRLARPQDSDSTSTSDDGLRLARPQGSDSASTSDDGLCLAQPQGSDSTSTSDDGLRLARPQGSDSNLRPRRSLRLARPWGSGPTTSQGGLHYSYL

SEQ ID NO: 76478 - protein, 141 aa, Zea mays
  Coding DNA Sequence Number=SeqID_34699
  Homolog annotation: Hit_ID=Q2QUC7; Match level="QueryCoverage=40%, HitCoverage=12%, E-value=5e-15, Identity=84%"; Hit description=Zinc finger, C3HC4 type family protein, expressed
MVSVALSHVGGYRNVDNLDDLRSGVKKNKLLHEMLKTCYSQVWETVSQMQAVHQMIGALCNNSSKSCTVNTVLWNTIQLLFPSEVEVCARALQRKHIIPLVTYVGQQAAALLGEQLVYHVVHRTIGCGAATPYQRSITQII

SEQ ID NO: 76479 - protein, 529 aa, Zea mays
  Coding DNA Sequence Number=SeqID_34700
  Homolog annotation: Hit_ID=Q6YUT4; Match level="QueryCoverage=39%, HitCoverage=34%, E-value=1e-50, Identity=54%"; Hit description =Putative adenosine monophosphate binding protein
  Pfam annotation: Domain name=HMA; Domain location=129-189; Score =50.4; E_value=6.1e-12; Accession=PF00403.16; Description=Heavy-metal- associated domain
MKIPLKVKIFVWYLRKGVGQQAAALLGEQPVYHAVQRTIGCGAAMPPVALPGKEGVDVVLEVEVLDEAGKPAGGSEAQHDRQHDRGPLNSRREDRSLSDGKEPDDGDRGHLQGSLERRVAAPALYHTCALKVNIHCDGCEKKVKKILHKIDGVYQSSIDAEQGKVTVSGLMDPATVIKKLNKAGKPAQLWGAKLDVVSQLQKLQLGGGGGGGKDKQPKGGDGGAKGQQTKGGGGEGGGGKGGKDANMVLPQPTPQQMQQVMQMKGMKLSHVLGWARVGGEVSRWRGFRCSVGRRWVYGRLGRTSDSRALPTTHLNAPLTPISFLERTTLVYPDRPSIVAAGHDAAPPPRTWRQTRDCCLRLAAALAGLGVARRDVVAVFAQNIPAFCELHFGIPMAGAVICALNSRLDAGMASVLLQHSEAKVVFVDAVLLGVAREALRFISQQAGGASRVPAVVLINGALDEPPPAATGNNKIPGVDRCYEYEALLSNSRGGDPEFLIRWPDDENEPIALDLRAGAVNRGEGRWICGR

SEQ ID NO: 76480 - protein, 116 aa, Zea mays
  Coding DNA Sequence Number=SeqID_34701
  Gene Ontology: Mol. function=kinase activity
  Homolog annotation: Hit_ID=Q6QP54; Match level="QueryCoverage=79%, HitCoverage=38%, E-value=2e-17, Identity=60%"; Hit description =Putative kinase
MEPGGGTAVGAVGSLLTSSCFRKGAESPPSSQSMRGAIIAYLAELARWDTGLVPCGPSQLGVGRCGGSSEAEVESVFHGRGRARAPGSGEAEVVARGQGGVRALGSGEAEFVVFWG

SEQ ID NO: 76481 - protein, 115 aa, Zea mays
  Coding DNA Sequence Number=SeqID_34702
  Gene Ontology: Mol. function=kinase activity
  Homolog annotation: Hit_ID=Q6QP54; Match level="QueryCoverage=71%, HitCoverage=48%, E-value=7e-10, Identity=52%"; Hit description =Putative kinase
MEPGGGTAVGAVGSLLTSSCFRKGAESRRRQSMRGAIIAYLAELARWDTGLVPCGPSQLGVGRCGGSSEAEVESVFHGRGRVRAPGSGEAEVVCRGQGGVRALGLGEAEFVVFWG

SEQ ID NO: 76482 - protein, 766 aa, Zea mays
  Coding DNA Sequence Number=SeqID_34703
  Gene Ontology: Mol. function=oxidoreductase activity; Cellular component=integral to membrane; Biological process=electron transport
  Homolog annotation: Hit_ID=Q8VYA9; Match level="QueryCoverage=98%, HitCoverage=100%, E-value=1e-162, Identity=97%"; Hit description =Cytochrome P450 monooxygenase CYP92A1
  Pfam annotation: Domain name=p450; Domain location=45-750; Score =208.5; E_value=1.5e-59; Accession=PF00067.12; Description=Cytochrome P450
VRSEINQSLYYSMEPATWAVFLGIALCAAAALFLSRGRRPVYNPPPGPKPWPIIGNLNLMGELPHRSMNELSKRYGPLMQLRFGSLPVLVGASVEMAKLFLKTNDAAFSDRPRFAIGKYTAYDFSDLLWAPSGPYLRQARRICATELFSATRLESFEHIRDEEVRVMLRQLRQAAGRTVRLRDYLQMLALGVISRIVLGNKYVMEEVADGEGDSAPAITPAEFREMVDEFFALHGAFNIGDYIPWLDWLDLQGYVARMKRMKARFGRFLERVLDVHNERRLREGGNFVAKDMLDVLLQLADDTSLEVQLSRDNVKAITQMGRREAEREGGSEVAGDGRERGGNPAAFVFVPRPGRSMRGAIIAYLAELARWDTGLVLCGSSQLGVGPSPSPWVGRGGGRSAEARAESEPWGRAKRSSSSSGAEPESEPGVGRSGVRRLLGLSSSPEPGVGRSGVRRLLGLSPSPSPGSGGAEFAVFRNLARVRAPGSGGAEFAVFRDLARVRALGRAERRPDCPSVSLCQVTLQSEWRRRRCPFVRPLHADGGYHLRIRSLEDFRDDLIIAGTDSNANTLEWAVSELLKNPKILAKAMEELNHVIGPDRLVTESDLPRLPYIEAVLKETMRVHPAAPMLAPHVAREDTSVDGYDVLAGTVLFINVWAIGRDPGLWDAPEEFRPERFVESKIDVRGHDFQLLPFGSGRRMCPGINLALKVMALSLANLLHGFEWRLPDGVTAEELSMDEAFKLAVPRKFPLMVVAEPRLPARLYTGA

SEQ ID NO: 76483 - protein, 187 aa, Zea mays
  Coding DNA Sequence Number=SeqID_34704
MAAPPTTRPVALTPRRDKRRFWQEKRATLRLRRNNRAKKGWPPEGFDSRLRSRGPYTHYWSEVRRPAPRRVPRPPQATRAPRPLLIRGSKAGPRRVHSRLRRRARDDQGYVRYITKARAALPSSPETPCSAPIEGNMALSPPPPCEKATQGQGTTGNSAPPDPGLGLGLSPGRRRTPLRPTQGSDSG

SEQ ID NO: 76484 - protein, 273 aa, Zea mays
  Coding DNA Sequence Number=SeqID_34705
  Homolog annotation: Hit_ID=Q6QP54; Match level="QueryCoverage=25%, HitCoverage=27%, E-value=7e-13, Identity=77%"; Hit description =Putative kinase
  Subcellular localization annotation: CTP_CleavageSite=86; ConfidenceScore=5.21e-01
MFGALRGQHGTFPTSSLWKGDKGAYDKSRNPDGRNSGQGSIHSRDTISPRPSPASGRNNRPRRIHASPEGLLKQRAHLRLARGPARAGFAVKQPWPDRLANRPYRRSIQSKDRLTPFPDARSSVGRAEENSAACPAPTAVPPAKVRLTAAESSLRRHKKLRLAHHGARPSPQPWKTVSASPDPRARPSPRPRKTVSASPDPRARPQPRPRKTVSASPDPRARPQPRPQRSHRIARPCARTDHATGGYIITLPLASSGYGEQDRRPIWLAPVNK

SEQ ID NO: 76485 - protein, 134 aa, Zea mays
  Coding DNA Sequence Number=SeqID_34706
  Gene Ontology: Mol. function=structural molecule activity; Cellular component=cytoskeleton; Biological process=sperm individualization
  Homolog annotation: Hit_ID=Q2TTE1; Match level="QueryCoverage=97%, HitCoverage=49%, E-value=7e-17, Identity=44%"; Hit description=Actin
MNLRDSKEKLGCSALDYEQELETARTISSVEKSYELPDGQVITISAERDSKEKLACSALDYEQELETARTISSVEKSYELPDGQELETARTSSSVEKSYELPDGQVITISAEKMWISKEEHDESGPGIVHMKCF

SEQ ID NO: 76486 - protein, 141 aa, Zea mays
  Coding DNA Sequence Number=SeqID_34707
  Gene Ontology: Mol. function=structural molecule activity; Cellular component=cytoskeleton; Biological process=establishment and/or maintenance of cell polarity (sensu Fungi)
  Homolog annotation: Hit_ID=P30169; Match level="QueryCoverage=97%, HitCoverage=44%, E-value=2e-54, Identity=66%"; Hit description=Actin- 75
  Pfam annotation: Domain name=Actin; Domain location=2-141; Score= -116.7; E_value=3.6e-08; Accession=PF00022.9; Description=Actin
MNLRDSKEKLACSALDYEQELETARTSSSVEKSYELPDGQVITISAERFRCPEVLFQPSLIGMESASIHEATHNSIMKCDVDIRKDRYGNVVLSGGSNMFSGIGDRMSKEITALAPSSMKMWISKEEHDESGPGIVHMKCF

SEQ ID NO: 76487 - protein, 161 aa, Zea mays
  Coding DNA Sequence Number=SeqID_34708
MPPRTRLTARKSTGPIGVPRHQLAPRHESSSSGSNDPIGDLEARDQLADRDLALDWAVQSRLLMCAKEARAQARVKELSSTVDNLQVYCNTLHEEVHILYAQLHPSEPAQPAEAEAGPSHVAGRALGGELDLFEPPPSLRLVDVWTPTPDDEAAKSNGKQE

SEQ ID NO: 76488 - protein, 510 aa, Zea mays
  Coding DNA Sequence Number=SeqID_34709
MRGPGGKDVFARAPGVFGAAAEGYPGVGGLRMFLSPARPAKTFLHLAWLHEARPKRQRGAAKATAPGGGQPPLAAKSAVPASSRAPEAAAAAGGSKSANAAPASSRVPEAAKAARDLPPPGKRVADFATDISVDDYLAGSDEGQLVVVPPAAATTAAAVVPKAKGGALSAGGEMPALIAVRDEAGAVSHRLKEMKEALSQAADFADRAASGALTAVVSAEVERLRTQHAYAVREKSAADRRRPMRPLAKAQSAQAEAHLARAEGSLAKQRAEQLEERLSALRARVERAEASTRAEAERTRKHLMDSYHELGARTSDFDVPDQEPGLRCLEWVQEELQALPTIVEGFMSYASLVTYEGAMNVLSREGCRHYEVFDQADEDFERDIYKVEDPIVKESAGALYDRMWGPHGREVVRKRAETARGQAARGERVDDFGALNSVLPDPESNPAAAVSEAALEPPPETAEGAPDAPAAAAAGGGLPPTAAPRAEDPVTVVAEATAEAPATAGSSQVA

SEQ ID NO: 76489 - protein, 607 aa, Zea mays
  Coding DNA Sequence Number=SeqID_34710
  Homolog annotation: Hit_ID=Q8SA97; Match level="QueryCoverage=15%, HitCoverage=11%, E-value=2e-11, Identity=64%"; Hit description =Ornithine carbamoyltransferase
  Subcellular localization annotation: CTP_CleavageSite=55; ConfidenceScore=5.14e-01
MDSGGSAAGGGVWTPHCIPVATGAGVCRRIVCIGPHGCRFGGTTTASAHCSGSCSSFAISTSACGRRDHCCPSWTAPASRRCSMWTHYLHWPSPKWNGLVFLLQREGLMALDSAAASAVRGEGVGSGAASPGTGTLYGAGPALGAASSRGEGAGAGPGKGARRGPHEGARRGLLQRRGRGSRPRRGRSARLPRALGAGPHEGARRGLIQRRGRGSRPRRGRSARLPRALGAGPTRALGAAHRRRSALVRRGRRRSTQRLLLGDGSFGWQTPLVPAAATGGGRQAAAWSAWQAAWAAFQSPKWVMMAPPVDVVGPRPRLGDVEDPPRSRSSPSSVAEAESEPPGRARRRPLAEARAEFDSWGRAKRSSSSSGAEPKSEPWVGRSGVRRLPGLCPSPSPGSGGAEFAVFRGFARVRALGRAERSSPSSGALPESEPWVGRSGVRRLPGLCPSPSPGSGGTEFAVFRGFARVKGKSKSAQSGSTGLSGGAPDSVRCARLARANWPLSGIHRRRTAKIHRTVRCAPDCPVSQRSAGPTVGRAICAGHVTEPTARRRHRTVRCAPDMSGAPTALWLPTVDFAVEGKKSGTGQCPVCTGLSGALVDRRQDQPS

SEQ ID NO: 76490 - protein, 133 aa, Zea mays
  Coding DNA Sequence Number=SeqID_34711
MASEDDAATWSIDGARGLSTTCSDGTDDHRHWWRRREGVVHDVQRWYRRPPTLQWAEAVVVPPSRHPWGPMQTIPRQTPAPVATGMQWGVHTPPPAAEPPLSIHGERRSAHFALAHGVQGSHAPVEALRLDQR

SEQ ID NO: 76491 - protein, 112 aa, Zea mays
  Coding DNA Sequence Number=SeqID_34712
MENAEVHILHLHTSFRDLVHRWKRCGLTSGERLQHRIINNVQNFAHTTADNDDLLFVHVHNECIDDNFQLGMNHFADLATNEYGHLPWRQDPCHPEWSRCGERNRHDDSEEC

SEQ ID NO: 76492 - protein, 566 aa, Zea mays
  Coding DNA Sequence Number=SeqID_34713
  Gene Ontology: Mol. function=transcription initiation factor activity; Cellular component=transcription factor TFIID complex; Biological process=transcription initiation
  Homolog annotation: Hit_ID=Q10IZ0; Match level="QueryCoverage=93%, HitCoverage=60%, E-value=1e-137, Identity=53%"; Hit description =Transcription initiation factor TFIID component TAF4 family protein, expressed
MDPIMKLLEDDEDESLHSGADVEAFTAALNREVEASASASASTSTSVPAGSSSQPTDHGAGLLPQEHKSLLNHDPGQWQDPVKNEIVNQESQQQEQTHAFRNDHPSRPEMVSQGSNNCPLPTNTPKECDLLKAKQEPGSTSQQGIVAQHQPMQQMKSEQTPIVSQQQSMQQMKNQQTPVTNQTNSATTTAKAPVVTFHMLIPILSRYLDKARDIEVQSIFAKLRKNEVSKEYFLKTVRNIVGDKLLKQAASQYQMQAQRSPQTNPSNYSLSGQVSGQQTAPSGSVTGDEQKGYPGAHTIPMRQAIASTRPPQFRPSSSGQMRSNTGYPPSQTNLHKANEMGNMSDGKGVHMLQTRPPNNSIPVQTMQHHVQRPQTSSPVFGANSIHARPFPRPLGGPAAPFRPQMADSNPKAQLIQGAVTTVSGSVPTRSIVSGNAPGNQSTRQQSANKEQKTISFTRTAHMNNETVSQNSEFSQNSFAVMHAKQVNQALGSSKVSAGMESQSQQLSAPKPLAATSLSQTQSHGIQEEPKIQLYETLKLSCLILLVPNFYVELIWPYQVAFTHNYT

SEQ ID NO: 76493 - protein, 273 aa, Zea mays
  Coding DNA Sequence Number=SeqID_34714
  Gene Ontology: Mol. function=nucleic acid binding
  Homolog annotation: Hit_ID=Q6CVU9; Match level="QueryCoverage=36%, HitCoverage=13%, E-value=1e-15, Identity=42%"; Hit description =Kluyveromyces lactis strain NRRL Y-1140 chromosome B of strain NRRL Y- 1140 of Kluyveromyces lactis
MESQSQQLSVPKPSSATSLSQTQSHGIQEEPKIQLHIKIISDTRVLHGEATNLRPQYYVLPRFDADALHRCHNQCPRGSPRSSPPPPQSMPTQIPHPPHHRRNQRHGRSTITVACVTWYFGQASRRPWKAHFIKDRRCNTAWAVFALESECKWALSGTPLQNRVGELYSLIRFLQIFPYSYYFYKDCSCEILDTRYVDAGTLMNNYAHIFDLLTRLRQAVDHPYLVAYSKTAGHPEGMKNEGNESMESQCGICHNLAEDVVCKTVVILIIPIL

SEQ ID NO: 76494 - protein, 536 aa, Zea mays
  Coding DNA Sequence Number=SeqID_34715
MEVVELVPCARNKWGNWHEFWFYVAEGTVEDHLGLPVSEVCSHFYSAYPPFEVAVEDADEGALSMPSHGGKLVRSPAFALDLHSRDPAAFVREAEDGAVRIIGRVFELNRMPYGGYPGQDDVDRRGKKPVRIDEDMRGPGGKDVFARAPGVFGADAEGYRGWWPKNVPIPRVADEDFFTSRMVRDWKVFLYGRNIAAVVSAVMDKDRQGAAQKRQAVVRVHEARPKRQRGAAKATAPGGGLPPLAAKSAVPASSRAPEAAKAAAAGGSKSAKAAPASSRVPEAAKAARGLPPPGKRVADFATDISVDDYLVGSDEGQLVVVPPAAATAAAVVVPRAKGSALSAGGEISALTAVRDEAGAVSRRLKEMKEALSQAADFADRAASGALTVVVSAEVERLRTQHADAVREKSAADSKCRKLADKVAALEGEKTDLRRQLAEERKEANEALAKAQAAQAEANLARAEGSLARQRAEQMEERLSALQSRVERAEASTRSEAERTRKLLMDSYHELGARTADFEVPDQEPGLRCLEWIQEEL

SEQ ID NO: 76495 - protein, 572 aa, Zea mays
  Coding DNA Sequence Number=SeqID_34716
MEVVELVPCARNKWGNWHEFWFYVAEGTVEDHLGLPVSEVCSHFYSAYPPFEVAVEDADEGALRCAAGLSSGRDLVEEFVAYGVWPLAHGWALSEVCPRQMPSHGGKLVRSPAFALDLHSRDPAAFVREAEDGAVRIIGRVFELNRMPYGGYPGQDDVDRRGKKPVRIDEDMRGPGGKDVFARAPGVFGADAEGYRGWWPKNVPIPRVADEDFFTSRMVRDWKVFLYGRNIAAVVSAVMDKDRQGAAQKRQAVVRVHEARPKRQRGAAKATAPGGGLPPLAAKSAVPASSRAPEAAKAAAAGGSKSAKAAPASSRVPEAAKAARGLPPPGKRVADFATDISVDDYLVGSDEGQLVVVPPAAATAAAVVVPRAKGSALSAGGEISALTAVRDEAGAVSRRLKEMKEALSQAADFADRAASGALTVVVSAEVERLRTQHADAVREKSAADSKCRKLADKVAALEGEKTDLRRQLAEERKEANEALAKAQAAQAEANLARAEGSLARQRAEQMEERLSALQSRVERAEASTRSEAERTRKLLMDSYHELGARTADFEVPDQEPGLRCLEWIQEEL

SEQ ID NO: 76496 - protein, 330 aa, Zea mays
  Coding DNA Sequence Number=SeqID_34717
  Homolog annotation: Hit_ID=Q94CH1; Match level="QueryCoverage=12%, HitCoverage=8%, E-value=5e-16, Identity=95%"; Hit description=Seven transmembrane protein Mlo4
MDIVVEKENVDVGNTAEPSYEVVARSGCSAQLSTNDTDEHELESADSKVSVGNAAKQSHDVVGVGIDCIFNHVEVSTEADLGPQPDVIHLTSLDVPNESSQISSDADMVKQNQQDALDTLIRISQHKKPKKLNVARVVSEDYKCTPEDVQLIEYIKTLPGKQVVVNIDSAWLNRNDMECLFHGDMQLSDKALNAYIHCIRGEEHLLHREGGKVFLENTFISSLLKRDGDPKALRSSVPVVVAVVLYVTPSQLGHAVCIYVFESLTLFGFTGHACLLRFISEICVPSSLFTSRFYICSESDYQDLLRNTDANQTALDRNIGTQCQRCLRRP

SEQ ID NO: 76497 - protein, 883 aa, Zea mays
  Coding DNA Sequence Number=SeqID_34718
  Gene Ontology: Mol. function=helicase activity; Biological process =viral genome replication
  Homolog annotation: Hit_ID=Q1EPC6; Match level="QueryCoverage=95%, HitCoverage=53%, E-value=0.0, Identity=61%"; Hit description=DNA helicase homolog, putative
MDPFNNNDVRPPLRELSSNTLEDESPEVPVSDGSIIDLTKSCDNTQDSQPPTVSLSSSKDMVISELSATPFVYASLQTKDVDMDKMIQSPRRQRHEHHVSSGERQSLISRQNQKFQSAIRRNFATATRDHGMEGGEHNEIDHAIASEIENNNVGMQRQITPNVTTNENHDEDDLKVSKVIRLTRCSSKTTLDGESIEDIEIDETQDAFTVNPDVPDLYDKVYSNIPEETHLLSTVADCDYCKAKKFQYEPPGFCCRNGQIDLAPFETPPQLRRLWECSDADARHFRDNIRFFNGHFSFTSLYCCLDSMTTNMDCGIYTFRAHGMMYHNVRSFGREVGAEHKHLELYFYDDDPSLEHRYRKCRQEQFEKDKAVIKQLVEILKGNPYSEHLRSMGNIDNIEDYHIALNLDQTLNQKLYNVPITSEVAAVWIEGSERRGQFSNSVMLHGKDRSSHGIRSYHGCYDALSYPLFFPKGELGWHANIPKSNVSMDEVDAYRDQHRRSDANNDDTERPSHLCVSVRDYYCYRFQIRPSIFNPILHGKRLFQQFAVDTYIKIESSRLDFIRKNQDRLRADLYKGLVDSLHEGENRADKIGKRTVLSTSFIGGPRDMRRRYMDAMALVRKFGKPDIFLTMTCNPNWDEITRELLPMQSPQDRPDLVVRIFRAKLEELKKRLTKHHILGKIRAYVYVVEFQKRGLPHVHFLLIMQRKYKLTCPDQYDHLISAEIPDKKKYPELYKMVIKHMMHGPCGLLNPKCPCTKGRASCKNHYPRAFSNATSQGKDSYPIYRRRDDGRKETVRGCELDNRWVVPYNPYLLRLFNCHINVEACGSIKAVKYLFKYIYKGHDRASVAVTDANKADGDVDEIKQYRDARWVTPSRSPLEDIQL

SEQ ID NO: 76498 - protein, 656 aa, Zea mays
  Coding DNA Sequence Number=SeqID_34719
  Gene Ontology: Mol. function=helicase activity; Biological process =viral genome replication
  Homolog annotation: Hit_ID=Q1EPC6; Match level="QueryCoverage=100%, HitCoverage=45%, E-value=0.0, Identity=63%"; Hit description=DNA helicase homolog, putative
  Pfam annotation: Domain name=DUF889; Domain location=580-656; Score= -77.1; E_value=2.9e-06; Accession=PF05970.5; Description=Eukaryotic protein of unknown function (DUF889)
MTCNPNWDEITRELLPMQSPQDRPDLVVRIFRAKLEELKKRLTKHHILGKIRAYVYVVEFQKRGLPHVHFLLIMQRKYKLTCPDQYDHLISAEIPDKKKYPELYKMVIKHMMHGPCGLLNPKCPCTKGRASCKNHYPRAFSNATSQGKDSYPIYRRRDDGRKETVRGCELDNRWVVPYNPYLLRLFNCHINVEACGSIKAVKYLFKYIYKGHDRASVAVTDANKADGDVDEIKQYRDARWVTPPEALWRIFSFDLSQNSPPVMQLQLHLENMHMVSFHERAKVNHVVQRPGADRSMLTAYFEANRLHEEARGILYRDFPEWYTLQQGKVWQRRKRNTGGQVGRIVSAHPAEGERFYLRLLLNHVTDDTIDECLNEAAIYQMPSALRRLFATILVYCEPNDVAELWQRHLDSMSEDYHRSTQSKTHVQQMVLIDIRNILQSMGKDIKTFPLPAIIDKYDDSHGTDREIYEEESIEPTAEDVAMKETLNEEQSCNSYIWCCGFHIAWGRTAHSRFKIPLTIDDGAVCSFTKQSGTAKLLQKASLIIWDEASMTKRQAIEALDNSMRDIMGRPGLPFGGRTVVFGGDFRQVLPVVRKGSRAQIVAASLRSSYLWESMCHLKLVQNMRAQSDPWFAEYLLRVGGGTEEANNDGDVRLPDE

SEQ ID NO: 76499 - protein, 265 aa, Zea mays
  Coding DNA Sequence Number=SeqID_34720
  Homolog annotation: Hit_ID=Q6QP51; Match level="QueryCoverage=21%, HitCoverage=32%, E-value=4e-07, Identity=50%"; Hit description =Putative growth-regulating factor 1
MAPPVDVAGLRPRLGDVEAPPRSRSSLSSVAEVESEPLGRARRRPSAEARAESEPWGRPESEPWVGRRGVRRLPGLSPSPSPGSGGAEFAVFWGLARVRALGRAKRSFLRCLRPGLTACQPHSVKWHCSRYDAGSAVLLSGRSVERRSDYGHFGSVDCRARVRIKVSGYLCIKCSCDLVGWRGDLVRVASWRRQGLGRARSMFVAGGGPRARRRSFGLCADGGYQLRIRSLEASEASEEWFDSSEVLMPRAMLWLVWSFPHASWP

SEQ ID NO: 76500 - protein, 301 aa, Zea mays
  Coding DNA Sequence Number=SeqID_34721
  Homolog annotation: Hit_ID=Q6QP51; Match level="QueryCoverage=18%, HitCoverage=25%, E-value=3e-10, Identity=70%"; Hit description =Putative growth-regulating factor 1
  Subcellular localization annotation: CTP_CleavageSite=87; ConfidenceScore=5.57e-01
MQAACNRAKWAHFSDSQHAQHGGPGPRVMQPARRMLRAYNSTATCATTAPPRLRNQYRDSRRPSARPSSASLARRRSGRRFAFAIMTASEKGPGKGDTPKRILPREGTRLRASLLIRGSKAGPSEGFDSRLRSRGLYTHYWSEVRRPAPRKGSTAASGYLGSAPITDQGGNDLVTESHRREASSPRTPSPGDRVRQITRSSPETPCSAPIEGNMALSPLLLAERQHRGVCKKVESVPDRPLALCRGSGAALANPAPAEPLTASTYQPENLGPDRTPGLRPARMRDDQTSQSITRGIKTSEE

SEQ ID NO: 76501 - protein, 129 aa, Zea mays
  Coding DNA Sequence Number=SeqID_34722
  Subcellular localization annotation: CTP_CleavageSite=28; ConfidenceScore=5.01e-01
MWRMPRPSPPKPGRPRPALTEDENSSLVCSSGFRSPNEVRVCNGKPVTIVASQEGFNPAGKRALISKNKVSLRMLLHKSCAQPPGVQRLQTSDPEDNEATQTFVRKILTDSLQKLENEAPIVHRVIYLS

SEQ ID NO: 76502 - protein, 212 aa, Zea mays
  Coding DNA Sequence Number=SeqID_34723
  Homolog annotation: Hit_ID=Q1S6C9; Match level="QueryCoverage=48%, HitCoverage=6%, E-value=6e-20, Identity=46%"; Hit description=TPR repeat
MEQREGLLAAGSEAVLLGTLRRIPPPQSLPSPTRPQVQNTPRTVLEANQVFGAKKPEPKPNAADAAAESAKAGSPSPSKTAPGGGEEPMYPPSKLEQFYDFFTFSHLTLSLHYIRRSSRPFVDDKREDDFFQIDVQVCNGKPMTIVASQEGFYPAGKRALISRSLVGLLQQTSRAFDGAYKALMKAFVEHNKVSPQSGCIYPATDFQPYKFT

SEQ ID NO: 76503 - protein, 94 aa, Zea mays
  Coding DNA Sequence Number=SeqID_34724
  Homolog annotation: Hit_ID=Q5NBT9; Match level="QueryCoverage=41%, HitCoverage=3%, E-value=1e-11, Identity=87%"; Hit description =Putative CTV.2
MAIYTPSGINHGGRPLSETFGTADNSEKLSSMLERNDSPSWPRFSGIISLIAGFEERHDRAKVVDILVNDLKVFSTFNEELHKETTQLLTLENF

SEQ ID NO: 76504 - protein, 517 aa, Zea mays
  Coding DNA Sequence Number=SeqID_34725
  Gene Ontology: Mol. function=zinc ion binding; Cellular component =integral to membrane
  Homolog annotation: Hit_ID=Q10Q54; Match level="QueryCoverage=99%, HitCoverage=87%, E-value=0.0, Identity=68%"; Hit description=Zinc finger family protein, putative, expressed
  Pfam annotation: Domain name=zf-DHHC; Domain location=154-210; Score =74.3; E_value=3.8e-19; Accession=PF01529.11; Description=DHHC zinc finger domain
MRKHGWQLPYHPLQVVAIAVFSALGFAFYVFFVPFVGTKPFQIVAMAIYTPLITCVVVLYIWCAATNPGDPGIFDSTKNLKLDKNEKHSYVNSDQGINHGGRPLSETFGTADNSEKLSSMLERNDSPSWPRFSGIISLTVYLQNTKCVKKACFSAAYAKQRSQVLKNSKHCRVCDKCVDGFDHHCRWLNNCIGKRNYKGFFVLMASAVILWLSGGLVLILCIVKRGEFSRQVVTKLGSSFSTVAFVIVVATCTILAMVATVPLAQLLCFHVLLVKKGISTYDYIIALREHEEQQEVPGHQSPQMSIVSSVTGFSTASSFGPLHRGSWCTPPRLFLEDQLILIAWSSLSQFDAIPPEIGISRNSGSKKTKEEEGARRKAGAVKISPWTLARLNAEEVSKAAAEARKKSKILKPVGKHGAPENSSKPDHLPSYKRRLDRRGFPAELSLDPLATLSASGTESNYSDAATEICGSLAPLQLEARSAFQPSTAASTRNVASSPESSFDSPNLHPFRTSSGHS

SEQ ID NO: 76505 - protein, 165 aa, Zea mays
  Coding DNA Sequence Number=SeqID_34726
RRGTGHFEPHDQISRAQIRSLIPEPPFSTGSMVRIDHVKRYAYCLIVAVGQNPRVRRPIPYPPPSHGGALKTHGGALAVTTSRTTARGGADAGRRPGEEFPRPQKLIPVAMLRRSFSRFSGATRHRRSCGNGGKSVSPQRTDRRGRFSTTQHPGGFRFNGEEDPT

SEQ ID NO: 76506 - protein, 140 aa, Zea mays
  Coding DNA Sequence Number=SeqID_34727
PFSTGSMVRIDHVKRYAYCLIVAVGQNPRVRRPIPYPPPSHGGALRTHGGALAVTTSRTTARGGADTGRRPGEEFPRPQKLIPVAMLRRSFSRFSGATRHRRSCGNGGKSVSPQRTDRRGRFSTTQHPGGFRFNGEEDPT

SEQ ID NO: 76507 - protein, 160 aa, Zea mays
  Coding DNA Sequence Number=SeqID_34728
MAGWLWDFAGAPLHKIPAEGPFSTGSMVRIDHVKRYAYCLIVAVGQNPRVRRPIPYPPPSHGGALKTHGGALAVTTSRTTARGGADAGRRPGEEFPRPQKLIPVAMLRRSFSRFSGATRHRRSCGNGGKSVSPQRTDRRGRFSTTQHPGGFRFNGEEDPT

SEQ ID NO: 76508 - protein, 140 aa, Zea mays
  Coding DNA Sequence Number=SeqID_34729
MSIRFIGVAWKPFDALATLKSIPFIDTSDEVSIMIYKNCLALPRGTQTILRMEVLKSGLGLGTGDVQPTLIKDYRECRLADRGPFNWSHASSWVSFALGRLIPERPTRNGSGEMARVACTLRGKRLDGGVFMLSVGVNPV

SEQ ID NO: 76509 - protein, 87 aa, Zea mays
  Coding DNA Sequence Number=SeqID_34730
MGKLCLGQTNTRKANTQWEWRDGESSVYPPWQEAGRWCICALGWREPGLVLRNPVHTLESLFFSRVTSHLFMNGVKRRWARPSYKSK

SEQ ID NO: 76510 - protein, 138 aa, Zea mays
  Coding DNA Sequence Number=SeqID_34731
MAGVGRSTRAGGDARRRRGDRPGHGEIVQSNGSVRSTGCQRRYERKELGGDSLDSSVHARRRKTEVRLGTGSCSVTKVPVSECLVLRSSCAKTMPKEFGLSSNFSRMCSREFGTTLIFGSPGFEFRKAENADDLWEGV

SEQ ID NO: 76511 - protein, 213 aa, Zea mays
  Coding DNA Sequence Number=SeqID_34732
  Subcellular localization annotation: CTP_CleavageSite=76; ConfidenceScore=5.27e-01
MAGGIELGGAKGKWLAGEGTGSCSVTKVPVSECLVPRSSCAKTMPNEFGLSSNFSRTCSREFGMTLIFGSPGFEFRKAENADDLWEEEVESGRQPSPVPQLDVPRAPPQGTSTTGGDPDGDDDDGSSSHNTKLLEEQEPEGWITRPIIRDAARGCHFHDALDTLLCWAFNRHNWSIEYRCVVYQHRRGLYPDQWEATCLVRRPDDDLQGAEAF

SEQ ID NO: 76512 - protein, 603 aa, Zea mays
  Coding DNA Sequence Number=SeqID_34733
  Gene Ontology: Mol. function=1,3-beta-glucan synthase activity; Cellular component=1,3-beta-glucan synthase complex; Biological process=1,3-beta-glucan biosynthetic process
  Homolog annotation: Hit_ID=Q8W0J2; Match level="QueryCoverage=95%, HitCoverage=31%, E-value=0.0, Identity=81%"; Hit description=1,3 -beta-glucan synthase component-like
MTTPRGTQRRAAAPAAAAGGEPYNILPIHDLLAEHPSLRFPEVRAAAAALRAVGGLRPPPFSQWRADQDLMDWLGAFFGFQRDNVRNQREHLVLLLANAQMRLSSADFSDTLEPRIARQIRKKLLRNYTSWCGFLGRRPSVYVPEGDPRADLLYTGLHLLVWGEAANLRFMPECLCYIYHHMATELHRILEGFIDTATGRPANPAVHGENAFLVRVVTPICDVIRAEAESSRDGKAPHAAWRNYDDINEYFWRRDVFDRLGWPMEQSRQFFRTPPDRSRVRKTGFVEVRSFWNIYRSFDRLWVMLLLYLQAAAIVAWEGAKWPWDDLLSSRGSESKDTQVRVLTVFITWAALRFLQSLLDIGTQFRRAFRDGRMLAVRMVLKAVVAAAWVVAFAVLYMRVWNQRTDNGQWSSAADSRMRSFLYAAAAFVIPEVLAIVLFIVPWVRNALEKTNWKICYALTWWFQSRSFVGRGLREGTFDNVKYSIFWVLLLAVKFAFSYFLQIRPLVKPTKEIYKLNGIQYTWHEFFGQSNRFAVFVLWLPVVLIYLMDIQIWYAIFSSLSGAFVRLFAHLGEIRDMKQLRLRFQFFASAMSFNIMQGRIRGR

SEQ ID NO: 76513 - protein, 331 aa, Zea mays
  Coding DNA Sequence Number=SeqID_34734
  Gene Ontology: Mol. function=1,3-beta-glucan synthase activity; Cellular component=1,3-beta-glucan synthase complex; Biological process=1,3-beta-glucan biosynthetic process
  Homolog annotation: Hit_ID=Q8W0J2; Match level="QueryCoverage=95%, HitCoverage=32%, E-value=2e-97, Identity=68%"; Hit description=1, 3 -beta-glucan synthase component-like
MGCPANPAVHNENAFLVRVVTPICDVIRVEAESNRDGNAPHAAWRNYDDINESFDRLWIMLLLYLQAAAIVAWEGAKWPWDDLLSSRGLESKDTLTHSGVDLPHGYPDLVCYIFFFVGCICGIFAHLGEIKDMKQLRLRFQFFASAMSFNIMPEEQQRLQLRYGFSRSFRKIESNQVEAQRFALVWNEIISKFQEEDIVSDREVELLELPPKLWNVRVIRWPCFLLCNELSLALGQAVTGSNRRLWRKICKNDYHRCAVIEVYDSAKHMLLEIIKEGNEEHGIVTQLFSNFDGSMKMEKFTVEYKMTELHNIHTRLVALCLPPHAASARQP

SEQ ID NO: 76514 - protein, 157 aa, Zea mays
  Coding DNA Sequence Number=SeqID_34735
  Homolog annotation: Hit_ID=Q8W0J2; Match level="QueryCoverage=25%, HitCoverage=2%, E-value=7e-13, Identity=82%"; Hit description=1, 3 -beta-glucan synthase component-like
  Subcellular localization annotation: CTP_CleavageSite=45; ConfidenceScore=5.05e-01
MATELHRILEGFIDTATGRPANPAVHGENTFLVRVVTPLLGTATTASARSMQSFREQLPAFSMRERFLKAVAANQLLRIHCGRYFLAQILQIEGGLSLGIEKDRASTVAMGFVDDSKGDELLSFTHEQRGFCTFFTSVDHLLGTRRKEFLQSVLLSK

SEQ ID NO: 76515 - protein, 331 aa, Zea mays
  Coding DNA Sequence Number=SeqID_34736
MKRAIVSAGEGGDTRGPGGNAPGASDGGERSPSGSRGEEKLYQTWWMKAHGEWGKESKKERNLWANMYDEKIWDVEIGPEIIDEALHPATVGRGIIELDVWPAPSHEQIVRLETPVSERADKDEGRAPFENKSPTTSISHALPRKIPHLVQIPHFFSFGRMLLHSSACHGSRLLSPCSSSCSRHYLLSSFASTPLKTLNALRTLVVMSYRGGRGGGGPNSHRGRGRGGGGGAGRRGGGGGRGEQRWWDPEWRAERLRQMHGETTASARSMQSFREKLPAFSMREGFLKAVAANQRIGKTLGEDVDKLQARRDVMDVDVPDSNTLMAKLMER

SEQ ID NO: 76516 - protein, 150 aa, Zea mays
  Coding DNA Sequence Number=SeqID_34737
  Pfam annotation: Domain name=IQ; Domain location=48-68; Score=28.5; E_ value=2.3e-05; Accession=PF00612.17; Description=IQ calmodulin -binding motif
MGDLWTNIRDDLAKMQATLQKVEQGLLQIKAAVQHEQHQLALSARLRTSAAVGIQAAARGFLARRRVREMRRQMLEAALVTVDLGTRGRDLALSDGHQQRHRAAISKCEHVFIDLGCSFFILSTAYYSTDDVVFSFVASCAWGQGGLHCA

SEQ ID NO: 76517 - protein, 400 aa, Zea mays
  Coding DNA Sequence Number=SeqID_34738
  Homolog annotation: Hit_ID=Q2QYW3; Match level="QueryCoverage=23%, HitCoverage=22%, E-value=6e-12, Identity=46%"; Hit description =Expressed protein
  Pfam annotation: Domain name=IQ; Domain location=162-182; Score=28.5; E_value=2.3e-05; Accession=PF00612.17; Description=IQ calmodulin -binding motif
  Subcellular localization annotation: CTP_CleavageSite=60; ConfidenceScore=5.67e-01
MASAANFAASSWQPASPSPWIAPHVTFVTPSWQPTSPSPWVAPHATFVTPSWQPASLSPWAASPANFVTTSWTPACPSPGTTPNFVTSSSLTASPSPWATPLGAATAQQSPAPSMGDLWTNIRDDLAKMQATLQKVEQGLLQIKAAVQHEQHQLALSARLRTSAAVGIQAAARGFLARRRVREMRRQMLEAALVTVDLGTRGRDLALSDGHQQRHRAAISKCEHGTCPAGDELQLYGNSGREGTHLVISKGALFRATTFRYRPPRGRLRWLLLRPIPVFIDLGCSFFILSTAYYSTDDVVFSFVASSMAKPLSPTSDSLAPKSLSRPSPGGLLDPLTASMRSLASARRSPITTLVMYDEDTRTIAELSIDIYLYLDTDLYNVSGLSLTLPPPTCDLSRGR

SEQ ID NO: 76518 - protein, 65 aa, Zea mays
  Coding DNA Sequence Number=SeqID_34739
  Gene Ontology: Mol. function=transcription regulator activity; Cellular component=nucleus; Biological process=regulation of transcription
  Homolog annotation: Hit_ID=Q10CH6; Match level="QueryCoverage=84%, HitCoverage=13%, E-value=7e-14, Identity=75%"; Hit description=Helix- loop-helix DNA-binding domain containing protein, expressed
  Pfam annotation: Domain name=HLH; Domain location=30-63; Score=3.9; E_ value=0.056; Accession=PF00010.16; Description=Helix-loop-helix DNA -binding domain
MRKLRDAECEEATEETKPWQRHGPKRRTRAAEVHNLSERRRRDRIKEKMRALQELIPHCNKVQVP

SEQ ID NO: 76519 - protein, 172 aa, Zea mays
  Coding DNA Sequence Number=SeqID_34740
  Gene Ontology: Mol. function=transcription regulator activity; Cellular component=nucleus; Biological process=regulation of transcription
  Homolog annotation: Hit_ID=Q10CH6; Match level="QueryCoverage=81%, HitCoverage=43%, E-value=5e-22, Identity=39%"; Hit description=Helix- loop-helix DNA-binding domain containing protein, expressed
MKRQRPSATKHSPNNPLGTSGLTAKETATWFLNTLDDPLEKDLYTNVESSWAGDICSTFCGSNQVPRTPTGIRGKDATLHSEVPSGAGAHDATSSSGGSESNYGGSGLPSDSVHGHKRKGMCRDESDSRSEDVECEEATEETKPWQRHGPKRRTRAAEVHNLSERRYWLLLM

SEQ ID NO: 76520 - protein, 140 aa, Zea mays
  Coding DNA Sequence Number=SeqID_34741
MKDFHCTPMRGINHQKRERLKGKCALGPFLSILVIECQRKCFCVDLCNVVDKVQIMSKVLETGKIDLEMKWLCSAKVSSVWVHRTVWWCTGQCPVRQADSGELTALGSSTAVYDYNSPDCPLCTGLSSEPFTGELVALGR

SEQ ID NO: 76521 - protein, 91 aa, Zea mays
  Coding DNA Sequence Number=SeqID_34742
MKDFHCTPMRGHKSPKRGRLKGKCALGPFLSILVIVCQHKGLNVYLCFWRNKVQIKIKGVERMLVRWDATTVVVAWLCTWFEPWEYHRDLF

SEQ ID NO: 76522 - protein, 135 aa, Zea mays
  Coding DNA Sequence Number=SeqID_34743
FWSLFVIDPRGLSLRSLWRSGRESFGRQVLLNLLPLLPWKTESLQGVNREVCQVQRTPIPFQVSEAHTNYYLNSTTIGCLELENEEEIEVTEEKTSPPLESQAETWLYFDICESEPDSPTNKGKPRCMQPLSLCF

SEQ ID NO: 76523 - protein, 122 aa, Zea mays
  Coding DNA Sequence Number=SeqID_34744
MEKSLLKVGLTDSTLTAFGSVLKSENCCMVPSLEPFCGCSIRFWTFLVIDPRGLSLRSLWRSGRESFGRQVLLNLLPLLPWKTESLQGVNREGHPSAHLAAVKQSQAIPQLYSASFVFSLGQ

SEQ ID NO: 76524 - protein, 403 aa, Zea mays
  Coding DNA Sequence Number=SeqID_34745
MGGTEPGSFAEKDPSRATGVPVARRVGLGFRLACQKLEKRVHLARLHAACMAARPFCPLVWAKMGVASPGLPVFQAPGWGISAAFPPPRWRNATPWELVPLSHRLASRIFITQPGRTPSPAVTRDGDLQLDGGGKRAGLRPLPLPQPQGFSSPRLGRGECRVGVGPCVGGGPLLHSVMGGEAGIARGVRQLQRAWSPAASGFGAPCGVGVCHGSRKRFFRRRGGRDRPRADLQLLRPSARPCLTSFGTGGGLLTAASTLRSALPLFGPPEQKSPSSPLLEQVTARRPSVFCGSAGLPHGVGSFVPAEGGTGVPLVVASRMPAGGSDISMNRGGVGSRMGNLVGRSLAVSPVSGADAQVGQSRPRIGLAPLEAGCPRPQGRRRCRGCYGSLRREDPSLQDQIVL

SEQ ID NO: 76525 - protein, 378 aa, Zea mays
  Coding DNA Sequence Number=SeqID_34746
MGGTEPGSFAEKDPSRATGVPVARRVGLGFRLACQKLEKRVHLARLHAACMAARPFCPLVWAKMGVASPGLPVFQAPGWGISAAFPPPRWRNATPWELVPLSHRLASRIFITQPGRTPSPAVTRDGDLQLDGGGKRAGLRPLPLPQPQGFSSPRLGRGECRVGVGPCVGGGPLLHSVMGGEAGIARGVRQLQRAWSPAASGFGAPCGVGVCHGSRKRFFRRRGGRDRPRADLQLLRPSARPCLTSFGTGGGLLTAASTLRSALPLFGPPEQKSPSSPLLEQVTARRPSVFCGSAGLPHGVGSFVPAEGGTGVPLVVASRMPAGGSDISMNRGGVGSRMGNLVGRSLAVSPVSGADAQVGQSRPRIGLAPLEAGCPRPQ

SEQ ID NO: 76526 - protein, 67 aa, Zea mays
  Coding DNA Sequence Number=SeqID_34747
MAGGIKLAGAKGKWLAGEEKTLSDTGVSQPSPLKGISSRDSGQSPPGVKRRIRKAGGGVGVITYQLP

SEQ ID NO: 76527 - protein, 108 aa, Zea mays
  Coding DNA Sequence Number=SeqID_34748
  Subcellular localization annotation: CTP_CleavageSite=63; ConfidenceScore=5.46e-01
MAGGNKLAGAKGKGLAGEGTGSCSVTKVPVSECLVPRLSCAKTVSNEFGLSSNFPRMCSRKTLSDTGVSQPSPLKGISSRDLGQSPPGVKRRIRKAGGGVGVITYQLP

SEQ ID NO: 76528 - protein, 62 aa, Zea mays
  Coding DNA Sequence Number=SeqID_34749
MARVVFTLRGKRLDGGVSVLSHILESLLLCRVKKRQTFVASVQRWYPKRRTKTRAAGGKALR

SEQ ID NO: 76529 - protein, 42 aa, Zea mays
  Coding DNA Sequence Number=SeqID_34750
MHILESLLLCRVKKRQTFVASVQRWYPKRRTNTRAAGGKALC

SEQ ID NO: 76530 - protein, 63 aa, Zea mays
  Coding DNA Sequence Number=SeqID_34751
MAGLLIKDYLSWQHALEMGQGKRILESLLLCRVKKRQTFVASVQRWYPKRRTKTRAAGGKALR

SEQ ID NO: 76531 - protein, 125 aa, Zea mays
  Coding DNA Sequence Number=SeqID_34752
  Subcellular localization annotation: CTP_CleavageSite=42; ConfidenceScore=5.62e-01
MDRPTPAISVNVPHTVVIPATSPSPSTTSPEQSRRRELVTIRAPLQKYRAPQPNFLMVVESTPLARNLKKTIGKELKDCNLADGEYVLIPEQGPVQEEDQEQASEAAIEDLPAAPAVEGKPRFYA

SEQ ID NO: 76532 - protein, 45 aa, Zea mays
  Coding DNA Sequence Number=SeqID_34753
MDRPTPAISVNVPHTVVIPRDLPFALDHFTGTVSPPSLKLKTETP

SEQ ID NO: 76533 - protein, 275 aa, Zea mays
  Coding DNA Sequence Number=SeqID_34754
MEEQGAGTLVLETRHQAAEFANNPGRPTSTSMVEDRRRAERARPPESKTRRRIRARRKLKTKSSWSRTEELRRWRGSQGAERAADRERAGACGERDLAEEEARQEEDRADGEELGMRWHMGTRHHGGQDTDHAGEPTAAMEESEQRESDATGREEVGGELEIVDVGAGGRTERRPSSGHEGSSGHRGTQGAQEAPSGGDAQGRIEHGAKPHAENRSAGWELDRRGRDEKERLGKKPAHGTAVEKSQRWMRMTAEVDKREREISNGEKMRMGWDFT

SEQ ID NO: 76534 - protein, 91 aa, Zea mays
  Coding DNA Sequence Number=SeqID_34755
MGVAGPSAVRAPAMKGVPATEGRRERRKLQAEETRREESSTSTPGSTTTDNLCGESNLNYKFSYAISRLTSGDIIICTENLVVEFYLICSG

SEQ ID NO: 76535 - protein, 160 aa, Zea mays
  Coding DNA Sequence Number=SeqID_34756
MKRASLFEGVKDSTKTNRKNKAGFKTKKQKETEVLPGLAHRTVRCGTGQCPVHHGGLPSNSSPSGFSGAAHYNSPDCPVLQNEAALNWPTSGKWKAAPLKFTGLSGVHRTVRCASGATATSRQRSTLTANSAQQYTRQKSEQKDRGAPDCSVCTGLSGAT

SEQ ID NO: 76536 - protein, 117 aa, Zea mays
  Coding DNA Sequence Number=SeqID_34757
MLAASSSSEESVELSSESHSRHTWASLPLFLCGSELASFGKMEGRSAKIHRTVRCTSDCPVRQWSNGYLAPTVDSDSEQCATVHAAEVRAEGQRGTGLSERERVEKDPSLSGLLNGD

SEQ ID NO: 76537 - protein, 134 aa, Zea mays
  Coding DNA Sequence Number=SeqID_34758
MAKPGHTTPPGPLLRKQQPTRPSIPVVGMEAKSHHQPNQGGTCKNYATSKAEYTNTHLDLPVAALVPTISRMGDPVSGRVRDKVRARLHSDNASPWIRVHRPSSFYYQKWIQPISDLARVLEKSLDFYRDPDLA

SEQ ID NO: 76538 - protein, 106 aa, Zea mays
  Coding DNA Sequence Number=SeqID_34759
MKAKSHHQPNQGGTCKNYATSKAEYTNTQLDLPVAALVPTISRMGDPVSGRVRDKVRARLHSDNASPWIRVHRPSPFCYQKWIQPIPDLARVLEKSLDFYRDPDLA

SEQ ID NO: 76539 - protein, 103 aa, Zea mays
  Coding DNA Sequence Number=SeqID_34760
MSTVPIDSPFASRPHRLGIQCSTDPDCRRAVAALVPTISRMGDPVSGRMRDKVRARLHSDNASPWIRVHRPSPFCYQKWIQPIPDLARVLEKSLDFYRDPDLA

SEQ ID NO: 76540 - protein, 88 aa, Zea mays
  Coding DNA Sequence Number=SeqID_34761
MEEADESDIQGPHGREGSEHALVDDLENIDIYVYPSIRSDEVGLGRLCNPTCRSGVYADVIVDITPQLITLNQRSKSNKYHKNKHSSI

SEQ ID NO: 76541 - protein, 46 aa, Zea mays
  Coding DNA Sequence Number=SeqID_34762
MERPGDYVEWGLGVYADTIVDITPQLVTLNQRSKSNKYHKNKYSSA

SEQ ID NO: 76542 - protein, 144 aa, Zea mays
  Coding DNA Sequence Number=SeqID_34763
  Gene Ontology: Mol. function=nucleoside-triphosphatase activity; Cellular component=outer membrane-bounded periplasmic space; Biological process=cytochrome complex assembly
  Homolog annotation: Hit_ID=Q287W7; Match level="QueryCoverage=89%, HitCoverage=55%, E-value=4e-49, Identity=73%"; Hit description=ABC transporter family protein
  Pfam annotation: Domain name=ABC_tran; Domain location=36-144; Score=- 32.3; E_value=0.00012; Accession=PF00005.17; Description=ABC transporter
MPPLRPPPPRLLLNNVSYMRNAQTVLRDINLSVHDGTTLVLTGANGSGKTTLLRMLAGFSRPSAGEILWNGHDITSPGVFQQYKLQLNWMSLKDAVKEKLTVLENVQWFELLEGKDDSRSGPAIQLMGLGRLMNEKARRMLSMG

SEQ ID NO: 76543 - protein, 188 aa, Zea mays
  Coding DNA Sequence Number=SeqID_34764
  Gene Ontology: Mol. function=nucleoside-triphosphatase activity; Cellular component=outer membrane-bounded periplasmic space; Biological process=cytochrome complex assembly
  Homolog annotation: Hit_ID=Q287W7; Match level="QueryCoverage=90%, HitCoverage=73%, E-value=3e-62, Identity=70%"; Hit description=ABC transporter family protein
  Pfam annotation: Domain name=ABC_tran; Domain location=17-172; Score =25.8; E_value=8.8e-10; Accession=PF00005.17; Description=ABC transporter
MNTTDGMSGLAYGPSCMLAGFSRPSAGEILWNGHDITSPGVFQQYKLQLNWMSLKDAMKEKLTVLENVQWFELLEGKDSSRSGPAIQLMGLGRLMNEKARRMLSMGQRKRLQLARLLAIDRPIWLLDEPSVALDAAGTRLLEHIIAEHREKGGIVFVAMHLPIQVEDSMSLRLPQRFPRRKTLVDLVH

SEQ ID NO: 76544 - protein, 233 aa, Zea mays
  Coding DNA Sequence Number=SeqID_34765
  Subcellular localization annotation: CTP_CleavageSite=38; ConfidenceScore=5.01e-01
FENKSPTTSSPSHSRRGRQRGSTGALGSGPLFGFDGLFASLERDREQEPSGGRVHLGPWLPLQRSLASLPAFVAPQARGRSYPRGRNRSSVCDGTLNASVFVHCGCRGLNMGNRPSRLLGPDSRRNLWTASPSEAGSDFAEDVVDAEGATAPFSVKTRACRIRSSCSSLYPNASYLSQKVMSEDSLSEVVKKHESNPAKKRSFFEEKFDAEGVSPLLAPEGGSGFAEARPTLP

SEQ ID NO: 76545 - protein, 384 aa, Zea mays
  Coding DNA Sequence Number=SeqID_34766
  Subcellular localization annotation: CTP_CleavageSite=2; ConfidenceScore=5.42e-01
MSSSSLKRRVFPSSKPPDGGYPPPFRLLVGGTQLHGSWYLSAIVRLQGFSSGSLVAPFRRWPPKTVTSSSWMGRDRPGCGPALSVGCVRHPRWGRGRGEPGLYLACGSANHLLFQLLVVAIVLPRCDGVVLQSCRGRRTVAVQLGCNIPSSPSHSGRGRQRGSTGALGGGPLFGFDGLFASLEWDREQEPSGDCVHLGPWLPLQRSLPRRPEVASGPTPKSISRGLGSGWRPWKPVDRGPGGNRLSRLLGPDSRRSPWTAAPPEAGSGFAEDVVDAEGATAPFGVKTRACRIRSSCSVCFLRPPRPEENALAALAKLRLFSSCFKHLDSVGNRDDPLSEVVKKHERNPAKKRSFFEEKFDAEGVSPLLAPEGGSGFAEARPTLP

SEQ ID NO: 76546 - protein, 111 aa, Zea mays
  Coding DNA Sequence Number=SeqID_34767
  Pfam annotation: Domain name=IQ; Domain location=34-54; Score=25.8; E_ value=0.00016; Accession=PF00612.17; Description=IQ calmodulin -binding motif
MQATLQKVEQGLLQIKAAVQHEQHQLALSARLWTLAAVGIQAAARGFLARRRVREMRRQMLEAALVTVDLGTRGRDLALSDGHQQRTGPLSPSASMLEDELLVQEGCSVRA

SEQ ID NO: 76547 - protein, 84 aa, Zea mays
  Coding DNA Sequence Number=SeqID_34768
MGSIACQFCHHILDAGVPMPRDNAKFRHIIFVDALVTVDLGTRGRDLALSDGHQQRHRTAISKCEHDGVHVIQVAALVQVQCAE

SEQ ID NO: 76548 - protein, 105 aa, Zea mays
  Coding DNA Sequence Number=SeqID_34769
  Subcellular localization annotation: CTP_CleavageSite=24; ConfidenceScore=5.44e-01
MARKATQQASPIHPMRPGYFPPVYSSSVYYPVQTWNGTMMNLWFSESSLVSFGVWMATQIKGLTSVLSVEQVLKDVGAKKCQSRSSQADLMIYESNIKAQACQML

SEQ ID NO: 76549 - protein, 115 aa, Zea mays
  Coding DNA Sequence Number=SeqID_34770
MEALPADDQRPFEDLVMRAEKEVMRQWNEQRNKEEAELLHKLSERRKEAADKYLSHFTVDRHQKIVRQGEIDMESLLPPLQGPAVVGAKKCQSRSSQADLMSYESNIKAQACQML

SEQ ID NO: 76550 - protein, 321 aa, Zea mays
  Coding DNA Sequence Number=SeqID_34771
  Gene Ontology: Mol. function=polygalacturonase activity; Biological process=carbohydrate metabolic process
  Homolog annotation: Hit_ID=Q2R052; Match level="QueryCoverage=53%, HitCoverage=50%, E-value=5e-41, Identity=49%"; Hit description =Glycoside hydrolase family 28 protein, putative, expressed
MEVSLLRKSRHQAEGCGTVVVAKGSIDNTTPCSKESSQWSIVEPLTSYGQGLDLPGPRHRSLMSGYNLTDVFITDNSVGVLQSKFDGSCHLFQGTMELLMAIACNVKVHNVTIETSLDAPLTDGIIPDSYSNLCIKDNTIIVSHEVISLKNRWDRAALAFGSEMSSGILDIHVDHLWIHDSSKGISFRPHRPWGLHRGRGHPGDHIYTGIEEYVYSRTKKSRKSPSRNDKHTNKIVLSEHDDHKYGDLELKPFVCAVQHHVGLVDLDCEMQVVGPDSRALCFRSWPLALSPLPEAMRSGRACSALASLLLLWLGVAAAQKA

SEQ ID NO: 76551 - protein, 54 aa, Zea mays
  Coding DNA Sequence Number=SeqID_34772
MDEQVWGEDLAAAGAEGERKDGGGPVKKVATPGGRMWYYGGGQGFHRYPPSMFK

SEQ ID NO: 76552 - protein, 156 aa, Zea mays
  Coding DNA Sequence Number=SeqID_34773
MAGTRVAWAGSAELAGAKDGVRTAGEGFNRQHLDAAEEIAGTLPLALPWLRPLIGLYLHPVLRRLRGDEAALVSDNDGDYSPRSTASLSAPRRRFSQGSYVYDINGNKYLDSLARLWCTTLGPLEDMIVGVTWPFILPAGWTVEWDPTSAQEEHEE

SEQ ID NO: 76553 - protein, 250 aa, Zea mays
  Coding DNA Sequence Number=SeqID_34774
  Homolog annotation: Hit_ID=Q6QP51; Match level="QueryCoverage=82%, HitCoverage=94%, E-value=3e-23, Identity=42%"; Hit description =Putative growth-regulating factor 1
MAERRQPPQGRAPLTAARRRQRGCSPSGGSEGTGKGDISKGILLHEGSRPRALITDQGFEGWPLGRVSTAAQSTRASSSLLIRGSKAGPSEGRQGRSDRSHFALPLTDLTGKQRRLPRSDCCATGQGEADNSQVQPQAQQEAPPRPTLGLGLERWSLPRPTPGLSPRLGLRRRSPPHPTPGLGPRFGLRRWSLPRPTPGLGLNLGLGRNRRLSRPQGSAPASASGGVSASLDLGLGPTAPRRMHHYPTPS

SEQ ID NO: 76554 - protein, 469 aa, Zea mays
  Coding DNA Sequence Number=SeqID_34775
MGSTRVAFVLLLLEERDLAGDDDHQFGGGEKQAGLRPLPRPQLQGSSSSGLGRRAGRVGAYLRVGRRPAYSSNIWGRKTSSSFAEEVSSSHAGEGELPLPGQGAAVRPPPGWRSCRARVAVVTGFAKGANFDDAGLVGHERRQLQRAWHAGSAGFGAASDVVSFRLVRAWLTVHRTGDCRAARRSDITTPPHRGRCPPVHEDLSGDLPVQAGATAIRRRGAGAQLAAVVGAEVVAAREGFSADEAIGVTRGRTPDSLDLMAFPCPSCGGMGEGLSTAAFALRSSLLLFSHPKRRSLSLLVQWSPASHLEFVVPQALWCGGCSYPREWNRSPKVTSEVASQADEVQQRQLELGQVIRERDQPRSHVAETVSRAEVPGGQLAEATERPTEVENLPPMSPSEAGPDSAEGGNDAEGAATPSVDDLFVGSRIAYPSESYFSRKVMSEDSVIDIVVKARKSFWQKSFRALGLVR

SEQ ID NO: 76555 - protein, 300 aa, Zea mays
  Coding DNA Sequence Number=SeqID_34776
  Gene Ontology: Mol. function=uroporphyrinogen decarboxylase activity; Cellular component=chloroplast; Biological process=porphyrin biosynthetic process
  Homolog annotation: Hit_ID=Q9AXB0; Match level="QueryCoverage=76%, HitCoverage=56%, E-value=1e-121, Identity=91%"; Hit description =Putative uroporphyrinogen decarboxylase
  Pfam annotation: Domain name=URO-D; Domain location=41-300; Score =188.9; E_value=1.2e-53; Accession=PF01208.8; Description =Uroporphyrinogen decarboxylase (URO-D)
  Subcellular localization annotation: CTP_CleavageSite=48; ConfidenceScore=5.65e-01
MMLPTATATAVFLTAAPSSFSTRRRRSRAIFASLSPSFSASEEPLLVRAARGEDGLPRPPAWMMRQAGRYMAEYQALAKRHPSFRERSENTDLIVEITLQPWRAFAPDGVILFSDILTPLPAIGVPFDISDSKGPVIQSPVRSKEQVRELVPIDLDMLQFVGESLKILRNEIDGKAALLGFVGAPWTIATYIVEGGMTNTYTNIKSMCHTAPDVLKGLLSHLAQAISDYIIYQVNSRAQCIQIFDSWGGQLPPHVWEQWSKPYIKQVTLPYFSCFHVLPTSWCCYVSALSYGITLMTPTE

SEQ ID NO: 76556 - protein, 268 aa, Zea mays
  Coding DNA Sequence Number=SeqID_34777
  Gene Ontology: Mol. function=uroporphyrinogen decarboxylase activity; Cellular component=chloroplast; Biological process=porphyrin biosynthetic process
  Homolog annotation: Hit_ID=Q9AXB0; Match level="QueryCoverage=85%, HitCoverage=56%, E-value=1e-119, Identity=90%"; Hit description =Putative uroporphyrinogen decarboxylase
  Pfam annotation: Domain name=URO-D; Domain location=1-250; Score =145.9; E_value=1.1e-40; Accession=PF01208.8; Description =Uroporphyrinogen decarboxylase (URO-D)
MVVRKERELGLPEEEKDGERDAKMARLRRRRVEKEEGAAIDGKAALLGFVGAPWTIATYIVEGGMTNTYTNIKSMCHTAPDVLKGLLSHLAQAISDYIIYQVNSGAQCIQIFDSWGGQLPPHVWEQWSKPYIKQIVSRIKKECPNVPLVLYINGNGGLLERMKNTGVDVIGLDWTVDMTDGRRRLGNGISVQGNVDPAFLFSPLPVLTDEIHRVVKAAGPKGHILNLGHGVLQKTPEEAVAHFFDVTRRLRYDTLFQGSVAEELHHVA

SEQ ID NO: 76557 - protein, 294 aa, Zea mays
  Coding DNA Sequence Number=SeqID_34778
MNSSQKKQRSNTYVLTRIVIQVSAFRDRGVPEPTSEVSPRAPAQMGRREAEREGGKARWPEMGVREVEILRPSCSSRVQVGHKERIQVYNGCNTRILGVQNPGANINTRTAITAKSSRGPPYTDHSPTALAPFRARLLPPRWVTANSKHRTTARPPEQREPAPSANASAHGAGRVRGGVGPTARNCGTVGPQSRLECPRAPSVYLPEALWPRSEAATVTMPRVDGDGDLDMHSGDSTTQTVKAVSSNEADYSRRHRAMGGGGRGEEATADQGQNGGGMWRVRQVGEGSDQEAWA

SEQ ID NO: 76558 - protein, 55 aa, Zea mays
  Coding DNA Sequence Number=SeqID_34779
MPRVDGDGDLDMHSGDSTTQTVKAGEEATADQGQNGGGMWRVRQVGEGSDQEAWA

SEQ ID NO: 76559 - protein, 104 aa, Zea mays
  Coding DNA Sequence Number=SeqID_34780
  Subcellular localization annotation: CTP_CleavageSite=33; ConfidenceScore=5.37e-01
MSVHPFPALSLVGSLPLATTHTQFSSRYSPDCRGRGVGPTSRVVGLIFSHLYPQISHLHFEIAMQLQQHLVPQGGQGQAHPVLCMSQLRASVQQEMFERVIGRL

SEQ ID NO: 76560 - protein, 247 aa, Zea mays
  Coding DNA Sequence Number=SeqID_34781
  Homolog annotation: Hit_ID=Q2QNM4; Match level="QueryCoverage=49%, HitCoverage=100%, E-value=8e-52, Identity=85%"; Hit description=DNA -directed RNA polymerase II 14.5 kDa polypeptide, putative, expressed
  Pfam annotation: Domain name=RNA_POL_M_15KD; Domain location=142-191; Score=32.1; E_value=2e-06; Accession=PF02150.7; Description=RNA polymerases M15 Kd subunit
  Pfam annotation: Domain name=TFIIS_C; Domain location=207-246; Score =8.5; E_value=0.014; Accession=PF01096.9; Description=Transcription factor S-II (TFIIS)
  Pfam module annotation: Pfam domain module=RNA_POL_M_15KD::TFIIS_C; Domain location=142-191::207-246
  Subcellular localization annotation: CTP_CleavageSite=94; ConfidenceScore=5.33e-01
AEPPPFLQSRSAGASSSLPFLLAIGTQAAAAALRLGLCDCVSGFPSGLSPVTARPRPRSSAHRPVTLRACLSPPASGGSSTAPGPGGSAARVSRAAGASSRCSTKAEAFWNPELWALRRHYCCNHEHHEVLSRVLLDDGWMCSNNILYPKEDRDRRTLFFACRNCEHQEVSDNNCVYRNEVHHTAGERTQVLQDVASDPTLPRTKTVRCNLCGHGEAVFFQAAARGEEGMTLFFVCCSPDCGHRWRE

SEQ ID NO: 76561 - protein, 114 aa, Zea mays
  Coding DNA Sequence Number=SeqID_34782
  Gene Ontology: Mol. function=RNA polymerase II transcription factor activity; Cellular component=DNA-directed RNA polymerase II, core complex; Biological process=regulation of transcription, DNA -dependent
  Homolog annotation: Hit_ID=Q2QNM4; Match level="QueryCoverage=73%, HitCoverage=63%, E-value=4e-26, Identity=84%"; Hit description=DNA -directed RNA polymerase II 14.5 kDa polypeptide, putative, expressed
MARLPYKSASLFINFEASPRLMFYPLKYKQEEVSDNNCVYRNEVHHTAGERTQVLQDVASDPTLPRTKIVRCNLCGHGEAVFFQQSDICISVVAIDGRSKRGGGDDPVLCVLQP

SEQ ID NO: 76562 - protein, 319 aa, Zea mays
  Coding DNA Sequence Number=SeqID_34783
  Pfam annotation: Domain name=IQ; Domain location=112-132; Score=27.0; E_value=6.6e-05; Accession=PF00612.17; Description=IQ calmodulin -binding motif
  Pfam annotation: Domain name=IQ; Domain location=70-90; Score=23.6; E_ value=0.00068; Accession=PF00612.17; Description=IQ calmodulin -binding motif
  Pfam module annotation: Pfam domain module=IQ::IQ; Domain location =112-132::70-90
  Subcellular localization annotation: CTP_CleavageSite=22; ConfidenceScore=5.43e-01
MTPGISSRLSSPPPAAHPSPPPAAATPSHPPSPTPDAFTRLKESFGRFAEQWDQFVVMFHRYKEKTEKELQAAVRLQTAARGFLARRQVQSLRGEKHLAVASRATPWPSSHEQAVVRLQAAVRGFLVRRAVRKLHLLISSSLHQLAACAPNHQVSSILFEPPAEVEIWVCSPPARPKRVVSFIRAPALVLDRPNIRTGWFLHLSSNVKAVVQLFPWDPGGQEDIAAVQIYNLVPQLFCIFVLNNKAPRAATLEPSLRQRGITSPEKTAILMDRRSMTQSFKLYLRELIQCALCPKQIKGGIKRVKQHLAGDYGDIVKVS

SEQ ID NO: 76563 - protein, 286 aa, Zea mays
  Coding DNA Sequence Number=SeqID_34784
  Homolog annotation: Hit_ID=Q84VE7; Match level="QueryCoverage=42%, HitCoverage=19%, E-value=1e-10, Identity=37%"; Hit description=Arm repeat protein
MALYVRLLSSWTSTKNDALAVLLCLSAEWENSGIFEAGATDSVLSAVGEAEAVAAVLASLTKHGAAETVGRLDGGVVQLVIKMVCNTEQSWECAAAILSCCAGGAMTASQVMVVPVQLGTGTDHSTKAVARMKETTLFGRAGGLHTQISTSAGGSKSIHETWWLGAQAASWCSDELISKCSFRTARLTRKPRTAACRRTTACSCDDGHGVALEATARVGEGGWEVVAAAYGAAAGGGEGWAAGGGEDNLELIPGVMDLRSMGIAVFSGEVIPLCRRLGSRVAALGA

SEQ ID NO: 76564 - protein, 46 aa, Zea mays
  Coding DNA Sequence Number=SeqID_34785
MEGKPSRERKSELKRESPPLAGVGEFIYGRESKLWQNHPNYSSLSA

SEQ ID NO: 76565 - protein, 46 aa, Zea mays
  Coding DNA Sequence Number=SeqID_34786
MEGKPSRERKSELKRESPPLAGVGEFICGRESKLWQNHPNYSSLSA

SEQ ID NO: 76566 - protein, 46 aa, Zea mays
  Coding DNA Sequence Number=SeqID_34787
MEGKPSRERKSELKRESPPLAGVGEFICGRESKLWQNRPNYSSLSA

SEQ ID NO: 76567 - protein, 46 aa, Zea mays
  Coding DNA Sequence Number=SeqID_34788
MEGKTSRERKSELKRESPPLAGVGEFICGRESKLWQNHPNYSSLSA

SEQ ID NO: 76568 - protein, 46 aa, Zea mays
  Coding DNA Sequence Number=SeqID_34789
MEGKSSRERKSELKRESPPLAGVGEFICGKESKLWRNRPNYSSLSA

SEQ ID NO: 76569 - protein, 46 aa, Zea mays; identical to SEQ ID NO: 76565
  Coding DNA Sequence Number=SeqID_34790

SEQ ID NO: 76570 - protein, 66 aa, Zea mays
  Coding DNA Sequence Number=SeqID_34791
MSRGRGVDSSHRVLLRMIGCWCDLAFVPATGIDGRVGYCFRRRGPGGVAWPGVGGLRLPKVLKNMI

SEQ ID NO: 76571 - protein, 70 aa, Zea mays
  Coding DNA Sequence Number=SeqID_34792
MPRNMVNRRLYPSRDLRRGLPFRLWWVQVRSLHDGSRASAFGNQTLQPNNCMSRGRGVDSSHRVLLRLIG

SEQ ID NO: 76572 - protein, 406 aa, Zea mays
  Coding DNA Sequence Number=SeqID_34793
  Homolog annotation: Hit_ID=Q8S985; Match level="QueryCoverage=49%, HitCoverage=23%, E-value=2e-64, Identity=68%"; Hit description =Arabidopsis ETTIN-like protein 1
  Pfam annotation: Domain name=B3; Domain location=31-173; Score=20.6; E_value=0.00033; Accession=PF02362.12; Description=B3 DNA binding domain
  Subcellular localization annotation: CTP_CleavageSite=51; ConfidenceScore=5.22e-01
MGQDKREVKKPKKPKVKKPKVKQRFSWMPHMFCKTLMASDTSMHVGFSVLRRSAEDCFPPLVRLRWLGKLPSFRCPGAALKDYSQQRSSQELVAKDLHGTEWRFRHIYRALCAMLSISHVIGQPHRHLLTTGWSAFVNKKLVSRDAVLFLRFLVIFRGDNGELRLGVRRAAQLKNGSAFPALYNQCSNLGSLPNVAHAVATKSVFHIYYNPRWLLQYRISPFFYRWGDSMHILAYTCPWPADHPKANEYYPDPRLVAYVVPYAPILSCLLLDLIWLLVNSTDAAKNSLRRKVEILKLKPHWSKAYFYLWDEVIELPVCHFAGVEAAAVEVSTVPEVAATGELSTVLEAEAAGELSTVSYEAATEMLCSRRHLLNWIYSLTFTATARGCGRFLQWQMGGAVDQVLDV

SEQ ID NO: 76573 - protein, 462 aa, Zea mays
  Coding DNA Sequence Number=SeqID_34794
MALKDADHPKANEYYSDPRLAAYAVPYAPILSCLLLYLIWLLVNSTDAAKNSLRREVEILKSKPHWSKAYFYLWDEPLNVEQYDMICNISNELRSYAPDVRILTTYYCGELCVISLRKKTGLTTKVENKGATCADLEHPVGVPGCPLSSRAAGPSGSELAPSTFEAFAKVPNVLRPHTQIFCTSEWVLGTREDLVKDIVAELRPDLGEEWWTYVCMGPSDPQPNWHLGMRGTQHRAVMWRVWKEGGTGFLYWGSNCYEKAMIPSAEICFRRGLPPGDGVLFYPGEVFSSSHEPVASTRLERILSGMQDIEYLKLYSSRYGREEGLALIEKTGMYLGPDRYTLDHGPVTPSKGAFVSTVCRDEDSRLSNGRCRRDALSLSRETGSLHLLAPLLLTGGKGADLVIRGNVVLNTLSARSTLMLLRDRICITSSSSRQVSGLAELSYAIAFDFLSTQSHEKVAESK

SEQ ID NO: 76574 - protein, 143 aa, Zea mays
  Coding DNA Sequence Number=SeqID_34795
  Gene Ontology: Mol. function=structural constituent of ribosome; Cellular component=intracellular; Biological process=translation
  Homolog annotation: Hit_ID=Q9FUL7; Match level="QueryCoverage=48%, HitCoverage=55%, E-value=2e-18, Identity=69%"; Hit description=40S ribosomal protein S24
  Pfam annotation: Domain name=Ribosomal_S24e; Domain location=6-84; Score=38.5; E_value=2.3e-08; Accession=PF01282.9; Description =Ribosomal protein S24e
MARQRMVLEVIHLDHANVSKMELKERLSKMYKVKDRNTIFVFKFRTGSISSGLIYDNLDSKKFEPKYCLIWFLLAKYVKHAVDAFSKAPITQENQRRCSLVRRGRSAAQGRTVRDLVRGGGALWSGADGPRHRAGRSATWCRS

SEQ ID NO: 76575 - protein, 222 aa, Zea mays
  Coding DNA Sequence Number=SeqID_34796
  Homolog annotation: Hit_ID=Q9FUL7; Match level="QueryCoverage=28%, HitCoverage=51%, E-value=1e-17, Identity=75%"; Hit description=40S ribosomal protein S24
  Pfam annotation: Domain name=Ribosomal_S24e; Domain location=121-197; Score=39.3; E_value=1.3e-08; Accession=PF01282.9; Description =Ribosomal protein S24e
MSTNADVRDGAPGAAVDAAFARRALQAKALLGDTRHCSATDYSKPILDWLENSSDEVAETMAKNGRLLLKCPVVQSDVQAMKEKKGELSKGMPLRFILGNNKMILGFAEGFPTMLKDEIAMVLEVIHLDHANVSKMELKERLAKMYKVKDRNTIFVFKFRAGSTGSGLIYDNLDSKKFEPKYCLIWILPQGPFTEFSPFCLPVQHAYTLTDAHADFVLMDGF

SEQ ID NO: 76576 - protein, 195 aa, Zea mays
  Coding DNA Sequence Number=SeqID_34797
  Homolog annotation: Hit_ID=Q8LHR6; Match level="QueryCoverage=42%, HitCoverage=7%, E-value=5e-40, Identity=93%"; Hit description =Putative UVB-resistance protein UVR8
  Pfam annotation: Domain name=Ank; Domain location=110-142; Score =40.1; E_value=7.6e-09; Accession=PF00023.20; Description=Ankyrin repeat
  Pfam annotation: Domain name=Ank; Domain location=144-176; Score =20.1; E_value=0.008; Accession=PF00023.20; Description=Ankyrin repeat
  Pfam module annotation: Pfam domain module=Ank::Ank; Domain location =110-142::144-176
FFFANLRQSLPLESRQRRTLRIDSGHIREEAIPTCHGSGGGDGMRLTGALDPSPIPPVVADILVQGPLQLVLAWQWPRSSWLSNRNNFTQNEAIPSCYLSGGNIDGRNAFGLSALHLATWRNHLPIVRRLLDAGADPDARDGESGWSSLHRALHFGHLCIAGVLLQFGASLALEDTKGRTPVWPKPYRKPDHLCS

SEQ ID NO: 76577 - protein, 499 aa, Zea mays
  Coding DNA Sequence Number=SeqID_34798
  Gene Ontology: Mol. function=protein binding; Cellular component =membrane; Biological process=protein modification process
  Homolog annotation: Hit_ID=Q8LHR6; Match level="QueryCoverage=85%, HitCoverage=41%, E-value=0.0, Identity=79%"; Hit description =Putative UVB-resistance protein UVR8
  Pfam annotation: Domain name=Ank; Domain location=45-77; Score=40.1; E_value=7.6e-09; Accession=PF00023.20; Description=Ankyrin repeat
  Pfam annotation: Domain name=Ank; Domain location=79-111; Score=20.1; E_value=0.008; Accession=PF00023.20; Description=Ankyrin repeat
  Pfam annotation: Domain name=RCC1; Domain location=138-185; Score =8.8; E_value=0.079; Accession=PF00415.9; Description=Regulator of chromosome condensation (RCC1)
  Pfam annotation: Domain name=RCC1; Domain location=188-242; Score =17.5; E_value=0.0091; Accession=PF00415.9; Description=Regulator of chromosome condensation (RCC1)
  Pfam annotation: Domain name=RCC1; Domain location=296-347; Score =15.3; E_value=0.016; Accession=PF00415.9; Description=Regulator of chromosome condensation (RCC1)
  Pfam annotation: Domain name=RCC1; Domain location=350-403; Score =5.4; E_value=0.18; Accession=PF00415.9; Description=Regulator of chromosome condensation (RCC1)
  Pfam module annotation: Pfam domain module=Ank::Ank::RCC1::RCC1::RCC1: :RCC1; Domain location=45-77::79-111::138-185::188-242::296-347::350 -403
  Subcellular localization annotation: CTP_CleavageSite=31; ConfidenceScore=5.03e-01
METSISPPGTSKQSAVRKPSPGSSLKDLCLVSKQGGGNIDGRNAFGLSALHLATWRNHLPIVRRLLDAGADPDARDGESGWSSLHRALHFGHLCIAGVLLQFGASLALEDTKGRTPVDLISCPVSQANGDFPDAVATEVFSWGSGTNYQLGTGNVHIQKLPCKVEALHGSYIKTVAASKFHSVAVSSNGELYTWGFGRGGRLGHPDIHSGQTTAVITPHLVTVGLGRKRVSVVAAAKHHTVIATELGNCLPGDQIEGQLGYPSVHTQPTPRRVGSLKQRIISVAAANKHSAAVADTGEVLTCGCNKEGQLGYSTSNSASNCIPRMVEYSKGKVLRGVSAAKYHTIVLGADGEVFTWGHRLVTPRRVVVARCLMKGGNTNLKFHRMERLQVISVAAGTTHSTALTADGALFYWVSSYPDIKCQQLFGQRQSARQINPVVSHPNTSGDKDVTWDNKSQHESSELPPRAEFIVNKQMTVEGYKAHPGHVNYILGRAKRICDC

SEQ ID NO: 76578 - protein, 370 aa, Zea mays
  Coding DNA Sequence Number=SeqID_34799
  Gene Ontology: Mol. function=protein tyrosine/serine/threonine phosphatase activity; Biological process=protein amino acid dephosphorylation
  Homolog annotation: Hit_ID=Q2R8T5; Match level="QueryCoverage=55%, HitCoverage=67%, E-value=2e-46, Identity=71%"; Hit description=MRNA capping enzyme, C-terminal domain containing protein, expressed
MDLRSMGIAVFSGEVIPLCRRLGSRAACWCSDELISKCSFRTARLTRKPHTAACRRTTTCSCDDGHGVALEATARCFSPRRDSVEHHNELIPLLCETTKTLFEPSECIWSWRGAGVMDLRSMGIAVFSGEVIPLCRRLGSRAMMFLDRQKQSKNPKYILAISIFAQRRPPGIYKRDYIEALYSFYHEVPDNMMIACPPTPEWKRPDDLDLNGEAKQDDDDDNGDPGPLHNESEDKVITNDDVLGDEVPYDQQEALRVLCYRLLEMPLGWDDPYVTRTHEGLLKWKYPEMNSVDFLFEIHLLSLGGLSSALGTRKNSVGHVMRSITDNITEEKLLEETDEITLLPIIAFNKAGGVLCRRCHLSVLPRARIM

SEQ ID NO: 76579 - protein, 301 aa, Zea mays
  Coding DNA Sequence Number=SeqID_34800
  Pfam annotation: Domain name=IQ; Domain location=115-135; Score=27.0; E_value=6.6e-05; Accession=PF00612.17; Description=IQ calmodulin -binding motif
  Pfam annotation: Domain name=IQ; Domain location=73-93; Score=25.0; E_ value=0.00027; Accession=PF00612.17; Description=IQ calmodulin -binding motif
  Pfam module annotation: Pfam domain module=IQ::IQ; Domain location =115-135::73-93
  Subcellular localization annotation: CTP_CleavageSite=19; ConfidenceScore=5.21e-01
MDRRSMTPGISSRLSSPPPAAHPSPPPAAAPFAAATPSHPPSPTLDAFTRLEEKWDQFVVMFHRYKEKTEKELQAAVRLQAAARGFLARRQVQSLRGEKHLAVASRATPWPSSHEQAVVRLQAAVRGFLVRRAVRKLHLLISSSLHQLAACAPNHQVSSILFESPAEVKIWVCNPPARPKRVVSFIRATALVLDRPNIRTGRFLLHLSSNVKSAVQLFPWDPGGQEDIATVQIYILVPQLFCIFVLNNKGKPRCKRLNLKSCQVSLWQLEDELVLKGGGDVMGIIGSERQQPGWDKAREQD

SEQ ID NO: 76580 - protein, 182 aa, Zea mays
  Coding DNA Sequence Number=SeqID_34801
  Homolog annotation: Hit_ID=Q6QP51; Match level="QueryCoverage=16%, HitCoverage=13%, E-value=1e-08, Identity=86%"; Hit description =Putative growth-regulating factor 1
MQAACNRTKGAHPFDFDASSMEAQAHTSCNRRAGCYVQETAPPLAPLPCLLDCGTSTATRGNPAHDPTVPTRHIGHGSVSRGRRRDGRYGQKWAGSNGGGRRAEAADRRHLWRQKQTTLHFRHNDRIKKGTGKGDTPKGILLREGSGPRAPLLIRGSKAGPSEGFSSRLRALGLRAHYWSEV

SEQ ID NO: 76581 - protein, 162 aa, Zea mays
  Coding DNA Sequence Number=SeqID_34802
MAQQCQPGASATGQSAAGEGATVDMAKRTGKGDTPKGILLREGSGPLALLLIRGSKAGPSEGFDSRLRALGLHAHYWLAPEGFDSRLRARRARDDSGYVRYMAEARAMLPRGSGATLANPAPAKPLTASTYQPENLEPDYALGQRLVRMREQPDQPRHHETR

SEQ ID NO: 76582 - protein, 437 aa, Zea mays
  Coding DNA Sequence Number=SeqID_34803
  Gene Ontology: Mol. function=translation elongation factor activity; Cellular component=mitochondrion; Biological process=translational elongation
  Homolog annotation: Hit_ID=Q8W2C4; Match level="QueryCoverage=42%, HitCoverage=37%, E-value=2e-77, Identity=86%"; Hit description =Translational elongation factor Tu
  Pfam annotation: Domain name=GTP_EFTU; Domain location=1-115; Score =65.0; E_value=2.4e-16; Accession=PF00009.17; Description=Elongation factor Tu GTP binding domain
  Pfam annotation: Domain name=GTP_EFTU_D2; Domain location=241-312; Score=87.0; E_value=5.8e-23; Accession=PF03144.15; Description =Elongation factor Tu domain 2
  Pfam annotation: Domain name=GTP_EFTU_D3; Domain location=317-413; Score=95.7; E_value=1.4e-25; Accession=PF03143.7; Description =Elongation factor Tu C-terminal domain
  Pfam module annotation: Pfam domain module=GTP_EFTU::GTP_EFTU_D2::GTP_ EFTU_D3; Domain location=1-115::241-312::317-413
MITGAAQMDGGILVVSAPDGPMPQTKEHILLARQVGVPSLVCFLNKVDAVDDPELLELVEMELRELLSFYKFPGDEIPIIRGSALSALQGNNDEIGKNAILKLMDAVDEYIPDPVRQLDKPFLMPIEDVFSIQLSHKRSAAARDLDSGGPIKQGWHWQASGQWTSATPSKVSMSGVGVTFGRSTCAGIEDLKRLAAHLLLGPAAVVVGGDWGLGLTDVDGPWCLVLVAAGRAVSRIDQGRGTVVTGRVEQGTIKTGEDVEILGLAQTGPLKTTVTGVEMFKKILDHGEAGDNVGLLLRGLKRGDVERGQVVCKPGSLKTCKKFEAEIYVLTKDEGGRHTAFVTNYSPQFYFRTADVTGRVELLGEMKMVLPGDNVTANFELISPVPLEPGNDYILNFFRQYRTIDQGKDLRLGKEEERSVLESSPKFLADQFPLSSP

SEQ ID NO: 76583 - protein, 249 aa, Zea mays
  Coding DNA Sequence Number=SeqID_34804
  Gene Ontology: Mol. function=translation elongation factor activity; Cellular component=intracellular; Biological process=translational elongation
  Homolog annotation: Hit_ID=Q8W2C4; Match level="QueryCoverage=99%, HitCoverage=61%, E-value=1e-102, Identity=72%"; Hit description =Translational elongation factor Tu
  Pfam annotation: Domain name=GTP_EFTU; Domain location=64-229; Score =260.8; E_value=2.7e-75; Accession=PF00009.17; Description=Elongation factor Tu GTP binding domain
  Pfam annotation: Domain name=MMR_HSR1; Domain location=67-162; Score=- 21.3; E_value=0.088; Accession=PF01926.13; Description=GTPase of unknown function
  Pfam module annotation: Pfam domain module=GTP_EFTU::MMR_HSR1; Domain location=64-229::67-162
  Subcellular localization annotation: CTP_CleavageSite=48; ConfidenceScore=5.05e-01
MASAAVLRNAGSRRLFSYPTLRAAAIYVPSALPDAPAAAAAPAQPPPTAGTLWARSMATFTRTKPHVNVGTIGHVDHGKTTLTAAITKAHVEYETAKRHYAHVDCPGHADYVKNMITGAAQMDGGILVVSAPDGPMPQTKEHILLARQVGVPSLVCFLNKVDAVDDPELLELVEMELRELLSFYKFPGDEIPIIRGSALSALQGNNDEIGKNAILKLMDAVDEYIPDPVRQLDKPFLMPIEDVFSIQGY

SEQ ID NO: 76584 - protein, 257 aa, Zea mays
  Coding DNA Sequence Number=SeqID_34805
  Homolog annotation: Hit_ID=Q337Z8; Match level="QueryCoverage=35%, HitCoverage=90%, E-value=3e-10, Identity=34%"; Hit description =Expressed protein
  Pfam annotation: Domain name=DUF1677; Domain location=133-249; Score =145.2; E_value=1.7e-40; Accession=PF07911.4; Description=Protein of unknown function (DUF1677)
MDVDTTARVDEFLVTTFVGPLVEEDLTRAIQEQIQQRVRSPTLWLIRFFMAPTGDAAAAQAPAPKKQSAKSRRISIEGLQRAMSDLALELARDSKKQAATPADADADAAKLQQLPAIAEQQQQQQQTAEEEEEELARCECCGMQEVCTPQYVRRVRDRYCGRWVCGLCAAAVSAEAEGGRATTEAALAAHMAVCGRFNRVGRANPVLLQTEAMRQILRKRGARCDSPRVRDRGARPAAAAALARSSSCIPAITKDFN

SEQ ID NO: 76585 - protein, 66 aa, Zea mays
  Coding DNA Sequence Number=SeqID_34806
MRALFPLVLPDSHSALVVIGRKTHVVGRGLMSTITMDVDTAARVDEFLVTTFVGPLVEEDLTRGVW

SEQ ID NO: 76586 - protein, 116 aa, Zea mays
  Coding DNA Sequence Number=SeqID_34807
  Pfam annotation: Domain name=AT_hook; Domain location=28-40; Score =13.9; E_value=0.09; Accession=PF02178.9; Description=AT hook motif
MGQGASPEVKEDVSARNLRMAHRIARSTRGRGRPKSDEGELGSPVRFCRVQELGKLYGPLAKLTEGQARLGRGWSELAEAWAVMAGGGKLVGAKGGFADWIKRYGGVKLGLSHCRT

SEQ ID NO: 76587 - protein, 62 aa, Zea mays
  Coding DNA Sequence Number=SeqID_34808
MAEGLAGGEVASVRGRRLAGFADWIKRYGGVKLGLSHCRALGEDPGFDVSRARVPMPSSGMR

SEQ ID NO: 76588 - protein, 322 aa, Zea mays
  Coding DNA Sequence Number=SeqID_34809
  Gene Ontology: Mol. function=cytochrome-c oxidase activity; Cellular component=membrane; Biological process=electron transport
  Homolog annotation: Hit_ID=Q33B99; Match level="QueryCoverage=99%, HitCoverage=45%, E-value=1e-133, Identity=76%"; Hit description =Expressed protein
  Pfam annotation: Domain name=DUF639; Domain location=37-322; Score= -94.4; E_value=1.7e-11; Accession=PF04842.3; Description=Plant protein of unknown function (DUF639)
MAMMSRTRDLLMEGFEGLVRDGSFKWGLPRRGDTAMDDGGDDDGSLSVQRSSIAGLSFKANAVVARCSRILGVSTNDLQNNFDKQASDSIKQPKSYARNFLEYCCFLALAQISQVTGYLADKSFRRLSFDMMLAWEVPYSSSQLTVKAEVDSTVSSEAFTRIAPAIPTIADVVTCANLFDVLSCSSGGRLSFSVYEKYLSELDRKHLAYVFISYRAVKKMKTQSESSLLSNFRSQRGERILEVDGTLTTQPVLEHVGISTWPGRLILTDHALYFEALRVVTYDKPKVYELAEDLKQVVKPELTGPWGSRLFDKAVMYKSTTL

SEQ ID NO: 76589 - protein, 283 aa, Zea mays
  Coding DNA Sequence Number=SeqID_34810
  Gene Ontology: Mol. function=identical protein binding; Biological process=negative regulation of enzyme activity
  Homolog annotation: Hit_ID=Q8H047; Match level="QueryCoverage=88%, HitCoverage=30%, E-value=3e-53, Identity=52%"; Hit description =Putative serine protease
MRWRWMPWGCNRGEGFAREDAVWRISVASPPSRNWSALGVDIGAACRRRGPRHAHGQHRGGQLRAECRRAGQRARQGVRDGAARAPGHLHGVDVLSFSIGATDDAQFNYDLIAIATFKAMEHGIFVSAAAGNDGPAAGSITNGAPWMLTVAAGTTDRAIRTTVRLGNGQEFHGQPLMAMMSRTRDLLMEGFEGLVRDGSFKWGLPCRGDTAMDDGGGDDDSLSVQRSSIAGLSFKANAVVARCSRALVEAEVRGKVVLCESRSISEHVEQGQSCPRRREEDGV

SEQ ID NO: 76590 - protein, 1135 aa, Zea mays
  Coding DNA Sequence Number=SeqID_34811
  Homolog annotation: Hit_ID=Q941P2; Match level="QueryCoverage=31%, HitCoverage=90%, E-value=1e-164, Identity=93%"; Hit description=ADP -glucose pyrophosphorylase small subunit
  Pfam annotation: Domain name=NTP_transferase; Domain location=692 -948; Score=317.0; E_value=3.5e-92; Accession=PF00483.13; Description= Nucleotidyl transferase
MSSHDAKLVQNLVLNLASSVESRAVNIRTFLEEAFRHLGDEHYLLNALLAIRKEVDLMEQDAIESKARSDPKKDRMEEQINLAQDAKPVPRQITFTPHPHQNCMTPVTMTPTTPTGPLGIAFGTCNNECLTTTQTILIDHLLPAPIQGPNDPSGYTFRTPWNPYFGMTTPGGPPTQTCFGQPQLVPPIPCPPVPTHVPNQTDPIPFESEAEHSVQEVNSPSKPSDTPGTFRRTKEQNFKPDEDLLLCKTWLEISSDPVISTGQRKEGLWARIEKRYNELRAEFPLRLNRALSSRWEKIRAETGKFAGFYARVLSENQSGLTDNDKTSKAATLYATSQKKPFHFMHCWTRLKNEPKWDAMVHGSPWRGNAGTEPVRSLTPTGSVNEVHTDEGGSKGKRPLGRDSMKASRKKSMSSSSQSTDYLSRIHDIQIARLKQSEEKSNLKQQNIEFMKEVELKKLEVQSKEIEVQEKKLMMEDRKQKVEELNKLFAMDMDALPEELRAPLIADLSSIVARFRRPRGANEVDISCTISFVLDIHVVHNNASSHHLCEPPQITALPPHGTSDAKAKRQTGSSETPRAGRGTPLRSVSHCPPITPPALSRPLPRARSDPPPMATAMGAMAATCMASIPAAATFPGDLGVGRRRAVVPGWRAGGRRLRATPPARRPFLFSPKGVSDSRSSQTCLDPDASTSVLGIILGGGAGTRLYPLTKKRAKPAVPLGANYRLIDIPVSNCLNSNVSKIYVLTQFNSASLNRHLSRAYGNNIAGYKNEGFVEVLAAQQSPENPNWFQGTADAVRQYMWLFEEHNIMEFLILAGDHLYRMDYQKFIQAHRETDADITVAALPMDEQRATAFGLMKIDDEGRIVEFAEKPKGEKLRSMMVDTTILGLDPERAKELPYIASMGIYVFSKDVMLRLLRENFPAANDFGSEVIPGATEIGLRTENDKNVLSETGGIPIGIGKNSHIRKAIIDKNARIGENVKVSVFLPAARGLSHPTAAARGFPLPAAAADQPPTSSRRRPPTPQPPAPPPLLPPPPLFPIAGSAPPPALLPPWTPAASPTRPPPLRRPLARAPPPLSLPARAASPTRPPPLRRPLARAPPPLSLPARTRPPLLLLARARPPPRLERAWPQEPPAWPPP

SEQ ID NO: 76591 - protein, 196 aa, Zea mays
  Coding DNA Sequence Number=SeqID_34812
  Gene Ontology: Mol. function=protein serine/threonine kinase activity; Cellular component=integral to membrane; Biological process=protein amino acid phosphorylation
  Homolog annotation: Hit_ID=Q5JN27; Match level="QueryCoverage=82%, HitCoverage=17%, E-value=3e-63, Identity=72%"; Hit description =Putative receptor-like protein kinase 1
MAWEGWMWAARGPCGVDRATRGAGRDTSRGVEAGYLDPEYFLTHKLTDKSDVYSLGVVFLELLTGMQPISHGRNIVREVLAANQSGMIFSVVDNRMGSYPAECVEKFAALALRCCQDETDSRPSMVEVVRELDMIWRMTPGTENIASSESGVMGMGSNSTSTPTASGSRMDDHYISSMEVSGSNLLSGVMPSINPR

SEQ ID NO: 76592 - protein, 493 aa, Zea mays
  Coding DNA Sequence Number=SeqID_34813
  Gene Ontology: Mol. function=protein serine/threonine kinase activity; Cellular component=integral to membrane; Biological process=protein amino acid phosphorylation
  Homolog annotation: Hit_ID=Q5JN27; Match level="QueryCoverage=51%, HitCoverage=27%, E-value=1e-107, Identity=75%"; Hit description =Putative receptor-like protein kinase 1
  Pfam annotation: Domain name=Pkinase; Domain location=165-429; Score =14.7; E_value=2e-09; Accession=PF00069.15; Description=Protein kinase domain
  Pfam annotation: Domain name=Pkinase_Tyr; Domain location=166-429; Score=-40.4; E_value=5.4e-10; Accession=PF07714.7; Description =Protein tyrosine kinase
  Pfam module annotation: Pfam domain module=Pkinase::Pkinase_Tyr; Domain location=165-429::166-429
MAWEGWMGPRVALAGSTGPHVAREETRAEASRPGDRIELKERVEIGGWGGANKGKHIFVEDNVMRDEYAVGDEVKTTIMGCRGDRIGLKERVEIGGWGGANKGKHIFVEDNVMRDEYACRERHRGEHDGEESAGAGQDVHTGIMPGTERGGPAGVREDRGGSQGEESTRGVGEGRGCAREESSAVAIHVGVDEEQLGAGAQPLLWLCEPDERRELCCGGQGKEHASREPSRGTSLAWGGSAAHDRASRAKVPLDFPMRLRIALGSSRGILYLHTEADPPIYHRDIKASNILLDSKFVAKVADFGLSRLAPLPETEGSAPGHVSTVVKGTPGYLDPEYFLTHKLTDKSDVYSLGVVFLELLTGMQPISHGRNIVREVLAANQSGMIFSVVDNRMGSYPAECVEKFAALALRCCQDETDSRPSMVEVVRELDMIWRMTPGTENIASSESGVMGMGSNSTSTPTASGSRMDDHYISSMEVSGSNLLSGVMPSINPR

SEQ ID NO: 76593 - protein, 118 aa, Zea mays
  Coding DNA Sequence Number=SeqID_34814
  Gene Ontology: Mol. function=serine-type peptidase activity; Cellular component=membrane; Biological process=signal peptide processing
  Homolog annotation: Hit_ID=Q9LW08; Match level="QueryCoverage=54%, HitCoverage=36%, E-value=2e-21, Identity=70%"; Hit description =Signal sequence processing protein; peptidase-like protein
MAAKAYKYKAEILLKEYLLADSYVLYTSVLAGLLMCKLVHERHDTVDSDILTKGDNNPGDDRVLYAHGQLWLQRQHIIGRAVGYLPYAGWLTIVMTEKPVLKYLLIGALGLLVVASKE

SEQ ID NO: 76594 - protein, 250 aa, Zea mays
  Coding DNA Sequence Number=SeqID_34815
  Gene Ontology: Mol. function=serine-type peptidase activity; Cellular component=membrane; Biological process=signal peptide processing
  Homolog annotation: Hit_ID=Q9LW08; Match level="QueryCoverage=64%, HitCoverage=90%, E-value=6e-51, Identity=60%"; Hit description =Signal sequence processing protein; peptidase-like protein
  Pfam annotation: Domain name=PPR; Domain location=214-248; Score =33.2; E_value=8.8e-07; Accession=PF01535.11; Description=PPR repeat
  Pfam annotation: Domain name=Peptidase_S24; Domain location=39-104; Score=41.8; E_value=2.3e-09; Accession=PF00717.13; Description =Peptidase family S24
  Pfam module annotation: Pfam domain module=PPR::Peptidase_S24; Domain location=214-248::39-104
MQIRPVVAQIITLGMILTSALILWKGLVVVTGSESPVVVVLSGSMEPGFRKGDVLFLHMNKDPVRTGDIVVFNVEGRDIPIVHRVIKVHERHDTVDSDILTKGDNNPGDDRVLYAHGQLWLQRQHIIGRAVGYLPYAGWLTIVMTEKPVLKCFCVGLSLLQVIGGSVTVSANWCTGAAGGSIQGVTLKEGHEVRGHVCAGLHGMGKEGIRADTVTWNPLIHGLFKDARVKEAAQLFTEMVATQVMPDNVT

SEQ ID NO: 76595 - protein, 63 aa, Zea mays
  Coding DNA Sequence Number=SeqID_34816
MGDLVSGQVRGKVRARLHSGLAFNSLGCGEILDGSLGSLLLVFLLDSSLLRDEHVLSVSEIAI

SEQ ID NO: 76596 - protein, 188 aa, Zea mays
  Coding DNA Sequence Number=SeqID_34817
MRNRARPSSLLLLLLSCWSSIPLNRPTRWQGGRPSHTINHILKRTCKNYATSKAEYTNTQLHLPGYKGSSSLISCEKQTIRIEFLNLARAHCLGIQCSYMGDPGCRRAVTALVPTIASMGDPVSGQVREKVRARLHLDIDDIKLHLYLRLDRRLRRERRPLAEGPKKHFPFDRIAKVNDKWAPPSCNA

SEQ ID NO: 76597 - protein, 181 aa, Zea mays
  Coding DNA Sequence Number=SeqID_34818
  Homolog annotation: Hit_ID=Q8RXA0; Match level="QueryCoverage=31%, HitCoverage=38%, E-value=2e-22, Identity=82%"; Hit description =Elicitor and UV light related transcription factor
  Pfam annotation: Domain name=UQ_con; Domain location=101-181; Score= -2.7; E_value=5.3e-05; Accession=PF00179.16; Description=Ubiquitin -conjugating enzyme
SCSVDRDWKTIEACVGSKTVIQIRTHTLKYFLKVQKNVSQIILLQGQPTQRQQGSVMPMDTATVQQITVQVAQRVRLVLGQLLKQLSKKLWFHHSVWVQSREGREWLFTPIGLTKSSVGENMFHWQATIMGPSDTPFAGGVFLVNIHFPPDYPFKPPKVSFHTKVFDLNINDNNNICLGHS

SEQ ID NO: 76598 - protein, 51 aa, Zea mays
  Coding DNA Sequence Number=SeqID_34819
  Gene Ontology: Mol. function=small conjugating protein ligase activity; Cellular component=proteasome complex (sensu Eukaryota); Biological process=protein modification process
  Homolog annotation: Hit_ID=Q8RXA0; Match level="QueryCoverage=84%, HitCoverage=29%, E-value=9e-17, Identity=88%"; Hit description =Elicitor and UV light related transcription factor
MGPSDTPFAGGVFLVNIHFPPDYPFKPPKVSFHTKVFDLNINDNNIFLGHS

SEQ ID NO: 76599 - protein, 68 aa, Zea mays
  Coding DNA Sequence Number=SeqID_34820
MDKELGGHEREGAPCAGEDSPVLQPLAGRRSREGARLLLAGVEAWVCIEGHRALGQRSGHGRSSAPRE

SEQ ID NO: 76600 - protein, 122 aa, Zea mays
  Coding DNA Sequence Number=SeqID_34821
MDQSSPTPWTSEGNAGGARLLADHGEDDSLLQPLARRRSREGARLLLCEEEGAGGAAPWLAKGEELLRVGCCCRGAGRKKLLAAERKGGSEKANRDILKLLSIRGFEFGSDMRYLAESDKID

SEQ ID NO: 76601 - protein, 141 aa, Zea mays
  Coding DNA Sequence Number=SeqID_34822
MARRPLLLLPRTAVAERPPCSSSWRAAAAGSRLLRGRPAIELPQRFPLMSMAWASSDPSRPPPLLLPQASRRIPLLPVHSAPFTFGCAPCTATCSPWLHHAQGIFSGSKLEQMARRRPWPTSTSLSMASKFPAPSSSIQKQ

SEQ ID NO: 76602 - protein, 79 aa, Zea mays
  Coding DNA Sequence Number=SeqID_34823
MEVSHRGRRPSPEPRGNPSIAGDSGIQSTNRTRCDEALDETNAAVPSDSADDARIGSNCSPELSPELEPPRTSAGNTGS

SEQ ID NO: 76603 - protein, 70 aa, Zea mays
  Coding DNA Sequence Number=SeqID_34824
MEVSHRGRRPSPEPRGNPSIAGDSGIQSTNRTRCDEALDETNAAVPSDSADDARIGSNCSPELSPELEPP

SEQ ID NO: 76604 - protein, 160 aa, Zea mays
  Coding DNA Sequence Number=SeqID_34825
  Gene Ontology: Mol. function=DNA binding; Cellular component=nucleus
  Homolog annotation: Hit_ID=Q0PJE6; Match level="QueryCoverage=62%, HitCoverage=77%, E-value=8e-10, Identity=40%"; Hit description=MYB transcription factor MYB148
  Subcellular localization annotation: CTP_CleavageSite=57; ConfidenceScore=5.05e-01
MQFILISPTIYMFILLSPSTLDGNGEQAAATLRSQRSPQHPRSWKVSRGLPFFQRVSCSVDRDWKTIEACVGSKTVIQIRTHALKYFLKVQKNVSQTILLQGQPTQRQQGSVMPMDTATVQQITVQVAQRVRLVLGQLLKQLSKKLWFHHSVANVPEKEM

SEQ ID NO: 76605 - protein, 119 aa, Zea mays
  Coding DNA Sequence Number=SeqID_34826
  Homolog annotation: Hit_ID=Q5VS69; Match level="QueryCoverage=36%, HitCoverage=16%, E-value=2e-09, Identity=66%"; Hit description =Putative MYB29 protein
  Subcellular localization annotation: CTP_CleavageSite=41; ConfidenceScore=5.05e-01
MMKGRTSKAQGNCALKYIKKRPPWDDTLAQSLSAGATNNCSGSTESPSGTWPTSEAVEQEIMVPSLRGREWLFTPIGLTKTYVHNSSSLHMTASFFSLLDSFHFCPSDTRYNNNSSVCY

SEQ ID NO: 76606 - protein, 123 aa, Zea mays
  Coding DNA Sequence Number=SeqID_34827
MNVCELTLAVSHPPQVKNRKGKIITQQQTEMNPPNPPPVEIDQVIAAQRLVIQQLTYLVTEMQNQIRQEREEIRQVRQEIRQARLERQQQQQPPPPPPTPPSYINIYINYYYLEDLDVTLVSR

SEQ ID NO: 76607 - protein, 73 aa, Zea mays
  Coding DNA Sequence Number=SeqID_34828
MANTKEVKNTGNRVRRQVVLALGRLGGALSTPARNCSRTAGLLIVVLPVFGQQPLDRFQQVEDLEDSFLFAVV

SEQ ID NO: 76608 - protein, 260 aa, Zea mays
  Coding DNA Sequence Number=SeqID_34829
MAVPRPRICALRRGTLLLFLLVPLIYSDFVELDLPHNKLLLMMFCNHNLILVECILSFSNQYLLAVGTMQPGLRALNKIGLSSEENYSGEHVPFVTVFTTYNSVSAGDGNVPPDSVTVGNSSYSKIERSMTILNTFISFIKVSMPRSDVIILTDPGSKFSVNQGSATLLPIEGNYSRGNLMLQRIKTYIAFLEQKLVEFDRTERLNHFVLTDSDIAVVDDLGHIFEKNPHFHLAVTFRNNKGQPLNSGFVASCGILETSP

SEQ ID NO: 76609 - protein, 293 aa, Zea mays
  Coding DNA Sequence Number=SeqID_34830
MRVLKQLSGIAGLAIRYGLTLNTLQAQVKYAPQLPFVLTMRLSSQEFKYHSVCNKNMYLKNIPAVNQGSATLLPIEGNYSRGNLMLQRIKTYIAFLEQKLVEFDRTERLNHFVLTDSDIAVVDDLGHIFEKYPHFHLAVTFCNNKGQPLNSGFVAVRGTRDGITKAVEFLKQVLGTYSLRYIKASRMLGDQLALAWVVKSHLPSALGKFSKHEAFTGEVNGTSVLFLPCVVYNWTPPEGAGQFHGIPLDVKVVHFKGSRKRLMLEAWNFYNSTSKMSDMLCLILRSGRTKYDF

SEQ ID NO: 76610 - protein, 57 aa, Zea mays
  Coding DNA Sequence Number=SeqID_34831
MGRGSEDIREPSKSASGVISQSGNRLRQGKHPPAMNGGNHSRSGNGKGGYPEKDPSS

SEQ ID NO: 76611 - protein, 314 aa, Zea mays
  Coding DNA Sequence Number=SeqID_34832
  Homolog annotation: Hit_ID=Q6QP51; Match level="QueryCoverage=16%, HitCoverage=23%, E-value=8e-13, Identity=70%"; Hit description =Putative growth-regulating factor 1
MAERYQLPRSCVPPTTRRKDCGHPPSGGSEDGKTQCIREREDMVAFQGGHPPFKGDSPYLRPQPSWAESSPTRSKVLPLWRGGWVPHVMQAGPEQKKPNRRARCMQPPNGYKWPSTFAQTSGRKGGQPCRRHATAPSGRASPTSNAPSMEAQAHASCNRRAGCCVRATAPPPAPLPRLLDCGTNTATRGDPAHDPAAPAWHDGQCGQKWAGSNGGGRQAGAAGPGKGDTPKRILLREGIRLRASLLIRGSKAGPSEGFNSRLRARGLHTHYWSEVRRPAPRKGSTTASGYSGSAPTTDQGFEGWPLKGSQPPQI

SEQ ID NO: 76612 - protein, 156 aa, Zea mays
  Coding DNA Sequence Number=SeqID_34833
  Homolog annotation: Hit_ID=Q2RBJ3; Match level="QueryCoverage=30%, HitCoverage=6%, E-value=5e-09, Identity=83%"; Hit description =Sodium/hydrogen exchanger family protein, expressed
MNFNPKLPSPPPCPLIDRLMDPMNVPGVPQAANRLIGEGRGAAAGVLEGTTSGVVYMEKTVEDAEGTASVVRAMSEKFDLLIVGRCPCALESDPRRRERAKSRGNQILKVCDREWAFLVHVRVRRCRFWELSGRPSRWDLPFPRLGNAPEQIHRGS

SEQ ID NO: 76613 - protein, 102 aa, Zea mays
  Coding DNA Sequence Number=SeqID_34834
  Homolog annotation: Hit_ID=Q2RBJ3; Match level="QueryCoverage=43%, HitCoverage=6%, E-value=3e-07, Identity=82%"; Hit description =Sodium/hydrogen exchanger family protein, expressed
MEAANRLIGEGRGAAAGVLEGTTSGVVYMEKTVEDAEGTASVVRAMSEKFDLLIFVTANGRSWSMFACAAADSGSSLVVRLAGICLFPGSSIDLLPSGQCRS

SEQ ID NO: 76614 - protein, 294 aa, Zea mays
  Coding DNA Sequence Number=SeqID_34835
  Gene Ontology: Mol. function=actin binding; Cellular component =cytoskeleton; Biological process=cytoskeleton organization and biogenesis
  Homolog annotation: Hit_ID=Q9SQH4; Match level="QueryCoverage=96%, HitCoverage=30%, E-value=1e-126, Identity=73%"; Hit description =Actin bundling protein ABP135
  Pfam annotation: Domain name=Gelsolin; Domain location=174-250; Score= 38.6; E_value=2.1e-08; Accession=PF00626.12; Description=Gelsolin repeat
  Pfam annotation: Domain name=Gelsolin; Domain location=60-140; Score =43.9; E_value=5.5e-10; Accession=PF00626.12; Description=Gelsolin repeat
  Pfam module annotation: Pfam domain module=Gelsolin::Gelsolin; Domain location=174-250::60-140
MKWDCSIKTVELDAILGGRAFQHRDSKPCIIPLEGGFASGFKKPEEEKFETRLYICRGKRAIRVKEVPFARSSLNHDDVFVLDAENKIYQFNGANSNIQERAKALEVIQHLKEKYHGGVCDVAIVDDGKLQAESDSGEFWVLFGGFAPIGKKTVSDDDVVLETTAPRLYSINDGQLKLEETALTKAVLENTKCFLLDCGAEIYVWVGRVTQMEDRKSATKAVEEFLINQKRPKTTRVTQVIQGYESHAFKSKFESWPVGNATGSPGAEEGRGKVAALLKQQGVDLKELQKAPLQ

SEQ ID NO: 76615 - protein, 935 aa, Zea mays
  Coding DNA Sequence Number=SeqID_34836
  Gene Ontology: Mol. function=actin binding; Cellular component =cytoskeleton; Biological process=cytoskeleton organization and biogenesis
  Homolog annotation: Hit_ID=Q9SQH4; Match level="QueryCoverage=99%, HitCoverage=95%, E-value=0.0, Identity=58%"; Hit description=Actin bundling protein ABP135
  Pfam annotation: Domain name=Gelsolin; Domain location=137-217; Score= 43.9; E_value=5.5e-10; Accession=PF00626.12; Description=Gelsolin repeat
  Pfam annotation: Domain name=Gelsolin; Domain location=251-327; Score= 38.6; E_value=2.1e-08; Accession=PF00626.12; Description=Gelsolin repeat
  Pfam annotation: Domain name=Gelsolin; Domain location=35-100; Score =29.4; E_value=1.3e-05; Accession=PF00626.12; Description=Gelsolin repeat
  Pfam annotation: Domain name=Gelsolin; Domain location=393-476; Score= 37.7; E_value=4e-08; Accession=PF00626.12; Description=Gelsolin repeat
  Pfam annotation: Domain name=Gelsolin; Domain location=523-593; Score= 21.4; E_value=0.0033; Accession=PF00626.12; Description=Gelsolin repeat
  Pfam annotation: Domain name=Gelsolin; Domain location=627-707; Score= 36.9; E_value=7e-08; Accession=PF00626.12; Description=Gelsolin repeat
  Pfam module annotation: Pfam domain module=Gelsolin::Gelsolin::Gelsoli n::Gelsolin::Gelsolin::Gelsolin; Domain location=137-217::251-327::35- 100::393-476::523-593::627-707
MSTAKVLDPAFQGAGQKHNLVGQKYGGLKILSQFRCQNLIMTTCTKGGAYLYDIHFWIGKDSSQDEAGTAAIKTVELDAILGGRAIQHRELQGYESDKFLSYFKPCIIPLEGGFASGFKKPEEEKFETRLYICRGKRAIRVKEVPFARSSLNHDDVFVLDAENKIYQFNGANSNIQERAKALEVIQHLKEKYHGGVCDVAIVDDGKLQAESDSGEFWVLFGGFAPIGKKTVSDDDVVLETTAPRLYSINDGQLKLEETALTKAVLENTKCFLLDCGAEIYVWVGRVTQMEDRKSATKAVEEFLINQKRPKTTRVTQVIQGYESHAFKSKFESWPVGNATGSPGAEEGRGKVAALLKQQGVDLKGAAKSTTPVNEEVPPLLEGGGKLEVWCVDGNAKTALPKEDIGKFYSGDCYIILYTYHSGDKKEEYYLSYWIGKDSLVDDQVSASQITNTVWNSLKGRPVLGRIYQGKEPPQFVALFQPMIILKGGIGSGYKKLIEEKGATGETYTTEGIALIRVSGTSIHNNKTLQVDTVATSLSSMECFILQSGNAMFTWFGNSSTYEQQQWAAKVAEFLKPGVAVKHCKEGTESSGFWFALGGKQSYTNKNAPQDIITREPHLYAFSFKNGRLEVTEIFNFSQDDLLTEDMMILDTHGEVFIWIGQCVESKEKQKAFDIGQKYVEHANSIDDLSPYAPLYKVMEGNEPCFFKTYFSWDNTKSLVHGNSFQKKLSLLFGLRSEGASRSSGNGGPTQRASALAALSSAFNPSSQQRLSNERPKSTGDGPTQRASALAALSNAFNSSLKPKTPPPSRSGQGSQRAAAVAALSSVLTAEQSGSSENLRAKASSTGDKTDVDRPVITPAGPSGPSSPQSEAGESNVFRQEKDAAVDGAPSDTDGAVAETREEETTENVGEATFSYDRLISKSTDPVRGIDYKRRE

SEQ ID NO: 76616 - protein, 91 aa, Zea mays
  Coding DNA Sequence Number=SeqID_34837
MVDCPLCAPARRGSSALAPKVAMRLMVLGIDSGNASPLQPNRILAGYVDVYSPLLYTPNPPSPGCQHCNHCSGEDEAVGGDFQEFQDYDEF

SEQ ID NO: 76617 - protein, 293 aa, Zea mays
  Coding DNA Sequence Number=SeqID_34838
MEAPPDPVVPSCSTRSSATSTDPQVAERKMALHQVADRKCQWLQAAVSEVNGDGAVCVRWRRGSQRRKIWNRTVDVSDDLVEQDGTAGGILYGVSSMSYGPMPSHANERSRELGLAGCSLVLHICGMEPPPWIIRNELTRLPSTVPPPEYRAAARTPRRRRQNTVPPLGRTNSSSARSPAAQAHRAAASPFNLVLGSPPPQPKLTAPPPAPSIAAHCSISFPDGKGLAESELGTTGSPSFEPERVDRPRVVATADARVCGLPPVLPPSQVLYKLALVPMKNYPFFLAQFATFG

SEQ ID NO: 76618 - protein, 158 aa, Zea mays
  Coding DNA Sequence Number=SeqID_34839
MEVCDELRSFEATGVYRLDVTSTGATFVDSVRLLILNASYQFSHLTSCGCAARGWNGCGRAGPRTRGGAASARRWRGRGYRSDEALSSTNVVGALGLHRAHHLLRERDGTVGGNGWRWRRRSELGLRGLRAEDEIERAGGGAVSLGCWAASRGRVCAA

SEQ ID NO: 76619 - protein, 119 aa, Zea mays
  Coding DNA Sequence Number=SeqID_34840
  Homolog annotation: Hit_ID=Q9SNS9; Match level="QueryCoverage=34%, HitCoverage=12%, E-value=3e-08, Identity=68%"; Hit description =MutT/nudix protein-like
MNPNPKLPSPPPCPLIDRLMDPMNVPGVPQAANRFTDHGASPSRAGSLENRIIGSAEVPRRFGYEALELRNGGSDYFGKGVLKVEEETGIKLNIEDMVDLMTLLDPATGGRMLPSLVTG

SEQ ID NO: 76620 - protein, 125 aa, Zea mays
  Coding DNA Sequence Number=SeqID_34841
  Subcellular localization annotation: CTP_CleavageSite=46; ConfidenceScore=5.69e-01
MARTKGSLALRVLHLFFPCTPTPLGGPCPCSQNSCSSSSSLGRSTRLAACGTPGTFMGSINRSIKGHGGGRREFRVRVHGLYLIGDTVEGRPRRPRRAPCAGHTPPSPTVAESPIHANTAWIQMC

SEQ ID NO: 76621 - protein, 81 aa, Zea mays
  Coding DNA Sequence Number=SeqID_34842
  Subcellular localization annotation: CTP_CleavageSite=39; ConfidenceScore=5.20e-01
MANGPKTDFRPRPRKRARGRARDPPVVPPRETWKFGCTREGKRVSSPEPRTPSRPSRGRRAPYRAQLRLALLAAWPAVFRP

SEQ ID NO: 76622 - protein, 68 aa, Zea mays
  Coding DNA Sequence Number=SeqID_34843
MAHGPKTDFRPRPRKRARGRARDPPVVPPRETSKFESTRLRGGYTSAKQNFQPHNTKNYCGYRSWNYH

SEQ ID NO: 76623 - protein, 75 aa, Zea mays
  Coding DNA Sequence Number=SeqID_34844
  Subcellular localization annotation: CTP_CleavageSite=51; ConfidenceScore=5.07e-01
MANGPKTDFRPRPRKRARGRARDPPVVPPRETWKFGSTLSPALGGPSVAVLASRPAVPSVEGCFGWLDRSGYAGA

SEQ ID NO: 76624 - protein, 128 aa, Zea mays
  Coding DNA Sequence Number=SeqID_34845
MANGPKTDFRPRPRKRARGRARDPPVVPPRETWKFGSTLEGKRVTLAKPLILSKNAVFGHLRWVSWGPGKMPWFSEGRTPRSPRRGYAPQVSSAEPRTPSRPSRGRSAPYRAQLRLALLAAWPAVVRP

SEQ ID NO: 76625 - protein, 90 aa, Zea mays
  Coding DNA Sequence Number=SeqID_34846
  Subcellular localization annotation: CTP_CleavageSite=54; ConfidenceScore=5.24e-01
MANGPKTDFWPRPRKRARGRAQDPPVVTPRETWKFGSTRITPRSPGRGYAPQVSSAEPRTPSRTNRGRSAPYRAQLRLALLAAWPAVVRP

SEQ ID NO: 76626 - protein, 87 aa, Zea mays
  Coding DNA Sequence Number=SeqID_34847
  Subcellular localization annotation: CTP_CleavageSite=51; ConfidenceScore=5.14e-01
MARGPENNGSATAAKNGLSPNVWKDTEPRAHVLSEGRTPRSPGRGYAPQVSSAEPRTPSRPSRGRSAPYRAQLRLALLAAWPAVVRP

SEQ ID NO: 76627 - protein, 83 aa, Zea mays
  Coding DNA Sequence Number=SeqID_34848
  Subcellular localization annotation: CTP_CleavageSite=10; ConfidenceScore=5.19e-01
MANGPKTDFRARPRKRARGWARDPPVVPPRETWKFGTPRSPGRGYAPQVSSAEPRTPSRPSRGRSAPYRAQLRLALLAAWPAV

SEQ ID NO: 76628 - protein, 90 aa, Zea mays
  Coding DNA Sequence Number=SeqID_34849
  Subcellular localization annotation: CTP_CleavageSite=54; ConfidenceScore=5.35e-01
MANGPKTDFWPRPRKRARGRAQDPPVVTPRETWKFGSTRRTPRSPGRGYAPQVSSAEPRTPSRPSRGRSAPYRAQLRLALLAAWPAVVRP

SEQ ID NO: 76629 - protein, 90 aa, Zea mays
  Coding DNA Sequence Number=SeqID_34850
  Subcellular localization annotation: CTP_CleavageSite=54; ConfidenceScore=5.22e-01
MANGPKTDFRPRPRKRARGRARDPPVVAPRETWKFGCTRRTPRSPGRGYAPQVSSAEPRTPSRPSRGRSAPYRAQLRLALLAAWPAVVRP

SEQ ID NO: 76630 - protein, 90 aa, Zea mays
  Coding DNA Sequence Number=SeqID_34851
  Subcellular localization annotation: CTP_CleavageSite=54; ConfidenceScore=5.58e-01
MANGPKTDFWPRPRKRARGRAQDPPVVTPRKTWKFGSTRRTPRSPGRGYAPQVSSAEPRTPSRPSRGRSAPYRAQLRLALLAAWPAVVRP

SEQ ID NO: 76631 - protein, 267 aa, Zea mays
  Coding DNA Sequence Number=SeqID_34852
MANGPKTDFRPRPRKRARGRARDPPVVPPRETWKFGCTREGKRNSPKSWEGVSSAEPRTPSRPSRGRSAPYRAQLRLALLAAWPAVRLRWRMSCLGPVTAWRTPAAVRPTPGARVPSLVRASRACCVEKCLRAATRPTGSRARYTLPSSSSPPGVRLVGSRAPAAFASCRRRPMAGGTEDTSLALLVSDVAHAEGRRRVGVTRPRIGPPERTTSSPARRLRAEAGAGPSARTCYLVDPASSHMLVSKIKPCMCKYELIRTVKLRMAH

SEQ ID NO: 76632 - protein, 206 aa, Zea mays
  Coding DNA Sequence Number=SeqID_34853
  Subcellular localization annotation: CTP_CleavageSite=85; ConfidenceScore=5.36e-01
VSFQVSSAEPRTPSRPSRGRSAPYRAQLRLALLAAWPAVRLRWRMSCLGPVTAWRTPAAVRPTPGARVPSLVRASCACCVEKCLRAATRPTGSRARYTLPSSSSPPGVRLVGSRAPAAFASCRRRPMAGGTEDTSLALLVSDVAHAEGRRRVGVTRPRIGPPERTTSSPARRLRAEAGAGPSARTCYLVDPASSHMLVSKIKPCMC

SEQ ID NO: 76633 - protein, 267 aa, Zea mays
  Coding DNA Sequence Number=SeqID_34854
MANGPKTDFRPRPRKRARGRARDPSVVPPRETWKFGCTREGKRNSPKSWEGVSSAEPRTPSRPSRGRSAPYRAQLRLALLAAWPAVRLRWRMSCLGPVTAWRTPAAVRPTPGARVPSLVRASCACCVEKCLRAATRPTGSRARYTLPSSSSPPGVRLVGSRAPAAFASCRRRPMAGGTEDTSLALLVSDVAHAEGRRRVGVTRPRIGPPERTTSSPARRLRAEAGAGPSARTCYLVDPASSHMLVSKIKPCMCKYELIRTVKLRMAH

SEQ ID NO: 76634 - protein, 141 aa, Zea mays
  Coding DNA Sequence Number=SeqID_34855
MGTPKVVAPFAERREFDKILIYSKQQLLMLEANLVFGAFASYDRHRDMRMDIDDMSYEVYFLWILKVARHRSIVGQYLTSCSGGTIAGLALGSRLSSFKTKLEVNKSTVDDMKCSICQTLVEFFGTLSRVGFGMHERPSTG

SEQ ID NO: 76635 - protein, 160 aa, Zea mays
  Coding DNA Sequence Number=SeqID_34856
  Homolog annotation: Hit_ID=Q94CH1; Match level="QueryCoverage=29%, HitCoverage=9%, E-value=2e-21, Identity=97%"; Hit description=Seven transmembrane protein Mlo4
  Subcellular localization annotation: CTP_CleavageSite=55; ConfidenceScore=5.42e-01
MDLLGVFPTGLATSTPETNTSQSQGSSDSSGNNKSKSHSTEPLCFLRQFKGSIIRSDYLALRLGFVTYHKLPHSYDFHKYMVQSMEDDYNGTIGIRRTTGPTRRSSKGNWTVEENQRSGETDQKVKAEGMPREQNEHVLFPRYSLVCTFRFSMLTKRKGK

SEQ ID NO: 76636 - protein, 128 aa, Zea mays
  Coding DNA Sequence Number=SeqID_34857
  Homolog annotation: Hit_ID=Q94CH1; Match level="QueryCoverage=37%, HitCoverage=9%, E-value=2e-21, Identity=97%"; Hit description=Seven transmembrane protein Mlo4
  Subcellular localization annotation: CTP_CleavageSite=55; ConfidenceScore=5.40e-01
MDLLGVFPTGLATSTPETNTSQSQGSSDSSGNNKSKSHSTEPLCFLRQFKGSIIRSDYLALRLGFVTYHKLPHSYDFHKYMVQSMEDDYNGTIGIRRTTGPTRRSSKGNWTVEEVNQNVFPGLRTEIQ

SEQ ID NO: 76637 - protein, 480 aa, Zea mays
  Coding DNA Sequence Number=SeqID_34858
  Homolog annotation: Hit_ID=Q94CH1; Match level="QueryCoverage=11%, HitCoverage=10%, E-value=2e-23, Identity=98%"; Hit description=Seven transmembrane protein Mlo4
  Pfam annotation: Domain name=Mlo; Domain location=119-443; Score= -313.7; E_value=0.0002; Accession=PF03094.6; Description=Mlo family
MGTPKVVAPFAERREFDKILIYSKQQLLMLEANLVFGAFASYDRHRDMRMDIDDMSYEVYFLWILKVARHRSIVGQYLTSCSGGTIAGLALGSRLSSFKTKLEVNKSTVDDMKCSICQKTGLFMLLLPHFPNVLLKRLGCTCEPSRHLLSSLAHCREWALECMKDLLLVNLKGNLQIVVQWNAFLKFCMSISKCNTPDFSLHTTARTQISISSMDLLGVFPTGLATSTPETNTSQSQGSSDSSGNNKSKSHSTEPLCFLRQFKGSIIRSDYLALRLGFVTYHKLPHSYDFHKYMVQSMEDDYNGTIGIRFLDSNNEAFKYTGLEIVSHEIQYGGCVEETGPAGSERLCRAQSLQLLLFLLMEESARNLKKGEIAQWVNFYPLIGTTHQEDNWSNTPLIQGQLDCRRVTLFSDMPTSAPKIYLIFGWQCSFYMLENQRSGETDQKVKAEGMSREQNEHVLFPRYSLVCTFRFSMLTKRKGK

SEQ ID NO: 76638 - protein, 97 aa, Zea mays
  Coding DNA Sequence Number=SeqID_34859
MRIKEDQQYQDCTLPVFVFDEVGRPTGFGRGCPRAQQVGIQRNHHTRHLIMLENQRSGETDQKVKAEGMPREQNEQALCIVEEANLMYEAPTLLLPQ

SEQ ID NO: 76639 - protein, 433 aa, Zea mays
  Coding DNA Sequence Number=SeqID_34860
  Homolog annotation: Hit_ID=Q94CH1; Match level="QueryCoverage=12%, HitCoverage=10%, E-value=2e-23, Identity=98%"; Hit description=Seven transmembrane protein Mlo4
  Pfam annotation: Domain name=Mlo; Domain location=72-396; Score= -313.7; E_value=0.0002; Accession=PF03094.6; Description=Mlo family
MRMDIDDMSYEVYFLWILKVARHRSIVGQYLTSCSGGTIAGLALGSRLSSFKTKLEVNKSTVDDMKCSICQKTGLFMLLLPHFPNVLLKRLGCTCEPSRHLLSSLAHCREWALECMKDLLLVNLKGNLQIVVQWNAFLKFCMSISKCNTPDFSLHTTARTQISISSMDLLGVFPTGLATSTPETNTSQSQGSSDSSGNNKSKSHSTEPLCFLRQFKGSIIRSDYLALRLGFVTYHKLPHSYDFHKYMVQSMEDDYNGTIGIRFLDSNNEAFKYTGLEIVSHEIQYGGCVEETGPAGSERLCRAQSLQLLLFLLMEESARNLKKGEIAQWVNFYPLIGTTHQEDNWSNTPLIQGQLDCRRVTLFSDMPTSAPKIYLIFGWQCSFYMLENQRSGETDQKVKAEGMSREQNEHVLFPRYSLVCTFRFSMLTKRKGK

SEQ ID NO: 76640 - protein, 323 aa, Zea mays
  Coding DNA Sequence Number=SeqID_34861
  Gene Ontology: Mol. function=DNA binding; Biological process =regulation of transcription
  Homolog annotation: Hit_ID=Q10PU3; Match level="QueryCoverage=52%, HitCoverage=19%, E-value=1e-53, Identity=60%"; Hit description=No apical meristem protein, expressed
  Pfam annotation: Domain name=NAM; Domain location=136-266; Score= -13.9; E_value=3.3e-06; Accession=PF02365.6; Description=No apical meristem (NAM) protein
MEVMRQWRLDLEEDEARRRSDETRPRDGVLAAVFSLAHKLQPAIIFIDEVDSFLGQRRTTDHEAMTNMKTEFMSLWDGFTTDRHLPKHRRLQPAINRRFGSLTSQNLDISQPNFEANPPDGVLAVPLLRHQSWPGLPRGVEFNPSDSDLLWHLAAEVGNALAERHPFINEFIKFVDDVREFICTHPQHIPGVRQDGRASYFFHRSFEPYINENDVNNCWKKIGSHISIILDGTLMGCKEVFALYADMPSDKRSQETDWRLHQYHLQNTVKAESEIVASKIFLASRNSLCELAKETHIESEWVLLSYQYPFVYISLEIPIIFVL

SEQ ID NO: 76641 - protein, 246 aa, Zea mays
  Coding DNA Sequence Number=SeqID_34862
  Gene Ontology: Mol. function=nucleoside-triphosphatase activity; Cellular component=membrane; Biological process=proteolysis
  Homolog annotation: Hit_ID=Q5Z9Q8; Match level="QueryCoverage=93%, HitCoverage=58%, E-value=1e-89, Identity=77%"; Hit description =Putative spastin protein
  Pfam annotation: Domain name=AAA; Domain location=122-245; Score =55.1; E_value=2.4e-13; Accession=PF00004.19; Description=ATPase family associated with various cellular activities (AAA)
  Pfam annotation: Domain name=AAA_3; Domain location=122-237; Score= -19.9; E_value=0.049; Accession=PF07726.2; Description=ATPase family associated with various
  Pfam module annotation: Pfam domain module=AAA::AAA_3; Domain location=122-245::122-237
MGSSEPSSRSVQNLVLYAASAALSCLVLLAGLRHLDPNRAASQKAQQQKKEIAKRLGRPLVSTTPYEDVIACDVINPDSIDVEFDSIGGLDKVKQALYELVILPLRRPELFASGKLLSPQKGVLLYGPPGTGKTMLAKAIARESGAVFINVRISNLMSKWFGDAQKLVSAVFSLAHKLQPAIIFIDEVDSFLGQRRTTDHEAMTNMKTEFMSLWDGFTTDRESFYTLPAAMKVDVQLSFVDNDVNL

SEQ ID NO: 76642 - protein, 450 aa, Zea mays
  Coding DNA Sequence Number=SeqID_34863
GLAKGPTGGLFAECQSTRYSAKKPPLPSAYESSRHRDWRWGPLDPSLPRAVRADTRQNWPLCRVPKKALGKGSVTVTWRRDGDFSLPSVKWHSANSLSSARQKVLGKEAVADVHKITNNIKFQKSFKGSVHQGTLPTLLSIGSEPRHSATKRSSLALKLAVVLSVLADAWLVRYRSPFVHPVPIETRSGDVAPPVEALLPGVRRHRVIDTAIETATGARSRDKFRQLRSELVEMLCDAADDDADRVKELCRLLDAAMAEALLTLHVVPVTTTMLTTTGVDKADEGLLSHEAGKVRALARGILIKWAQGGVLDLDTTVLAGRSSVHSPDASAAGAERPETAVLLADTPKISDEKMPPVVSNAGGDRVRSGQTGDAKRKHPGYYREADADDEKRQRNVSEKVEDRPRKMEPDIKSRSSWRSRDTKSRSRASSWRYRDERRFSSSTRHSHRRV

SEQ ID NO: 76643 - protein, 77 aa, Zea mays
  Coding DNA Sequence Number=SeqID_34864
MALGKEGNLGTGKAIFVECCGQGTWQRDWQRGPLEDSLPSASPLATRQRSLLCRVPTRALGTGTGGGAHWTRLCRGP

SEQ ID NO: 76644 - protein, 119 aa, Zea mays
  Coding DNA Sequence Number=SeqID_34865
VNKVHTKKAAAPKIAKQESSDDDTSDETFESDEEPAKKPAAKPLAAVAKNGSKTVKQESSSDEDSSEDESDDDSDDGSDIVFNLLNRVYDDVGKRWSRRLVFSMPNQGVSLILVISSEM

SEQ ID NO: 76645 - protein, 382 aa, Zea mays
  Coding DNA Sequence Number=SeqID_34866
  Homolog annotation: Hit_ID=O24659; Match level="QueryCoverage=32%, HitCoverage=51%, E-value=2e-49, Identity=73%"; Hit description=Sec14 like protein
  Pfam annotation: Domain name=CRAL_TRIO_N; Domain location=51-129; Score=5.2; E_value=0.014; Accession=PF03765.5; Description=CRALTRIO, N-terminus
MAGQAHPAHAALHGIAVPADLLSPAVHSPNELLSMEHRGRGLLLGEIHGWRPPLLLSPPPASLIEALLDSVLRCVHGGFSWASGEAGAHAGGGQPDAGRFLRARDHDVDKASAMFLKFLKWRREAAPGGSVPEEQVRRELSQDKLCMGGGDRAGRPILVAFAARHFSVGRDMAEFKSFVVYFFDKICARIPRGQEKFLCIVDLKGWGYSNCDVRAYIAAIEILQVNKVHTKKAAAPKIAKQESSDDDTSDETFESDEEPAKKPAAKPLAAVAKNGSKTVKQESSSDEDSSEDESDDDSDDGSDIVFNLLNRVYDDVGKRWSSLSDHKWDNANYLEPKQINSLCMVTLSADDYRNKDEVSVLTEEFKTQLTIREDLFITTKVV

SEQ ID NO: 76646 - protein, 70 aa, Zea mays
  Coding DNA Sequence Number=SeqID_34867
  Subcellular localization annotation: CTP_CleavageSite=33; ConfidenceScore=5.46e-01
MVAETAAIGGRPSLQPSQARKSAALSVAASPASSAHRSALFSGNGSGGRYISNEKLLSRQPCGINSKKRL

SEQ ID NO: 76647 - protein, 221 aa, Zea mays
  Coding DNA Sequence Number=SeqID_34868
  Subcellular localization annotation: CTP_CleavageSite=33; ConfidenceScore=5.37e-01
MVAETAAIGGRPSLQPSQARKSAALSVAASPTSSAHRAYVAQVTSQGKLLMWGAKAVAYYFHGLILDEGNTSLARVRRAEDPCSAVAKWLLHRGGIAPTPISIVLAPSATSPPDTVHVGVHVRRLHFHLLICYAFHLGRCQSRCLVAGDRPPHALRVRQPHWCLYGLLLLALVIYSLGSKTLAKFEFADSLEYNFQRLGLIKHSSCLADSPHARHQPGFSV

SEQ ID NO: 76648 - protein, 106 aa, Zea mays
  Coding DNA Sequence Number=SeqID_34869
MEITFRRTKGHDPNLEGAVADRPERLEGLGARSHGQRSSANTMEDAPIGRSVALAVAAAVQQVPQRCWDQRQDHPRSDGRAQGQVGPGVLLAALLGMVATMSMRST

SEQ ID NO: 76649 - protein, 292 aa, Zea mays
  Coding DNA Sequence Number=SeqID_34870
MIYKDLSVALLTFILRFLNGGHRRRRGADFAARRLLRAAHRHGRHHAKKRSKKDARATLDPERVRRTGGDPGAGPSNVAAPAAPPQQPPAPRQDRWVRPPSPSPERVAERLRESETQQPLRPMRYCPLHGWGPCPARHPRAPPTDADTAAPAVRSSGLLVQVTSPARPRARTRLTARKLTGPRGRPVGQIASTSTATVAVDATSSSDDDERIALVLCDGVQQRLPTPTPDDGPSGTVSPSTLLSPSGNRVVRRLAHHLSPRPLAPGSWSATARPSDDDDVREHSRSPPRRLP

SEQ ID NO: 76650 - protein, 796 aa, Zea mays
  Coding DNA Sequence Number=SeqID_34871
  Homolog annotation: Hit_ID=Q10I64; Match level="QueryCoverage=44%, HitCoverage=58%, E-value=1e-178, Identity=82%"; Hit description=FAD -binding domain-containing protein, putative, expressed
  Subcellular localization annotation: CTP_CleavageSite=68; ConfidenceScore=5.43e-01
MQAARNRTKGAHPFDSDASSMGAQAHTSCGRKQRSSRLQAHVPSWDSERALSHGVKTTRPCSVPRTARARTTAAPRTTRPVALTLRQDRRHLWQAKEATLHLRHNDRVKKASPSEGFNSRLRALRLHAHYWSEVRRLAPRKGSTAASGHSGSAPTTDQGFVGWPPKGSTVASEHTERGMTLGTSDTWPRLELRSRGTLGHFRDQQERFCNEIPSEGGIEPSDPIKRDRFRQITCRSRLRPLKGHDLASLEPSPGQRQPTQEDSRLARGSPQGQSDCSHFAAPLADLTGKQRRLRCSDCCATHQGLGLHLDLGRRTPPRPTPGLGLNLDSGRRSPPRPTLGLGLNLDLERRYPPRPTPGLELNLDPGRRSPPRPTPGPGLSLDLGGAPASPDLGLGPTTSQGGAIITLPLASSGYGEQDRRPIRLAPRDDDDLAEQVAKFGYQHEFADISWFPGHGRAVYRIDDRLPLAASGEGAMDFIGFRATPTVVIQASRLAEDLFERAGNGSGKCLTSRVTHAALSVAGYGLQRRSGGLFTGYPVVGPQHRMQASGGCVTGPENALLTACPWDPRVPAGTFFHQTTFSLPLRRAAAFVTEVRRLRDLEPQALCGVELYDGILMRYVKASTAHLGKPAPRGEPSGDMVDFDITYYRSRDPGRARLFEDVLEEIEQMGIFKYGGLPHWGKNRNLAFVGAARKYPGLPHFLRVKDAYDPDGLFSSDWSDTMLGIGGRSPTTDAPGCALEGMCVCSRDEHCAPEQGYVCRPGKVYKDARVCTRDRSTAEGTIGGLSPRFPTELNLLL

SEQ ID NO: 76651 - protein, 486 aa, Zea mays
  Coding DNA Sequence Number=SeqID_34872
  Homolog annotation: Hit_ID=Q10I64; Match level="QueryCoverage=13%, HitCoverage=10%, E-value=4e-23, Identity=74%"; Hit description=FAD -binding domain-containing protein, putative, expressed
  Subcellular localization annotation: CTP_CleavageSite=68; ConfidenceScore=5.43e-01
MQAARNRTKGAHPFDSDASSMGAQAHTSCGRKQRSSRLQAHVPSWDSERALSHGVKTTRPCSVPRTARARTTAAPRTTRPVALTLRQDRRHLWQAKEATLHLRHNDRVKKASPSEGFNSRLRALRLHAHYWSEVRRLAPRKGSTAASGHSGSAPTTDQGFVGWPPKGSTVASEHTERGMTLGTSDTWPRLELRSRGTLGHFRDQQERFCNEIPSEGGIEPSDPIKRDRFRQITCRSRLRPLKGHDLASLEPSPGQRQPTQEDSRLARGSPQGQSDCSHFAAPLADLTGKQRRLRCSDCCATHQGLGLHLDLGRRTPPRPTPGLGLNLDSGRRSPPRPTLGLGLNLDLERRYPPRPTPGLELNLDPGRRSPPRPTPGPGLSLDLGGAPASPDLGLGPTTSQGGAIITLPLASSGYGEQDRRPIRLAPRDDDDLAEQVAKFGYQHEFADISWFPGHGRAVYRIDDRLPLAASGEGAMDFIGFRATPTV

SEQ ID NO: 76652 - protein, 197 aa, Zea mays
  Coding DNA Sequence Number=SeqID_34873
  Homolog annotation: Hit_ID=Q6YUU0; Match level="QueryCoverage=22%, HitCoverage=11%, E-value=8e-12, Identity=71%"; Hit description =Putative Cgi67 serine protease
MEPEQSSPARTHGEKFNHSLQPSEANTFANIEATYKCLVDVYGTREEDIVLYGQSVGSGPTLNLAVCFNRTSVGAGALPNRSALVDFIPNPEAWSDIVDCLPDSAADDASLVLAGGVRLRFPHRPLDLDPTCAISYQLKLFWLPSRSNPTAENPRYPFDRQLCKRAPNDVSKQPAVHTGLFSVSAERYTETPAFSGY

SEQ ID NO: 76653 - protein, 238 aa, Zea mays
  Coding DNA Sequence Number=SeqID_34874
MAGSKHSSEVSTRNIIKPTWVTLPAEEQLRFEERQEQLIQEAKAKFLANFKTAVGAVVVAPLGTPDSPVNFSGVASEKPEAEEFRVYSPCISLVADGTVPLVITVARRCNRLRGMRGDSPGHAPATLLSPSRLGPSPRAIQANSAHPCFRLKSGTSPASTNPGIPIPQCVGPPHIAIECRCAIGETSVGAGALPNHSALVVFIPNPEAWSDIVDCLPDSAADDASLVLAVGVRLRFLH

SEQ ID NO: 76654 - protein, 149 aa, Zea mays
  Coding DNA Sequence Number=SeqID_34875
MAGIARSTCAGGCSRRRRVYRPNHGDLVQSKGTRVGWGWGKLDWPVYGGSGSGGRGHTAHGQTTVNWTPVRLECARKSVTDAWEGFIGAGAGQGADWPLARRGARAGVLWQAQGASNTWSLQSARVPQLTQVANVRILAKIRCESFPGT

SEQ ID NO: 76655 - protein, 121 aa, Zea mays
  Coding DNA Sequence Number=SeqID_34876
MAGITRSTCAGGCSRRRRVYRPNHGDLVQSKGTRVGWGWGKLDWPVYGGSGSGGRGHTAHGQTTVNWTPVRLECARKSVTDAWEGFIGAGAGQGAGWPLAQRGARAGVLWQAQGASNTWSL

SEQ ID NO: 76656 - protein, 121 aa, Zea mays
  Coding DNA Sequence Number=SeqID_34877
MSKPDKTIPLLILPVLPSLLNPGVGPHEFGLSDCPHSLEWLYDKGVQGVGRGLPTGRGRSSAAGIAAGGLWVGNGGWKVALRVRGYARELLGSLNSLPDQQRRRGRRRERLTGEEDDAGAL

SEQ ID NO: 76657 - protein, 121 aa, Zea mays
  Coding DNA Sequence Number=SeqID_34878
MSKPDKTFPLLILPVLPSLLNPGVGPHEFGLSDCPHSLEWLYDKGVQGVGRGLTTGRGRSSAAGIAAGGLWVGNGGWKVALRVRGYARELLGSLNSLPDQQRRRGRRRERLTGEEDDAGAL

SEQ ID NO: 76658 - protein, 381 aa, Zea mays
  Coding DNA Sequence Number=SeqID_34879
  Gene Ontology: Mol. function=oxidoreductase activity; Cellular component=vacuole; Biological process=response to oxidative stress
  Homolog annotation: Hit_ID=Q5U1S5; Match level="QueryCoverage=80%, HitCoverage=82%, E-value=1e-135, Identity=79%"; Hit description =Class III peroxidase 18 precursor
  Pfam annotation: Domain name=peroxidase; Domain location=90-339; Score=321.0; E_value=2.2e-93; Accession=PF00141.13; Description =Peroxidase
MSLLGPPARGAICLLVVSSSIVVLSTAGGLGSDATSRSAAAYLSVDDDYGEEDESGDSSFSFPDPETSSASTGLVFGFYDDKCPDAEEMVSSMVRKLYHADPNVAAALVRLFFHDCFIHGCDASVLLDRVGGQRSERDAGPNQSLRGLGAVEAIKRGVEKACPGTVSCADILALAARDSLVLVGGPTYPVLTGRRDSAQSFYYDADGGGIPPPNATYAMTLDAFARRGQFTERETVALLGAHSIGKVRCRFIADRIYNFAGTGAPDDSIDPDMVGEMRAACGGGDGAAPMEMGYYRQGREVGFGAHYYAELLEGRGILRADQQLTAGSTVRWVRVYASGARGEELFRDDFAHAMVKLSALAPLTGSAGQVRITCSNPVRPN

SEQ ID NO: 76659 - protein, 551 aa, Zea mays
  Coding DNA Sequence Number=SeqID_34880
  Gene Ontology: Mol. function=oxidoreductase activity; Cellular component=vacuole; Biological process=response to oxidative stress
  Homolog annotation: Hit_ID=Q5U1S5; Match level="QueryCoverage=53%, HitCoverage=79%, E-value=1e-130, Identity=80%"; Hit description =Class III peroxidase 18 precursor
  Pfam annotation: Domain name=peroxidase; Domain location=90-339; Score=321.0; E_value=2.2e-93; Accession=PF00141.13; Description =Peroxidase
MSLLGPPARGAICLLVVSSSIVVLSTAGGLGSDATSRSAAAYLSVDDDYGEEDESGDSSFSFPDPETSSASTGLVFGFYDDKCPDAEEMVSSMVRKLYHADPNVAAALVRLFFHDCFIHGCDASVLLDRVGGQRSERDAGPNQSLRGLGAVEAIKRGVEKACPGTVSCADILALAARDSLVLVGGPTYPVLTGRRDSAQSFYYDADGGGIPPPNATYAMTLDAFARRGQFTERETVALLGAHSIGKVRCRFIADRIYNFAGTGAPDDSIDPDMVGEMRAACGGGDGAAPMEMGYYRQGREVGFGAHYYAELLEGRGILRADQQLTAGSTVRWVRVYASGARGEELFRDDFAHAMVKLSALAPLTGSAGQRRTVLGRRQRRHPSLEVFADNRWSDRDRTGGDTLRLIGTRRRPATKSSHSAASSSSEAHVLGGNSSVNLPSHGHCAGVFIDCNYRDAFTDQARNSRRPRRARYNGPERTWASELDEAALWDDFVAGLRLVPIKRRVSPPVLSLSDQRLSAKTSSEGWRLCLRPNICPPRDQFDKVTWCRRRR

SEQ ID NO: 76660 - protein, 109 aa, Zea mays
  Coding DNA Sequence Number=SeqID_34881
MLSATFLTQPCSQLLLFLAVAAFGTDLAEHGHNAAKHVASLISVDTPKVGPDIQQCTTKKRAFDLLELDHRRKKAMKKLFVSQLEHKDTPDEPRSIKCKTHFPLMEADT

SEQ ID NO: 76661 - protein, 182 aa, Zea mays
  Coding DNA Sequence Number=SeqID_34882
MASTTTVARDFSGDKCRRSEETAGYKDLQLQLPSKTDLQPPATLMAVMPSRETDNIAEHGHNAAKHVASLISVDTPKVGPDIQQHTTKKSSIITDKKAMKKLFVSQLECKDTPDEPRSARRVNPRVAEKEIVVVLSFASVALVESSVAVVDHLTFLVSHLPPLQNLTAASSSSLQDPIVHGL

SEQ ID NO: 76662 - protein, 50 aa, Zea mays
  Coding DNA Sequence Number=SeqID_34883
MAVSSVFVRWVRRGSRAITGLGFMVPRIALGQAVTGKVGPRSARVLEARF

SEQ ID NO: 76663 - protein, 89 aa, Zea mays
  Coding DNA Sequence Number=SeqID_34884
MAMSSVFVRWVRRGSRAITGLGFMVPRIAQGQAVTGKVGPRSARDTVKKKKKRGRKWAGGVLFSPAGAVKARKGEDGPETDISAQVTFS

SEQ ID NO: 76664 - protein, 96 aa, Zea mays
  Coding DNA Sequence Number=SeqID_34885
  Subcellular localization annotation: CTP_CleavageSite=41; ConfidenceScore=5.05e-01
MAMSSVFVRWVRRGSRAITGLGFMVPRIAQGQAVTGKVGPRSARVLETLPGFTNPTPINRNLILEIYVIVDITPQLITLNQRSKSDKYRKNKHSNT

SEQ ID NO: 76665 - protein, 142 aa, Zea mays
  Coding DNA Sequence Number=SeqID_34886
MVLNRLRRRHYTETLFSCKSPARSQLNLLTQKLGTWQRAILSIVKPFCKNRVSRRRGEHSGEHLYRPTGATAGFSEHQTPNWIYREYFPQPNCTNRELLRSGHGGREHRGKTDAFPAIGGLLAQFSGSASIEESSECSNKGE

SEQ ID NO: 76666 - protein, 128 aa, Zea mays
  Coding DNA Sequence Number=SeqID_34887
MVLNRLRRRHYIETLFSCKSPVRSQLNHLNPNLGTWQRAILSIVKPFCKNRVSRQGYENTQTREQKVWADLNRAGRGEAVSTVAETDFGGSSKLELSSDWLRTIRGGWVLDDLAELGEGSIYRESERW

SEQ ID NO: 76667 - protein, 150 aa, Zea mays
  Coding DNA Sequence Number=SeqID_34888
  Subcellular localization annotation: CTP_CleavageSite=55; ConfidenceScore=5.06e-01
MLVDYTTVLDRPSVPVESPTQQGIESVVEVTPASSVTSDVSRNPSIRLRLLRELRAVARTTTGVVVVSVSVGGASLTEVQGKEASQPPPPAEARVKSPAAPAPGVGAPTPHAGDDAVSSTGWTGLTPYDAGDAPPVEKAKRGSQTYVQCT

SEQ ID NO: 76668 - protein, 201 aa, Zea mays
  Coding DNA Sequence Number=SeqID_34889
MGTSGALAGQREEARHKKKLGRGDPRTQRAEDQIELGPMPGLGATSHGAWGQALSGWSRETAARAQRTGKKTHERESGEEAAGAERKKETRIDKGTRGRDPLLRLWLLRELRAVAPTATGIVVVSISVRGKAASQTPPSAEARGKSLVAPAAAPGVGAPAPRAGDNAVSLGDGTDLAPYDTVDASPGEKAKRGSQTYVQCI

SEQ ID NO: 76669 - protein, 171 aa, Zea mays
  Coding DNA Sequence Number=SeqID_34890
  Homolog annotation: Hit_ID=Q9FPR5; Match level="QueryCoverage=28%, HitCoverage=5%, E-value=2e-21, Identity=93%"; Hit description=EDR1
MLTPSPYLIPTRRSRVPPSRLPHRSKDCLLFTLYVLPTPFYFLLHRCDVYSFGVILWELATLRMPWSGMNPMQVVGAVGFQDRRLDIPKEVDPLGGEDDNFAIVFAAMGVNMEKKLNSYLSDHNVGPHKIQGIGAGLIPRVLDVDLLDETLQVLSGEAIDTAKALALKESK

SEQ ID NO: 76670 - protein, 114 aa, Zea mays
  Coding DNA Sequence Number=SeqID_34891
  Gene Ontology: Mol. function=protein serine/threonine kinase activity; Cellular component=membrane; Biological process=protein amino acid phosphorylation
  Homolog annotation: Hit_ID=Q9FPR5; Match level="QueryCoverage=94%, HitCoverage=12%, E-value=7e-49, Identity=86%"; Hit description=EDR1
  Pfam annotation: Domain name=Pkinase_Tyr; Domain location=1-85; Score= -171.6; E_value=0.061; Accession=PF07714.7; Description=Protein tyrosine kinase
MALLHSREDPWCDVYSFGVILWELATLRMPWSGMNPMQVVGAVGFQDRRLDIPKEVDPLVARIIFECWQKDPNLRPSFAQLTSALKTVQRLVTPSHQETQSPHVHQEISVNLTP

SEQ ID NO: 76671 - protein, 568 aa, Zea mays
  Coding DNA Sequence Number=SeqID_34892
  Homolog annotation: Hit_ID=Q9FPR5; Match level="QueryCoverage=8%, HitCoverage=5%, E-value=2e-20, Identity=95%"; Hit description=EDR1
  Pfam annotation: Domain name=GATA; Domain location=368-408; Score =28.5; E_value=2.4e-05; Accession=PF00320.17; Description=GATA zinc finger
MGVDAAASARLLPAMGVTWRFGPQAIHEGLHVPLLQPTPPPNPNHSGATPRRTDLPRSAPAAARRGGCAVVALALSRAGPRGSLRAAGPVHGGEARASRRAQAEGRNCSGDDTEARGRGFASEAVNGSGGALRAATAYMEAGAPPLIWMILDLVLTQILGVELIYAGEREQGGSIKNRMPTWCDVYSFGVILWELATLRMPWSGMNPMQVVGAVGFQDRRLDIPKEVDPLGGEDDNFAIVFAAMGVNMEKTQFLRQRRGAAAWIRPKNPPICGDQGDRRHGWRWPRRGVGGGPPGYVLSLPAAALPLPVVVSCLDATVRRKGRNHIRHRGHPSGWWAFRLPVPAPEEAKGPVPPSSAANNPTEEGRSCSRHQRLPCGAAVTPQWRSGPMGQGTLCNAYRVRLKVAGVLRDQVKHRPTPATARTPARPPLDSPASTEEEASETGETLAASEDGTRGGAAASASGIPRQEEEEIGFGEEAVAAPEGRLLPEYRPLASPTFEPSEHANKHSQVMQLHRQRKSQGQHHPLPAEHPRAMDVLQFPQRWQVKEYQPTPVHQPLPHPDKEMISCL

SEQ ID NO: 76672 - protein, 167 aa, Zea mays
  Coding DNA Sequence Number=SeqID_34893
MGGAPQITARHLKWGQVRKGKRFRHMLSTTGNVCESVFLEKKTMPLEREDQWGLRVKKFVSFLGKNHQSSLVIRTSYCSEVEGFPHLLQSCALRMGIRKKPEYVWKEYRENGTEKCFMAVYLGESRNYPNHPPFQVTFTGHRFPDTCQNVAPKSSPTAMPKLQLRGL

SEQ ID NO: 76673 - protein, 300 aa, Zea mays
  Coding DNA Sequence Number=SeqID_34894
MWDGKRAVFLLSDVFKKCMVKEGLSPHIRIGLSSFTTCTHDKYNLSRLYGQSLNLNSYGSNPRVMKAGEHREDKEGECFVRFGHGGGLTPSGITVKVGTCEEIKRFGIRSHDEVEGFPHLLQSCALRMGIRKKPEYVWKEYRENGTEKCFMAVYLGESRNYPNHPPFQVTFTGHRFPDTCQNVAPKSSPTAMPKLQLRGRDPTEDDPTIVYMAGYLHTLDNHYDDLSSHCTHLNSQVESLEQQVKELKKEKASLQENLEIAEGEEANTREAYRTLKMDYDKKLKKLAPTKKIRKNIKSQG

SEQ ID NO: 76674 - protein, 140 aa, Zea mays
  Coding DNA Sequence Number=SeqID_34895
MAFLSFNPGSFPTVTVTAERKRVARLTGDEGGSVKGWVRYKESTNGLPWARTTCGGDRLKSGDVDLASPARVEDGCLGWSTVVVACAAAGMGFFGQMLANSCSGWVRDAQGCTVETEVGFIAVGACMGAGLTRHGAARVG

SEQ ID NO: 76675 - protein, 177 aa, Zea mays
  Coding DNA Sequence Number=SeqID_34896
MGFSFFQPGLLPHRNSDYGEEKGWHGLPVTRENKADRKQAVGLVGSVYSGLLTAVGLNQMAHVALRDAKDVIGTRNRRMAYRGARTTCGGDRLKSGDVDLASPARYCSILGSGSFTKVWRSYPKGRIGWRMAVLAGLRWSWLVRPLARGSLGKCWRTRARAGSGTRRGVRSRPRWDL

SEQ ID NO: 76676 - protein, 202 aa, Zea mays
  Coding DNA Sequence Number=SeqID_34897
  Gene Ontology: Mol. function=translation initiation factor activity; Cellular component=cytoplasm; Biological process=multicellular organismal development
  Homolog annotation: Hit_ID=Q10CA6; Match level="QueryCoverage=69%, HitCoverage=11%, E-value=1e-59, Identity=80%"; Hit description=Piwi domain containing protein, expressed
  Pfam annotation: Domain name=Piwi; Domain location=3-176; Score= -75.5; E_value=0.00014; Accession=PF02171.8; Description=Piwi domain
MNPFVVVNGEPYPLDIRGELDDTTAFKNFKKDGISEGQFNYVLILEMDAIRKACASLEDGYLPPVTFVVIQKRHHTRLFPRVHGRRDVTDRSGNILPGTVVDTEICHPREFDFYLCSHAGIQIRFSREPAGQYTIMSSTMKTVSRLMGCKYLQTTCATHTHDARTLSQLIFAYFLVFMYHLSEIDELRQKPFKRNGPDFDAK

SEQ ID NO: 76677 - protein, 310 aa, Zea mays
  Coding DNA Sequence Number=SeqID_34898
  Gene Ontology: Mol. function=translation initiation factor activity; Cellular component=cytoplasm; Biological process=multicellular organismal development
  Homolog annotation: Hit_ID=Q7FS89; Match level="QueryCoverage=45%, HitCoverage=80%, E-value=1e-72, Identity=95%"; Hit description =Putative argonaute protein
  Pfam annotation: Domain name=Piwi; Domain location=59-310; Score =135.9; E_value=1.1e-37; Accession=PF02171.8; Description=Piwi domain
  Subcellular localization annotation: CTP_CleavageSite=25; ConfidenceScore=5.11e-01
MTSSGSPFSSSSSASRMPDRWEPPSSQMSKDGPDSDSPPSSQMSKDGHGSDPTLPSGGLGLVIVADGSQISSDSVSCLLCFTAHTQHNTSSARQGSSHCSPCNVIAAAPLLLLTAAVAGLLLELSVSCSVLQLCHSNAMVVASMDWPQVTTYKALVSAQAHLEEIIQNLGRMIRELLISFYKRTGKKPKRIIFYRDGISEGQFNHVLIPEMDTIRKACASLEDGYLPPVTFVVIQKRHHTRLFPGVHGRRDVTDRSGNILPGTVVDTEICHPREFDFYGTSRPIHYHVLYDENRFSADGLQILTNSLCYT

SEQ ID NO: 76678 - protein, 56 aa, Zea mays
  Coding DNA Sequence Number=SeqID_34899
  Homolog annotation: Hit_ID=Q1EPC6; Match level="QueryCoverage=98%, HitCoverage=5%, E-value=2e-20, Identity=89%"; Hit description=DNA helicase homolog, putative
MAFVYVVEQVFNSLDAPARLNIDVTVEEPKEDMNPSHEKLCHRKAEGNDSCTMHDP

SEQ ID NO: 76679 - protein, 866 aa, Zea mays
  Coding DNA Sequence Number=SeqID_34900
  Gene Ontology: Mol. function=helicase activity; Biological process =viral genome replication
  Homolog annotation: Hit_ID=Q1EPC6; Match level="QueryCoverage=99%, HitCoverage=54%, E-value=0.0, Identity=73%"; Hit description=DNA helicase homolog, putative
  Pfam annotation: Domain name=DUF889; Domain location=674-866; Score =292.7; E_value=7.1e-85; Accession=PF05970.5; Description=Eukaryotic protein of unknown function (DUF889)
  Pfam annotation: Domain name=MIB_HERC2; Domain location=343-395; Score=-12.0; E_value=0.051; Accession=PF06701.4; Description=Mib _herc2
  Pfam module annotation: Pfam domain module=DUF889::MIB_HERC2; Domain location=674-866::343-395
MALVRKFGKPDIFLTMTCNPNWDEIRRELLPGQTPQDRPDLVVRVLHAKLQELKHRLTKQDILGKVRAYVYVVEFQKRGLSHAHFLLIMQRKYKLTCPEQYDLLISAKIPSNKYPELQKMVIKHMMHGPCGSLNPNGPCTKGRKSCKNHYPRPFSDTTLQGKDSYPIYRRRDDDRKEKVRGCELDNRWVVPYNPYLLRLFNCHINVEACGSIKAVKYLFKYIYKGHDHASVVMRDASKADDDVDEIKQYRDARWVTPPEALWRIYGFELSQISPPVMQLQLHLPNMHMVAFHERQMVERVVNRPGVDRSMLTSYFEANRLHEEARGILYRDFPEWYTWQSGKGKVWQWRKQDTGGQVGRIVSAHPAEGERYYLRVLLNHVTGTASYVDLRTVDGVTLPTFREAAERRGLLESDNTLDECLTERALFQMPSSLRRLFATILVYCEPSDVAVLWQKHKDSMSEDNQHKSQNKTHVEQMVLIDIRNMLQSMGKDIKTFPLPPMIDAYDDAIGTAREVYEEESIQPTVEDVALKDSLNEEQRATYDKIMSAVDTDKGGLFFVDGPGGTGKTYLYRVLLATLRNQGKIAVAIATSGVAASIMPGGRTAHSRFKIPLTIDDGAVCSFTKQSGTAELLRKASLIIWDEASMTKRQAVEALDNSMRDIMGRPALPFGGKTIVFGGDFRQVLPVVRKGSRAQVVASSLQMSYLWESMSHLKLVSNMRAKNDPWFAEFLLRVGGGTEETNSDSDIRLPDDVCVPYSGSDNDLDNLIDFAFPNLNENMSDSTYITSRAILSTRNDWVDMINVKMIDRFQGEHMVYHSFDSAMDDPHNYYPPEFLNTLTPNGLPPHVLKLKIGCPVILLRNIDPANGL

SEQ ID NO: 76680 - protein, 161 aa, Zea mays
  Coding DNA Sequence Number=SeqID_34901
MGSRHSACSAEAECRGCPHCNHCSGEGEAVEGDFQEFQDYDEFYDMARLRHTARKSVIPFLPSRLAERPLHRTVSGQSSHLERLHHRLREEQERRRQHGEQQGSSSSPQQEVETVRPRSSVAQLEAPLVPPRDVPAVGGAVGGAVGRRPRRRRLRPQHGVL

SEQ ID NO: 76681 - protein, 117 aa, Zea mays
  Coding DNA Sequence Number=SeqID_34902
MRVKWDTLSQLIRGTRGVVASSSCRQRGLGTVLALPRLSAEVVHIVTTAQEKTKSWKETSRSSKTMTSFRLKPKIIEALICTKDWKIALEQDLETEIKTISEAINALDLDADAVAAT

SEQ ID NO: 76682 - protein, 676 aa, Zea mays
  Coding DNA Sequence Number=SeqID_34903
  Gene Ontology: Mol. function=receptor activity; Cellular component =thylakoid; Biological process=photosynthesis
  Homolog annotation: Hit_ID=Q32Y71; Match level="QueryCoverage=56%, HitCoverage=51%, E-value=0.0, Identity=83%"; Hit description =Peroxisomal targeting signal 1 receptor long form
  Pfam annotation: Domain name=TPR_1; Domain location=169-202; Score =18.9; E_value=0.018; Accession=PF00515.18; Description =Tetratricopeptide repeat
  Pfam annotation: Domain name=TPR_1; Domain location=203-236; Score =0.9; E_value=4.2; Accession=PF00515.18; Description=Tetratricopeptide repeat
  Pfam annotation: Domain name=TPR_1; Domain location=268-301; Score =35.1; E_value=2.4e-07; Accession=PF00515.18; Description =Tetratricopeptide repeat
  Pfam annotation: Domain name=TPR_1; Domain location=302-335; Score =19.9; E_value=0.0093; Accession=PF00515.18; Description =Tetratricopeptide repeat
  Pfam annotation: Domain name=TPR_1; Domain location=336-369; Score =32.5; E_value=1.5e-06; Accession=PF00515.18; Description =Tetratricopeptide repeat
  Pfam annotation: Domain name=TPR_2; Domain location=135-168; Score =0.0; E_value=33; Accession=PF07719.7; Description=Tetratricopeptide repeat
  Pfam annotation: Domain name=TPR_2; Domain location=169-202; Score =24.8; E_value=0.00031; Accession=PF07719.7; Description =Tetratricopeptide repeat
  Pfam annotation: Domain name=TPR_2; Domain location=203-236; Score =0.3; E_value=31; Accession=PF07719.7; Description=Tetratricopeptide repeat
  Pfam annotation: Domain name=TPR_2; Domain location=268-301; Score =27.3; E_value=5.3e-05; Accession=PF07719.7; Description =Tetratricopeptide repeat
  Pfam annotation: Domain name=TPR_2; Domain location=302-335; Score =16.9; E_value=0.076; Accession=PF07719.7; Description=Tetratricopepti de repeat
  Pfam annotation: Domain name=TPR_2; Domain location=336-369; Score =30.2; E_value=7.2e-06; Accession=PF07719.7; Description =Tetratricopeptide repeat
  Pfam module annotation: Pfam domain module=TPR_1::TPR_1::TPR_1::TPR _1::TPR_1::TPR_2::TPR_2::TPR_2::TPR_2::TPR_2::TPR_2; Domain location
MSRGELIIEDNQVKEGSASQSSGWADEFQTPYIANANSWADQFAHEELSQGADKWVSEFSSQPNHGALNENWVDEFSKLNVTDEWAEEFSGGGFGESSADPWVDEFQEHLSSFKQSPGASRGVYVFSENNPYVGHPNPMQEGQELFRKGLLSEAVLALEAEVLKNPDNTEGWRLLGVTHAENDDDQQAIAAMMRALEANPTNLEVLLALGVSHTNELEQGEALRYLYRWLQNQPKYGGLVPLQSTDSPYGPDVVRLFNEAAQMSPEDADVHIVLGVLYNLSREYDKAIASFKTALQLKPQDYSLWNKLGATQANSIQSADAILAYQQALDLKPNYVRAWANMGISYANQGLYEDSIRYYVRAVAMNPKADNAWQYLRISLRAEPKLNSMTGQLIKSQELTHIYKAASSKGLYTVLNSKYRGLSGTLNVEASESALSALLLHQPPRGNFRLLLPRAGDCIFRGRALDPACFAAGIEAGGREAGVRRRVCRRRARTPSNRGRASHRNPRSKPVSPCSSPESRHRQKASSSADFVQGSRQKEEKLVAAVVFLFDSVHRGRSAKGEDLEHSMDSENEKLRKALATLLRVVQKRSCDIVDVVKSAFQPFNSPLVDELNRALVEIDDLAKDLEDVAVQTQWEVENMANSQVKQHPQQEEAVEDLLIEDGSEDDLLIDEESPI

SEQ ID NO: 76683 - protein, 131 aa, Zea mays
  Coding DNA Sequence Number=SeqID_34904
MDSENEKLRKALATLLRVVQKRSCDIVDVVKSAFQPFNSPLVDELNRALVEIDDLAKDLEDVAVQTQWEVENMANSQVKKHPQQEEAVEDLLIEDGSEDDLLIDKESPINYEDLVGYDNGRDYSTDDTYPY

SEQ ID NO: 76684 - protein, 246 aa, Zea mays
  Coding DNA Sequence Number=SeqID_34905
  Subcellular localization annotation: CTP_CleavageSite=80; ConfidenceScore=5.38e-01
MHKLKGRVRTAAHRQLRPAVPWPRRGAVLRRGRTLVRNSPAPDAPNLMPLPRNQLPSRGEAPRVHNSPRIDDNHQCTTTAAELRFSFSLTAYGSLGDWVLVEMDKEARAAGLYRGGASPSEEQGWSRGRCAFCGPPLRRTRHGSFWGGRRSDNQTPPVSAWACSNAGVQLQAKRAHLTDPGSHTAASAVKGVRATSVADRAVPPDSVTEASPGLYTDRPRQKNLTVGDSPPLFVSPASGFTLVVDG

SEQ ID NO: 76685 - protein, 155 aa, Zea mays
  Coding DNA Sequence Number=SeqID_34906
MVQCSIVDQIARGRKISPPVTSRRDSCHRRQDSRSWWMDNVVGKRISAAENEEEIEVTEEKTPPPSESQAGNCFYFDICGSESDSPTNEGKPRKHFCKIESLIIEKPYLDSLNQHTLESLFFSRVGKQQTFVAFAPRWFQMKKNKSEAAGGHGPP

SEQ ID NO: 76686 - protein, 161 aa, Zea mays
  Coding DNA Sequence Number=SeqID_34907
MPPRTRKTARKSTGPIGVPRHQLAPRHEDSSSGSNDPIGDLEARVNQLQAELQRRTNIWVADGDRINELRSHIRRLQDQLADRDLVLDWAVQSRSVAWAKEAKARARVEELSSAIDNLQAYCNTLHEEVHVLYSQLHPSAPTDPVGVGSRTLACCGRSAWW

SEQ ID NO: 76687 - protein, 194 aa, Zea mays
  Coding DNA Sequence Number=SeqID_34908
MPPRTRKTARKSTGPIGVPRHQLAPRHEDSSSGSNDPIGDLEARVNQLQAELQRRTNIWVADGDRINELRSHIRRLQDQLADRDLVLDWAVQSRSVAWAKEAKARARVEELSSAIDNLQAYCNTLHEEVHVLYSQLHPSAPTDPVGSEAEPSHVVGEALGGELDLFRPPPSMRLVDEWSPTPDDEAARSNQKQE

SEQ ID NO: 76688 - protein, 328 aa, Zea mays
  Coding DNA Sequence Number=SeqID_34909
  Gene Ontology: Mol. function=cysteine-type peptidase activity; Biological process=proteolysis
  Homolog annotation: Hit_ID=Q53MK8; Match level="QueryCoverage=64%, HitCoverage=21%, E-value=2e-21, Identity=28%"; Hit description=Ulp1 protease family, C-terminal catalytic domain, putative
MEKLDHNDMTIRAGPGKELKITKDTVHLILGLPNAGGGTALGIDEAVVANNLRAELGLSKEDFGVTALQDRLRKGSDDDLSIRCFFLILFNRLLFPTASWGITNHEVLLTEQMDRFHQIDWCQLIFNDLCQAAKKWHNRSVTNVSTTIYGCSIVILLYYLDHLHDSAAPQNKRGTPRIKYFDRNIIQALTRADKGKIRKGEEAFGHCSHKTRTNTFDVPRPDPSGHHSIHIELPLIRDLISSKLNQLPSRHRMGFIEKLSHFDVEVGKACTVIKQTLQQIVEKQFNLSDVFGELIDEVLRAEAGDNEDAYDVQKTTSKSDDILPQTAG

SEQ ID NO: 76689 - protein, 1030 aa, Zea mays
  Coding DNA Sequence Number=SeqID_34910
  Gene Ontology: Mol. function=cysteine-type peptidase activity; Biological process=proteolysis
  Homolog annotation: Hit_ID=Q53MK8; Match level="QueryCoverage=74%, HitCoverage=81%, E-value=5e-35, Identity=22%"; Hit description=Ulp1 protease family, C-terminal catalytic domain, putative
  Pfam annotation: Domain name=Peptidase_C48; Domain location=777-1023; Score=-29.7; E_value=0.09; Accession=PF02902.9; Description=Ulp1 protease family, C-terminal catalytic domain
MSALVFDEDTPSIDTKIIKNKNATNTDDPVTRMRAKQLEKEIYSQMTTGAFWLPIQKYKLFEFSSSPAVAFSFTTAETRPRLLRRTPSPSPPHTGRGLVLRLRQGPRNLGGGCAAPAFSYSSETETSIFSTAAAERRLPYPVASPAPRWVVPCTGVSDSAALQAHPHSGTSVMKNVDRPPSNPKQIIIQSTQECFSVDIPRAPAGTVRPETRHATDEDDDFMPLSKKRKLDDSPGKVLKKVVTKRRKAVPPPRQQKLNVRCNPQDVLVSIQILNDRQQQAIARRGFSSILDMRLDALGSRSHLAWLMEKLDHNDMTIRAGPGKELKITKDTVHLILGLPNAGGGTALGIDEAVVANNLRAELGLSKEDFGVTALQDRLRKGSDDDLSIRCFFLILFNRLLFPTASWGITNHEVLLTEQMDRFHQIDWCQLIFNDLCQAAKKWHNRSVTNVSTTIYGCSIVILLYYLDHLHDSAAPQNKRGTPRIKYFDRNIIQALTRADKGKIRKGEEAFGHCSHNTRTNTFDVPRPDPSGQHSIHIELPLIRDLISSKLNQLPSRHRMGFIEKLSHFDAEVGKACTVIKQTLQQIVEKQFNLSDVFGELIDEVLRAEAGDNEDAYDVQKTTSKSDDILPQTAESCPDEADIDLLVHTNITKQNKTPTTSVGKHGDGGKNMPTNTNVTPKATPHMDPDAPIFDTTPQIKSTGGVQQVAETDLPDSGPCFDQTPSEHVYVETDPATNTPQVGQASLDSEMQTVLALREYLCGLQSDTGRTIIDYGEYSATCSDIYESFADGKCLDNGFMQCFIQCVIHDAKNQQTSMSSNSLVLDVNVGSILNFEEQERHSRNPQPFDESVLHTLLDNSLPETDELDQCKAIMVPMVSRGHWTLYVVNKVKKCIHILDSNPYGPTLGGTTWKDYHFAHLGSGGRKLPWAKVIMSRLNKAIQHVRPSSCFPKFGNFTIDLCQNCPNMAAGSNDCGFYVMGYILFYQCDEGSLRSDIEAGNTSEIRSLALHYITFHPKNKALSLLQDIQRFKV

SEQ ID NO: 76690 - protein, 598 aa, Zea mays
  Coding DNA Sequence Number=SeqID_34911
MNRVFELNRLPYGCYPGEDVADRRGKKLMGVDGDMCGPRGKDVFARALGVFGANVGARGLGIFPYGRNIAAVVSAVMNKDRQDAAQKRRAVVRLPDPRREVKRARGSAKAAAPGGSQPTLAAKPVVLGSSKVPESTKAVIVGGTKSTSGGAAKVRELPSPGRRVADYGTNISVDDYFVDVSAKVERLQAQHANAIREKSAAESKNRRLAEKAEAKLARAEGSLASQRAEEWEVRFNALRGRVDKAEASTRSEVERTRTVDSYRELGARTADFEVPDREAGLRFLEWLQEELLVLPTIVEGFMSFASLVTCEGAMNALSREGCKHYEVFDRSDENFERGIFKVEDPVVKDSMGALFDRMWGPHGREAVRERSDRAREQMARAEDVEDLGDLNGVRPEAEVNPVLPEAEVDPALRSKAIEAASAGPVSTVSGEGSLLAPAPTAEDPPKAVAELAAEDPMAAARPSQVQDFGPAHATATDTANFVTASTVVAENELDESVSKFFESDDSGGSIVWTEESPDEDLDYFAALDVAVAEASPRVMDVEVFPGPSSGRRRRRAVAKRRLREVEDEGELQSLFEGEELRIMLFNYREMGIIPKVEP

SEQ ID NO: 76691 - protein, 662 aa, Zea mays
  Coding DNA Sequence Number=SeqID_34912
MGTCAAPEGRMSSPELWESSARMLEVTGGRWPKNLPIPWAEGEDMSTSRIARGLGIFPYGRNIAAVVSAVMNKDRQDAAQKRRAVVRLPDPRREVKRARGSAKAAAPGGSQPTLAAKPVVLGSSKVPESTKAVIVGGTKSTSGGAAKVRELPSPGRRVADYGTNISVDDYFVGSGEGEMVVVPPAVATTTSTVVAGVKGDAFCAADFAERVASGALTADVSAKVERLQAQHANAIREKSAAESKNRRLAEKAEAKLARAEGSLASQRAEEWEVRFNALRGRVDKAEASTRSEVERTRTVDSYRELGARTADFEVPDREAGLRFLEWLQEELLVLPTIVEGFMSFASLVTCEGAMNALSREGCKHYEVFDRSDENFERGIFKVEDPVVKDSMGALFDRMWGPHGREAVRERSDRAREQMARAEDVEDLGDLNGVRPEAEVNPVLPEAEVDPALRSKAIEAASAGPVSTVSGEGSLLAPAPTAEDPPKAVAELAAEDPMAAARPSQVQDFGPAHATATDTANFVTASTVVAENELDESVSKFFESDDSGGSIVWTEESPDEDLDYFAALDVAVAEASPRVMDVEVFPGPSSGRRRRRAVAKRRVREVEGGRLRVDRAGKRELLSSPVGASVDEGELQSLFEGEELRIMLFNYREMGIIPKVEPM

SEQ ID NO: 76692 - protein, 66 aa, Zea mays
  Coding DNA Sequence Number=SeqID_34913
MALGRRTQNRTVAGLSPFPPFVLFDDIQDVNNLPQVKSVFARVVVKFPRRRNSQHYILQDITMLLA

SEQ ID NO: 76693 - protein, 461 aa, Zea mays
  Coding DNA Sequence Number=SeqID_34914
  Homolog annotation: Hit_ID=Q9FGT4; Match level="QueryCoverage=19%, HitCoverage=9%, E-value=2e-26, Identity=60%"; Hit description =Arabidopsis thaliana genomic DNA, chromosome 5, TAC clone:K21L19
  Pfam annotation: Domain name=Tubulin; Domain location=337-460; Score=- 44.3; E_value=7.4e-05; Accession=PF00091.15; Description=TubulinFtsZ family, GTPase domain
MAACRPLGPLWWCVIVLFTRMHVEMAMGTRYPKPVGMGNPLGTQNPHGYGFGQNFIPVMGMSFLAGVFFLRGYGFENVARLSAISPELSVCLRVVVLDLPPQVEGLLVGAESTVDLPPEKVELLKEAFDDLVASFASFVVESPAGVCRARRTSGVVASASVASPTDTFSVDEGLHQYRTRSPPNAAVGATRRGRGPLEPHLRQRQQELKLGPEELERWFTKIDHVFEHTRIPPVGEVLTPFYKTTVKKLQHYDLPLVGHVNHNFSVHAIHMGEDVLSVFEHAIKVLSCKDDLVDSRLPLLLRTSLARIRLLTVSRYVIDVCLPDSCGVLIRFVDMSDNEKLVGEGTTPRGADWEVVTLTASATQSSSSRGRRTQLTTLPVATTRVIVDLCLDCVRKLADNCTGLQGFLVFNAVGGGTGSGLGSLLLERLSVDYGKKSKFGFTIYPSPQLEVLVLILPKEYQ

SEQ ID NO: 76694 - protein, 146 aa, Zea mays
  Coding DNA Sequence Number=SeqID_34915
  Gene Ontology: Mol. function=structural molecule activity; Cellular component=protein complex; Biological process=microtubule-based movement
  Homolog annotation: Hit_ID=Q53M52; Match level="QueryCoverage=56%, HitCoverage=18%, E-value=1e-17, Identity=56%"; Hit description =Tubulin alpha-2 chain
  Pfam annotation: Domain name=Tubulin; Domain location=1-112; Score= -81.9; E_value=0.041; Accession=PF00091.15; Description=TubulinFtsZ family, GTPase domain
GKVIVDLCLDCVRKLADNCTGLQGFLVFNAVGGGTGSGLGSLLLERLSVDYGKKSKFGFTIYPSPQHPATLFYQAILFTGFMLSLLASIIVKEKVLANIMSVSEVEALYKLFKKINIAFIDDGLINKGDADSLLDRLWQKKAEIKQ

SEQ ID NO: 76695 - protein, 88 aa, Zea mays
  Coding DNA Sequence Number=SeqID_34916
MELQVDLSDKLFSESGALFTGLQKNRAEDKDQPSPAIRTPPQLGMVVGGRGKSYRRHGDVSLRWRSPVIGVECLNNSCITFLELDYPP

SEQ ID NO: 76696 - protein, 40 aa, Zea mays
  Coding DNA Sequence Number=SeqID_34917
MARANQLAIDEIRLGEMIEVIGVECLNNSCITFLELDYLP

SEQ ID NO: 76697 - protein, 121 aa, Zea mays
  Coding DNA Sequence Number=SeqID_34918
MPHNICKEGLCSDTSCDGTSQVIRPTYSCPCLTDIRHPVDVPKSLDKFGIFPYLSRNVSPVLQTLQNIGDKEMRKRLHKLTFIKNKSYPTKEKTLKGMLVIWESRVSRKVIKFKEGNAGIV

SEQ ID NO: 76698 - protein, 271 aa, Zea mays
  Coding DNA Sequence Number=SeqID_34919
  Homolog annotation: Hit_ID=P28551; Match level="QueryCoverage=38%, HitCoverage=25%, E-value=4e-43, Identity=87%"; Hit description =Tubulin beta chain
  Pfam annotation: Domain name=Tubulin; Domain location=113-254; Score=- 1.5; E_value=5.4e-08; Accession=PF00091.15; Description=TubulinFtsZ family, GTPase domain
  Subcellular localization annotation: CTP_CleavageSite=67; ConfidenceScore=5.33e-01
MAHGSACVRAPTLRHLLLLLSPSLRRHLLGSVRPLRRHLLLLLSHTNSTSSSSTTSTTPEKYAPSLRCHLLGSARPLRRHLLLLVSPTNPTSSSSTASTTPEKYASDSDLHLERINVYYNEASGDRFAPRAVLMDLEPGTMDSVHSGPFGQIFRPDNFVFGQSGAGNNLAKGHYTEGTELIDFVLDVVHKEAENCDCLPKSAAAAPHATTPAPAHLPTAAAAPSGLRWSGTPPPRPDPSVVRPSGLAQNQSRPSIYALDWIPPSRALRVSK

SEQ ID NO: 76699 - protein, 285 aa, Zea mays
  Coding DNA Sequence Number=SeqID_34920
  Homolog annotation: Hit_ID=P28551; Match level="QueryCoverage=36%, HitCoverage=25%, E-value=4e-43, Identity=87%"; Hit description =Tubulin beta chain
  Pfam annotation: Domain name=Tubulin; Domain location=113-254; Score=- 1.5; E_value=5.4e-08; Accession=PF00091.15; Description=TubulinFtsZ family, GTPase domain
  Subcellular localization annotation: CTP_CleavageSite=67; ConfidenceScore=5.33e-01
MAHGSACVRAPTLRHLLLLLSPSLRRHLLGSVRPLRRHLLLLLSHTNSTSSSSTTSTTPEKYAPSLRCHLLGSARPLRRHLLLLVSPTNPTSSSSTASTTPEKYASDSDLHLERINVYYNEASGDRFAPRAVLMDLEPGTMDSVHSGPFGQIFRPDNFVFGQSGAGNNLAKGHYTEGTELIDFVLDVVHKEAENCDCLPKSAAAAPHATTPAPAHLPTAAAAPSGLRWSGTPPPRPDPSVVRPSGLAQNQSRPSIYALDWIPPSRALRVSKPIVALQADMDVLPV

SEQ ID NO: 76700 - protein, 733 aa, Zea mays
  Coding DNA Sequence Number=SeqID_34921
  Homolog annotation: Hit_ID=P27322; Match level="QueryCoverage=10%, HitCoverage=11%, E-value=2e-18, Identity=67%"; Hit description=Heat shock cognate 70 kDa protein 2
MSLDTKLILGAIGKLFDDFDARWERRLSKLLTAQEASPVISVLTPTMAVGAAVIADNWGGGFNGGEYSFEQYCTAPSIVADNWGGFFGGEDAAANAEFAIDPPDDPERFVLPNVSTDEPSIDPALDRTNSGAADDSVNALVSPTIRDAASRAPALDDDWLLKPLAHHRLLGRAYYAEDDVFHTLPTKCSTTVLNYDAYSVPNPATSLTTSTFTRPIFNDYSSMERNSTDNGTVLVAQFTGALRGLRATDDEDLLRMLHLNPRLRSDGSDRPMLEMNTCFQLAKGSISRWFSEPSVPSEMKLWPCKVIPGPGDKPMIVVNFKGEEKQLAAEEISFMVLLKMEDAANNFARGYYTVGKGIMLKFPLSRMVAQISINREHAVLIALQSSVLLVTGMATGSEAAKPVEVVDTVFKVFNNCKSASFTVESISNHEISSFVIPVHDSASEHQVVNKRTGPEISVLAFPYNAEPMLLSSLASIALGPPTANFITSIPASCVTVSLGAHHIFDEMTKGSWCLPQLRHQHYRPGNVWKFLHSYSSCIIDYHGTKHNNVFRRALVWCCKFSVHELLGHFEYLLLDITKEHTISCINSGGLERTFILWLSWPTPVKIFHASGELRPSCSVPMATIRKHVSVPAILLALAVLSCLLLVSAAGNRRALLPREPADTYAGGGRGQVVLPTTTTAAEEGAAVLGAELAEAERDETMVVDTAARRAGLLQTQDYPGSGPNGRHDPRNPH

SEQ ID NO: 76701 - protein, 54 aa, Zea mays
  Coding DNA Sequence Number=SeqID_34922
MSCAFDDYYIEDCGVILAPDVTKRRIDNSDQFVILATVRVESGDPRQPMCSLFS

SEQ ID NO: 76702 - protein, 219 aa, Zea mays
  Coding DNA Sequence Number=SeqID_34923
MNPCFLLQTPNKLHEQEAFALSSFIDDEKKLGDWGLMVVANVDDSRVVLDTASDTTPSRRLAHRPLKPNLPQLTQRRIDNSDQFVILATVRIVVAKLGPHVSRGGRLDPSTLLPPRPLPRHRTGADKLAGVHVLHDESAQDADEFAGVDQPGRPQSCRADHRVVPVGALQQRKPRVPTAYLGGEICPLLEALAAILLGIHNPVGSCGLQIEQELDCGEN

SEQ ID NO: 76703 - protein, 246 aa, Zea mays
  Coding DNA Sequence Number=SeqID_34924
  Gene Ontology: Mol. function=oxidoreductase activity; Cellular component=integral to membrane; Biological process=metabolic process
  Homolog annotation: Hit_ID=Q9LGI8; Match level="QueryCoverage=64%, HitCoverage=58%, E-value=5e-51, Identity=71%"; Hit description =Putative pod-specific dehydrogenase SAC25
MEKNPTARIDVLKLDLSSLKSVRAFVDQFNSIKLPLNILINNAGVMFCPFQLSKDGVEMQFATNHLGHFLLTNLLLDTMKATAKSTGIEGRIVNLSSVAHHHTYPKGIDFDNLNDEKIYNDKMAYGQSKLANLLHAKELSRRLKRCFRLPLTYCGRMYPSSRALFGEKRRAWKLTSFFRAGTVVEADAGEIGRDKGPLNLQSASRLLRRCCLHWFRRRGQATHAKNVSLKLSRAQKHSQEYHQPSG

SEQ ID NO: 76704 - protein, 231 aa, Zea mays
  Coding DNA Sequence Number=SeqID_34925
  Homolog annotation: Hit_ID=Q1SVI3; Match level="QueryCoverage=20%, HitCoverage=9%, E-value=8e-10, Identity=68%"; Hit description =Protein kinase
MCMEKKRRQRRGVNGKSLSTRQMTRRYTTCLCSKGSAFGQLRLAASGFGMENIVYEHGEKEPNVVYKGKLDAQCHIVVKLSNHSAWAKKKANAQSHIVPGIPFAFFFTLSNYVHLVELLKYRDAAKMVAVETTQETAMAEILVQCLRPYGIVGTNASVELYEQMHHVQHHQMQWKCGGSNPIVSKAVDEMIDVTVPRKARSASTKRSSHEWPVPGGGTSGSSTGAGDGSQI

SEQ ID NO: 76705 - protein, 576 aa, Zea mays
  Coding DNA Sequence Number=SeqID_34926
  Gene Ontology: Mol. function=structural constituent of ribosome; Cellular component=intracellular; Biological process=translation
  Homolog annotation: Hit_ID=Q2R0M9; Match level="QueryCoverage=81%, HitCoverage=77%, E-value=3e-23, Identity=23%"; Hit description =Expressed protein
  Pfam annotation: Domain name=DUF594; Domain location=415-466; Score =57.1; E_value=5.6e-14; Accession=PF04578.4; Description=Protein of unknown function, DUF594
MLVFVSGIIKYGERVWALKSASRKGLDKTSANPSSHEDTIDDVLTCTKESYALWTVLIARGFFVGRTMLLMGQGPASTLWFYFKTKYQGREEKLKMVMMELGMMFDLLYTKANVLQRRIGVLFLCASQALMVVALVLFMIRREEGAHNNKVNVAITYTLFSGAIFVETCCVAAAIASPWTRAHLKESSCLHGLSDSLFEAVHLCKSTANNMAQFNLLDHCISVNSKPRVFSKALSAIGLDKQWYVHHMDKQCYWWIINRVLEHLATLPDEFSGLATVHFTINAPTEHPVWFNQLSTSFEQVLYGLHLYTDLHLSRHFNNCSTGSVVQPPPPEIMRLKEECETLSNYMMYLMVVHPSMLPVNTVAAGDLVQQLIGWVTNHPGHGATTTKLAILRGYSRTFYILGIDEPGQHRSFYYLHHLLTQIKEMWVRLLMYAAGKCSGEVHARQLGEGRELITFVWLLMLHHGLGDMAAEFKLLRSNDPNVAERGAWIVSPPGNYQEPTCAFNHATVLSEAPFHIQTNPSDCLLLCYMSTDIQASIQKRTTNSRNRSNEENSCTAQLCGYQSIWKFVFHNRPTK

SEQ ID NO: 76706 - protein, 593 aa, Zea mays
  Coding DNA Sequence Number=SeqID_34927
  Gene Ontology: Mol. function=structural constituent of ribosome; Cellular component=intracellular; Biological process=translation
  Homolog annotation: Hit_ID=Q2R0M9; Match level="QueryCoverage=78%, HitCoverage=77%, E-value=3e-23, Identity=23%"; Hit description =Expressed protein
  Pfam annotation: Domain name=DUF594; Domain location=415-466; Score =57.1; E_value=5.6e-14; Accession=PF04578.4; Description=Protein of unknown function, DUF594
MLVFVSGIIKYGERVWALKSASRKGLDKTSANPSSHEDTIDDVLTCTKESYALWTVLIARGFFVGRTMLLMGQGPASTLWFYFKTKYQGREEKLKMVMMELGMMFDLLYTKANVLQRRIGVLFLCASQALMVVALVLFMIRREEGAHNNKVNVAITYTLFSGAIFVETCCVAAAIASPWTRAHLKESSCLHGLSDSLFEAVHLCKSTANNMAQFNLLDHCISVNSKPRVFSKALSAIGLDKQWYVHHMDKQCYWWIINRVLEHLATLPDEFSGLATVHFTINAPTEHPVWFNQLSTSFEQVLYGLHLYTDLHLSRHFNNCSTGSVVQPPPPEIMRLKEECETLSNYMMYLMVVHPSMLPVNTVAAGDLVQQLIGWVTNHPGHGATTTKLAILRGYSRTFYILGIDEPGQHRSFYYLHHLLTQIKEMWVRLLMYAAGKCSGEVHARQLGEGRELITFVWLLMLHHGLGDMAAEFKLLRSNDPNVAERGAWIVSPPGNYQEPTCAFNHATVLSEAPFHIQTNPSDCLLLCYMSTDIQASIQKRTTNSRNRSNEENSCTAQLCGYQAPGEKQADDHETQAYGSPEHNGYSLCCLLP

SEQ ID NO: 76707 - protein, 328 aa, Zea mays
  Coding DNA Sequence Number=SeqID_34928
  Homolog annotation: Hit_ID=O22784; Match level="QueryCoverage=38%, HitCoverage=41%, E-value=3e-34, Identity=51%"; Hit description =Expressed protein
  Pfam annotation: Domain name=DUF26; Domain location=84-135; Score =61.5; E_value=2.7e-15; Accession=PF01657.8; Description=Domain of unknown function DUF26
MSSWPGVCGASVAARVQLAGCLALYEVSGFPQVSGVQMLFKTCGTGSGGGGGDFEMRRDTAFSALEGGVATSSGGFVATSYQAVYAMAQCEGDLSTGDCSQCVTQAVQHVEVECGGAPSGQVYLDKCYISYSYYPHGVPHGGGTGGEILAVPSVHSCFRIDLIDSDWYLFGCSSGCLGANLCRLVVHSQVQYGSRVAQFPFCHLVYASVYSSFGQQTAKTVAIVLGGAVGLGFVVICLLFARSLVKKKDGAPTAVCSTRCLTVPPYQTCVYCRLLMGGRARKENVDKDIVGAWYGILMERVGCLFGWSVMEDELPDALGPDFNSRVWK

SEQ ID NO: 76708 - protein, 434 aa, Zea mays
  Coding DNA Sequence Number=SeqID_34929
  Homolog annotation: Hit_ID=O22784; Match level="QueryCoverage=36%, HitCoverage=50%, E-value=9e-43, Identity=52%"; Hit description =Expressed protein
  Pfam annotation: Domain name=DUF26; Domain location=190-241; Score =61.5; E_value=2.7e-15; Accession=PF01657.8; Description=Domain of unknown function DUF26
  Pfam annotation: Domain name=DUF26; Domain location=84-138; Score =47.5; E_value=4.5e-11; Accession=PF01657.8; Description=Domain of unknown function DUF26
  Pfam module annotation: Pfam domain module=DUF26::DUF26; Domain location=190-241::84-138
MGIRRARRFLFLAAAVLLLHAPLPATSADLYALIYKGCANQSFPGGVAPPSVAALSTTLSAQSASAKFYKTSSSSSAASSSTSVFGLFQCRGDLSASDCAACVSRAMSSWPGVCGASVAARVQLAGCLALYEVSGFPQVSGVQMLFKTCGTGSGGGGGDFEMRRDTAFSALEGGVATSSGGFVATSYQAVYAMAQCEGDLSTGDCSQCVTQAVQHVEVECGGAPSGQVYLDKCYISYSYYPHGVPHGGGTGGEILAVPSVHSCFRIDLIDSDWYLFGCSSGCLGANLCRLVVHSQVQYGSRVAQFPFCHLVYASVYSSFGQQTAKTVAIVLGGAVGLGFVVICLLFARSLVKKKDGAPTAVCSTRCLTVPPYQTCVYCRLLMGGRARKENVDKDIVGAWYGILMERVGCLFGWSVMEDELPDALGPDFNSRVWK

SEQ ID NO: 76709 - protein, 300 aa, Zea mays
  Coding DNA Sequence Number=SeqID_34930
  Homolog annotation: Hit_ID=Q6QP51; Match level="QueryCoverage=67%, HitCoverage=81%, E-value=6e-17, Identity=43%"; Hit description =Putative growth-regulating factor 1
MQAACNYTKGMHPFDLDASNMEAQAHTSWTRKGDTPKGILLHEGSGPRALLLIRGSKAGPSEGFDSRLRALGLHAHYCSEVRRLAPRKGSTAASGHSGSAPTTDQGFEGWPPEGFDSRLRTRRARDDSGYVRYMAEARATLPRLGGCSRKPGSGQTVDNLVTPISTKLQRPDGRNSGQGSAHSRDTILPRPSQPRAKTADPGEFTSRPRENSVACPAPTAVPPTRVRLTVAKSSLGRHRKLRLARPQGSDSTSTPEDSPRLARPQGSDSTSTSDDGLRLARPQGSDSTSTSDDGLRLARP

SEQ ID NO: 76710 - protein, 249 aa, Zea mays
  Coding DNA Sequence Number=SeqID_34931
  Homolog annotation: Hit_ID=Q6QP54; Match level="QueryCoverage=29%, HitCoverage=26%, E-value=3e-07, Identity=48%"; Hit description =Putative kinase
  Subcellular localization annotation: CTP_CleavageSite=51; ConfidenceScore=5.65e-01
MGAIPVKALSTQVTRSRLARAQPRAGTVDQGRFTPRPRVSSSNGRTFDSPEAQLGQASRRSNLGQIATPTDQLGLNLDAGRRTPPRPTPGLGLNLDVGRRTPPRPTLELGLSLGRHRKLRLARPQSSDSTSTPDDGLRLARPQSSDSTSTSDDDLRLARPPGLGLSLDSGRRSPPRLTLGLGLNLDLGRRSPPRPTLGARTQPRPRTTVSASPDPWAQTPPRPRRSLRLARPRARTDHVAGGHHYPTPS

SEQ ID NO: 76711 - protein, 43 aa, Zea mays
  Coding DNA Sequence Number=SeqID_34932
MAAVLAVSPSASRNRRSSFDYQVIKLFEFYEIEDPEHSFCEGK

SEQ ID NO: 76712 - protein, 135 aa, Zea mays
  Coding DNA Sequence Number=SeqID_34933
MKTMRSTSTNKIRVAQWKHVWVPTHRSKGSSRNVSLGLERLKQQMKRIPHPELRLHRARLAAQLSALGDCARSSTHVVLARHRRSTTSSTRLTVRRRRKIAIYFRASRNRQSSFGDQVIKFFEFYEIEDPEHLFW

SEQ ID NO: 76713 - protein, 92 aa, Zea mays
  Coding DNA Sequence Number=SeqID_34934
  Subcellular localization annotation: CTP_CleavageSite=63; ConfidenceScore=5.43e-01
MAGGIKLAGAKGKWLAGEGTGSCSVTKVPVSECLVPRLSCAKTVSKGFGLSSNFPRMCSRETLSDTGVSQPSPLKGISSRDSGQSPPGVKRR

SEQ ID NO: 76714 - protein, 100 aa, Zea mays
  Coding DNA Sequence Number=SeqID_34935
  Subcellular localization annotation: CTP_CleavageSite=40; ConfidenceScore=5.29e-01
MAGGIKLAGAKGKWLAGEGTGSCSVTKVPVSECLVPRLSCAKTVSNEFGLSSNFPRMCSRETLGDTGVSQIRPRIRPLPRKASKLYININVLKQHSFMKG

SEQ ID NO: 76715 - protein, 58 aa, Zea mays
  Coding DNA Sequence Number=SeqID_34936
MAGGIKLAGAKGKWLAGEDYLSTFHQVWNYSISRTAKFGAVETLILDANANSKTNLDF

SEQ ID NO: 76716 - protein, 350 aa, Zea mays
  Coding DNA Sequence Number=SeqID_34937
MNKTSAFKMPSQTELRSRPHGNSSPSPAWLEDVSASGLEGDCHHQKLEEEVVRRPAQEVEPRLASLPASTRMANTLNTEGGIGVTARPTGERGRQPRRRHATAPSGRTSPTPDTPAWRPRPTRRATGTPDAACEQLPRLRHHRASSIAEPTPRLEATQRATQRRQPDAAANAAKGGPAVMTVAGAREQRSRRQPSSRPIRGQRESPLSRHEDNAPVICSSNGPRTRNGSPASYSPHRINSAAGQAALLAGKAGGASPSPKQPRQKRDQERGIPRKGSFPVKEPGSEPPYWSGVRRLAPRRVQQPPQIAWALHPLLVRGSKAGPPKGSTAASGYSGFVPITDQGFEGWPPK

SEQ ID NO: 76717 - protein, 394 aa, Zea mays
  Coding DNA Sequence Number=SeqID_34938
MNKTSAFKMPSQTELRSRPHGNSSPSPAWLEDVSASGLEGDCHHQKLEEEVVRRPAQEVEPRLASLPASTRMANTLNTEGGIGVTARPTGERGRQPRRRHATAPSGRTSPTPDTPAWRPRPTRRATGTPDAACEQLPRLRHHRASSIAEPTPRLEATQRATQRRQPDAAANAAKGGPAVMTVAGAREQRSRRQPSSRPIRGQRESPLSRHEDNAPVICSSNGPRTRNGSPASYSPHRINSAAGQAALLAGKAGGASPSPKQPRQKRDQERGIPRKGSFPVKEPGSEPPYWSGVRRLAPRRVQQPPQIAWALHPLLVRGSKAGPPKGSTAASGYSGFVPITDQGFEGWPPKDPAPAKSLTASTYQPENLGPDRAPGLRPVRMREQPDLLKRYARH

SEQ ID NO: 76718 - protein, 73 aa, Zea mays
  Coding DNA Sequence Number=SeqID_34939
  Homolog annotation: Hit_ID=Q6ETL7; Match level="QueryCoverage=66%, HitCoverage=10%, E-value=2e-08, Identity=57%"; Hit description =Putative oxidative-stress responsive 1
MWKGKKSGPLAPWGRKREFPIRAADYELLEPIGDGATTVMRRARCLSHGRSSSSRNWEDLSFDGKGYHSQLQY

SEQ ID NO: 76719 - protein, 235 aa, Zea mays
  Coding DNA Sequence Number=SeqID_34940
MPGKANCFCPARVQHSVLYPRFRGEDGSEDLPVRFGATDARWCGVGGRVDAAVSADMVAAGESFFADEPVSATRGPTSGSLALMSGSRPLSGDANKSLPVAASVLAPSLLLQRSLASHQEFVVPRALRCGGCSYPREWNRCSVCNGTLSAGVCSSWLSGPEHLCILAWSRVFSSFRALELACRLAEPLNQVFLRGGDAPTVLPSEAGSDSAEGGVDAEGAAAPPLMFDPAGTVYL

SEQ ID NO: 76720 - protein, 150 aa, Zea mays
  Coding DNA Sequence Number=SeqID_34941
  Subcellular localization annotation: CTP_CleavageSite=24; ConfidenceScore=5.20e-01
MGKNISLILSLSLQFNVLLLFSILAAWRRSRGRRKPWRGCRHSDSSARTLVYGLYPWKLRRSFYQRVAHELMVGVGGLRLPKHLRTSPQQLEQAAWCIKLQNFVLEGQEMLFFLLDKEADSSLGLVMLLIGCEGVSLLLEVGTAHAKAFE

SEQ ID NO: 76721 - protein, 213 aa, Zea mays
  Coding DNA Sequence Number=SeqID_34942
  Subcellular localization annotation: CTP_CleavageSite=24; ConfidenceScore=5.20e-01
MGKNISLILSLSLQFNVLLLFSILAAWRRSRGRRKPWRGCRHSDSSARTLVYGLYPWKLRRSFYQRVAHELMVGVGGLRLPKVPSDSDQNHSVKKHKEYEAFENKSPTVGAGSLVYQASNPVVAWPGHNLQPGGERALTVSEIESLEGVILWRLPNFVKATQPYMILRRGQEMLFFLLDKEADSSLGLVMLLIGCEGVSLLLEVGTAHAKAFE

SEQ ID NO: 76722 - protein, 145 aa, Zea mays
  Coding DNA Sequence Number=SeqID_34943
  Subcellular localization annotation: CTP_CleavageSite=63; ConfidenceScore=5.13e-01
MSSSPAESNALQAMGEWLGLLTVKQELFFVYFKPSTSLLCKSSARFTGVPGSSARFSGIAGARLDNDEEESETKERPLVLRLQPREVQSGAGPSGPVPSGCRSYRYFPDARALQSCRSYAILGIPLIDTPPDRDLQIVEMSRGRG

SEQ ID NO: 76723 - protein, 757 aa, Zea mays
  Coding DNA Sequence Number=SeqID_34944
  Gene Ontology: Mol. function=protein binding; Biological process =regulation of transcription
  Homolog annotation: Hit_ID=Q8LJA9; Match level="QueryCoverage=63%, HitCoverage=100%, E-value=0.0, Identity=78%"; Hit description =Putative tubby-like protein TULP10
  Pfam annotation: Domain name=F-box; Domain location=334-389; Score =32.0; E_value=2.1e-06; Accession=PF00646.23; Description=F-box domain
  Pfam annotation: Domain name=Tub; Domain location=400-757; Score =632.1; E_value=4.8e-187; Accession=PF01167.8; Description=Tub family
  Pfam module annotation: Pfam domain module=F-box::Tub; Domain location=334-389::400-757
MDPETGDFIPNSMLVSEWYVWDVYTVAYAFRSELENGEPISGLDPPPTWIESCCSRVKVKVSSGNLYSSSQNCSTITMHPDTQRCAVCALWRCGHWSKDKHHRLSQYGYCGSAMIEQSIANDSPFGSSQLLLRIFCAPCRIVSSYSLTGCCPSLFYRVGKKRKGMRMLPGVIITVEIVLTGVEDKLDDRSDQGTRTLLLGPLASSCARACGGREGQPEGRAGCTDLGAACPRWWGEAAPASRNVSSRYTRGGAVVGQLVVAVSFAYALSIVVVISKEMSFRSIVRDVRDGFGSLSRRSFEVTLASIYGLTGHHKGKTQSSSHVLDDSPSIIRESRWANLPPELIRDIIRRLEADESTWPARKHVVCFAAVCRTWREMCKEIVLSPEFCGKLTFPVSLKQPGPRDGNTMVQCFIKRNKSKSTYHLYLCLSNVVTSESGKFLLSAKRHRKTTCTEYTISMDSGNISRSKRTYIGKIRSNFLGTRFLIYDTQPPYNGAVVPPAGRTSRRFNSTKVSPKLPSVSYNIAQVSYELNVLGTRGPRRMRCIMHSIPASSVEPGGTVPGQPEQIVPRALEDSFRSTASFSQSFRSTASFSKSIMDSSMDFNSARFSDIAGSSARFTGVPGSSARFAGVPGSSARFSGIAGARLDNDEESETKERPLVLRNKPPRWHEQLQCWCLNFRGRVTIASVKNFQLIAAATPPPAGAPTPSQPAPSDPDKVILQFGKVARDMFTMDYRYPLSAFQAFAICLSSFDTKLACE

SEQ ID NO: 76724 - protein, 240 aa, Zea mays
  Coding DNA Sequence Number=SeqID_34945
  Gene Ontology: Mol. function=zinc ion binding
  Homolog annotation: Hit_ID=Q94IR1; Match level="QueryCoverage=54%, HitCoverage=74%, E-value=2e-68, Identity=90%"; Hit description =Methyl-binding domain protein MBD101
  Pfam annotation: Domain name=4F5; Domain location=186-229; Score=3.6; E_value=0.011; Accession=PF04419.5; Description=4F5 protein family
  Pfam annotation: Domain name=MBD; Domain location=59-126; Score=8.0; E_value=0.0055; Accession=PF01429.10; Description=Methyl-CpG binding domain
  Pfam annotation: Domain name=zf-CW; Domain location=1-45; Score=69.0; E_value=1.5e-17; Accession=PF07496.5; Description=CW-type Zinc Finger
  Pfam module annotation: Pfam domain module=4F5::MBD::zf-CW; Domain location=186-229::59-126::1-45
QCYKCYKWRTVPKEEFETLRENFTKDPWFCSRRPDCSCEDDADIEYDSSRIWVLDTPNIPKPPPETERLVIMGGDYTRMDTYYVMPNGKRARCAGDVDKFLEANPAYKSRISASDFDFAPPEVVEETVVSHNFLPLQEGSGSKGRFWIQGVPFSPAAYKFCPTVSSPAPSILGLSASRFPLLPEASSRARRPAAKGRDDGLTPEQRRERDAKALQEKAARKAAQAAGGACAKGGKNTGKK

SEQ ID NO: 76725 - protein, 278 aa, Zea mays
  Coding DNA Sequence Number=SeqID_34946
  Gene Ontology: Mol. function=zinc ion binding
  Homolog annotation: Hit_ID=Q94IR1; Match level="QueryCoverage=48%, HitCoverage=75%, E-value=8e-69, Identity=90%"; Hit description =Methyl-binding domain protein MBD101
  Pfam annotation: Domain name=4F5; Domain location=224-267; Score=3.6; E_value=0.011; Accession=PF04419.5; Description=4F5 protein family
  Pfam annotation: Domain name=MBD; Domain location=97-164; Score=8.0; E_value=0.0055; Accession=PF01429.10; Description=Methyl-CpG binding domain
  Pfam annotation: Domain name=zf-CW; Domain location=35-83; Score =76.1; E_value=1.1e-19; Accession=PF07496.5; Description=CW-type Zinc Finger
  Pfam module annotation: Pfam domain module=4F5::MBD::zf-CW; Domain location=224-267::97-164::35-83
  Subcellular localization annotation: CTP_CleavageSite=25; ConfidenceScore=5.24e-01
MEPGRFPFPASPLSPVPPRRRHDNRVNTGFAPLSRLSVQCYKCYKWRTVPKEEFETLRENFTKDPWFCSRRPDCSCEDDADIEYDSSRIWVLDTPNIPKPPPETERLVIMGGDYTRMDTYYVMPNGKRARCAGDVDKFLEANPAYKSRISASDFDFAPPEVVEETVVSHNFLPLQEGSGSKGRFWIQGVPFSPAAYKFCPTVSSPAPSILGLSASRFPLLPEASSRARRPAAKGRDDGLTPEQRRERDAKALQEKAARKAAQAAGGACAKGGKNTGKK

SEQ ID NO: 76726 - protein, 93 aa, Zea mays
  Coding DNA Sequence Number=SeqID_34947
  Subcellular localization annotation: CTP_CleavageSite=64; ConfidenceScore=5.51e-01
MVGRGPLHVFLAAVRAKLRWSTSFSACSSSIGFRACSRLPSSRRTHHPLFDPPPHQLAPNTISSSFHASSRNPKNRMKTKLAARYSPSARQIA

SEQ ID NO: 76727 - protein, 129 aa, Zea mays
  Coding DNA Sequence Number=SeqID_34948
  Subcellular localization annotation: CTP_CleavageSite=48; ConfidenceScore=5.23e-01
MSSSRTIIIASVASSLATVILTASARDCGRVHRIRQHFVADSTAVVPRVSKKSQESGEDEASSAIFSKRSTNCLDRKITTDLADRVSYGNGTLINRAMRKTSQVDPKRGLLRRMMLMDKPEDTRQVDVT

SEQ ID NO: 76728 - protein, 131 aa, Zea mays
  Coding DNA Sequence Number=SeqID_34949
MDHVLAGLMGDHLALIVDRLLTESTLEAAIGGGKQMVDLRQETVDVDLKTVLMPPPLLLRIEASETANTSFRICRRFDPGGSQDRRVGCACSRGLQASAWEREREPYALARSPARPTFSYESPEPSFYRRK

SEQ ID NO: 76729 - protein, 224 aa, Zea mays
  Coding DNA Sequence Number=SeqID_34950
MAGRMHDHRCHARHGEEELELGLLSSAVADAPTSICARGRHTARRAGFPLDLSHPSAMVAHAREAPWRICAESVVVFAFTTEVDDESSVLEPVRFGEDDGALELPRGTHPQYQRWFKHAMCGRLGRGPPKSATKTDGRPSRVDRGPAGDRVDAGRAIGGGKQMVDLRQETVDVEYCHRELGGGSAMKVVECRICQEEDWDTCMEAPCACCGSLKDLFNHAIFFI

SEQ ID NO: 76730 - protein, 196 aa, Zea mays
  Coding DNA Sequence Number=SeqID_34951
MGASARESRVSVAIYSLDVVGHSGLHQSGITSLCFVGCFSPGPQKNDLTIYWALGPFVRSFTPLVDPGDIYPPHNSLRLHGIQLCCHMEHRVSTTPVTIVWNIASHFWANTTNTLKTSIMVEREEFVVSKTRLYYDVNLIDPLNNLGLGLMGFSHLCILNGSKSRAHEGLAQNHWIGHCQRHSRRLIQQPSSSSMA

SEQ ID NO: 76731 - protein, 104 aa, Zea mays
  Coding DNA Sequence Number=SeqID_34952
MQRDHGVETDIMDEGMTMKRKEGVGASSLHLTGTDRVGLANVAPNRRLHVDKSIIPAYHLDLDGPQRRASKSQQRPDFPALKPPCNGAMRGEPSCNHVHILTRT

SEQ ID NO: 76732 - protein, 96 aa, Zea mays
  Coding DNA Sequence Number=SeqID_34953
MGMEWKQKVSLFDVIDETSVPTKLGHAASNGVAATATWGNSQGLGDSVIILCIIRSKQGEKSSCQRVNITRRSTNSKSQGPSNNHTYKGSLKESLE

SEQ ID NO: 76733 - protein, 53 aa, Zea mays
  Coding DNA Sequence Number=SeqID_34954
MGMEWKQKVSLFDVVDETSVSTKLGHAASNGVAATATWGNSNAIAVLFYDFIL

SEQ ID NO: 76734 - protein, 78 aa, Zea mays
  Coding DNA Sequence Number=SeqID_34955
MPIEKTRKVESVVKFNTSYLVLQAMAMWGNDRRMKFVGDAKILQINFVIDLLSYEDNSCRYAIPTNIQQRLIDIAKKD

SEQ ID NO: 76735 - protein, 590 aa, Zea mays
  Coding DNA Sequence Number=SeqID_34956
  Gene Ontology: Mol. function=cysteine-type peptidase activity; Biological process=proteolysis
  Homolog annotation: Hit_ID=Q109R5; Match level="QueryCoverage=77%, HitCoverage=44%, E-value=2e-32, Identity=23%"; Hit description=Ulp1 protease family, C-terminal catalytic domain containing protein
  Pfam annotation: Domain name=Peptidase_C48; Domain location=76-265; Score=-8.0; E_value=0.0022; Accession=PF02902.9; Description=Ulp1 protease family, C-terminal catalytic domain
MVLMVRDFAVLSFYFELAQAFLKQAKRSREMLQYNAVQWTLCFAWLEMEGDLALIDFIKEIPCEPRVEVVLIDDAFVERKSMECLFQPNAYLGDEVIDCYINLIKAQKHLKCRSGGRVHIENAFQFNFLKRDGDVDIKTEELYPIEDMTQICSAERRVLLYLDHDMVFIPINIRETQWYLAVIHARNMEIQVLDSLGTSQDRKDLTDSIKGLQRQIDMISQPLHVASFFLNYIEYWTGDELSDSFTQDDMSHFRKKMAAILLSSELNKRRGCLLYKNDKEVDSGSPSDVEILENPTDSKKRKLLHVLDDNEVVYEDEEGPITQADLQKWFVDDWDKRTPVKVSNDGCTNDFLMVGLSTKDMPVTKAESIDVLCDYIMAIEDDTTLECFDMAVRLLANKESRRPKGEIINNRKHYMDMRFWRMVGFGKLPKYHQDPTAEELAKTLDCWPSMNYYITGCRYVLMPWKFNGCYALFVIDHVKKHVTFIDFTLTQDWCKHMPYKRFAEAIIMASKKYKIAYSKKRSGWAEDIFKWEHTIQTDVPIDLRGFNTSYLVLQAMAMWGNDRRMKFVGDAKIVRRNFVIDLLSYEDNSC

SEQ ID NO: 76736 - protein, 198 aa, Zea mays
  Coding DNA Sequence Number=SeqID_34957
  Gene Ontology: Mol. function=cysteine-type peptidase activity; Biological process=proteolysis
  Homolog annotation: Hit_ID=Q6H486; Match level="QueryCoverage=69%, HitCoverage=24%, E-value=1e-14, Identity=37%"; Hit description =Epstein-Barr virus EBNA-1-like protein
MTSPGARQLLLSSGSARRIGMPGDGSAAAGDPLARSHSSGDLALIDFIKEIPCEPRVEVILIDDAFVERKSMECLFQPNAYLGDEVIDCYINLIKAQTHLKCRSGGRVHIENAFQFNFLKRDGDVDIKTEELYPIEDMTQICSAERRVLLYLDHDMVFIPINILETHWYLAVIHARNMEIQVLDSLGTSQDRKDLTDS

SEQ ID NO: 76737 - protein, 79 aa, Zea mays
  Coding DNA Sequence Number=SeqID_34958
  Gene Ontology: Mol. function=microtubule motor activity; Cellular component=microtubule associated complex; Biological process =microtubule-based movement
  Homolog annotation: Hit_ID=Q9LHL9; Match level="QueryCoverage=70%, HitCoverage=5%, E-value=6e-10, Identity=63%"; Hit description =Kinesin (Centromere protein) like heavy chain-like protein
MVGKNSMKIARDLVMQEVVNDLNPSGQNLQNKEDLQGTLIDGIKEVVLSPADALSLIAAGEVFYNSLAFGIATAKTSFL

SEQ ID NO: 76738 - protein, 221 aa, Zea mays
  Coding DNA Sequence Number=SeqID_34959
  Gene Ontology: Mol. function=protein serine/threonine kinase activity; Cellular component=integral to membrane; Biological process=protein amino acid phosphorylation
  Homolog annotation: Hit_ID=O49974; Match level="QueryCoverage=48%, HitCoverage=12%, E-value=8e-52, Identity=94%"; Hit description=KI domain interacting kinase 1
MVGKNSMKIARDLVMQEVVNDLNPSGQNLQNKEDLQGTLIDGIKEVVLSPADALSLIAAGEVFRLSQSLLLHKSLTWPSTTASPCPRSCDPRPRSRPPVCRHSVSGRSASVPRAMLDISQSIRFDDDVEDGKSHELKVYSLDRIRAATINFSDSNKLGQGGFGHVYMGTLPGGEEVAVKRFCRNSGQGLEEFKNEVILIAKLQHRNLVRLLGCCIQREEKI

SEQ ID NO: 76739 - protein, 103 aa, Zea mays
  Coding DNA Sequence Number=SeqID_34960
  Subcellular localization annotation: CTP_CleavageSite=65; ConfidenceScore=5.21e-01
DAKRIGPRKMRMQHLKRRHKKMHRSPILKNKRSPKKSAKKSKKRAVSQRLVVHRTLVSGVHRTVRCGTGQSAQRGHRQALSGCSTGLSGANGRLTWRAPDTAQ

SEQ ID NO: 76740 - protein, 124 aa, Zea mays
  Coding DNA Sequence Number=SeqID_34961
MTGDKQRQKLKQKPSSKISNTYIKKVDKKAATSYLIKKKKNGKVIAIKANKQVNKGKGAKRIWVPKEIISTMKSTKKVWIPKGNLLPSGLAKNLDPNFPPMTKFTGCEENWTKANEDATPQKKT

SEQ ID NO: 76741 - protein, 220 aa, Zea mays
  Coding DNA Sequence Number=SeqID_34962
  Subcellular localization annotation: CTP_CleavageSite=40; ConfidenceScore=5.51e-01
MDRGPSAVSRSAQSGRKRMKLSGRGPSTALARTVHDRQLRRAEAVNLSFLFINSPLTLSTRQKVTFVDCARTVKRSCTRTVRKLVGRSTNMSSSCGLGGLRKKLVGRFKSKRPRADDADYTPTTDSEAQSSAGGSVSMDTEDVPHTHPNYPIDIIGWTFPKRRFSMAEYCSKRTVNQYTLPSDTNVQFFHTQLQFDIFWGTLMDTNFHKHQVIDWTFMLG

SEQ ID NO: 76742 - protein, 502 aa, Zea mays
  Coding DNA Sequence Number=SeqID_34963
MRGPGGRMSSPELRESSARMLRVIGGCWPRNVPIPRATGEDFFTSRMVREWRVFPYERNVAAVVSAVMDKDRQGAAQKRQAVVRLVEARPKRQRGAAKAAAPGGGKPPLAAKSGAPASSKAPEATAGAGGSKSTKAVPPSSRVPEVVKAARALPSVGKRVADFATDISVDDYLGADEDFERDIYKVEDPIVKESAGAIYDRMWGPHGREVVRERAETARAQAARGERVDDFGALNSALPDLEPTPAEAVSGAALEPPLETAEGAPDTPASAVAGGDVPPDTAEGAPDAPAAAAPSAEDPATVVAEAAAEATVEATAEATAGSSQVQDFGPAHATTTTKFLAASTVDGGNKCDGSASEFSDFADSGSSVEWTEESSEEDLDYFAALDVAAAEASPRAADTEDVPGPSTGRRRRRAVAKRRVSEAEGGDFCADSLRGRLRFFALVVLVRLHPKATSARIVFAVDFGFFALVVLVRLHPWATSARIVFAVDFGFFALVVLVRLHP

SEQ ID NO: 76743 - protein, 141 aa, Zea mays
  Coding DNA Sequence Number=SeqID_34964
MALAPTPCRHPLSLFSLTRAPLLPALCSAQEPPRCLETVGVFHLAGNLIIQARCLSSLVACNEHPSPTSSLASPTELLLGRALLMPIAPIPIWIPCPFSSAAALLRARSRRHASRFTRSTKHQAMWTVHAAKSRLVQVESM

SEQ ID NO: 76744 - protein, 150 aa, Zea mays
  Coding DNA Sequence Number=SeqID_34965
MRRARPRRSSAGEAREDVGEGCSLHATSEDRQRVWMMRFPAKWKTPTVSRHRGGSCAEQRAGRRGARGREKRDRGCRHGAGASAVAASGQEQREKGKRKWSREGRRSRGGRRHGLIPGDEGNPGNICAPTMAGERILGRRCQGGDNLYQR

SEQ ID NO: 76745 - protein, 105 aa, Zea mays
  Coding DNA Sequence Number=SeqID_34966
MKAKSHQQPIILRSTCKNCATSKAEYTNTQLDLPGQHGSSSLISCEKQTIRIEFLNLARIQHLARSNSANTTVLSRFGQIQTCNFKNSQLQIQTSKQGDPRLYGK

SEQ ID NO: 76746 - protein, 128 aa, Zea mays
  Coding DNA Sequence Number=SeqID_34967
MKAKSHQQPIILKSTCKNYATSKAEYTNTQLDLPGQYGSSSLISCEKQTIRIEFLNLASDRTCTHHNQNGRPRLTSREGICPLPGSLRQRIPMDRCPQTTIIMISKWIQPIPDLARVLEKSLDFYRDP

SEQ ID NO: 76747 - protein, 522 aa, Zea mays
  Coding DNA Sequence Number=SeqID_34968
  Gene Ontology: Mol. function=diacylglycerol kinase activity; Cellular component=intracellular; Biological process=protein kinase C activation
  Homolog annotation: Hit_ID=Q10GC5; Match level="QueryCoverage=98%, HitCoverage=98%, E-value=0.0, Identity=71%"; Hit description =Pentatricopeptide, putative, expressed
  Pfam annotation: Domain name=PPR; Domain location=134-168; Score=5.0; E_value=1.9; Accession=PF01535.11; Description=PPR repeat
  Pfam annotation: Domain name=PPR; Domain location=169-203; Score =11.4; E_value=0.33; Accession=PF01535.11; Description=PPR repeat
  Pfam annotation: Domain name=PPR; Domain location=231-265; Score =38.9; E_value=1.8e-08; Accession=PF01535.11; Description=PPR repeat
  Pfam annotation: Domain name=PPR; Domain location=301-334; Score=7.4; E_value=0.98; Accession=PF01535.11; Description=PPR repeat
  Pfam annotation: Domain name=PPR; Domain location=335-369; Score =44.6; E_value=3.5e-10; Accession=PF01535.11; Description=PPR repeat
  Pfam annotation: Domain name=PPR; Domain location=370-404; Score =12.0; E_value=0.28; Accession=PF01535.11; Description=PPR repeat
  Pfam annotation: Domain name=PPR; Domain location=406-440; Score=8.9; E_value=0.66; Accession=PF01535.11; Description=PPR repeat
  Pfam annotation: Domain name=PPR; Domain location=99-133; Score=25.5; E_value=0.00018; Accession=PF01535.11; Description=PPR repeat
  Pfam annotation: Domain name=TPR_4; Domain location=168-193; Score =9.0; E_value=3.2; Accession=PF07721.5; Description=Tetratricopeptide repeat
  Pfam annotation: Domain name=TPR_4; Domain location=199-224; Score =9.1; E_value=3.1; Accession=PF07721.5; Description=Tetratricopeptide repeat
  Pfam annotation: Domain name=TPR_4; Domain location=405-430; Score =13.1; E_value=0.99; Accession=PF07721.5; Description=Tetratricopeptid e repeat
  Pfam annotation: Domain name=TPR_4; Domain location=471-496; Score =0.8; E_value=30; Accession=PF07721.5; Description=Tetratricopeptide repeat
  Pfam module annotation: Pfam domain module=PPR::PPR::PPR::PPR::PPR::PP R::PPR::PPR::TPR_4::TPR_4::TPR_4::TPR_4; Domain location=134-168::169-
  Subcellular localization annotation: CTP_CleavageSite=54; ConfidenceScore=5.30e-01
MAPLNGCPLPTTSTTGPPHLLPSSASISAFIASDPALTLLHTRCVSMAHLRQLHAALVKSGLAKDPIAASRAVAFCAGPGRDVLYAERLVRHHPRPNSFMWNTVIRALSDGARPDAAVALFVDMLSSPTPPDRRSFPSLLAAYARLGRAGDGEALHGMALKLGLAGDAYVRNATIAMYASCGRADEALALFGQCPELDVVACNSVIVALARAGRVDEARSVFDAMPERTVATWSAMVSAYARAARCSEALALFSAMQADGMEPNANVLVSVLGCCASLGALVQGAWVHEYIDRHGVAMNALVVTALVDMYCKYGSVDDARQVFDAARSQGLAKLSSWNSMMQGLAVHGQWREAVALFSELKSYGLSPDNVTFIAVLTAYGHSGMPDEAQAAFASMSSEHGVEPGIEHYGCLVDALARAGRLREAEDAIRAMPMAPDAAIWGALLSGCRLHGDAELGARAAREAVRCDPRDSGAYVLAASVLARGGDPGRGAGIRGRMREAGVGKVPGSSMIEVNGVVHEFVS

SEQ ID NO: 76748 - protein, 266 aa, Zea mays
  Coding DNA Sequence Number=SeqID_34969
MNVCELTLAVSHPPTGQEQVPQDEAHRGCCDEFVSGLGRRLPVNFGLLDRCLLIITPGDYVRARVLVPRNPGVTNLEGNNVQGQDDMQIEENINVGLMLHLEHTNPDLAFEDFMARKRSSSWADLLPGNDGSVSVPKVWPAFFMGLLMRPDSFDWARKFLLSGAISAFVKPSMDTISIKIPSNCLLPPSQDTPAEPQSPPQSKATFRKRQPILVDTTVRSARLRAKAKGFKIALGLVKRIVLAALKAFLLPFNLTSSRNWELSFVR

SEQ ID NO: 76749 - protein, 230 aa, Zea mays
  Coding DNA Sequence Number=SeqID_34970
MNVCELTLAVSHPPTGQEQVPQDEAHRGCCDEFVSGLGRRLPVNFGLLDRCLLIITPGDYVRARVLVPRNPGVTNLEGNNVQGQDDMQIEENINVGLMLHLEHTNPDLAFEDFMARKRSSSWADLLPGNDGSVSVPKVWPAFFMGLLMRPDSFDWARKFLLSGAISAFVKPSMDTISIKIPSNCLLPPSQDTPAEPQSPPQSKATFRKRQPILVDTTVRSARLRAKAKGL

SEQ ID NO: 76750 - protein, 324 aa, Zea mays
  Coding DNA Sequence Number=SeqID_34971
  Homolog annotation: Hit_ID=Q8S7R8; Match level="QueryCoverage=43%, HitCoverage=29%, E-value=1e-48, Identity=66%"; Hit description =Putative anthocyanidin-3-glucoside rhamnosyltransferase
MDPGEAVELGGCRNNSLATDNARGVALDGVRDVCAATGQARRLMDDPDAVCQWSGHDALNAERAHRPSAWWQGKAWTRASTGPLLMSGSSPSRDLAKARTLLGGSWGPPEGPDLPMWWGRMSFSVWPGDVARVQRLYSKQVELSLRTGSTAFEQGDHATPSGKTSSSRLPALPLALGQGQPIAMDAASSSAAPLRLVIFPWLGFGHLLPYLELAERLALRGHRVSFVSTPGNVARLPPLRPAAAPRVDIVALPLPRVDGLPDGAESTNSVPHDKFELLFKAFDGLAAPFAEFLGGCCADEGRRPDWVVLDSFHYWAATAAVEHK

SEQ ID NO: 76751 - protein, 461 aa, Zea mays
  Coding DNA Sequence Number=SeqID_34972
  Gene Ontology: Mol. function=transferase activity, transferring glycosyl groups; Biological process=metabolic process
  Homolog annotation: Hit_ID=Q8S7R8; Match level="QueryCoverage=97%, HitCoverage=96%, E-value=1e-145, Identity=58%"; Hit description =Putative anthocyanidin-3-glucoside rhamnosyltransferase
  Pfam annotation: Domain name=UDPGT; Domain location=12-455; Score= -60.1; E_value=1.4e-07; Accession=PF00201.9; Description=UDP -glucoronosyl and UDP-glucosyl transferase
MDAASSSAAPLRLVIFPWLGFGHLLPYLELAERLALRGHRVSFVSTPGNVARLPPLRPAAAPRVDIVALPLPRVDGLPDGAESTNSVPHDKFELLFKAFDGLAAPFAEFLGGCCADEGRRPDWVVLDSFHYWAATAAVEHKVPCAMLLPSAACLAVGRERQSSSGKPAAAPRYESEQNKQYSAKDGASGVSIAERYFLTRERCTIMAIRSSHEWEPEFLPLVAPLVGKPVLPLGLLPPSPDGGRGASANANGEHATVRWLDAQPPSSVLYVALGSEVPLRAEQVHELALGLELAGTGFLWALRNPSGVPDADVLPAGFQERTRGRGLVTTGWVPQPSVLAHAAVGGFLTHCGRNSLIEGLLYGRPLVMLPIFGDQGPNARLMEGKKVGLQVPRDEHDGSFDRHGVAGAARAVMLEEETRGVFVANALKVQAIVADKELQDRYVDEFIQQLLIRGRPCPASS

SEQ ID NO: 76752 - protein, 970 aa, Zea mays
  Coding DNA Sequence Number=SeqID_34973
  Homolog annotation: Hit_ID=Q10S92; Match level="QueryCoverage=28%, HitCoverage=23%, E-value=3e-86, Identity=59%"; Hit description=EF hand family protein, expressed
  Pfam annotation: Domain name=Reticulon; Domain location=837-967; Score=18.0; E_value=5.7e-08; Accession=PF02453.8; Description =Reticulon
MAEGVAWKAKEERVQGAQNLETTHEEVRCMTRDMEMEPEELSWVDPRSGEQKLETELTSRVRAYSLQEAASITASDELMSRRSRRWLGANPAPVEIRYGEQGRRCGLNAQCDGGMTLPVFDERPLENVIWDDEQQQLDREMDDLLEYNQVAWDEELVHGVESHDSRWQLVDHAECQIAMDEHLLPMLGSYKAAIVTKDDEEKYKQVAELASKLVVEEAAYRDVQERKVELHDALIKMVQGGSVDGLLQVRADRIQYHLEEMEKAIGERCKHFGFKFKSSTSVELPSGWEPGPQEGIIEWDEDWDKFGNEGFSIVKDNGCRLLDGSGDCLRRALQEDCGEAAVWIVRGLRLPRRSGKGDISGIEILHMSPVASSNGHIKEEGCYRGGDQVTESEIAYGFGDEFVRNPGSAGRSASGSPFKSSRFGVHDSSLSKSESYNDYGGPEFVFGDKFVDETSWNFDDHDIDYVWGSTALNTKVNDQAEEATDSDTVPTDCTTEKHYYSKKGLARSNDSGDSETCAVGENAEPLAVASQPVNKVNTIQVNICEQTGASAICHEKMFSRSTRQLEGNYEHGVKGGRLMECDEHIENNFRMTSLAGHSLRSIEQECKAMTIFVKTMGDKPSSLQLVDSFGEILKSKRNSSFHLLQVATDKGYHVKETNRHGYDGWWWTESSSYPATLNPEICDRYSPPYKVVNGEELLRMLSGKEEHTTILFHALWCPFSQRIKLVFDDMSSLFPRVKHLAVEESNIMKAILSRYHVCALPSEIIAGNSHVFWPLGSIDHRLAGHFSPQNFVQQGFDLNLAVCNQEKQRHEEEFGGVFTMEKLRLTFPWDPGGHSSRNASAAAVVGATTVWFVFERAGYSFPSVLSNALLLLVAILFFWAKSASLLNRPLPPLPNLEVSDAIVEKAANHALVWINRLLAVGHDIAIKRDRKVFIKDQVDEKVGVAYSVLSRHIDTIITRAGQSAKQKKTE

SEQ ID NO: 76753 - protein, 273 aa, Zea mays
  Coding DNA Sequence Number=SeqID_34974
  Homolog annotation: Hit_ID=Q6K3D9; Match level="QueryCoverage=43%, HitCoverage=12%, E-value=7e-25, Identity=69%"; Hit description =Phosphatidylcholine acyltransferase-like
MADGEDTGHARPQHPMKQSRFNFTKAVVEKAAYYALVWINRLLAVGHDIAIKTDRKVILFPNYICSYLFLFSIVQKMILILWLVSFVGMLFNFLTLVYIDLETGAVFVGINFVLDRSILSLDLFSAVNCWLKCMLLEPYNQTDHPECKSRPDSGLSAITELDLGYITGTVICISLTLLLLSKEKGKGKHLALILFYWARFQVLSLQYGKNGSNGSVRVNGPVTDSRYPAHQQIPQAYGYRQMPARLDSTNPSQAMGGYTLQSQKETLFEELPF

SEQ ID NO: 76754 - protein, 88 aa, Zea mays
  Coding DNA Sequence Number=SeqID_34975
MAAHGSAMAYSPWPETFFAPEYYIRRLSAVWWILRATSRRQQSSDSRLESLARLKSRGYATIGWLRCNCGHYSTTHHTQSKIQIRHVS

SEQ ID NO: 76755 - protein, 141 aa, Zea mays
  Coding DNA Sequence Number=SeqID_34976
MPPCSDEQFGVVPRMHRAHRCHAKLQRASTNILVHHHGPTDDLAQFKPPTDPTIALMACTGVAGRLESLARLKSRGYATIEWLRSPIPKVTLGTGFQSVKSTFVFRRKRFRPTVNIPLIPLLSHPGFGVPRPGREHNHQVR

SEQ ID NO: 76756 - protein, 135 aa, Zea mays
  Coding DNA Sequence Number=SeqID_34977
MINNIESGRNYGYRRRIEIDTSWMTGRTDRHTYRTAASRRGSGASPWGAAEEAVRRPADPLRPEHAAHGAGLGRFVDCGRVRGVAGADCGSWRDLSSTARNARRDLPLTAGRNCGNVDCGRGVDGADCGSGATFR

SEQ ID NO: 76757 - protein, 543 aa, Zea mays
  Coding DNA Sequence Number=SeqID_34978
  Gene Ontology: Mol. function=oxidoreductase activity; Cellular component=integral to membrane; Biological process=electron transport
  Homolog annotation: Hit_ID=Q9FRC3; Match level="QueryCoverage=40%, HitCoverage=42%, E-value=4e-72, Identity=61%"; Hit description =Putative cytochrome P450-related protein
SAAMDVSGRVLRDDSSTDDGGHDGGFTSTVINEGALRTAHLAGYLVDVKACTGSVFCLPAIGCRRASRASSANLPRRSRKSPRRSSSARIPRHRGWKVHLLLAAPANQPRKSSWALPSTPRPQSADPQFLPAVNGRSRRSRSPRHQRLARSPHSRNSSPPSMEGRAAHSSPLMEGRASSRSPRQPRLGRARSPQIGHAPRRGRHVQGAGVRGPPYSFLSGCNREMRKMKAEADDGLRLDVRDHNYLPRLMPHFLAWKQKYGEPFLYWMGPRPRVCLFDYESVRQVLFNKFGHFFKDDAHPTILAMLDKGLVLVEGTDWVRHRRVVNPAFAMDKLKTMVSCAEPLIKRWEQLTASRSSEDGGRGEVQVEFSKQFQDLTADVISHTGFGSSYKEGKEVFHTQKQLLALAIATLLNVQLPGFKQVDLFLFLPLLGHHSPIYCCPRTTAELEAHVADTSLVSADAPCVLADTVLDISGLALSKTLPKLPDLVELYLSDLNLENKGTIAIAKALEQSSPQLEVLEIAGNEINAKAAPDLAKCLAEMQC

SEQ ID NO: 76758 - protein, 251 aa, Zea mays
  Coding DNA Sequence Number=SeqID_34979
MGSAHVAFVLLLLEERNFAEDGDHQFDGGEKQAGYGLCPALSFKDLHHPCWGGGRAEPELYLLYGPAGHLFLQHSGEKALTGLAEEADFDNAGSIGRKRRQLQHAWFTGFRCHLPPLSGVWLSARRTGGCCAARTGGPPKTSRAVRAAFVFLGCPALDPARRLCAEVAGESFPADETVSATHGPTSGSLTLIACPRPSSGDMGEGLVAAASALRPPDVGVVHTRGSGTGVPFVMAPWVPVSVHCGCRGLNI

SEQ ID NO: 76759 - protein, 362 aa, Zea mays
  Coding DNA Sequence Number=SeqID_34980
MGSAHVAFVLLLLEERNFAEDGDHQFDGGEKQAGYGLCPALSFKDLHHPCWGGGRAEPELYLLYGPAGHLFLQHSGEKALTGLAEEADFDNAGSIGRKRRQLQHAWFTGFRCHLPPLSGVWLSARRTGGCCAARTGGPPKTSRAVRAAFVFLGCPALDPARRLCAEVAGESFPADETVSATHGPTSGSLTLIACPRPSSGDMGEGLVAAASALRSSLLLFSRPKRTSLSLLQWSAASHPEFVVPQAPRCGGCSYPREWNRSSICNGTLGAETLGRSAMSRSRRQRCQRGQRRSRLEKKLRRPRSRGLSRPRRCSSGGWDLARHGTDIFLRGGDPPTVSPSEAGPDSAEGGDDAEGAAAPPID

SEQ ID NO: 76760 - protein, 255 aa, Zea mays
  Coding DNA Sequence Number=SeqID_34981
  Gene Ontology: Mol. function=voltage-gated ion-selective channel activity; Cellular component=mitochondrial outer membrane; Biological process=anion transport
  Homolog annotation: Hit_ID=Q1KSB8; Match level="QueryCoverage=85%, HitCoverage=67%, E-value=1e-113, Identity=94%"; Hit description =Putative voltage-dependent ion channel
  Pfam annotation: Domain name=Porin_3; Domain location=5-246; Score =104.5; E_value=3.1e-28; Accession=PF01459.12; Description=Eukaryotic porin
MYFICYDLLYKDYNFDQKFSLSTCSNSGLNLTATGVKINEDFIGDIRTQHKSGRTTVDVIIDSDSKVSTTVTVDEALTGLKTSFAFKVPDHKSGKLDLQYAHNRFSMNSTIGLTSTPLVELAATVGTSELAIGAEFGFDSTSAAVTKYNSGVGYNKSDFSVSLLLADKGETLKASYVHLFNPTNGATVAAEVTHKLKTKENYFTLGSSHALDPSTLLKTRFSNSGKAASENDNCASADSRGFTLIGSSNESKAKI

SEQ ID NO: 76761 - protein, 416 aa, Zea mays
  Coding DNA Sequence Number=SeqID_34982
  Gene Ontology: Mol. function=voltage-gated ion-selective channel activity; Cellular component=mitochondrial outer membrane; Biological process=anion transport
  Homolog annotation: Hit_ID=Q1KSB8; Match level="QueryCoverage=70%, HitCoverage=89%, E-value=1e-141, Identity=89%"; Hit description =Putative voltage-dependent ion channel
  Pfam annotation: Domain name=Porin_3; Domain location=155-409; Score =178.8; E_value=1.3e-50; Accession=PF01459.12; Description=Eukaryotic porin
MERHVEGEGKGVQALARVQHVSEERLVVVLLVRVYVVVTIGDEEALVESGEGLLSRGGAHRAVASGASGDDDACSTHSHYLQREVGPSSVRAEATPEESLSCVHASLAATRATAAAALRPAAQVFVGRFTGEERPPYQNGCHFIFIGIIVMYFICYDLLYKDYNFDQKFSLSTCSNSGLNLTATGVKINEDFIGDIRTQHKSGRTTVDVIIDSDSKVSTTVTVDEALTGLKTSFAFKVPDHKSGKLDLQYAHNRFSMNSTIGLTSTPLVELAATVGTSELAIGAEFGFDSTSAAVTKYNSGVGYNKSDFSASLLLADKGETLKASYVHLFNPTNGATVAAEVTHKLKTKENYFTLGSSHALDPSTLLKTRFSNSGKVGLLCQHEWRPKSLVTLSAEYDPKVVSAPSRIGVAISLKP

SEQ ID NO: 76762 - protein, 165 aa, Zea mays
  Coding DNA Sequence Number=SeqID_34983
MSWADVLGGQLAEALGRPSRLLGPDSWRRPWRRWPGCGADVVLRSREPPTALTSEARSDFAEGVVDAEGAAAPPPSRSEPAGSVYLVVRDSANDVVEKARKIILAERFPSIKTCSVSGIAYPSVSYLSQKVTSEVSVSRRHRSPSARSALAAYVYSVVFRIPLSK

SEQ ID NO: 76763 - protein, 459 aa, Zea mays
  Coding DNA Sequence Number=SeqID_34984
WGEASRAAASAPPSASRIFIILDGAESEPRRGRRIAAAQLGCSISSSVRAMVAPHTGQPRPGLPRADSRARGSSSTSCAARAALMFWGGSGEGRSEDLLMRFGAPGARWCGVEVVAAGEGFSADEIANSACTPGPPSPDLNGGFLSFVGESPSAAASAQKPLLQLFRHPGRRSLSLLPERAAVSHLEPYRPAGPPMWGVVRTRGGGTGVPFVMAPRVPVFVHCGCRGLNMNPRPLFDEPELEAAVSAWTEAELARKEDFVGRSLTGPSTGGTGAGVELPRPWAGLMSSGDSWLRLRGDRPSRLLEPDSWRRPWRRWPGRGADVVLQSGDPLTMLSFEAQSGFAEGGVDAEGAAAPPPSRSEPTGSVYLVVIVCPSESYFSQKVMSEDSANDVVEKARKIVSAERSPSIKTCSVSGIAYPSVSYLSQKDPTFEVVKKHERRSRRKTFFEENFDAEGVPPF

SEQ ID NO: 76764 - protein, 325 aa, Zea mays
  Coding DNA Sequence Number=SeqID_34985
  Gene Ontology: Mol. function=structural constituent of ribosome; Cellular component=ribonucleoprotein complex; Biological process =translation
  Homolog annotation: Hit_ID=P42795; Match level="QueryCoverage=54%, HitCoverage=97%, E-value=5e-82, Identity=87%"; Hit description=60S ribosomal protein L11-1
  Pfam annotation: Domain name=Ribosomal_L5; Domain location=152-205; Score=96.9; E_value=5.9e-26; Accession=PF00281.9; Description =Ribosomal protein L5
  Pfam annotation: Domain name=Ribosomal_L5_C; Domain location=209-308; Score=216.6; E_value=5.5e-62; Accession=PF00673.11; Description =ribosomal L5P family C-terminus
  Pfam module annotation: Pfam domain module=Ribosomal_L5::Ribosomal_L5_ C; Domain location=152-205::209-308
MGGHTAAVSSFGEKGKFLISGGNDASVKLWDWSKGFYSETNSKVDLVLDIDVKKKQSVMHLDAVTELADVHLFCSLRQGFPRSSWSAVIRSEASGNAVASPGTVIKRSKEELITFFRDIQTSIAECSRKASKRTRKQPPDLFQEASEKKQSNPMREMKVQKLVLNISVGESGDRLTRAAKVLEQLSGQSPVFSKARYTVRSFGIRRNEKIACYVTVRGEKAMQLLESGLKVKEYELLRRNFSDTGCFGFGIQEHIDLGIKYDPSTGIYGMDFYVVLERAGYRVARRRRCKSRVGIQHRVTKEDAMKWFQVKYEGVILNKAQANTS

SEQ ID NO: 76765 - protein, 425 aa, Zea mays
  Coding DNA Sequence Number=SeqID_34986
  Homolog annotation: Hit_ID=P42795; Match level="QueryCoverage=41%, HitCoverage=97%, E-value=7e-82, Identity=87%"; Hit description=60S ribosomal protein L11-1
  Pfam annotation: Domain name=Ribosomal_L5; Domain location=252-305; Score=96.9; E_value=5.9e-26; Accession=PF00281.9; Description =Ribosomal protein L5
  Pfam annotation: Domain name=Ribosomal_L5_C; Domain location=309-408; Score=216.6; E_value=5.5e-62; Accession=PF00673.11; Description =ribosomal L5P family C-terminus
  Pfam annotation: Domain name=WD40; Domain location=95-131; Score =20.4; E_value=0.0063; Accession=PF00400.22; Description=WD domain, G- beta repeat
  Pfam module annotation: Pfam domain module=Ribosomal_L5::Ribosomal_L5_ C::WD40; Domain location=252-305::309-408::95-131
ITGGLDSKLAAWDFSKGRTLFSIDYVAVSEEGILGGLYKVCAVARGDGAVDVVDLEYELAPAKSKGPPRAAILTTRSKGAELGDGSCNQSRAKRIHLDYTMGGHTAAVSSFGEKGKFLISGGNDASVKLWDWSKGFYSETNSKVDLVLDIDVKKKQSVMHLDAVTELADVHLFCSLRQGFPRSSWSAVIRSEASGNAVASPGTVIKRSKEELITFFRDIQTSIAECSRKASKRTRKQPPDLFQEASEKKQSNPMREMKVQKLVLNISVGESGDRLTRAAKVLEQLSGQSPVFSKARYTVRSFGIRRNEKIACYVTVRGEKAMQLLESGLKVKEYELLRRNFSDTGCFGFGIQEHIDLGIKYDPSTGIYGMDFYVVLERAGYRVARRRRCKSRVGIQHRVTKEDAMKWFQVKYEGVILNKAQANTS

SEQ ID NO: 76766 - protein, 625 aa, Zea mays
  Coding DNA Sequence Number=SeqID_34987
  Homolog annotation: Hit_ID=Q75GQ8; Match level="QueryCoverage=62%, HitCoverage=93%, E-value=9e-16, Identity=38%"; Hit description =Expressed protein
MVGSGAGATRRARALGAKICGAELGATRDSHVTKLGATGCGAELCYLGATTCGAELRARRGLVTDSPSANVRQELNEQTRGVRNKRAQDEGINRHGSTASALAHAKVVSNTSFSNGFTSEVLFQNELEEREHQTAPKSQHPRPARRRPPMLAVAGDGKGRRRSVLPKERPSGRLIRLLAALRPSRAGPLPVQTGFPTSLADLVVKNHGRLKKHPSPSSKRGAAASPSPSPLPSPSTPTSPSLFPPAESPPPPTTADAVSPSDRPRPDLPPAQPPRRGKGSGFGPGLGLGLGFLAVSGVVASLALLVIWSKVVAAVTVASFSLYLLESVRSSSLPRRRPRAVVTERRLALDGRGRVSPIREVDAATEPSRPSCCSDSDRESDGRMLLVEESGGVLDESSNLRPKAKKKSWKKLLASSKKLHRGRRSKEAGSSGCDGDGDGSREGDDTARGGGNAKAADSSGSRRGAPSEIGAAADEAAAKEADSSRGSRGSQCVEVDAGHVEIDASVDDLIEEEEEEQAGIRSPALVLVAIVLVGLVAGKVVALAVTVLCSAFLSSVQRSPCACGQTDMALWGSFRMAKMMEPNVPRHCGSFVALMTEIMRIAMRPWWGNLKCILSCPVVGVGSGR

SEQ ID NO: 76767 - protein, 102 aa, Zea mays
  Coding DNA Sequence Number=SeqID_34988
MPERGDSGRAGGDSGAWARRPAVSSKSSEQGGWPELGGGRAAAAISGAWERRRALGAKICGAELGATEDSHVTKLGATGCGAELCYLGATVYGAELRVQNCI

SEQ ID NO: 76768 - protein, 85 aa, Zea mays
  Coding DNA Sequence Number=SeqID_34989
GRWSAELGRSAAGRPAELAAAASGARGGRREELKGGARGGAGAGASGSGLGAKICGAELGATQDSHVTKLGATACGAELRVQNCI

SEQ ID NO: 76769 - protein, 136 aa, Zea mays
  Coding DNA Sequence Number=SeqID_34990
  Homolog annotation: Hit_ID=Q3LRV3; Match level="QueryCoverage=29%, HitCoverage=24%, E-value=3e-09, Identity=70%"; Hit description =Polymerase
MPEGLKNAGSNFSHLTKKVLKNQVGRNVFTYVDDVIVARTFHPSDRQYVHRRCENAEVSDALQIGPPSSNSLQGKVPDDGSVLRSSGESLYRPIEAMTDAPERQTPNWIYPKPFPQLNCIQGQLWSSGHGGREHGG

SEQ ID NO: 76770 - protein, 69 aa, Zea mays
  Coding DNA Sequence Number=SeqID_34991
MKGSTFSNHFCKTESLIIEKPYLDSLNQHTLESLFFSRVRKRQIFVASVLRWYQRKNARNEVREERILH

SEQ ID NO: 76771 - protein, 69 aa, Zea mays
  Coding DNA Sequence Number=SeqID_34992
MKGSTYSKHFCKTESLIIEKPSLDSLNQHTLESLFFSRVRKRQIFVASILRWYQRKNARNEVREERILH

SEQ ID NO: 76772 - protein, 69 aa, Zea mays
  Coding DNA Sequence Number=SeqID_34993
MKGSTFSKHFCKTESLIIEKPYLDSLNQHTLESLFFSRVRKRQIFVASVLRWYQRKNARNEVREERILH

SEQ ID NO: 76773 - protein, 241 aa, Zea mays
  Coding DNA Sequence Number=SeqID_34994
MWRLGDGRYRGEGSGSRGGEKSGRAVLPSLVTSIHLGEGASRRCSSAEPAKLGSKRSCSSGSGGGPLSVVGGKEVARDETKIEGSGATVGVRRRRTAIAKKLRRSTAPTKEGAEKRKRISSSPSSSSSSRSGAPDPKRKRVVEERCADIVDVVHGAFQPVSGPVLNEMNRALVQIEDLVNDLDQLALETDWEMEHMAPSPIAESSQTEDELLIDYDSELNNDDTVGYDDGRDYSTDDTYPY

SEQ ID NO: 76774 - protein, 129 aa, Zea mays
  Coding DNA Sequence Number=SeqID_34995
MWRLGDGRYRGEGSGSRGGEKSGRAVLPSLVTSIHLGEGASRRCSSAEPAKLGSKRSCSSGSGGGPLSVVGGKGGGPRRDKDRRLGCNRRCSSPSNRHREEAEKIHGTDEGRCGETQAHLVVAIVIVFQ

SEQ ID NO: 76775 - protein, 289 aa, Zea mays
  Coding DNA Sequence Number=SeqID_34996
MPSIRGTFLRIASFAFVFASDIVEILRLLFASTRSGALPPPWPWAISSGSLSIAASKLSAAAMDDLVRPALHRNSQLEALHRGHGRPRRAQSFPSQPPSSPPWPWTTSSDQHSITTRSSPPRPWATSSSSKLSVMASKLSVGTVHMIDGEASLLKVRELHHRGRHSLGHSVERSTAGSAVRILLTSPCCRKGLRAIGVMAHAGHHHYPSPGVGRGRDFSRDRGRGRVWGSGEAETSSRGWSLRLGEAEASSRGRSMRSGEAELPVAPKAELGDSKEEGQSDCGHFGLAD

SEQ ID NO: 76776 - protein, 42 aa, Zea mays
  Coding DNA Sequence Number=SeqID_34997
MAGSAARILLTSPCCRKGLRATSVMAHAGHHHYPSPGRCRGG

SEQ ID NO: 76777 - protein, 490 aa, Zea mays
  Coding DNA Sequence Number=SeqID_34998
MSSVRVQDMQQLGYFGGGVGRVPRAEEVPEPEGELVVFEAFFIAGLRLPAHRFVSEVLQKFEVQKRKIGYKIAQFGSCTFTPKSGKTSMEVVELVPCARNKWGNWWDYWFYVSEAEVEDHPGLPTAIMCSHYYVAYPPFEVAEDDENERALQIAARTSSGRDLVEEFIWYGVWPLAHGWALGEVCPREMPSLGGRKVRSPLFALDVRGRDPAAVVHEAEDGAVRIVGRYVPKTEAQRSWDIRGSNDRLNRAFELNRLPYGGYPGEDVVDRRGKKPAAMTEDDPAPEAAPATKKRKLGTAMGELGVSDSFAMELMGTCAAPGGRMSSPELRESSARMLEVTGGRWPKNVPIPRAAGEDFFTSRMARDLRVFPYGRNIAAVVSVVMTKDRQDAAQKRRMVVRMVDLVREVKRARGSAKAAASGSGKLVPTAKTAAPGGSKASTGEKDAAAGGTKPLPGGPSPAKLPPPGLRVADFGTNISVEDYLGDESLDS

SEQ ID NO: 76778 - protein, 97 aa, Zea mays
  Coding DNA Sequence Number=SeqID_34999
MEELIGEEDSRWSRGGNPSIGGDSELVWCDCNLCEEVEPFAEEPFTEKKGWGRGSEKVLSGACGRDEDGLGGAVGSDLARRFGLGAFSILNALRCNI

SEQ ID NO: 76779 - protein, 428 aa, Zea mays
  Coding DNA Sequence Number=SeqID_35000
  Homolog annotation: Hit_ID=Q69V57; Match level="QueryCoverage=9%, HitCoverage=11%, E-value=8e-09, Identity=78%"; Hit description =Putative fructose-bisphosphate aldolase
MKTKRRFGLGGAIGSDQVLLALRFGLGAFSILIAPRGDHVGLEKGGLVEDLMVADRLQDRGEDGLRGGGAGPDVVPAEVRRRRGRGHAGAPGRREGLREVQGNVANAGVGMVTTQRARKVATNSGMARRQRNLAPVSNCDTRGQERGNWGRGRSGERGQREPEGEGVNRGVSQVANVEAKLTKATNKARTRRWPQNALKPKADDGCVFFGTRAVRGIGPFEGLDHASPVPSLGQGQQSRSDRSHFAAPLTGLTEGQRRLRRSDCCAAQQSEADRQPGPASGTIGNSASPDPGLGLGLSPRRRRTPLRPTQGSDSSSAPEDGELRSARPRARTWAQPRKTANSAPPDPGLGLGLSPGRRRTPLRPTQGSDSGSAPEDGELRSARPRARTRAQPRKTTNSAPPDPGLGLSPGLRRRSLPRPSQGLGLCGG

SEQ ID NO: 76780 - protein, 92 aa, Zea mays
  Coding DNA Sequence Number=SeqID_35001
MSVHTPVKLPERGIEAYFAGEASPRSPELSTPPEYVDRIAVVWPVHSPPTRTPACARGPSDSGHPRRQAAPRCDRQSLPEPTLPFAGPISPP

SEQ ID NO: 76781 - protein, 49 aa, Zea mays
  Coding DNA Sequence Number=SeqID_35002
MDRAIPAIPAVKPHLAVTARTSPSQPCPSLDLSHRRDLGVKLFFSGNSY

SEQ ID NO: 76782 - protein, 243 aa, Zea mays
  Coding DNA Sequence Number=SeqID_35003
  Gene Ontology: Mol. function=triacylglycerol lipase activity; Biological process=lipid metabolic process
  Homolog annotation: Hit_ID=Q6K832; Match level="QueryCoverage=69%, HitCoverage=25%, E-value=7e-69, Identity=79%"; Hit description =Lipase class 3 protein-like
  Pfam annotation: Domain name=Lipase_3; Domain location=30-158; Score =42.2; E_value=1.8e-09; Accession=PF01764.16; Description=Lipase (class 3)
MEPQRVGDADGESRSAAAQSAPPPRAETHGTNQRSCGEVRALLQLGDPLGWLPLRRPIGMVAAARWIAKLSGPCLAQALQMYPDFKIKVVGHSLGGGTAALLTYVLREQKEFASTTCLAFAPGAAACMTWKLAESGVHFITTVINGADLVPTFSAALVDDLGSEVTASAWLNDFRHQIEQTRILSTFYRSASALGSRLPFMANAKARVAGAGAILRPVSTGTHVTFKASFVTPSSGSLVVFEF

SEQ ID NO: 76783 - protein, 647 aa, Zea mays
  Coding DNA Sequence Number=SeqID_35004
  Gene Ontology: Mol. function=triacylglycerol lipase activity; Biological process=lipid metabolic process
  Homolog annotation: Hit_ID=Q6K832; Match level="QueryCoverage=96%, HitCoverage=95%, E-value=0.0, Identity=81%"; Hit description=Lipase class 3 protein-like
  Pfam annotation: Domain name=Lipase3_N; Domain location=49-130; Score= 94.6; E_value=3e-25; Accession=PF03893.7; Description=Lipase 3 N -terminal region
  Pfam annotation: Domain name=Lipase_3; Domain location=183-326; Score= 102.2; E_value=1.5e-27; Accession=PF01764.16; Description=Lipase (class 3)
  Pfam module annotation: Pfam domain module=Lipase3_N::Lipase_3; Domain location=49-130::183-326
MATAAGAAALLYYTLNRRLQTERLNKEGECSDSRDVTPRAAQGSPSRSRVSRRDVRAPATWLETISTLSETLRFTYSETLGKWPIGDLAFGISFLLKRQGNLSVASIYAGNDSVELKGAEVIADLKYLLNLLTLCWHFSKKPFPLFLEATGYTTEDVLMQEPKAGILKPAFTILLDRDKKSILLLIRGTHSIRDTLTAATGAVVPFHHTIVQEGGVSDLVLGYAHFGMVAAARWIAKLSGPCLAQALQMYPDFKIKVVGHSLGGGTAALLTYVLREQKEFASTTCLAFAPGAAACMTWKLAESGVHFITTVINGADLVPTFSAASVDDLRSEVTASAWLNDLRHQIEQTRILSTFYRSASALGSRLPSMANAKARVAGAGAILRPVSTGTQVVMRRARSVAQAAWTRPALQLSSWTCIGPRRRNNISTSTVTSEEIIASTGGGSESTSLLTETTAETTETVTSEAVSEVVQSSVSVAVDAVDLVDDKGDSDDDIVDHHGDEDRMTDVELWQQLESELYRKREGEEDDIAEEMAESTIAEEVGGVAEDVLSETKEVHRFYPPGKIMHILFSSREEADRGEEPEDDVTDGEAQSSIGIFLTPRSLYGKLRLSKMMINDHYMPIYRRNIEQLIAELEKDSSDQIGCVRCS

SEQ ID NO: 76784 - protein, 319 aa, Zea mays
  Coding DNA Sequence Number=SeqID_35005
  Homolog annotation: Hit_ID=Q2QQD3; Match level="QueryCoverage=54%, HitCoverage=34%, E-value=4e-66, Identity=72%"; Hit description =Expressed protein
  Pfam annotation: Domain name=IQ; Domain location=48-68; Score=23.6; E_ value=0.0007; Accession=PF00612.17; Description=IQ calmodulin-binding motif
MGDLWTNIRVDLAKMQTTLQKVEQGLLQIKATVQHEQHQLALSARLQTSATVGIQAAARGFLARLRVREMRQQMVEAALVTVDLDTRGRDLACRTPSAATPGCYLQLRAWCSSMCSPFVQMAFMGSRWLHTCKSNARRVSALSYGVRNSDLIEVNKTEFMTPSAFIFLYENNLFLTFCNRTVAAWNFRGELVTSFEDHELWHPNCNTNNIYITAGHDLIISYCKVSKQRADCVDSEAGEVLSMGSINMSDIFTGKCVAKISPADPTLTIAPRRRGDDSRSTIRSTVPEALEDITALFYDEDRNEIYTGNSKGLVHVWSN

SEQ ID NO: 76785 - protein, 198 aa, Zea mays
  Coding DNA Sequence Number=SeqID_35006
MGDLWADIRANLTKMQASLLVVEQWLLQIKAAEQRGRQLALAARHQTLVVACLHAVARGLLVRQQIGPYQQMLKTTLVAVDLDAQGRDLALSDGHRQPCRPAVSKCEHGECRVSDRLQLYGSGGREGTPLVIDKGALLSTTTFRYRPPRGHLRCSLLRPPGGHPCAPLSSRWRPWDPGDCTRASPMRRGVRLILRGQK

SEQ ID NO: 76786 - protein, 151 aa, Zea mays
  Coding DNA Sequence Number=SeqID_35007
RLNHEHYAISSKLMFALTKYLSGTSFVDIRIETMDSENAKLRRALAHLIKVVEQCCADIVDVVHGAFQLVSGPVLNEMNRALVQIEDLAKDLDHLALEKDWEMEHMAPSPIATSSEIEDELLLDYDSELNPDDIVGYDDGRDYSTDDTYPY

SEQ ID NO: 76787 - protein, 266 aa, Zea mays
  Coding DNA Sequence Number=SeqID_35008
MWRNPDVRYPGSGSGSRGGEKSGAAVVPSLATSIEVGEGGSRRCSSAAPPKLGSKRPCSSGSGGRPLSVVGGKEVGADDSKIQGAGGSVGVRRRRTAIAKKLRRSTKPTKEAGEKRKRISTPPSSSSSIRSGGPDPKKKSFVDIRIETMDSENAKLRRALAHLIKVVEQCCADIVDVVHGAFQLVSGPVLNEMNRALVQIEDLAKDLDHLALEKDWEMEHMAPSPIATSSEIEDELLLDYDSELNPDDIVGYDDGRDYSTDDTYPY

SEQ ID NO: 76788 - protein, 303 aa, Zea mays
  Coding DNA Sequence Number=SeqID_35009
MRFRSEREDVTITADQIRQLFGFPVSTTRLHSLCYGTSDPPRRPHGGVAPGTAHVAALFRPPFTDGSRRSPADFTTAAKYLYELVRRTLLPRMGYREATTHIQLWLLGALVSHSEFDVVDFLICEIEDTVLDGIRARRQLPYAHYLCHIFAQLIQPPRFQSTLEASRLVFGSYRPAPEIPVPAYAPVFDTQAEDAALRQFDSQGAAADDDDDDDDDDDFGVPLPPPPPMPPRSHDHEAGSSRAAPAPPALDPALASILQTLTQQQQTLTQQQHTLTQQQALLAAEQAQHAGQAGCSSAAAYSG

SEQ ID NO: 76789 - protein, 231 aa, Zea mays
  Coding DNA Sequence Number=SeqID_35010
MGYREATTHIQLWLLGALVSHSEFDVVDFLICEIEDTVLDGIRARRQLPYAHYLCHIFAQLIQPPRFQSTLEASRLVFGSYRPAPEIPVPAYAPVFDTQAEDAALRQFDSQGAAADDDDDDDDDDDFGVPLPPPPPMPPRSLDHEAGSSPCCPCSSSFGPCSCFDSSDSHPAAADSHPSSSRLSPSSRLSWQPSRPVYLTVCSSMFSEHVGQAGCSSAAAYFRIGQRIGHS

SEQ ID NO: 76790 - protein, 1344 aa, Zea mays
  Coding DNA Sequence Number=SeqID_35011
  Homolog annotation: Hit_ID=Q6Z8M9; Match level="QueryCoverage=74%, HitCoverage=79%, E-value=1e-108, Identity=30%"; Hit description =Putative proton pump interactor
  Pfam annotation: Domain name=MAP7; Domain location=1094-1241; Score= -78.8; E_value=0.047; Accession=PF05672.2; Description=MAP7 (E-MAP -115) family
MTAEGTACNGAGEAPKAEFVPEKVVTASLEEKAAGEREGEDVGGPFVVVNGGDSDGHSDRGSDLGKASGEESSSEEEDVPGSNVAPDLAVGGDHGSARGEVSAQGAALGASSADGSGRASDGAEGGADEGKGEPSSDFDAEAAPQEDVGEEDGGAAALASSGCEPAITGADSEAAPAVDDEVEGKEGTVDGSAVADVAEAVVHQEVSTEHDDALTLPKSSASMESEVIREDNKEQSTADIVGPHEQGTCGASALVENEHLCADMRADSFVAVTEPDSQEDYAVESCMRDDVLICTESGSADIESEVNGKDSKQEQSNADVVEVIGQGVVRADALMANGHLCADIQADSSEAATKPDNIANESKLTEVAESGEDAAASGELDAIDASSQTNGHIYVASGADSFIIASESKSHSFETDGQETDQQEEEVPQTEAELLDGVLKPTERNCARSVEELIGEEVDTDGHPSVDGTADASGEQEAKPMQVEGEATCGILEFEEVDKDGEDSLCNDCMVGVVSSNEETELPMKERTDEAVPSVNVGESEQVTEDTSQDIMQGGLARGVFIGTIFVKPVSDPHVESSLVHKVKAEVHLVDEITAADLKAENMVEVKRTDREVDEIEVKAPGTHEIGNSSEVEPKEEFEMEVDDAVSLHEAAASASENGSEEKSSNIAVDQVEPVNLNVDELAVDDDQPSFNPGYGSAKSSDVAETKNVEAQVTEQKGNAHHASGEWHGDHTQVIGPQRIYIIKVPKFAGDDLWDKIQAAQAHLDQLTQERDAINRRRQKQKAICDEYREKFEAARQEEREARAAHGDKKNDLNSVRSVLEKLHQANSVEELDELIAKKERIMQHETISLKEEKLLIKEINELKSQRKQLSATMGSKAEINEAFDQKDHIHERHKVLKKDSDVLFSNLKVLEENTRKIQKSFADERTALRKLTEEHRAANEIRQKAYSDWTELRSEPSKKNEYFFKYRDARNAAENFRANGDINGLISHCNSQIERVMEIWNKNEDFRKQYVESNKVSTLKRLGTHDGRKLGPGEDPPVIPSRRPSNICPLSASSPEMITLASTPAPVLAAAAAVPSKENSFPALAAPQTSKRAKSKASGSSAQIKNKSVIVSEEEDLEQTLKEKAHQLELARKAEELDRKAEELARKEEELRKERDAAEKERLRMEQKAKAKEAEERKRRKAEKDKERAEFKARKEAEEREKLHYLIIHKDRPSMQQVPILIPTLFEHFQKKAKRDKKKGAAPADSSAIGDSHAAASATADTDSNASDNPREADVSQPAVAPRRPARPAAAIKQLNRLQPMPAPLRNRGRRKLRQYILIAAAVLTVLALFVAGNYIPRLRSHS

SEQ ID NO: 76791 - protein, 119 aa, Zea mays
  Coding DNA Sequence Number=SeqID_35012
MSGRSSLGRSSASVPKQRDVPKILQQGAEVADLRLLCADLRAEAAAARAEVQRRQSEFDQVANERDQSQGRAAEAESRAGALAADLAVAQAAASEQRARAGELESALDESTRALAGVAE

SEQ ID NO: 76792 - protein, 74 aa, Zea mays
  Coding DNA Sequence Number=SeqID_35013
MSSSTLRTEKGQEHDRLAPYPRRRASVDSRLRLWAEVAVATARVSVRAGVGRIRGGGSCSYALCREWGGAKVEA

SEQ ID NO: 76793 - protein, 61 aa, Zea mays
  Coding DNA Sequence Number=SeqID_35014
  Subcellular localization annotation: CTP_CleavageSite=12; ConfidenceScore=5.10e-01
MSSSTTHTKKARSMTDSRLRPWVGATATARVGVRAGVGRIRGGGACSYALYREWGGAEVEA

SEQ ID NO: 76794 - protein, 84 aa, Zea mays
  Coding DNA Sequence Number=SeqID_35015
MAKTMPLCESVSGLVSDEYGEEAHAPTPSAENRVVRRWRHEEREKRNMMVNEMVATETKTIIIVWRYKWSNGPCLANRSEARPI

SEQ ID NO: 76795 - protein, 139 aa, Zea mays
  Coding DNA Sequence Number=SeqID_35016
MARVIGIWKTSRKARLAEQLISPVVGSSKVAGSPVAAVQDASDDGARVVVLVAGSPVDSASDSLPPPVAATPAPAAEAKQESVSETEETKQAAAAAAAPATAAGGVQAMAVTVVRDVETGLDASTSDRDGDKPSWFTPK

SEQ ID NO: 76796 - protein, 124 aa, Zea mays
  Coding DNA Sequence Number=SeqID_35017
  Gene Ontology: Mol. function=transporter activity; Cellular component= integral to membrane; Biological process=transport
  Homolog annotation: Hit_ID=Q1T3F8; Match level="QueryCoverage=61%, HitCoverage=18%, E-value=2e-13, Identity=74%"; Hit description=Major facilitator superfamily MFS_1
MAVTVVRDVETGLDASTSDRDGDKPSWFTPKRLLVMFCIINMLNYIDRGVIASNGVNGTRKSCSGGTCTSGSGIHIYGWVVGVFVDICKPCKKFLFFIVGFVYRIQIWVYGVFKFGEFKFEENN

SEQ ID NO: 76797 - protein, 165 aa, Zea mays
  Coding DNA Sequence Number=SeqID_35018
  Homolog annotation: Hit_ID=Q69P80; Match level="QueryCoverage=27%, HitCoverage=28%, E-value=5e-10, Identity=73%"; Hit description =Putative COPT5
  Pfam annotation: Domain name=Ctr; Domain location=1-136; Score=-9.8; E_value=0.00015; Accession=PF04145.6; Description=Ctr copper transporter family
MAVRDFFQKEDEDEEVEAEELAVGGRSLRKLGDELTTILDLWMNQCSSREEAPSQPPPPSRHPAGSDSRTPLLAPAFAAVVGHWPARLAVAAMFGVNSGLGYLFMLAVMSFNGGVFVAVVVGLALGYLACSSGRTAGARRLERIRATIRVKVPTQSGARIKEMVS

SEQ ID NO: 76798 - protein, 1145 aa, Zea mays
  Coding DNA Sequence Number=SeqID_35019
MSSRFHHGGGDDHRVGDAGDAALARDIVTLHKALSLDPSTHRRRTLPLPSPSPVVTEQPRNKPRLKPSSSSSSSRKLLPSTPNSSSASTSSSSSSFWKKSLTAISHLGRRRLDFAFALHVHSVNGLPAALDGSAVSVRFRRMSVSASTRPVVAALGAAAFEEALTLRSPVYFSRGAKAVVKYEPRSFVVSVAASTLELGKHEVDLTRLLPLSFDDLEDGGDSGFGKWSSSFRLSGPARGARLNVTFSCSLLAGGVGSEQHKAVEVAGVRRGSMARPVSVQAPTPVPARSRDVRVLHEVLPSLRSARSLPFVGDGGLDARKEEVAALDCMEDGSPEAKHCTSVEVKKGDLVRPDGDCSTMEFNVVGHGVEVASYDPQRLKHVETSNEADQNEDPGFKIDEEVSFKPVLVCGDVAEDQTVGVKTEVAVCDVAVQRENVEDKHDGIIKANSLPTSALEAEDQLGADVELEDLECILNELLVAKPEEFESPVVEDKYSRRLSCTADSYKSDSRKGRSRSMDISTDSVANEFLDMLAIEHIPFGQPSDSDPESPRERLWKQFEKEALASDKAILGLDFDDGIEGPICENVVEDFDLSAMIHEAELELQNGSQPIDTKFRAKSLEDEETEALMRQFGLNEKSFQSSPPESRSGFGSPINLPPEQPLELPPLAEGLGPFIQTKDGGFLRSMNPALFKNAQNSCSLVMQASSPIVLPAEMGSGIMDILHGLASVGIEKLSMQANKLMPLEDVNGKMMQQIAWEAAPALESAERYDPLDYHSVDALVGGGGNAPSSKKKKCRCADLSSSLGGENASEYVSLEDLAPLAMEKIEALSIEGLRIQSGMSEEEAPSNISAKPIGEFSSLQGKCAENTWSLGLEGTAGLQLLDVKQSGEEVDGLMGLSITLDEWMRLDSGVVDEEEQYSDRTSKILAAHHAKSMELAAENRNGDRKNRRSGRRWGLLGNNFTVALMVQLRDPLRNYEPVGTPMLALIQVERVFVPPKPKIYSTVSDKGNSEQDDEEPKTEKVPDKALVTEEKAEELEDPIPQFKVTEVHVAGFKSEPEKKKPWGNQTQQQSGSRWLLAAGMGKGNKHPLMKSKAIVKPTKEAAGQAGDILWSISSRVHGAGTRWGELTGSKSHSRNPNIMLQKDKRFR

SEQ ID NO: 76799 - protein, 159 aa, Zea mays
  Coding DNA Sequence Number=SeqID_35020
  Subcellular localization annotation: CTP_CleavageSite=58; ConfidenceScore=5.21e-01
MPVGWSPHRMLSSGGSRRHELPWGKPPRPTPSVRAVVVPGEAADTAMALSPPDASLVSASTPAAVAADLPAEPSIALDVGMVGASPLAVVPDPPVPGPEEGADAVAEVGDRKPATLAEGEPSASMAMVPDVLTAGEPDALAEEHVTPRPVSGGGVLIPA

SEQ ID NO: 76800 - protein, 206 aa, Zea mays
  Coding DNA Sequence Number=SeqID_35021
MKTWSFFYNHTLESLFLSRMNQQEAPTGVGEFLRDFGVPVVLWRLLQEVGYTEAPKYQWSRTVLRGQPWYEVVLRIPERARKPSWPYWMFHAEGMTPWEGAQVAALEVLTTICYQRREEIQATSMRLFPAVALSDPLVYHHQARLMESIPIGQDSVESASARVLMAVLELQLTRGHSRQKWQQLYTGSYAAFKMMEKAKNIACTQA

SEQ ID NO: 76801 - protein, 185 aa, Zea mays
  Coding DNA Sequence Number=SeqID_35022
MESIPIGQDSVESASARVLMAVLELQLTRGHSRQKWQQLYTGSYAAFKMMEKAKNIACTQAQERLEETKVQAEQVIGLEHQVTELQMQYQADQNRIKELEHQLTNAHSKLEILSKQQEEVCLYAVAVRKDLKETMSFISHQDQAIKELNRAHPMEFQVAQRLVNHLQQAVHRLNVAFYPTPAPAD

SEQ ID NO: 76802 - protein, 239 aa, Zea mays
  Coding DNA Sequence Number=SeqID_35023
PVKRAVRRGSGAAVLDRHRCAAKLDAKAASRGFLLLHKVKKEGGGRAELLLGHGDVVGEGAGLGRRDGTARGQRRSTAMGETRAPCLMQPRTAEGGRRPGCYCCWAPAMEKPLRTGKKCSLLGRSVGARARGRIGSAGQGENGAESVTGEGRHGWGVGLHPLSRASARGFNRGAPWEENGAGCAPCWAPWKGEQRCCTWGGGCRELGVAAGCCVREKKAGKRQWRLGKMEGWECKNAKC

SEQ ID NO: 76803 - protein, 132 aa, Zea mays
  Coding DNA Sequence Number=SeqID_35024
MEKPLRTGKKCSLLGRSVGARARGRIGSAGQGENGAESVTGEGRHGWGVGLHPLSRASARGFNRGAPWEENGAGCAPCWAPWKGEQRCCTWGGGCRELGVAAGCCVREKKAGKRQWRLGKMEGWECKNAKCK

SEQ ID NO: 76804 - protein, 421 aa, Zea mays
  Coding DNA Sequence Number=SeqID_35025
MECELEELQFLGVVGIYRFSAEILRGPHCPLFACIAAAFALPLSALFLLHVAISHALFTHIDSDDTALDASSPGTDTQRRLLSRLASDWLALLLFKSAYLLALLLLSLLSVVASVYRQARRAHLPARALCRAPRLAEARRHVPRHLRAPLRLPRLRRARLRRPPRRRGQRLRPRGPARLPRRRQARNSVLMGHKVSFVAITLISMIAILTQSWIKFIALYLSHDSLEANIGHVSLEAIPRWETQSLARPRPSLGGRRSHASGGRHSQGSSKANQSCLARGQPHARDAVTSNERRSPHPRPPSDKRRSHASPEDTLRRGTQSLLARGHPRAGEAIKARLRHPRVGDAVALAQGHPRAGDTVMPRPRPTLGGRCNHDLPEATSQSQLTRGQPRSGDTVTPRPRPTSDERRSQASPTANLEWET

SEQ ID NO: 76805 - protein, 195 aa, Zea mays
  Coding DNA Sequence Number=SeqID_35026
MECELEELQFLGVVGIYRFSAEILRGPHCPLFACIAAAFALPLSALFLLHVAISHALFTHIDSDDTALDASSPGTDTQRRLLSRLASDWLALLLFKSAYLLALLLLSLLSVVAFGLPPSATRSPSRACSLSCPASGGGSPPRSSPPSRSSSPTTPSSCSSSSASSSPWTTAPASRACSPSSSPSSAEQCADGAQG

SEQ ID NO: 76806 - protein, 57 aa, Zea mays
  Coding DNA Sequence Number=SeqID_35027
  Gene Ontology: Mol. function=2 iron, 2 sulfur cluster binding; Cellular component=chloroplast; Biological process=chlorophyll biosynthetic process
  Homolog annotation: Hit_ID=Q8S7E1; Match level="QueryCoverage=98%, HitCoverage=18%, E-value=1e-16, Identity=53%"; Hit description =Chlorophyllide a oxygenase, chloroplast precursor
  Pfam annotation: Domain name=PaO; Domain location=3-57; Score=2.6; E _value=0.0047; Accession=PF08417.2; Description=Pheophorbide a oxygenase
MEFRLPCMVLSTIGISKPEKLEGKSTQQCSMHLHQVLNEDLRLVLGQQERMINGANV

SEQ ID NO: 76807 - protein, 85 aa, Zea mays
  Coding DNA Sequence Number=SeqID_35028
  Gene Ontology: Mol. function=2 iron, 2 sulfur cluster binding; Cellular component=chloroplast; Biological process=chlorophyll biosynthetic process
  Homolog annotation: Hit_ID=Q8S7E1; Match level="QueryCoverage=98%, HitCoverage=18%, E-value=1e-36, Identity=77%"; Hit description =Chlorophyllide a oxygenase, chloroplast precursor
  Pfam annotation: Domain name=PaO; Domain location=3-85; Score=111.0; E_value=3.6e-30; Accession=PF08417.2; Description=Pheophorbide a oxygenase
MEFRLPCMVLSTIGISKPEKLEGKSTQQCSMHLHQVHVCLPSSRNKTRLLYQMSLDFAPWLKHVLNEDLRLVLGQQERMINGANV

SEQ ID NO: 76808 - protein, 73 aa, Zea mays
  Coding DNA Sequence Number=SeqID_35029
MPVPRTARARTTAAPRTSRPVALTLRRDRRRLWQAKQATLHLRHDDRVKKGPGKGILRKGSFSVKKAGPEPSY

SEQ ID NO: 76809 - protein, 535 aa, Zea mays
  Coding DNA Sequence Number=SeqID_35030
  Homolog annotation: Hit_ID=Q6QP51; Match level="QueryCoverage=45%, HitCoverage=99%, E-value=2e-12, Identity=36%"; Hit description =Putative growth-regulating factor 1
MQAACNCTKGAHPFDFDASSMEAQAHTSWNRRAGYYVQKTAAPLAPAPRLLDYGTGVATRGNPAHGPAVPTRHAGHGSVSRGRRRDARELSHGVKAKRPFLERLAHAQRLPREPLVPSQLAPRKGSTAASEHPGSAPTTGWPPDGFDSRPRARRVRDDSGYVRYITKARSTLPRNGRPRQIHASPEGLLKQRAHPRLARGPARVGFTEKQPWPDRLASRPDRRSIQCKDRLTPYPDARFPVDKAEQPSLASGAIGISASPDPRARTQPRLGRRSPPRPTPGLGLSLNSGRRSPPRPTPGLRLDLDSGRRSPSRPTPGLGLSLNSERRSPPRPTPGLGLSLDLRGVTTSLRPTTPQREAIITLPLASLGYGEQDRRPIWLAPVKQVMMAPRVLHDNGGSQPPTEARIRQQGSDSPDSCASTGLKRSSNGHDGHMNRAPTPLRQPRRHGSHTKKKVAAQENGEPHAPCLSLPRERALVTPYCKRIRPGRRTARGRGFPLTVFPPCVSVSRRPIWARTRSDNLLVGPGTPRGQNADIP

SEQ ID NO: 76810 - protein, 226 aa, Zea mays
  Coding DNA Sequence Number=SeqID_35031
MVCLGLGGRRKHTLQDNPILQARILTVEGSSSTLGVNYTFGKESGSSRRLGQSPRGLGQLSPEDISPARGLGNSIPATVPPVDDPARLWPTKSSFRANSASVRADTATPGFGSSKSGRGVPLTKQEKPRTARPTEPRDSYASGIRIPHLYEQPHTIGGPAEQQKADGRLTVARSSSSDNDPRYGWPNYSSDGLRADAAATVPSPTPTLERRGQVQRAGGPKRGWWR

SEQ ID NO: 76811 - protein, 92 aa, Zea mays
  Coding DNA Sequence Number=SeqID_35032
  Subcellular localization annotation: CTP_CleavageSite=65; ConfidenceScore=5.72e-01
MASVISFSALGSLAQLALARLPVPLSSRGQLSRRAHRRTAPRRRTLLGRRSCSGAVLPLHRYGASARSVGVGEGKVAAASALRPSLLQFDHP

SEQ ID NO: 76812 - protein, 69 aa, Zea mays
  Coding DNA Sequence Number=SeqID_35033
  Gene Ontology: Mol. function=heat shock protein binding; Biological process=protein folding
  Homolog annotation: Hit_ID=O65160; Match level="QueryCoverage=72%, HitCoverage=12%, E-value=1e-12, Identity=70%"; Hit description=DnaJ -related protein ZMDJ1
METDECEETTMHDVNNIEEEMHRKQAHAAHEAYEEDDEMPGGAQRVQCAQQIQNRKRPVGRSIGMRQSI

SEQ ID NO: 76813 - protein, 325 aa, Zea mays
  Coding DNA Sequence Number=SeqID_35034
  Homolog annotation: Hit_ID=O65160; Match level="QueryCoverage=49%, HitCoverage=38%, E-value=2e-67, Identity=80%"; Hit description=DnaJ -related protein ZMDJ1
  Pfam annotation: Domain name=DnaJ_C; Domain location=84-196; Score= -5.1; E_value=4.7e-06; Accession=PF01556.9; Description=DnaJ C terminal region
MLLFRHVGKTSSIPPPAGGLSAAVVVVARRGKEYHVIAAVEGHELKTPETEHRPGLEKLLETTHLELDGKLFVNTQQAPTWRTNYRRFDPGGSLDRRKDHSKFKRKGEDLLYEHTLSLTEALCGCQFVLTHLDNRQLLIKSDPGEVVKPDQFKAINDEGMPIYQRPFMKGKLYIHFTVEFPDSLAPEQCKALETVLPPRLSSKLTDMETDECEETTMHDVNNIEEEMHRKQAHAAHEAYEEDDEMPGGAQRVQCAQQIQKQLVRIFVGGNKERNCIHIIPVKLLLLLVLYGILPTSTSLNQVPAVVFNCETNQEALLELKVVLAS

SEQ ID NO: 76814 - protein, 103 aa, Zea mays
  Coding DNA Sequence Number=SeqID_35035
  Gene Ontology: Mol. function=diphosphate-fructose-6-phosphate 1 -phosphotransferase activity; Cellular component=6-phosphofructokinase complex; Biological process=glycolysis
  Homolog annotation: Hit_ID=Q9SYP2; Match level="QueryCoverage=52%, HitCoverage=8%, E-value=9e-22, Identity=89%"; Hit description =Pyrophosphate-dependent phosphofructokinase alpha subunit
MGIYTLIFSPFIRKQIETEKLLAQLVETEMNIHLKEDTYKGKKFNAICHFLGYQARGALPSKFDCDYAYASPSPAHLVKNIDCCWFNTWVVGLRFWGMCATTS

SEQ ID NO: 76815 - protein, 613 aa, Zea mays
  Coding DNA Sequence Number=SeqID_35036
  Gene Ontology: Mol. function=diphosphate-fructose-6-phosphate 1 -phosphotransferase activity; Cellular component=6-phosphofructokinase complex; Biological process=glycolysis
  Homolog annotation: Hit_ID=Q41140; Match level="QueryCoverage=99%, HitCoverage=100%, E-value=0.0, Identity=71%"; Hit description =Pyrophosphate--fructose 6-phosphate 1-phosphotransferase alpha subunit
  Pfam annotation: Domain name=PFK; Domain location=147-398; Score= -118.3; E_value=1.7e-05; Accession=PF00365.10; Description =Phosphofructokinase
MDSDYGVPRELSEVQKKRTLYQPELPPCLQGTTVRVEYGDAAIAADPAGAHVISHAFPHTYGQPIAHFLRKTAVVPDAKVISEHQAVRVGIVFCGRQSPGGHNVVWGLYEAIKAHNQNSKLIGFLVINVDGILKIFDPTFMGLFRQTSSICRHFLGGSDGLLAQRTLEITDKVIASYKNQGGYDMLGRTKDQIRTTEQVNGAMASCQALKLDALVIIGGVTSNTDAAQLAETFAEAKCATKVVGVPVTLNGDLKNQFVETTVGFDTICKVNAQLISNVCTDALSAEKYYYFIRLMGRKASHVALECALQSHPNMVILGEEVAASKLTIFDITKQICDAVQARAEKDKNHGVILIPEGLVESIPELYALLQEIHGLHGKGVSVENISSQLSPWASALFEFLPPFIRKQLLLHPESDDSAQLSQIETEKLLAQLVETEMNRRLVLGHVCYHIIAAGLNSYMATVTNLKNPVNKWRCGATPISSMMTVKRWSRGPSATQIGKPAVHMASVDLKGKAYDVLRQNSSSFLLEDVYRNPGPLQFEGPGADSKPISLCVEDQDYMGRIKKLQEYLEKVKRIVKPGCSQDVLKAALSAMSSVTETLNIMTSSSTGQTPLSH

SEQ ID NO: 76816 - protein, 85 aa, Zea mays
  Coding DNA Sequence Number=SeqID_35037
MWVVTQSELVRSNPRVMKAGEHRDDKEGECFVRIGHGGGLTPSGITVKVRTCEERKRFGIRVSRRKRRSGKSYDCSQPCLWLLDR

SEQ ID NO: 76817 - protein, 118 aa, Zea mays
  Coding DNA Sequence Number=SeqID_35038
MWVVTQSELVRSNPRVMKAGEHRDDKEGECFVRIGHGGGLTPSGITVKVRTCEERKRFGIRVSRRKRRSPPGTSNCITFESQRIGDASLSHRRLKPIAPLVGYSGHSKLSKREHVAPS

SEQ ID NO: 76818 - protein, 102 aa, Zea mays
  Coding DNA Sequence Number=SeqID_35039
MKAGEHRDDKEGECFVRIGHGGGLTPSGITVKVRTCEERKRFGIRVSRRKRRSPPGTSNCITFESQRIGDASLSHRRLKPIAPLVGYSGHSKLSKREHVAPS

SEQ ID NO: 76819 - protein, 363 aa, Zea mays
  Coding DNA Sequence Number=SeqID_35040
  Gene Ontology: Mol. function=DNA-directed RNA polymerase activity; Cellular component=chloroplast; Biological process=transcription
  Homolog annotation: Hit_ID=Q9SYW4; Match level="QueryCoverage=62%, HitCoverage=29%, E-value=1e-112, Identity=73%"; Hit description=T7 -like RNA polymerase
MDRFEGAQEHNRVSKRSLKNWVVNISDVRATRTRPSPGVEQRGRDREAAEHGQPPSAWLRSSPVKHFARGGADLFSVGGGRRLKKKQWVIDHLVHEGFESTARHVDIPYLPMLVPPKKWKGVNRRVHDVVETIWSQGGGIAGLVDKANNQRTMMKCRNGSTSIKKAKKTNRELHAERCDTELKLSVARKMREEDGFYYPHNLDFCGRAYPMHPHLSHLGSDLCRGVLEYAEGRPLGKSGLCWLKIHLANKYGGGIEKLSHEGKLAFVENQLFDIFDSAANPVDGNYWWTNAEDPFQCLAACMDLSDAPFRTLGVISTYVYVVLVQLAMVESMPVSQFVAVSVVVATGLILNFINYFGWLSRTL

SEQ ID NO: 76820 - protein, 313 aa, Zea mays
  Coding DNA Sequence Number=SeqID_35041
  Gene Ontology: Mol. function=DNA-directed RNA polymerase activity; Cellular component=chloroplast; Biological process=transcription
  Homolog annotation: Hit_ID=Q9SYW4; Match level="QueryCoverage=72%, HitCoverage=28%, E-value=1e-114, Identity=90%"; Hit description=T7 -like RNA polymerase
MRGLKALLGMLIYPTSLCWYLRRNGKVLACCEALDILGSTKWRVNRRVHDVVETIWSQGGGIAGLVDKANNQRTMMKCRNGSTSIKKAKKTNRELHAERCDTELKLSVARKMREEDGFYYPHNLDFCGRAYPMHPHLSHLGSDLCRGVLEYAEGRPLGKSGLCWLKIHLANKYGGGIEKLSHEGKLAFVENQLFDIFDSAANPVDGNYWWTNAEDPFQCLAACMDLSDAPFRGMLTGLLGNLSPLSYFANKRETKAVIVQTLGVISTYVYVVLVQLAMVESMPVSQFVAVSVVVATGLILNFINYFGWLSRTL

SEQ ID NO: 76821 - protein, 205 aa, Zea mays
  Coding DNA Sequence Number=SeqID_35042
MMVTRSAITKRKGWRRKGQEGRFSLLWLKSLGLRKPKKEAGSGAKNRHQTLSQGPGKGDTPKRILPREGTRLRASLLIRGSKAGPPKGFNSRLRSRGPYTHYWSEVRRPAPRRVPRPPQATRAPRPLLIRGSKAGPRRVHSRLRRRARDDQGYVRYITKARAALPSSPETPCSAPIEGSGAALANPAPAKPLTASTYQPENLGPD

SEQ ID NO: 76822 - protein, 164 aa, Zea mays
  Coding DNA Sequence Number=SeqID_35043
  Homolog annotation: Hit_ID=Q6QP51; Match level="QueryCoverage=24%, HitCoverage=18%, E-value=2e-07, Identity=65%"; Hit description =Putative growth-regulating factor 1
MEKGHGSRGEMMVTRSAITKRKGWRRKGQEGRFSLLWLKSLGLRKPKKEAGSGAKNHHQTLSQVYKDQGTGKGGYPEKDPSPWRNQAPSLLTDQRFEGWPPEVFQQPPQIAWALHPLLVRGSKAGPPKGSTAASGYPGSTPITDQGFEGWPPKGSQPPQTPSEG

SEQ ID NO: 76823 - protein, 77 aa, Zea mays
  Coding DNA Sequence Number=SeqID_35044
MVTRDGDLRFDGGEASQAAASTPPSASRIFVIQAKMKDEASRGAATAWVGCLFLPPRLGENGIPQSHGDFLQPCWDR

SEQ ID NO: 76824 - protein, 131 aa, Zea mays
  Coding DNA Sequence Number=SeqID_35045
MVSPVSCKRVIRVDVRAPFVGGRLGAQRHAQKYLRKSEKRVHLAQLHAACMAARPSRPLVWAKVGGRLGGPWSVLEKTQPAAFGAHPGCSPPPVATQDGDLQFDGGESVPGCGLYPSLGLKDFHHPGQDEG

SEQ ID NO: 76825 - protein, 150 aa, Zea mays
  Coding DNA Sequence Number=SeqID_35046
MTDHALDTQQRRCQQRETVLLHATIEWQMFNVLSTRALGARSWTLELTDVWSGIKEEMFLIVFTLIKLMNLVHVITSKPFGGCRREALATGCCTPTANRGHRAGGQKQPATTVGHRSNPSFEDNNDNDVVPKPVVAVAEHLHVPRCSMIV

SEQ ID NO: 76826 - protein, 233 aa, Zea mays
  Coding DNA Sequence Number=SeqID_35047
  Homolog annotation: Hit_ID=Q1XBU3; Match level="QueryCoverage=17%, HitCoverage=12%, E-value=3e-15, Identity=97%"; Hit description=Beta -carotene hydroxylase
  Pfam annotation: Domain name=Carotene_hydrox; Domain location=47-146; Score=-39.1; E_value=5e-06; Accession=PF03897.5; Description=Carotene hydroxylase
SNPSFEDNNDNDVVPKPVVAVAEHLHVPWSKEVTLDDKDLRYGAEKELGANGHNLDRCDSVQEDEVSMAYMFVHMFGITLFGMAYMFVHDGLVHRCFPVGPIANVPYFRRVAAAHKGDNDYLDMVFTQVSLEGVEAGRGGEGKDALFVELWKACAGPLSCVPPLGQKVYYLPQGHIEQVRQTGREGALAMPVSRYCWDGFPVRQVVRGDVPDGRALRSAITIRELPVDGERIC

SEQ ID NO: 76827 - protein, 168 aa, Zea mays
  Coding DNA Sequence Number=SeqID_35048
  Gene Ontology: Mol. function=hydrolase activity; Cellular component =cytoplasm; Biological process=protein amino acid dephosphorylation
  Homolog annotation: Hit_ID=Q9LKF8; Match level="QueryCoverage=65%, HitCoverage=35%, E-value=7e-58, Identity=96%"; Hit description =Serine/threonine protein phosphatase PP2A-5 catalytic subunit
  Pfam annotation: Domain name=Metallophos; Domain location=82-167; Score=34.4; E_value=4.1e-07; Accession=PF00149.18; Description =Calcineurin-like phosphoesterase
MADFDTHGYFIGSFVMSIGYGGHGGYEYDFMCPLGMLPTAIPMQDTTRNGGSLFGECRKVKALCEKAKEILMQESNVQPVKSPVTICGDIHGQFHDLVELFRIGGKCPDTNYLFMGDYVDRGYYSVETVTMLVALKVRYPHRITILRGNHESRQITQVYGFYDECLRK

SEQ ID NO: 76828 - protein, 340 aa, Zea mays
  Coding DNA Sequence Number=SeqID_35049
  Gene Ontology: Mol. function=hydrolase activity; Cellular component =protein phosphatase type 2A complex; Biological process=negative regulation of tyrosine phosphorylation of Stat3 protein
  Homolog annotation: Hit_ID=Q9LKF8; Match level="QueryCoverage=80%, HitCoverage=88%, E-value=1e-156, Identity=95%"; Hit description =Serine/threonine protein phosphatase PP2A-5 catalytic subunit
  Pfam annotation: Domain name=Metallophos; Domain location=82-277; Score=135.9; E_value=1.1e-37; Accession=PF00149.18; Description =Calcineurin-like phosphoesterase
MADFDTHGYFIGSFVMSIGYGGHGGYEYDFMCPLGMLPTAIPMQDTTRNGGSLFGECRKVKALCEKAKEILMEESNVQPVKSPVTICGDIHGQFHDLVELFRIGGKCPDTNYLFMGDYVDRGYYSVETVTMLVALKVRYPHRITILRGNHESRQITQVYGFYDECLRKYGNANVWKTFTDLFDYFPLTALVESEIFCLHGGLSPSIENLDSVRSLDRVQEVPHEGPMCDLLWSDPDDRCGWGISPRGAGYTFGQDISEQFNHTNNLKLVARAHQLVMEGYNWAHEQKVVTIFSAPNYCYRCGNMASILEVDDCNSHTFIQFLQSRGTGQKDRSTICTCVA

SEQ ID NO: 76829 - protein, 100 aa, Zea mays
  Coding DNA Sequence Number=SeqID_35050
MKAKSHQQPIILRSTCKNYATSKAEYTNTQLDLPGYNGSSSLIGCEKQTIRIEFLSLQVTALVPTITGMGDHVSGRVRGYVHCQVHSGIRTLILIPIFIS

SEQ ID NO: 76830 - protein, 72 aa, Zea mays
  Coding DNA Sequence Number=SeqID_35051
MDTSMLGRVAALLIRDLGRSRVIFLALARGPWGRVVYEMKIGIRINVRIPVSRYFLGRLVDGVTWPSSLPPG

SEQ ID NO: 76831 - protein, 221 aa, Zea mays
  Coding DNA Sequence Number=SeqID_35052
  Subcellular localization annotation: CTP_CleavageSite=34; ConfidenceScore=5.48e-01
MGDARSPFALSLGGTQLRGSRYLSAIVRLQGFSSCSPAAPLRRRSPKTVTTSPWMGRGKPGCDLGPALSFKDVHHPCWGGERGGPGLYLPRGPVGRLFFQLQVVATILQLCGGGVLQPCRGRRTVAAQLGCNIPPSSSLSWRGRERGPAGALWSGSLFGFDGWFASLEWEREREPSGGRVRPGTMAAAAEVAGESPGTRRPAGSPVWRLFIPAGTEPEFRL

SEQ ID NO: 76832 - protein, 130 aa, Zea mays
  Coding DNA Sequence Number=SeqID_35053
  Subcellular localization annotation: CTP_CleavageSite=40; ConfidenceScore=5.09e-01
MQPGCTPPPAVTQDGDLRLDGSYTVPGSRTRVASEPLAAPASATAAGRGSSAGGIARAGHGPTSNSMAFCPSLPHEFGHGRGPLGSSIRPEVSAAAVRPPGAEVVVVAAAGAGDDAPFVGLLLLRRPSPM

SEQ ID NO: 76833 - protein, 131 aa, Zea mays
  Coding DNA Sequence Number=SeqID_35054
  Subcellular localization annotation: CTP_CleavageSite=40; ConfidenceScore=5.09e-01
MQPGCTPPPAVTQDGDLRLDGSYTVPGSRTRVASEPLAAPASATAAGRGSSAGGIARAGHGPTSNSMAFCPSLPHEFGHGRGPLGSSIRPEVSAAAVRPPGAEVVVVAAAGAGDDAPFVGLLLLRRPSPME

SEQ ID NO: 76834 - protein, 189 aa, Zea mays
  Coding DNA Sequence Number=SeqID_35055
  Homolog annotation: Hit_ID=Q0PJJ0; Match level="QueryCoverage=25%, HitCoverage=18%, E-value=2e-09, Identity=64%"; Hit description=MYB transcription factor MYB118
MSYLFSHVWTKIEEHVSTKTTVQIRSHAQKYFLKVQKLGLVAGPPPMYPRRHFATQQQQSSVAGSSVAAIPDLAALIEGMGHAVTDDKVSCMMEEVDADDEGCINLPVFAALMEFASAAAAVEDDVDHAFMVFYTDDNDLITLAELACVLRSLGGACHHRLDLTPSTTPLVVLGVRFFNDDAFLPVLGG

SEQ ID NO: 76835 - protein, 290 aa, Zea mays
  Coding DNA Sequence Number=SeqID_35056
  Homolog annotation: Hit_ID=Q0PJJ0; Match level="QueryCoverage=14%, HitCoverage=15%, E-value=7e-07, Identity=65%"; Hit description=MYB transcription factor MYB118
  Subcellular localization annotation: CTP_CleavageSite=3; ConfidenceScore=5.47e-01
MQSASRRSPSAISHRGAPSILACAPLSFTKPRSLQSPSIGDTILAGKSRLAMQSPMDPIGPVAVPVIPEASAACLPTPTCHLVLPAEMSRDPPPRKDHHTIGVSCFAYKALRIEEHVSTKTTVQIRSHAQKYFLKVQKLGLVAGPPPMYPRRHFATQQQQSSVAGSSVAAIPDLAALIEGMGHAVTDDKVSCMMEEVDADDEGCINLPVFAALMEFASAAAAVEDDVDHAFMVFYTDDNDLITLAELACVLRSLGGACHHRLDLTPSTTPLVVLGVRFFNDDAFLPVLGG

SEQ ID NO: 76836 - protein, 122 aa, Zea mays
  Coding DNA Sequence Number=SeqID_35057
  Gene Ontology: Mol. function=motor activity; Cellular component =myosin complex; Biological process=auditory receptor cell differentiation
  Homolog annotation: Hit_ID=Q7Y1D5; Match level="QueryCoverage=56%, HitCoverage=4%, E-value=1e-22, Identity=75%"; Hit description =Putative myosin heavy chain
MTKKERYIFMSVSGYRDDKKKKAKTVGEALNKLVLEAFGNAKNYQEQFKSFWNFFVEIQFDANGKISRAAIRAYLVERSRVCQISDPERNYHCFCMLCSAPSELDTMIGLGVSPATLFMCNI

SEQ ID NO: 76837 - protein, 256 aa, Zea mays
  Coding DNA Sequence Number=SeqID_35058
  Homolog annotation: Hit_ID=Q7Y1D5; Match level="QueryCoverage=42%, HitCoverage=6%, E-value=5e-24, Identity=75%"; Hit description =Putative myosin heavy chain
REAQRRGRHLHLSVSAVAINLWRAGRAPKNSSLAWPLVLPIFNGAAYIYEAHVRHYFKIGNYVSPSYSEHHRRVLQMTSLDVCSFSCVNLELLQEHVVTALSVESYYRFNYAKDQIKTCVEFPECFVSKTVGEALNKPVLGHLAMQKLSGTIQVVLEFFVEIQFDANGKISGAAIRAYLVERSRVCQISDPERNYHCFCMLCSAPSEFDANGKISGAAIRAYLVERSCVCQISDPERTYHCFCMLCSAPSETSMVA

SEQ ID NO: 76838 - protein, 730 aa, Zea mays
  Coding DNA Sequence Number=SeqID_35059
  Homolog annotation: Hit_ID=Q9AYF0; Match level="QueryCoverage=45%, HitCoverage=24%, E-value=4e-57, Identity=37%"; Hit description =Helicase-like protein
MKEIGLKVDKLIFLKMEQALTWKQESKKQKSSCEGKAWPRETAPSAANNDGSAAAKSSTDALAGLSTCPPRLNAPTSRRPPPPRPAKPNPRSFPPRPRLRQLTLALLHSLTPDYDDEDLAPYDVKIFSLRLFRDKCYIEIFPVVEKSIIVRSDDEERKRDERNRKQREYYARRKVDETTEERDARNKMMRDYRARKKAETGPSDEHERHREERNRKQREYRARRKAEETNEEREARNKRMCDYRAMKKADTVLYSPRQTQAYATGSSIVIQTNTQMAEPVTPVVARGSLHQLPTSVEPFSTNSQVTEPVTPVVARGSLHQLPISVEPFSTISQPSTYNQSAITASTMGNLIMNRARYINMDDADREILLHKRREYKRLRQCVQDDTITEHPITPHDFNIAQHNEYTRSREFHGEDDAFESYRLLGYSSHTEDPYDYVYHKLPDRHHVLRKIPDCCYCGAMKFEFEPHGMCCRKGKIKVHIPDVPTELKRLFTSQGDDDAKYFRKNIRTRRSPDLDINIIKNILTILEGNPYVQTFNRLGSIPNLDDYVIELNTNVTPDQRRYNAPTASQVAAIWFEGNDPQRSFDRSVIIYATGDRPTCIKAYHGCYDPLAYPLFFPRGQTGWNRFMPYNETPTVNATFNAPDHNDTRSVNNEHTTHYYLDEDNQQDDYDISNGGVIQSARFVTAREYYCFLIQLERGFLISCYLEGEWPQWVVDMYIKIESMRLMISIA

SEQ ID NO: 76839 - protein, 1083 aa, Zea mays
  Coding DNA Sequence Number=SeqID_35060
  Gene Ontology: Mol. function=helicase activity
  Homolog annotation: Hit_ID=Q9AYF0; Match level="QueryCoverage=62%, HitCoverage=51%, E-value=1e-168, Identity=43%"; Hit description =Helicase-like protein
MKEIGLKVDKLIFLKMEQALTWKQESKKQKSSCEGKAWPRETAPSAANNDGSAAAKSSTDALAGLSTCPPRLNAPTSRRPPPPRPAKPNPRSFPPRPRLRQLTLALLHSLTPDYDDEDLAPYDVKIFSLRLFRDKCYIEIFPVVEKSIIVRSDDEERKRDERNRKQREYYARRKVDETTEERDARNKMMRDYRARKKAETGPSDEHERHREERNRKQREYRARRKAEETNEEREARNKRMCDYRAMKKADTVLYSPRQTQAYATGSSIVIQTNTQMAEPVTPVVARGSLHQLPTSVEPFSTNSQVTEPVTPVVARGSLHQLPISVEPFSTISQPSTYNQSAITASTMGNLIMNRARYINMDDADREILLHKRREYKRLRQCVQDDTITEHPITPHDFNIAQHNEYTRSREFHGEDDAFESYRLLGYSSHTEDPYDYVYHKLPDRHHVLRKIPDCCYCGAMKFEFEPHGMCCRKGKIKVHIPDVPTELKRLFTSQGDDDAKYFRKNIRTRRSPDLDINIIKNILTILEGNPYVQTFNRLGSIPNLDDYVIELNTNVTPDQRRYNAPTASQVAAIWFEGNDPQRSFDRSVIIYATGDRPTCIKAYHGCYDPLAYPLFFPRGQTGWNRFMPYNETPTVNATFNAPDHNDTRSVNNEHTTHYYLDEDNQQDDYDISNGGVIQSARFVTAREYYCFLIQAREGIESMRLDWYSNPVNQEIIRAELYQGLVDVISAGENRASEVGKRIVLPRTFQGGDRDMQQRFLNAMAIVQRLGKPDYFITMTCNPYWEEITNNLLPGQTPQDRPELVTMVYRAKLRDMKDLLIKKAYFGQVAGYVHVTEFQKRGLPHEHILLIMNLHNKLTSPDAYDKVICAEIPEKDKYHVLHNLVIKHMLHGPCGVLNKKCPCMVNEECRFRYPRQFCAATQQGKDSYPLYRRRDDGRRVKVRGSCSSIKAIKYMCKYVYKGHDRASFSVDPAHKEDGVINEIRQYRDARYISPPEVVHRILGFPLFGVNPSVLQLQCHLPGMQSVIIDETTKLQDIVNEPTSSMTTLTEYFTKNRADSFARTLLYKDFPEYYRWIHGSKRWQR

SEQ ID NO: 76840 - protein, 193 aa, Zea mays
  Coding DNA Sequence Number=SeqID_35061
MSAPDLGPGSDDERTMQFPRTVPVVGKLREVVDAAKAAAATGATRHARWAWGWSVEQEVEGGGCGNGDDGVGRVAEMTEGVVTDRGACGDEDGSHRRQARRLHHRPHGGVGGGILVWRVAGGRCEEGEAMRGGRHRGWPRRTEAVSVAAAREAGRGGEGGRANERCSGHGGDARRTNGVDWLKAERKEAAYPL

SEQ ID NO: 76841 - protein, 355 aa, Zea mays
  Coding DNA Sequence Number=SeqID_35062
  Homolog annotation: Hit_ID=Q9C8A0; Match level="QueryCoverage=19%, HitCoverage=33%, E-value=2e-15, Identity=62%"; Hit description =Serine/arginine-rich protein, putative; 48931-50251
  Pfam annotation: Domain name=TAFII55_N; Domain location=219-326; Score=-32.5; E_value=0.00026; Accession=PF04658.4; Description =TAFII55 protein conserved region
  Subcellular localization annotation: CTP_CleavageSite=49; ConfidenceScore=5.60e-01
MSSSSHRLTLLASPARNSPNENTATDAPVRPVMQPASLSAMRAVLIPTRSSIRDNSFCHLRHSSNTIIPIPAPSSLHLLLHAPSPRPACVPCRPRRGRGLGSVDDLPQLPHHGHRPGELHGALIVRSRTKVRCAHRQIQDQLTKVSCNVFKASEGRLCIISVVNGVEQLLNGIQKSGQVQWGFQAPGTREAGNRLYVGASKALAMREVVCGGFQGACSRLCGDRNNSRSVTKYDPKELNLFHVGHEDGTNGTFMIGNESFPASLLDLPAVVESYKTYDDSVLIKTADVGQQLGKNGGFFHGVRSLSFGVDLQEIRLMGVLQRIAIAYLLTALREIWIRGDVDVDYGYDLFKRYRY

SEQ ID NO: 76842 - protein, 156 aa, Zea mays
  Coding DNA Sequence Number=SeqID_35063
  Gene Ontology: Mol. function=glycine hydroxymethyltransferase activity; Cellular component=vacuole; Biological process=L-serine metabolic process
  Homolog annotation: Hit_ID=Q8RYY6; Match level="QueryCoverage=65%, HitCoverage=17%, E-value=2e-55, Identity=98%"; Hit description =Putative hydroxymethyltransferase
  Pfam annotation: Domain name=SHMT; Domain location=1-152; Score= -156.4; E_value=1.7e-07; Accession=PF00464.10; Description=Serine hydroxymethyltransferase
MGLEPPSGGHVSHGYYTPSGKKVSGASIFFESMSYKVNPQTGYIDYDKLEERAMDFHPKILICGGSSYPREWDFARMRLIADKCGAVLLCDMAHISGLVAAKERLMIAPAQPGFVETPIFCVSREPGPEGIFASAEPDCRGWPDNQTREGCIREPG

SEQ ID NO: 76843 - protein, 235 aa, Zea mays
  Coding DNA Sequence Number=SeqID_35064
  Homolog annotation: Hit_ID=Q942Z3; Match level="QueryCoverage=79%, HitCoverage=53%, E-value=2e-16, Identity=65%"; Hit description =Putative shock protein
  Pfam annotation: Domain name=XYPPX; Domain location=102-106; Score =1.9; E_value=90; Accession=PF02162.7; Description=XYPPX repeat
  Pfam annotation: Domain name=XYPPX; Domain location=113-117; Score =1.6; E_value=1e+02; Accession=PF02162.7; Description=XYPPX repeat
  Pfam annotation: Domain name=XYPPX; Domain location=119-123; Score =1.9; E_value=88; Accession=PF02162.7; Description=XYPPX repeat
  Pfam annotation: Domain name=XYPPX; Domain location=159-163; Score =4.0; E_value=22; Accession=PF02162.7; Description=XYPPX repeat
  Pfam annotation: Domain name=XYPPX; Domain location=183-187; Score =1.6; E_value=1e+02; Accession=PF02162.7; Description=XYPPX repeat
  Pfam annotation: Domain name=XYPPX; Domain location=86-90; Score=1.9; E_value=90; Accession=PF02162.7; Description=XYPPX repeat
  Pfam annotation: Domain name=XYPPX; Domain location=95-99; Score=1.2; E_value=1.4e+02; Accession=PF02162.7; Description=XYPPX repeat
  Pfam module annotation: Pfam domain module=XYPPX::XYPPX::XYPPX::XYPPX: :XYPPX::XYPPX::XYPPX; Domain location=102-106::113-117::119-123::159 -163::183-187::86-90::95-99
HIPLSELLSGAPDGPVPAKFVAYQVRKISSGKPQGVLNLSYKLGEVANGYAPAPPPSPPTPSLHRPPRTRLLQARQGRRVRPPATAYPPAAKADAYPPPYGAYPPAGGKADAAYPPSSGYPPTAGKPGKGGEPVTAYPSAGPSTAAPYAARLPQYGGYGYPPQQAAGYGYPSPPPQQVGYGYGYPPPQAAGYGYRPARRRRRGPPDRRHDLGLVSVRRREKPESNNKHNLQQQWL

SEQ ID NO: 76844 - protein, 156 aa, Zea mays
  Coding DNA Sequence Number=SeqID_35065
  Homolog annotation: Hit_ID=Q942Z3; Match level="QueryCoverage=42%, HitCoverage=18%, E-value=6e-20, Identity=75%"; Hit description =Putative shock protein
MMSGVVPSSLHVLLRAERALRDRDVGEVHIPLSELLSGAPDGPVPAKFVAYQVRKISSGKPQGVLNLSYKLGEVANGYAPAPPPSPPTPSLHRPPPKADAYPPPYGAYPPAGGKADAAYPPSSGYPPAAGKPGKGGEPVTAYPSAGPSTAAPYARK

SEQ ID NO: 76845 - protein, 332 aa, Zea mays
  Coding DNA Sequence Number=SeqID_35066
  Homolog annotation: Hit_ID=Q7Y0C8; Match level="QueryCoverage=26%, HitCoverage=17%, E-value=6e-40, Identity=88%"; Hit description =Cytochrome P450 74A1, chloroplast precursor
MYDKLRRSCRLDAVQSGCSALSIVKQGDLMVVANGYYLADEPGVHFVLQPSQESSVLGMSRAFDDYYIEDYGVILAPEVTQGRTDKNDQFVILATVGASTHRVLPSLPAPQSPPAIRWKVLADGRSRPAAENGRSSRPHARWKVREEAQTDTQAGQTGQVGMKKKGETERVELVVDDTTRAAASAATDRPREVLSPKRRLPLRKVSGDYGPPVLGAVRDRFEYFYGPGGCDGFFASRVRAHGSTVVRLNMPPGPFVARDPRMVALLDAASFPVLFDTSFVKEERVSDRKRSAMAEEIHQNQDEEEEVVAVSSGKKTKLELLRALWNASFRDT

SEQ ID NO: 76846 - protein, 143 aa, Zea mays
  Coding DNA Sequence Number=SeqID_35067
  Gene Ontology: Mol. function=GTP binding; Cellular component =intracellular
  Homolog annotation: Hit_ID=Q0AGY4; Match level="QueryCoverage=71%, HitCoverage=45%, E-value=1e-12, Identity=33%"; Hit description=GTP -binding protein YchF
  Pfam annotation: Domain name=DUF933; Domain location=50-129; Score =36.7; E_value=7.8e-08; Accession=PF06071.3; Description=Protein of unknown function (DUF933)
MEGKPARSVDLAEHEKEVIKHLYLLTMKPVISVANVIESDLAEPDINPRVKEVAKAASYLQYGVTAPQAAGVIHSDFQKGFIRVETVSYDDFVAAGFLGVAREKRTGQNLDVVACYSMGFGLVLQVLLALYLVLVLMYKFLKL

SEQ ID NO: 76847 - protein, 299 aa, Zea mays
  Coding DNA Sequence Number=SeqID_35068
  Homolog annotation: Hit_ID=Q8S9P9; Match level="QueryCoverage=31%, HitCoverage=22%, E-value=3e-31, Identity=73%"; Hit description =Purple acid phosphatase-like
MATETGANRLLSYSSSGPWELWPDVSNYVLQVLSRGRRARGDGHDHDPALLMYFLDSGGGSYTEVVSSAQVRWFHTQSQFLNPDGRILELIFWHIPSTAYAKIEKRLDKLNNSKTKDTQVKVKNLILLNLISILVSKRWLKQHQTCSLASFFLTIVSIVIFEEVFVIIITACDSTSYMMLDCTNEIPNVNFVHAPTDYNEIRYDGILVNSIEARPVFSRILSQSQMFDLDHVSVASYSLLHEPFKSIPIIWTMHEYSPVHHAKEYNAPSEAFQVDSFIAKSYHEDVKISLHVKIRVKGL

SEQ ID NO: 76848 - protein, 404 aa, Zea mays
  Coding DNA Sequence Number=SeqID_35069
MARVTEPPKSLGPPTVVLVQQTSDNPVDVPESLDNKSYLTKEKTLKGVLVIRESRRRHYTETPFSCKSPARSQLNHFNPKTWYLAEVTDNLHRDPSNSIPLHDKVLDGASHGKLNSGELDWPEGAKTGASLRFTPDSTPEKYFPSLNFRIGALPYPVHEDSAENLRNNVFPATRGSLVQLDDLGCYNATRPPPPRAPLPPSRSALGVASATPRRGERDASAWPALLACPQRGPPSPRHGATWLLGAAVALAPPPRHGDPPHAVAPCCPGTARPRCLRAACPTQPARGVRVARLLRAQRDQLAVSQNPVNAALRARACAMYAASSTGVVLVMNIIIDLTDTLLGHLGSDQWRVMISGQKGNHDLWVKDVRITGGDENGGFGIDYGNGEDETVEEDFQEFQDYDEF

SEQ ID NO: 76849 - protein, 72 aa, Zea mays
  Coding DNA Sequence Number=SeqID_35070
MKLNADACRTCLLDTVAEQKEAEAAIFQGFGLGDREPESGGHENDSFGIDYGNGEDEAVEGDFQEFQDYDEF

SEQ ID NO: 76850 - protein, 85 aa, Zea mays
  Coding DNA Sequence Number=SeqID_35071
MTLRLRGDFNPSAPTFGLYSSLIRFTSKFDSIVYSNKSHYFECPPFHEREELVRCEARKQQSAFSLVLLIAFGLLGIVLGYIVKK

SEQ ID NO: 76851 - protein, 175 aa, Zea mays
  Coding DNA Sequence Number=SeqID_35072
RNGGTTHDETGVEAEDRSRRVEIPPQSQRRDGANVAAGVETVVCSKKTIAPRCRGSRSRGGRGRKTRNKSLIFGRGRRSSVNDRQGDTAKGHWQADLPASSIDQTSRSPAREADSSATRLRWSRDGINEGEEGGGRRGGSNPGKGPAPDLSRDDDGAGAGRSLKGEALLGINASS

SEQ ID NO: 76852 - protein, 87 aa, Zea mays
  Coding DNA Sequence Number=SeqID_35073
MEVVGALEKGGWAAVVRCKGGMGGGASAHGGGHACGGHRALAKVKKNFTTQCTQRTGHTNFRPGNSLLARIAHNFNLRHLLDGSTGS

SEQ ID NO: 76853 - protein, 203 aa, Zea mays
  Coding DNA Sequence Number=SeqID_35074
MTMNRNYERTMNDRMIERTNDRNFGSITDSIDEYYHHTEEETKDYEPCATVFNPRITKHCDLRGEGVENGVACDLAEGIYLECALSELGVEGAGGGFIGERGCWGVWSGSDGAGDTRQQVRQGEGGAIAGDDGGSGCAAKGGWAAVVRCKGGVGGGASAHGGGHACGGTAVFTFLQAEGLSFMTFVRNPLYPKGNNDPKDEGF

SEQ ID NO: 76854 - protein, 795 aa, Zea mays
  Coding DNA Sequence Number=SeqID_35075
  Homolog annotation: Hit_ID=Q8H4R8; Match level="QueryCoverage=75%, HitCoverage=93%, E-value=0.0, Identity=64%"; Hit description =Pentatricopeptide repeat-containing protein-like protein
  Pfam annotation: Domain name=PPR; Domain location=311-345; Score =11.1; E_value=0.36; Accession=PF01535.11; Description=PPR repeat
  Pfam annotation: Domain name=PPR; Domain location=385-418; Score=0.7; E_value=6.2; Accession=PF01535.11; Description=PPR repeat
  Pfam annotation: Domain name=PPR; Domain location=509-543; Score=8.9; E_value=0.65; Accession=PF01535.11; Description=PPR repeat
  Pfam annotation: Domain name=PPR; Domain location=590-623; Score=5.9; E_value=1.5; Accession=PF01535.11; Description=PPR repeat
  Pfam annotation: Domain name=PPR; Domain location=624-657; Score=3.7; E_value=2.7; Accession=PF01535.11; Description=PPR repeat
  Pfam annotation: Domain name=PPR; Domain location=663-697; Score=1.1; E_value=5.5; Accession=PF01535.11; Description=PPR repeat
  Pfam module annotation: Pfam domain module=PPR::PPR::PPR::PPR::PPR::PP R; Domain location=311-345::385-418::509-543::590-623::624-657::663 -697
  Subcellular localization annotation: CTP_CleavageSite=40; ConfidenceScore=5.40e-01
MPSALGRRQLISSAPFSPTTAVLASGPSVGPSRLHSYSPALESGMAHRWPVQWGHWTTVLKRSNALYRHTTLKPCTGLYRRHGLDLVTRALGSTLPRMRRLFLACCRYLQFTSVPDAIRATSPVNNVYGSWRRYIFTNADKVLPWEAPSREILLRKINCAMKDGNVEEALQSLSNYKKLHGLPEPRVLNSIIVSLSYMSSRRWLQRAFDMVLSVYQINRNLLNCGSLMRLALALARDQMPIPASTVLRIILESRKLPDVDMLTMSFLHMLKSQVGSYLATDVLIETCESFLDQVTDRREMKKLDPIKNNATLFNMVLESCVTFKCIIKAQKIMELMSLIGVVADVNTVVMASRVFEMVGQRDELIHMKRSIDSLTSLTFLQYYLHFYDSLLSLHFKYNDMDAAAKFLIDLHQQPKPGVLFCNESQFGLVVLTDGNLLHTEKALAKLIIGCVKSRNMHILSNFFIMSCQYGLELISPQDVVTACIQMGWLHAAHDIIDNLESAGIPVGITGYVSLLRAYEKENKSEEVNGLLQQIQKMASTMDDVHTDSPFTINNIAEVVKYEMSFSSSSLVAALADEIKHYNPGEHLALELNNSVLFFCKAKMMEDALCTYKCMREQNIRPTSHTFCHMLCGYSSMDMHREITMLWGEIKRRHEYGELDLDRDLLDSLVLNFLKGGYFSRVMEIISYMSKHNIYCDKWKYRRAFLKLHKNLYRNLDSLHDKTEAQSKRIEDHLQRGKRVEAVESFGELSLREVVMFALGEVGLSKQTEIQLVDVLLSSVWPTCTALLLIEVHLFP

SEQ ID NO: 76855 - protein, 86 aa, Zea mays
  Coding DNA Sequence Number=SeqID_35076
  Gene Ontology: Mol. function=ATP-dependent helicase activity
  Homolog annotation: Hit_ID=Q5VRY0; Match level="QueryCoverage=65%, HitCoverage=10%, E-value=4e-10, Identity=61%"; Hit description =Putative VASA
MVFAAPCSGGKRVEAVESFGELSLREVVMFALGEVGLSKQTEIQLVDVTSGVFGSHTGSRKTFFYLLLVYCSGYCRKKTYNASHLI

SEQ ID NO: 76856 - protein, 39 aa, Zea mays
  Coding DNA Sequence Number=SeqID_35077
MSRWLRCLRLRLLRSWSSLIPPFLTMGRGRPLSPRSSWT

SEQ ID NO: 76857 - protein, 789 aa, Zea mays
  Coding DNA Sequence Number=SeqID_35078
  Gene Ontology: Mol. function=ATP binding; Biological process=viral genome replication
  Homolog annotation: Hit_ID=Q1EPC6; Match level="QueryCoverage=97%, HitCoverage=80%, E-value=1e-143, Identity=58%"; Hit description=DNA helicase homolog, putative
  Pfam annotation: Domain name=DUF889; Domain location=651-789; Score =50.9; E_value=5.9e-15; Accession=PF05970.5; Description=Eukaryotic protein of unknown function (DUF889)
MDGQGSGVDHTQSKPRVISNVDDDDGVVFEDDADENEGYLFAGQYEDTDEDIEIDGSQDESTATDVPDPYDKVYINIPEETHMLKTVPNCGYCNAKKEGGAKHKHLELYFYDDDPILEHRYQSPSHLSVPVRDYYCYKFQIRPGVFNPILHGKRLFQQFTINTYIKIESSRLDFICKNQDRLRVDLYQGLVDSMLDGDIRADKVGKRTVLSTSFIGGPRDMRRRYMDAMALVWKFGKPDIFLIVTCNPNWDEIRRELLPGQTPQDRPDLVVRVFHAKLQELKHRLTKHDILGKRKYKLTCPEQYGLLISAEIPSNKYPELRKMVIKHMTHCLRRDDDRKEKARGCELDNRWVVPYNPYLLRLLNCHIIVEACGSIMAIKYLFKYIYKGHDRVSVVMRDVSNADDDVDEIKQYRDVRWVTPPEALWRIYGFDLSQISPPVMQMQLHLPNMHMVAFHEWQMVERVINHPGVDRSMLIEYFEANRLHEEARGILYRDFPEWNMLQLMGKDIKTFPLPSIIDAYGDAISTAREGRLFFVDGPGGTGKTYLYRVLLATLHNQGKIAVATAKSGVAASIMPGGRTAHSHFKIPLTIDDGVVCSFTKQSGTTELLQKASLIIWDEASMTKRQAVEALDNSMHDIMGRPGLPFGGKTIVFGGDFRQVLPVVRKGSRAQVVASLLWMSYLWESMSQLNLVSNMRAKNDPWFVKFLLRVGARTEDTNSDGDIRLPDDVCVPYSGSDNDLDNLIDFAFPNLNENMSNSTYITSRAILSTQNNLVDMINVKMIDRFQGEHM

SEQ ID NO: 76858 - protein, 556 aa, Zea mays
  Coding DNA Sequence Number=SeqID_35079
  Homolog annotation: Hit_ID=Q943L0; Match level="QueryCoverage=26%, HitCoverage=67%, E-value=2e-39, Identity=58%"; Hit description =Putative thaumatin-like cytokinin-binding protein
MKKSSGSGSVSLARSIPELYEERGASNLREFGFQELRAATSDFSRLLKVGEVASGAFTRASSAFLAGPPAARSSRLSHSGISHLPADEVKPLVKYDNDEDAHSPGGRGRGRGGRGRGRGRGRGGRGNGFNEYADAGWEDDHAPAYMGNGYARGRGRSFRGRGRRGDDDNQPEYQHVGGFKGMRVMRVKNLNLYAFGLYMQPTSIREKLGPKYASFPTDKLMENPDFYRNGFNEYDDAGWEDDHSPAYMGNGYARGRGRSFRGRGRRGGDNNQPEYQQVGGYYECSCSSFRFSPFVMELKPASHRSGNLFLVVNIYMVYPVVLCTSNFVHIEPVRMTSSLKVIEMLQSSNGIQHIPCAAISALISRAGNANWNRKGLLLIQSNWAPMVKAYGHSRLKNSEYLEARQLVDAEGLAAALARKDAVGRGAQLQLAGAALSEVFLRQARTGQLSRPSCGVTDRPTLKSSTTLTPYEVWSLSWWRFTHASVVGTASPSPPQSPWRSGAARRRRRSPCASRCCQTRGGPAPGTTCGRAAGGITTVGACWSIITTPIDTIKTRL

SEQ ID NO: 76859 - protein, 191 aa, Zea mays
  Coding DNA Sequence Number=SeqID_35080
  Gene Ontology: Mol. function=nucleic acid binding; Biological process= proteolysis
  Homolog annotation: Hit_ID=Q7XJ13; Match level="QueryCoverage=99%, HitCoverage=22%, E-value=4e-37, Identity=48%"; Hit description =Chloroplast nucleoid DNA-binding protein-like protein
MGRAINKIVMAVELIKVLLMALVLTNITYHLILIVTVITVKRRIVDLHQNTTTGSTDITDMWEPLEEGLLPLETTRHVSMITITLSKKEMDTSSIGYQSPLPADEVKPLVKYDNDEDAHSPGGRGRGRGGRGRGRGRGRGGRGNGFNEYADAGWEDDHAPAYMGNGYARGRGRSFRGRGRRGGYNNQPEYQ

SEQ ID NO: 76860 - protein, 145 aa, Zea mays
  Coding DNA Sequence Number=SeqID_35081
  Subcellular localization annotation: CTP_CleavageSite=59; ConfidenceScore=5.12e-01
MPGSLAQLALALLPVPPPTAGAERGCPPTVQAAIAPCAPGDRPRRRTPLGRRSCSWIVVSSLRHDASAWSRPERRSLLLLLQRSAASHLEFAVPQNPRLLCDEPELEAAVSAWTEAESAREEASSARERVASLAEEVQQRQLELG

SEQ ID NO: 76861 - protein, 114 aa, Zea mays
  Coding DNA Sequence Number=SeqID_35082
MVVTTSSTVGRSKSGCGLCPALSFKDLHHPCCCGGRAEPELYLPYGPAGHLFHQHSGERALTGLAEGVDFDNAGPVGRKHRQLQHVWLAGSGAASDATSHRWGGAWLSAVNTGI

SEQ ID NO: 76862 - protein, 60 aa, Zea mays
  Coding DNA Sequence Number=SeqID_35083
MQVTSKHLMYICKENLHPRKALSAIEVKELLYELCHIMLNEAIEFPYSMIYRSKVYMCDI

SEQ ID NO: 76863 - protein, 231 aa, Zea mays
  Coding DNA Sequence Number=SeqID_35084
  Homolog annotation: Hit_ID=Q75G59; Match level="QueryCoverage=43%, HitCoverage=20%, E-value=8e-32, Identity=64%"; Hit description =Expressed protein
  Pfam annotation: Domain name=CDT1; Domain location=29-145; Score =55.6; E_value=1.6e-13; Accession=PF08839.1; Description=DNA replication factor CDT1 like
MAVEDPGSVDTIENYVTTDHLVFPVHNVRHKDLLNLFNRMESSIRLLRLRKRMAKFNNISTQVEILAKEAIQIKRVLLHEKSLCMYADMEIILVMDVVEYTSPDQSPSMAICDAFYSKLLTFLDAHQKVPAKEQVDALSKELFALSTVTVQVRLLGMLGFKLIKRLCSPLQLCLYELYHIMLNEAIEFPYSMILRYERRLYAEGPKKHLPFARIATFNDKWGLSTFNASSV

SEQ ID NO: 76864 - protein, 199 aa, Zea mays
  Coding DNA Sequence Number=SeqID_35085
  Homolog annotation: Hit_ID=Q75G59; Match level="QueryCoverage=50%, HitCoverage=20%, E-value=5e-32, Identity=64%"; Hit description =Expressed protein
  Pfam annotation: Domain name=CDT1; Domain location=29-145; Score =55.6; E_value=1.6e-13; Accession=PF08839.1; Description=DNA replication factor CDT1 like
MAVEDPGSVDTIENYVTTDHLVFPVHNVRHKDLLNLFNRMESSIRLLRLRKRMAKFNNISTQVEILAKEAIQIKRVLLHEKSLCMYADMEIILVMDVVEYTSPDQSPSMAICDAFYSKLLTFLDAHQKVPAKEQVDALSKELFALSTVTVQVRLLGMLGFKLIKRLCSPLQLCLYELYHIMLNEAIEFPYSMIVKNKAT

SEQ ID NO: 76865 - protein, 125 aa, Zea mays
  Coding DNA Sequence Number=SeqID_35086
MEHRPKDEGSQDREGDEVKYLRPVEAEHRRGDGAETGGRAAEGIREREGDTPAPMEQRPGGGDGAETRRRRCTLGFSRIVVSARRWSREQPPDDSGGVEGFLIARGGREDRVFSTSVVPESGLSV

SEQ ID NO: 76866 - protein, 131 aa, Zea mays
  Coding DNA Sequence Number=SeqID_35087
MEMEQRPEDYGSREGDWKPRGTGSREGDRVDVGEIPETRRARGAASQRHDVGDGTQTGRRGEPGPGGRRGEIPEARGGGAQTRRWSRDWRPSRRGDPGAGGRHAGADGAETRRRRWSRDQAAAMYSRSRVF

SEQ ID NO: 76867 - protein, 178 aa, Zea mays
  Coding DNA Sequence Number=SeqID_35088
  Gene Ontology: Cellular component=integral to membrane; Biological process=vesicle-mediated transport
  Homolog annotation: Hit_ID=Q69WS1; Match level="QueryCoverage=87%, HitCoverage=70%, E-value=1e-61, Identity=78%"; Hit description =Synaptobrevin-like protein
  Pfam annotation: Domain name=Synaptobrevin; Domain location=83-171; Score=142.7; E_value=9.8e-40; Accession=PF00957.11; Description =Synaptobrevin
MVQVTVHSAQWRVCIAIVTSYCVVAVESVGRQIPIAFLDRVKEDFTKKYGGGKAATAAANSLNREFGSKLKEHMQYCVDHPEEVSKLAKVKAQVSEVKGVMMENIEKVLDRGEKIELLVDKTENLRSQAQDFRQQGTKVRRKMWLQNMKIKLIVLGIIIALILIIILSVCHGFKCGSK

SEQ ID NO: 76868 - protein, 201 aa, Zea mays
  Coding DNA Sequence Number=SeqID_35089
  Gene Ontology: Cellular component=integral to membrane; Biological process=vesicle-mediated transport
  Homolog annotation: Hit_ID=Q69WS1; Match level="QueryCoverage=98%, HitCoverage=99%, E-value=3e-85, Identity=75%"; Hit description =Synaptobrevin-like protein
  Pfam annotation: Domain name=Synaptobrevin; Domain location=127-194; Score=61.7; E_value=2.4e-15; Accession=PF00957.11; Description =Synaptobrevin
MGQQSLIYAFVARGTVVLAEYTEFTGNFTTIAAQCLQKLPASNNKFTYNCDGHTFNYLVEDGFTYCVVAVESVGRQIPIAFLDRVKEDFTKKYGGGKAATAAANSLNREFGSKLKEHMQYCVDHPEEVSKLAKVKAQVSEVKGVMMENIEKAQDFRQQGTKVRRKMWLQNMKIKLIVLGIIIALILIIILSVCHGFKCGSK

SEQ ID NO: 76869 - protein, 565 aa, Zea mays
  Coding DNA Sequence Number=SeqID_35090
  Gene Ontology: Mol. function=transferase activity, transferring glycosyl groups; Cellular component=membrane; Biological process =protein amino acid glycosylation
  Homolog annotation: Hit_ID=Q6ZKZ3; Match level="QueryCoverage=94%, HitCoverage=91%, E-value=0.0, Identity=65%"; Hit description =Putative beta-1,3-galactosyltransferase 5
  Pfam annotation: Domain name=Gal-bind_lectin; Domain location=102 -316; Score=157.0; E_value=4.9e-44; Accession=PF00337.12; Description= Galactoside-binding lectin
  Pfam annotation: Domain name=Galactosyl_T; Domain location=362-525; Score=16.8; E_value=4.8e-08; Accession=PF01762.12; Description =Galactosyltransferase
  Pfam module annotation: Pfam domain module=Gal-bind_lectin::Galactosyl _T; Domain location=102-316::362-525
MEGLATVLLLYALLVLALESPLVSTSPFGGAAGGTARKLHLSFGAGERAAPVPGASAHGQDHRLSRFASGLDVRLLDSARSGALRRCPHSIALTAEELGARGRVVELPCGLALGSHITVAATPRAPHEERNPAIAVLRDGERHAMVSQFMVELQGLRAVDGEDPPRVLHFNPRLRGDWSGHPVIEQNTCYRMSWGAAQRCDGWRSRPDEETVDGLVKCEKWIRDDDDRLEKSKTTSKTAWWLNRLIGQKEEVNFGWPFPFVEGRLFVLTLSAGLEGYHVSVDGRHVTSFPYRTGFVLEDATGLSLNGDLDVHSVIAGSLPTTHPSFAPHNYLEFSNVWQAPLLPDEPVEIFIGILSAANHFAERMGVRKTWMSAVHKSPNMVARFFVALHGRMEVNAELKKEAEFFRDIVFVPFLDNYDLVVMKTLAICEYGVHVVSAKYVMKCDDDTFVRLDSVVTEIKKEWPQEVYPLYANGPGYVISSDIADFIMSEFMKQKLMLFKMEDVSLGVWVEQFNKTRPVEYVHSDKFCPNGCVPDYYTAHYQSPRLMLCMWQKLLEGRPDCCNAR

SEQ ID NO: 76870 - protein, 612 aa, Zea mays
  Coding DNA Sequence Number=SeqID_35091
  Gene Ontology: Mol. function=transferase activity, transferring glycosyl groups; Cellular component=membrane; Biological process =protein amino acid glycosylation
  Homolog annotation: Hit_ID=Q6ZKZ3; Match level="QueryCoverage=99%, HitCoverage=98%, E-value=0.0, Identity=66%"; Hit description =Putative beta-1,3-galactosyltransferase 5
  Pfam annotation: Domain name=Gal-bind_lectin; Domain location=149 -363; Score=157.0; E_value=4.9e-44; Accession=PF00337.12; Description= Galactoside-binding lectin
  Pfam annotation: Domain name=Galactosyl_T; Domain location=409-572; Score=16.8; E_value=4.8e-08; Accession=PF01762.12; Description =Galactosyltransferase
  Pfam module annotation: Pfam domain module=Gal-bind_lectin::Galactosyl _T; Domain location=149-363::409-572
MAGAGATFRRRAMEGLATVLLLYALLVLALESPLVSTSPFGGAAGGTARKLHLSFGAGERAAPVPGASAHGQDHRLSRFASGLDVRLLDSARSGALRRSIADAVAAGARAFSDLEALDPAAVAAPSGESDAARCPHSIALTAEELGARGRVVELPCGLALGSHITVAATPRAPHEERNPAIAVLRDGERHAMVSQFMVELQGLRAVDGEDPPRVLHFNPRLRGDWSGHPVIEQNTCYRMSWGAAQRCDGWRSRPDEETVDGLVKCEKWIRDDDDRLEKSKTTSKTAWWLNRLIGQKEEVNFGWPFPFVEGRLFVLTLSAGLEGYHVSVDGRHVTSFPYRTGFVLEDATGLSLNGDLDVHSVIAGSLPTTHPSFAPHNYLEFSNVWQAPLLPDEPVEIFIGILSAANHFAERMGVRKTWMSAVHKSPNMVARFFVALHGRMEVNAELKKEAEFFRDIVFVPFLDNYDLVVMKTLAICEYGVHVVSAKYVMKCDDDTFVRLDSVVTEIKKEWPQEVYPLYANGPGYVISSDIADFIMSEFMKQKLMLFKMEDVSLGVWVEQFNKTRPVEYVHSDKFCPNGCVPDYYTAHYQSPRLMLCMWQKLLEGRPDCCNAR

SEQ ID NO: 76871 - protein, 184 aa, Zea mays
  Coding DNA Sequence Number=SeqID_35092
  Homolog annotation: Hit_ID=Q336V3; Match level="QueryCoverage=33%, HitCoverage=11%, E-value=6e-11, Identity=56%"; Hit description =Cytochrome P450 family protein, expressed
  Subcellular localization annotation: CTP_CleavageSite=53; ConfidenceScore=5.78e-01
MQLASGTGAPPSLSKSCGSALRQNTGLSSRNPSKSGRKSAPRRRSHTSPSLAAAMEIPESLPPLRPTAQGRDGTQSGIWEKVLRRKGRWLARRALHGGGVRRGVLGAGMHRDARRACGRREFRGGGFAAGGCGGRKERRGGGCGGLRARRLFAGRPGIAAGWLRVRALGGDPGWVRAGDGIRGR

SEQ ID NO: 76872 - protein, 175 aa, Zea mays
  Coding DNA Sequence Number=SeqID_35093
  Gene Ontology: Mol. function=oxidoreductase activity; Cellular component=membrane; Biological process=electron transport
  Homolog annotation: Hit_ID=Q336V3; Match level="QueryCoverage=35%, HitCoverage=11%, E-value=5e-11, Identity=56%"; Hit description =Cytochrome P450 family protein, expressed
VGDDAARQRNRGTALPVEVLWLRAEAEHRPFLPQSLEERQEERTAEEVPHLAELGGRDGNPRVIAAAPADRARERRDPVGDLGEGLAKKGEVVSRRGDAAAVRSVAAGDAAACGRGGCLPGGLESRLGGCGCERWVVIVLEGNTGSSVLKAVSDARSSVNPFEKTPLFSHIPFLH

SEQ ID NO: 76873 - protein, 156 aa, Zea mays
  Coding DNA Sequence Number=SeqID_35094
MEVVEGAVAVAVAGGSTLTVVLPTILAAVEGTYRGGSGVGNDFSDQRQHYGGGNRGGGRGDFQGSFQKPRARTSCGRPSCLSKDPDNVRGYAIRGQPRGLLRRARPSSGRRRGGGAAIAERLSAEHNAASEEDPTLVPRFNEGVVSLLWDAVVVSR

SEQ ID NO: 76874 - protein, 345 aa, Zea mays
  Coding DNA Sequence Number=SeqID_35095
  Homolog annotation: Hit_ID=Q10SN2; Match level="QueryCoverage=19%, HitCoverage=23%, E-value=9e-18, Identity=72%"; Hit description=F-box family protein, putative, expressed
  Subcellular localization annotation: CTP_CleavageSite=58; ConfidenceScore=5.16e-01
MEVRLRDGTSEATNAQAKTTTWWRLPPLPTQRNPRSRTPARQRNPRSRNGLPHAPPTSAAAKPPRNPHPRIPPVPNRPRAAALCPRRSLAPNRRGFPTTAANLVGNPTTAADSASYAHSLLSTSTNRSSWRNPLHPRIASASLLSKVFFALRRDPQIPHSPSTEIGMGAGASGLASTEPSGKVARGAGLGDLPELCTAEVLLRLGALDICRLTRLNLAFRGAAGANFVWEAKPPLQGSGQRPGIRYTWPTSGTLAPCSAVESSLSSQVRMPRTSLPSAPPAHVQAALPGHHPHGSLALLWWLPRRQVESTTQMNVSFAVKQDPTLVPRFNEGAVSLLWDAVVVSR

SEQ ID NO: 76875 - protein, 104 aa, Zea mays
  Coding DNA Sequence Number=SeqID_35096
  Homolog annotation: Hit_ID=Q1KL68; Match level="QueryCoverage=53%, HitCoverage=5%, E-value=6e-24, Identity=96%"; Hit description=Lysine ketoglutarate reductase/saccharopine dehydrogenase biofunctional enzyme
MSTRERRVATSLVDDVEGVVNDVVELEGVVRLREAMQCQDMVLLHHEVEVEYPDGQPTEKHQATLLEFGKVENGRSTTAMALTVGIPAAIGALVANLTTILLEQ

SEQ ID NO: 76876 - protein, 245 aa, Zea mays
  Coding DNA Sequence Number=SeqID_35097
  Gene Ontology: Mol. function=oxidoreductase activity; Cellular component=cytoplasm; Biological process=electron transport
  Homolog annotation: Hit_ID=O04709; Match level="QueryCoverage=92%, HitCoverage=21%, E-value=1e-113, Identity=89%"; Hit description =Lysine-ketoglutarate reductase/saccharopine dehydrogenase bifunctional enzyme
MEHLDLIHILESNAKRLRLPELPDFALEHLPNRNSLIYGDLYGISKEASTIYRATLRYEGFSEIMATLTKIGFFDAANHPLMEDTNRPTHKGFLDELLNNISTTNTDFDIEASDGYDDELIARLLKFGHCKDTEIAVKTVKTIKFLGLYEETQIPTGCSSPFDVICQRMEQRMAYGHNEQDMVLLHHEVEVEYPDGQPTEKHQATLLEFGKVENGRSTTAMALTVGIPAAIGALVANLTTILLEQ

SEQ ID NO: 76877 - protein, 198 aa, Zea mays
  Coding DNA Sequence Number=SeqID_35098
  Gene Ontology: Mol. function=iron-sulfur cluster binding; Cellular component=mitochondrion; Biological process=lipoate biosynthetic process
  Homolog annotation: Hit_ID=Q5ZAQ2; Match level="QueryCoverage=70%, HitCoverage=37%, E-value=2e-67, Identity=92%"; Hit description =Putative lipoic acid synthetase isoform 1
  Pfam annotation: Domain name=Radical_SAM; Domain location=8-183; Score=11.4; E_value=0.015; Accession=PF04055.11; Description=Radical SAM superfamily
MADKGKGKGIVIGDPRMSDISQKEIARKASDEKAKKSEDTGGQAQLMNQTHQPSPSIVDDYVVLTSVDRDDLPDGGSSHFAQTVKALKELKPGILVECLTSDFRGDLEAISSLANSGLDVYAHNIETVRSLQRVVRDPRAGYDQSLAVLKHAKGSREDMITKSSIMLGLGETDEEVKQAMMDLRAIGVDILTLGQYLQ

SEQ ID NO: 76878 - protein, 243 aa, Zea mays
  Coding DNA Sequence Number=SeqID_35099
  Homolog annotation: Hit_ID=Q1SW45; Match level="QueryCoverage=27%, HitCoverage=34%, E-value=1e-08, Identity=53%"; Hit description=Sec20
  Pfam annotation: Domain name=MPPN; Domain location=140-216; Score= -21.9; E_value=0.019; Accession=PF05172.3; Description=MPPN (rrm -like) domain
  Pfam annotation: Domain name=Sec20; Domain location=64-140; Score= -6.4; E_value=0.026; Accession=PF03908.4; Description=Sec20
  Pfam module annotation: Pfam domain module=MPPN::Sec20; Domain location=140-216::64-140
MSSRYALIYTPSALKIERPRLSVNVAILAKERYLRTRVDIAVGEAQSNTKVDTTPKMTKAGMTSVAESITESLRRSRQMMVQEVERSASTLATFGETGRTYEARLVAIYRHVRENGVEGQPISVSTEQFACHFLVAQYRHQVLSSCVNTTVYGFHYPLNMKHIVLKLTTFTIVYVVPKRSYDARKALQKNVIQLSSSLIVGVKPIDAVHRQQLDESFAPSNSGGFMASLPSKSLGLKSTGASN

SEQ ID NO: 76879 - protein, 182 aa, Zea mays
  Coding DNA Sequence Number=SeqID_35100
  Pfam annotation: Domain name=MPPN; Domain location=79-155; Score= -21.9; E_value=0.019; Accession=PF05172.3; Description=MPPN (rrm -like) domain
  Pfam annotation: Domain name=Sec20; Domain location=3-79; Score=-6.4; E_value=0.026; Accession=PF03908.4; Description=Sec20
  Pfam module annotation: Pfam domain module=MPPN::Sec20; Domain location=79-155::3-79
MTSVAESITESLRRSRQMMVQEVERSASTLATFGETGRTYEARLVAIYRHVRENGVEGQPISVSTEQFACHFLVAQYRHQVLSSCVNTTVYGFHYPLNMKHIVLKLTTFTIVYVVPKRSYDARKALQKNVIQLSSSLIVGVKPIDAVHRQQLDESFAPSNSGGFMASLPSKSLGLKSTGASN

SEQ ID NO: 76880 - protein, 449 aa, Zea mays
  Coding DNA Sequence Number=SeqID_35101
  Gene Ontology: Mol. function=transferase activity, transferring hexosyl groups; Biological process=carbohydrate biosynthetic process
  Homolog annotation: Hit_ID=Q75IZ5; Match level="QueryCoverage=45%, HitCoverage=37%, E-value=3e-80, Identity=74%"; Hit description =Putative glycosyltransferase protein
MDIVVEEGNVDVGNTAEPSYEVVAISGCLTQLSTNDTDEHELKSEDSKVSVGNAAKQSHDVVGVGIDCIFNHVKVSTEADLGPKPDVIHLTSLDVPNESSQIRSDADMVEQNKQDALDTLIRISQHKKPKKLNVARVVSEDYKCTPEDVQLIEYIKTLPGEQVVVNIDSAWLNRNDMECLFHGDIQLSGEALSAYIHCIRDEEHLLHREGGKVFLENTFISSLLKRDGDPKDNGSEIEEVPREKIRNCQRLLSEGVVSGRAITKDEAHPIISRLALLIYKAQDSHYDLSTTIVTLKNHALALEERAKAAIVQSAEFGQLAAESFPKNLHCLTVKLTEEWLRNPKHRSRSEENRNSTRLVDNNNLYHFCIFSDNVLATSVVVNSTVSNANHPQQLVFHVVTDRIHFGAMSTLFLINDFKGCTVEVRCIDEFSWLNASSSPLVRQLSEVET

SEQ ID NO: 76881 - protein, 415 aa, Zea mays
  Coding DNA Sequence Number=SeqID_35102
  Gene Ontology: Mol. function=cysteine-type peptidase activity; Biological process=proteolysis
  Homolog annotation: Hit_ID=Q109R5; Match level="QueryCoverage=82%, HitCoverage=47%, E-value=6e-23, Identity=26%"; Hit description=Ulp1 protease family, C-terminal catalytic domain containing protein
YKCTPEDVQLIEYIKTLPGEQVVVNIDSAWLNRNDMECLFHGDIQLSGEALSAYIHCIRDEEHLLHREGGKVFLENTFISSLLKRDGDPKVLLNCVHSNEYRKLSLVPGSSECKKLRFKLPAILWDSRLNTKKRHQNLDHNVDEDGESSSDVQIIDTPYNAKYLKKHWIQSTKPYPISLSLQKFKDILDVNKPMNTYCFNMAVRMIACNDALFLLEDKYHYMDLQFCYSITKFGRDPRLRAKPDINMLAKLLECWPDMEYDVSDCKQILLPFSFLGHFTLYVLNMDTRSIYIMDSMPIPSWFKGDHPSMHYIHNIHYIANNMNAVMELANPTWKDNIYMWRRIVPTWVPRTLNWDLSGFLVINFMHDWNGIRLPCICTNGNDLRTKFLVELLKYKDNEFKDNIPEKIQEIIRHIR

SEQ ID NO: 76882 - protein, 189 aa, Zea mays
  Coding DNA Sequence Number=SeqID_35103
  Gene Ontology: Mol. function=ATP binding
  Homolog annotation: Hit_ID=Q8LML8; Match level="QueryCoverage=77%, HitCoverage=9%, E-value=3e-61, Identity=77%"; Hit description =Putative DNA helicase homolog
  Pfam annotation: Domain name=DUF889; Domain location=3-93; Score= -130.3; E_value=0.012; Accession=PF05970.5; Description=Eukaryotic protein of unknown function (DUF889)
  Subcellular localization annotation: CTP_CleavageSite=24; ConfidenceScore=5.06e-01
AGHFETGSSIPLQPTRRVFSLHCVLSLRVGRHPDPVPGSKGTLNPANGLCNGTRLVVRGFQKNSIDAEIVLGQHAGMRIFLPRIPLCPSDDEMFPFRFKRKQIPIRLSFAMTVNKAQGQTIPNVGVYLPEPVFSHGQLYVALSRATARSKVKILAIPVHDEKKKGVERNSAINGATYTKNIVYKEVLTS

SEQ ID NO: 76883 - protein, 213 aa, Zea mays
  Coding DNA Sequence Number=SeqID_35104
  Gene Ontology: Mol. function=ATP binding
  Homolog annotation: Hit_ID=Q8LML8; Match level="QueryCoverage=68%, HitCoverage=9%, E-value=4e-61, Identity=77%"; Hit description =Putative DNA helicase homolog
  Pfam annotation: Domain name=DUF889; Domain location=3-117; Score= -117.8; E_value=0.0017; Accession=PF05970.5; Description=Eukaryotic protein of unknown function (DUF889)
MAHRGSLHKDVTYNQCGNSYSYVVAGHFETGSSIPLQPTRRVFSLHCVLSLRVGRHPDPVPGSKGTLNPANGLCNGTRLVVRGFQKNSIDAEIVLGQHAGMRIFLPRIPLCPSDDEMFPFRFKRKQIPIRLSFAMTVNKAQGQTIPNVGVYLPEPVFSHGQLYVALSRATARSKVKILAIPVHDEKKKGVERNSAINGATYTKNIVYKEVLTS

SEQ ID NO: 76884 - protein, 156 aa, Zea mays
  Coding DNA Sequence Number=SeqID_35105
MRRPLPRPAPCRAKRQDHLVAKRRAPRPDHHVAEPPSVFSIRRQGARRPPGNRAMKQQGLSARPREQPPAREMAKPCARSTREPRHLAMCGPRAWLEAARSARLAGLLCRSERRPWPIVRAEHVTRTGNRARDRAGEPRWGRLYACLRWEEPPGCA

SEQ ID NO: 76885 - protein, 389 aa, Zea mays
  Coding DNA Sequence Number=SeqID_35106
MALGKGPLAATSTEKFYSGGFGERRIERYDAYGSSSNSPPFTSPREPDVTRAIAATVLQAPAVTDADSATGLVSHDSCLGGEPDPWRPRANEADHGSSAAGLAPARTPRRRSQRGLCWPPGAVRARLAGLSEPRRTTSVLLGRGSTAATPLVVAGGGSTALESPSAAHGGPAALPVGRASDQSTTDAAPRETGGWGLGAALRGARRGLLGTLGATRRLFPAKAGVEAPPARLPCTVASPVSSPGHVLGADDRPRPPLGATQQPGEARRPGGLKPGARATHRQVARLPGRASARFGHLSRWRLLPRTRREALLLHGAVSWRAPGSLAPDGEDRRRLGHVVVWARCSALGHEVVLALGATRGWARQRSTHGGGRGAPAPWRRLGQSPGGGG

SEQ ID NO: 76886 - protein, 478 aa, Zea mays
  Coding DNA Sequence Number=SeqID_35107
  Gene Ontology: Mol. function=3-isopropylmalate dehydratase activity; Cellular component=chloroplast; Biological process=leucine biosynthetic process
  Homolog annotation: Hit_ID=Q6Z702; Match level="QueryCoverage=99%, HitCoverage=86%, E-value=0.0, Identity=86%"; Hit description =Putative 3-isopropylmalate dehydratase large subunit
  Pfam annotation: Domain name=Aconitase; Domain location=2-468; Score =124.6; E_value=2.8e-34; Accession=PF00330.10; Description=Aconitase family (aconitate hydratase)
MTMTEKILARASERAALEPGENVWVDVDVLMTHDVCGPGAFDIFKKEFGEDARVWDREKLVVIPDHYIFTSDGRAKRNVDILRDFCAEQNIKYFYDIKDLSDFRFMSWLLCLVSVIPEFRFLACSFPLPEHFTFRSCLQANPDYKGVCHIALAQEGHCRPGEVLLGTDSHTCNAGAFGQFATGIGNTDAGFVLGTGKALLKVPPTIRFILDGEMPPYLLAKDLILQIIGEISVSGATYKSMEFVGSTVESLTMEERMTLCNMVIEAGGKNGVVPADETTFKYLEGKTSVDYEPVYSDAQARFFSDYRFDVSKLEPVVAKPHSPDNRAPARECKDVKIDRVYIGSCTGGKTEDFLAAAKVFLASGKKVKVPTFLVPATQKVWLDIYSLPVPGSGGKTCSQIFEEAGCDTPASPNCGACLGGPRDTYARMNEPTVCVSTTNRNFPGRMGHKEGQIYLASPYTAAASALTGYVTDPRDFLM

SEQ ID NO: 76887 - protein, 502 aa, Zea mays
  Coding DNA Sequence Number=SeqID_35108
  Gene Ontology: Mol. function=3-isopropylmalate dehydratase activity; Cellular component=chloroplast; Biological process=leucine biosynthetic process
  Homolog annotation: Hit_ID=Q6Z702; Match level="QueryCoverage=95%, HitCoverage=86%, E-value=0.0, Identity=86%"; Hit description =Putative 3-isopropylmalate dehydratase large subunit
  Pfam annotation: Domain name=Aconitase; Domain location=26-492; Score= 124.6; E_value=2.8e-34; Accession=PF00330.10; Description=Aconitase family (aconitate hydratase)
  Subcellular localization annotation: CTP_CleavageSite=34; ConfidenceScore=5.08e-01
MASSVSAAAKAAAAFAHKVQVKSAMTMTEKILARASERAALEPGENVWVDVDVLMTHDVCGPGAFDIFKKEFGEDARVWDREKLVVIPDHYIFTSDGRAKRNVDILRDFCAEQNIKYFYDIKDLSDFRFMSWLLCLVSVIPEFRFLACSFPLPEHFTFRSCLQANPDYKGVCHIALAQEGHCRPGEVLLGTDSHTCNAGAFGQFATGIGNTDAGFVLGTGKALLKVPPTIRFILDGEMPPYLLAKDLILQIIGEISVSGATYKSMEFVGSTVESLTMEERMTLCNMVIEAGGKNGVVPADETTFKYLEGKTSVDYEPVYSDAQARFFSDYRFDVSKLEPVVAKPHSPDNRAPARECKDVKIDRVYIGSCTGGKTEDFLAAAKVFLASGKKVKVPTFLVPATQKVWLDIYSLPVPGSGGKTCSQIFEEAGCDTPASPNCGACLGGPRDTYARMNEPTVCVSTTNRNFPGRMGHKEGQIYLASPYTAAASALTGYVTDPRDFLM

SEQ ID NO: 76888 - protein, 320 aa, Zea mays
  Coding DNA Sequence Number=SeqID_35109
  Gene Ontology: Mol. function=aldehyde reductase activity
  Homolog annotation: Hit_ID=Q9FVN7; Match level="QueryCoverage=48%, HitCoverage=51%, E-value=2e-53, Identity=67%"; Hit description=NADPH- dependent mannose 6-phosphate reductase
  Pfam annotation: Domain name=Aldo_ket_red; Domain location=1-226; Score=30.7; E_value=5e-11; Accession=PF00248.11; Description =Aldoketo reductase family
QGGPCELEVLGKKGMVQLNGRLVQQIIDAILVLDIDDPPCAIAAGALLFVLASDPVSKVLCKLRRLEQGGPCELEVLGKKGMVQLNGRGLARVGVCARDGGLHRNHWTKIKSAVNQIETHPYFQRDSLVKFCQKHGICVTAHTPLGGSTTNAEWFGRVSCLDDPVIKSSAEKYGKTPAQLVLRWGLQRDTVVIPKTSKVERLQENFDVFGFDISGEDMERMKAVDRKYQTNQPAKLWASTCEGNCKDLRTLSGRMKKVGQYLLRRRTHYMSQFEKLAMELMPKLGEHFVEEMINPSMYGSRWFITVFSCSFPFHLTLRVL

SEQ ID NO: 76889 - protein, 153 aa, Zea mays
  Coding DNA Sequence Number=SeqID_35110
  Homolog annotation: Hit_ID=Q1S3A6; Match level="QueryCoverage=44%, HitCoverage=22%, E-value=1e-21, Identity=69%"; Hit description =Aldo/keto reductase
SSAEKYGKTPAQLVLRWGLQRDTVVIPKTSKVERLQENFDVFGFDISGEDMERMKAVDRKYQTNQPAKLWASTCEGNCKDLRTLSGRMKKVGQYLLRRRTHYMSQFEKLAMELMPKLGEHFVEEMINPSMYGSRWFITVFSCSFPFHLTLRVL

SEQ ID NO: 76890 - protein, 308 aa, Zea mays
  Coding DNA Sequence Number=SeqID_35111
  Homolog annotation: Hit_ID=O23372; Match level="QueryCoverage=59%, HitCoverage=8%, E-value=8e-34, Identity=41%"; Hit description =Probable histone-lysine N-methyltransferase ATXR3
MALDRSITLLSDDAVVFLSGATYNTKKGGDDTGSSKPKGGGSFVPRHLRPGDTSSLLLGTTLATEGHILLLCCVNHVCHFRSCPMSWIRNPHKFRQVIDASIVYDPWTRESQGFGFVTMPCVKEAYRYIKYLNRFVMQDQVITAEKPLGLNFFDNLLSDIMPADLELSPTDKHIFIEELLLNALNKQVRSAEDSGGRRTLKMCLGMLKFMRNRSDQNFVAYRKVYPSWRWYEKQDGIEHIQSNSEDQAPEFYNIMLERSKGDRYGYDLVFVDAMHKANYASRICHSCNPNCEAKIYVYDVHEVFFWRE

SEQ ID NO: 76891 - protein, 154 aa, Zea mays
  Coding DNA Sequence Number=SeqID_35112
  Homolog annotation: Hit_ID=Q10NM2; Match level="QueryCoverage=32%, HitCoverage=14%, E-value=3e-12, Identity=70%"; Hit description=RNA recognition motif family protein, expressed
MALDRSITLLSDDAVVFLSGATYNTKKGGDDTGSSKPKGGGSFVPRHLRPGDTSSLLLGTTLATEGHILLLCCVNHVCHFRSCPMSWIRNPHKFRQVIDASIVYDPWTRESQGFGFVTMPCVKEAYRYIKYLNRFVMQDQVITAEKVIGLRLRA

SEQ ID NO: 76892 - protein, 314 aa, Zea mays
  Coding DNA Sequence Number=SeqID_35113
  Gene Ontology: Mol. function=protein dimerization activity; Cellular component=nucleus; Biological process=regulation of transcription, DNA-dependent
  Homolog annotation: Hit_ID=Q6Z2L2; Match level="QueryCoverage=97%, HitCoverage=97%, E-value=2e-86, Identity=52%"; Hit description =Putative transcription factor HBP-1a
  Pfam annotation: Domain name=MFMR; Domain location=1-147; Score =122.8; E_value=1e-33; Accession=PF07777.2; Description=G-box binding protein MFMR
  Pfam annotation: Domain name=bZIP_1; Domain location=207-271; Score =89.3; E_value=1.2e-23; Accession=PF00170.11; Description=bZIP transcription factor
  Pfam annotation: Domain name=bZIP_2; Domain location=207-261; Score =34.9; E_value=2.8e-07; Accession=PF07716.5; Description=Basic region leucine zipper
  Pfam module annotation: Pfam domain module=MFMR::bZIP_1::bZIP_2; Domain location=1-147::207-271::207-261
  Subcellular localization annotation: CTP_CleavageSite=56; ConfidenceScore=5.21e-01
MGSNDPNTPSKASKASEQDQPPATTTSSGTASVYPEWPSFQAYSAIPPHAFFPPTVAANPQAHPYMWGAQPIVPPYGTPPPPPYVMYPPGTVYAHPSTPPAMHPFGHYPMPTNGHAETHDSHSKDNDGKEDGNSQNGMSYSGSQGVVNQTMAMLPMQPGAMVGGVPSSTAANLNIGVDYWAAPGSAAVPAAHGKAPAGSARGDQWDERELKKQKRKQSNRESARRSRLRKQAECEELGQRAEALRSENSSLRAELERIRKEYEQLLSQNASLKEKLGAASSDSLPDMNEQNDGDGDGGYRKQPDSDGHQPGSES

SEQ ID NO: 76893 - protein, 229 aa, Zea mays
  Coding DNA Sequence Number=SeqID_35114
  Gene Ontology: Mol. function=DNA binding; Cellular component=nucleus; Biological process=regulation of transcription, DNA-dependent
  Homolog annotation: Hit_ID=Q1SKG8; Match level="QueryCoverage=63%, HitCoverage=14%, E-value=1e-43, Identity=58%"; Hit description=SBP
  Pfam annotation: Domain name=bZIP_1; Domain location=57-107; Score =17.7; E_value=0.0018; Accession=PF00170.11; Description=bZIP transcription factor
MAMLPMQPGAMVGGVPSSTAANLNIGVDYWAAPGSAAVPAAHGKAPAGSARGDKWDERELKKQKRKQSNRESARRSRLRKQIVNWLKHSPTEMEGYICPGCLVLSMYLLMPGIAWDELEENLLQRVNSLFQSSDLDFWRKGRFLVRTNSQLVSYKAGMTRLSKLWRTWNTPELTLVSPIAVVGGQKTSLILKGHNLSIPGTQIHCTSIGKYISKEVLCSAYPGRKQVQG

SEQ ID NO: 76894 - protein, 275 aa, Zea mays
  Coding DNA Sequence Number=SeqID_35115
  Subcellular localization annotation: CTP_CleavageSite=44; ConfidenceScore=5.67e-01
METSAATPTRPPHPAAASPSPSPSSSLRLWRSAAQRNVRNQWSRLSAAKEQWLAAVADGRAHASALVNAHLCRRQASFLSAWGAIQWDASVGLQGDGNLPLQSYADSVTKNLDPIVHGIKFSDRQDNLNDSGDGGGAPVFKWFSILEFETLAQELVQMFVSEQKLKRLLLLEFLSIALKEGVELQTSLNWGDELYDGESNELQSIGLQSGDAYSPPENWCAERLGSQRPGNLPLHEVLQNSHLEFGCDNSDDFLHHLRIGEIFELVEEEMKIKLS

SEQ ID NO: 76895 - protein, 197 aa, Zea mays
  Coding DNA Sequence Number=SeqID_35116
  Gene Ontology: Mol. function=oxidoreductase activity; Cellular component=cytosol; Biological process=visual perception
  Homolog annotation: Hit_ID=Q10T48; Match level="QueryCoverage=70%, HitCoverage=37%, E-value=3e-47, Identity=68%"; Hit description =Oxidoreductase, zinc-binding dehydrogenase family protein, expressed
  Pfam annotation: Domain name=ADH_N; Domain location=30-111; Score =82.5; E_value=1.3e-21; Accession=PF08240.2; Description=Alcohol dehydrogenase GroES-like domain
MVKSKAIRVHELGGPEVLRWEEVEVGEPGEGEIRIRTTAVGVNFIDIYFRKGVYAAPTMPFTPGMEAVGVVTAVGPGLTGRKVGDVVAYAGNPMGSYAQEQILPAAVAVPVPPSVDHKQAASVMLKGMTAHVLLRRVFKSRAVEGAVEGSDDNGDIRARIRNAAASARVREGNGNQGWVIGTVEQTRDCSLSVNRGN

SEQ ID NO: 76896 - protein, 386 aa, Zea mays
  Coding DNA Sequence Number=SeqID_35117
MQLCIRQSRAVEGSDDNGDIRARIRNAAAFARVHEGNGKQGWVIGTVEQTRHCSPSVNRGNGLQCDPSPFTGILFLLLSPPDLFSLPLNGWARYSGDLPRSRFLRTQARALGILRGRSSRRTTGDRTAAGEGTRRSALARESFVFVRPASSSGGPPRESAVQLRGPATRPIRAKTPVPLVSVRRHVGCGVEVKGRSSIRRQIYAQPICVIRASRSKLTRRRRGPELGAIDLGAELRSKTPSSSSLQSRGSRLLHRALVSSTATIVSSTAATAPPRPPATARAPPPAAARPGPSTGDRAARPIAPAPRPGAARPCSSGGACPHYPAASPPPPPLAREPRARDLPTAPRPPAPRTTASPSSLHRAPQRAPALSTAVPRRSRTKLRLAS

SEQ ID NO: 76897 - protein, 643 aa, Zea mays
  Coding DNA Sequence Number=SeqID_35118
  Homolog annotation: Hit_ID=Q71CE5; Match level="QueryCoverage=21%, HitCoverage=30%, E-value=4e-26, Identity=47%"; Hit description =Lecithine cholesterol acyltransferase-like protein
  Pfam annotation: Domain name=LACT; Domain location=1-385; Score= -166.9; E_value=0.098; Accession=PF02450.6; Description =Lecithin:cholesterol acyltransferase
MPLSYDADAKADDYYNAPGVEIMVSNFGSTSTLSYLEPDLMLPMRYRNILAGMLEKAVYEEGHDLFGVLYESRYGLAGPGPPSQGGNAYLQHLRLRVESACTTNGRRPAILVVHNLCGLFTLQLLPCSPLQWRAVHMQRLGTLSTPWGDSVQEMLENIFDCLYCVFRVLENKERLVKAEGVEFMLIMQPWPPPHMQVEFGCGSADLCPIPWPFFTTIGTNEEIIDITSDDDKVDNVVDQLIDEQIAAVVFVPACMEATPNNGINTSKTMETFAAHQSPEYDSGLKDKDQRISFEDEISEGGQAEQSTPQQELCAMPPDTSDRETVERTTRSIEVEHFSQVESKHKMNSMSVEASEHVTITQIEKKQVQQVEITQELDSLPICSREHSDEALEGERTVQAGLEQECEVLGILSTITSDIFAIGLSPNQYTVYFYQNLMACMMLICRRFLLSFGRSWDVVILGDGLSVRLTPWQPFDTDIYIFPVNRPESSPSVFGIATESTQCAYDSQGNSVSTILLMMQRCLYEQMMQYKSEEGCTRVVKCLPPADASLLVWAVNQMTDPLIALMYAVQVMNFLKDKDESPREDVLLLQKDPFDGNRHQKPNVTLAISLRKDPGVIAACTAPTNEVPTYVEDYTSSSKSATAG

SEQ ID NO: 76898 - protein, 886 aa, Zea mays
  Coding DNA Sequence Number=SeqID_35119
  Homolog annotation: Hit_ID=Q71CE5; Match level="QueryCoverage=21%, HitCoverage=42%, E-value=3e-32, Identity=42%"; Hit description =Lecithine cholesterol acyltransferase-like protein
  Pfam annotation: Domain name=LACT; Domain location=222-628; Score= -143.4; E_value=0.0032; Accession=PF02450.6; Description =Lecithin:cholesterol acyltransferase
MAHMELRLTDALAGRGGEHRMEDAVSGLSSAAPTGFDGEPTFDEELGNSITESVDVSCHDHLFLLDTTWDCSQQHNASIPGRRQHLGRSTRLQRRPLQHLIVDPVSAVHGSDDSELSHSEVDRVLATVVLSNPREKVHDGLVGVTEFAHRPLAVYDSYVEHDLYSFIPLLFYTEQAKEEQVPVDTPTRCSMRVLNCRTFPRQGLQGHPSSPVCPLVRRHDGGFHLWFEPSVLVAPRTRGRAEQMPLSYDADAKADDYYNAPGVEIMVSNFGSTSTLSYLEPDLMLPMRYRNILAGMLEKAVYEEGHDLFGVLYESRYGLAGPGPPSQGGNAYLQHLRLRVESACTTNGRRPAILVVHNLCGLFTLQLLPCSPLQWRAVHMQRLGTLSTPWGDSVQEMLENIFDCLYCVFRVLENKERLVKAEGVEFMLIMQPWPPPHMQVEFGCGSADLCPIPWPFFTTIGTNEEIIDITSDDDKVDNVVDQLIDEQIAAVVFVPACMEATPNNGINTSKTMETFAAHQSPEYDSGLKDKDQRISFEDEISEGGQAEQSTPQQELCAMPPDTSDRETVERTTRSIEVEHFSQVESKHKMNSMSVEASEHVTITQIEKKQVQQVEITQELDSLPICSREHSDEALEGERTVQAGLEQECEVLGILSTITSDIFAIGLSPNQYTVYFYQNLMACMMLICRRFLLSFGRSWDVVILGDGLSVRLTPWQPFDTDIYIFPVNRPESSPSVFGIATESTQCAYDSQGNSVSTILLMMQRCLYEQMMQYKSEEGCTRVVKCLPPADASLLVWAVNQMTDPLIALMYAVQVMNFLKDKDESPREDVLLLQKDPFDGNRHQKPNVTLAISLRKDPGVIAACTAPTNEVPTYVEDYTSSSKSATAG

SEQ ID NO: 76899 - protein, 258 aa, Zea mays
  Coding DNA Sequence Number=SeqID_35120
  Gene Ontology: Mol. function=oxidoreductase activity, acting on single donors with incorporation of molecular oxygen, incorporation of two atoms of oxygen; Cellular component=chloroplast; Biological process=abscisic ...
  Gene Ontology: Biological process=acid biosynthetic process
  Homolog annotation: Hit_ID=Q5MBR5; Match level="QueryCoverage=84%, HitCoverage=23%, E-value=2e-34, Identity=51%"; Hit description=9-cis- epoxycarotenoid dioxygenase 3
MVNRNMLGPRTRYAYLAVAEPWPKVSGFAKVDAGTREVVVVGSCMTPADSIFNDADDGHQLQSVLTEIWRDEPTAAPVPRRTDSIFNDADDGHQLQSVLTEIRLDTRTGASTRCAVLPASAQVNLEVGMVNRNMLGRRTRYAYLAVAEPWPKVSGFAKVDAGTGEVVVVESCMTPADSIFNDADDGYQLQSVLTEIRRDEPTAAVRARRMGPRGGQTGLPDSTPLPPAHIAPALPSLPPDASTPSSTTPTTGTSCKAC

SEQ ID NO: 76900 - protein, 377 aa, Zea mays
  Coding DNA Sequence Number=SeqID_35121
  Gene Ontology: Mol. function=oxidoreductase activity, acting on single donors with incorporation of molecular oxygen, incorporation of two atoms of oxygen; Cellular component=chloroplast; Biological process=abscisic ...
  Gene Ontology: Biological process=acid biosynthetic process
  Homolog annotation: Hit_ID=Q5MBR5; Match level="QueryCoverage=76%, HitCoverage=23%, E-value=1e-27, Identity=50%"; Hit description=9-cis- epoxycarotenoid dioxygenase 3
  Subcellular localization annotation: CTP_CleavageSite=69; ConfidenceScore=5.20e-01
MCAGGSGVESGNPVCPPLGPILLALTAAVGSSRLISVSTLCSWYPSSASLKMESAGVMQDSTTTTSPVPASTFANPDTLGHGSATARYAYRVRRPSMFRFTIPTSRFTCADAGSTAHRVDAPLVPVVGVVEDGVGASGDRLGRAGAMCAGGSGVESGNPVCPPLGPILLALTAAVGSSRQISVSTLCSWCPSSASLKMESAGVMQDPTTTTSLVPASTFANPDTLGHGSATARYAYRVRGPSMFRFTIPTSRFTCADAGSTTRRVDAPVRVSSLISVSTLCSWCPSSEDGIVESGCRELPVGPRPAVVEQVAKAFGAVVVVGGGVTASPRRGEEGRHARSEVDGVVTGGVGRPRRRGIRASWRPLDGGDALDLGSAR

SEQ ID NO: 76901 - protein, 276 aa, Zea mays
  Coding DNA Sequence Number=SeqID_35122
MQLEHQSLGAKKANRRARNELSRTIAHRLGAAAERYFINQGGDNEAPRTWPNGAARRGAMGQSAAGTDVAVDVRSRHVSREGDTLHGVNSGPEPHARAPDPWIYILDPKDGPEPPDIQSGPPRLVPDPHVCKLDPWNGIRTLRMGSGPVRIRLCSPPRRRPDAATWPTTRDVSQRAEPDVRPPGYATPTFIADKARCLPTPLTCDVPPRHLMSHVHPVGGVPVHSTGRRCAASAFNETCPSHRRHACPFHWQTARPYCRVHYAHHYSYVTKEAAAS

SEQ ID NO: 76902 - protein, 92 aa, Zea mays
  Coding DNA Sequence Number=SeqID_35123
MRPLQLYADGGYQLRIRSLEDILFVFSIFALFFLTNLLPPPMVAVASRPMLVDAVRSPGLGRYSHPLDLLGLTPGEKTPMRTDEQEDTPTRT

SEQ ID NO: 76903 - protein, 149 aa, Zea mays
  Coding DNA Sequence Number=SeqID_35124
  Subcellular localization annotation: CTP_CleavageSite=31; ConfidenceScore=5.50e-01
MVLVSIAATSFAILLLFSLPSCPRLRTTPFSAEGVRTGVSSPYSSDTNPDTDSRSGYYTSTRTSHNMRAPSFLPSSDILFVFSIFALFFLTNLLPPPMVAVASRPMLVDAGTGESVLLLAFLCACRTRRTQWRLPHLGYLGSEESSAKD

SEQ ID NO: 76904 - protein, 99 aa, Zea mays
  Coding DNA Sequence Number=SeqID_35125
MDLGGVVMAADDSASELGLLGGGGYTGDGANTARGEDDERQQVEAGDASIRRRRGRGGCHQGGDTVLAAVNLFHGITNYPHENKKILSDFSTDKGNVSF

SEQ ID NO: 76905 - protein, 618 aa, Zea mays
  Coding DNA Sequence Number=SeqID_35126
  Gene Ontology: Mol. function=zinc ion binding; Cellular component =nucleus; Biological process=regulation of transcription
  Homolog annotation: Hit_ID=Q5NBP4; Match level="QueryCoverage=75%, HitCoverage=92%, E-value=1e-109, Identity=46%"; Hit description =Ascorbate oxidase promoter-binding protein AOBP-like
  Pfam annotation: Domain name=zf-Dof; Domain location=242-304; Score =135.5; E_value=1.5e-37; Accession=PF02701.6; Description=Dof domain, zinc finger
MAAPGGLDQDCAQDAAIKLFGRSIPVLHSSVFAATAAAASECLYGNFLPIRVSSTSHSPYLRPYLWGDLCWFIPYPDSNHKDTLPLSVEKSLRIFLFSWGLILLDISALAYFYSRTNNLLKSKSTSSNNLSCVAWNANHVTHWVVLVSTKLSNDVRSNDGMPCLPNMSLIVKTNPFPSKSNMKNGLQAISSQHGKMEADSNSEEAKNSLQAIISQPGKRYDSKSEEAKTESGGSGQEKVLKKPDKILPCPRCNSMETKFCYFNNYNVNQPRHFCRNCKRYWTAGGTMRNVPVGSGRRRNKDPSHHHHFTKVCDYTIATNGDVSDATQRQSVAAKPCLLQGSGKQNETACKSVSPVSNIKEQNNADLISLVSGDNKEEKSCASSAVVSGSSENWMPENTVKKEEDNTSAYGNGVKVPDHKMQPHHAGPVSVFSRNPAAVMATNQCSEDGIHTPGNGTVSPLSLPPLPMVPTPGICAPAVPFPFPLVPAFVSCIPGWPSGLWGAPWPGSSAPTLLSLPPNGLALSGSNSGVLGKHTRVANLQEEQKAEKKFWVPKALRIDNPEEAAKSSIWASLGIKPDDRIIFKSFQSKDLKNSATKTPESLQANPAAFSRSQTFQERA

SEQ ID NO: 76906 - protein, 76 aa, Zea mays
  Coding DNA Sequence Number=SeqID_35127
MFGLQVTMRLIVLGFDSGNASPLQPNRTLAEYVDVYSPLLYTPTPPSPGCQHCDHCSREDEAVEGDFKEFQDYDEF

SEQ ID NO: 76907 - protein, 36 aa, Zea mays
  Coding DNA Sequence Number=SeqID_35128
MFGLQVTMRLMVLGFDSGNGIRPGDQQQYSSYSLER

SEQ ID NO: 76908 - protein, 63 aa, Zea mays
  Coding DNA Sequence Number=SeqID_35129
RIQGVVRFAVVPSMGLGVCGLLCQGMFGLQVTMRLMVLGFDSGNGEDEAVEGDFQEFQDYDEF

SEQ ID NO: 76909 - protein, 241 aa, Zea mays
  Coding DNA Sequence Number=SeqID_35130
  Subcellular localization annotation: CTP_CleavageSite=14; ConfidenceScore=5.10e-01
MAPPSPSPQPVHARAASLAPHLNLLRTSPHLAAAVPTRHRPSPIVPPEHGVAWKPVPYPQARHPPPLACNSFHAPLPPPCPHWICRTSAAGTLLRCGGCTCTAGSSPSSGGVARGSRLDVVLRAVRRGVVTPDPDPAPVIGVSSLTRPRPARRCRPIRIPRSTLPDARGFASDADLTRSPSPLPMAPSSPPMVDARCNSEVLQCVGVFVQGREGEQRIHPRQASGQHMQDEDVGRPYRKFL

SEQ ID NO: 76910 - protein, 214 aa, Zea mays
  Coding DNA Sequence Number=SeqID_35131
  Homolog annotation: Hit_ID=Q2R902; Match level="QueryCoverage=30%, HitCoverage=10%, E-value=2e-20, Identity=73%"; Hit description =Aminotransferase, putative
  Subcellular localization annotation: CTP_CleavageSite=61; ConfidenceScore=5.46e-01
MAPPSPSPQPVHARAASLAPHLNLLRMSPHLAAAVPMRHRPSPSCPPYPHARNCQHMATSMAAAFTRYLSSPFPVPHPPDLGARRRVEARAIPAGPPPTSPGVQQLSRSPCPRHARTGSAKHPPLAHSSGAAAALHSRFVTKLLNDLFGVQSRGDCACAVRPALLGVGEDLALRIRDAIVKGYHGMKPGWTRFRLAYYLSHDEFFKCPLSSVPQ

SEQ ID NO: 76911 - protein, 76 aa, Zea mays
  Coding DNA Sequence Number=SeqID_35132
  Subcellular localization annotation: CTP_CleavageSite=18; ConfidenceScore=5.08e-01
MKLWKETSRSSKTTTSSRCGLAATPSRLPVKAAFIYVSFPHFDLLARDSNLWRFLANGKSDKKKEHRGIQVDHWIT

SEQ ID NO: 76912 - protein, 698 aa, Zea mays
  Coding DNA Sequence Number=SeqID_35133
  Gene Ontology: Mol. function=hydrolase activity, acting on acid anhydrides, catalyzing transmembrane movement of substances; Cellular component=integral to membrane; Biological process =metabolic process
  Homolog annotation: Hit_ID=Q43002; Match level="QueryCoverage=53%, HitCoverage=42%, E-value=1e-167, Identity=75%"; Hit description =Plasma membrane H+-ATPase
  Pfam annotation: Domain name=Hydrolase; Domain location=15-394; Score= 13.8; E_value=0.0034; Accession=PF00702.16; Description=haloacid dehalogenase-like hydrolase
MEAAMYSASQLDMTTTCCLTDYPVDGTLAEEEDDPACALAGVDVAGVVAVAVPDKESTNVADGVCQIRSCVDEVAKAPHKTPENSAACPAPTAVALDRVRLTAAKSSLGRHGSSASPDPGLGLSLGLGRRSPPRPTLGLGLSLGLGRRTPPRPTPGLGLSLGLGRRSPPRPTQGSDSASTPEDELRLARPQGSDSASTSEDEIRLARPQGPDSTSTSEEPPPRPTSGSDPPRHREGLHYPTPSYLRLRGTRPASHLARPGLSYEKVGRAGERAGGQSLSLPLSLSHSPTRTLVTPLLQAHPTWAQDNTKAAGTPRSRNADRKCQMNKDESIASLPIDELIEKADGFAGVFPEHKYEIVKGLQARKHICGMTGDGVNDAPALKKADIGIAVADSTDATRSASDIVLTEPGLSVIISAVLTSRAIFQRMKNYTIYAVSITIRIVLGFMLLALIWKFDFPPFMVLIIAILNDVLGGYLAMMTVIFFWAAYKTDFFPRLFHVESLEKTAQDDFQKFASAVYLQVSTVSQALIFVTRSRSWSFVERPGFLLVFAFLVAKLIATLIAVYANWAFTAIKGIGWGWAGVIWLYNIVFYFPLDIIKFLIRYALSGRAWNLVLEQRIAFTSKKNFGTEERERKWAHAQRTLHGLQPPEASIFENKTTFNELNQLAEEARRRAEMARLREVSTLKGRMESVVKQKGLDI

SEQ ID NO: 76913 - protein, 248 aa, Zea mays
  Coding DNA Sequence Number=SeqID_35134
FSPSPQREVEYERPPSPAHQSEMPPAPPRGIPAAGGDPDGDNDADGGSLSHNTELSEEPEGWIARPITRDAARGCHFYDALDTQLHRDFDRHTWSNEYHCVVYQHCRGLYPDQWEATCLVRRPDDDLRGAEAFSEHYSITEKDTAEAAMQDAARQALSQYCSLFSGVADGLDLKYYPRRSTGSAGGVVVSPVGEGNPRLNSMVNLDVVLNTELDHALDELGKHPYHSPPRGRFDYCTPDCRTRIDLDP

SEQ ID NO: 76914 - protein, 386 aa, Zea mays
  Coding DNA Sequence Number=SeqID_35135
  Subcellular localization annotation: CTP_CleavageSite=79; ConfidenceScore=5.47e-01
MTPAHAPNSLFRAPPVPALAPRLISHSIALSRALPSPSDAAGDPCPLPRTSSSPETAPSLPELRPELYFPNVLNAFSVYLDNEQSEVPECVVGDLPEQQPAERPLRRMVPGQSSHLERLHRYLHEEQERRRQEQEQQDSSPSPQREVESERPPSPAPQSEMPPAPPRGIPAAGGDPDGDNDADGGSLSHNTELSEEPEGWIARPITRDAARGCHFYDALDTQLHRDFDRHTWSNEYHCVVYQHCRGLYPDQWEATCLVRRPDDDLRGAEAFSEHYSITEKDTAEAAMQDAARQALSQYCSLFSGVADGLDLKYYPRRSTGSAGGVVVSPVGEGNPRLNSMVNLDVVLNTELDHALDELGKHPYHSPPRGRFDYCTPDCRTRIDLDP

SEQ ID NO: 76915 - protein, 115 aa, Zea mays
  Coding DNA Sequence Number=SeqID_35136
  Subcellular localization annotation: CTP_CleavageSite=79; ConfidenceScore=5.47e-01
MTPAHAPNSLFRAPPVPALAPRLISHSIALSRALPSPSDAAGDPCPLPRTSSSPETAPSLPELRPELYFPNVLNAFSVYLDNEQSEVPECVVGDLPEQQPGEGKCPLTYYVLHTL

SEQ ID NO: 76916 - protein, 131 aa, Zea mays
  Coding DNA Sequence Number=SeqID_35137
  Homolog annotation: Hit_ID=Q2QMG2; Match level="QueryCoverage=23%, HitCoverage=4%, E-value=8e-10, Identity=96%"; Hit description =Methylcrotonoyl-CoA carboxylase subunit alpha, mitochondrial precursor
  Pfam annotation: Domain name=CPSase_L_D2; Domain location=2-127; Score=-127.9; E_value=0.072; Accession=PF02786.7; Description =Carbamoyl-phosphate synthase L chain, ATP binding domain
MDLTRCGMGGAEAEIGSKCTGQEPSKSGGRLRIRAWCLPHWSAAAGAAATAGIAVVLLTSRGSFIGLFVWKAVGYYNAGTVEFIVDTLSGEFYFMEMNTRLPPPLLDPVICYEAAINALLPLSAQLLLALS

SEQ ID NO: 76917 - protein, 119 aa, Zea mays
  Coding DNA Sequence Number=SeqID_35138
  Homolog annotation: Hit_ID=P42895; Match level="QueryCoverage=25%, HitCoverage=6%, E-value=3e-07, Identity=87%"; Hit description =Enolase 2
MPSVVAHIGACSTMRAPRPACRQTYPAAAHTRLLMAEAERRHGSDTVWNGEEPKRRLDQSGLGRSQANRVQDDWVRYAKMTEEIGEQLHIVGDDLVTNPTAFLAHMVYMKELMNLEGCG

SEQ ID NO: 76918 - protein, 191 aa, Zea mays
  Coding DNA Sequence Number=SeqID_35139
MEDEASRGAASAWVSYPFLPLASGGEWHPPVSRRLPPAMPGKGEDLPARFEASAAGDGFSTDEIANSASSPGSPSPGLNGWLSSSVGESPSAVAPAPKPLLKLLRRPGRGWLSLLPDRAAAGRPSVRDRSADSPVDYLNRFTKHESPRVKVTSESGDPWTASPSEARLDFAEGVTAPFQRQDPSLQNQSVL

SEQ ID NO: 76919 - protein, 110 aa, Zea mays
  Coding DNA Sequence Number=SeqID_35140
  Subcellular localization annotation: CTP_CleavageSite=62; ConfidenceScore=5.23e-01
MNKKPWHSKCHYKWNSGSVPAGTNDPTRLGNPRSDRGPTGGPPPPDPATATTTPAPGDEAASAAALGQVLRADRQRFRREQWATLRLRRNNCDKKAGTGKGGYPEKDPSP

SEQ ID NO: 76920 - protein, 363 aa, Zea mays
  Coding DNA Sequence Number=SeqID_35141
MHGCWGQTVPVPAPDPRPRPCPCLEDRRGASRGAAPEEDRRGRAAGHAPRRDARVLGPDRARPCAGSEAEAAPLPGGPSRSQPWSHARGGPPRPGGRARVAPGCTGAGARPRPPLRQIRGRGRALARRQSSSLLVPTRRPSGPACAHAGWRGRTLLTSVHMQSLGSPSRFGLPPPKLSAFSPLPVAPRDASRDSRVRPPDVYKLVLQMPLPPIVIHPLPPPRTTFLGHHQGASAGERAGGSCGPWCSTSRPVQPLLTVSARCPSSSHLVGAPPSLPPSGACFLPMIQSVARYVSIHTGISIVYAWSQGVNHAIIRHANKTSYNCFPAIIRHNQPEVWAFCLGNGYAGLKDALGSNDSRLQRIC

SEQ ID NO: 76921 - protein, 84 aa, Zea mays
  Coding DNA Sequence Number=SeqID_35142
  Homolog annotation: Hit_ID=Q10BD2; Match level="QueryCoverage=41%, HitCoverage=11%, E-value=3e-07, Identity=74%"; Hit description =Armadillo/beta-catenin-like repeat family protein, expressed
MVLVFYVPLQANGSNRCIFENQVYAWSQGVNHAIIRHANKTSYNCFPAIIRHNQPEVWAFCLGNGYAGLKDALGSNDSRLQRIC

SEQ ID NO: 76922 - protein, 64 aa, Zea mays
  Coding DNA Sequence Number=SeqID_35143
  Homolog annotation: Hit_ID=Q10BD2; Match level="QueryCoverage=64%, HitCoverage=13%, E-value=1e-07, Identity=61%"; Hit description =Armadillo/beta-catenin-like repeat family protein, expressed
MFKVVAAATTAKSRWTTRWSQGVKHGSAIIRHNQPEVWAFCLGNGYAGLKDALGSNDSRLQRIC

SEQ ID NO: 76923 - protein, 345 aa, Zea mays
  Coding DNA Sequence Number=SeqID_35144
  Gene Ontology: Cellular component=cytoskeleton
  Homolog annotation: Hit_ID=Q10S45; Match level="QueryCoverage=94%, HitCoverage=75%, E-value=9e-93, Identity=58%"; Hit description =Ankyrin repeat protein, chloroplast, putative, expressed
  Pfam annotation: Domain name=Ank; Domain location=263-295; Score =15.6; E_value=0.17; Accession=PF00023.20; Description=Ankyrin repeat
  Pfam annotation: Domain name=Ank; Domain location=296-328; Score =22.4; E_value=0.0017; Accession=PF00023.20; Description=Ankyrin repeat
  Pfam module annotation: Pfam domain module=Ank::Ank; Domain location =263-295::296-328
  Subcellular localization annotation: CTP_CleavageSite=18; ConfidenceScore=5.33e-01
MTPPSIFHHHRCLVSLPSASPTWTSSRRLIHQLAKPTVLSLHLRPVLSSSFAVAAVGDDEDVVVGDCLVFDDDAFEEPDLDLPSSPWPSASASRHGRRSEAGESDSLVPERWRHAEEEINLTKKDKRRIAHGLRFGSRLERRAPPAVAAPDEFRAYRKGMLSAEREHVSHVYRGPLERTPPPEVKEHPPPEPEPGTRVAPRNPRMGMGVGTLDDIDEFFRSREYVQDEMEDSKSPKGRQKLFSNEEKILLNKRVPDLETATSSKWLPLHTLAASGDFYLLNSLLKHNVDINALDKDGLPAIHKAILSKKAAIINYLLRNSANPFIQDKGQSRASSNNPHEVPSPT

SEQ ID NO: 76924 - protein, 154 aa, Zea mays
  Coding DNA Sequence Number=SeqID_35145
  Gene Ontology: Cellular component=cytoskeleton
  Homolog annotation: Hit_ID=Q10S45; Match level="QueryCoverage=69%, HitCoverage=24%, E-value=1e-42, Identity=77%"; Hit description =Ankyrin repeat protein, chloroplast, putative, expressed
  Pfam annotation: Domain name=Ank; Domain location=35-67; Score=17.3; E_value=0.055; Accession=PF00023.20; Description=Ankyrin repeat
  Pfam annotation: Domain name=Ank; Domain location=68-100; Score=22.4; E_value=0.0017; Accession=PF00023.20; Description=Ankyrin repeat
  Pfam module annotation: Pfam domain module=Ank::Ank; Domain location =35-67::68-100
MEDSKSPKGRQKLFSNEEKILLNKRVPDLETATSSKWLPLHTLAASGDLYLLNSLLKHNVDINALDKDGLPAIHKAILSKKAAIINYLLRNSANPFIQDKRRDKLRDYITAFSLQKLLLDEATLYDSPHYWKFVSGPEPGQTQCRRQEWGLEKG

SEQ ID NO: 76925 - protein, 503 aa, Zea mays
  Coding DNA Sequence Number=SeqID_35146
  Gene Ontology: Mol. function=ribonuclease activity; Cellular component=exosome (RNase complex); Biological process=rRNA processing
  Homolog annotation: Hit_ID=Q8H885; Match level="QueryCoverage=91%, HitCoverage=55%, E-value=0.0, Identity=83%"; Hit description =Putative mitotic control protein dis3
  Pfam annotation: Domain name=OB_RNB; Domain location=164-224; Score= -3.7; E_value=0.064; Accession=PF08206.2; Description=Ribonuclease B OB domain
  Pfam annotation: Domain name=RNB; Domain location=317-503; Score= -91.2; E_value=3.1e-05; Accession=PF00773.9; Description=RNB-like protein
  Pfam module annotation: Pfam domain module=OB_RNB::RNB; Domain location=164-224::317-503
MSLSNHHDRTITYQIVSWEELIALVDAHVLRRLQLPNAKLLMDTYVKDMVGESSNDRNDRAIRVAARWYQSHLGESVKVLLITNDRDNKRKAIEEGLNAETVESYVRSLAQPGLLDLVVVPTSGDVSMEDVDDHRPSKKKVIYNEHKPMSEITSGLRCGIYHQGKLRVNRYNPFEAYVGSESIGDEIVIRGRSNMNRAFDGDIVAVELLPQDQWHESKSFIADDDEEEEEDVHLVPNSADDAPRNTNSTQSTVGSSAPSISSRPVGRVMGIIKRNWNSYCGSLQPMPMPAGSGGVAHALFVSKDRRVPKIRIQTRQLENLVNKRIVVAVDSWDVLSRYPSGHYVVLIENDINTRPFSTQVLACLPPLPWTLSPEDLANPNRQDLRQVRVFSVDPPDVCSLRADVERLAFSVIWEMTPDADVISTRYTKSVIKSCAAMSYVEAQARMDDSRLVDPLTVDLRNLNSLAKIMRQRRCERGALTLASAEVKFEIDSETHDPLDIGAS

SEQ ID NO: 76926 - protein, 855 aa, Zea mays
  Coding DNA Sequence Number=SeqID_35147
  Gene Ontology: Mol. function=ribonuclease activity; Cellular component=exosome (RNase complex); Biological process=rRNA processing
  Homolog annotation: Hit_ID=Q8H885; Match level="QueryCoverage=99%, HitCoverage=100%, E-value=0.0, Identity=84%"; Hit description =Putative mitotic control protein dis3
  Pfam annotation: Domain name=OB_RNB; Domain location=240-300; Score= -3.7; E_value=0.064; Accession=PF08206.2; Description=Ribonuclease B OB domain
  Pfam annotation: Domain name=RNB; Domain location=393-723; Score =226.1; E_value=7.7e-65; Accession=PF00773.9; Description=RNB-like protein
  Pfam module annotation: Pfam domain module=OB_RNB::RNB; Domain location=240-300::393-723
MLQSKSFVKKTKQGRIQKVVREHYLRDDIYCGFVPCTACAAAAERKLGAAAAAILVVDTNVVLHQIDLLENPAIEDVVLLSVVLDEVKNKNLSVFNRIKALCINKARRFYVFANEQHRDTYVKDMVGESSNDRNDRAIRVAARWYQSHLGESVKVLLITNDRDNKRKAIEEGLNAETVESYVRSLAQPGLLDLVVVPTSGDVSMEDVDDHRPSKKKVIYNEHKPMSEITSGLRCGIYHQGKLRVNRYNPFEAYVGSESIGDEIVIRGRSNMNRAFDGDIVAVELLPQDQWHESKSFIADDDEEEEEDVHLVPNSADDAPRNTNSTQSTVGSSAPSISSRPVGRVMGIIKRNWNSYCGSLQPMPMPAGSGGVAHALFVSKDRRVPKIRIQTRQLENLVNKRIVVAVDSWDVLSRYPSGHYVVLIENDINTRPFSTQVLACLPPLPWTLSPEDLANPNRQDLRQVRVFSVDPPDVCSLRADVERLAFSVIWEMTPDADVISTRYTKSVIKSCAAMSYVEAQARMDDSRLVDPLTVDLRNLNSLAKIMRQRRCERGALTLASAEVKFEIDSETHDPLDIGIYQIREANQMIEEFMLAANVSVAEKILKHFPLCSLLRRHPSPTKEMLEPLLRTASSIGLNLDVSSSKALAESLDNAKSNDPYFNKLIRILATRCMTQAVYFCSGDLTFSEYYHYGLAASLYTHFTSPIRRYADVVVHRLLAAALNIAKLPPIFQDGPQLTGIADNLNYRHRNAQMASRASVELHTHIYFKTRPTDTEARIVKIKANGFIVFVPKFGIEGPIYLTPKGDKGGDWVVDEVHQRVTKPGTNISYAILQTVRIHMEVVEPQPHRPKLQLTLI

SEQ ID NO: 76927 - protein, 414 aa, Zea mays
  Coding DNA Sequence Number=SeqID_35148
  Homolog annotation: Hit_ID=Q2QYT4; Match level="QueryCoverage=30%, HitCoverage=47%, E-value=7e-29, Identity=57%"; Hit description =Expressed protein
MGKSVEFLREEKGNRVQEGAIEDSEGWMDLALKGGKGWRVEGTPVATSAGVMAGEGEGGDLAPAAGVRGGGRPTSVEGGLGGGVGVGAAPALEELLPELSLEEQPRLQNQSHERDRIRKRHNKHSPPPRPSLTSVRYVMDMGSMGMDFVAPALEELLPDLSREEQLRLQNKSRGRDRISKPRNKHAPRPRPSPFSEWDQCNFIKIPQVLHALAHYNARHPGGEFDVVKPLKQSRVGFRGQAWFHVNFWARPSSSSSNNNKTIKRFFAEVHYKPTPISSPSSSSSSLAITAVPIVEICIIIATETFYTLRAAVSSSVETTRTGLNSDWTLAAALESMARELEKELTKATEEFTIEIQSLKGKISGLISEKESIYDELKSTQEKVQLEMSQRKGLEDQILRFKQSVSDSCAEEDLD

SEQ ID NO: 76928 - protein, 126 aa, Zea mays
  Coding DNA Sequence Number=SeqID_35149
  Gene Ontology: Mol. function=microtubule motor activity; Cellular component=microtubule associated complex; Biological process =microtubule-based movement
  Homolog annotation: Hit_ID=Q9SV36; Match level="QueryCoverage=79%, HitCoverage=9%, E-value=7e-07, Identity=29%"; Hit description =Kinesin-like protein
MARELEKELTKATEEFTIEIQSLKGKISGLISEKESIYDELKSTQEKVQLEMSQRKGLEDQILRFKQSVSDSCAEESKTSCSMVRSGSGLGNTAFVSKSEKLREALSGQRGTISKIFEEDKVTRGI

SEQ ID NO: 76929 - protein, 481 aa, Zea mays
  Coding DNA Sequence Number=SeqID_35150
  Homolog annotation: Hit_ID=Q4FX62; Match level="QueryCoverage=47%, HitCoverage=1%, E-value=3e-07, Identity=28%"; Hit description =Proteophosphoglycan 5
MSTSRIARGLRIFPYGRNIAVVVSAVMNKDRQDAAQKRRAVIRIADPRREAKRARGSAKAAAPGSSQPVPDAKLAAPGSGKSSASAKTAAAGGTKPPPVEAAKGRELPSRGKRVADFGTNISVEDYFVGSGEGQMVVVPPSVATTLPSAVAADFADRVASGVLTADVAAEVERLQAQHADAVREKSAAESKNRRLAEKVAALEAEKMDLRRQLMEERREANQAIAEAQAAQAEAKVARAEGSLASQRAEEWEARFNALRGRVDKAEASMRLEVERTLARFVDSYRELGARTADFEVPDREAGLRFLEWLQEELLVLPTIVEGFMSFASLVTCEGAMNALSREGCKHYEVFDQSDESFEREIFKAEDHVVKQSAGALFDRMWGAHGREAVRERSDQAREQMERAEDVKDLGGLVGAPPEAAEVNPVLPSDAGEGPSVVPMPAMAGEDPVSAPAPTVEGALKVATEPTVEDPTAAARPSQVAK

SEQ ID NO: 76930 - protein, 568 aa, Zea mays
  Coding DNA Sequence Number=SeqID_35151
  Homolog annotation: Hit_ID=Q4FX62; Match level="QueryCoverage=40%, HitCoverage=38%, E-value=1e-07, Identity=26%"; Hit description =Proteophosphoglycan 5
MPRTECLRSWDIRGSNDRLNRVFDLNRLPYGGYPGEDAADRRGKKLMGGTEEGPSQDAAPAAKKRKLGTMVGGMGVSDNFAVELMGTYMSTSRIARGLRIFPYGRNIAVVVSAVMNKDRQDAAQKRRAVIRIADPRREAKRARGSAKAAAPGSSQPVPDAKLAAPGSGKSSASAKTAAAGGTKPPPVEAAKGRELPSRGKRVADFGTNISVEDYFVGSGEGQMVVVPPSVATTLPSAVAADFADRVASGVLTADVAAEVERLQAQHADAVREKSAAESKNRRLAEKVAALEAEKMDLRRQLMEERREANQAIAEAQAAQAEAKVARAEGSLASQRAEEWEARFNALRGRVDKAEASMRLEVERTLARFVDSYRELGARTADFEVPDREAGLRFLEWLQEELLVLPTIVEGFMSFASLVTCEGAMNALSREGCKHYEVFDQSDESFEREIFKAEDHVVKQSAGALFDRMWGAHGREAVRERSDQAREQVKMERAEDVKDLGGLVGAPPEAAEVNPVLPSDAGEGPSVVPMPAMAGEDPVSAPAPTVEGALKVATEPTVEDPTAAARPSQ

SEQ ID NO: 76931 - protein, 679 aa, Zea mays
  Coding DNA Sequence Number=SeqID_35152
  Gene Ontology: Mol. function=protein binding; Biological process =regulation of transcription
  Homolog annotation: Hit_ID=Q7XCD7; Match level="QueryCoverage=47%, HitCoverage=48%, E-value=1e-116, Identity=67%"; Hit description=GRAS family transcription factor containing protein, expressed
  Pfam annotation: Domain name=GRAS; Domain location=297-590; Score =239.5; E_value=7e-69; Accession=PF03514.5; Description=GRAS family transcription factor
  Pfam annotation: Domain name=zf-CCHC; Domain location=31-48; Score =25.4; E_value=6.3e-05; Accession=PF00098.13; Description=Zinc knuckle
  Pfam module annotation: Pfam domain module=GRAS::zf-CCHC; Domain location=297-590::31-48
MGMIRKINLMGVPLQVEDILFNIDKKKQRKRGCFACGEKGHFRDNCPTMTEPKKERSKGKALTSVKTWDDSLSEDEPPRTRSHRSSSRSSWSSRKCLMARGKMSIPSSSDESSSDDEDDDTSRDAPRRSRDGREPATTRPLRPSTSPPTTLSSPLGIADVAALADADAKSVSPPAWPDDDDDDVAGRDDWVHHLPPLDMHMPPLGLGAAEAWEPHAQPPGPGGLTLSHAQQTHDSTFLGWFIADDVAMSGVMDDHNSHSVLHDLDHIPSSSVPPPQFQPLAPHVHYPPKLHHHQNPVVPASPPKHTLLKPKPEAPGTDDASTAVDQLAEAAKLAEAGDVFGAREILARLNYLLPPGAATATPLLRSAFYFKEALRAALSTTASATAAAAAAPVDVLLKLGAYKDFSELCPVLQFAHFTCVQAMLDELGGAACIHVLDLDIGVGEQWASLMQELASRRPGAALKVTALVSAASHHPLELQLVHENLSNFAAETRVPFQLAFFNLDAMDPAELLATAAGDAVAVHLPAGSVHAPAVPSVLHLVRRLGAKLVVSVDRSCDRGELPFAAHFQSCVFLLESLDAVGTGPDITAKIERFLIQPRIERCLAERYRAAAAGDKTPPWRAMLVSAGFVPVQASSLAEAQAEALLKKVPVRGFRVEKRAGSLVLHWQRGELLSVSAWRC

SEQ ID NO: 76932 - protein, 259 aa, Zea mays
  Coding DNA Sequence Number=SeqID_35153
MGAAARRMRRKAGGRCAWRRRAGKQGALRVGCADAEEGPSGMPGSRGEGLWRGTARPASTVEGCGAAGRTRVTGRLARPPPPLLHWRARRQASQAAAAPLEGVQAVRVEVLSRTDGCAAKEREEAASRRGGQRPRTVERSAASEGGRRTPGGSGPAADPGARRMGPTGTGAGVEEGGRRGGAEAQRGWGLGRRCASPRRIWAGGCPAWPRTAARARCPEPVDSRNRKHRAVQLKPFASLAPEDLVAEGQSTRLCDSVTK

SEQ ID NO: 76933 - protein, 330 aa, Zea mays
  Coding DNA Sequence Number=SeqID_35154
MPRRQRAPPGRPTAAHAAALVKVSTPAAEKKGNVGSGREGHGSDGSGRGDAIQPKGRRIEPRRTQQHGSGREGRGSDGSNEGEEGEGNGAVAARQGPAPDLARDDDGAGVGRSSKGWRYLVTARSVRWPARRGGRRAQGAQEGQGHCAWGAAARRMRRKAGGRCAWRRRAGKQGALRVGCADAEEGPSGMPGSRGEGLWRGTARPASTVEGCGAAGRTRVTGRLARPPPPLLHWRARRQASQAAAAPLEGVQAVRVEVLSRTDGCAAKEREEAASRRGGQRPRTVERSAASEGGRRTPGGSGPAADPGARRMGPTGTGAGVEEGAFSESE

SEQ ID NO: 76934 - protein, 208 aa, Zea mays
  Coding DNA Sequence Number=SeqID_35155
MASSFVLNPYGLDEIERPQSVFCHRVLPTPAVPAAILAVAAEHSHRARKSRDSPSIHGRYAVRASARASTPPPPLPIAQCRQSPNQRKVSRISYPAINGRCTPAKAAINALLPTPSMEGARGSTPSRPPPHLLCPTLLPTSSMARADPRWPRIRPTLLPHLLDPCRAPACGHEPAIRARRQGARRHRAGQHDPVDGLALGSAPCPWTM

SEQ ID NO: 76935 - protein, 172 aa, Zea mays
  Coding DNA Sequence Number=SeqID_35156
SRWPRIRPTLLPHLLGPCGAPACGYVSHHEIPVSIGAIQSPTHPRDPLSCCGADLLLGAQIGAIHSRVAVSSSASPPGGEGFVRDGQMGNGSENVLSRRTRRVDPLEGLRKYKRGKNRVNCARAGEGSLEAGLALEMVKAKARVRYDIDIPLVPLRYCGGVNGDASSAQYSE

SEQ ID NO: 76936 - protein, 325 aa, Zea mays
  Coding DNA Sequence Number=SeqID_35157
MNALSREGCRHFEVFDQADEDFERDIFKVEDPVVKESVGAIYDRMWGPHGREVVRERAETARAQAARGERVDDFGALNSALPDPEPTPAEAVSGVALEPTPETAEDAPDAPASAAAGEDLPPEVAEGAPDAPAAAAPSAEDPAAVAVETAAEATAEPTAEAPATSGPSQVQDFGPAHATATTKFLAASTAGDGNECGGSASEFFDFADSGSSVEWTEESSSKDLDYFAALDVAAAEASPHAADAGDVPGPSTGRRRRRAVAKRRVSGAEGARLRVSRAGRQELLSLPAAVNTGEGELRSLFAGEELRIILFNYREMGIIPKVEPM

SEQ ID NO: 76937 - protein, 469 aa, Zea mays
  Coding DNA Sequence Number=SeqID_35158
MGGLGVSDGFARELMRTCAAPGERMSSPELRESSARMLKVTGGCWPRNVPIPRAASGDVFTSRMVRKWRVFPYGRNIAAVVSAVMDKDRQGAAQKWQAAIRIVEARPKRQKRGSATAAAPGGGKPPLAAKSGVPASSKAPEAAAGAGGSKPAKAVPPLSRVAEAAKAARALPSAGKRVADFATDICVEDYLGGKSLAFFFKFIGALQGSDEGQLATVAPAAAIATAAIVPKARGEGLGSGGEVSALAVVRDEADAATRRLKEVTEALSQVADFASRTASGALTAAVSAEVERLRTQHADAVREKSASNSKCRKLTDKVAALEREKANLRRQLAAERREANEAIAKEQAAQAEAKLARAEGNLAKELAEHLQERLTALESRAKGAEAAMRAEAEQTRTQLMDTYRELGARTGDFEVPDREPGLRCLQWAQEELLDSPLSWGVMSYASLVPARGDDALSCEGCRHFEVFEQ

SEQ ID NO: 76938 - protein, 242 aa, Zea mays
  Coding DNA Sequence Number=SeqID_35159
  Homolog annotation: Hit_ID=Q9LGH0; Match level="QueryCoverage=90%, HitCoverage=66%, E-value=7e-12, Identity=23%"; Hit description=NAM -like protein-like
MGTDWKPKAYNSRRGSMLERSTKSLMSMWDSIKTQCSIFAGYMMVVLRQNSNGLTDADKTSLAATRFVAVEKKPFHFLHCWEILKDQPKWMYQHIGIQNPPPNPIDSRPSSFTSKRPLSRDSSKEKAKKQRSVDTSSTDSEYLTRMGELSLERLSVYKSVALTERKLESMNKNERQKLILERKKLNLEKLRMDPQKLKEDKEEEVMILSMDLSKCNPLLRQCYEAKQQEILARVTGNSSSSK

SEQ ID NO: 76939 - protein, 191 aa, Zea mays
  Coding DNA Sequence Number=SeqID_35160
MALLMQTRLSLAATRFVAVEKKPFHFLHCWEILKDQPKWMYQHIGIQNPPPNPIDSRPSSFTSKRPLSRDSSKEKAKKQRSVDTSSTDSEYLTRMGELSLERLSVYKSVALTERKLESMNKNERQKLILERKKLNLEKLRMDPQKLKEDKEEEVMILSMDLSKCNPLLRQCYEAKQQEILARVTGNSSSSK

SEQ ID NO: 76940 - protein, 391 aa, Zea mays
  Coding DNA Sequence Number=SeqID_35161
  Pfam annotation: Domain name=zf-CCHC; Domain location=121-138; Score =17.9; E_value=0.0011; Accession=PF00098.13; Description=Zinc knuckle
  Pfam annotation: Domain name=zf-CCHC; Domain location=292-309; Score =17.2; E_value=0.0014; Accession=PF00098.13; Description=Zinc knuckle
  Pfam module annotation: Pfam domain module=zf-CCHC::zf-CCHC; Domain location=121-138::292-309
MEDLRTMTLIIVIGKIMAFEMSRKMCRGEEPTSSRPYAFACDERKGKKKAPTPSSSSEEEEEEESDDEEDNQPSTSSFKDEEIIRRVGKVMGMIHKINLMGVPLQAKDLLFNIDRKKQRKRGCFACGEKGHFTDSCSTMSKPKMGRSQGKALTSVETWDDSSSEDEPPRTRSHRSSSRSSRLSRKCPMARGKMSIPSSSDDSSSDDEEVSLIELPEIIKKMLLLLALNQVPVKNVVIETCSDKIEMENEQLKQEVARLGKALYDKKGKDKQIQPPQDNTTAGVNKPVEGETMICRLCHKEGHKSFQCKAKTEDKQKLKKKPTSKILNTYINKVDKKTATPYLIKKKKNGKVIAIKANKQANKGKGAKSMWVPKEIISTMKSTKKVWIPKEK

SEQ ID NO: 76941 - protein, 384 aa, Zea mays
  Coding DNA Sequence Number=SeqID_35162
  Pfam annotation: Domain name=zf-CCHC; Domain location=121-138; Score =17.9; E_value=0.0011; Accession=PF00098.13; Description=Zinc knuckle
  Pfam annotation: Domain name=zf-CCHC; Domain location=292-309; Score =17.2; E_value=0.0014; Accession=PF00098.13; Description=Zinc knuckle
  Pfam module annotation: Pfam domain module=zf-CCHC::zf-CCHC; Domain location=121-138::292-309
MEDLRTMTLIIVIGKIMAFEMSRKMCRGEEPTSSRPYAFACDERKGKKKAPTPSSSSEEEEEEESDDEEDNQPSTSSFKDEEIIRRVGKVMGMIHKINLMGVPLQAKDLLFNIDRKKQRKRGCFACGEKGHFTDSCSTMSKPKMGRSQGKALTSVETWDDSSSEDEPPRTRSHRSSSRSSRLSRKCPMARGKMSIPSSSDDSSSDDEEVSLIELPEIIKKMLLLLALNQVPVKNVVIETCSDKIEMENEQLKQEVARLGKALYDKKGKDKQIQPPQDNTTAGVNKPVEGETMICRLCHKEGHKSFQCKAKTEDKQKLKKKPTSKILNTYINKVDKKTATPYLIKKKKNGKVIAIKANKQANKGKGAKSMWVPKEIISTMKSTKK

SEQ ID NO: 76942 - protein, 149 aa, Zea mays
  Coding DNA Sequence Number=SeqID_35163
MAPKRANPKADEAAKAALLAARKGKALALTQSTHQEATEDDTLRTCGPEGQPQPPSGFAPPEGVDLTEDGEVLGVTPSSSPYCACLCSSAISLVADLAPAPATASPSALLLQALSLSYGTRPTCDTVDPRSSFRICLNSVQVPEIGLFG

SEQ ID NO: 76943 - protein, 169 aa, Zea mays
  Coding DNA Sequence Number=SeqID_35164
  Pfam annotation: Domain name=Complex1_LYR; Domain location=90-156; Score=45.9; E_value=1.3e-10; Accession=PF05347.5; Description =Complex 1 protein (LYR family)
  Subcellular localization annotation: CTP_CleavageSite=66; ConfidenceScore=5.16e-01
MAAAAPAISLVADLAPAPATAPPSALLLQALSLSHGTRRNPMIWGKTKSKHNPRQSLDEKSKPKPSAFSRVPEGFYVGKDDMASRPKLSGIQKQVLALYRGFLRTARLKAPEERRRIESVILAEFRDNARSVDLRNFVHIEYLLRRGKKHLEQLKNPDITGLATLVVKK

SEQ ID NO: 76944 - protein, 143 aa, Zea mays
  Coding DNA Sequence Number=SeqID_35165
MKKELADLGTTGRGEGVLAVAESGFGENQKFSSSGERLWLISGGCRNEEEGATGITGVLSSSPSARIFYRVPLSAHPEHKSGRQRHESQRNWSSVVGLLATLSVSAVHCTMVNTPSENLTARVEGRFPSKFLWQHKPNSAAKL

SEQ ID NO: 76945 - protein, 124 aa, Zea mays
  Coding DNA Sequence Number=SeqID_35166
MASNTPERDTDELYRSEGAKTGAPERRNEEEGATGITGVLSSSPSARIFYRVPLSAHPEHKSGRQRHESRRNWSSAVGLLATLSVSAVHCTMVNTPSENLTARVEGRFPSKFLWQHKPNSAAKL

SEQ ID NO: 76946 - protein, 111 aa, Zea mays
  Coding DNA Sequence Number=SeqID_35167
  Gene Ontology: Mol. function=protein phosphatase type 2C activity; Cellular component=nucleus
  Homolog annotation: Hit_ID=Q2HW33; Match level="QueryCoverage=92%, HitCoverage=34%, E-value=9e-22, Identity=52%"; Hit description =Protein phosphatase 2C-like
MSIVTQGDLMVIANVGDSRFVLGTASDDVPSRRPYHRPPEVYYLADEPGVHFVWQPSEESLVLAMLRAFDDYNIKDCGVISAPKVMQRRTDSNDQIVILATVGVAFVPACL

SEQ ID NO: 76947 - protein, 156 aa, Zea mays
  Coding DNA Sequence Number=SeqID_35168
  Gene Ontology: Mol. function=protein phosphatase type 2C activity
MASSSNAVPGTTRESPTLATTMRSPCLTMDSAGAAALHRVQAAAAPELVVHSGTCGHVGLFLEVELAVAKLLLVVDERPQRECLLLMVFVRGFKKQEEEEKKWRVAVYSQRLFRAGAPDCPGERLQVVEIPRKREKIKGKKNTVVFKLIIGSLERS

SEQ ID NO: 76948 - protein, 844 aa, Zea mays
  Coding DNA Sequence Number=SeqID_35169
MPFHGGRVVRSPAFALSLQNRDPAAFVREAEDGAVRLVGRYVPRTEGQRSWDIRGSNDRLNRVFELNQLPYDGYPGQDDVDRRGKKPAMETGDDPAPAAAPSSKKRKLGTAMGGLGVSDGFARELMRTCAAPGGRMSSPELQESSARMLRVTGGCWPRNVSIPRAAGQDFFTSRMVREWRVFPYGQNIGVVVSAVMDKDRQGAAQKRQAAVRLVEARPKRQRGAAKAAAPGGSRPPLAAKSGVPASSKAPEATAGAGGSKSAKAVPPSSGVAEVAKAARALPLSGKRVADFATDISVDDYLGGSGEGQLAIVAPAAATTTAAAVPKTKGGALSAGGEVSALAVVRDEVGAASRRLKEVTEALSQVADFASRTASGALTAAVAAEVERLRTQHADAVREKSAADSKCRKLADKAALAEANLARAEGNLARERAEQLQERLTALESRVERAEAASRAEAERTRQLLIDTYRGLGAGTGDFEVPDREPGLRCLEWVQEELQALPTVVEGFMAYASLVTCEGAMNALSREGCWHFEVFDQVDEDFEQDIFKVEDPVVKESAGAIFDRMWGPHGCEVVRERAETARAQAARGERVDDFGSLNSMLSDPGPTPAEAVSGVALEPTPETAEDAPGAPASAAAGEDLPPEVAEGAPDAPAAAAPSAEDPAAVALETTAEATVEPTAEAPSTSGPSQVQDFGPAHATATTMFLAASTAEGDDECGGSASEFFGFADSRSSVEWTEESSSEDLDYFAALDVAAAEASPHAADAEEVPGPSTGRWRRRAVAKRRVSGAEGARLRATSARTVFAIDFGFFALVVLVRLHPWATSARIVFAIDFGFFALVVLVRLHP

SEQ ID NO: 76949 - protein, 127 aa, Zea mays
  Coding DNA Sequence Number=SeqID_35170
MESLLLEFLGVHGRWSAELLRSGAKGEQGLAAMNRGAAAGAMDVDLVEVDPRSFCAQGRKTGARERCAGRHDCWPEMECGLQQRGLGHGKSREGEAGCRPWSRPGKETPWRAPCVLLHSVEHMARRT

SEQ ID NO: 76950 - protein, 80 aa, Zea mays
  Coding DNA Sequence Number=SeqID_35171
  Subcellular localization annotation: CTP_CleavageSite=62; ConfidenceScore=5.61e-01
MAPKKNPLAEPPLPASAPVPLLLLPRTAAARPTFPRCAAPRRNAAVPASPGFLAATAARMPSARHNVKGDVLLQHVVTLA

SEQ ID NO: 76951 - protein, 177 aa, Zea mays
  Coding DNA Sequence Number=SeqID_35172
MDTKTARVAGCLTEGRRCRERVCAKNSEHPASVTTCCNNTSPLTLCRALGMRAAVAARKPGLAGTAAFRRGAAQRGKVGRAAAVRGRRSRGTGALAGRGGSARGFFLGAMTGSRGSSCCCYGVLAAGISGRPWEVERRAAAQWGKRGARAGSHEQGAAAGVREEWKSCSRGEEEGEG

SEQ ID NO: 76952 - protein, 153 aa, Zea mays
  Coding DNA Sequence Number=SeqID_35173
MDTKTARVAGCLTEGRRCRERVCAKNSEHPGSVTTCCNNTSPLTLCRALGMRAAVAARKPGLAGTAAFRRGAAQRGKVGRAAAVRGRRSKGTGALAGRGGSARGFFFGRHGWEQRVKLLLLWSPCCWNFWASMGGGAQSCCAVGQKGSKGWQP

SEQ ID NO: 76953 - protein, 134 aa, Zea mays
  Coding DNA Sequence Number=SeqID_35174
  Subcellular localization annotation: CTP_CleavageSite=35; ConfidenceScore=5.51e-01
MAPKNPPAEPPLPASAPVPLLLLPRTAAARPTFPRCAAPRRNAAVPASPGFLAATAACMPSARHNVKGDVLLQHVVTLVGCSLFLAQTRSRHRRPSPPSKSRSAFGRSTKCQALWTAHVTSLDSSRLFTWYFVD

SEQ ID NO: 76954 - protein, 134 aa, Zea mays
  Coding DNA Sequence Number=SeqID_35175
  Subcellular localization annotation: CTP_CleavageSite=35; ConfidenceScore=5.53e-01
MAPKNPPAEPPLPASAPVPLLLLPRTAAARPTFPRCAAPRRNAAVLASPGFLAATAARMPSARHNVKGDVLLQHVVTLAGCSLFLAQTRSRHRRPSPPSKSRSAFGRSTKCQALWTAHVTSLDSSRLFTWYFVD

SEQ ID NO: 76955 - protein, 1900 aa, Zea mays
  Coding DNA Sequence Number=SeqID_35176
  Gene Ontology: Mol. function=zinc ion binding; Cellular component =nucleus; Biological process=regulation of transcription, DNA -dependent
  Homolog annotation: Hit_ID=Q7F8S7; Match level="QueryCoverage=48%, HitCoverage=99%, E-value=0.0, Identity=65%"; Hit description=PHD finger-like protein
  Pfam annotation: Domain name=C1_3; Domain location=1042-1071; Score =6.0; E_value=0.1; Accession=PF07649.3; Description=C1-like domain
  Pfam annotation: Domain name=FYRC; Domain location=384-440; Score= -5.4; E_value=0.081; Accession=PF05965.4; Description=FY rich C -terminus
  Pfam annotation: Domain name=FYRN; Domain location=142-189; Score =48.0; E_value=3.1e-11; Accession=PF05964.4; Description=FY-rich N -terminus
  Pfam annotation: Domain name=PHD; Domain location=1043-1091; Score =54.5; E_value=3.6e-13; Accession=PF00628.19; Description=PHD-finger
  Pfam module annotation: Pfam domain module=C1_3::FYRC::FYRN::PHD; Domain location=1042-1071::384-440::142-189::1043-1091
QNITDGPQLTVANLPHFEGGHLQNTTLYDGMQFMPAFDLAQCFGMRQNFTSMDQDLIADGNVPQRSAHLRRRRDLPQTSTLPKVAVNHELGSAGTSMDPSFFNNTIKQSPSENRSSLKPPIFLMENSNHQPHHHTVALPVQYSDFFITSLGEIDNRTSYHNSYQIWPVGFTSYWHDRVTGSLFECEVHDGGNFGPLFKMRRLPCSAFQLPDASTTVCLNVVRNADTIETKEGSDLIEDTANDANDNISMLLSDFSETNQDFLSCLGNDLEGKESLGCSNVETKDMTVPDVLSDPGSFSWAPTNDANMYDKIGDFSYEGTSPSSVWRMISCAMMEACEKMYKEHGHLVLFCTHSSEKSPFDYESGPQRTDGPFNLLAKFCSSNGPKVPQFIEKENDVQSTCALLKEWLYPDRIGFDLEFVQEFVESLPKSGACSHYQFLCNRTGINSSLTIASGTLVAVNKNSPMHARHGSVVSGPQDHAQPSSSSIRELPPGNPISRKLAPELAGDVFQILEFLGRFAEIIGLKELPSIEQVEDELIDPWPMHPNKNDIHNYMDHNPPMNSPANVSSSYSNGESGITSIEEMVYVSIPVETSSAREAAQNKLAAQTLGRCSGLVLPEIHIALLKVLFTELVSRVAIFVDPSIDLKESKSRRGRKRDTDTLTRELKIDMLTANNLTWPELARRYILAVSSMSGCMDLSDISSREGVKLFRCLQGDGGILCGALPGVVGMEKDASLLAEAETLICNSSANEGNTVFMMDYKDTDIVDSPEEPASDTTLPDWVKSLEPVRKLPTNVGTRIRKCVYEALERKPPEWARKILEHSISKEVYKGNASGPTKKAVLSVLTEACRTKVPQNTEKPRKERNIISISEAVLKKCRIALRRAISSDESKQFANLLGTTLTNSNENEDEGILGFPGMVSRPLDFRTIDIRLAKGAYRGSWEAFLDDVQEYAFLVFNRVLEPAFHSQKVICNLQTAFADRPEVLIMVVALSESFESLYKTEVQDLVEKFDRYLSNENDSSEIHQELQDALTAANNKLPKAPWEDGVCKVCGIDRDDESVLLCDNCDSEYHTYCLNPPLARIPLGNWYCPSCTAQTHVAVQEQKKCLGEEAHVFIEKLNKLAVAMDEKEYWELTVAERIYLLKFLCDELHNTALIREHLDQCSDKSNDLQQKLRHLNYELKELRYRVEIKNPYATQSRWMKNDQVSNSSGLVENQQRAMPTASEHLEEAEQVNVGVNLNNPAEGVPAALLDVGKPCSTDNGISSTSVIEGNKSLGLSEQPSKIITDQTDRDSIAEGSNSCEKSLVGKSGTCDPNVGETHAATVINAPNGDLPDENAMTLSQDNIETSTSKLVDHDADMNESNNLLERISQLHGSISTVESQLSMASLRGECLGRDSVGRLYWVTGRPCKRPRLVADGSMMIPKDRDISMVTSHSQSTFDRGWNSASLVIYESDEEMKCLVDWLRDIDPREKDLKDSILHWQKSIYRQASFPITDPPVSKFSKSEPLMELPNTNAFIVLEQKYGLQTDQDTSELSKRRGTKSRSGSEERVYRCDCLEPIWPSRHHCLNCHETYLTLMEYEGHNGGKCTSSNDCPNESKEIDEPKLKGSKSDIKEKDPVVHNCSVEPSNSGKLESCPYDFEEICRKFTTNDSIKETVKEIGLLGSNGIPSCVPSPAYFLDPPVLLNESKRNDDKPNDWTSSLQECQAVSAKMSGQEGSQVGQDFSGNAGDEELPKSKKPVRDSTSAKEAPSTDISTRLLTVNGGLVPESSLMPVIGRNFHILKQLKINLLDIEAALPEEAFRASKSQQIRRRSWRAFVKDAELISYVVLAINFLQSMIKAEFLKKDWWYWSSFTAAIKTTTVSSLALRIYTLDDCIMYTKDPAPNLQPADNARSGNKGKRKKDIDS

SEQ ID NO: 76956 - protein, 323 aa, Zea mays
  Coding DNA Sequence Number=SeqID_35177
  Pfam annotation: Domain name=FYRN; Domain location=210-257; Score =48.0; E_value=3.1e-11; Accession=PF05964.4; Description=FY-rich N -terminus
MGPDPHGQVPNPCIYELNLGAGSRISTGTDRTPGMGPGPLCVGSGPLSVGSWDSGTKSTWTLVKARQRQNITDGPQLTVANLPHFEGGHLQNTTLYDGMQFMPAFDLAQCFGMRQNFTSMDQDLIADGNVPQRSAHLRRRRDLPQTSTLPKVAVNHELGSAGTSMDPSFFNNTIKQSPSENRSSLKPPIFLMENSNHQPHHHTVALPVQYSDFFITSLGEIDNRTSYHNSYQIWPVGFTSYWHDRVTGSLFECEVHDGGNFGPLFKMRRLPCSAFQLPDASTTVCLNVVRNADTIETKEGSDLIEDTANDANDNISMLFIRFL

SEQ ID NO: 76957 - protein, 112 aa, Zea mays
  Coding DNA Sequence Number=SeqID_35178
MGKPTDEGGGRPGVGGQVQELLARLSHGAPVKQGQTNDAMAKALTCAAARSDADRGCAEAVRLCCLLAVTVVRAPVLCACAVCFCSPWSVDPGRCFRDLLEAKRWTGGRLVA

SEQ ID NO: 76958 - protein, 315 aa, Zea mays
  Coding DNA Sequence Number=SeqID_35179
MGESSKELLDLPSDPRPPASFIESLLAGREQQQQDKEGKRKLGASTDPLPKSQGTVELALQLVDLCSVPTAHCLAIASASPSSEACGRGGEVSRGEGQRVDGEAGRYHRTSVKENRYGVEGRLLARHSERWAAANSARVAGVLLWAVLGLHRRVVVEFFWARPRLQPPPALGPESASGSYIIGKVKDFLGEIARANQKLQLDAQNKPPVEYDIEALTGNEEEYIEMDLLLGVADLHSEQAVEAAEATINGRQTSEMSFACSSSDSEDDSDDSDEDADDKPLTSDKDNKCKSPDDAEMGPAKGKKPNKRQKIVVLN

SEQ ID NO: 76959 - protein, 184 aa, Zea mays
  Coding DNA Sequence Number=SeqID_35180
MVLVQVDLCSVPTAHCLAIASASPSSEACGREEVRSRGVRGRGSMVRPGVIGKVKDFLGEIARANQKLQLDAQNKPPVEYDIEALTGNEEEYIEMDLLLGVADLHSEQAVEAAEATINGRQTSEMSFACSSSDSEDDSDDSDEDADDKPLTSDKDNKCKSPDDAEMGPAKGKKPNKRQKIVVLN

SEQ ID NO: 76960 - protein, 268 aa, Zea mays
  Coding DNA Sequence Number=SeqID_35181
MGESSKELLDLPSDPRPPASFIESLLAGREQQQQDKEGKRKLGASTDPLPKSQVDAGTVADAGIAEASKQWCWCRWICARVDGEAGRYHRTSVKENRYRVEGRLLARHSERLQPPPALGPESASGSYIIGKVKDFLGEIARANQKLQLDAQNKPPVEYDIEALTGNEEEYIEMDLLLGVADLHSEQAVEAAEATINGRQTSEMSFACSSSDSEDDSDDSDEDADDKPLTRGAKQGRVGAKGETEVDTASALSPGSPSTQRKGTGARCR

SEQ ID NO: 76961 - protein, 169 aa, Zea mays
  Coding DNA Sequence Number=SeqID_35182
  Homolog annotation: Hit_ID=Q5N730; Match level="QueryCoverage=40%, HitCoverage=5%, E-value=2e-22, Identity=87%"; Hit description =Erythroid differentiation-related factor 1-like protein
  Subcellular localization annotation: CTP_CleavageSite=33; ConfidenceScore=5.61e-01
MVLRSPLHHQRRPPPWQPPSLCTSTSAAVASLRCLLTAPSTGLILPSPSESDSSASLPVLLPSPSPIGAPSGHINQNLSRKCEALAVLGLAEYGDEIDVIAPPDIMKQILKIPYSKAQVSIAVNRLMLMKVKRYSEDKPCSYLESLFSSILLVSIVFLSHYPIGHRVLA

SEQ ID NO: 76962 - protein, 259 aa, Zea mays
  Coding DNA Sequence Number=SeqID_35183
  Homolog annotation: Hit_ID=Q75HM8; Match level="QueryCoverage=21%, HitCoverage=8%, E-value=8e-15, Identity=74%"; Hit description =Putative serine protease inhibitor
MEAWMQGESVENHTRARSPRLAWPGLGEAGRGEAKGADARHAREWSTKIRPLVLRTHDMHVNGPHTTARDLFVDPAALTSSTLLLRHRRLCCFHSRRLPLGFLGTRALAHRHRACGHCSLPFSSVAATAEASTTRDQLAAAPAGADGLHALAEQVVQLVLADGSGASSPRVAFADGVFVDSSLKLKPAFEEVPVGKYRADTQSVDFQKSSYSYDSGHINQNLSRKCEALVVSGLAEYGDEIDGIVPADIMKIQPILQWS

SEQ ID NO: 76963 - protein, 126 aa, Zea mays
  Coding DNA Sequence Number=SeqID_35184
MEVDGGLILKYYGGSYAKCYGRRGIGNSPSLDPQPSAQIRPRTLLNGSDRTKSTSPRPSAKDPAATTRVRRSSPCYTARNVLRLPLPVKLGAKPSSTDCSRLRAIQWQVIPPTAPGALPHRIHASA

SEQ ID NO: 76964 - protein, 126 aa, Zea mays
  Coding DNA Sequence Number=SeqID_35185
MEVDGGLILKYYGGSYAKCYGRRGIGNSPSLDPQPSAQIRPRTLLNGSDRTKSTSPRPSAKDPAATTRVRRSSPRYTARNVLRLPLPVKLGAKPSSTDCSRLRAIQWQVIPPTAPGALPHRIHASA

SEQ ID NO: 76965 - protein, 335 aa, Zea mays
  Coding DNA Sequence Number=SeqID_35186
  Subcellular localization annotation: CTP_CleavageSite=45; ConfidenceScore=5.08e-01
MQNPHDYPLVAWQKCCVGSSCASPQPRAATLGPQQRPTPPHGRVRGRHESREGDILQSINSESGPPRESAGPPDVQCGPPRMVPDPRIYSLDPKVGSGPPRVQAGPLEWDPYPSVWGLGRPQWGPKVQDRTYTGFGQDPSGGPVPTRVQAQSSTDLSAYAPRSPPRRRPDAAMWPTARDISQRVEPDIRPPGYVAPAFIADKARCLPTSLTGDVPPQHLMSPIHSAGGVPVHSTGRRCAASVFNETYPFHWQAATYQSHRRHACPFHWQTARPYCRVHYAHHYSCITKEAAAACQRCAGYEHLGAWRLLCVTCISCSRYSIHYVLGPTCRGSAPL

SEQ ID NO: 76966 - protein, 259 aa, Zea mays
  Coding DNA Sequence Number=SeqID_35187
  Subcellular localization annotation: CTP_CleavageSite=45; ConfidenceScore=5.08e-01
MQNPHDYPLVAWQKCCVGSSCASPQPRAATLGPQQRPTPPHGRVRGRHESREGDILQSINSESGPPRESAGPPDVQCGPPRMVPDPRIYSLDPKVGSGPPRVQAGPLEWDPYPSVWGLGRPQWGPKVQDRTYTGFGQDPSGGPVPTRVQAQSSTDLSAYAPRSPPRRRPDAAMWPTARDISQRVEPDIRPPGYVAPAFIADKARCLPTSLTGDVPPQHLMSPIHSAGGVPVHSTGRRCAASVFNETYPFHWASSDLSVP

SEQ ID NO: 76967 - protein, 276 aa, Zea mays
  Coding DNA Sequence Number=SeqID_35188
  Homolog annotation: Hit_ID=Q7GC12; Match level="QueryCoverage=15%, HitCoverage=10%, E-value=4e-16, Identity=100%"; Hit description =Shaggy-related protein kinase gamma
MPLLLHQPLLLLNASADHHLPWRRSSPISSCQGAVTELALPQPWTPSGHPSPISPRPHPLAAAPSYSWWLSLLPWMLAVLPSLVLTSAPCVGWPVAPALGLSSANSAPSIPARILLIGPAQIILMPGRGTTAIAMKPHRVAPSTCSTEYRSTCRPDLQPWLRGRRTPLPSTLCLALHQCNEMSERIDDMRPEFDSARLFDVYFTHCDLVDDVFTVSYMAERIVGQGSFGIVFQAKCLETGETVAIKKVLQDKRYKNHGIVISYFIAKKFRNSINVW

SEQ ID NO: 76968 - protein, 467 aa, Zea mays
  Coding DNA Sequence Number=SeqID_35189
  Homolog annotation: Hit_ID=Q9M835; Match level="QueryCoverage=18%, HitCoverage=23%, E-value=3e-29, Identity=77%"; Hit description=L -allo-threonine aldolase, putative
  Pfam annotation: Domain name=Beta_elim_lyase; Domain location=179 -437; Score=28.9; E_value=9.3e-13; Accession=PF01212.11; Description =Beta-eliminating lyase
  Pfam annotation: Domain name=Ribosomal_S4e; Domain location=379-440; Score=62.9; E_value=1e-15; Accession=PF00900.10; Description =Ribosomal family S4e
  Pfam module annotation: Pfam domain module=Beta_elim_lyase::Ribosomal_ S4e; Domain location=179-437::379-440
MPLLLHQPLLLLNASADHHLPWRRSSPISSCQGAVTELALPQPWTPSGHPSPISPRPHPLAAAPSYSWWLSLLPWMLAVLPSLVLTSAPCVGWPVAPALGLSSANSAPSIPARILLIGPAQIILMPGRGTTAIAMKPHRVAPSTCSTEYRSTCRPDLQPWLRGRRTPLPSTLCLALHQCNEMSERIDDMRPEFDSARLFDVYFTHCDLVDDVFTVSYMAERIVGQGSFGIVFQAKCLETGETVAIKKVLQDKRYKNHGIVISYFIAKKFRNSINVCTHCLKLHIDGARIFHASAALGVLVDRLVKAADSVLVCLSKGLGTPVGSVIVGSKAFIDKARILRKTLGGGMRQVGVLCAAAHVAVRDTVGKLADDHKKAKALAGSYMDISTLCEFKLCKVRSVLFGQKGIPYLNTYDGRTMRYPDPLIKANDTIKIDLETNKIMDFIKLYLPFHGLYQVIYLVRLNVSTNS

SEQ ID NO: 76969 - protein, 325 aa, Zea mays
  Coding DNA Sequence Number=SeqID_35190
MELPLDAQSSGRRLDVDERVEQCRAVAGVLHVLARFVQVLQMQHLRAPTAVLLQDSGAPPTATILRTQGSSTSPTATLACTQGSGTSLPDILAHSYTLIVHLDPLLASIKGRFRALGREGRRAGGWADEQAHSLSLANACNPYCKRRPPRRRITRAAVSPLVFHLAPTTIWAGTRIDNFTRRSRDPGVETSTVINTSLIIFIWGLDGPGRVAFTARSIGPAAAALLCGANDVPKGKGSTLYLDVAAGLDLHQLSVNPAGLRPSRTVLRDRLRFRSLIKKCGMKYLVDDLLLLAQALYHSAQQATSPCAVTLATATLAQRLCMASR

SEQ ID NO: 76970 - protein, 345 aa, Zea mays
  Coding DNA Sequence Number=SeqID_35191
MELPLDAQSSGRRLDVDERVEQCRAVAGVLHVLARFVQVLQMQHLRAPTAVLLQDSGAPPTATILRTQGSSTSPTATLACTQGSGTSLPDILAHSYTLIVHLDPLLASIKGRFRALGREGRRAGGWADEQAHSLSLANACNPYCKRRPPRRRITRAAVSPLVFHLAPTTIWAGTRIDNFTRRSRDPGVETSTVINTSLIIFIWGLDGPGRVAFTARSIGPAAAALLCGANDVPKGKGSTLYLDVAAGLDLHQLSVNPAGLRPSRTVLRDRLRFRSLIKKCGMKYLVDDLLLLAQALYHSAQQATSPCAVTLATATLAQRLCMASRAVRSLCDGAHGAYVPVLLYR

SEQ ID NO: 76971 - protein, 216 aa, Zea mays
  Coding DNA Sequence Number=SeqID_35192
MEVRCQTSFCQNEDGFPKLLRACTVRLGIRSQPEYDGREFIEHGTEKCVVTVYIGSSPHHVEWSVTAAGHRFKDTCQVVARKALRTLCQIYEEEVADTPLRFFSPFQRNRPVWMARMRALEGQQLLEDDPSVVYLTAYLLTLDATLKQAKEEHVQKLMKAYLVTRNQCRALWIQDPVSSNPVQSMRAEDPQILEGHPVSTRGEKKTWELPEGAIVL

SEQ ID NO: 76972 - protein, 300 aa, Zea mays
  Coding DNA Sequence Number=SeqID_35193
SLNLNSYGSNPRVMKAGEHREDKEGESFVRFGHGGGLTPSGITNKKKEIGSQMEVRCQTSFCQNEDGFPKLLRACTVRLGIRSQPEYDGREFIEHGTEKCVVTVYIGSSPHHVEWSVTAAGHRFKDTCQVVARKALRTLCQIYEEEVADTPLRFFSPFQRNRPVWMARMRALEGQQLLEDDPSVVYLTAYLLTLDATLKQAKEEHVQKLMKAYLVTRNQCRALWIQDPVSSNPVQSMRAEDPQILEGHPAMDKQEHPESSHDPPPELVEPLTMKKIPAPSREIKEEATSTPPAPPPSEEL

SEQ ID NO: 76973 - protein, 262 aa, Zea mays
  Coding DNA Sequence Number=SeqID_35194
  Homolog annotation: Hit_ID=Q2QMV6; Match level="QueryCoverage=81%, HitCoverage=55%, E-value=8e-31, Identity=35%"; Hit description =Expressed protein
RKQCGDATTSVLAHECVGRPIRASLRIADPPAVSRLYVHWTSIPAIDHHDSILFRVLPPCFTRVPPCFGGGRTDPELDKWLQPHRRQQQRTMIEEDMGILCHGDKGDQTLLATSSTFASDAEMKWSVEKLQIPADMKINLYSFKTDVVITIGERCLCWVDYYHGMLLIDVLTDSNSNSRLRYIPLTSKALKTDRVYKDGKPDPFRRLSVCDGGIIKGVCIITKKHSSPYPHDEAAWTLGGSYQGGGGKEVNWHMGPARLFIL

SEQ ID NO: 76974 - protein, 66 aa, Zea mays
  Coding DNA Sequence Number=SeqID_35195
  Subcellular localization annotation: CTP_CleavageSite=30; ConfidenceScore=5.10e-01
MAWSLAPTSRRSRGWCDGRRRTRGKGHAPRAGGARRPQRGGRTSSVGSKAGGGYCTADGRELSETM

SEQ ID NO: 76975 - protein, 415 aa, Zea mays
  Coding DNA Sequence Number=SeqID_35196
  Homolog annotation: Hit_ID=Q2QMX3; Match level="QueryCoverage=61%, HitCoverage=63%, E-value=5e-38, Identity=35%"; Hit description =Expressed protein
  Pfam annotation: Domain name=DUF1618; Domain location=311-412; Score=- 22.6; E_value=0.00096; Accession=PF07762.4; Description=Protein of unknown function (DUF1618)
  Subcellular localization annotation: CTP_CleavageSite=57; ConfidenceScore=5.23e-01
YNEGVHTPCPRLLPPARPACSPTGRGNASAPTPSSYPSAVQYPPPAFDPTDDVRPPRCGRRAPPARGACPLPRVRRLPSHHPLDRLDVGARLQAIGDESGPGLPSRPRSTTMPTIPGPWMTPTILEWSREGGVGSEKGRTPEGKSDISHGVVCRKQCGDATTSVLAHECVGWPIRASLRIADPPAVSRLYVHWTSIPAIDHHDSILFRVLPPCFTRVPPCFGGGRTDPELDKWLQPHRRQQQRTMIEEDMGILCHGDKGDQTLLATSSTFASDAEMKWSVEKLQIPADMKINLYSFKTDVVITIGERCLCWVDYYHGMLLIDVLTDSNSNSRLRYIPLTSKALKTDRVYKDGKPDPFRRLSVCDGGIIKLVCIITKKHPSPYPFTIATWTLVDIYQGRWEKDVNLTMGASEFFNL

SEQ ID NO: 76976 - protein, 308 aa, Zea mays
  Coding DNA Sequence Number=SeqID_35197
MVGTSAVTSRRPVGVSEALYAKAFRHTWVIRTSYCSEEEGFPHLLRSCALRLGIRKKPEYVWKEYRENGMEKCSMGVYLGESRNYPNHPPFQITFIGHRFRDTCQSVARKALKQLCQNYNREIFETPLRYFPPSNKNTPTWKKRLQALSGGDPIEDDPTIVYMAGYLHTLDNHYDELSSHCTHLNSRVESLEQQVKELTQEKASLQESLSIVEGEEANTREAYRTLKIDFDKKLKALAPKKKIQKKTTNQGCQIEKKKKKAPLALPPPRIDDWSDEEDVSLASLDDLLKAFGDTLDKELASTSKNALV

SEQ ID NO: 76977 - protein, 396 aa, Zea mays
  Coding DNA Sequence Number=SeqID_35198
  Subcellular localization annotation: CTP_CleavageSite=66; ConfidenceScore=5.39e-01
MARSLAPVPAPPCAAVAPVPPHRGPGVPARDLARVAPAPAPPPVPARRGFGSRGCGAPAWRGPLPVARPRRGDENDGFGIGYGNVKWYSFHLERMAHLRHTAQKSVIPFLPSCLAERPLYRPVTAGDRVCEELLPYASAGGAPAPPLSALAARVAAGGDLDDRGGDSSSSHNTDLSADQEPEGWVARPITRDAARGCHFHDALGTLLRQALDQRTWSIEYRCVVFQHSRGVYSDHWEATCLVRRPENSLRGAEICSEHFSISERDSAEAAMQDAARRALSHYCSVLGGVADGLNLKYYPHRPSGSTGGVIVSPVGEDNPRLSSTVNLATVLNTELDHALDELSRARAEIAQLRAERAEHRHLEDGSPAPVGTQHPCRSPRRGHQAYGDTDCRTKIN

SEQ ID NO: 76978 - protein, 345 aa, Zea mays
  Coding DNA Sequence Number=SeqID_35199
MRKVFKKDVASNIPETCVPGGDENDGFGIGYGNVKWYSFHLERMAHLRHTAQKSVIPFLPSCLAERPLYRPVTAGDRVCEELLPYASAGGAPAPPLSALAARVAAGGDLDDRGGDSSSSHNTDLSADQEPEGWVARPITRDAARGCHFHDALGTLLRQALDQRTWSIEYRCVVFQHSRGVYSDHWEATCLVRRPENSLRGAEICSEHFSISERDSAEAAMQDAARRALSHYCSVLGGVADGLNLKYYPHRPSGSTGGVIVSPVGEDNPRLSSTVNLATVLNTELDHALDELSRARAEIAQLRAERAEHRHLEDGSPAPVGTQHPCRSPRRGHQAYGDTDCRTKIN

SEQ ID NO: 76979 - protein, 240 aa, Zea mays
  Coding DNA Sequence Number=SeqID_35200
KVDTVEVAPAWSPPLENPDAVLEALGGLSLAPCGRHERHRPAPPFKADEIRRRITIHMGPNPSYDDLSDFFTSYAELSTLYDAEVTFYYSGSNNNPTPSHLSCATPWRFTVSNSDLSPPESDEEEPSSGYPRGNGSSIEKGCKNGRMSALGWVWMSHRATSESLVRTLVPRDRGCDIVAPAEGSLRRYIPIDAEKLQPQQGSSTHVSQMLRVFHLVELEELDLGTSGSPSLDCRFLEAQE

SEQ ID NO: 76980 - protein, 415 aa, Zea mays
  Coding DNA Sequence Number=SeqID_35201
  Homolog annotation: Hit_ID=O40947; Match level="QueryCoverage=36%, HitCoverage=16%, E-value=8e-09, Identity=24%"; Hit description=ORF 73
PEDGDLGHAADPRRERRGGSPDPHRGIWILDALAGGPQPANVAPSANPAVAPSPLDKGKGAASSASTPGGSRVSKEERRCRLRRADGSLVSEPPRSARGLQAGPRRPAPGPTARRGASVLRSCHHHHHLGVITPRGTSSSNSNSSPQQQQDQRLPRFQGHWKVQGPKGASSSIPPPAPEEMEVVFGRRLRSGAEQEAAPVPLPRMLSRARQVLSDTRAAILWEWETLEAELQRLSDWRTQLEERTKSASRQFLSERSQLERDRKEYKGDLQKVCARELEAARREKKVTRREEAMSQQEALTTEYQAKLSALDQTLEAQRAHQVKAVERLQKWQQELEGKVSDATLAEENLKAKEQSLDRREMDLARRETNLVFREEMLTRWGELLAKHELEAEEKERKLEEQICQFNAAQAASGP

SEQ ID NO: 76981 - protein, 197 aa, Zea mays
  Coding DNA Sequence Number=SeqID_35202
MDLARRETDLVFREEMLTRRGELLAKHELEAEEKERKLEEQIRQFNATQAAPGPHVMEATRKALEDLQVEHRAGVQRIAAWAGEASTALVPLGISPIPVSELPTSISDALPVLDSAADRLQRLDQILGARLEAEGGKLYRAVVEYILTYFWSHDPAISLAPVIAGSVAAIEDAARESVQDAVELVAERFQRDPADEL

SEQ ID NO: 76982 - protein, 430 aa, Zea mays
  Coding DNA Sequence Number=SeqID_35203
  Gene Ontology: Mol. function=hydrolase activity, acting on acid anhydrides, catalyzing transmembrane movement of substances; Cellular component=integral to membrane; Biological process =metabolic process
  Homolog annotation: Hit_ID=P20649; Match level="QueryCoverage=99%, HitCoverage=44%, E-value=0.0, Identity=82%"; Hit description=ATPase 1, plasma membrane-type
  Pfam annotation: Domain name=Cation_ATPase_N; Domain location=6-87; Score=89.8; E_value=8e-24; Accession=PF00690.16; Description=Cation transporterATPase, N-terminus
  Pfam annotation: Domain name=E1-E2_ATPase; Domain location=99-320; Score=287.2; E_value=3.1e-83; Accession=PF00122.10; Description=E1 -E2 ATPase
  Pfam module annotation: Pfam domain module=Cation_ATPase_N::E1-E2 _ATPase; Domain location=6-87::99-320
MELSLEQIRKEAVDLENISMEEVFAFLKCCKEGLSTEEAQKRVLMFGPNKLEERKESKVLKFLMFMWNPLSWVMEMAAVMAIALANGDNRPPDWQDFVGIVVLLVINSTISFVEENNAGSAAEALMANLAPKTKVLRDGQWSEEDAAVLVPGDIISIKLGDIVPADARLLEGDALKIDQSALTGECLPVTKSPGSSVYSGSTCKQGEIEAVVIATGVHTFFGKAAHLVDSTNQVGHFQKVLKAIGNFCIGAIAMGVIVEVVVMYAVQHRRYREGIDNLLVLLIGGIPIAMPTVLSVTMAIGSHKLSLQGAITKRMTAIEEMAGMDVLCSDKTGTLTLNKLSVDRTLVEIFAAGVTKDDVILFAARASRVENQDAIDAAMVGMLGDPKEARDGIEEVHFFPFNPVDKRTALTYIDLADGSWHRVSKGAPEQ

SEQ ID NO: 76983 - protein, 952 aa, Zea mays
  Coding DNA Sequence Number=SeqID_35204
  Gene Ontology: Mol. function=hydrolase activity, acting on acid anhydrides, catalyzing transmembrane movement of substances; Cellular component=integral to membrane; Biological process =metabolic process
  Homolog annotation: Hit_ID=Q8RW30; Match level="QueryCoverage=98%, HitCoverage=98%, E-value=0.0, Identity=77%"; Hit description=Plasma membrane H+-ATPase
  Pfam annotation: Domain name=Cation_ATPase_N; Domain location=6-87; Score=89.8; E_value=8e-24; Accession=PF00690.16; Description=Cation transporterATPase, N-terminus
  Pfam annotation: Domain name=E1-E2_ATPase; Domain location=99-320; Score=287.2; E_value=3.1e-83; Accession=PF00122.10; Description=E1 -E2 ATPase
  Pfam annotation: Domain name=Hydrolase; Domain location=324-611; Score=68.1; E_value=2.8e-17; Accession=PF00702.16; Description =haloacid dehalogenase-like hydrolase
  Pfam module annotation: Pfam domain module=Cation_ATPase_N::E1-E2 _ATPase::Hydrolase; Domain location=6-87::99-320::324-611
MELSLEQIRKEAVDLENISMEEVFAFLKCCKEGLSTEEAQKRVLMFGPNKLEERKESKVLKFLMFMWNPLSWVMEMAAVMAIALANGDNRPPDWQDFVGIVVLLVINSTISFVEENNAGSAAEALMANLAPKTKVLRDGQWSEEDAAVLVPGDIISIKLGDIVPADARLLEGDALKIDQSALTGECLPVTKSPGSSVYSGSTCKQGEIEAVVIATGVHTFFGKAAHLVDSTNQVGHFQKVLKAIGNFCIGAIAMGVIVEVVVMYAVQHRRYREGIDNLLVLLIGGIPIAMPTVLSVTMAIGSHKLSLQGAITKRMTAIEEMAGMDVLCSDKTGTLTLNKLSVDRTLVEIFAAGVTKDDVILFAARASRVENQDAIDAAMVGMLGDPKEARDGIEEVHFFPFNPVDKRTALTYIDLADGSWHRVSKGAPEQILALCNCGDDVCNLVHTVIDKYAERGLRSLAVARQQVPEKSKESLGDPWEFVGLLPLLDPPRSDSSDTIKRALDLGVNVKMITGDQLAIAKETGRRLGMGTNMYPSSALLGQSKDEATASVPVDDLIEKADGFAGVFPEHKYEIVKRLQEMKHICGMTGDGVNDAPALKKADIGIAVAGATDAARSASDIVLTQEGLSVIISAVLTSRAIFQRMKNYTIYAVSITIRIVLGFLLIALIWKFDFSPFMILVIAILNDGTIMTIAKDRVKPSPLPDSWKLNEIFATGVVYGTYMAVMTVVFFWAMRSTDFFSNTFHVRSLRGSTEEMMSALYLQVSIISQALIFVTRSRSWCFAERPGFLLCAAFVIAQIVATLIAVWADFGFAHIRGIGWGWAGVIWLYSVVTFVPLDLFKFAIRYVLAGKAWNNLLQNKTAFTTKKNYGGEERMAQWATTQRSLHGLPVTEPEAGGRRSGSFVELSEVAEQARRRAEFARLREKNTLRGQLESSARLRGVDLNAIKSPFYSV

SEQ ID NO: 76984 - protein, 270 aa, Zea mays
  Coding DNA Sequence Number=SeqID_35205
  Homolog annotation: Hit_ID=Q6QP51; Match level="QueryCoverage=67%, HitCoverage=83%, E-value=7e-20, Identity=48%"; Hit description =Putative growth-regulating factor 1
MGAPDSPVHTGHVRCPSHVILSVEIGAGRPLEALSLCGTGQSGSGKGDTLKWILLREGSGPRALLLIKGSKAGPSEGFDSRLRALGLRAHYWSEVRRLAPRKGSTAASGHSGSAPTTDQGFEGWPPKGSTAASEHAERGMTLGTSDTWPRLGLRSRGTLGHFRDQQERFCNGIPLEGGIEPSDPIKQDQVRQITCRVTLTVAKSSLGHHRKLRLARPQGSDSTSTLEDGLRLARLPGSDSTSTSEESPPRPTLGSDRPCYRGVHHYPTPS

SEQ ID NO: 76985 - protein, 137 aa, Zea mays
  Coding DNA Sequence Number=SeqID_35206
MKKKSKRDLEMKHKTTALKLTQRFLSKDLKWERQEMCVREREVFLGLEMEFKSCSLLWGERGAVEPPLTAPGDLFASLTGRLQIRGQRGQRPAELPLRTSSTGLDHSAEKLNTAEVKFSWKAQLQLKKFSCFSARTL

SEQ ID NO: 76986 - protein, 89 aa, Zea mays
  Coding DNA Sequence Number=SeqID_35207
MEFKLCSLLWGERGAVEPPLTAPGDLFASLTGRLQIRGQRGQRPAELPLRTSSTGLDHSAEKLNTAEVKFSWKAQLQLKKFSCFSARTL

SEQ ID NO: 76987 - protein, 342 aa, Zea mays
  Coding DNA Sequence Number=SeqID_35208
  Gene Ontology: Mol. function=diacylglycerol kinase activity; Cellular component=intracellular; Biological process=protein kinase C activation
  Homolog annotation: Hit_ID=Q1SFH7; Match level="QueryCoverage=47%, HitCoverage=30%, E-value=4e-42, Identity=47%"; Hit description =Tetratricopeptide-like helical
  Pfam annotation: Domain name=DUF1499; Domain location=189-331; Score =74.0; E_value=4.6e-19; Accession=PF07386.2; Description=Protein of unknown function (DUF1499)
MITGLAMNDGERQALSLLWKMQMVGVQPNDITFIGLLSACTHSGLVNEGRRLFDSMIEDFGIQPFPQHYGLMVDLIGRSGRVMEALYFVKSMPVEPHPGLWGALASACKMHGKVELGEEVAKKLIELEPRHGSRYILLSNLYGSVNRWDDMASVRKILKRRKVPKGTGNAVVGMTSASLCVFPFTLGSSGSKPSYLGVQKSPPSLALCPATNNCVSTSEEISDSNHYAPPWNYNPKDGRSGKPITKEEAMKELIEVVTKTKPDNFTPRIVEKKDDYIRVEYESPIFGFVDDVEFWFPPGNKTMVQYRSASRSGFIDFNANKKRVKELRLALEKKGWASESNF

SEQ ID NO: 76988 - protein, 658 aa, Zea mays
  Coding DNA Sequence Number=SeqID_35209
  Gene Ontology: Mol. function=transferase activity; Cellular component= nucleus; Biological process=protein kinase C activation
  Homolog annotation: Hit_ID=Q1SLC5; Match level="QueryCoverage=63%, HitCoverage=78%, E-value=7e-82, Identity=37%"; Hit description =Tetratricopeptide-like helical
  Pfam annotation: Domain name=DUF1499; Domain location=505-647; Score =74.0; E_value=4.6e-19; Accession=PF07386.2; Description=Protein of unknown function (DUF1499)
  Pfam annotation: Domain name=PPR; Domain location=147-181; Score =20.4; E_value=0.0067; Accession=PF01535.11; Description=PPR repeat
  Pfam annotation: Domain name=PPR; Domain location=209-243; Score =25.6; E_value=0.00017; Accession=PF01535.11; Description=PPR repeat
  Pfam annotation: Domain name=PPR; Domain location=312-346; Score =32.4; E_value=1.6e-06; Accession=PF01535.11; Description=PPR repeat
  Pfam annotation: Domain name=PPR; Domain location=347-381; Score=8.9; E_value=0.66; Accession=PF01535.11; Description=PPR repeat
  Pfam annotation: Domain name=PPR; Domain location=383-416; Score=2.0; E_value=4.3; Accession=PF01535.11; Description=PPR repeat
  Pfam module annotation: Pfam domain module=DUF1499::PPR::PPR::PPR::PPR ::PPR; Domain location=505-647::147-181::209-243::312-346::347 -381::383-416
  Subcellular localization annotation: CTP_CleavageSite=40; ConfidenceScore=5.28e-01
MGSGGIRNARPSSWLAAVAAAAAPPIAHAVLLTSGHLSSRASANSLLRVAPCSSACALILRLLLLHRLRPDHISLSFSLHACARVVPTTSRYPLTVTGLLHSLALRLGHARDVYVANAAVSSYFAASDVASADRLFAEVSTDVADVVTWTTMVTGHASAGGLGRARHFFDAMSERNVVSWNAMLSAYARAGMLTEARDLFDAMPTRNAATWSCMISGLVLSGRCWEALGLFGDMVHSSGIVPNEPALVSVVSACAQMRSLEHGAWVHAYAEQELQGAMSVVLASAIIDMYGKCGGIHSAIRVFAAMPMRNIYSWNAMITGLAMNGGERQALSLLWKMQMVGVQPNDITFIGLLSACTHSGLVNEGRRLFDSMIEDFGIQPFPQHYGLMVDLIGRSGRVMEALYFVKSMPVEPHPGLWGALASACKMHGKVELGEEVAKKLIELEPRHGSRYILLSNLYGSVNRWDDMASVRKILKRRKVPKGTGNAVVGMTSASLCVFPFTLGSSGSKPSYLGVQKSPPSLALCPATNNCVSTSEEISDSNHYAPPWNYNPKDGRSGKPITKEEAMKELIEVVTKTKPDNFTPRIVEKKDDYIRVEYESPIFGFVDDVEFWFPPGNKTMVQYRSASRSGFIDFNANKKRVKELRLALEKKGWASESNF

SEQ ID NO: 76989 - protein, 144 aa, Zea mays
  Coding DNA Sequence Number=SeqID_35210
  Homolog annotation: Hit_ID=Q9FN84; Match level="QueryCoverage=56%, HitCoverage=24%, E-value=6e-14, Identity=53%"; Hit description =Arabidopsis thaliana genomic DNA, chromosome 5, P1 clone:MVA3
MNYVEENCAPAVYTPELRYVCIAGRYIQGAPLLGNSAAASDEILTVDTPSEGGDAVIVSSSDNSTSTPSAVSWRARFVGQGYKQTRYIQGAPLLGNSAAASDEILAVDTPSEGGDAVIVSSRDNSTSTPSACNLARFIGQGYKQ

SEQ ID NO: 76990 - protein, 517 aa, Zea mays
  Coding DNA Sequence Number=SeqID_35211
  Homolog annotation: Hit_ID=Q8S522; Match level="QueryCoverage=38%, HitCoverage=53%, E-value=8e-60, Identity=61%"; Hit description=D -type cyclin
  Pfam annotation: Domain name=Cyclin_N; Domain location=55-193; Score =41.0; E_value=4e-09; Accession=PF00134.13; Description=Cyclin, N -terminal domain
  Subcellular localization annotation: CTP_CleavageSite=52; ConfidenceScore=5.25e-01
MPRLSLTVTDDAAAMPFALRLGGSPALRPGSQSPSWLRFGGRAGVRKALFCSAEDARRCGSDGGEREHMPRACYGERLRGGGLCIHREAIDWIWKAYTHYSFHPLTAYLAVNYLNRFLSLSECLSYWNKDWMTQLLSVACVLHFRFRWLPKMEEIPVMQSLDLQVGDVCYVFEAKTVHRMELLVLTTLNWRMKAITPFSYMDYFLNKLNGGNTNMIVILLREIGTGCLGFRPSEIAAAVAATVAGEVDATGIENAYAHIDKEPIDETHVPEVINEVPKKFQFHLPLYHWRRHQRSHMLQLFGRDWKKIEEHVGTKTTVQIRSHAQKYFVKVQKLGLAVGLPPMYPRRHFAMQQQQQSSVAGGSSAAAMPLLHGRQPTCAPVAMPGLAEPDAVAHHGSIGWSSPSVVVPAASSDGGGKDARLGLGVGGRRFGSRGKYLVLHMQVDVFSFGIVLWKILTGEEPYANMHCGAIIAASDEILAVDTPSEGGDAVIVSSSDNSTSTPSACNLARFIGQGYKQ

SEQ ID NO: 76991 - protein, 141 aa, Zea mays
  Coding DNA Sequence Number=SeqID_35212
  Homolog annotation: Hit_ID=Q10BI2; Match level="QueryCoverage=36%, HitCoverage=25%, E-value=5e-12, Identity=81%"; Hit description =Expressed protein
  Subcellular localization annotation: CTP_CleavageSite=49; ConfidenceScore=5.24e-01
MAPAPSPSATPTPSSPRQIDRRFSVVNTLLGKNSYNVTVNPGIDYAFIVALVNEYFFRYRDDRNAAEIFRANGDINGLKSQCNNQSNQVKSGSMDAGGWGVWRGRLLEQRRGRGSGVEGQGRGRGPRRGSAGMRQSVAAVS

SEQ ID NO: 76992 - protein, 74 aa, Zea mays
  Coding DNA Sequence Number=SeqID_35213
MDTVLLVSGMEIMCKEELEAARREEWEARTALGDKKNDLNNNEYFFRYRDDQNAAEIFKANGDINGLKSHCNSQ

SEQ ID NO: 76993 - protein, 457 aa, Zea mays
  Coding DNA Sequence Number=SeqID_35214
  Homolog annotation: Hit_ID=Q08069; Match level="QueryCoverage=43%, HitCoverage=89%, E-value=4e-87, Identity=81%"; Hit description=40S ribosomal protein S8
  Pfam annotation: Domain name=Ribosomal_S8e; Domain location=113-309; Score=231.6; E_value=1.7e-66; Accession=PF01201.12; Description =Ribosomal protein S8e
MDLAGRGSRGSRRICRSQSLHRVDAFHGVSGSYLLNPQAPGMVLDMDDYVDPYEEVVAEDDSDNPDKDDSDAESNYKDKSFDLLKSDKHRLRNLDDTFRGPFCPCKKSRGTRARTSSSTLRRHRCLQQALTSRPQMYELGRQPANTKLSSNETVRRVHVRGGNAKWRALRLDTGNCSWGSEALIRKTHILDVVYNASNNELVRTQTLVKSAIVQVDAAPFKQWYLTHYGVDIGRKKKVHVAKKDDTEGQEGEAIVEETKKSNHVQRKIDKRHQYRALDTHIEEKFGSGRLLACISAHPRQCGRADGYILEGKELEFYMKKLQRRFKINVECNHATLSRHCCHHELENAWINRLLVNIDANTVDDMQNMQTVSATQTLEVFKLIGNCIAKEYGTYAPKEKGKNHTFFGSENEYFFRYRDDRNAAEIFRANGDINGLKSHCNSQLIYHLGVMSSQLKCS

SEQ ID NO: 76994 - protein, 61 aa, Zea mays
  Coding DNA Sequence Number=SeqID_35215
VVWYRYCALAFSFSSAPACASDGRKPECSNSTLATETTLIAGVSFPLTDDVCNNHSFTDDE

SEQ ID NO: 76995 - protein, 451 aa, Zea mays
  Coding DNA Sequence Number=SeqID_35216
  Homolog annotation: Hit_ID=Q9SLP6; Match level="QueryCoverage=30%, HitCoverage=41%, E-value=6e-42, Identity=67%"; Hit description =Ferredoxin
  Pfam annotation: Domain name=NAD_binding_1; Domain location=123-228; Score=61.9; E_value=2e-15; Accession=PF00175.11; Description =Oxidoreductase NAD-binding domain
  Subcellular localization annotation: CTP_CleavageSite=42; ConfidenceScore=5.24e-01
MPRLSLTVTDDAAAMPFVLRLGGSPALRPGSQSPSWLRFGGRAGARKALFCSAEDARRCGSDDDAEAEECRRRGGSRVPSDRRIRGRNAAATVGDLQSGDNVQITGPVGKEMLMPKDPNATIIMLATGTVQRSGLALPGCSNEQLVALQGGQYIDLYKEEFRKMKERASENFRVDYAVSREQTNAAGERMYIQTRMAEYKEELWELLKKDNTYVYMCGLKGMENGIDDIMLDQESLKYNNVNGRSSRSAYDEIKLDFSHFLDLKITFIGTVVWYRYCALAFSFSSAPACASDGRKPECSNSTLATETTVKPTKFNIYNNSMCPGFGCDWKKIEEHVGTKTTVQIRSHAQKYFLKVQKLGLAVGLPLMYPRRHFAMQQQQQSSVAGGSSATAMPLLHGRQPTCAPVAMPGLAEPDTVAHHGSIGWSSPSVVVPAASGGGDKDARLGLGVGGR

SEQ ID NO: 76996 - protein, 109 aa, Zea mays
  Coding DNA Sequence Number=SeqID_35217
MDAVQSGCTVLSIFKQGDLMIVANAGDSRLFWAPHPTTAPSRRPAHHPPETQPATPGGPSGRRVSAACPSPDGSSAWASAKGGRSEAAGDRRERGGNPAAFVFVPRPGR

SEQ ID NO: 76997 - protein, 86 aa, Zea mays
  Coding DNA Sequence Number=SeqID_35218
  Gene Ontology: Mol. function=protein phosphatase type 2C activity
  Homolog annotation: Hit_ID=Q2HW33; Match level="QueryCoverage=71%, HitCoverage=17%, E-value=4e-09, Identity=45%"; Hit description =Protein phosphatase 2C-like
MSCAFDDYYIKDYGVILAPENNPRVAGVGDDHEVPLFEDGPRGAAALDRVQATVATELAEHSDACDHVVLLPEVKLAVARLLLIVD

SEQ ID NO: 76998 - protein, 449 aa, Zea mays
  Coding DNA Sequence Number=SeqID_35219
  Gene Ontology: Mol. function=RNA binding
  Homolog annotation: Hit_ID=Q69N36; Match level="QueryCoverage=37%, HitCoverage=18%, E-value=8e-37, Identity=45%"; Hit description =Agenet domain-containing protein / bromo-adjacent homology (BAH) domain-containing protein-like
  Pfam annotation: Domain name=Agenet; Domain location=108-189; Score =63.9; E_value=5.1e-16; Accession=PF05641.3; Description=Agenet domain
RIGGAMSHDELADKEPSSSEEFQLALTDSKFRSLSPAPIPIPASPGIRSFVDSVTATCKLYIVPISRPSSDGGLKRKRDAFNDDANPQKFIPYGASTSRFYGENIQQLCPGCHVEVLSQDSGIRGCWFRCLILKRHKDKIKVCYLELQDADETENLEEWVMLTRVAKPDQLGVRFLGRPMVRPQRVEQSKASCFDVGAIVDAWWHGGWWEGIVLCQVGSGRLQVYFPGENRTTEFGEDELRCSLEWVGNKWNPLKGRKDVTSKLTSTADCGISTISRDQKRVLADLTNDLKLDNLRWRPRKRSRRSGSRKQSDTSSGSSSGDMDLFSPSPSGSFGQHNLVPDEETCKRSGEQTFMGVPVQVLNLVMSRLFLPAQPRSSFLQFFGGSSVVIKDVKMSHQEPLRFAWCGKLIRYARAVAAHYVCSVKGLCFDLFIIRGGNRAFNACWRCTV

SEQ ID NO: 76999 - protein, 657 aa, Zea mays
  Coding DNA Sequence Number=SeqID_35220
  Gene Ontology: Mol. function=1,3-beta-glucan synthase activity; Cellular component=1,3-beta-glucan synthase complex; Biological process=1,3-beta-glucan biosynthetic process
  Homolog annotation: Hit_ID=Q8W0J2; Match level="QueryCoverage=50%, HitCoverage=22%, E-value=8e-81, Identity=45%"; Hit description=1, 3 -beta-glucan synthase component-like
MDSCPVLQHGLLLDRQQPRPHPGISKTTQQLDGIYALFAVLRLAVVDTKAGCCDFAGNEVVALTESIGKPLADVLKELGKRVPDSLVKTRVEDDGFTINHTLMEFCLAWCGKLIRYARAVAAHYVCSVKGLCFDLFIIRGGNRAFNACWSIEKRPTVVNFGPEPEQGAALKSSQAQTQAQVRGDDSSLLALSVPAHLALPPPLNPTLTRGSGDSRFGLRFPPSAVQKSISATASREDEPPPQPPPAYNIIPIHDVVMQGEHPSLRFPEVRAAVEALAHAADLPPPPLARGWDAFRADLFDWLGATCGFQLDNVRNQREHLVLLLANAQLRAGGTLPTDHPADVLHHSIARDIRRKLLKNYKTWCSYLGKRPHVHVPSGGRRVAQGVGPDTRRDLLYTALYLLIWGEAANLSRNGTKPHSAWRNYDDVNEYFWSRRVFRRLQWPLSPARSFFIKPGNPGRIGKTGFVEQRSFWNVYRSFDRVLVMLILFFQAAMIVAWDGHTPWFSLLYRDIQIRVLSVFITWAALRIVQAVLDAGTQYSLVRTDTIFLAVRMVLKVLVAVGWTISHSLVLNYLEAAAVFLIPQNGTGHRTAEATGKYKQYRVPVPHEATTSPDGDGNPSSWRTSGDVTRCLVGDAPWRADLHRLLPPRRTVINEACY

SEQ ID NO: 77000 - protein, 143 aa, Zea mays
  Coding DNA Sequence Number=SeqID_35221
MEGHKSFQCKVMTGDNQRQKLKQKPSSKISSTYIKKVNKKDATPYLIKKKKNGKVIAIKANKQGNKGKGAKRIWVPKEIISTMKSTKKVWIPKGNLIVRKMKSPENDNNLPLQNLQELSCLTSLPLVFNWSAIDFRLVSLRLH

SEQ ID NO: 77001 - protein, 196 aa, Zea mays
  Coding DNA Sequence Number=SeqID_35222
  Subcellular localization annotation: CTP_CleavageSite=38; ConfidenceScore=5.13e-01
MGFSGTERKRFPFLSPGITNPSSRTAVVPGNFFHGRTRAAKGRGEKDHSHGDARKDVGRSLLSMRVGQRLGSLGRGRTRSHGWPRHGGAGQRTVPRAGVPGRAEAQAGWPGMAATRAEPTRTRARTSGLATPHRRSRKTERARRGENVEGREERLTCGCLIVRKMKSPEKDNNLPLQNLQELSCLTSLPLTFNRYL

SEQ ID NO: 77002 - protein, 227 aa, Zea mays
  Coding DNA Sequence Number=SeqID_35223
MARLRHTARKSVIPFLPSRLAERPLHRTVSGQSSHLERLHHRLREEQERRRQHREQQGSSSPPQREVESVRPRSSVAQLEVPPAPPRDAPAVGGATGGDPGGDPDDDDSDHSMESSEPQEAEGWVARPITHDAARGCHFHDALDTLLRQAFDRHTWSIEYRCVVYQHSRGSTESVVVSPVGEGNPRLSSTVNLVAVLNTELDHSLDELSRARTEIAELRAELAERHH

SEQ ID NO: 77003 - protein, 222 aa, Zea mays
  Coding DNA Sequence Number=SeqID_35224
HTARKSVIPFLPSRLAERPLHRTVSGQSSHLERLHHRLREEQERRRQHREQQGSSSPPQREVESVRPRSSVAQLEVPPAPPRDAPAVGGATGGDPGGDPDDDDSDHSMESSEPQEAEGWVARPITHDAARGCHFHDALDTLLRQAFDRHTWSIEYRCVVYQHSRGSTESVVVSPVGEGNPRLSSTVNLVAVLNTELDHSLDELSRARTEIAELRAELAERHH

SEQ ID NO: 77004 - protein, 109 aa, Zea mays
  Coding DNA Sequence Number=SeqID_35225
MARRGEGRLTVDGAHRGRKEWRAFSGSLLRSNGVEVHVPLHGADAAQLARISWNKVQHLCAAWLVSLCFMGPNFRRDVVFTNEVFILLTGFYTANNLHKLLNRNSTMNN

SEQ ID NO: 77005 - protein, 145 aa, Zea mays
  Coding DNA Sequence Number=SeqID_35226
MLGGCFLVLKNKYPTEPQPFVLSGDFRLTVDGAHKGRKEWRAFSGSLLRSNGVEVHVPLHGADAAQLASLLLPQLPAKTGGEELLLEGGDVGAVHRRIYDVSSRGRALARSTEDLARATGSVAASPSGSTSSTSSSPEPPVLSQR

SEQ ID NO: 77006 - protein, 170 aa, Zea mays
  Coding DNA Sequence Number=SeqID_35227
MTCGHDTIQQVDMLPQLQERLAVAIPSLHANKDIQNKYPTEPQPFVLSGDFRLTVDGAHKGRKEWRAFSGSLLRSNGVEVHVPLHGADAAQLASLLLPQLPAKTGGEELLLEGGDVGAVHRRIYDVSSRGRALARSTEDLARATGSVAASPSGSTSSTSSSPEPPVLSQR

SEQ ID NO: 77007 - protein, 380 aa, Zea mays
  Coding DNA Sequence Number=SeqID_35228
  Subcellular localization annotation: CTP_CleavageSite=62; ConfidenceScore=5.17e-01
MAHRSFSDPPETFSPSFSLLCPWIHGFFPATEFVVAPSSPLPNSCDPGATLARACLNSGDLTAAERSGATRSHLFPRSWFLSELLKIPLSSNLEQEQQDSSPSPQQEVESERPLSPAPQPEMPPAPPQGIPTAGGDPDGDGDDDDAGGSSSHGTELLEEPEPDGWIARPITRDAARGCHFHDALDTLLRRAFNRHTWSIEYHCVVYRHRRGLYPDQWEATCLVRRPDDDLRGAEAFSEHYSITERDTTETAMQDAARRALSQYCSLFSGVADGLDLKYYPRHSTGSAGGVIVSPVGEGNPRLSSMVNLVVVLNTELDHTLDELGKVRAEVAELRAERAAHHYMDGGSPAPIGIQHPYHSPPRGRFDYGTPDCRTQIDLDP

SEQ ID NO: 77008 - protein, 358 aa, Zea mays
  Coding DNA Sequence Number=SeqID_35229
  Subcellular localization annotation: CTP_CleavageSite=62; ConfidenceScore=5.17e-01
MAHRSFSDPPETFSPSFSLLCPWIHGFFPATEFVVAPSSPLPNSCDPGATLARACLNSGDLTAAERSGATRSHLFPRSWFLSELLKIPLSSNLEQEQQDSSPSPQQEVESERPLSPAPQPEMPPAPPQGIPTAGGDPDGDGDDDDAGGSSSHGTELLEEPEPDGWIARPITRDAARGCHFHDALDTLLRRAFNRHTWSIEYHCVVYRHRRGLYPDQWEATCLVRRPDDDLRGAEAFSEHYSITERDTTETAMQDAARRALSQYCSLFSGVADVGEGNPRLSSMVNLVVVLNTELDHTLDELGKVRAEVAELRAERAAHHYMDGGSPAPIGIQHPYHSPPRGRFDYGTPDCRTQIDLDP

SEQ ID NO: 77009 - protein, 299 aa, Zea mays
  Coding DNA Sequence Number=SeqID_35230
  Homolog annotation: Hit_ID=Q6E4A5; Match level="QueryCoverage=14%, HitCoverage=25%, E-value=2e-12, Identity=77%"; Hit description =Putative PRLI-interacting factor N
  Subcellular localization annotation: CTP_CleavageSite=51; ConfidenceScore=5.02e-01
MKPSLSKKKGKKKKKSSLPAAAPAPPPAEGAADTEACPPLPGTITLTAATAAAAVVSETESSSSGEASTCPSACFTASSSGTASSHSFSALSSSASTASSSAAGEERRDLTWLLDAFASATFDQIDSAYREAGGDPFVAAGILSSTQDTHPPQPPQPAPQPPPPPDLSPRSGSGGRKAGRRPKRVAVAATGMVADVIGKEYTRPAANSVVSMPNAWKGRDGESDGSGSGGRKDSVEEAEQFLCSMLGDNSELGMGVVRDVLGQYGYDVEKVNIYFIGRISQGLLTGFIPFFPKFQQNPT

SEQ ID NO: 77010 - protein, 80 aa, Zea mays
  Coding DNA Sequence Number=SeqID_35231
NGEESEVIEEKTPPPLESRARTWLYFDICESEPDSPTNEGKPRPVDQGLSYLATCPENGTGGGSVGIVDIKVYEKHMSCG

SEQ ID NO: 77011 - protein, 61 aa, Zea mays
  Coding DNA Sequence Number=SeqID_35232
AKTWLYFDNCESEPDSPTNEGKPRPVDQGLSYLATCPENGTGGGSVGIVDIKVYKKHMSCG

SEQ ID NO: 77012 - protein, 143 aa, Zea mays
  Coding DNA Sequence Number=SeqID_35233
  Gene Ontology: Mol. function=protein phosphatase type 2C activity
MTQTIMGLLVISSLGSTEGVSFFKIFGYEAYPQQPATSIVPAHKNLCPNNPRVIDVGDNHEAPLLNDGQRDTAALDRVQAAASRELVVHNGACDHVGLLLEVELTVVKLLLVIDERRQREFLLLMVFVRVSSKKHGFMLGVGL

SEQ ID NO: 77013 - protein, 185 aa, Zea mays
  Coding DNA Sequence Number=SeqID_35234
MANPKDHNNVVLDINTRLTNSPTNEDEKLEDHMKRLDEEFQRQQAQISKVAKKWYLSHFKVDHHQKIIKKRKVKEDTTPVPRSRTVRPKAVDRPRHRRGHYQATCRRPPPLFTSRSQTQGIAHHEKVLGFVAIWSQIGGDHHRGVATVLVECLALRKGVNILFGDSAGDNAYRPIKSALNGRFKG

SEQ ID NO: 77014 - protein, 560 aa, Zea mays
  Coding DNA Sequence Number=SeqID_35235
  Gene Ontology: Mol. function=phospholipase A2 activity; Biological process=lipid metabolic process
  Homolog annotation: Hit_ID=Q6ZG42; Match level="QueryCoverage=78%, HitCoverage=96%, E-value=1e-154, Identity=65%"; Hit description =Putative latex protein allergen
  Pfam annotation: Domain name=Patatin; Domain location=52-287; Score =250.2; E_value=4.3e-72; Accession=PF01734.12; Description=Patatin -like phospholipase
  Subcellular localization annotation: CTP_CleavageSite=38; ConfidenceScore=5.44e-01
MAPVYAAADHGTNGGSGLTLNPVARRALSLVGAPTTPSSSTPPAYGSIVTVLSIDGGGVRGIIPGTILAFLEEKLQEYDERPDARLADYFDVIAGTSTGGLVTAMLTAPNKDGRPLFAAKDINGFYLDHCPRIFPPGGGAGGPLGLLKKLSGPKYDGKYLHALVRDLLGETRVSQALQNIVIPTFDIKLLQPTVFSKYDVKTLLLLPCMVCSPIIYMLNDDDDYVHAQAITDVSKDALLSDVCISTSAAPTYLPGHQFQTTDKDGKARAFNLIDGGVAANNPTLLAMTDVSKQILLGNPDFFPIKPADYGRFMVLSLGTGSAKAEEKFDAVQSGKWGLLGWLSSKDTTPIIDSFSQASADLVDIHASVLFQALHSERQYLRIQDDELTGQTSSVDVSTEENLNRLVDVGRGLLKKPACKVNIETGKNEPDGKRGTNEDELVRFAKMLAPLLRPGCGPSSLEPRTVRATAEGTARRPSDLSQAATTVHLAEPNPRPIRSVAMANPKDHNNVVLDINTRLTNSAPNEDEKLEDHMKRLDEEFQRQQAQISKVAKSGTSRTSR

SEQ ID NO: 77015 - protein, 64 aa, Zea mays
  Coding DNA Sequence Number=SeqID_35236
  Subcellular localization annotation: CTP_CleavageSite=52; ConfidenceScore=5.32e-01
MRGKANCCSLARVQLSVLFPGGGRAARGPATSKSALHRRLHRGSLNTSYAARAARRTTEGPTDI

SEQ ID NO: 77016 - protein, 565 aa, Zea mays
  Coding DNA Sequence Number=SeqID_35237
  Gene Ontology: Mol. function=ligase activity; Cellular component =cytoplasm; Biological process=response to auxin stimulus
  Homolog annotation: Hit_ID=P0C0M3; Match level="QueryCoverage=99%, HitCoverage=99%, E-value=0.0, Identity=75%"; Hit description =Probable indole-3-acetic acid-amido synthetase GH3.11
  Pfam annotation: Domain name=GH3; Domain location=12-545; Score =931.2; E_value=4.2e-277; Accession=PF03321.4; Description=GH3 auxin -responsive promoter
MDAHKLGYTGNDVLQELEILTINAKAAQEVILSKILEKNQATEYLNKFMNGSVDISAFKSQVPVVTYDVVQPYIARIAAGERSSILCGEQIVELLRSQVSRYIRGLGEGKAMYLLFVKAETLTNAGIPVRSVLTSYYKSPQFLQRKHDLYNSYTSPDEVILCPDSQQSMYCQLLCGLVERQNVVRLGAVFASAFLRSISFLEKHWHDLVTDIRTGRINPSITNAACRVATESFLAQPNPELADEVEAICSSESWKGVLGRLWPNVKYIEAVLTGTMAQYVPMLEFYSDGRIPLVCTMYASSESYFGVNLRPLCSPKDVSYTILPNMAYFEFVPLDDGLRLAEDGEAVEKEKLVGLVDVKVGCYYELVVTTFAGLYRYRVGDVLQVTGFYNRAPQFKFICRRNVILSVDADKTNEEDLHGSVSRAKKILEDRGHILLEYTSFTDTSTVPGHYVLFWEVKATPTSGSGGARLDAQVLESCCVAVEESLDCVYRRCRAHDRSVGPLEIRLVEAGAFDALMDLLVSQGGSINQYKTPRCIEPGGAALELLDSKATASFFSPRDPEATGV

SEQ ID NO: 77017 - protein, 116 aa, Zea mays
  Coding DNA Sequence Number=SeqID_35238
  Gene Ontology: Mol. function=oxidoreductase activity; Biological process=electron transport
  Homolog annotation: Hit_ID=Q7XHL8; Match level="QueryCoverage=90%, HitCoverage=27%, E-value=3e-17, Identity=41%"; Hit description =Putative dimethylaniline monooxygenase
MPKQFCGQLMRMPFPDGYPEYPTRRQFVDYLERYAAEFKIKPELGTAVLSARYDETSSGIWRVVTNGGDMNQGGSINQYETPRCIEPGGAALELLDFHGPASFISPCPGWSLLVTE

SEQ ID NO: 77018 - protein, 347 aa, Zea mays
  Coding DNA Sequence Number=SeqID_35239
  Pfam annotation: Domain name=Cupin_5; Domain location=28-176; Score= -64.7; E_value=0.067; Accession=PF06172.2; Description=Cupin superfamily (DUF985)
  Subcellular localization annotation: CTP_CleavageSite=42; ConfidenceScore=5.22e-01
MGGSEPGSFAEKDPFRGEASRAPPARGRRVSRRRVNATGRVVGEAVVAIRSRNGSRVHRLHAVRGGSLAVSRWDQLTHRLLDAWAWVPKLACQKSEKRVHLARLHAASGLHDMRDPAPESQGRALERVGEDSARGVWGPRMGGIRRLSASSLEERNSMGVGTFQPSFGFKDFHHAARLLPSAGGLGRGVRRDGVGPCVGGGPLLHSVMGGEAGIARGVRQLQRAWSSAASGFGATCGAGVCHGSWKRFFRRRGGRDRPRADLQLLRPSARPCLTSFGMGGGFLAAASTLRSALPLFGPPEQKSSSSPLLEQESLGPFGLVVWGSSSLVDETPRPPFGGPRPGVAISV

SEQ ID NO: 77019 - protein, 91 aa, Zea mays
  Coding DNA Sequence Number=SeqID_35240
NSTIHPVPTIVPTTRVKPTTDANILDVFVPRVRQTFDTREETYLFYLDYAKLAGFSVRTKSILSGACEKDEDEASVWPEWDGWLGPGAPGA

SEQ ID NO: 77020 - protein, 165 aa, Zea mays
  Coding DNA Sequence Number=SeqID_35241
MAPPSLPHLESPQCSSPNSLAIVVAGGADPILPSPIATTGAGVRGGSGDPLHHKTLLTPPPSIPPGSLVTPDAAQLFHPLHGVYSNCKLESLFLLIDYSCMLHGVYSNCKLESLFLLIDYSCMDANILDVFVPRVQQTFDTKEEAYLFYLDYAKLAGFSVSPLGD

SEQ ID NO: 77021 - protein, 79 aa, Zea mays
  Coding DNA Sequence Number=SeqID_35242
MAPPSLPHLESPQCSSPNSLAIVVAGGADPILPSPIATTGAGVRGGSGDPLHHKTLLTPPPSIPPGSLVTPDAAQLFHP

SEQ ID NO: 77022 - protein, 119 aa, Zea mays
  Coding DNA Sequence Number=SeqID_35243
MATSRGRGLPHQTQMGTQGRDLALWQVPNQEGLCDSPPAGKDPSRKNPTENALARAAKTLLSLEHRTVRWCTGQCPVRQAGSSEQAALGNSPATYDYNSPDCPCKGERLQVVEIPRKRD

SEQ ID NO: 77023 - protein, 283 aa, Zea mays
  Coding DNA Sequence Number=SeqID_35244
  Homolog annotation: Hit_ID=Q6QP51; Match level="QueryCoverage=21%, HitCoverage=35%, E-value=5e-14, Identity=66%"; Hit description =Putative growth-regulating factor 1
MQAACSRTEGAHPFDFDASSMEAQAHTSCNRRAGYYVRETAPPLAPVPRLLDCRTGAATQGDPAHDPTVPTKHIGHGSVSRGIRRDGRYDQKWASRTGKGDTPKGILLREGSGPRAPLLIRGSKAGPSEGFNSRLRALGLRAHYWSEVRRLAPRKGSTAASGHSGSVPTTDQGFVGWPPKGSTAASEHAERGMTLEGGIEPSDPIKRGPGPANHPQCPTQVPKCKKVDKVQIKDKGKIQLKMPWLEQPRLCSVWSTGLSGGVRCTRLALQSGCSRDFDGGVRL

SEQ ID NO: 77024 - protein, 118 aa, Zea mays
  Coding DNA Sequence Number=SeqID_35245
MQNRGMRIVKDGAKAMIVTDKGKNATKVRIGKTPLSNQDGKDDISKGRHKITSWKDLEITKRVRRRPRAKGGVFAFAPTFALRGTSSTIHLVPKTSLDGGDAALARSGSAGVFDMTVD

SEQ ID NO: 77025 - protein, 95 aa, Zea mays
  Coding DNA Sequence Number=SeqID_35246
MEGRGMSIIKDGAKAMIVTDKGENATKVRIGKTPFSNRDGKDDISKGRHKITSWKDLEITKVQDKHQESRQDSPNGKVEKTIKDKISEVPTEELK

SEQ ID NO: 77026 - protein, 105 aa, Zea mays
  Coding DNA Sequence Number=SeqID_35247
MEGRGMSIIKDGAKAMIVTDKGENATKVRIGKTPFSNQDRKDDISKGRHKITSWKDLEITKVQDKHHGKDQGMTRVKMITDKHNQGCILDKTCEASKKGKQSMVK

SEQ ID NO: 77027 - protein, 105 aa, Zea mays
  Coding DNA Sequence Number=SeqID_35248
MEGRGMSIIKDGAKAMIVTDKGENATKVKIGKTPFSNRDGKDDISKGRHKITSWKDLEITKVQDKHHGKDQGMTRVKVITDKHNQGCILDKTCEASKKGKQSMMK

SEQ ID NO: 77028 - protein, 105 aa, Zea mays
  Coding DNA Sequence Number=SeqID_35249
MEGRGMSIIKDGAKAMVVTDKGENATKVRIGKTPLSNQDGKDDISNGRHKITSWKDLEITKVQDKHHGKDQGMTRVTVITDKHNQGCILDKTCEASKKGKQSMMK

SEQ ID NO: 77029 - protein, 67 aa, Zea mays
  Coding DNA Sequence Number=SeqID_35250
MEKMIFLKGRHKITSWKDLEITKVQDKHHGKDQGMTRVKVITDKHNQGCILDKTCEASKKGKQSIMK

SEQ ID NO: 77030 - protein, 271 aa, Zea mays
  Coding DNA Sequence Number=SeqID_35251
  Gene Ontology: Mol. function=carboxyl- and carbamoyltransferase activity; Cellular component=ornithine carbamoyltransferase complex; Biological process=amino acid metabolic process
  Homolog annotation: Hit_ID=Q8SA97; Match level="QueryCoverage=52%, HitCoverage=23%, E-value=5e-15, Identity=41%"; Hit description =Ornithine carbamoyltransferase
MAPPVDVAGLRPRLGDVEAPPKPRLSLSSVAEAESEPLGRARRGSSAEARAESEPWGRAKRIGVAQAALSFCQAGQWSGEVTAVTSALPGGACQDKGVRASGEPEICSPSEGGLGRDGNPPGSVALLYADGGYQLRIRSLEGLNASRNASAGLVVPSCELAVARGERVIRDRLGFFTYAPASPFRKEEGGKAPCCPRWAPNMVSPVSCKRVIRVDVRAPFVRSRLGAQRHAQKYLRVICRTRSPGDGVRGLDASLRWDSVTRSFPLVSEMS

SEQ ID NO: 77031 - protein, 402 aa, Zea mays
  Coding DNA Sequence Number=SeqID_35252
  Homolog annotation: Hit_ID=Q10EF8; Match level="QueryCoverage=14%, HitCoverage=8%, E-value=2e-13, Identity=51%"; Hit description=HEAT repeat family protein, expressed
PPRFAVVVGRTPTRSAHSSRLEARLLSMVGQFDPRLQRTPLHHGTFPAVEASTQRPGGCHPEPAGGRAPGTPLAYDVSGSAVLEMMRKLPRAEEEDAGETRSYVFANECLDRLSIAVGEGSAKVMIKKTEQVVGMVLNSFQDPHPRVRKVMSRIHVYTVQAISRLTKPERHQPSSGCGMIQSLVVKSTDDSTRSLAFRWLQLASSLGLNSGDFVGLLLAQTSPLYMKMLNALQLNVVTTLLNLSILEANKKRIMHTESAADALCHVMGSSATWHAKENAVATALSLAAVHAEVEVATAVLAKCGNAEPIVRLGGDVAQLIPRSHCGIAGEVMAAHGREWAIWKLLGTNMDRAPQGRIAQQGMGPVGGSHSIGEVAGFEVAVAEELKGAHDSRGSAPSRVLAR

SEQ ID NO: 77032 - protein, 229 aa, Zea mays
  Coding DNA Sequence Number=SeqID_35253
  Homolog annotation: Hit_ID=Q84VE7; Match level="QueryCoverage=33%, HitCoverage=11%, E-value=4e-09, Identity=48%"; Hit description=Arm repeat protein
  Subcellular localization annotation: CTP_CleavageSite=69; ConfidenceScore=5.17e-01
MENTKLSSALFAGTHFDRKRFAADFARFRKGPALPSAATPSAPSPEKKRKRKSGKAKAKKNKKRAQDAAAAASSGMVRYRLVGLLLDFVEGFSVFKGLADNNAELRSEKVDMRKDDDSVAVRRRKEIEREFELLCHCHLKPGDFSDAVAATHRPHALLSDAALRRAVHVGAQQLPDGPFPAMGCHHLTCDAAVAPARRHRSTSAAAEPSRDHYVPCHTSVLAVPRRRPA

SEQ ID NO: 77033 - protein, 68 aa, Zea mays
  Coding DNA Sequence Number=SeqID_35254
MARARDYKAPRDFDRTPPHALDLTGAQNHRRLPVHGVPATARSPATVDRPTEPFPTLSNPRRRLCTPR

SEQ ID NO: 77034 - protein, 117 aa, Zea mays
  Coding DNA Sequence Number=SeqID_35255
MARARAYKAPRDFDRTPPHTLDLTGAQSHRRLPVHGVPAAARSPATVDRPTEPFPATPDPWKRLCRVCHLFHIVHKVKENRKGSLEDMVAGVTWPSILPPGWTVEWDPASAEEEHEE

SEQ ID NO: 77035 - protein, 113 aa, Zea mays
  Coding DNA Sequence Number=SeqID_35256
MPRDVPRLPRDVLVSRGVVAVPGKPIPPPTSGPTRREVDGDTRAAAGAEGDVHGTSPRRGTPRSRKPKHQATVDRDQRINEQHQGTASTAPHHHHREQQTADDTDETRTPGIE

SEQ ID NO: 77036 - protein, 141 aa, Zea mays
  Coding DNA Sequence Number=SeqID_35257
MPRDVPRLPRDVLFTVNPPRHADQPRCHHQPPHVDYLRGKTSSANTRFCPRKPIPPPTSGPTRREVDGDTRAAAGAEGDVHGTSPRRGTPRSRKPKHQATVDRDQRINEQHQGTASTAPHHHHREQQTADDTDETRTPGIE

SEQ ID NO: 77037 - protein, 297 aa, Zea mays
  Coding DNA Sequence Number=SeqID_35258
  Gene Ontology: Mol. function=ATP binding; Biological process=defense response
  Homolog annotation: Hit_ID=Q8GUB6; Match level="QueryCoverage=48%, HitCoverage=51%, E-value=1e-13, Identity=39%"; Hit description =Disease resistance protein NBS-LRR type
MASYSHQRGRLVPGLKPLFGCLESTGMFEAAGREVAAFLRVKSNWSKARNGPGQPAGRRDDGQDAGHGGGGQAERLWSSGAGVAQARPRALPGHHRRGLRRRASICKPVVDELEEVNRLTEEGRRFRTFGFKPPPRAVSRLPQTETVGLEPMLTRLHDLLEKGESSIIDVWGQEGIGKTTLLHTPSTMISKRNITIISSANTRFCPRKPIPPPTSGPARREVDGDTRAAAGAEGDVHGTSPRRGTPRSRKPKHQATVDRDQRINEQHQGTASTTPHHHHREQQTADDKDETRTPGIE

SEQ ID NO: 77038 - protein, 123 aa, Zea mays
  Coding DNA Sequence Number=SeqID_35259
  Homolog annotation: Hit_ID=Q84LJ8; Match level="QueryCoverage=51%, HitCoverage=32%, E-value=4e-10, Identity=53%"; Hit description =Putative RNA-binding protein
  Pfam annotation: Domain name=YTH; Domain location=1-74; Score=41.3; E_ value=3.2e-09; Accession=PF04146.6; Description=YT521-B-like family
MAWWICCWFACSIRNTLTKLLPNLTWHIVNGVSDNILNHIILENNENKPVTNSRDTQEICLEQGLHILKIFEDYHVSKTSILNDLASAMGNTPNPYEQAMSTCVNDQAMMLSHMVWHESTISL

SEQ ID NO: 77039 - protein, 256 aa, Zea mays
  Coding DNA Sequence Number=SeqID_35260
  Homolog annotation: Hit_ID=Q53MQ7; Match level="QueryCoverage=49%, HitCoverage=13%, E-value=1e-26, Identity=76%"; Hit description =Expressed protein
  Pfam annotation: Domain name=YTH; Domain location=127-207; Score =48.8; E_value=1.8e-11; Accession=PF04146.6; Description=YT521-B-like family
MEDGIGPVNRFPCNANFVRFFMFPIPVGMVPLRRFYVASVYAPISFPSLPLIVLKNRDGEQSAIAAVGSLKSMDPNRIILKKIVLTMYPQSLESEIDRVVYVPRSQRRKMVQGKYLCVPLTYPIYPFSTQRQCYFCSLLSGGQNMVVVAASWRPLVLMWHIVNGVSDNILNHIILENNENKPVTNSRDTQEICLEQGLHILKIFEDYHVSKTSILNDLASAMGNTPNPYEQAMSTCVNDQAMMLSHMVWHESTISL

SEQ ID NO: 77040 - protein, 107 aa, Zea mays
  Coding DNA Sequence Number=SeqID_35261
  Gene Ontology: Mol. function=microtubule binding; Cellular component =membrane; Biological process=protein transport
  Homolog annotation: Hit_ID=Q9XEB5; Match level="QueryCoverage=58%, HitCoverage=51%, E-value=2e-26, Identity=90%"; Hit description =Putative symbiosis-related protein
  Pfam annotation: Domain name=MAP1_LC3; Domain location=1-67; Score =96.0; E_value=1.1e-25; Accession=PF02991.6; Description=Microtubule associated protein 1A1B, light chain 3
YLVPANLTVGQFVYVVRKRIKLSAEKAIFIFVKNTLPPTAALMSSIYEENKDEDGFLYMTYSGIADGIGNEGRVPRSLPTHLKPTSHRSGLDSRVPMASADGKFEPQ

SEQ ID NO: 77041 - protein, 478 aa, Zea mays
  Coding DNA Sequence Number=SeqID_35262
  Homolog annotation: Hit_ID=Q6Z3U3; Match level="QueryCoverage=25%, HitCoverage=10%, E-value=4e-30, Identity=68%"; Hit description =VP1/ABI3 family regulatory protein-like
MERLLILWQEESILQILVMPQYSYETLLFQRLHCGCVASKNSYDLLDSGGIQCVTCMKNSAAQSASGQVVPKLFPCPNNLLFFGKSDELLSSRKFEQPPSLMLDSRNDDIAIVNKSNHLFMGVFHKYEDSLLSTELDSLPNNTHELSNCKICRDEMNAAGFNAMHYVHFPGSKAGDAPLGAFWATQHAQDAQAVVNRNPLFDGESIKASLSSKQNQSWVDTSISIPGNRHDHSGQVSLTKVSLTRRYKILGKAEHNNLNPSQNASELELEVSNLKEQLKKTTLEKAEMTCPTDIENHIRHDCIILTVYVHLVESACQQLSKNMSLKLDKLLSSSTNNFWASGLVFVMVLRHLAFMINATINFRVEGFNLLSTSSRVICSFEGRCILQEDMDSVAENAEYKDRDIESLSLCCYVPGPRGVDDEMEEVDEHEGQHGIISRKHLKEMSIMLHVKEAESPIMLSVKFKERALYLHRLMEYTN

SEQ ID NO: 77042 - protein, 222 aa, Zea mays
  Coding DNA Sequence Number=SeqID_35263
  Homolog annotation: Hit_ID=Q1SWR7; Match level="QueryCoverage=56%, HitCoverage=20%, E-value=3e-41, Identity=67%"; Hit description =Mitochodrial transcription termination factor-related
  Pfam annotation: Domain name=mTERF; Domain location=1-167; Score= -80.1; E_value=0.0068; Accession=PF02536.5; Description=mTERF
MRLGVPFIAPRQLGAVESNPGKQFLPSVAWRTGHCPVIFLLTKGGVKQDDIGKVIALDPQLLGCSIAHKLEVSVKYFRSLGIYHFVLGQMIADFPTLLRYNVDILRPKYQYLRRVMVRPLKDLIEFPRFFSYSLEDRIEPRHRTLVANRINMKLRYMLTGSDEEFAQRVREAVERRARFEAGKAAGLETFSCSSETSSDAEATEAAACQNSTDVVGVLQKQA

SEQ ID NO: 77043 - protein, 215 aa, Zea mays
  Coding DNA Sequence Number=SeqID_35264
  Homolog annotation: Hit_ID=Q1SWR7; Match level="QueryCoverage=70%, HitCoverage=23%, E-value=9e-42, Identity=60%"; Hit description =Mitochodrial transcription termination factor-related
  Pfam annotation: Domain name=mTERF; Domain location=1-160; Score= -80.3; E_value=0.007; Accession=PF02536.5; Description=mTERF
MHSVYFQILKNYYLLCKLLPSVSHVCKSQVIFLLTKGGVKQDDIGKVIALDPQLLGCSIAHKLEVSVKYFRSLGIYHFVLGQMIADFPTLLRYNVDILRPKYQYLRRVMVRPLKDLIEFPRFFSYSLEDRIEPRHRTLVANRINMKLRYMLTGSDEEFAQRVREAVERRARFEAGKAAGLETFSCSSETSSDAEATEAAACQNSTDVVGVLQKQA

SEQ ID NO: 77044 - protein, 82 aa, Zea mays
  Coding DNA Sequence Number=SeqID_35265
MGSYSWLRYFTQGATTIVFRNLSGLLRIKRVMLETLMEILSTTMISKSNDASVIFLWEIAPVIYIPLYFDVILVKDTMIQMM

SEQ ID NO: 77045 - protein, 62 aa, Zea mays
  Coding DNA Sequence Number=SeqID_35266
MGTYSCLRYLTQGATTIVFRNLSGLLRIKRVMLETLMEILTTRNSKSNDAPVIFLWEIAPVI

SEQ ID NO: 77046 - protein, 55 aa, Zea mays
  Coding DNA Sequence Number=SeqID_35267
MGKTGSGGVGSPRYHGDVFLAKRVMLETLMEILTTTNSKSNGASVIFLWEIAPVI

SEQ ID NO: 77047 - protein, 107 aa, Zea mays
  Coding DNA Sequence Number=SeqID_35268
  Subcellular localization annotation: CTP_CleavageSite=20; ConfidenceScore=5.09e-01
MTTVPIDSPFASRPHRLGIQCSTDPGCRRAVTALVPTIASMGDPVSGRMRDKVRAWLHSEFTTLEVYDLLELNKVNFTYVRPLGGILGKLGQTLSKWGSGGCSLLLK

SEQ ID NO: 77048 - protein, 197 aa, Zea mays
  Coding DNA Sequence Number=SeqID_35269
MYDLLELNKVNFTYVRPLGGILGKLGQTLSKWLGTGVCFSVSKIGDQKWGSCGFFFADQSLGHYSHGSLTLQKTPRVLQILTRGPSPNVNSNRGRRKGEGAYRRRDGSGEVVEDVEEVSGITTVCGSPSGMAGVGRSTCAGGDARRRRGVRPAHGEMVQLDGSERFTGCQRRYGCKELGGDSPVSSVHARRRKTEVR

SEQ ID NO: 77049 - protein, 137 aa, Zea mays
  Coding DNA Sequence Number=SeqID_35270
MGKSKKGSGSSPRSGDKRKREPTPPSEDFGDSEYSEEEFSSESEGSPAPVSPPASSDDLDDSQGIAAEVWTYIRAVERSGLEGSDESEYSSDSSEEDSGGDGGDGGDDGGDGDGGGGDNSKDNDGGSKGDPWRRQQG

SEQ ID NO: 77050 - protein, 147 aa, Zea mays
  Coding DNA Sequence Number=SeqID_35271
MGKSKKGSGSSPRSGDKRKREPTPPSEDFGDSEYSEEEFSSESEGSPAPVSPPASSDDLDDSQGIAAEVWTYIRAVERSGLEGSDESEYSSDSSEEDSGGDGGDGGDDGGDGDGGGGDNSKDNDGGSKGDHGDGSKGSSKDSNKSSG

SEQ ID NO: 77051 - protein, 79 aa, Zea mays
  Coding DNA Sequence Number=SeqID_35272
  Subcellular localization annotation: CTP_CleavageSite=33; ConfidenceScore=5.18e-01
MASAGFGATRGTRGSGAGVLWRAQNASNTWRCSSAHVQKLAKIANVRILAKIRRRPLPDTYGYLLYINKLLNFVSKVWS

SEQ ID NO: 77052 - protein, 79 aa, Zea mays
  Coding DNA Sequence Number=SeqID_35273
MASAGLWRDAGHARSGAGVLWRAQNASNTWRCSSAHVQKLAKIANVRILAKIRRRPLPDTYGYLLYINKLLNFVSKVWS

SEQ ID NO: 77053 - protein, 738 aa, Zea mays
  Coding DNA Sequence Number=SeqID_35274
MPSSSSSADTTPPAAASSEESLSSLMVEELRAGDSVDFGVSRMTSARVEDMQRLGYFGGGVARAPGTEEVPEPEVAEEDADEGALRCVAGQSSGRDLVEEFVAYGVWPLAHGWALGEVCPRQMPFHGGRVVRSPTFALNLRNRDPAAFVRDAEDLAVRLVGRYVPRTEGQRSFDIRGSNDRLNRVFELNQLPYDGYPGQDEADRRVMDKDRQGAARKRQATVRLHEARPKRQRGAAKAAASGGGKPPLAAKAGASAPSKAPEATAGAGGSKSTKVVPPASGVAEASKAARALPLSGKRVADFGTDITVDDYLGGSDEGQLAMVAPGAETATAAIVPRARGEALGTGGEVSALAVVRDEASAATRRLKGVTEALSQATEALSQVADFASRTASGALTAAVSAEVERLRTQHADAVREKSASDSKCRKLSDRVAALEKEKADLRRQLAAERREANEAIAKEQAAQAEAKLARAEGNLAKELAEHLQERLAALESRAKGAETAMRAEAERTRAQLKDTYRELGARTGDFEVPDREPGLRCLQWVREELQELPAVVGGFMSYASLVTCEGAMNALSREGCRHFEVFDQADKDFERDVYTVEDPVVKESAGALYDRMWGPHGREVVREWAEIARAQAERGERVDDFGALNSALPDPEPTPAEAATGAALEPTPETAAIATAAPTSAAAGEDLPPKVAEGAPDAPAAAAPSIEDPAVEAMETTAEVAAEPTAEAPAASGPSQVA

SEQ ID NO: 77054 - protein, 97 aa, Zea mays
  Coding DNA Sequence Number=SeqID_35275
MDGQVTPATMSSREPVKNYATSKAEYTNTQLDLPGYNGSSSLISCEKQTIRIEFLSLQVTALLPTITGMRDHVSGRMRRAICGQDLADIILKEEKLS

SEQ ID NO: 77055 - protein, 144 aa, Zea mays
  Coding DNA Sequence Number=SeqID_35276
MGKPVPSLLMLLLSRGGIPLDCPTRWQDGRPSHSSNHVLQRTCKNYAASKAEYTNTQLDLPGYNGSSSLISCEKQTIRIEFYPCKIRAHRLGVQCLTDPDCRRAVTALVPTITGMGDHVSSRVRGKVCGQVHSGIRLTDLPCFS

SEQ ID NO: 77056 - protein, 167 aa, Zea mays
  Coding DNA Sequence Number=SeqID_35277
MEDSLAIRTSYCSEVEGFPHLLRSCALRMGIHKKPEYVWKEYLESGMDKCSMAILARMLPEQPSDNYARTTTSNKNTPTWRKRLQALSVGDPIEDDPTIVYMAGYLHTLDNQYDDLTLHCTHLTSRVESLEQKVRELLREKASLQESLAIAEGEETNTREAYRTLKI

SEQ ID NO: 77057 - protein, 246 aa, Zea mays
  Coding DNA Sequence Number=SeqID_35278
MEDSLAIRTSYCSEVEGFPHLLRSCALRMGIHKKPEYVWKEYLESGMDKCSMAILARMLPEQPSDNYARTTTSNKNTPTWRKRLQALSVGDPIEDDPTIVYMAGYLHTLDNQYDDLTLHCTHLTSRVESLEQKVRELSREKASLQESLAIAEGEETNTREAYRTLKMDYDKKLKKLAPARKIRKKTKSQGCQIEQKEEAPPTLRPAGLRNSSDTEEMSLASLDDLLKEFGDTLENELGSTLDSTRV

SEQ ID NO: 77058 - protein, 137 aa, Zea mays
  Coding DNA Sequence Number=SeqID_35279
  Subcellular localization annotation: CTP_CleavageSite=62; ConfidenceScore=5.03e-01
MTSAACARNQSSSSHLRRRPAHRRDRRDLPDVTDHPTGALLPPIATSLTESTFSCRSKELLRSRLPSSRDLRRGLPSGYGGYKCGHCTTAAGVSEALYAKAIGSLEDMVAGVTSPSILPPGWTVEWDPTSAEEEHEE

SEQ ID NO: 77059 - protein, 145 aa, Zea mays
  Coding DNA Sequence Number=SeqID_35280
MTSAACARNQSSSSHLRRRPAHRRDRRDLPDVTDHPTGALLPPIATSLTESTFSCRSKELLRSPWGYVVSETEIGIRIKVCVTEPPKSLGPPTVVLVQQTSAYHVGAPGSLDKFGICFSYLPKSVLPVLQTLQIIGDTEKRKHLQ

SEQ ID NO: 77060 - protein, 155 aa, Zea mays
  Coding DNA Sequence Number=SeqID_35281
MPELINRGLGPGWRPWKMVGRGPGGNRPSRLLGPDSRRSPWQRLPGRGDDVVLRSGDPRTVSPSEARSGLAEGVVDAEGATAPFQRQDPSLQGQISGLFVGNMDVCASESCFSRKVMSEKVMSEVSVSRRRRSPSARSALAAYVYSVVSRTRFSK

SEQ ID NO: 77061 - protein, 108 aa, Zea mays
  Coding DNA Sequence Number=SeqID_35282
MGCAGGASNGCSSRPSNGFFKDNPFEGQHYVIKISLQRSAYILSLAAEFAICPYLARYLLRALHGCDRFEKYTDTSWASPPMGVGKGRLDGWECLLNALRLFSDRGWK

SEQ ID NO: 77062 - protein, 176 aa, Zea mays
  Coding DNA Sequence Number=SeqID_35283
MADCYCVGDVLLLHGWECLLNALRLFSDRDWKAPKRKREPTPPSDDFGDSEYSEEEFSSESEGSPAPVSPPASSDDSDDSQGIAAEVWTYIRAVERSGLEGSDESEFSSEEEDSDGDEGEDDDDDDDGDGSGGGSGGGEVSKSGTKGGSSVGSTGGGGSKGGTKGGGGGSSSKASG

SEQ ID NO: 77063 - protein, 93 aa, Zea mays
  Coding DNA Sequence Number=SeqID_35284
MSTARGLDPFLKAALPTRIPSVTGKVSTDELQGSIPTLRRGGWVPHVMRADRKQKKPNRCTRSRDRERGYFEKEPSQRRKRAPSPPTDQGFES

SEQ ID NO: 77064 - protein, 441 aa, Zea mays
  Coding DNA Sequence Number=SeqID_35285
MAEVKRRPLRLPKGCLESRHWFRSQEDTTLAQVATLPVTLGMRVGRAAFKKGSILRAVDMPLHSPHALRPSTFRAPEWGAPVSPSSCCCWRSATPRGLALFRHRSASRIFITQPGCSPSPMVIRRDDHQPCGGEKQVGLRPLPRPQLQGCSSSRLGRGAHRDGACLRAGSGPLLPSVIGGEGCSPPMALAALRRRRPPATRGKANCCCQDRVQLSVFRPGDGRRLHRGVAQHVVRREGGTRVLGRSRSRSCGEGGSEDLPVRFRAAAARWCGVGGQVAVIVGAKVVVAIGEVASAEAVASADETVSATCAPDLWLFGFNGWFSSPVRGRERGPFSSSVCPGTIAAAVLPPETEVVAALLVQRSPASHLEFVVPQALWCGGCSYPREWNRSPNLRLLCDELKPEAAVSAWTEAESARKEASSAREHVASLAEEVQQRRLELG

SEQ ID NO: 77065 - protein, 107 aa, Zea mays
  Coding DNA Sequence Number=SeqID_35286
  Gene Ontology: Mol. function=protein phosphatase type 2C activity; Cellular component=nucleus
  Homolog annotation: Hit_ID=Q2HW33; Match level="QueryCoverage=53%, HitCoverage=16%, E-value=8e-13, Identity=60%"; Hit description =Protein phosphatase 2C-like
MVVANIDDSRVVLDTASDDDAITSSSSSSTRSPTYHGHYLADEPGVHFVWQPNQESSVLVMSRAFDDYYIEDCGVILASEVTQRRIDNRDQFIILATVRVAFVPTCL

SEQ ID NO: 77066 - protein, 124 aa, Zea mays
  Coding DNA Sequence Number=SeqID_35287
  Gene Ontology: Mol. function=protein phosphatase type 2C activity
MASSSDAMPRTTRESPTLATAMRSPCLMIDSAMQPLWTVSKGAAVPELVVHSGACGHVGLLSEVELVVVMLLLIVDERHQRERLLLVVFVRGFQVDVGCTGKWEFEWALSGRGIEKTKMRIAEQ

SEQ ID NO: 77067 - protein, 226 aa, Zea mays
  Coding DNA Sequence Number=SeqID_35288
  Homolog annotation: Hit_ID=Q7F0I3; Match level="QueryCoverage=19%, HitCoverage=10%, E-value=8e-07, Identity=56%"; Hit description =Putative serine/threonine protein kinase
MDACARVCAPELNLDTSAFSLLDRALVIEHKPYDRRADVFSFAIVLWELLTHKEPIEERTSTICIIKYHLRHHYWALLYDHVIRSPYNIKNIEKKKYSLYSVLMGLILSLNIFQNHFGANIVVTRGPLSCHDGSYPPYYAANITSTYFFTKHKGIASQIEIENPSLVKTKNVKVKDIDKGWPFFRLLIALLKFMEPYPRGALRIGHRIRIGQLQLQEDILQYSSEF

SEQ ID NO: 77068 - protein, 193 aa, Zea mays
  Coding DNA Sequence Number=SeqID_35289
MLLSSSGGAGAGAASCTSDGGRELVAALLESPGIRHAVDRLKVAPERRISTGSVMICAVKEPIEERTATICIIKYHLRRHYWALLYDHVIRSPYNTKNIEKKGPLSCRDGSYPPYYAANITSRYFFYCKNPQCRLQAKHKGIASQIEIENPSLVKTKNVKVKDIDVHGTISQRRTSVGGAQLGEVSQNGGSGP

SEQ ID NO: 77069 - protein, 274 aa, Zea mays
  Coding DNA Sequence Number=SeqID_35290
MVDAKERKRKRDRERYAAMSIEQKNEKNRKRREARQRNKEHNVMPNVSGGDQNEQLRLYNQTPRRKEGKLEYIRKRRALQASTLNQGSIAMEVPTYTSEVVHPTAYVSEPDSSSDNSCDWVIPEYTSTPFMPASTQTEDVGSPDMSTEPLRRKHHVLRGERQAILARQNKKFEANIARNVATLTEDTISDVGQMDDSTQPGSTIEINNTVDDDDEGVIFGEDNDENEGYIFADEDTNEDFEIDGTQDQSVVTDVPDPYDKVYSNIPEETHMLKH

SEQ ID NO: 77070 - protein, 162 aa, Zea mays
  Coding DNA Sequence Number=SeqID_35291
MEPAVLNRERVALDKKNRMPMLFDDYSDEDFYGVQRKYSIVARVEVKFPIEPRYRDRQHYILSDINSVSNQLTIQQYTSNRSITTPIILNIRWDIMPVANHSQTSLAISLEVIKMNCSDRWSMLRSVRGKGIGKDMQRCPLNKKTRRIGSVVKHVNETRDTM

SEQ ID NO: 77071 - protein, 464 aa, Zea mays
  Coding DNA Sequence Number=SeqID_35292
  Homolog annotation: Hit_ID=Q9M651; Match level="QueryCoverage=35%, HitCoverage=30%, E-value=6e-50, Identity=64%"; Hit description=RAN GTPase activating protein 2
MAAATEKTAEDIRRELQELQRQHREVHLLLCPAHLEASSLRAVCPDPLVVPSQITERLRDPCGLRRGTPGPGPGPGPPRPLRGFVRPVDGSENNEDDTKDADGEGQEAGSGATEGSDRRTFNIGGFRRDGSLWMQRRVDYNSLPEPAPRELPMNEDPSLAEQKVREESERLRQQEREQIAEKRKCDMMLHARVAAKAEEKSMELLYIHWTEHHKKAVQFLKTFIASSCLSEYAVYISYMNAGCMVISGDSYTVYAHSKIICHQFAMFCPTEVDYTISKKNMTFQIYCCPRTTAELEAHVADTSLVSADAPRVLADTVLDISGGERAFIEADEAKELLSPLTKPGNSYKRICFSNRSFGIGAANVAGPILDSVKNQLTEVDISDFVAGRPEDEALDVMRIFSKALEGSVLRYLNISDNALGEKGVRAFSELLKSQESLEELYVMNDGISEEAAKALSELIPATEA

SEQ ID NO: 77072 - protein, 504 aa, Zea mays
  Coding DNA Sequence Number=SeqID_35293
  Gene Ontology: Mol. function=beta-galactosidase activity; Cellular component=beta-galactosidase complex; Biological process =carbohydrate metabolic process
  Homolog annotation: Hit_ID=Q8RUV9; Match level="QueryCoverage=51%, HitCoverage=31%, E-value=1e-119, Identity=76%"; Hit description =Putative beta-galactosidase
  Pfam annotation: Domain name=Glyco_hydro_35; Domain location=60-272; Score=-143.7; E_value=6e-06; Accession=PF01301.10; Description =Glycosyl hydrolases family 35
MMLEVLRKGPRTTAELEAPVADTSLVSADAPRVLADTVLDISGGERAFIEADEAKELLSPLTKPGNSYKRICFSNRSFGIGAANVAGPILDSVKNQLTEVDISDFVAGRSEDEALDVMRIFSKALEGSVLRYLNISDNALGEKGVRAFSELLKSQESLEELYVMNDGISEEAAKALSELIPATEKLKVLHFHNNMTGDEVELNKQFSCTLPLTNKTNKQVTFKFKYHGGTNFGRISGGPYITTSYDYDAPSDEYGNIRQPKYGHLKDLHDLIRSMEKILVHGKYNDTSYGKNAIVTKYTYGGSSVCFINNQFVDRDVKVTLGGGTHLVPAWSVSILPDCKTVAYNTAKIKTQTSVMVKKANSVEKELEALRWSWMPENLKPFMTDHRDSFRQSQLLEQIATSTDQSDYLWYRTSLEHKGEGSYTLYVNTSGHEMYVFVNGRLVGQNYSADGAFVFQLQSPVKLHSGKNYVSLLSGTVGLKSAKTLVIVAEYPDKFRVVAFSARF

SEQ ID NO: 77073 - protein, 146 aa, Zea mays
  Coding DNA Sequence Number=SeqID_35294
MGGKSKKGSGSSPRSGDKRKREPTPPSEDFGDSEYSEEEFSSESEGSPAPVSPPVSSDDSDDSQGIVAEVWTYIRAIERSGLEGSDESEYSSNEEDSSDSSEEGSSGDGGDDDDDRGDGGGGGDSGRGGDGGSNGSGSKGSNKANG

SEQ ID NO: 77074 - protein, 263 aa, Zea mays
  Coding DNA Sequence Number=SeqID_35295
  Subcellular localization annotation: CTP_CleavageSite=57; ConfidenceScore=5.19e-01
MDPKGKGMVVNVGVLGPTAHPGLPLKVLFRSRTVLPTVAQWFVPDARGTVDNGLQAHASEVSISYCRTSNFIGCTPMGAAPELRVDFLQTIHSKCLCFSGFFTSLAVVYSPLLPSTATKGKSKKGSGSSPRSGDKRKREPTPPSEDFGDSEYSEEEFSSESEGSPAPVSPPVSSDDSDDSQGIVAEVWTYIRAIERSGLEGSDESEYSSNEEDSSDSSEEGSSGDGGDDDDDRGDGGGGGDSGRGGDGGSNGSGSKGSNKANG

SEQ ID NO: 77075 - protein, 466 aa, Zea mays
  Coding DNA Sequence Number=SeqID_35296
  Homolog annotation: Hit_ID=Q8VX49; Match level="QueryCoverage=18%, HitCoverage=12%, E-value=1e-25, Identity=68%"; Hit description =Cytochrome P450 reductase
  Pfam annotation: Domain name=Flavodoxin_1; Domain location=194-318; Score=33.2; E_value=9e-07; Accession=PF00258.15; Description =Flavodoxin
MSREIRGSPEILFAREVARACRMGNFISFFRLARKATYLEACLMHAHFAKEWLEANKDYRAIVDGANIALYQPNFAEGGFSLTQAQAIMLIAAAAAAAAATKGSAATAFNPPMSTSVAAGQAQVVADPSSISKLQADLPIARRHSLQRFLEKRRDRVVSKAPYSPAKSFDGMESAGMEMTVDGKQGARPSILKDWGAAKSEALAEEAKVRYDKAVFKVVDLEDYAAEDEEYEDKLKESITLFFLATYGDGEPTDNAARFYKWFSEGNERGEWLNNLRLGVFDLGNRQYEHFNKVSCIGANASAAAARELSLTLCSNSIASSNSTLNATELRLEEAKTLAEKLCDGPLSSAANLWILRASMEINSLATASGSSPLNKENLSSLFDLFGTCRHRLLALPRPSLKLMQYCIELEASLASLGDHGALTNARWLYDSVVDMYPREREVWSSYYSLELKVRPHITAGKEFNI

SEQ ID NO: 77076 - protein, 91 aa, Zea mays
  Coding DNA Sequence Number=SeqID_35297
  Homolog annotation: Hit_ID=Q5JLG3; Match level="QueryCoverage=38%, HitCoverage=6%, E-value=3e-08, Identity=80%"; Hit description =Pentatricopeptide (PPR) repeat-containing protein-like
MSREIRGSPEILFAREVARACRMGNFISFFRLARKATYLEACLMHAHFAKEWLEANKDYRAIVDGANIALYQPNFAEGGFSLTQALNNRDI

SEQ ID NO: 77077 - protein, 126 aa, Zea mays
  Coding DNA Sequence Number=SeqID_35298
MVHGLVDYSDTINDENVEASKRMRSPASEFTRMVKSPPSDTRGNIRSSSVDFGSNYSVQNLHAYADVQKRTGISSLDATDDDHLTPSTELEREEQAKAKRLARFHVELSRPVQNTNDFVKTVKSFA

SEQ ID NO: 77078 - protein, 295 aa, Zea mays
  Coding DNA Sequence Number=SeqID_35299
  Homolog annotation: Hit_ID=Q01G91; Match level="QueryCoverage=43%, HitCoverage=8%, E-value=3e-15, Identity=38%"; Hit description=[UD] KOG1860 Nuclear protein export factor
  Subcellular localization annotation: CTP_CleavageSite=49; ConfidenceScore=5.15e-01
SDASFSKFRNQIQSRIGGACSPSQQMSHLSDSNELNTLAISPPKPSILSATRRTGISSLDATDDDHLTPSTELEREEQAKAKRLARFHVELSRPVQNTNDFVKTVKSSADKSKQATSVGRTPLRTNDDTDDNTLVDMDSTALAAIVGLCPDMCPEPERAERERKGDLDRYERLDGDRNLTTELLAVKKIRLHIIAMHELCEYNKGEGFPEGFDAHLNIEQMNKTSVELFQMYDDHRREGVLFSTEKEFRGYYALLKLDKHPGYKVEPAELSLDLAKMSREIRGSPEILFAREVAR

SEQ ID NO: 77079 - protein, 340 aa, Zea mays
  Coding DNA Sequence Number=SeqID_35300
  Homolog annotation: Hit_ID=Q01G91; Match level="QueryCoverage=46%, HitCoverage=10%, E-value=7e-24, Identity=40%"; Hit description=[UD] KOG1860 Nuclear protein export factor
  Subcellular localization annotation: CTP_CleavageSite=63; ConfidenceScore=5.28e-01
MTVITWGITQTLDGSDASFSKFRNQIQSRIGGACSPSQQMSHLSDSNELNTLAISPPKPSILSATRRTGISSLDATDDDHLTPSTELEREEQAKAKRLARFHVELSRPVQNTNDFVKTVKSSADKSKQATSVGRTPLRTNDDTDDNTLVDMDSTALAAIVGLCPDMCPEPERAERERKGDLDRYERLDGDRNLTTELLAVKKIRLHIIAMHELCEYNKGEGFSEGFDAHLNIEQMNKTSVELFQMYDDHRREGVLFSTEKEFRGYYALLKLDKHPGYKVEPAELSLDLAKMSREIRGSPEILFAREVARACRMGNFISFFRLARKATYLQACLMHAHFAK

SEQ ID NO: 77080 - protein, 363 aa, Zea mays
  Coding DNA Sequence Number=SeqID_35301
  Homolog annotation: Hit_ID=Q01G91; Match level="QueryCoverage=43%, HitCoverage=10%, E-value=7e-24, Identity=40%"; Hit description=[UD] KOG1860 Nuclear protein export factor
  Subcellular localization annotation: CTP_CleavageSite=86; ConfidenceScore=5.11e-01
MVKSPPSDTRGNIRSSSVDFGSNYSVQNLHAYADVQKSDASFSKFRNQIQSRIGGACSPSQQMSHLSDSNELNTLAISPPKPSILSATRRTGISSLDATDDDHLTPSTELEREEQAKAKRLARFHVELSRPVQNTNDFVKTVKSSADKSKQATSVGRTPLRTNDDTDDNTLVDMDSTALAAIVGLCPDMCPEPERAERERKGDLDRYERLDGDRNLTTELLAVKKIRLHIIAMHELCEYNKGEGFSEGFDAHLNIEQMNKTSVELFQMYDDHRREGVLFSTEKEFRGYYALLKLDKHPGYKVEPAELSLDLAKMSREIRGSPEILFAREVARACRMGNFISFFRLARKATYLQACLMHAHFAK

SEQ ID NO: 77081 - protein, 307 aa, Zea mays
  Coding DNA Sequence Number=SeqID_35302
  Gene Ontology: Mol. function=transcription factor activity; Cellular component=nucleus; Biological process=regulation of transcription, DNA-dependent
  Homolog annotation: Hit_ID=Q10R18; Match level="QueryCoverage=99%, HitCoverage=100%, E-value=1e-85, Identity=56%"; Hit description=AP2 domain containing protein
  Pfam annotation: Domain name=AP2; Domain location=25-89; Score=116.1; E_value=9.9e-32; Accession=PF00847.10; Description=AP2 domain
MESYGHKRAWKKEPTRGKGGPQNAACEYRGVRQRTWGKWVAEIREPNKRARLWLGSFATAEEAALAYDEAARRLYGTDVFLNLPHLRASGVSAAGAGNAHERLRWLPAASARGAAVPAYGLLNLNAQHNVHVIHQRLQELKNNGSPADHLPAAASTSPCSTVTTRAAAALPAPMSCFHALEQAVTTVATRTTVDDAEPCEGGACPSGADKPQIDLSEFLQQIGVLNNTDDDGIRTTAKASFRGDAAEAGCFGGNGEFDWDALAADLNDIAGAGVHGGVNGGFQMDDLHEHEVEQFGTCLPIPVWDVQ

SEQ ID NO: 77082 - protein, 325 aa, Zea mays
  Coding DNA Sequence Number=SeqID_35303
  Gene Ontology: Mol. function=transcription factor activity; Cellular component=nucleus; Biological process=regulation of transcription, DNA-dependent
  Homolog annotation: Hit_ID=Q10R18; Match level="QueryCoverage=93%, HitCoverage=99%, E-value=3e-85, Identity=56%"; Hit description=AP2 domain containing protein
  Pfam annotation: Domain name=AP2; Domain location=25-89; Score=116.1; E_value=9.9e-32; Accession=PF00847.10; Description=AP2 domain
MESYGHKRAWKKEPTRGKGGPQNAACEYRGVRQRTWGKWVAEIREPNKRARLWLGSFATAEEAALAYDEAARRLYGTDVFLNLPHLRASGVSAAGAGNAHERLRWLPAASARGAAVPAYGLLNLNAQHNVHVIHQRLQELKNNGSPADHLPAAASTSPCSTVTTRAAAALPAPMSCFHALEQAVTTVATRTTVDDAEPCEGGACPSGADKPQIDLSEFLQQIGVLNNTDDDGIRTTAKASFRGDAAEAGCFGGNGEFDWDALAADLNDIAGAGVHGGVNGGFQMDDLHEHEVEQFGTCLPIPVWDKDKPSEVVRMWCLNALKINT

SEQ ID NO: 77083 - protein, 452 aa, Zea mays
  Coding DNA Sequence Number=SeqID_35304
  Homolog annotation: Hit_ID=Q10LK8; Match level="QueryCoverage=24%, HitCoverage=8%, E-value=7e-11, Identity=40%"; Hit description=AAA -type ATPase family protein, putative, expressed
MQCTGHSLMEDNYALNLVKEQWRVLSNNLLKADTANPSVAPAEVGTVAGPLPNTAGLEALTGAMDKLETVLRPKEGQSNPTGHKRGTTDKDITTKIKRAMDLSEDLSAKIKKTKDNVAGILNKPQAAATSRRQEPCRGSAHISKIFKVIYHLKGTKSQPLLWKMSVFIVASSARSTARQAHPAHAALHVIAVPADLLSPAVHSPNELLSMEHRGRGLRLSKIHGWRPPLLLSPALASLIEVRYLRLILFVVENSAIIRLCSIRCFVVSMGGFELGLWRLLRSEDVGAGTQIHGAPNARVVRWRCLHPQSDLDWRIHREPWMMYGNMTNQHEAFLRRKLEEEQATELQQAIELEGRRFMGLQLLDLKSRGHHHLGSGAPMPMRQATDGKGSDSNGNDNASHLEDAISIIQDKRMMSSLAMNAPAADAEGEHEEQQGEGGGGCDKKMQCLSDAS

SEQ ID NO: 77084 - protein, 409 aa, Zea mays
  Coding DNA Sequence Number=SeqID_35305
  Homolog annotation: Hit_ID=Q10LK8; Match level="QueryCoverage=22%, HitCoverage=7%, E-value=8e-11, Identity=44%"; Hit description=AAA -type ATPase family protein, putative, expressed
VGTVAGPLPNTAGLEALTGAMDKLETVLRPKEGQSNPTGHKRGTTDKDITTKIKRAMDLSEDLSAKIKKTKDNVAGILNKPQAAATSRRQEPCRGSAHISKIFKVIYHLKGTKSQPLLWKMSVFIVASSARSTARQAHPAHAALHVIAVPADLLSPAVHSPNELLSMEHRGRGLRLSKIHGWRPPLLLSPALASLIEVRYLRLILFVVENSAIIRLCSIRCFVVSMGGFELGLWRLLRSEDVGAGTQIHGAPNARVVRWRCLHPQSDLDWRIHREPWMMYGNMTNQHEAFLRRKLEEEQATELQQAIELEGRRFMGLQLLDLKSRGHHHLGSGAPMPMRQATDGKGSDSNGNDNASHLEDAISIIQDKRMMSSLAMNAPAADAEGEHEEQQGEGGGGCDKKMQCLSDAS

SEQ ID NO: 77085 - protein, 306 aa, Zea mays
  Coding DNA Sequence Number=SeqID_35306
MNYGVISAPEVTHRRTDSNDQFVILPTVGPHACRDLPQTPPAAPNPRKPLYARSSSSRAPPAPALHPRCALPPIRRRRRQPLRCHVDHGWARPDRQFTAAGFDDAVLLWERDDEPTGVVRARRMGPRGGQTRLPDPTPLPPTHIAPALPSLPPDAPTRNRAAPKTDFSWLQRWAPYDLDPSHPTAALAPIPSPTKSIDRIVHRLCILALDDDDPSSSSTRHKPNDLAPIIEPPRVIVHPVPPFLRPHASGFVAICSDCAPVRPFGGKDLFSLLMDCAFVWFASTVRLKARKQDLSRKIHGQMVVLQ

SEQ ID NO: 77086 - protein, 265 aa, Zea mays
  Coding DNA Sequence Number=SeqID_35307
MSRAFDDYYIMNYGVISAPEVTHRRTDSNDQFVILPTVGPHACRDLPQTPPAAPNPRKPLYARSSSSRAPPAPALHPRCALPPIRRRRRQPLRCHVDHGWARPDRQFTAAGFDDAVLLWERDDEPTGVVRARRMGPRGGQTRLPDPTPLPPTHIAPALPSLPPDAPTRNRAAPKTDFSWLQRWAPYDLDPSHPTAALAPIPSPTKSIDRIVHRLCILALDDDDPSSSSTRHKPNATVLQFDRLGEKICFPCSWTVPLCGLRLLCG

SEQ ID NO: 77087 - protein, 301 aa, Zea mays
  Coding DNA Sequence Number=SeqID_35308
  Homolog annotation: Hit_ID=Q5QFC3; Match level="QueryCoverage=35%, HitCoverage=17%, E-value=2e-34, Identity=69%"; Hit description =Glutamine-dependent asparagine synthetase
  Pfam annotation: Domain name=Asn_synthase; Domain location=205-298; Score=-27.0; E_value=8.6e-06; Accession=PF00733.11; Description =Asparagine synthase
MRNQERMRGALSLSDQLRSPRQTRVRGNGNKSHSQAEIDPYLGAITIDIEVTRLDANINDAKFSFLCVELALMWRIPSTAISARPRRSRSQRSPAIRSPCLGSAIREAGGDPFVAVGGHFQIPSSAAINALLIDPVIRCESPFSSPSRLRRRRFEFWFMGFVRYQVSLHELEKAIEQANSDVSNLPWYDDDKAVVTPSVPYDPLALRKAFEKAVVKRLMTDVPFGVLLSGGLDSSLLAAVAVRHLAGTEAARRWGTKLHSFCVGLEGSPDLKAAREVAEYLGTLHHEFHFTRSGRHRKLDN

SEQ ID NO: 77088 - protein, 305 aa, Zea mays
  Coding DNA Sequence Number=SeqID_35309
  Homolog annotation: Hit_ID=Q5QFC3; Match level="QueryCoverage=37%, HitCoverage=18%, E-value=2e-37, Identity=69%"; Hit description =Glutamine-dependent asparagine synthetase
  Pfam annotation: Domain name=Asn_synthase; Domain location=205-304; Score=-25.6; E_value=6.7e-06; Accession=PF00733.11; Description =Asparagine synthase
MRNQERMRGALSLSDQLRSPRQTRVRGNGNKSHSQAEIDPYLGAITIDIEVTRLDANINDAKFSFLCVELALMWRIPSTAISARPRRSRSQRSPAIRSPCLGSAIREAGGDPFVAVGGHFQIPSSAAINALLIDPVIRCESPFSSPSRLRRRRFEFWFMGFVRYQVSLHELEKAIEQANSDVSNLPWYDDDKAVVTPSVPYDPLALRKAFEKAVVKRLMTDVPFGVLLSGGLDSSLLAAVAVRHLAGTEAARRWGTKLHSFCVGLEGSPDLKAAREVAEYLGTLHHEFHFIVQDGIENWITKVAI

SEQ ID NO: 77089 - protein, 163 aa, Zea mays
  Coding DNA Sequence Number=SeqID_35310
MDQIVHRRRTIPRPLDPKDARPSPPGSDELIVEERQSPPTPRVADIVRDDRASRDHQSDPASLVATAVSTRPRPLEEKTGSLKPATTYGKGKGPAKIEDAKNAIEDDRPLGEGHFGQEFGGRRYKVHHSARKVMGPKQLNEVVGFAEQLGVSFGVYNLWGGGA

SEQ ID NO: 77090 - protein, 175 aa, Zea mays
  Coding DNA Sequence Number=SeqID_35311
MTHVGLEWSHGMAYDDSRHTDVAKREVSGLGLTDEIATTIMQLDSLKPVYDIYLHGIDSSSPEDDPKAARSKDVAQATGSDELIVESYSGTRGSIDPHLAPSCDTPWVVVALEEKTGSLKPATTYGKGKGPAKIEDAKNAIEDDRPLGEGHFGQELEVGDTRFTIQPGRLWVLNK

SEQ ID NO: 77091 - protein, 215 aa, Zea mays
  Coding DNA Sequence Number=SeqID_35312
MRGKANCCCLDRVQLSILHPGDGRWLHQGVAQHVVRREGGTRVLGRSRSRSCGESGSEHLPVRFGAAAARWCGVGGQVAAVVGAEVVVAIGEAASAEAVASADDTVSATYALGLRLFGFNGWFSSPVRGRERGPSSGSVCPRAIAAAVLPSETEVVAVLLVQRSPASHPEFVVPQALWCRGCSYPREWNRSSVCNGTLSMGVCSLWLSRPEHHGI

SEQ ID NO: 77092 - protein, 164 aa, Zea mays
  Coding DNA Sequence Number=SeqID_35313
MMTTSSVVGRSKPGCGLCPALSFKDLHHPCCGGGRVEPGFYLPHGPATCFFLWHSGEKGILQLYGGDVFQPCGGRRTTAAWTGCSCPSSTRATVAGCTRGSHNTSYAARVNLRPLCDELELEAAVSAWTEAESAQKEASSAREHVASLAKEVRRRRLELGQVVR

SEQ ID NO: 77093 - protein, 188 aa, Zea mays
  Coding DNA Sequence Number=SeqID_35314
  Subcellular localization annotation: CTP_CleavageSite=49; ConfidenceScore=5.27e-01
MDRGLGGSLLELLGSNVQKRSSRSFFAGGQSSRPGASPIIGITAGLAHRCSPVRSSGPPDRTARPLEQGFHQSLLRRDGNGYPLPETRWGFALLGYRFGSISLLMGLLMGSNGNPTVGMGNPSGTRNPHGYEFGQNFILFLRGYGFGQVIPSRFLPIAISTPTRTGCRRPRISRGDQQRIPHAQGRQF

SEQ ID NO: 77094 - protein, 182 aa, Zea mays
  Coding DNA Sequence Number=SeqID_35315
MDSRPVDDEPSQKGFHTINCVNLRAIHMDCRGSRSTSTREADGLTSIAWRTITGKGPPLTLHKPPSNPHGLLRGLGATSNRCACMHPKRESLKESLSSTLMSYTKAEGCCRVPENRRYAGEEVSGCTETSSQPRHIDRPGVATWPGKGTCSRIHAVDLDLLQGKRRAPVRGDRTSKMGTRPF

SEQ ID NO: 77095 - protein, 66 aa, Zea mays
  Coding DNA Sequence Number=SeqID_35316
  Subcellular localization annotation: CTP_CleavageSite=33; ConfidenceScore=5.25e-01
MTLGQNQCKNTSFHYRLSGGKAKTVRDLARTVRASGADRPVAVDLQGRTVRTRRADRPRSAEWPNG

SEQ ID NO: 77096 - protein, 119 aa, Zea mays
  Coding DNA Sequence Number=SeqID_35317
  Subcellular localization annotation: CTP_CleavageSite=58; ConfidenceScore=5.62e-01
MTLGQNLCKNTSFHYGLSGGKAKTVRALARTVRPQARTVRSPLIFKGGPSAPGGRTVRAQQNGPTARKWLVAINTTPTTSIQDTQAFQPSTFNTRASNPFQDTFKASISPSFTIEKRNH

SEQ ID NO: 77097 - protein, 116 aa, Zea mays
  Coding DNA Sequence Number=SeqID_35318
MAHAEDVEDLGALVGVTPEAAEVNPVPPLDAGEGSSAAPVPTVAGEDPVSAPAPTAEDALKVVAEPAAEDPAAAAGAFAALDVAAAETPPRVMGAEDHPGASAGRRRRRAVAKWRM

SEQ ID NO: 77098 - protein, 649 aa, Zea mays
  Coding DNA Sequence Number=SeqID_35319
MGVTEEEPSQVAASATKKRKLGTAVEGLGVSDSFAMELMGTCAALGGRMSSPELRESSARMLEVTGGRWPKNVPIPRAAGEDFVTSRMASQKRRAVVRIADPRHEAKRAQGSAKSAAASSSSKPVPAAKPVVPGPSKASASAKTAASGGIKPPLGEPTKGRELPSPGRRVADFGTNISVEDYFVAVGAKDVASSMSQRLREASQQLSQQLSQAADFADRVASGWRRKLPPWRPRRQTSGASLAEERTGRRITAIAEAQTARAEAKVARAESSLTSQRTEELEARFDALRSCVDKAEASTRSEVERTHAQFVDAYRELGARTADFEVPDREAGLRLPRMRYRSELLVLPTIVEGFMSFALPRHLRGGHECIVPTEGCRHYEVFDQSDENFEREIYKVEDPCGEAMAHAEDVEDLGALVGAPPEAAEVNPVPPLDAGEGSSAAPVPTVAGEDPVSAPAPTAEDALKVVAEPAAEDPTAAAGPSQGFGPAHTTATDNANFVVASTVVAEGNSDDSVSKFFESDDSRSSIVWTEESSDEDLDYFAALDVAAAETSPRVMGAEGLPGASAGRRRRRAVAKRRLSELSRSDRHHRGEMEGGRLHVDGTGKRELLSSPTGASVGEGELRSLFEGEELRIMLFNYREMGIIPKVEPM

SEQ ID NO: 77099 - protein, 145 aa, Zea mays
  Coding DNA Sequence Number=SeqID_35320
  Homolog annotation: Hit_ID=Q6H5X2; Match level="QueryCoverage=41%, HitCoverage=28%, E-value=2e-12, Identity=65%"; Hit description=ABA -responsive protein-like
MDPAPNVRLLDGLLQFVQGHLVPDEAHEPELEACTYFCSGRSLFPPGVAVLTLPSGMETLNGTRTTVPRLGGQRQRAVHGDDAFFSQTFLILLVQSFYKILSHSSVQTIFKSYENGFGSSKEVASPRESEPKPFLEKPEPCQRGP

SEQ ID NO: 77100 - protein, 166 aa, Zea mays
  Coding DNA Sequence Number=SeqID_35321
  Gene Ontology: Mol. function=asparagine synthase (glutamine -hydrolyzing) activity; Cellular component=cytoplasm; Biological process=asparagine biosynthetic process
  Homolog annotation: Hit_ID=Q5QFC3; Match level="QueryCoverage=70%, HitCoverage=18%, E-value=1e-40, Identity=71%"; Hit description =Glutamine-dependent asparagine synthetase
  Pfam annotation: Domain name=Asn_synthase; Domain location=68-166; Score=-23.8; E_value=4.9e-06; Accession=PF00733.11; Description =Asparagine synthase
MAHRTVRCANGVPARTGEGHRAGERSGPDPSTPVRIMIQSDVSNLPWYDDDNDDKVIVTPSVPYDPLALRKAFEKAVVKRLMKDVPFGVLLSGGLDSSLVAAVTVRHLAGTEAARRWGTKLHSFCVGLEGSPDLKAAREVAEYLGTLHHEFHFTVQDGIENWITKV

SEQ ID NO: 77101 - protein, 190 aa, Zea mays
  Coding DNA Sequence Number=SeqID_35322
MEGSFVIRTSYCSEVEGFPHLLWSCALRMGIRKKPEYVWKEYRENGTEKCSMAVYLGESRNYPNHPPFQALSGRDPTEDDPTIVYMAGYLHTLDNHYDDLFSHCTHLNSRVESLEQQIKELKEEKASLQESLEIAEGEEANTREAYRTLKMDYDKKLKKLAPTKKIRKRTKSQGCQTERKKGGPTSTASL

SEQ ID NO: 77102 - protein, 357 aa, Zea mays
  Coding DNA Sequence Number=SeqID_35323
  Subcellular localization annotation: CTP_CleavageSite=94; ConfidenceScore=5.37e-01
QIAIALKLRHCAPSSACTPPSPIVPSSLTGDFTAAGTRHIAMDRPPRASTGQIDPTSVIPYLRSCLATFPSSRNRATGEEPPWNFTGGRFSPPRTASPRHFPPNAVPPSSLARGSAPTVPSLHRPPLMEGSFVIRTSYCSEVEGFPHLLWSCALRMGIRKKPEYVWKEYRENGTEKCSMAVYLGESRNYPNHPPFQALSGRDPTEDDPTIVYMAGYLHTLDNHYDDLFSHCTHLNSRVESLEQQIKELKEEKASLQESLEIAEGEEANTREAYRTLKMDYDKKLKKLAPTKKIRKRTKSQGCQTERKKEAPPALPPSRIENLSDIEDMSLASLDDLLKESGDTLEREFGSTLESAHA

SEQ ID NO: 77103 - protein, 152 aa, Zea mays
  Coding DNA Sequence Number=SeqID_35324
MTGDPSSQQNSHGANARPRRSCALPLGRVLLALKGHAWHQVAGWAERGAWATLRWDMLGQRCSRSIDIILEGPLDLWVRTHTRFRCTTLILLADVDRIVFIGVQDKHHGKDQGMTRVKVITDQDNQGCILDKTCEASKKGKPINGEVGEALS

SEQ ID NO: 77104 - protein, 146 aa, Zea mays
  Coding DNA Sequence Number=SeqID_35325
MTGDPSSQQNSHGANARPRRSCALPLGRVLLALKGHAWHQVAGWAERGAWATLRWDMLGQRCSRSIDIILEGPLDLWVRTHTRFRCTTLILLADVDRIVFIGVQDKHHGKDQGMTRVKVITDQDNQGCILDKTCEASKKGKQSMVK

SEQ ID NO: 77105 - protein, 114 aa, Zea mays
  Coding DNA Sequence Number=SeqID_35326
MTNTLDAEGGIEITARLASPHPGAGGHRLGRPPAEGCNRAGPGKGDTPKRILPREGTRLRASLLIRGSKAGPSKGSTTASDRVGPTPTTGQRFEGRPPEGFHGRLRLLGLRAHY

SEQ ID NO: 77106 - protein, 55 aa, Zea mays
  Coding DNA Sequence Number=SeqID_35327
MCYLNPAPNCKCNSDIGRSPVLQLKIILVVEPLIPSEGPRIGEHIFGYKESDVAG

SEQ ID NO: 77107 - protein, 235 aa, Zea mays
  Coding DNA Sequence Number=SeqID_35328
  Gene Ontology: Mol. function=threonine endopeptidase activity; Cellular component=proteasome core complex (sensu Eukaryota); Biological process=ubiquitin-dependent protein catabolic process
  Homolog annotation: Hit_ID=Q94II8; Match level="QueryCoverage=33%, HitCoverage=30%, E-value=1e-22, Identity=65%"; Hit description=Alpha 1-2 subunit of 20S proteasome
  Pfam annotation: Domain name=Proteasome; Domain location=62-225; Score=-59.4; E_value=0.071; Accession=PF00227.16; Description =Proteasome A-type and B-type
MASKVAFDHPERFSKKFEFSADNIEPLVQTCMTTLSSKRIHLQSFKYYDTDNDVNRSPVLQLKIILAVEPLIPSEGPRIGEHIFGYTDPSVWITFSFFRRSKHEARNQTTEFCFNWGYEMPHDVLAQWIADRAQIWTEYVSKRPSGVVAMILGIDDEKGTPQLFTCDPAGYFFGHKIQIVDQLCLCLSPWNTESLLLSPHKVHVHNLVIEQSLASRSTEFEAVIQNGDKSSLRAV

SEQ ID NO: 77108 - protein, 235 aa, Zea mays
  Coding DNA Sequence Number=SeqID_35329
  Gene Ontology: Mol. function=threonine endopeptidase activity; Cellular component=proteasome core complex (sensu Eukaryota); Biological process=ubiquitin-dependent protein catabolic process
  Homolog annotation: Hit_ID=O48551; Match level="QueryCoverage=82%, HitCoverage=90%, E-value=1e-57, Identity=53%"; Hit description =Proteasome subunit alpha type 6
  Pfam annotation: Domain name=Proteasome; Domain location=32-191; Score=68.8; E_value=1.8e-17; Accession=PF00227.16; Description =Proteasome A-type and B-type
  Subcellular localization annotation: CTP_CleavageSite=4; ConfidenceScore=5.23e-01
MKLRAARAPPAVSDGPSLLFRVSFADYAWNATKLAGVTSVGVRGTDSVCVVGQRRANTHAPKDKLLDMTSVSRLFPITDRLGLLATGIADRAQIWTQYVSKRPSGVVAMILGIDDEKGTPQLFTCDPAGYFFGHKAASAGQRDTEAVNFLEKKMKNNPSLPFQETIQMAISALQFALKADLKASEVEVGVVRTDDPTFRVLTEAEIDEHLEAINPEPRHSEMLPGLFRDKLTLEN

SEQ ID NO: 77109 - protein, 110 aa, Zea mays
  Coding DNA Sequence Number=SeqID_35330
MRRATTSGLRSPQENRGAAPATSGYGHSPLLLASLLGRTRDDNGYPKPETRWVFTPLGFWIMISLIITILIDYEKIIILEMKPAGNPWVPVNPMGTGLGKISNPSRVRVF

SEQ ID NO: 77110 - protein, 463 aa, Zea mays
  Coding DNA Sequence Number=SeqID_35331
  Gene Ontology: Mol. function=protein serine/threonine kinase activity; Cellular component=beta-catenin destruction complex; Biological process=protein amino acid phosphorylation
  Homolog annotation: Hit_ID=Q5EZ69; Match level="QueryCoverage=88%, HitCoverage=98%, E-value=1e-147, Identity=58%"; Hit description =Shaggy-related protein kinase 6
  Pfam annotation: Domain name=Pkinase; Domain location=182-415; Score =208.5; E_value=1.6e-59; Accession=PF00069.15; Description=Protein kinase domain
  Pfam annotation: Domain name=Pkinase_Tyr; Domain location=182-415; Score=-37.3; E_value=3.5e-10; Accession=PF07714.7; Description =Protein tyrosine kinase
  Pfam module annotation: Pfam domain module=Pkinase::Pkinase_Tyr; Domain location=182-415::182-415
MARVAECAPRALRFWIMISLIIMILIDYEKIIILEMKPAGNPWVPVNPMGTGLGKISNPSRGGDSGSKRPKFEQDGAGDIVMEPHLTEDKPVRIDQESSSTSNRDAEASTSTSMKPVKTEEAGADLLPKEMNIMTISDDKADGHNDKEGEGVTLDGTGTETGQIIVTTIGGHNGKPKQKVSYMAELVVGTGSFGIVFQAKCLETDETVAIKKVLQDKRYKNRELQTMQLHDHPNVVQLKHHFFSTTQKGEVYLNLVLEFVSETVYRVAKYYNRMNQRVPIIYVKLYAYQMCRALAYIHRVVGVCHRDIKPQNLLVPGEPNISYICSRYYRAPELIFGATEYTTAIDIWSVGCVVAELLIGQPLFPGESGVDQLVEIIKLFGKRMPPEAVDLVSRLLQYSPNLRCTAVDACAHPFFDELRDPKACLPNGRPMPPLFDFTAAELEGLPAELVHRIVPEHMRKEVN

SEQ ID NO: 77111 - protein, 385 aa, Zea mays
  Coding DNA Sequence Number=SeqID_35332
  Gene Ontology: Mol. function=glutathione transferase activity; Biological process=auxin mediated signaling pathway
  Homolog annotation: Hit_ID=Q9FQC6; Match level="QueryCoverage=66%, HitCoverage=100%, E-value=1e-123, Identity=87%"; Hit description =Glutathione S-transferase GST 13
  Pfam annotation: Domain name=GST_C; Domain location=141-239; Score =49.8; E_value=9.4e-12; Accession=PF00043.15; Description=Glutathione S-transferase, C-terminal domain
  Pfam annotation: Domain name=GST_N; Domain location=3-109; Score =13.1; E_value=0.048; Accession=PF02798.10; Description=Glutathione S- transferase, N-terminal domain
  Pfam module annotation: Pfam domain module=GST_C::GST_N; Domain location=141-239::3-109
MAAGLQVFGQPASTDVARVLTCLFEKNLEFELIRTDTFKKSHKLPEFIKLRDPTGQVTFKHGDKTIVGKNFDKKQLPERTKRELILYKRLKNEMKCMADSRAICRYLCTQFPDDGYKKLYGTGSLERASIEQWLQAEAQSFDAPSSELAFQLAFAPHLKNVRPDEARAAENERKLHGMLGVYDDILSKNEYLAGDDFTLADLSHLPNSHYIVNSSDRGRKLFTARKHVARWYDKISTRDSWRQVIKMQREHPGAFELRTLTGLSTSSYVPVAYPYKRQITSPAARQLESTSGEDASKRNPLPSALVSNLQSVLAARRPSAAVVSTAATTSEAEAFAQEAEASDAPAGDGTPARPIVLLTCAGGSGRRVSRRSSTPSLPPTAATST

SEQ ID NO: 77112 - protein, 256 aa, Zea mays
  Coding DNA Sequence Number=SeqID_35333
  Gene Ontology: Mol. function=glutathione transferase activity; Biological process=auxin mediated signaling pathway
  Homolog annotation: Hit_ID=Q9FQC6; Match level="QueryCoverage=99%, HitCoverage=100%, E-value=1e-123, Identity=87%"; Hit description =Glutathione S-transferase GST 13
  Pfam annotation: Domain name=GST_C; Domain location=141-239; Score =49.8; E_value=9.4e-12; Accession=PF00043.15; Description=Glutathione S-transferase, C-terminal domain
  Pfam annotation: Domain name=GST_N; Domain location=3-109; Score =13.1; E_value=0.048; Accession=PF02798.10; Description=Glutathione S- transferase, N-terminal domain
  Pfam module annotation: Pfam domain module=GST_C::GST_N; Domain location=141-239::3-109
MAAGLQVFGQPASTDVARVLTCLFEKNLEFELIRTDTFKKSHKLPEFIKLRDPTGQVTFKHGDKTIVGKNFDKKQLPERTKRELILYKRLKNEMKCMADSRAICRYLCTQFPDDGYKKLYGTGSLERASIEQWLQAEAQSFDAPSSELAFQLAFAPHLKNVRPDEARAAENERKLHGMLGVYDDILSKNEYLAGDDFTLADLSHLPNSHYIVNSSDRGRKLFTARKHVARWYDKISTRDSWRQVIKMQREHPGAFE

SEQ ID NO: 77113 - protein, 114 aa, Zea mays
  Coding DNA Sequence Number=SeqID_35334
MSIHTALLRASPSPRRRRRPAPEIAGWFHAAPRLPAGHTDLAKIASSLLFPEGDNDCGGGSGVISYIAVIQNRVAPPFILDNAACVALRVQGFSNPGATSVGATHHESMLASQP

SEQ ID NO: 77114 - protein, 114 aa, Zea mays
  Coding DNA Sequence Number=SeqID_35335
MSIHTALLCASPSPRRRRRPAPEIAGWFHAAPRLPAGHTDLAKIASSLLFPEGDNDCGGGSGVISYIAVIQNRVAPPFILDNAACVALRVQGFSNPGATSVGATHHESMLASQP

SEQ ID NO: 77115 - protein, 217 aa, Zea mays
  Coding DNA Sequence Number=SeqID_35336
MPLLLHQPLLLLNASADHHLPWRRSSPISSCQGAVAELALPQPWMSLGHPSPISPRPHPLAAAPSYSWWLSLLPWMLVVLPSLVLTSAPCVGWPVAPALGLSSANSAPSIPARILLIGPAQIILMPGRGTTATAMKPHCVAPSTCSTEYRSTCRPDLQPWLRGRQTPLPSTLCLTLHQCDEMSERIDDMRPEFDSARLFDVYFTHCDLVDDVFVCAR

SEQ ID NO: 77116 - protein, 472 aa, Zea mays
  Coding DNA Sequence Number=SeqID_35337
  Homolog annotation: Hit_ID=Q9M835; Match level="QueryCoverage=28%, HitCoverage=32%, E-value=7e-31, Identity=56%"; Hit description=L -allo-threonine aldolase, putative
  Pfam annotation: Domain name=Beta_elim_lyase; Domain location=179 -401; Score=8.3; E_value=2.3e-11; Accession=PF01212.11; Description =Beta-eliminating lyase
  Pfam annotation: Domain name=Ribosomal_S4e; Domain location=380-445; Score=67.5; E_value=4.4e-17; Accession=PF00900.10; Description =Ribosomal family S4e
  Pfam module annotation: Pfam domain module=Beta_elim_lyase::Ribosomal_ S4e; Domain location=179-401::380-445
MPLLLHQPLLLLNASADHHLPWRRSSPISSCQGAVAELALPQPWMSLGHPSPISPRPHPLAAAPSYSWWLSLLPWMLVVLPSLVLTSAPCVGWPVAPALGLSSANSAPSIPARILLIGPAQIILMPGRGTTATAMKPHCVAPSTCSTEYRSTCRPDLQPWLRGRQTPLPSTLCLTLHQCDEMSERIDDMRPEFDSARLFDVYFTHCDLVDDVFTVKCLETGETVAIKKVLQDKRYKNHGIVISYFIAKKIRNSINVCTHCLKLHIDGARIFHASAALGVLVDRLVKAADSVLVCLSKGLGAPVGSVIVGSKASIDKARILRKTLGGGMRHVGVLCAAAHVAVRDTVGKLADDHKKAKALAVWVLKLLCLVGFIFLEGLKKIEQITVDSASVETNMFKLYKVRSVLFGQKGIPYLNTYDGRTMRYPDPLIKANDTIKIDLETNKIMDFIKLYLPFHGLHQVIYLVRLNVSTNS

SEQ ID NO: 77117 - protein, 472 aa, Zea mays; identical to SEQ ID NO: 77116
  Coding DNA Sequence Number=SeqID_35338
  Homolog annotation: Hit_ID=Q9M835; Match level="QueryCoverage=28%, HitCoverage=32%, E-value=7e-31, Identity=56%"; Hit description=L -allo-threonine aldolase, putative
  Pfam annotation: Domain name=Beta_elim_lyase; Domain location=179 -401; Score=8.3; E_value=2.3e-11; Accession=PF01212.11; Description =Beta-eliminating lyase
  Pfam annotation: Domain name=Ribosomal_S4e; Domain location=380-445; Score=67.5; E_value=4.4e-17; Accession=PF00900.10; Description =Ribosomal family S4e
  Pfam module annotation: Pfam domain module=Beta_elim_lyase::Ribosomal_ S4e; Domain location=179-401::380-445

SEQ ID NO: 77118 - protein, 399 aa, Zea mays
  Coding DNA Sequence Number=SeqID_35339
  Homolog annotation: Hit_ID=Q8SA97; Match level="QueryCoverage=22%, HitCoverage=15%, E-value=2e-08, Identity=46%"; Hit description =Ornithine carbamoyltransferase
  Subcellular localization annotation: CTP_CleavageSite=38; ConfidenceScore=5.26e-01
MQTGSEQKKPNRRVWGTQPPSGYKRSSTFAQTNGRERRAAMQAACNHAKHKTQQRQPDATVNAAESGPAVMTVADAREQRARRQPSSRPIRAQRESSLSRCEDNALVIRSSNGSHTRNGCPANHSPCCINSAAGQVAYLAAATGDASPSPKQPHQKRLRASLLIKGSKAGPRRVQQPPQIALAPEGFTVASDAERGMTRAHRRHHVRCPSRRLGGCSRKPGSGRTVDSVNIPARELGPRPYTRATASSHEGTTRLAEALRKALRPRRSEITPPRPRGLHPAGALARTHRNQMQPRKAGPLAKKCDESLQASADTPFEARGLLSGTIIRGTLKTPNSQLGSDSGKAPEDGELRSARPRARTRAKPRKTANSAPPDPGLGLGLSPGRRRTPLRPTQGSDSG

SEQ ID NO: 77119 - protein, 458 aa, Zea mays
  Coding DNA Sequence Number=SeqID_35340
  Homolog annotation: Hit_ID=Q8SA97; Match level="QueryCoverage=31%, HitCoverage=27%, E-value=4e-09, Identity=38%"; Hit description =Ornithine carbamoyltransferase
  Subcellular localization annotation: CTP_CleavageSite=38; ConfidenceScore=5.26e-01
MQTGSEQKKPNRRVWGTQPPSGYKRSSTFAQTNGRERRAAMQAACNHAKHKTQQRQPDATVNAAESGPAVMTVADAREQRARRQPSSRPIRAQRESSLSRCEDNALVIRSSNGSHTRNGCPANHSPCCINSAAGQVAYLAAATGDASPSPKQPHQKRLRASLLIKGSKAGPRRVQQPPQIALAPEGFTVASDAERGMTRAHRRHHVRCPSRRLGGCSRKPGSGRTVDSVNIPARELGPRPYTRATASSHEGTTRLAEALRKALRPRRSEITPPRPRGLHPAGALARTHRNQMQPRKAGPLAKKCDESLQASADTPFEARGLLSGTIIRGTLKTPNSQLVTPISIKLQRPDGGSDSASADELRLARPRGSDSASADELRLARPRGSDSASADELRLARPGGSDSASADDLRLARPRGSDSASADDLRLARPRGSDSASAMEDRLDPGFGGASTSPNLGH

SEQ ID NO: 77120 - protein, 267 aa, Zea mays
  Coding DNA Sequence Number=SeqID_35341
  Homolog annotation: Hit_ID=Q5QNM3; Match level="QueryCoverage=23%, HitCoverage=9%, E-value=2e-14, Identity=65%"; Hit description =Leucine-rich receptor-like protein kinase-like
  Subcellular localization annotation: CTP_CleavageSite=78; ConfidenceScore=5.86e-01
MAAMPTHAPLRPLDAASSHPQSPPPLRFHPSPVASSSRVVVSPWLAGTRKRPTQANPSRRARRESWRDEESVQEEQIRKAKPMSLNCFAANRDETHTAESLSCRYWEASSRSSSVITNYVGYLNKGQIPPKHISLVNLTVILNIEGSKFTRQRLLVHTFSLMVEHAYYSFWLTTGAQKLNRAELEVACEDFSNINTFPTYTVFKGILSGGVEIGIVSTVISSSKDWSRSAKHASRKDRGYTVQFDYFDFGTACASSVVFILVRLLTF

SEQ ID NO: 77121 - protein, 1094 aa, Zea mays
  Coding DNA Sequence Number=SeqID_35342
  Homolog annotation: Hit_ID=Q6K6Z8; Match level="QueryCoverage=12%, HitCoverage=26%, E-value=4e-27, Identity=53%"; Hit description =Hydroxyproline-rich glycoprotein-like
  Pfam annotation: Domain name=AUX_IAA; Domain location=312-481; Score=- 11.3; E_value=1.2e-08; Accession=PF02309.7; Description=AUXIAA family
  Pfam annotation: Domain name=PP2C; Domain location=383-639; Score= -7.0; E_value=1.5e-05; Accession=PF00481.12; Description=Protein phosphatase 2C
  Pfam module annotation: Pfam domain module=AUX_IAA::PP2C; Domain location=312-481::383-639
PPPTVLSMVTNALTHEGEYRIRSTMATGAQKLNRAELEVACEDFSNINTFPTCTVFKGILSGGVEISIVSTVISSSKDWSRSAETCFKKKTCTYLCNAFACICAAYVHNSSSLHMTASFFSLLDSFHFCPLGYKDFPDLGNTTSSLLSTCCHVVLELWYNWSWVKATWSLEVIFPDGIFPADGKSEIEGKNKYFELFQFNKPHAAPPAASTSIHDCPRARLPLSLRDARWIGEIAHKSHPWQLSSPKSAANRICQRGLAPPCRRSPTSVADFVMPFFLFIVGVALALAYKRVPDKLDASRKALLRALTLFCLGLGLVLQGGFFHGVRSLSFGVDLREIRLMGVLQRIAIAYLLTALCEIWIRGDEDVDYGYDLLKRYCYQLAQVVGWPPVQNYRKNTLVASSSRRKAPAEDAASTAQTMYVKVSMDDAPYLKMVDIKMYSSYEDLSMALEKMFSCFITGETYQKTDIDFLESEASAFRDDGSTASTAILVGDRLYVANVGDSRAVIPKAGKAMALSEDHKPNRIDERKRIENACVLSFGLAGFNVGLYRPLTWPGLHIDHAGFNVISVRPIDGHRRLGDRRRRPTPGAQAFDGTIADDEHSRAGSDLITEMSSVGSGSGTRAANGAAAISAAATAAGSADARFHPQLLQQQDRKGGKRIVPAARTSDGNGSNARGNGLQSGANSNQNMPMNLSLLAPPSSPASFSNSALPSTAQSPNCFLSVSANSPGGPTSNMFAVGPYANEPQLVSPPVFSTYTTEPSTAPLTPPPELAHATTPSSPDVPYARFLSSSMDIKTASKEHNMPFLSTTYSGGSGLQASYPLYPESPCSSLISPASVTPRTGLSSPIPEQEVPPAHWKTSRSACDTPYFRASPIPEQETTAQWKTSRSACDTPYARTSPTNIFGLDSNTPRNYMLDSNFFRPAASAQFYLDQAQQAFPHNGGRVSVSREKQDADEIEAYRASFGFSADEIVQSQSYVGIPDAVDESFSISPFGNNAPATEICPFSDLPSEVQKADKSCTYVKDGTSPKKSANQLSIDSPNKVLRLDVFKVTKGGHLSEDEGIARDDAEIEYRRTRSLRDANGVLSRRSALARQLH

SEQ ID NO: 77122 - protein, 35 aa, Zea mays
  Coding DNA Sequence Number=SeqID_35343
MELKSFIMLLHGAPLLLGSIKFETICLFYADEFDC

SEQ ID NO: 77123 - protein, 186 aa, Zea mays
  Coding DNA Sequence Number=SeqID_35344
  Homolog annotation: Hit_ID=Q69NX2; Match level="QueryCoverage=27%, HitCoverage=4%, E-value=6e-09, Identity=62%"; Hit description =Putative fanconi anemia, complementation group D2
MGCSKAIIPFLRKRLGYSAHKLLSADFPSEDAGKRWQSKLIGDKPEKDFEVEFEEFGVKADDSELDSADEAMTFAAPGAHSPEDTTGSSQSPKLSLFVTPFLATIAVPLEEKTSTRYMALVDLEDLPLINFKKRLGRRFQLKRKVKSGRHGMELKSFIMLLHGVPLLLGSIKLETICLVYADEFDC

SEQ ID NO: 77124 - protein, 208 aa, Zea mays
  Coding DNA Sequence Number=SeqID_35345
  Subcellular localization annotation: CTP_CleavageSite=80; ConfidenceScore=5.35e-01
MSRPTNRGGGCVVTACRVPNDDPARSLHTSTTRDVKTYRTLRTPLPANATSVAFRASNPHTQRGPCCPCTDGSTTGSSIQGQTDWQRHLGMAAGRVVFGSDNTRPDIIPDPYTNIHTHQVNRVQNWTRTRTYRVSVGYRVSGGYGTVKYKSACKSQLGTVAGRSRAGVARPLGAASQRGSGLKPEDWPIAIPRGTRQAGPAAVTDPWS

SEQ ID NO: 77125 - protein, 238 aa, Zea mays
  Coding DNA Sequence Number=SeqID_35346
MAHRTVRCTPDMSGAPATSSVPLESDRWSSDLWATLDVRWRTGQLLFIVRCASMGKPDVCARCGAFNASAVREPLEIPEGGEFELESPGAPDTVRWCTGHCPVAHRTVRCSSTARRSLGTVAGRSRAGVARPLGAASQRGSGLKPGDWPTGGRPGQRAAACWARARGWGLGPGRRLGAWAGARGWGPGIAAVPRVGVAAWGAGSWPPGKAGTTGSGGWGSGVGGRDSWEGKGVGNLGS

SEQ ID NO: 77126 - protein, 104 aa, Zea mays
  Coding DNA Sequence Number=SeqID_35347
MEDDLLPLPDPIVVALLLLDPIAREGGAVQMGDPIAGLGVGLRKRKKMFTRMTFGQSRRRSPKNLIADPPCKVSNDKGFGGTCPLASLCAQSYEMEILTLAARQ

SEQ ID NO: 77127 - protein, 103 aa, Zea mays
  Coding DNA Sequence Number=SeqID_35348
MSIPRARSRTARASEAPALSLLCARRVMRWEYSHLRLGCDSENSSVLMYQVSGALLYLTSRRGKLKEKGHMLHAKRRAAEGQESRMRHAKGRARAETPAVSEC

SEQ ID NO: 77128 - protein, 251 aa, Zea mays
  Coding DNA Sequence Number=SeqID_35349
  Gene Ontology: Mol. function=carboxyl- and carbamoyltransferase activity; Cellular component=ornithine carbamoyltransferase complex; Biological process=amino acid metabolic process
  Homolog annotation: Hit_ID=Q9SEX4; Match level="QueryCoverage=73%, HitCoverage=57%, E-value=1e-80, Identity=74%"; Hit description =Ornithine carbamoyltransferase OOCT1
  Pfam annotation: Domain name=OTCace; Domain location=137-250; Score =37.3; E_value=2.3e-10; Accession=PF00185.14; Description =Aspartateornithine carbamoyltransferase, AspOrn binding domain
  Pfam annotation: Domain name=OTCace_N; Domain location=9-133; Score =13.3; E_value=2e-09; Accession=PF02729.11; Description =Aspartateornithine carbamoyltransferase, carbamoyl-P binding domain
  Pfam module annotation: Pfam domain module=OTCace::OTCace_N; Domain location=137-250::9-133
MANISSPVTKLLRLAKYRVVGRREVLESGDMAVLLRNAKAGDKVSARALLHLILDGDEGDASKKDDIQMGKREETRDVARVLSGYNDIIMARVFAHQDILYLAKYASLPVINGLTDYNHPCQIMADALTMLEQIGRIENTKVVYVGDGNNIVHSWLLLADVLPFHFVCACPKGFEPDAHTVEMARGAGISKIEITNSPREAVKGADVVYTDVWASMGQKEEIDYRNQKSQGIHERGVEMTDGAIEAPNSWK

SEQ ID NO: 77129 - protein, 244 aa, Zea mays
  Coding DNA Sequence Number=SeqID_35350
  Gene Ontology: Mol. function=carboxyl- and carbamoyltransferase activity; Cellular component=ornithine carbamoyltransferase complex; Biological process=amino acid metabolic process
  Homolog annotation: Hit_ID=Q9SEX4; Match level="QueryCoverage=73%, HitCoverage=49%, E-value=3e-82, Identity=83%"; Hit description =Ornithine carbamoyltransferase OOCT1
  Pfam annotation: Domain name=OTCace; Domain location=137-244; Score =32.6; E_value=5.4e-10; Accession=PF00185.14; Description =Aspartateornithine carbamoyltransferase, AspOrn binding domain
  Pfam annotation: Domain name=OTCace_N; Domain location=9-133; Score =13.3; E_value=2e-09; Accession=PF02729.11; Description =Aspartateornithine carbamoyltransferase, carbamoyl-P binding domain
  Pfam module annotation: Pfam domain module=OTCace::OTCace_N; Domain location=137-244::9-133
MANISSPVTKLLRLAKYRVVGRREVLESGDMAVLLRNAKAGDKVSARALLHLILDGDEGDASKKDDIQMGKREETRDVARVLSGYNDIIMARVFAHQDILYLAKYASLPVINGLTDYNHPCQIMADALTMLEQIGRIENTKVVYVGDGNNIVHSWLLLADVLPFHFVCACPKGFEPDAHTVEMARGAGISKIEITNSPREAVKGADVVYTDVWASMGQKEEIDYRNQKSQGFTVDETLMEIAGP

SEQ ID NO: 77130 - protein, 350 aa, Zea mays
  Coding DNA Sequence Number=SeqID_35351
MVGSYCKAPCDALFILGNKNNPKDGSEEATKFCCFCSKVMNQQEAPTGVGEFLRDFGVPVVLWRLLQEVGYTEAPKYQWSRTVLRGQPWYEVVVRIPERARKPSWPYWMFHAEGMTPWEGAQVAALEVLTTICYQKREEIQATSMRLFPAVALSDPLVYHHQARLMESIPIGQDSVESASARVLMAVLELQLTRGHSRQKWQQLYTGSYAAFKMMEKAKNSACTQAQERLEETKVQAEHVIGLEHQVTELQMQHQADQNRIKELEHQLTNAHSKLKILSKQQEEICLYVVAVREDLKETMSFISHQDQAIKELNRAHPMEFQVAQRLVNHLQQAVHRLNVAFYPTPAPAD

SEQ ID NO: 77131 - protein, 47 aa, Zea mays
  Coding DNA Sequence Number=SeqID_35352
MVGSYCKAPYDALFILGNRNNPKDGSEEATNFCCFCSKVVPSEEKQD

SEQ ID NO: 77132 - protein, 47 aa, Zea mays
  Coding DNA Sequence Number=SeqID_35353
MVGSYCKAPCDALFILGNRNNPKDGSEEATKFCCFCSKVVSNEEKQD

SEQ ID NO: 77133 - protein, 47 aa, Zea mays
  Coding DNA Sequence Number=SeqID_35354
MVGSYCKAPCDALFILGNRNNPKDGSEEATKFCCFCSKVVSNEEKQG

SEQ ID NO: 77134 - protein, 59 aa, Zea mays
  Coding DNA Sequence Number=SeqID_35355
MVGSYCKAPCDALFILGNKNNPKDGTNEPDGPHVRRGGGVHRQRLDLTPEKDPVGEERS

SEQ ID NO: 77135 - protein, 388 aa, Zea mays
  Coding DNA Sequence Number=SeqID_35356
MENGEESEVTEGKTQPPLESQAETWLYFDICESEPDSPTNKGKPRKDGFYLQEYFHLEQWWDLTAKLPVMLFSSSGTETILRMEHTLESPFLSRVRKRQSFVAFAPRWYLMKKNKNEDTGGLGPPHRIVLFDNYLGGVFASLDMCTQHSFIALMNQQEAPTGVGEFLQDFGVPVVLWRLLQEVGYTEAPKYQWSRTVLRGQPWYEVVVRITERARKPSWPYWMFHAEGMTPWEGAQVAALEVLTTICYQKREEIQATSMRLFPAVALSDPLVYHHQARLMESIPIGQDSVESASARVLMVVLELQLTRGHSRQKWQQLYTGSYAAFKMMEKAKNSACTQAQERLEETKVQAEQVIGLEHQVIELQIQHQADQNRIKELEHQLTNAHSK

SEQ ID NO: 77136 - protein, 130 aa, Zea mays
  Coding DNA Sequence Number=SeqID_35357
MRLRPRSADPTEDENETRRRINHTGAAEVRRTYHDAWRRRNAGGAMGSRRRRDGLAAAGERRVGYNPREVGAASNRSQVTGASGVKCADGFQRKRVVEKRREKRRVWLQLLLLAARSRREAEPNSRMIRC

SEQ ID NO: 77137 - protein, 189 aa, Zea mays
  Coding DNA Sequence Number=SeqID_35358
  Subcellular localization annotation: CTP_CleavageSite=51; ConfidenceScore=5.46e-01
RAHFPRVVAHATLPRSRQAIAPPPRTHRAAGVPSPPRIVGSRSEGRSLIPVANEALPPSSSLQRNQADSIADKAIGRMQEISDKIFSVARETIRPGRGLTSFDATKLRVALEEIACMLEQDSLVLQEHLDIVNNFNIPVDSSYEPSTLSSPPPSDDDLTPHWDFAEHFQNFWGVEYDSDQMPSFSDNDV

SEQ ID NO: 77138 - protein, 140 aa, Zea mays
  Coding DNA Sequence Number=SeqID_35359
MSNVRRMICKILCSCITVATNVVFYSYAKVDLYLVCKRVAVGDVYALRVPTTLQFANIFIKWLPSQFSYVGSVGTLKQGYLLLQGEGAAPVEKSLVVRRTVLHAPHQPPWGHHVVKEKDVLQDTRSGSGPTARKAPDPRT

SEQ ID NO: 77139 - protein, 119 aa, Zea mays
  Coding DNA Sequence Number=SeqID_35360
  Gene Ontology: Mol. function=transferase activity, transferring glycosyl groups; Cellular component=membrane
  Homolog annotation: Hit_ID=Q10RW1; Match level="QueryCoverage=56%, HitCoverage=13%, E-value=4e-11, Identity=50%"; Hit description =Xyloglucan galactosyltransferase KATAMARI 1, putative, expressed
MESNTERRVHESPGGCRQKTDFWNSRMMLAGVWQCVLLRARVFTLKGVVAPSASTTSPAKPDPASGGDAAQGLLRESGPSRRLDRLPLGPRSTGFQGRQPDPRPRLIDFGVGSADGQHD

SEQ ID NO: 77140 - protein, 1167 aa, Zea mays
  Coding DNA Sequence Number=SeqID_35361
  Homolog annotation: Hit_ID=Q10RW1; Match level="QueryCoverage=38%, HitCoverage=86%, E-value=0.0, Identity=72%"; Hit description =Xyloglucan galactosyltransferase KATAMARI 1, putative, expressed
  Pfam annotation: Domain name=Exostosin; Domain location=714-1071; Score=406.1; E_value=5.1e-119; Accession=PF03016.6; Description =Exostosin family
  Pfam annotation: Domain name=p450; Domain location=139-608; Score= -164.0; E_value=0.0017; Accession=PF00067.12; Description=Cytochrome P450
  Pfam module annotation: Pfam domain module=Exostosin::p450; Domain location=714-1071::139-608
MVSKLLADALPFFDDGRIDELDVWDEDATSVDADDSVSASMGDRELRFDEFTFNDKSAQYHLSSTHEALFSDGANPFFDEACYALTVFDQMPIFCFDGEPIFDEVPNDSITEYELSFMEVPHFALRCEKIQQHVDVAALRGEEHLVSLETMKSKVEAGNTMAAMAAAASPLPSLLAVGNLTPSSIAQPHPQAGAVGSSESELAAPSSVHDDSVALIAVSGRCDYARANEMTSAQIDAMAQDETDEIANTVEQLTGLGVEKVVATALPPIGCTPWLSRSNNYGSCSTLDTLFQVVAVYKFRDPKTSDQEMLESICGVLMPLKLQAKVSRPMDIIINSLYNNKDIFVWESISNVSDALERIRILSLTDKEVLVEGDTEKLEIQLDKEKKMLSMQDKSIGMTIIANGVQVRPLPWPSFYYYAAWVRWMKSLVMALCWDLFGAGTETTLVTTEWAPSLLLNHPEALKKAQAELDALVGSSHLITTDDMCYLGYLHCIINETLHMYSAAMLLLPHESMVDCKVDGYDGTLSKDDGLVDGLRKCEQWKWQDIFASKETKTSSWFHEFIGRAKKPEMGCPPFGCGCGWDVVPYKQPWPPPMQFMLLGDANTIVQLVRHILRFPPSNPILPKLSSSWSFCCFTLAKSARKAGGGARSRRAVGVEAAAAKVLPRLRILAVLAVVAWTFFLYYVHFTVISSSTVEVGNGDEDGGAADPCRGRYVYMHDLPPRFNADIVRDCRKTEDHWGDMCGFVSNAGLGRPLAADDDGVITGEAGWYGTHQFALDAIFHNRMKQYECLTNHSAVASAVFVPFYAGFDFARYHWGYDNATRDAASADLMEWLMARPQWRRKWGHDHFLVAGRTGWDFRRSSNVNPDWGTDLLDMPAGRNMTVLVLESTLKYTSDFSVPYPTYFHPRSDADVLRWQDRVRGRRRTWLMAFVGAPRPDVPMSIRIRDHVIAQCRASSACAMLGCARTLGSTQCHTPASIMRLFQKSVFCLQPPGDSCTRRSVFDSMVAGCIPVFFHTGSAYEQYPWHLSRDDGHLRYSVFIPDADVRRRNVSVEAVLRAIPPPTVERMRQEVIRLIPTLLYADPRSKLETLKDAVDVAIDGILDTMAGTKDTPSLFAAIFSSSKGPLWARIRNDEDDDSGGRVTEDPPDLFASTESRFRFRPVQADHP

SEQ ID NO: 77141 - protein, 102 aa, Zea mays
  Coding DNA Sequence Number=SeqID_35362
ETCSTQQEQIQTFQKQLAVATEKLKLFNYVLGSHLPSHAFANTRLQQSPCDLNSIYSHFKLLQRYYTSPNGAYSTGFKPLSHQVSYLAAVQFFPEWNVWTRF

SEQ ID NO: 77142 - protein, 427 aa, Zea mays
  Coding DNA Sequence Number=SeqID_35363
  Homolog annotation: Hit_ID=Q2EN88; Match level="QueryCoverage=9%, HitCoverage=15%, E-value=7e-16, Identity=95%"; Hit description =Guanylyl cyclase-like protein
MDIVVEEGNTDVGNTVEPSYEVVARSGCSAQLSTNDTNEHELESEDSKVSVGNAAKQSHDVVGVGIDCIFNHVKVSTEADLGTQPDVIHLTSLDVPNESSQISSEQNKQDALDTLIRISQHKKPKKLNVARVVSEDYKCTPEDVQLIEYIKTLPGKQVVVDIDSAWLNRNDMECLFHGDIQVSGEALSAYIHCIRNEEHLLHREGGKSFLGSFVARQGCHPQVPKIGCLETPTVPVKAAWEQRKQVNQGCFEMPANIDCSEDLFQSHEDLQNQSRTSNLDNEHFPRDASNHANVEATGPPYDLSNGHTVIIIEEMGTRAYQEQETCNTQQEQIQTFQKQLAVATEKLKSLAKFMFKATGNAVNLVQIVGMKVPHVQQAFTWDYGLACVLMVLRTLGIDCCDDIADLERLCRTTRFSLGLELYNFKYN

SEQ ID NO: 77143 - protein, 133 aa, Zea mays
  Coding DNA Sequence Number=SeqID_35364
MVIGSRVDGSDSKSPRVSRGRQIQIGRPEIAVRKLLRSNPSPPHKLHLTAVALPPIPIGLRWRRQRITADHRRRRPVSSYKARYLAYHCAERHPDQGEHREGQLTSREGTDEAGRRCSAARSLRRGIRSRVYG

SEQ ID NO: 77144 - protein, 78 aa, Zea mays
  Coding DNA Sequence Number=SeqID_35365
  Subcellular localization annotation: CTP_CleavageSite=22; ConfidenceScore=5.09e-01
MVIGSWMDGSDSKSPRNVTRIKASIVKANSPVERAPTRPVDGAVPPAAFGEEFGVTEEAQDLAHGLWREDPTRQRKRG

SEQ ID NO: 77145 - protein, 353 aa, Zea mays
  Coding DNA Sequence Number=SeqID_35366
  Subcellular localization annotation: CTP_CleavageSite=20; ConfidenceScore=5.10e-01
MGLGSSKATAMGYGRRQAVLLHLRRRARTFPFIPSVPFPPPSPDQAGLVLPITGGSALPPPPHIPGHGPPRQRRPPGDIPNPYATSLFPPARWDLGAARTPQWDLRATKGPPPSLVTISYLPLPPLRPLPTTITPPSGPTAARPTGGRFYSANSSPSSWTCPTIDGVRWRLTLWRYRPPCNALVRNNSLMLLLGVGTDVIRFDLSPRFFFILNLVKKCVVITGWESSSLSHSAMRTTFHTFYFLEQENNLGLECQGNCETHGAAVPGTKDAGTGKAGQSSGDRQEEKLPKCEQVDYGSEVEGFADDENPGKRAALVTLVEMNTAATRMREFKCSPLSIRMSLQMTLSTVLILG

SEQ ID NO: 77146 - protein, 189 aa, Zea mays
  Coding DNA Sequence Number=SeqID_35367
MGSESDKRSSSILSDDLALVRNNSLMLLLGVGTDVIRFDLSPRFFFILNLVKKCVVITGWESSSLSHSAMRTTFHTFYFLEQENNLGLECQGNCETHGAAVPGTKDAGTGKAGQSSGDRQEEKLPKCEQVDYGSEVEGFADDENPGKRAALVTLVEMNTAATRMREFKCSPLSIRMSLQMTLSTVLILG

SEQ ID NO: 77147 - protein, 39 aa, Zea mays
  Coding DNA Sequence Number=SeqID_35368
MAKLDEESEELQQKFLAKDIDFPHLLPIGLAKHFARFVG

SEQ ID NO: 77148 - protein, 106 aa, Zea mays
  Coding DNA Sequence Number=SeqID_35369
  Homolog annotation: Hit_ID=Q5YJL6; Match level="QueryCoverage=75%, HitCoverage=47%, E-value=2e-08, Identity=42%"; Hit description =Autophagy protein AGP6
VTSSLELLTGRPWPSAARFWLCAEWELSGIEESGRSVRWGIEERKNELLPSVTIDKASMAKLDEESEELQQKFLAKDIDFPHLVQKYKKLRTAYHKQALLHLAGQT

SEQ ID NO: 77149 - protein, 83 aa, Zea mays
  Coding DNA Sequence Number=SeqID_35370
MGIGCLRDKNLNKDYGVVPRLPSSRDLRRGLPFRLWWVQVWSLHDGSRGSLEDMVAGVTWPYILPSGWTVEWDPASAEEEHEE

SEQ ID NO: 77150 - protein, 83 aa, Zea mays
  Coding DNA Sequence Number=SeqID_35371
MGIGCLRDKNLNKDHGVVPRLPSSRDLRRGLPFRLWWVQVRSLHNGSRGSLEDMVAGVTWPSILPPGWTVEWDPASAEEEHEE

SEQ ID NO: 77151 - protein, 83 aa, Zea mays
  Coding DNA Sequence Number=SeqID_35372
MGIGCLRDKNLNKDYGVVPRLPSSRDLRRGLPFRLWWVQVRSLHDGSRGSLEDMVAGVTWPSILPPGWTVEWDPASAEEEHEE

SEQ ID NO: 77152 - protein, 275 aa, Zea mays
  Coding DNA Sequence Number=SeqID_35373
MARPSIGRLLWASDSTRPLHVDGSRAATWPEKMIYSKVSTVSPDPHGKVPDPCGDQPVPQAACLSIPLADGIKKCASFLIILIGAPHMGSPRENKLLIRAIMKVKWRARKNKIVMKATRPRPTPGGRHSSDSIEANLGGRRGSNSLKANLYGRHHSDSLEANLRGRHGSDSLEANLCRRHDSDSPEANLYGRCRSDSPESTSDSPKRSHDSPERSHDSPKCISDSPERSHDSPKRISDLPKGVSGDCLVRPRLAQTWPNFFTPIWLDLRGSLALR

SEQ ID NO: 77153 - protein, 126 aa, Zea mays
  Coding DNA Sequence Number=SeqID_35374
MARPSLGRLLWASDSTRPLHVDGSGAATWPEKKIYSKVSTAETSPFRRRRACPFHWQTVHPYCRVHYAHHYSYVTKEAAAACQYYADCGHRGAQEIAQALVTPIIYSFRYVPGPTCRAQHPCMCLP

SEQ ID NO: 77154 - protein, 410 aa, Zea mays
  Coding DNA Sequence Number=SeqID_35375
  Homolog annotation: Hit_ID=Q94LQ9; Match level="QueryCoverage=76%, HitCoverage=13%, E-value=1e-88, Identity=54%"; Hit description =Putative transcription regulatory protein
MARISSQRPLKYPTSAGCEALLSGVMIWILRCFSDECVCWVLAGAKELEALIANDGKHVEIQDSVPICLAKCGIHTVLSVIAEVPDMLRRCVSRDEAALVVAQKVFKSLYDNASNSAYVSWLLATLIAIRDVCKLVVKELTSWVIYSDEEKKFNIEIIFGLIHSKLLNLGEYNVHLTKLIDGGRNIFIHRPGSTVGNVGLQLAWGPGSPESLQQLIGIARNNVSTPTGFVVIGKEEKVLAAQVNKEESIANETTLIDPNQVAVLFSEWCQICSHVNASDAIYSRFVTQLEQDSLLNGDDISERFFHILTELAVTHSLVSEQIVAPGGSSQQSPQQPHISYFSIDSYAKLVVMVLKFFSVDFVVTMRHNCLRLSSVERVKHDICTVDDTVDTLCRVKFEIRDELGELLGIA

SEQ ID NO: 77155 - protein, 228 aa, Zea mays
  Coding DNA Sequence Number=SeqID_35376
  Homolog annotation: Hit_ID=Q94LQ9; Match level="QueryCoverage=69%, HitCoverage=7%, E-value=2e-36, Identity=50%"; Hit description =Putative transcription regulatory protein
MLLMQYRKPGSTVGNVGLQLAWGPGSPESLQQLIGIARNNVSTPTGFVVIGKEEKVLAAQVNKEESIANETTLIDPNQVAVLFSEWCQICSHVNASDAIYSRFVTQLEQDSLLNGDDISERFFHILTELAVTHSLVSEQIVAPGGSSQQSPQQPHISYFSIDSYAKLVVMVLKFFSVDFVVTMRHNCLRLSSVERVKHDICTVDDTVDTLCRVKFEIRDELGELLGIA

SEQ ID NO: 77156 - protein, 95 aa, Zea mays
  Coding DNA Sequence Number=SeqID_35377
AEMLVGGEESGVLTARLSKRPMSGEGESASPVRQCLGSSLEKLHGFTGKRSRCWGEAGGVVASLRWQCHKVESRGADLGILKNSNGKTFLLYFVG

SEQ ID NO: 77157 - protein, 136 aa, Zea mays
  Coding DNA Sequence Number=SeqID_35378
MTQRIVLPTCGDERPKSGEGESASPVRQCLGSSLEKLHGFTGKRSRGWGSTEGAGHNGRARAEMAGGGACFPRRTPVISGSGGALAELSPLPEPYNPLADPEMKEALDVMSLANSIIDEVVDKLSNEAVEKILREE

SEQ ID NO: 77158 - protein, 70 aa, Zea mays
  Coding DNA Sequence Number=SeqID_35379
MQQTRQGEGAGVADGGCAAKGKWGGGGAHGGGHACRGHGLFQASRVSFTVSSWGSSQSEEKLHYPIHAED

SEQ ID NO: 77159 - protein, 96 aa, Zea mays
  Coding DNA Sequence Number=SeqID_35380
MEQVTRGNKHDKGRGDSVVGGDGGGGCAAKGKWGGGGAHGGGNACGGHGLFQASRVSFPVSSRRGGSLETAYKLESGHQQDLHGDHRAPNATKPSR

SEQ ID NO: 77160 - protein, 236 aa, Zea mays
  Coding DNA Sequence Number=SeqID_35381
  Gene Ontology: Mol. function=threonine endopeptidase activity; Cellular component=proteasome core complex (sensu Eukaryota); Biological process=ubiquitin-dependent protein catabolic process
  Homolog annotation: Hit_ID=O81149; Match level="QueryCoverage=89%, HitCoverage=98%, E-value=1e-109, Identity=86%"; Hit description =Proteasome subunit alpha type 5-A
  Pfam annotation: Domain name=Proteasome; Domain location=52-217; Score=209.8; E_value=6.3e-60; Accession=PF00227.16; Description =Proteasome A-type and B-type
MARFDQLAARLVSDAAGIFLGLGSCRTEYDRGVNTFSPEGRLFQVEYAIEAIKLGSTAIGLKTKDGVVLAVEKRVTSPLLEPSSVEKIMEIDEHIGCAMSGLIADARTLVEHARVETQNHRFSYGEPMTVESSTQAICDLALRFGEGDEESMSRPFGVSLLIAGHDENGPSLYYTDPSGTFWQCNAKAIGSGSEGADSSLQEQYNKVTPNNVDIAKVAPKYHLYTPAEVEAVIARL

SEQ ID NO: 77161 - protein, 258 aa, Zea mays
  Coding DNA Sequence Number=SeqID_35382
  Gene Ontology: Mol. function=threonine endopeptidase activity; Cellular component=proteasome core complex (sensu Eukaryota); Biological process=ubiquitin-dependent protein catabolic process
  Homolog annotation: Hit_ID=O81149; Match level="QueryCoverage=89%, HitCoverage=98%, E-value=1e-115, Identity=89%"; Hit description =Proteasome subunit alpha type 5-A
  Pfam annotation: Domain name=Proteasome; Domain location=52-239; Score=265.7; E_value=9.6e-77; Accession=PF00227.16; Description =Proteasome A-type and B-type
MARFDQLAARLVSDAAGIFLGLGSCRTEYDRGVNTFSPEGRLFQVEYAIEAIKLGSTAIGLKTKDGVVLAVEKRVTSPLLEPSSVEKIMEIDEHIGCAMSGLIADARTLVEHARVETQNHRFSYGEPMTVESSTQAICDLALRFGEGDEESMSRPFGVSLLIAGHDENGPSLYYTDPSGTFWQCNAKAIGSGSEGADSSLQEQYNKELALEEAETIALSILKQVMEEKVTPNNVDIAKVAPKYHLYTPAEVEAVIARL

SEQ ID NO: 77162 - protein, 125 aa, Zea mays
  Coding DNA Sequence Number=SeqID_35383
  Subcellular localization annotation: CTP_CleavageSite=35; ConfidenceScore=5.51e-01
MASANVGASLSGVGDHSSTSFIEGGGLKRSSSPPSASPATPEGPASIPTGSAEMGFAPIPAVIEPPKSLGPPTVVLVQWTSDNSVGAPDHLTSSITIFFTFPKRVLPITQTLQYIGGTKMRKRLQ

SEQ ID NO: 77163 - protein, 125 aa, Zea mays
  Coding DNA Sequence Number=SeqID_35384
  Subcellular localization annotation: CTP_CleavageSite=35; ConfidenceScore=5.50e-01
MASANVGASLSGVGDHSSTSFIEGGGLKRSSSPPSASPATPEGPASIPTGSAEMGFAPIPAVIEPPKSLGPPTVVLVQWTSDNSAGAPDHLTSSISIFFTFPKRVLPITQTLQYIGGTKMRKRLQ

SEQ ID NO: 77164 - protein, 90 aa, Zea mays
  Coding DNA Sequence Number=SeqID_35385
  Subcellular localization annotation: CTP_CleavageSite=59; ConfidenceScore=5.10e-01
MASANVGGTGGGLGVASLPRELLIAFGSFIVGRRRSFINQLHRGRRPEKVQFATKCFSRYSTRSSFHPDRDPQIPDWIIATTATVFMMWG

SEQ ID NO: 77165 - protein, 478 aa, Zea mays
  Coding DNA Sequence Number=SeqID_35386
  Gene Ontology: Mol. function=methyltransferase activity; Biological process=DNA methylation
  Homolog annotation: Hit_ID=Q9M529; Match level="QueryCoverage=86%, HitCoverage=68%, E-value=0.0, Identity=99%"; Hit description =Putative DNA cytosine methyltransferase Zmet3
MRLCSQRGKNNRGRVGGVAAAGGFHLLPHVVCVIFLPSVLFEKQDDTNIELALYFMELLFFVLLKGPDASISVLVDSIYASQTAGDGYCGNLSDYEDNSYGGRSTGNKKKRKRYGGQAQGSRGPLDGSCDEPMPLPHPMVGFNLPDQWSRRVDRSLPAQAIGPPYFYYENVALAPKGVWTTISRFLYDIQPEFVDSKYFCAAARKRGYIHNLPLENRSPLLPIPPKTISEAFPRTKRWWPSWDPRRQFNCLQTCVSSAKLLERIRVALTNSSDPPPPRVQKYVLEECRKWNLAWVGLNKVAPLEPDEMEFLLGFPKDHTRGISRTERYRSLGNSFQVDTVAYHLSVLKDLFPQGMNVLSLFSGIGGAEVALHRLGIQMNTVISVEKSEVNRTILKSWWDQTQTGTLIEITDVQTLSSERIEAYIRRIGGFDLVIGGSPCNNLTGSNRHHRDGLEGEHSALFHHYFRILHAVKSIMERL

SEQ ID NO: 77166 - protein, 717 aa, Zea mays
  Coding DNA Sequence Number=SeqID_35387
  Gene Ontology: Mol. function=methyltransferase activity; Biological process=DNA methylation
  Homolog annotation: Hit_ID=Q9M529; Match level="QueryCoverage=59%, HitCoverage=70%, E-value=0.0, Identity=99%"; Hit description =Putative DNA cytosine methyltransferase Zmet3
  Pfam annotation: Domain name=DNA_methylase; Domain location=305-623; Score=-116.9; E_value=0.00047; Accession=PF00145.8; Description=C-5 cytosine-specific DNA methylase
  Pfam annotation: Domain name=Dabb; Domain location=504-593; Score =62.7; E_value=1.2e-15; Accession=PF07876.3; Description=Stress responsive AB Barrel Domain
  Pfam annotation: Domain name=Dabb; Domain location=613-709; Score =52.9; E_value=1.1e-12; Accession=PF07876.3; Description=Stress responsive AB Barrel Domain
  Pfam module annotation: Pfam domain module=DNA_methylase::Dabb::Dabb; Domain location=305-623::504-593::613-709
MGFPEDEAALAITRCGPDASISVLVDSIYASQTAGDGYCGNLSDYEDNSYGGRSTGNKKKRKRYGGQAQGSRGPLDGSCDEPMPLPHPMVGFNLPDQWSRRVDRSLPAQAIGPPYFYYENVALAPKGVWTTISRFLYDIQPEFVDSKYFCAAARKRGYIHNLPLENRSPLLPIPPKTISEAFPRTKRWWPSWDPRRQFNCLQTCVSSAKLLERIRVALTNSSDPPPPRVQKYVLEECRKWNLAWVGLNKVAPLEPDEMEFLLGFPKDHTRGISRTERYRSLGNSFQVDTVAYHLSVLKDLFPQGMNVLSLFSGIGGAEVALHRLGIQMNTVISVEKSEVNRTILKSWWDQTQTGTLIEITDVQTLSSERIEAYIRRIGGFDLVIGGSPCNNLTGSNRHHRDGLEGEHSALFHHYFRILHAVKSIMERSGIIVGMSVPASAQVPHTIRSAGSCCFRSSHQLSAQNLGRHRRWRGTGKKKILSTRGVLESRNGAHPGGLMKRRKVVEHIILLRAKPNISDAEEKDMLDYLYTSQYQMRGILAVSLGRIEDPNSDNFTHAVFMRFQQKQDIAEFQSNAYYSKVVDEHGSVSVDFESEVEDDIIPLFRRGEDFNYGVEFMLLVSFLKTASREATEDALASLDKLISQCSASIVQATCGCCLDRPDNGYSHAAVIRFPSSDELKLFRESEEYKDMWASKFRPIVERSLHLHFTVDPVGNQLM

SEQ ID NO: 77167 - protein, 774 aa, Zea mays
  Coding DNA Sequence Number=SeqID_35388
  Gene Ontology: Mol. function=mannosyl-oligosaccharide 1,2-alpha -mannosidase activity; Cellular component=membrane; Biological process=transport
  Homolog annotation: Hit_ID=Q10QV1; Match level="QueryCoverage=95%, HitCoverage=99%, E-value=0.0, Identity=74%"; Hit description=SacIy domain containing protein, expressed
  Pfam annotation: Domain name=Syja_N; Domain location=52-348; Score =298.9; E_value=9.2e-87; Accession=PF02383.9; Description=SacI homology domain
MTGGKFLQKFRLYETRSKFYLIGRDKSRIHWRVLKIDRLESTELGVDEDPTIYTESFVKFLGPYYMVIITSRRKIGTICGHEIYSVGKSEMIAISSVTVWPNVAYSRDENRYKRLLCSVDLSKDFFFSYSYNIMRSLQKNITQKNTGQAVYEPMCVWNEFLTRAIRNHLKNTCWTVALVHGFFKQSKLSVSGKDFWLTLIARRSRHFAGTRFLKRGVNEKGRVANDVETEQIVFEDTSDGIPTQMASAVQHRGSIPLVWFQETSRLNIRPDIILKPDVDYKATRLHFENLALRYGNPTREKKPRESLLRAEFAKAIHYINKSLPDDKRLKFLHMDLSKLSRRKGTNVLALLTKVASDVLDLTEFLHCEISTSTKPDDTSSGERTAAKPHDDRSSSDQTECAAKLAPLLLQKGVLRTNCIDCLDRTNVAQFAYGLAALGRQLHALGLTEAQKIELHDPLADDLMDFYEWMGDTLAIQYGGSAAHNKIFCEQRGQWKAATQSQEFLRTIQRYYNNAYTDHDKQDAINMFLGHFQPQQGKPALWKLDSDQHYNIGRQGTLKEEIGRSFIKRSLSDGNILLENNLPVTSCNNETNNTELLPMQQLDDIREPTDSAPEISICEPNPCSSVNYGRVPGRHSISEERQSYLKRLGYPELHSSNFLDLDLLSSSGNSCDEEVFERSSLINSPMDVVSVESSTSYSEQGHTDEGRDDMDLSRSSSQVSDVRDYSDRFAHWVADGGMLWKWMRADDMARCRDGGRGKSLASIMEEIKLQKYLNL

SEQ ID NO: 77168 - protein, 364 aa, Zea mays
  Coding DNA Sequence Number=SeqID_35389
  Homolog annotation: Hit_ID=Q1EPC6; Match level="QueryCoverage=24%, HitCoverage=5%, E-value=6e-08, Identity=39%"; Hit description=DNA helicase homolog, putative
MGTLLVMDQIGYNVGRTPFTDISNTIITGNQNESNSLGPIVDAKECKRQRDRERYAMTVEEKNEKNRQRREARQRNKGLSIEPLSSRAFCKWVIYEEDVNTDQACEVVSFPDDCSTIDFTNLSTQDIAGGDEQVNLDAYDDNDWLHRNETFQANNIVTSKDLLTPGCMHETVDNIPKHTMKRVAYFSERYKNMTPVERESRRVRLRLYNKTPRRKDANKECSRKRRALQGDTLNQESIAMEDPVYTPEVVHPTTYEIEPYGSLVTTCDWVIPEFVVTPFLPTSTQTKDVGSLDMSTEPLRRRHHVLSGTRLATLGRRNQEFEDGIGRNVATVTEDTICDAMEGDDWTQPHPTAEIHTNGNYNQF

SEQ ID NO: 77169 - protein, 371 aa, Zea mays
  Coding DNA Sequence Number=SeqID_35390
  Gene Ontology: Mol. function=helicase activity
  Homolog annotation: Hit_ID=Q1EPC6; Match level="QueryCoverage=87%, HitCoverage=26%, E-value=6e-56, Identity=58%"; Hit description=DNA helicase homolog, putative
MTPVERESRRVRLRLYNKTPRRKDANKECSRKRRALQGDTLNQESIAMEDPVYTPEVVHPTTYEIEPYGSLVTTCDWVIPEFVVTPFLPTSTQTKDVGSLDMSTEPLRRRHHVLSGTRLATLGRRNQEFEDGIGRNVATVTEDTICDAMEGDDWTQPHPTAEIHTNGDDDEGVIFEEDEDDDENDGYLFGGQYDETDEDIEIDGTQNESIATGLPDPYDKVYSNMPEETHMLKYFNGHFSFTSLYCCLDSMTTNVRDSGIYMFRAQCMMYHNIKSFGREGGAEHKHLELYFYDDDPNLEHRYRKCREECQQKDKDVIKQLVGILHGNPYSEHLRSMGHVENLDDYRITLNLDQTLNQKTYNTPLTSEVAAV

SEQ ID NO: 77170 - protein, 333 aa, Zea mays
  Coding DNA Sequence Number=SeqID_35391
  Gene Ontology: Mol. function=helicase activity; Biological process =viral genome replication
  Homolog annotation: Hit_ID=Q1EPC6; Match level="QueryCoverage=99%, HitCoverage=21%, E-value=1e-119, Identity=62%"; Hit description=DNA helicase homolog, putative
MRDASKADDDVDEIKQYRDSRWVTPLEALWRIYGFELSQNSPPVMQLQLHLPNMHMVAFHERQMVERVVNRPGADKSMLTAYFEANRLHEEAQGILYRDFLEWKRDTGGQVGRIVSAHPYEGERYYLRVLLNHVTGATSYVDLRTIDGVTLLTFREAAERRGLLESDNTLDDCLTERALFQMPSTLRRLFATILVYCEPSDVAVLWRKHLDAMSEDYQRRSQSKTHVEQMVLIDIRNMLQSMGKDIKTFPLPPIIDTYGDAIGTAREVYEEESIELASADVVLKDSLNEEQMAAYDKIMSTVNTDQGGLFFVDGPGGTGKTYLYRVLLATLRN

SEQ ID NO: 77171 - protein, 173 aa, Zea mays
  Coding DNA Sequence Number=SeqID_35392
  Gene Ontology: Mol. function=helicase activity; Biological process =protein amino acid phosphorylation
  Homolog annotation: Hit_ID=Q1EPC6; Match level="QueryCoverage=83%, HitCoverage=9%, E-value=3e-47, Identity=64%"; Hit description=DNA helicase homolog, putative
MRDASKADDDVDEIKQYRDSRCHRFYDWLFATILVYCEPSDVAVLWRKHLDAMSEDYQRRSQSKTHVEQMVLIDIRNMLQSMGKDIKTFPLPPIIDTYGDAIGTAREVYEEESIELASADVVLKDSLNEEQMAAYDKIMSTVNTDQGGLFFVDGPGGTGKTYLYRVLLATLRN

SEQ ID NO: 77172 - protein, 249 aa, Zea mays
  Coding DNA Sequence Number=SeqID_35393
  Gene Ontology: Mol. function=hydrolase activity; Biological process =cell redox homeostasis
  Homolog annotation: Hit_ID=Q10SE7; Match level="QueryCoverage=64%, HitCoverage=55%, E-value=2e-74, Identity=85%"; Hit description=Beta -carotene hydroxylase, putative, expressed
  Pfam annotation: Domain name=Carotene_hydrox; Domain location=48-208; Score=316.7; E_value=4.2e-92; Accession=PF03897.5; Description =Carotene hydroxylase
MEVRYVVNTKGGASRRVAPVRVCPFPLMGRFCAVLGQGGGAIPVTEMVGTFALSVGAAVGMEFWARWAHRALWHASLWHMHESHHRARDDGPFELNDVFAIVNAVPAMSLLAYGFFNRGLVPGLCFGAGLGITLFGMAYMFVHDGLVHRRFPVGPIENVPYFRRVAAAHQIHHMDKFQGVPYGLFLGPKELKEVGGTEELEKEIKRRIRRREALDAHPNKDLLDIAIHTVLWLLNPTCVLAFPFFFYVA

SEQ ID NO: 77173 - protein, 293 aa, Zea mays
  Coding DNA Sequence Number=SeqID_35394
  Gene Ontology: Mol. function=hydrolase activity; Biological process =cell redox homeostasis
  Homolog annotation: Hit_ID=Q10SE7; Match level="QueryCoverage=73%, HitCoverage=75%, E-value=1e-104, Identity=86%"; Hit description=Beta- carotene hydroxylase, putative, expressed
  Pfam annotation: Domain name=Carotene_hydrox; Domain location=123 -283; Score=308.9; E_value=9e-90; Accession=PF03897.5; Description =Carotene hydroxylase
  Subcellular localization annotation: CTP_CleavageSite=73; ConfidenceScore=5.47e-01
MAVARLVSAPFPLAPLRVRAPRPALPPGAHAGPRPPVLALAPPAASAAPRRAVPARAAPEDGGRGDAAAAAARAARKQSERRTYLVAAVMSSLGITSMAAAAVYYRFAWQMEGGGAIPVTEMVGTFALSVGAAVGMEFWARWAPRALWHASLWHMHESHHRARDDGPFELNDVFAIVNAVPAMSLLAYGFFNRGLVPGLCFGAGLGITLFGMAYMFVHDGLVHRRFPVGPIENVPYFRRVAAAHQIHHMDKFQGVPYGLFLGPKELKEVGGTEELEKEIKRRIRRREALDATQ

SEQ ID NO: 77174 - protein, 173 aa, Zea mays
  Coding DNA Sequence Number=SeqID_35395
MEVVVALLVQWSLASHLEFVIPQAFRSGQPLRVLPTSESRYHCYPKITYPSVSYLSRKVTSESKGTKVVLAKNFFEESFGTEGASPSLDPRRPLGPVPLRRFWPWSAGLSGLPEAWPHSSVPRPRVCFARSVTFLLSPFFTLRLKKVVLPSVGFETALDEAVKNCKALAEAAE

SEQ ID NO: 77175 - protein, 194 aa, Zea mays
  Coding DNA Sequence Number=SeqID_35396
MGCTYVALFLLLFEECDPVGVGALQSPLGFKDFHHAARLQSLTNGHPMFIIRAGEGGTELGLASAWAGDPLLPPAFGGEGHPPAVRRRRPPAIRGKVNCCCLARVQLSVLPQGDGRAVRRRLLSPVLKRRPPLERLPTAVVVASADETVGATCAWGLRLFGFNGWFSSLPPETEVIVALLVQWSLASHLEFVIP

SEQ ID NO: 77176 - protein, 73 aa, Zea mays
  Coding DNA Sequence Number=SeqID_35397
MPVSLIVQQALIGDGCGEGRVEEMTHGVHLRNLTGILPHLKRMRVELLKSWGFELLEVPHNKGVTGPSAAVAA

SEQ ID NO: 77177 - protein, 131 aa, Zea mays
  Coding DNA Sequence Number=SeqID_35398
MAHQEADDVEAAARTHSIMEERGSADRGSREREQSLLAFRGLTVWGMQDRLGEGCWMSRSECVPWRVGGVVLQGLRREAKQRGGDAGFSDRAASTNWRRLWRGKSGGNDTWGPPVRMREGGEMRALVREIG

SEQ ID NO: 77178 - protein, 188 aa, Zea mays
  Coding DNA Sequence Number=SeqID_35399
MTEDPLTGHMPRHGIHFSKHFCKTESLIIEKPYLDSLNQHTLESLFFSRGCLRNDLWVADAAIRYLQDQLAKRDLTLDWAVNSRPFAWAKEAKARAHVEELSSAMDNLQVYYNTLHEEVHVLYSQLHPNVPADPVGMEAGPSRVAGEALDGELDLFRPPPSMKLVDEWSSPPDSKATKSEKKWLIKCL

SEQ ID NO: 77179 - protein, 155 aa, Zea mays
  Coding DNA Sequence Number=SeqID_35400
MAKVGGMFSKIKLDGESVKGLDRFNIGKDVPLPGLMIEDPLTGHMPRHGIHFSKHFCKTESLIIEKPYLDSHITSIPLRVFSLVGYLRTQVGITVDQNNTKVDTAPKVNSTPVLFTLILAFTFASRLYFHLLQVEGTPFITFVQKPLYPKGNNAS

SEQ ID NO: 77180 - protein, 174 aa, Zea mays
  Coding DNA Sequence Number=SeqID_35401
MAENEEEIEVTEEKTPPPSDSQADNCFYFDICGSEQASPGFTMLSIALEKQKDLFYKRCLAKVGGMFSKIKLDGESVKGLDGFNIGKDVPLPESLIIEKPYLDSLNQHTLESLFFSRVRKRQIFVASAPRWFPRKKNKSEAAGGLGPPYRTFVKELIGRSFYLPWYCNNITLHS

SEQ ID NO: 77181 - protein, 267 aa, Zea mays
  Coding DNA Sequence Number=SeqID_35402
  Gene Ontology: Mol. function=pyridoxal phosphate binding; Biological process=carboxylic acid metabolic process
  Homolog annotation: Hit_ID=Q9C509; Match level="QueryCoverage=43%, HitCoverage=21%, E-value=2e-38, Identity=70%"; Hit description =Sphingosine-1-phosphate lyase
MEGETSSEVVLLDEDDDLDAVVCESPELLDEPDVPQVLIDDGCCFVLTDEDIQLVGAAFPKETARYPIPPFDFSVKGVTSISSDVHKYGLAPKGTSIVLYRNHEIRKHQFVAVTEWTGGLYVSPTIAGSRPGGLIAGAWAAMMSLGLNGDKLILKFHHMTTEEQKTLKGTESSAPSVPPDGGVSKEPKKGGDYPMGEFLSAYWNHSSGFTICIFRLNSYTCLFISGFRRATGPACRSSKGNWTLEEDDILRKAVETYKGQNWKKIVR

SEQ ID NO: 77182 - protein, 505 aa, Zea mays
  Coding DNA Sequence Number=SeqID_35403
  Homolog annotation: Hit_ID=UPI00004C1732; Match level="QueryCoverage =33%, HitCoverage=11%, E-value=1e-91, Identity=93%"; Hit description =UPI00004C1732 related cluster
  Pfam annotation: Domain name=Myb_DNA-binding; Domain location=239 -284; Score=25.0; E_value=0.00026; Accession=PF00249.21; Description =Myb-like DNA-binding domain
MEGETSSEVVLLDEDDDLDAVVCESPELLDEPDVPQVLIDDGCCFVLTDEDIQLVGAAFPKETARYPIPPFDFSVKGVTSISSDVHKYGLAPKGTSIVLYRNHEIRKHQFVAVTEWTGGLYVSPTIAGSRPGGLIAGAWAAMMSLGLNGDKLILKFHHMTTEEQKTLKGTESSAPSVPPDGGVSKEPKKGGDYPMGEFLSAYWNHSSGFTICIFRLNSYTCLFISGFRRATGPACRSSKGNWTLEEDDILRKAVETYKGQNWKKIVLADPRRVKNVGTHVLKVKNEGIIELIVQSADLGRTHKFDGPVELTSISSSKNRRRLYSSVNPRSYVSCSGLGVLHALHVAFERVFVRGADGDDPVGARHLELEVGVVGDGQELHVTWPSQYRVVGSSEPDHLERQGLPSEVGGCSEADEKIELSEGLDALPGDDPMERRSARPDRGQIDTQKPEGLGVDDVEATASVHEDLGEPDVADDGVDDERVFPRARHMVGVVGLVEGDGLVGPV

SEQ ID NO: 77183 - protein, 93 aa, Zea mays
  Coding DNA Sequence Number=SeqID_35404
MEDAMSEQQEKFREQLRQQQMTFLQHQSEYMVAYNAQAQQAMNGSGVMGHNTPPPVIPAPGGAYAGNPNPLHDFVNEFFASGGSGHNSNDPDM

SEQ ID NO: 77184 - protein, 85 aa, Zea mays
  Coding DNA Sequence Number=SeqID_35405
MEDAMSEQQEKFREQLRQQQMTFLQHQSEYMVAYNAQAQQAMNGSGVMGHNTPPPVIPAPGGAYAGNPNPLHDFVNEFFASGDYL

SEQ ID NO: 77185 - protein, 132 aa, Zea mays
  Coding DNA Sequence Number=SeqID_35406
MLTQIDPPHLVGYNSTIIRDVFIKNTSDMSLKITLWGNQASNFSISDVYNQSNNQSIVILLVGFLAKRFKGQPYLSGTTTSSWYFNPGIPEAQTYRNGQKATNALLLSHALCKNSKWWYPPLLQIQAQLHCY

SEQ ID NO: 77186 - protein, 372 aa, Zea mays
  Coding DNA Sequence Number=SeqID_35407
  Gene Ontology: Mol. function=helicase activity
  Homolog annotation: Hit_ID=Q5NA16; Match level="QueryCoverage=70%, HitCoverage=56%, E-value=9e-36, Identity=31%"; Hit description =Helicase-like protein
  Pfam annotation: Domain name=Rep_fac-A_C; Domain location=145-265; Score=-70.1; E_value=0.093; Accession=PF08646.1; Description =Replication factor-A C terminal domai
MLTQIDPPHLVGYNSTIIRDVFIKNTSDMSLKITLWGNQASNFSISDVYNQSNNQSIVILLVGFLAKRFKGQPYLSGTTTSSWYFNPGIPEAQTYRNGLQNNDLQLIQPTTAEEEIQLSQPPNLEHKTVEELLNIDPDMFPPEGYKCTVTISRIVQNSKWWYPPCSRCHKSSSQTSTGYHYTSCGCTNINFRYKLSFIATDGTCEEELFCFDNIARKIVGKPCDNLVIAVTTSQGPTAALATIMCLKFTLAVSINMSAYSVTNRVFFIMSILTNHGRQTFIPSNMPSHPQQELHTQDEIPSLPTTQDSPATSMVKLSTCSNERNEGDDQRISELNNQELSSPPKRINIATLAKAYQILQTPKRKPPRSSSTS

SEQ ID NO: 77187 - protein, 242 aa, Zea mays
  Coding DNA Sequence Number=SeqID_35408
  Homolog annotation: Hit_ID=Q65FE5; Match level="QueryCoverage=28%, HitCoverage=43%, E-value=4e-15, Identity=58%"; Hit description=YuiD
  Pfam annotation: Domain name=DUF212; Domain location=135-242; Score =50.0; E_value=8.1e-12; Accession=PF02681.5; Description=Divergent PAP2 family
  Subcellular localization annotation: CTP_CleavageSite=63; ConfidenceScore=5.55e-01
VPQPMSVSRAKHSRATENAPRRQTSPAPPRVVKRGGISVHGRVGINPSPIATARSAAQRCGAEAMEAQPPFPPPMPAAPSPSLARLLAAALRGGRAGRELPDLAAATTGGAGIGTLLMSTTAAAVTKARESPYLLALAANPTFVSGLLAWAAAQAAKALLTSVVERRWDLRMLFSSGGMPSSHTALCTALTASVALCHGVSDALFPVCLGFTLIVMYDATGVRRHAGMQAESEENRFDTLPP

SEQ ID NO: 77188 - protein, 331 aa, Zea mays
  Coding DNA Sequence Number=SeqID_35409
  Homolog annotation: Hit_ID=Q65FE5; Match level="QueryCoverage=20%, HitCoverage=43%, E-value=7e-15, Identity=58%"; Hit description=YuiD
  Pfam annotation: Domain name=DUF212; Domain location=176-312; Score =67.9; E_value=3.3e-17; Accession=PF02681.5; Description=Divergent PAP2 family
  Subcellular localization annotation: CTP_CleavageSite=65; ConfidenceScore=5.41e-01
MAPPHISQSIIGPLRRATENAPRRQTSPAPPRVVKRGGISVHGRVGINPSPIATARSAAQRCGAEAMEVLSSSRFARALLLPTILYPVSRHLSTPPCRRHAVHTLASGSAPVPAADAAAPSPSLARLLAAALRGGRAGRELPDLAAATTGGAGIGTLLMSTTAAAVTKARESPYLLALAANPTFVSGLLAWAAAQAAKALLTSVVERRWDLRMLFSSGGMPSSHTALCTALTASVALCHGVSDALFPVCLGFTLIVMYDATGVRRHAGMQAESEENRFDTLQQSVILIPLKSEGNGYGRRKIAGGAWISLPEGTPSGRRDPRSCLGSGRPT

SEQ ID NO: 77189 - protein, 289 aa, Zea mays
  Coding DNA Sequence Number=SeqID_35410
SPTSIFSMSNDREVKILEKPRLSSVWHTGLSGGAPDSVRCARLNSGEQAALGRSLATSEQMEEGVETDSKPRIFLRQELQFRFNLLEGFFTPLRSSLRVEGAYFAIMSSDSDLFVDAHDLWTKLKLKFFKSICTSSTPFIAGDTNLSKGEEQERLQPNDESTSSTGLSSTSNKCLIANNNGGDKSDDEEEYEDEESTSSQGTFSCFVSTDNNDRENETDDVEEEEIRHFYIHLNKEDKALLVKLLRMNKEQGETLLRLEESLIKTNNSLEKMTKEHEKLKYSHGNLVPM

SEQ ID NO: 77190 - protein, 132 aa, Zea mays
  Coding DNA Sequence Number=SeqID_35411
MEARRASRYQVHRRKSTRLRNPKPRKQRKEEKKRDAKGLTVYNQDSAQSGTPDCPVVHRTVPGGAPDSVRCARLNSSEQAALGRSLATYSYNSPDCPEIWHRTVSGGAPDCPVRHPTEGKDFALPGFASNGS

SEQ ID NO: 77191 - protein, 450 aa, Zea mays
  Coding DNA Sequence Number=SeqID_35412
  Homolog annotation: Hit_ID=Q7FS86; Match level="QueryCoverage=12%, HitCoverage=65%, E-value=4e-18, Identity=84%"; Hit description =Putative response regulator
MSSDSDLFVDAHDLWNRIKEKYSVANCDAPTPYITCDTNHSKGEEQERWHPNDESTSSTGLFSTNDKCFIANNDGGDESHDEEEYEDDSEDESSSSQGTFSYIASTDINDRENETDDMEEEEIRRFYNHLNKADKALLVKLLRRNKEQGETLLRLEETLIKTNDSLEKMTKEHEELKYSHGNLVQRSETTDQAKDGGKKSFEVPSAREKVKVAEEPKAKGEEEDLQSQGSRQADLMIYESNIKAQSMSNAKEVKVKRSQSSAQSGTPDYPVVHRTVTGGAPDSVRCARLNSAAAAVPSGVRAPVILGASSGVAPDAGDQRRRSTRNERQRRSRGGRASGDGVLEADGRRQRTLGPMATPFVPSVSAMATAAAAPASMAPFPAPKANNTRKAVVPGMIGYELLKRFKESAALRDILVVIMSSENVPTRITHCLEEFDPRLTVIYALFVVTK

SEQ ID NO: 77192 - protein, 116 aa, Zea mays
  Coding DNA Sequence Number=SeqID_35413
MPGKANCCCPARMQHSVLCPRFHGEDESEDLPVRFGAACACWCGVEVVAAGEGFSADEIANSACTPRPPSPDLNGWFSSFVGESPSTAASARKPLLQLFRRSGRRFLSLLPKRAAH

SEQ ID NO: 77193 - protein, 284 aa, Zea mays
  Coding DNA Sequence Number=SeqID_35414
  Subcellular localization annotation: CTP_CleavageSite=10; ConfidenceScore=5.38e-01
MSSRSPHASRLSTFRAPRWGAPAVLPPYRRWGNATSQKLVPFSHCSASRIFIRQPGCIPSPVVTQDGDHQFDGGEKQTGLRPLPLPQLQGSSSSLLGRRARRAGALPPARVDRPPLLPASGGGNHPPALWRGRPPTMPGKANCCCPARMQHSVLCPRFHGEDESEDLPVRFGAACACWCGVEVVAAGEGFSADEIANSACTPRPPSPDLNGWFSSFVGESPSTAASARKPLLQLFRRSGRRFLSLLPKRAAVSHVEPCRPAGPPMWGVVRTRGGGTGVPFVMAP

SEQ ID NO: 77194 - protein, 54 aa, Zea mays
  Coding DNA Sequence Number=SeqID_35415
MEDLLERFLLNALRLDKHGHIIGTEYLSDLVEKEHGAHHDHGILFFLQGQKSIK

SEQ ID NO: 77195 - protein, 385 aa, Zea mays
  Coding DNA Sequence Number=SeqID_35416
  Gene Ontology: Mol. function=protein binding; Cellular component =endoplasmic reticulum; Biological process=ER to Golgi vesicle -mediated transport
  Homolog annotation: Hit_ID=Q9Y282; Match level="QueryCoverage=64%, HitCoverage=73%, E-value=1e-34, Identity=34%"; Hit description =Endoplasmic reticulum-Golgi intermediate compartment protein 3
  Pfam annotation: Domain name=DUF1692; Domain location=145-273; Score =53.8; E_value=5.9e-13; Accession=PF07970.2; Description=Protein of unknown function (DUF1692)
MARIPSLKSLNAFPHAEEHLLKKTYSGAVVTIFGLLIMITLFVHELQFYLTTYTVHQMSVDLKRGETLPIHINMSFPSLPCEVLSVDAIDMSGKHEVDLHTNIWKLRLDKYGHIIGTEYLSDLVEKGHGAHHDHDHDHDHHDEQKKHEQTFNEEAEKMIKSVKQALGNGEGCRVYGMLDVQRVAGNFHISVHGLNIFVAEKIFEGSNHVNVSHVIHELSFGPKYPGIHNPLDETSRILHDTSGTFKYYIKSQRRDGANVAAGVETVVCSKKTIAPRCRGSRRRGGRGRKTRNKSLIFGRGRRSSVNDRQGDTAKGHRQADLSTSSIIRASTSPAREADGSARVCAGHGVRARGRKDGESVDPAGKATTATNPAMKTTIRPKGWRI

SEQ ID NO: 77196 - protein, 103 aa, Zea mays
  Coding DNA Sequence Number=SeqID_35417
MSGVHRTVRCNGTATATSALTVTCSDIKCVPERAEGRHARDGAPDTLQYMSGAPPDTPKLKSKVEMQTLVDNVSIFTERVAGLLHAQVVLRFRLLSDALRRLH

SEQ ID NO: 77197 - protein, 102 aa, Zea mays
  Coding DNA Sequence Number=SeqID_35418
MGLLHAQVVLRFRLLSDALRRLHYRASGRNAAGLVPSENGYNGFSPSALDYGAQRGVHGSNRELHARCRCGSESSASLVIDLTGGVHMTAAVAKLERGPKRQ

SEQ ID NO: 77198 - protein, 58 aa, Zea mays
  Coding DNA Sequence Number=SeqID_35419
MDGACCQEPWEGEVPAFEQMRGEDGMGGAKKRAGAAIYRAKLWTCQLVAAGGRFYNFY

SEQ ID NO: 77199 - protein, 162 aa, Zea mays
  Coding DNA Sequence Number=SeqID_35420
MQYNESSSLISCEKQTIRIEFLSLQVTALVPTITGMGDHVSGRVRGYVCGQVQSGLRAPWPWKGILAAAMGEKKRGMAPQQRTKESPSRGGEMAWGKRRERARAAIYRAKLSTCQLVAAGGRCYSDIFGRRVLAVSAWNRILVPAQNIFLDLYSTIVVQDLR

SEQ ID NO: 77200 - protein, 51 aa, Zea mays
  Coding DNA Sequence Number=SeqID_35421
MAVGALQKGAWVAVVRYKGGVGWWGSALILTLVPGFKGKLPGIFLGKVLLS

SEQ ID NO: 77201 - protein, 60 aa, Zea mays
  Coding DNA Sequence Number=SeqID_35422
MAVGALQMGAWVVVVRCKGGVGGGSAHGGGHACEGHGLFQASRVSFPVSSWVRCFSLEMG

SEQ ID NO: 77202 - protein, 37 aa, Zea mays
  Coding DNA Sequence Number=SeqID_35423
MAVVGALQREASRVSFPVSSWARCFSLEMGQDENGSI

SEQ ID NO: 77203 - protein, 372 aa, Zea mays
  Coding DNA Sequence Number=SeqID_35424
  Gene Ontology: Mol. function=helicase activity; Biological process =RNA-dependent DNA replication
  Homolog annotation: Hit_ID=Q5NA16; Match level="QueryCoverage=67%, HitCoverage=53%, E-value=7e-40, Identity=35%"; Hit description =Helicase-like protein
  Pfam annotation: Domain name=Rep_fac-A_C; Domain location=117-237; Score=-60.0; E_value=0.017; Accession=PF08646.1; Description =Replication factor-A C terminal domai
  Subcellular localization annotation: CTP_CleavageSite=48; ConfidenceScore=5.12e-01
MSLKITLWGNQASNFSISDVYNQSSNQPIVILLVGFLAKRFKGQPYLSGTTASSWYFNPGIPEAQTYYSRLQNNDLQLIQPTAAEEEIQVSQPPNLEHKTVEELLDIDPDMFPPEGYRCTVTISRIVQNSKWWYPSCSRCHKSSSQTSTGYHCTSCGCTDINFRYKLSFIATDGTCEAEFFCFDSIARKIVGKPCDNLVTAVTTSQGPPAALAAIVCLKFTLAVAINMSAYSVTNRVFSILSILTNHGRQSFIPSNMPSHPQQELHTQDEIPSLPTTQDSPATSMAKLSTCSNKKNEPIINISFLHAYNLMKSIQQARRILIYSDMPHDTEGDDQHISEVNNQELSSPPKRIKHSHTNKGAPDLTDPKKKSS

SEQ ID NO: 77204 - protein, 329 aa, Zea mays
  Coding DNA Sequence Number=SeqID_35425
  Gene Ontology: Mol. function=helicase activity
  Homolog annotation: Hit_ID=Q5NA16; Match level="QueryCoverage=62%, HitCoverage=44%, E-value=2e-33, Identity=38%"; Hit description =Helicase-like protein
  Pfam annotation: Domain name=Rep_fac-A_C; Domain location=74-194; Score=-60.0; E_value=0.017; Accession=PF08646.1; Description =Replication factor-A C terminal domai
QPYLSGTTASSWYFNPGIPEAQTYYSRLQNNDLQLIQPTAAEEEIQVSQPPNLEHKTVEELLDIDPDMFPPEGYRCTVTISRIVQNSKWWYPSCSRCHKSSSQTSTGYHCTSCGCTDINFRYKLSFIATDGTCEAEFFCFDSIARKIVGKPCDNLVTAVTTSQGPPAALAAIVCLKFTLAVAINMSAYSVTNRVFSILSILTNHGRQSFIPSNMPSHPQQELHTQDEIPSLPTTQDSPATSMAKLSTCSNKKNEPIINISFLHAYNLMKSIQQARRILIYSDMPHDTEGDDQHISEVNNQELSSPPKRIKHSHTNKGAPDLTDPKKKSS

SEQ ID NO: 77205 - protein, 221 aa, Zea mays
  Coding DNA Sequence Number=SeqID_35426
MASSFLSFLAEKLHPSVDEAWCPFQLLHYSRHVDASLCSYSSKAPWDFSSRALPLSYLKQDEGQVTPSTKSRRYLQNCATSKAEYTNTQLDLPGYNGSSSLISCEKQTIRIEFLNLARPHRLGIQCSTDPGRRREVAALVPTISRMGDPVSGRVRDKVRARLHSGIRTLILIPILSHRQRIPMDPCPQTIIILLSKWIQPIPDLARVLEKSLDFYRDPDLA

SEQ ID NO: 77206 - protein, 75 aa, Zea mays
  Coding DNA Sequence Number=SeqID_35427
MDKDTVGGPNDLGGSVTSLRTSEGQRIPMDPCPQTIIILLSKWIQPIPDLARVLEKSLDFYRDPDLAWQLLDLAY

SEQ ID NO: 77207 - protein, 189 aa, Zea mays
  Coding DNA Sequence Number=SeqID_35428
MTRGNASHARRRGHGDCDIAAVHDIELHSGISSNTHEAPTLRGCGGNSAARSCAIEGWTCFSRSGGGGGVHWTGQNSEPTEHGVATTAAGGMPVCYGGRLVSMGGGAQSCCTGRKGAELLACRERALGGRRALGGGVRALGAGEQGARNGCAGEGRCPWEGAASLEEWSSAAMEVTGGSACAAGDSRLE

SEQ ID NO: 77208 - protein, 164 aa, Zea mays
  Coding DNA Sequence Number=SeqID_35429
MGEKRRRRHGQQGESIGWELFYAMNMEATPGKISRAPTTRAEGEEGRWEVGCAPLEQGSRELGNGAHGNSGYQGRPSEMGRRAPRAGAGRPWKGGSSPTPWRRARRHGCLEERARRRQGWRPRSSCALAAVAVEQGGRRLLAAEGNGGVGVQNCPSAREEGPYL

SEQ ID NO: 77209 - protein, 120 aa, Zea mays
  Coding DNA Sequence Number=SeqID_35430
  Subcellular localization annotation: CTP_CleavageSite=89; ConfidenceScore=5.16e-01
MNKNTKDTRFILRFGHTTKMPYFLVEAPTKSRVSFNPNPPFANHKGQAHTLIFAQTSGSKVRGVRDQLNCPSGPVQLVLTREFRRENPSSTARRQVQLVYGQRGSQLKLSLAGVEKAQLS

SEQ ID NO: 77210 - protein, 77 aa, Zea mays
  Coding DNA Sequence Number=SeqID_35431
MNKNTRDTRFIPRFGHTTKVPYFLVEAPTKSWVSFNRNPPFADHKGQERKPQLNCPEASSAGVWSKRFTAEVEFSWS

SEQ ID NO: 77211 - protein, 235 aa, Zea mays
  Coding DNA Sequence Number=SeqID_35432
MTLEPHPLQPGWHSLDSESFGYSAEDTIEAIALHGLTTFCGFHPLELSTHPIGLFPAEKEDDPMWKDRVEHAKDVWALYPGQTAHLTVRCMNALYRLQAVRGEAMSQLMGLVEATKITLDNREDLVVDLSTELVEKDLQVEQMATQIQELEEQIGARENTIEVLEDQLLNTQQQLGEANQHLDMHHLEIQDMEAEGADEDVDIEGGEEPKPAFSLDTAGSGRPPSPESSVASFAH

SEQ ID NO: 77212 - protein, 124 aa, Zea mays
  Coding DNA Sequence Number=SeqID_35433
MWKDRVEHAKDVWALYPGQTAHLTVRCMNAMYRLQAMRGEAMSQLMGLVEATKITLDNREDLVVDLSTELVEKDLQEIQDMEAEGAEEDVDIEGGEESEPASSLDTAGSGRPPSPESSVASFAH

SEQ ID NO: 77213 - protein, 190 aa, Zea mays
  Coding DNA Sequence Number=SeqID_35434
MAQCSALTILFGKPYTSRELPPLVRYRIWLMMTSPTPINGRDTRFSFDYLSHEGFPSIYVGGALLRRLPYTPSVYCAAIRGASGATLQVWLTLESHPLQPGWRSLDSETVGFRADDTTEPTALKALTTFCEYHPLEMMMHPLGLFPAEKRDDLMWCNRVSHVKDVWAMHPDQVGRITVQCMSALYRRQAL

SEQ ID NO: 77214 - protein, 85 aa, Zea mays
  Coding DNA Sequence Number=SeqID_35435
MAFTLAAEGTDHVEGVTYPMWCNRVSHKKDVHPDQVGRITVQCMSALYRRQALQSYAIAHLTNLAQTTKITLDDREDFVVDLSSE

SEQ ID NO: 77215 - protein, 409 aa, Zea mays
  Coding DNA Sequence Number=SeqID_35436
  Gene Ontology: Mol. function=kinase activity; Cellular component =mitochondrion; Biological process=protein amino acid phosphorylation
  Homolog annotation: Hit_ID=Q2HTV1; Match level="QueryCoverage=50%, HitCoverage=33%, E-value=1e-81, Identity=70%"; Hit description =Protein kinase-like
  Pfam annotation: Domain name=ABC1; Domain location=111-234; Score =116.2; E_value=9.5e-32; Accession=PF03109.7; Description=ABC1 family
MECASGAGPGGRGGRAARGAADPEPGEQPQPGEQPGGARWQDASQLAWKRLVALGSRAPKAYSIISKVACAIGLAVSRSNIAPYLVTFIVGELHTKAPAHSFTYTKKTVEKAFGQKLSDIFEEDPVASGSVAQVHRAVLRFRYPNRQTNHVTVAVKVRHPGVGDSIKRDFNIINAIAKITRYIPTLNWLRLDESVQQFAVFMMSEVDLAREAAHLSRFILNFRRWKDVSFPRPLYPLVHPAVLVETYEHGESVSRYVDDLEGHDRIKSALAHIGTHVLLKMLLQTKPNNFVPFIRSGEWSDIGGRDYMEDAHVCISDLAKNFGSNSADDAVISFYGDSGSHQVTPPPHDDFADRCLNSSGGATVAELPELFQLTALEARPHLIRNNTSIPRIESDEATNRIKYHILTRW

SEQ ID NO: 77216 - protein, 89 aa, Zea mays
  Coding DNA Sequence Number=SeqID_35437
  Gene Ontology: Mol. function=protein serine/threonine phosphatase activity; Cellular component=protein serine/threonine phosphatase complex; Biological process=protein amino acid dephosphorylation
  Homolog annotation: Hit_ID=Q5SMK6; Match level="QueryCoverage=74%, HitCoverage=18%, E-value=4e-23, Identity=73%"; Hit description =Putative DNA-binding protein phosphatase 2C
MERVCENTVSVELKQTKPNNFVPFIRSGEWSDIGGRDYMEDAHVCISDLAKNFGSNSADDEVISFYGEEELKRGELEADKDKMMRDYRA

SEQ ID NO: 77217 - protein, 220 aa, Zea mays
  Coding DNA Sequence Number=SeqID_35438
  Homolog annotation: Hit_ID=Q6QP51; Match level="QueryCoverage=28%, HitCoverage=30%, E-value=2e-09, Identity=63%"; Hit description =Putative growth-regulating factor 1
MAERYQLPRSCVPPTTRQKDGGYPPSGGLEGGKTRCIREREDRSPSKGGHPPFKGDSPYLRPQPSRAEPSPTHSKVLPCGAGAGSRTSCKLARSRRSQTAVRDGASGRRSGRRFAFAIMTASKKGPGKGDTPKRILPREGTRLRASLLIRGSKASPSEGFDSRLRSRGPYTHYWSEVRRPAPRKGSTAASGYSGSAPITDQWFEGWPPKGSQPPQTPSEG

SEQ ID NO: 77218 - protein, 253 aa, Zea mays
  Coding DNA Sequence Number=SeqID_35439
  Subcellular localization annotation: CTP_CleavageSite=30; ConfidenceScore=5.34e-01
MGDIRRLSASSWRKRNSTGVGTFQPLFGFRISSERGDAPPRRRSPKMVTTSPWVGGSKPGCDLGPTLSFKDVHHPRWGGGRAELVGHPLLRRLRERALAGPAGGSDFDNAGPVDGRRRLPQRAGLAGLAPSALSCRKAAAAPCAREDRPRCRALLGRRSCSGAVLPLHRYGASARRSVPCSSGRIRVGICQWADGPRRRCRGGGGSRSPRRRRDHRHHLRFGPLALCTCPRPSSVGVGEGKVAAAFALRPSPL

SEQ ID NO: 77219 - protein, 175 aa, Zea mays
  Coding DNA Sequence Number=SeqID_35440
  Homolog annotation: Hit_ID=Q6QP51; Match level="QueryCoverage=21%, HitCoverage=16%, E-value=4e-11, Identity=86%"; Hit description =Putative growth-regulating factor 1
MAPDEYNTVTGSDCRTSSTTVAAYFLGMKIWNGLARDGTQGENAARIISHQGYARSRGYKRSRERESLFVCSSLRATLSQEGPGPPFYRCKERVQAMSSFLLVVYNGGCSLSANVSGREVPEPCVHANVAVGEVLEPYPCPSDWHNSRSGVSDAVFLSDRLVKGRSDCGHFDLAD

SEQ ID NO: 77220 - protein, 300 aa, Zea mays
  Coding DNA Sequence Number=SeqID_35441
  Homolog annotation: Hit_ID=Q6QP51; Match level="QueryCoverage=25%, HitCoverage=48%, E-value=5e-20, Identity=75%"; Hit description =Putative growth-regulating factor 1
MSGREVSEPCVHANVAVGEVLEPCGNDVSPVVRSVRAQGRARRRLLLRPRPGSGEDVIPPEAEAEAESWGRARRSFLPRPRLNLLLAALPGWLAQQSERGARVRIRCQAILALNAPAIRSVGEAIWPRLLLDEACPSWASGEPRMAHIRCTARKSVIPFLPSRLAERPLRRTVSGQSSHLERLHRRLHEEQECRRQEQEQDQEQQDSSPLPQQEVESERPPSPAPQPEMPPAPPQGIPAAGGDPDGDGDDDDAGGSSSHGTEFSEELEPEGWIARPITRDAARGCHFHDALDTLLCRAFD

SEQ ID NO: 77221 - protein, 72 aa, Zea mays
  Coding DNA Sequence Number=SeqID_35442
  Homolog annotation: Hit_ID=Q6QP51; Match level="QueryCoverage=50%, HitCoverage=16%, E-value=7e-12, Identity=91%"; Hit description =Putative growth-regulating factor 1
MVVDEQGGLDGQGNWRDRRAARTELRRGSTNSGAEGKQRCSPCSDCYASHPGKADNSKFSLGRNRKLRLARP

SEQ ID NO: 77222 - protein, 273 aa, Zea mays
  Coding DNA Sequence Number=SeqID_35443
MEVGILPPLFDFKDFHHAARSQPLAGASRMFIIRAGEEGEPSGSFTFRVGWRSASSSSIRGRRAFAGLAEEANSRYTGPAICGAVSYRVPGSPAWVALVLPPVLPPAVGAERGCPSTHGRRSRRAWVGHIHGFSRATGRTGRSYKTSYAAGVAATFLDGLVLTPAVRTGAKTSSCVLVQPLPIGAEVVAATSRADVVASAGGRGRGPIRSSAHPEVIAAAGEPLGAEVVVAAGAEVVAVVGGLSGASSSATLAGFSLGSPVVCPNPLDGGFKY

SEQ ID NO: 77223 - protein, 227 aa, Zea mays
  Coding DNA Sequence Number=SeqID_35444
MFIIRAGEEGEPSGSFTFRVGWRSASSSSIRGRRAFAGLAEEANSRYTGPAICGAVSYRVPGSPAWVALVLPPVLPPAVGAERGCPSTHGRRSRRAWVGHIHGFSRATGRTGRSYKTSYAAGVAATFLDGLVLTPAVRTGAKTSSCVLVQPLPIGAEVVAATSRADVVASAGGRGRGPIRSSAHPEVIAAAGEPLGAEVVVAAGAEVVAVVGGLSGASSSATLAGAA

SEQ ID NO: 77224 - protein, 41 aa, Zea mays
  Coding DNA Sequence Number=SeqID_35445
MAKAKRRPLLLSEAPPVGCLNRFTKSESPRVKVTSEDPLSK

SEQ ID NO: 77225 - protein, 182 aa, Zea mays
  Coding DNA Sequence Number=SeqID_35446
MGSSPIAELLSVYSSTTLLQTVGLVTTQKLEKIDPKYGLSGALMGAHDGTVPNGSDRTQQKNPAVDHSSAAIRVAGVVIPARATAPTYIPNPPLASANFGFPPSSLKNTVTAASPWPALLRCADRGPFNWSHASSWHTLESLFLSRVRKQQIFVAFAPRWYQMKKNKTEVREDLVLHIGSFA

SEQ ID NO: 77226 - protein, 99 aa, Zea mays
  Coding DNA Sequence Number=SeqID_35447
MAGTDHVWDALRARRRRGVPWRRNRVVRMFLQTVSDVRRADRGPFNWSHASSWHTLESLFLSRVRKRQIFVAFAPGWYQMKKNKTEVREDLVLHIGSFA

SEQ ID NO: 77227 - protein, 61 aa, Zea mays
  Coding DNA Sequence Number=SeqID_35448
RADRGPFNWSHASSWHTLESLFLSRVRKRQIFVAFAPRWYQMKKNKTEVREDLVLHIGSFA

SEQ ID NO: 77228 - protein, 720 aa, Zea mays
  Coding DNA Sequence Number=SeqID_35449
  Homolog annotation: Hit_ID=Q53MK8; Match level="QueryCoverage=37%, HitCoverage=27%, E-value=2e-21, Identity=30%"; Hit description=Ulp1 protease family, C-terminal catalytic domain, putative
QNVSGQQGAHAVRRSPRVENKRKQLDKNELKERKKRLRLKVPPIQDAESDDEKDTEFVPAGDGSGDDNVGIVGGDENKGITKTRAIRCSPGKFIKLVNSLSDELKSEVVAKGFGGLLRFKPHLLSRKLLSWLMRKLNPETMKLEIGGGKEIQITEHSVWCVLELPNVGSDPPTMSDADARALRDELGVQICGKSYRRISGINISVITDRLQKRTLNGELGLRAFFIAAFQCLLFSNTDTRIRIDDVKYTQDIQNIGNKNWCKAVVDRLSIAARLYRKDFAEKGINAPISGCEIFVAMLYVDNLQHGLDTSPFSIPRCAFLDSKMIDAIANMDLRGDVLPGTTEFGHLRLRSITDTCYGVPIGALAILHAPVPAPAPVAVPNPTAAPNPVAAAFVPVATTAPTGTSADKAVKYSTISRDLMAKAHHECYTGIQKLIADAIVEKRAAKERRRKVKNDPRAGAGAGTSSIAPEDQSRGGDGEEIIRSPVAIDPRAGAGLGTTSNVPEDQPGGGDSEEIQLDCSGGDLDDSLDFTRTPSCGDDIDLEEGNLNRTPPDLRGSTRSIDDILEMIYSPEHFASIDGESPPNSQPTRAPRIAVRKRKASSNPPGNDQPPVGPPETEEEPLSRDTGMQHPTAQDHITYSRRSDRSIQVANTQKAEAEKKKAEIEMKNAEAEEAEKRKAEAEQADKKKAEEAENKRKAEAEVAEKKKEVEAENKRKAEAE

SEQ ID NO: 77229 - protein, 449 aa, Zea mays
  Coding DNA Sequence Number=SeqID_35450
SDRSIQVANTQKAEAEKKKAEIEMKNAEAEEAEKRKAEAEQADKKKAEEAENKRKAEAEVAEKKKEVEAENKRKAEAEVAEMKRKAAAEEAEKKKEEEAEDKRKAEAEKAEIKRKAEAEEAEIKRKAEAEEAEIKRMAAAEEVVKKKADAEKKVDAEEKRIQVAIQKQLKDNIKALKKPVPAAKLKKMFQLQMSKEYAEQRQQYEDRLNMLRQEAKAEIDSLENSIDGQAGPSSSFDDIQFPAESDDDINNLTQPIRLSQDEVSVGQADFSEFQRMIFKRLGDRVLKKPREYISPFKIPRNRPEIPLAKAVALRRKIASDPELKRRILLEFGLLVGLTGEEILTSFSNDTLGESGIIDFFVHCMRHDDIVHKEERHKAVFAKIPIIDAAFQKVSNLKLPRFKGPIYRCELLHYEIFHPLNQAEIPGSLDKFRIGGRPLPIEWDSSQSNN

SEQ ID NO: 77230 - protein, 338 aa, Zea mays
  Coding DNA Sequence Number=SeqID_35451
MTLKANTYGFLTKKWSPPEIQECGLWQGNTCGVRCMSLWSMINCHTTPIFVKNSHERPFSIIPKANTYGFLTNKSTQPEIQECEQKQRNLAGTRGKSRAPTRKGNTTPIFVENSHERPFSMTLKANTYEFLTNKWSPPEIQECDLWKENICGVKCTSLWSMINGHTTPIFVENSHERPFSMTLKANTYGFLTKKWSPPEIQECDLWQGNICGVRCTSLWSMINGHTTPIFDENSHERPFSIIPKANTYGFLTKKWSPPEIQECDLWQGNICGVRCMSLWSMINGHTTPIFVENSRERPFSIIPKANTYGFLTKKWSPPEIQECDLWQGNICGVRCTSL

SEQ ID NO: 77231 - protein, 151 aa, Zea mays
  Coding DNA Sequence Number=SeqID_35452
MHKEAARLYGFYVRLDPLAYVTGHKPRGSSGEHRARPGHVPAPDPYSCQGPCPGTLLRLGPYSEGDWCPPKGPSVPSWGLWTCTYRGPVSFCGGPDPTRLHAVEEGTPDPGYPQDHFALLRAICLIKHNVTELLTNPVDLLKTLCALMFES

SEQ ID NO: 77232 - protein, 228 aa, Zea mays
  Coding DNA Sequence Number=SeqID_35453
  Subcellular localization annotation: CTP_CleavageSite=72; ConfidenceScore=5.01e-01
MAQGHISLSLPRDSRHPAHGPTVTLRAKVTGQLAVGTGVTVGVAIGGPAVIAPTGAQEQQADRQLDSGPTCRLASSPEAGPGATVSTLNQGYPLLQHEDAAPVQHLKATWRMAPNPTIRAGPRVPHGKERRTPDPYTYKSRAPKKARWIPWEGPSPPPSKVRVLARSRDEKDPGIQSLPYLLFRWHLCHTYAFGILWDFRHSCGIDRRVPRLMAEPMGLFVLVLPHEA

SEQ ID NO: 77233 - protein, 132 aa, Zea mays
  Coding DNA Sequence Number=SeqID_35454
  Gene Ontology: Mol. function=DNA binding
MLEKLATHDVETITTLFALADKCARAAEGRAWHSAPQTGVAQTGGSGAIAQDGKKKKKKNRDHEKPHSTALVVAAATGGRNERNKRPRPQRGNNVSHPVPGGAISHRKMTDILLDLEFIVINISIKVSSITL

SEQ ID NO: 77234 - protein, 55 aa, Zea mays
  Coding DNA Sequence Number=SeqID_35455
MGKRGSCGVGSPRYHGDVFLAKRVMLETLMEILTTMNSKSNDTPVIFLWEIAPVI

SEQ ID NO: 77235 - protein, 55 aa, Zea mays
  Coding DNA Sequence Number=SeqID_35456
MGKRGSGGVGSPRYHGDVFLAKRVMLETLMEILTTMNSKSNDTLVIFLWEIAPVI

SEQ ID NO: 77236 - protein, 111 aa, Zea mays
  Coding DNA Sequence Number=SeqID_35457
  Homolog annotation: Hit_ID=Q8W0H5; Match level="QueryCoverage=41%, HitCoverage=9%, E-value=5e-16, Identity=82%"; Hit description =Putative glutamate transporter
MKAQDHKGLTELAKKLKSTTEFVSVGFLGPGIALLCLNEAKSPIIASAWLTVAVGLKSFGHSGFLVNLQEGLYFGHSFLSYKYKDLRLYCKLEFLINYGISNYSSKPKTMV

SEQ ID NO: 77237 - protein, 485 aa, Zea mays
  Coding DNA Sequence Number=SeqID_35458
  Gene Ontology: Mol. function=transporter activity; Cellular component= integral to membrane; Biological process=transport
  Homolog annotation: Hit_ID=Q8W0H5; Match level="QueryCoverage=82%, HitCoverage=82%, E-value=0.0, Identity=87%"; Hit description =Putative glutamate transporter
  Pfam annotation: Domain name=MFS_1; Domain location=95-447; Score =166.3; E_value=7.5e-47; Accession=PF07690.6; Description=Major Facilitator Superfamily
  Pfam annotation: Domain name=Sugar_tr; Domain location=91-477; Score=- 123.5; E_value=0.0053; Accession=PF00083.14; Description=Sugar (and other) transporter
  Pfam module annotation: Pfam domain module=MFS_1::Sugar_tr; Domain location=95-447::91-477
  Subcellular localization annotation: CTP_CleavageSite=68; ConfidenceScore=5.26e-01
MTPPGQLLPLSRLPPGLSSRCPPPAHAQARVSLLHPWAHRLHGRFMPSPHLFRSPACPPRAPTPPGLSAAAGGEAQAAAVAEFVTSERVKVAAMLGLALALCNADRVVMSVAIVPLSQAYGWTPSFAGVVQSSFLWGYLMSPIIGGALVDYYGGKRVMAYGVALWSLATFLSPWAAGRSIWLFLFTRVLLGIAEGVALPSMNNMVLRWFPRTERSSAVGIAMAGFQLGNTIGLLLSPIIMSRTGIFGPFVIFGLFGFLWVLVWIPAISGTPGEHAQISAYELKYITKGQKLVKPQIGSEKTKKGYFVILSWMPVYFKTIYHVNLREAAWFSALPWVMMAVLGYVAGVVSDMLIRNGTDITLTRKIMQSIGFLGPGIALLCLNAAKSPIIASAWLTVAVGLKSFGHSGFLVNLQEIAPQYAGVLHGMSNTAGTFAAILGTIGAGFFVDRMGSFRGFLILTSLLYFSSALFWDIFATGERVDFDGTG

SEQ ID NO: 77238 - protein, 96 aa, Zea mays
  Coding DNA Sequence Number=SeqID_35459
MEKKKKACSKLVEDHIIKHISFWMRSRHPSSVDEAPEDQSRKESMWEFARESYRSVRAVSWRPDLQVYARRWSQKPVPRALLPPSPDKHGKLTGSL

SEQ ID NO: 77239 - protein, 115 aa, Zea mays
  Coding DNA Sequence Number=SeqID_35460
VFPEQEQGGGPCGFRNDDPDSSAFGIPQVAGDTQPELRLFPEADADLKGFFYENLFGSEDKCPDDLKDICKDLIQISAGQICKSTLGGGARSQFRELSFPLRLISTTSSLDPFDA

SEQ ID NO: 77240 - protein, 554 aa, Zea mays
  Coding DNA Sequence Number=SeqID_35461
  Gene Ontology: Mol. function=carboxyl- and carbamoyltransferase activity; Cellular component=ornithine carbamoyltransferase complex; Biological process=amino acid metabolic process
  Homolog annotation: Hit_ID=Q8SA97; Match level="QueryCoverage=24%, HitCoverage=25%, E-value=4e-72, Identity=95%"; Hit description =Ornithine carbamoyltransferase
  Pfam annotation: Domain name=HGTP_anticodon; Domain location=324-412; Score=47.4; E_value=4.9e-11; Accession=PF03129.10; Description =Anticodon binding domain
  Pfam annotation: Domain name=OTCace; Domain location=447-554; Score =30.5; E_value=8e-10; Accession=PF00185.14; Description =Aspartateornithine carbamoyltransferase, AspOrn binding domain
  Pfam annotation: Domain name=OTCace_N; Domain location=101-443; Score= -3.9; E_value=5.5e-08; Accession=PF02729.11; Description =Aspartateornithine carbamoyltransferase, carbamoyl-P binding domain
  Pfam module annotation: Pfam domain module=HGTP_anticodon::OTCace::OTC ace_N; Domain location=324-412::447-554::101-443
MLVILIQAAAAECATGEGSSEDDGDAAWKAAIDSIVSVGFSVPSSNGMVKAASSGNDEVNNHVDLEEPRERKLKGPGLSCISIPDNIRIHWPYVTVSEAPKDFLQIIDFDKDTIMKVLNRAIEVKALIKSGDKSFQPFKGKTMVMIFAKPSMRTRVSFETGFFLLATTPKKIERGKCAVLDLLILQEATSMIRTSLGKAGLVPCTSCTEEHNIDRNGVYAKAFSYLTSDNDILEREHISYEQGDSIQGTSFLKQGFIIDDGQAEVAQCMEFQAARDSMQEVMVRNSVEATTSLTSTQQGRHMRTGLFNVSTVTPFPRQFCVIFDSTFVTCCRNQEFDAAAKEITKALTTVGISHIIDTTAISIGRRYGRTDEIGVPFVVAMDSTNVTIRERDDKEQIRVDINEVASVDILDLAKYASVPVINGLTDYNHPCQIMADALTMLEQIGRIENTKVFYVGDGNNIVHSWLLLADVLPFHFVCACPKGFEPDAHTVEMARGAGISKIEITNRPREAVKGADIVYTDVWASMGQKEEVDYRKQKFQGFTVDETLMEIAGP

SEQ ID NO: 77241 - protein, 149 aa, Zea mays
  Coding DNA Sequence Number=SeqID_35462
  Homolog annotation: Hit_ID=Q10QC9; Match level="QueryCoverage=40%, HitCoverage=25%, E-value=2e-12, Identity=56%"; Hit description =Expressed protein
MAWIWMVLVAAVVLLCRVVLCGPERAVHAPHSSDRRSRNMLLIVPHPDDKSMSVDLPKQNRWKIIMGNWWTAWKAAAAECATGEGSSEDDGDAAWKAAIDSIVSVGFSVPSSNGMVKAASSGNDEVNNHVDLEEPRERKLKGPGLSCIR

SEQ ID NO: 77242 - protein, 134 aa, Zea mays
  Coding DNA Sequence Number=SeqID_35463
  Subcellular localization annotation: CTP_CleavageSite=79; ConfidenceScore=5.47e-01
MPTLTFNHSALSLKRRPCVQSLGIASKMPTPTLNHSALPLKRRPRVQSLGITSKMPTPTFNHSALSLKRRPCVQSLGIASKMPTPTLNHSALPLKRRPRVQSLGIASKNADADFQPLGAASKTPTTCSIAWHYF

SEQ ID NO: 77243 - protein, 190 aa, Zea mays
  Coding DNA Sequence Number=SeqID_35464
  Subcellular localization annotation: CTP_CleavageSite=79; ConfidenceScore=5.57e-01
MPTPTFNHSALPLKRRPHVQSLGITSKMPTPTFNHSALSLKRRPCVQSLGIASKMPTPTLNHSALPLKRRPRVQSLGIASKMPTPTFNHSALPLKRRPHVQSLGITSKMPTPTFNHSTLSLKRRPCVQSLGIASKMPTPTLNHSALSLNTDHVFNRLALLLKCRRRHSITRRCLYNADHVFTRPALLLKC

SEQ ID NO: 77244 - protein, 205 aa, Zea mays
  Coding DNA Sequence Number=SeqID_35465
  Gene Ontology: Mol. function=translation initiation factor activity; Cellular component=membrane; Biological process=photosynthesis
  Homolog annotation: Hit_ID=Q6ZGV8; Match level="QueryCoverage=91%, HitCoverage=14%, E-value=3e-77, Identity=73%"; Hit description =Eukaryotic translation initiation factor 3 subunit (EIF-3)-like
MMYEKIKKLDKELARYVHNNIFFSFAVDSDFEDISKDHKLDCQNGSSRSTKVSSPDVITKPYANHGKSAEVVDSKSEEAQLADREQATYASANNDLKGTKAYQEADVSGLHNLAMAIVDYRGHKVVAQSIIPGILQGDKSDSLLYGSVDNGKKISWNETFHSKVVEAAKQLHLKEHVVLDGSGNPVKLAATVECKGIVGSDDRKR

SEQ ID NO: 77245 - protein, 205 aa, Zea mays
  Coding DNA Sequence Number=SeqID_35466
  Gene Ontology: Mol. function=translation initiation factor activity; Cellular component=membrane; Biological process=photosynthesis
  Homolog annotation: Hit_ID=Q6ZGV8; Match level="QueryCoverage=91%, HitCoverage=14%, E-value=3e-77, Identity=73%"; Hit description =Eukaryotic translation initiation factor 3 subunit (EIF-3)-like
MMYEKIKKLDKELTRYVHNNIFFSFAVDSDFEDISKDHKLDCQNGSSRSTKVSSPDVITKPDANHGKSAEVVDSKSEEAQLADREQATYASANNDLKGTKAYQEADVSGLHNLAMAIVDYRGHMVVAQSIIPGILQGDKSDSLLYGSVDNGKKISWNETFHSKVVEAAKQLHLKEHVVLDGSGNPVKLAATVECKGIVGSDDRKR

SEQ ID NO: 77246 - protein, 457 aa, Zea mays
  Coding DNA Sequence Number=SeqID_35467
  Homolog annotation: Hit_ID=Q9M4X0; Match level="QueryCoverage=25%, HitCoverage=25%, E-value=2e-48, Identity=86%"; Hit description=UDP -glucose pyrophosphorylase
  Pfam annotation: Domain name=KOW; Domain location=414-450; Score =28.3; E_value=2.7e-05; Accession=PF00467.19; Description=KOW motif
  Pfam annotation: Domain name=Ribosomal_S4e; Domain location=333-409; Score=64.2; E_value=4.4e-16; Accession=PF00900.10; Description =Ribosomal family S4e
  Pfam annotation: Domain name=UDPGP; Domain location=2-231; Score= -187.4; E_value=9.7e-08; Accession=PF01704.8; Description=UTP- -glucose-1-phosphate uridylyltransferase
  Pfam module annotation: Pfam domain module=KOW::Ribosomal_S4e::UDPGP; Domain location=414-450::333-409::2-231
  Subcellular localization annotation: CTP_CleavageSite=49; ConfidenceScore=5.06e-01
MGAATTSGGGGGGSAGPRSRRSLPETGSTGAVFCHDFLQVEETRELRTVVEAAKQLHLKEHVVLDGSGNPVKLAATVECKGIVGSDDRLERRGLEHPDGCPLCDHEQETTQHLLASCISGTSFFHLLGWDTSLLGNMCRLLLIGGKRSRFLPVKATSDLQLVQSDLYTLVDGFVTRNSARTNPSNPSIELGPEFKKVGSFLGRFKSIPSIVELDNLKVSGDVWFGSGIVLKEKVTITAKPGVKLEIPDGAVMEPNTNNSEGSLAGAAVWDVFRRQDLPKLNDYLAVHREECAARCQAVSSVKYPIYDQTVYLNDYHKKMLKDQYVWVLKLVCLVGSIFLEGLKTIEQITMDSASVETNMFKLCKVRSVQFGQKGIPYLNTYNGRTIRYPDSLIKANDTIKIDLEINKIMDFIKFDVDNVVMVTGGRNTGRVGVIKNREKHKGNFETIHVLLGAFCYV

SEQ ID NO: 77247 - protein, 128 aa, Zea mays
  Coding DNA Sequence Number=SeqID_35468
MKILSKSLLGSLQSNDDLILSDEEIHGSSKPTANWPSHARRHRKRDPDVIGIYVDNDGVFKKEGCGTLKGIAAATKRIKNGDHKLKIEFSSKLGGPVGPNTRTFVDEIVLFTKKKAPLTGVKKWRAQC

SEQ ID NO: 77248 - protein, 203 aa, Zea mays
  Coding DNA Sequence Number=SeqID_35469
MGRKRVGARTHGGHRVGVSRRGSRTETGKRLHSREGEATGALETNGDGVTDVASSPLVIHGPNRRDDNADSSIPFHGERIPRSPTMHACQKETNLDSVGEGERDDVAQEKPGVDSESCSRRVDESIEGGVHELQPARTTTVRRAGKVAAASLSSAVSVVASIVAMAMGGIGVSRAEMGCCVEAFHRWSEEEEEVAESVDANAQ

SEQ ID NO: 77249 - protein, 126 aa, Zea mays
  Coding DNA Sequence Number=SeqID_35470
MISLNSYDRSNLKKETNLDRVGEGERDDVAQEKPGVDSESCSRRVDESIEGGVHELQPARTTTVRRAGKVAAASLSSAVSVVASIVAMAMGGIGVSRAEMGCCVEAFHRWSEEEEEVAESVDANAQ

SEQ ID NO: 77250 - protein, 177 aa, Zea mays
  Coding DNA Sequence Number=SeqID_35471
  Gene Ontology: Mol. function=1-(5-phosphoribosyl)-5-[(5 -phosphoribosylamino)methylideneamino]imidazole-4-carboxamide isomerase activity
  Homolog annotation: Hit_ID=Q2WBG1; Match level="QueryCoverage=60%, HitCoverage=72%, E-value=2e-22, Identity=46%"; Hit description =Uncharacterized protein conserved in bacteria
  Pfam annotation: Domain name=DUF971; Domain location=61-147; Score =97.9; E_value=3e-26; Accession=PF06155.2; Description=Protein of unknown function (DUF971)
MPLQTRPVTQRRPRGARYNGPDHTWASEQDEAVLRGDVTAGLRLVLNEAKGVPARFVFVRPATAAKGDERRVEIEFADGSSFHLSAEFLRVYSPAADSKIRSVGGEKVIFGRRHVGIMSAESVGNYGVRILFDDLHKTGIFTWDYLHHLGSNKFSLMRNYIRTLRKHGLSRDPQRRK

SEQ ID NO: 77251 - protein, 731 aa, Zea mays
  Coding DNA Sequence Number=SeqID_35472
  Gene Ontology: Mol. function=transferase activity, transferring glycosyl groups; Cellular component=chloroplast; Biological process =glucan biosynthetic process
  Homolog annotation: Hit_ID=O48900; Match level="QueryCoverage=96%, HitCoverage=94%, E-value=0.0, Identity=75%"; Hit description=Starch synthase isoform zSTSII-2
  Pfam annotation: Domain name=Glyco_transf_5; Domain location=216-495; Score=364.4; E_value=1.8e-106; Accession=PF08323.2; Description =Starch synthase catalytic domain
  Pfam annotation: Domain name=Glycos_transf_1; Domain location=543 -705; Score=36.9; E_value=7e-08; Accession=PF00534.10; Description =Glycosyl transferases group 1
  Pfam module annotation: Pfam domain module=Glyco_transf_5::Glycos _transf_1; Domain location=216-495::543-705
  Subcellular localization annotation: CTP_CleavageSite=17; ConfidenceScore=5.22e-01
MAGATSSSSVSLILILVASSSPRRSRGRVGIALRSYGYSGAELRLHWARRGSSRDGPAVVRAAAVPAGGEGEDAAAVGKSSSSKAVAVQGSESKTQAVYSTSPPKTATSAPKQNQSAAKQNGTVGSSSASKSPAPAVSESKAEPSAPVTKTETDASAKVEELKPSVDDAKPVESIGIPEPVDAKVDAAAATDAAASAADDTEDKEHGPLAGPNVMNVVVVASECAPFCKTGGLGDVVGALPKALARRGHRVMVVIPRYGEYAEARDLGVRRRYRVAGQDSEVTYFHSYIDGVDFVFIEAPPFRHRHNDIYGGERSDVLKRIILFCKAAVEVPWYAPCGGTVYGDGNLVFIANDWHTALLPVYLKAYYRDNGLMQYARSVLVIHNIAHQKLAKKLSVWQSGAAFGGQKLPEVETNRAKIWWHIRKGRGPVDDFVNFDLPEHYIDHFKLYDNIGGEHCNVFAAGLKMADQVVTVSNGYLWELRTSEGGWGLHDIINQNDWKLQGIVNGIDMSEWNPAVDVHLHSDEYTNYTFETLDTGKRQCKAALQRQLGLQVRDDVPLIGFIGRLDHQKGVDIIADAIHWIAGQDVQLVMLGTGRPDLEDMLRRCEAEHSDKVRAWVGFSVPLAHRITAGADVLLMPSRFEPCGLNQLYAMAYGTVPVVHAVGGLRDTVAPFDPFNDTGLGWTFDRAEANRMIDALSHCLNTFRNYKESWRGLEARGMAQDPQLGPRRRAV

SEQ ID NO: 77252 - protein, 742 aa, Zea mays
  Coding DNA Sequence Number=SeqID_35473
  Gene Ontology: Mol. function=transferase activity, transferring glycosyl groups; Cellular component=chloroplast; Biological process =glucan biosynthetic process
  Homolog annotation: Hit_ID=O48900; Match level="QueryCoverage=96%, HitCoverage=96%, E-value=0.0, Identity=76%"; Hit description=Starch synthase isoform zSTSII-2
  Pfam annotation: Domain name=Glyco_transf_5; Domain location=216-495; Score=364.4; E_value=1.8e-106; Accession=PF08323.2; Description =Starch synthase catalytic domain
  Pfam annotation: Domain name=Glycos_transf_1; Domain location=543 -705; Score=36.9; E_value=7e-08; Accession=PF00534.10; Description =Glycosyl transferases group 1
  Pfam module annotation: Pfam domain module=Glyco_transf_5::Glycos _transf_1; Domain location=216-495::543-705
  Subcellular localization annotation: CTP_CleavageSite=17; ConfidenceScore=5.22e-01
MAGATSSSSVSLILILVASSSPRRSRGRVGIALRSYGYSGAELRLHWARRGSSRDGPAVVRAAAVPAGGEGEDAAAVGKSSSSKAVAVQGSESKTQAVYSTSPPKTATSAPKQNQSAAKQNGTVGSSSASKSPAPAVSESKAEPSAPVTKTETDASAKVEELKPSVDDAKPVESIGIPEPVDAKVDAAAATDAAASAADDTEDKEHGPLAGPNVMNVVVVASECAPFCKTGGLGDVVGALPKALARRGHRVMVVIPRYGEYAEARDLGVRRRYRVAGQDSEVTYFHSYIDGVDFVFIEAPPFRHRHNDIYGGERSDVLKRIILFCKAAVEVPWYAPCGGTVYGDGNLVFIANDWHTALLPVYLKAYYRDNGLMQYARSVLVIHNIAHQKLAKKLSVWQSGAAFGGQKLPEVETNRAKIWWHIRKGRGPVDDFVNFDLPEHYIDHFKLYDNIGGEHCNVFAAGLKMADQVVTVSNGYLWELRTSEGGWGLHDIINQNDWKLQGIVNGIDMSEWNPAVDVHLHSDEYTNYTFETLDTGKRQCKAALQRQLGLQVRDDVPLIGFIGRLDHQKGVDIIADAIHWIAGQDVQLVMLGTGRPDLEDMLRRCEAEHSDKVRAWVGFSVPLAHRITAGADVLLMPSRFEPCGLNQLYAMAYGTVPVVHAVGGLRDTVAPFDPFNDTGLGWTFDRAEANRMIDALSHCLNTFRNYKESWRGLEARGMAQDLSWDHAAVLYEDVLVKAKYQW

SEQ ID NO: 77253 - protein, 210 aa, Zea mays
  Coding DNA Sequence Number=SeqID_35474
MARPHEETTRPTEASQKELRPQRSQNTPLRPRGLHPAASASGEALRLARPQASALALASGEGLRLARPQASASALALGEGLHLARPQASASALASGEGLRLARPQPRPQEKPPPRPSWALDRLRYRGYIITLLLASCLRLQRNKTGVPSKVTPATDYYYVFCLHVWCDVNFSFILCLFVLWRVDEPATEDPCVQQIEVAEQELIEGKLCP

SEQ ID NO: 77254 - protein, 230 aa, Zea mays
  Coding DNA Sequence Number=SeqID_35475
  Homolog annotation: Hit_ID=Q6QP51; Match level="QueryCoverage=29%, HitCoverage=30%, E-value=9e-19, Identity=70%"; Hit description =Putative growth-regulating factor 1
MAKRFSRSSNDLRTRNRYPGSERGHFEGALRSKTNRPRALLLIRGSKVAPCGVRQPPQSTRAPSPLLIRGSKVDPSEGFDSRPRTCKVRDDPGYVRYMAKARATLPRYPKTFSRPAGTVCNGIPPKGGTEPLDPIEWVQVQQITCRVTWRIPPSSLRKGDKGVYNKKPRRSSIVLSLRAEARRLLSHQATAKLLTTSTNQLKNSEPDHAPGLRPGHMREQQGRPRNHKKN

SEQ ID NO: 77255 - protein, 214 aa, Zea mays
  Coding DNA Sequence Number=SeqID_35476
MARTKTTQRKATGPHGVPPHQLAPRHEGSNSGSNDPIGDLEARVARLMKLWKRDTAIDWAVNSRSFVWDCEAKALARVAELSASLENLQAYCNTLHEEVHMLYDRLHPNVPPEVATMGAGPSGTVNGGPDGELDLFEAPPSMNVLPILAVAIAALVNTTADNTRFLCETGGKSISANMEAEVDLKGSRDTTYLEFSETRPPLFVKAEEPLEVDE

SEQ ID NO: 77256 - protein, 274 aa, Zea mays
  Coding DNA Sequence Number=SeqID_35477
MARTKTTQRKATGPHGVPPHQLAPRHEGSNSGSNDPIGDLEARVARLMSELRHGSWERARDSHRIAELSAKVNRLQQEIVERDTAIDWAVNSRSFVWDCEAKALARVAELSASLENLQAYCNTLHEEVHMLYDRLHPNVPPEVATMGAGPSGTVNGGPDGELDLFEAPPSMNVLPILAVMPSRTRAHDGAGTSRGGEETSNPPHVPPFLVEAIAALVNTTADNTRFLCELAGNQFQQHGGRGRPQGSRDTTYLEFSETRPPLFVKAEEPLEVDE

SEQ ID NO: 77257 - protein, 150 aa, Zea mays
  Coding DNA Sequence Number=SeqID_35478
  Homolog annotation: Hit_ID=Q1SGL9; Match level="QueryCoverage=24%, HitCoverage=9%, E-value=2e-07, Identity=67%"; Hit description =Protein phosphatase 2C-like
MSRAFDDYCIEDCGVILAPEVTQRRIDNSDQFVILATVRPPVLLSSRHIPYLDGLLSGSHATREAKETTRTSSTISMFCQLEVSWMEINAEVRARADEGDDISVIQSVKRRDNNEVELRQGVDCRCPLRRGGDCRRPRHRGGAAPRHLRR

SEQ ID NO: 77258 - protein, 139 aa, Zea mays
  Coding DNA Sequence Number=SeqID_35479
MEINAEVRARADEGDDISVIQSVKRRDNNEVEIVDAHAIEVELRRDTYADENVDVGDNEGGIASERRPPLLSCSSHLPSSSTLMDMDLNSHLAISIITAHESCRCIEAVALSTILLVTVASYQFIDMRFLYHLKPARIK

SEQ ID NO: 77259 - protein, 144 aa, Zea mays
  Coding DNA Sequence Number=SeqID_35480
  Homolog annotation: Hit_ID=Q9FKP4; Match level="QueryCoverage=40%, HitCoverage=4%, E-value=7e-15, Identity=68%"; Hit description =Similarity to kinesin heavy chain
  Subcellular localization annotation: CTP_CleavageSite=23; ConfidenceScore=5.15e-01
MESKFNTLICRSDSSKSRSPDVFASPVSQDKTGNSGAIVKSSNELAKTTPAGEYLTSALMDFDPDQFEGFVAIVDGANKLLMLKRVKNVGTHVLNIKNVGTVELNVQPSQTHVGLRTWVPTFLMLRTWVPSNLLCSPRRRSQDT

SEQ ID NO: 77260 - protein, 209 aa, Zea mays
  Coding DNA Sequence Number=SeqID_35481
  Pfam annotation: Domain name=WD40; Domain location=12-50; Score=17.4; E_value=0.052; Accession=PF00400.22; Description=WD domain, G-beta repeat
  Pfam annotation: Domain name=WD40; Domain location=55-93; Score=10.7; E_value=2; Accession=PF00400.22; Description=WD domain, G-beta repeat
  Pfam module annotation: Pfam domain module=WD40::WD40; Domain location=12-50::55-93
MLTQCVGLVPIGDQGSHVDEGDQGVNATQLLHNEPVLVTVSGDGSVGMWDVTLGQPCVRHIVAHTRRANAVVVALNDKYLCTGGSDQKVACLREIHASILRKHLHRLEHPGAVEPDVESEKEVDNKLEDEMHEDEDDKRYSPESIPQQTDNQFQEEDGSFSPHLMHGNKDEDAIDPEEDKAELKRDKNVGTHVLKVKNVGTVELNVQPT

SEQ ID NO: 77261 - protein, 335 aa, Zea mays
  Coding DNA Sequence Number=SeqID_35482
  Gene Ontology: Mol. function=cysteine-type peptidase activity; Biological process=proteolysis
  Homolog annotation: Hit_ID=Q109R5; Match level="QueryCoverage=89%, HitCoverage=28%, E-value=6e-36, Identity=32%"; Hit description=Ulp1 protease family, C-terminal catalytic domain containing protein
  Pfam annotation: Domain name=Peptidase_C48; Domain location=65-286; Score=30.9; E_value=2.9e-06; Accession=PF02902.9; Description=Ulp1 protease family, C-terminal catalytic domain
MESLFIGLSHNKPKKSVATAIVREVLSHDWLLLDYICTQGDLALIDFINEIPCEPRVEVVLIDDAFVERKWMECLFQPNAYLGDEVIDCYINLIKAQKHLKCRSGGRVHIENAFQFNFLKQDGDVEIKTEELYPIKDMTQICSAERRVLLYLGHDMVFIPINIRETHWYLAIIHARNMETQVLDSLGTSQDRKDLTDSIKGLQRQIDMISQRKELKDHRWPDLQVASWPLREIDMGYAKHTDSSSCGLFLLNYIEYWTGDELSDSFTQDDMSHFRKKMAAILLSSDLNKRRGCLLNKNEKEVDSGSPSDVEILENPTDSNKRKLLHVLDDSEVVY

SEQ ID NO: 77262 - protein, 368 aa, Zea mays
  Coding DNA Sequence Number=SeqID_35483
  Gene Ontology: Mol. function=cysteine-type peptidase activity; Biological process=proteolysis
  Homolog annotation: Hit_ID=Q109R5; Match level="QueryCoverage=55%, HitCoverage=20%, E-value=9e-19, Identity=28%"; Hit description=Ulp1 protease family, C-terminal catalytic domain containing protein
MSYSKRIAYSISKIPIPRNERKQTGPKRKLLHVLDDSEVVYEDEEGPITQADLQRWFVDDWDKRAPVKVSTDGCTNDFLMVGLSTKDMPVTKADSIDVLCDYIMAIEDDTTLERTWVRSFNPFKIEISVKDLQNILKTTQDMILRCFDMVVRLLANKESRRPKEEIINNRKHYMDMRFWRMVGFGKLPKYHQDPTTEELAKTLDCWPSMNYYITGCRYVLMPWKFNGCYALFVIDHVKKHVTFIDFTPTQDWCKHMPYKRFAEAIIMASKKYKIAYSKKHSGWAEDIFKWEHTIQTGVPIDLRGFNTSYLVLQAMAMWGNDRRLKFVGDAKTLRRNFVIDLLSYEDNLCRYAIPANIQQRLVDIAKKD

SEQ ID NO: 77263 - protein, 195 aa, Zea mays
  Coding DNA Sequence Number=SeqID_35484
MGQSPEYEVYFRKTYPTKARLSIGKTFCKTGIQGSSGRKRKRKAVNSTGPKAAQAAQPAQKQGRAHARTASFARKAVAGLNIPLRVLATIPCVVDPLHLSPPPFFSLHAEILDGEPHREPSSDELDWPEGENTGASEWQTPNRTPPAHFPQHNFTKGYLVCSGRSDRGPCGQMHTFPAIGDGLVQLGGSMSITGS

SEQ ID NO: 77264 - protein, 65 aa, Zea mays
  Coding DNA Sequence Number=SeqID_35485
  Subcellular localization annotation: CTP_CleavageSite=7; ConfidenceScore=5.10e-01
MGFAPIPAMTEPPKSLGPPTVVLVPRTSDNPAEQKQQKFAASSPKTTWDKALSTKCTFTRLTRQG

SEQ ID NO: 77265 - protein, 46 aa, Zea mays
  Coding DNA Sequence Number=SeqID_35486
MGQSPEYEVYFHKTYPTSLPEEKPTHDEACDQLKGPRSAGLHREGP

SEQ ID NO: 77266 - protein, 200 aa, Zea mays
  Coding DNA Sequence Number=SeqID_35487
  Gene Ontology: Mol. function=oxidoreductase activity
  Homolog annotation: Hit_ID=Q948G0; Match level="QueryCoverage=52%, HitCoverage=31%, E-value=2e-41, Identity=81%"; Hit description =Putative quinone oxidoreductase
MAVRLLANKESRRPKEEIINNRKHYMGMRFWVLMPWKFNGCHALFVIDHVKKHVTFIDFTPTQDWCKHVPYKRFNTSYLVLQAMAMWGNDRRLKFVGRNLNSLGVDGRLFIIGFQGGIAAEVNLQAVLARRLTIQAAGLRNKSLANKAEIVSEVEKNVWPAVTAGKVKPVIYKTFPLCEAAEAHRLMEATTHIGKILLLP

SEQ ID NO: 77267 - protein, 411 aa, Zea mays
  Coding DNA Sequence Number=SeqID_35488
  Gene Ontology: Mol. function=cysteine-type peptidase activity; Biological process=proteolysis
  Homolog annotation: Hit_ID=Q109R5; Match level="QueryCoverage=69%, HitCoverage=25%, E-value=9e-26, Identity=28%"; Hit description=Ulp1 protease family, C-terminal catalytic domain containing protein
  Pfam annotation: Domain name=Peptidase_C48; Domain location=48-252; Score=8.7; E_value=0.00013; Accession=PF02902.9; Description=Ulp1 protease family, C-terminal catalytic domain
MVNRMQTEVGRFGGCYSSLCGGVWFSGCNEQGNGCSFVGNKDDANGAIERTHLSIYPMSRPRLFRGGATGLFGSDLTQSVTSMRGGAKEGRERRLVDPDRTTGHRQGVRCNAATTSAASQAKVFIPINIREMHWYLVVIHARNMEIQVLDSLGTSQDRKYLTNPIKGLKIQIDMISQRKELKYHRWPDLQVASWPLGEIDMGYAKQTYSSSCGLFLLNYIEYWTGDELSDSFTQDDMSHFRKKMAAILLPSDLNKRRGCLLYKNEKEVDSGSPSDVEILENPIDSNKRKLLHVLDDSEVVYKDQEGPITQADLQRWFVDDWDKRAPVKVSTDGCTNDFLMVGLSTKDMPVTKADSIDVLCDYIMAIEDDTTLECFDMAVRLLANKESRRPKEEIINDINHYMDMRFWDPND

SEQ ID NO: 77268 - protein, 586 aa, Zea mays
  Coding DNA Sequence Number=SeqID_35489
  Gene Ontology: Mol. function=transferase activity, transferring glycosyl groups; Biological process=metabolic process
  Homolog annotation: Hit_ID=Q6Z478; Match level="QueryCoverage=66%, HitCoverage=93%, E-value=1e-117, Identity=53%"; Hit description =Putative flavonol 3-O-glucosyltransferase
  Pfam annotation: Domain name=UDPGT; Domain location=67-481; Score= -115.1; E_value=7.9e-05; Accession=PF00201.9; Description=UDP -glucoronosyl and UDP-glucosyl transferase
MEVARQLYGRVTGEAVYVAEPVSAPARRGSPTKGCLGAMRLVAGPRRKGDQVVCLGFDMRNNGCYPTIVLVHVWGIGHFVPMLEVGKRLLARSARLLTITVLEASGLAIRFHHLPAVEPPTDHSGIEEYISRYVQLYSPHVKAVVASLTCPVAGVVVDIFCTVLFDAAYQLSVPAYVYLITSAAMCALLLRSPALDEEVVIEVEFEQMEGDVDVLGLPPVPASCLPTGLDNRKIPTYRWFLYNGRRYMEATGIIVNTIVEVEPRVLAAIADGRSACAGSTQPLGSVVFFCFGGQGCFTAPQAHDLDHSGHRFLWVLRGTPEPGTKMPSDGNLAELLSTDFLARTKDRGLVWPTKAPQKEILAHAAVGGFVTQCGWNSVLESLWHCMPMVPWPLAVEQHYIAFTLVADMGIAVALNVERKRKNFVEATELERAVKALMCDDETARKVRDKVMEMKLGQTSNKHYWEEALVLTLVIDDEKKLGDCQCDLWKQSYVVACTAVYDKLRRSHRLDVVRSGCTAPSIVKQEDLVVVANVGASRVVLGTTSDDDAITLSSVISVPEMTQRRTDNNDQFIVLTIVGVAFMLACF

SEQ ID NO: 77269 - protein, 150 aa, Zea mays
  Coding DNA Sequence Number=SeqID_35490
  Gene Ontology: Mol. function=zinc ion binding
  Homolog annotation: Hit_ID=Q10LJ3; Match level="QueryCoverage=83%, HitCoverage=13%, E-value=3e-21, Identity=72%"; Hit description=JmjC domain containing protein, expressed
MPMLNVYFVERQGTGKGVGQALRRQAAALQRALHARQDRLREALRPGQEALRALLRRSSASSLAPAFPFSSSAAVARLRVVDEDPPMAAARPLYGRVAGEAVYVVEPVSAPARRGSPTKGCLGAMRLVAGPRRGWSAEAHYGFLVVALKG

SEQ ID NO: 77270 - protein, 268 aa, Zea mays
  Coding DNA Sequence Number=SeqID_35491
  Subcellular localization annotation: CTP_CleavageSite=64; ConfidenceScore=5.35e-01
MAPRTLYDDGGSQPPYGSKRTSARTQQPRQLSFRQAPALLRRPRHHRNWVPKPLRLPRWHNRIRCICGAYTLNTYLVHSPKRWDLMRPQPPHPRTSATRHARARVAAPRLLEPRWPREGAASHVGDAPRRAKGTQAASRTRGARPRCAPGENRPGRPRLGCARVRLATAQADHIGWPTRRRAASRALAAPSHRAGYAGWPHQATRLDGRGRGPGGNGRAGLAVGRQELRRAVARMLAADRHAGWPRRASSREMVRGPQLLRASTRIGA

SEQ ID NO: 77271 - protein, 143 aa, Zea mays
  Coding DNA Sequence Number=SeqID_35492
MSGTLLGEPRARRPRRARGELGHAAHQGRTVRGGHGWAVQGCAWPPRRQTTLAGRREDGPRAARWPRRATVLATQAGHTRPPGWMAAAAGRVAMAERGSPLAGKSCVEPSRACWPQTATPAGRAGPPAVRWCVGRSCCELARG

SEQ ID NO: 77272 - protein, 274 aa, Zea mays
  Coding DNA Sequence Number=SeqID_35493
MDKMGYLKLELGLSIMPKDHLADNLAYNSQKERCRRRWVGPTHQRAPPRLIFPNRPAAPLAPTSRTRSRQPPSPLLSPPPRSCPYPRASSQQLRPTHHLTAGGPARPAGVAVCGQHARDGSTQLLPANGEPRSAIATRPAAAAIQPGGLVWPACVASTVARRGQRAARGPSSRRPANVVCLRGGQAHPCTAQPWPPRTVLPWCAAWPSSPRARRGLRALGSPRSVPDMARGALARPARLEKPWRSYSRPCVSRSTSSWVRWLWPHEIPSFWTVN

SEQ ID NO: 77273 - protein, 355 aa, Zea mays
  Coding DNA Sequence Number=SeqID_35494
MAPGKRSTWTSRKPEEPVPTDYEKIRAMNMMKNNQLFQRLGLGQLKSLVTATATNNKEDCPQQSESLYDGENTDNSNEEESQCRNDGRANISNDGDQISTKVTSGNKRIVAPAQERTIRVTRQRIAEINQENSHNLSVHKQLSSCPATNHDSIKTLVVPTQPSANTTIDNNPTHNIDNAIEPNSLIQEESDNHTAVEGTIDIIPRRKSMGKQLESLSRGLGMKIPIQITEGSKRPEPPIQAAKFASEGGITLRQHIPIFHHLKEYKRKENEPTIKNYIGKVTAQFTMDNDSKAVEDACLDMLKVGQRQMRYRLKQKYFNGIPANQVRTTSPISSMSDEDWRKLVEKWLALYYLIA

SEQ ID NO: 77274 - protein, 81 aa, Zea mays
  Coding DNA Sequence Number=SeqID_35495
MAPGKRSTWTSRKPEVLYAFNLLYVTLIEPVPTDYEKIRAMNMMKNNQLFQRLGLWTTEITSDCYSYKQQRRLSSAIREFI

SEQ ID NO: 77275 - protein, 253 aa, Zea mays
  Coding DNA Sequence Number=SeqID_35496
DARPSQAPCPARLMPTLPLVSLLSVPSDALLAAAALARLEERPSPLRREFGDATLRDTVAPLLVPCYDLATGRPSSSPTPTPWRATSGSATEKELAVVKINPADVEIIASELKLDKKIAKRTLCEHKGDAVAAQGLDSGGRAAIMMFDVADMHGHHGDGRRAAAVQVIFPQSQIARGKASSVAETGSTDHVPSTSSTAADSSTLADKAIAGLPPDLLNKLTIRSGRLSHRTLAGSSVGGLIRLRRSSCNVSFA

SEQ ID NO: 77276 - protein, 273 aa, Zea mays
  Coding DNA Sequence Number=SeqID_35497
  Subcellular localization annotation: CTP_CleavageSite=52; ConfidenceScore=5.14e-01
MDCVTMKQEQGLGTNGPNAKDARPSQAPCPARLMPTLPLVSLLSVPSDALLAAAALARLEERPSPLRREFGDATLRDTVAPLLVPCYDLATGRPSSSPTPTPWRATSGSATEKELAVVKINPADVEIIASELKLDKKIAKRTLCEHKGDAVAAQGLDSGGRAAIMMFDVADMHGHHGDGRRAAAVQVIFPQSQIARGKASSVAETGSTDHVPSTSSTAADSSTLADKAIAGLPPDLLNKLTIRSGRLSHRTLAGSSVGGLIRLRRSSCNVSFA

SEQ ID NO: 77277 - protein, 227 aa, Zea mays
  Coding DNA Sequence Number=SeqID_35498
  Subcellular localization annotation: CTP_CleavageSite=23; ConfidenceScore=5.12e-01
MVKKSLDKNQSKFYTLQRLYPVPTSHVTRLPRGHESHTPLPRKRGRVTLRGLYKVPLASENPLQFMGRALARITRLTAIAAKSTREPRYMQLPYCPCPYRVSDNKEHYWVIEVVKGTTCLTLEIPDCATKTEKCRVSGRRREIRTTPAAQLAQKGLDHVRTAPVVVLAPTDARPSTCRGGADGGDLSAHSTHGQLSAVKYFDSQLDEEEATEVGNNPNLYAGQGDRA

SEQ ID NO: 77278 - protein, 105 aa, Zea mays
  Coding DNA Sequence Number=SeqID_35499
MARCMGFMTPWQMGNMTCGYRVQPLQSVKLQCSALTILFVKPYTSYELPPLMVNTRKGGGIDLPPNRHTRRIFKQPQPQQAEMDPPNPPSIGADPAVAAQIRIMQ

SEQ ID NO: 77279 - protein, 77 aa, Zea mays
  Coding DNA Sequence Number=SeqID_35500
MAGSAASLPARRARGYERPRELQRLVILDQRHCGTGGYETVDSGYDYDAGCQHCNHCSGEDEAVEGDFQEFQDYDEF

SEQ ID NO: 77280 - protein, 172 aa, Zea mays
  Coding DNA Sequence Number=SeqID_35501
MDETTHTLSAASGTAGVVPKVKTIGYPTEQGTVLGKCTTCSILYGCLGSAPLRNRVVFRESLYTQEVILRTAHQAGSLPTVRVPPVTVLVDYTMGAPLARAPGWGVSQTLPPAEARSKSPVAPSPDADAPAPCADDVVAFLGGSTDRTPCSEVDTPQGESAGKGSLSYEQCA

SEQ ID NO: 77281 - protein, 229 aa, Zea mays
  Coding DNA Sequence Number=SeqID_35502
MVGEVVARAPPLAGLAVPVGYAYLVDGATIGVVITGRRERVVQLSVDGTTQPTVILSNGRDNHTLSAASGTAGVVPKVKTIGYPTEQGTVLGKCTTCSILYGCLGSAPLRNRVVFRESLYTQEVILRTAHQAGSLPTVRVPPVTVLVDYTMGAPLARAPGWGVSQTLPPAEARSKSPVAPSPDADAPAPCADDVVAFLGGSTDRTPCSEVDTPQGESAGKGSLSYEQCA

SEQ ID NO: 77282 - protein, 76 aa, Zea mays
  Coding DNA Sequence Number=SeqID_35503
MFRLQVATRLMVLGFDSGNASPLQPDRTLAEYVDVYSPLLYTPNPPSPGCQHCNPCSGEGEAVEGDFQEFQDYDEF

SEQ ID NO: 77283 - protein, 92 aa, Zea mays
  Coding DNA Sequence Number=SeqID_35504
MESHDLRAERESRLVGKVHNLCRVFETDISAVLVVATRLMVLGFDSGNAANPLNKSIDTHLMKMLPTLILTDLEELEVAKRTGARGKNNEKR

SEQ ID NO: 77284 - protein, 147 aa, Zea mays
  Coding DNA Sequence Number=SeqID_35505
MAPGEAVELGGWHSNSLAADKAPGATLDALDVCAGVCCRAECTAAAPGAGRLVARGVEDATSSSMRNEVVVLNDMDHGVEQENKQKPNAKPPTWRAKCRRRNSPAGWQNAPALNPKIRRGLSVLPARWIRDEHKNTQGFRVVQAAGA

SEQ ID NO: 77285 - protein, 202 aa, Zea mays
  Coding DNA Sequence Number=SeqID_35506
MNTRTHKGLEWFRPPERNTLLHSQGGTNKDTEPQHVGPGAKWKEITNACNAWAISECHHVRSPYSIDMSRLLPRRPRGSIGSPHEWGAEAYAVWSGHVSAPDPRLALIKAWVFFVPESWDPAVSGPDPTQRGPVCARGGPGPYPEVRVPTVAPGPTSGEDTSLQVGSKLDWRLVRRFRAFADVITANPPSVTPTAMSVPAVD

SEQ ID NO: 77286 - protein, 177 aa, Zea mays
  Coding DNA Sequence Number=SeqID_35507
MLERREKSLAEHELEAEEKERTLEERVRRFQAAQAAQATSGPQAVEAMKKTLEDLQAEQHAGVQRIAACASEASTTLVPLGVSPIPVSELPTSISDALPVLDSAADRLQRLDQILGARLEAKSVRLRRAMIEYILTCVRSNDPTISLEPVIAGPVADTKDAVREAVQDVVELVAERF

SEQ ID NO: 77287 - protein, 86 aa, Zea mays
  Coding DNA Sequence Number=SeqID_35508
MWLLEGCCRMAHWTVRCTTGHCPAGDDLTGREADLARRDKDLAFKEEMVERREKSLAEHELEAEEKQRTLEEWVRRFQATQAAPGP

SEQ ID NO: 77288 - protein, 347 aa, Zea mays
  Coding DNA Sequence Number=SeqID_35509
MDLQLSIIDSDRRTFAVMKTWSFFYNHTLESLFLSRMNQQEAPTRVGEFLRDFGVPVVLWRLLQEVGYTEAPKYQWSRTVLRGQPWYEVVVRIPERARKPSWPYWMFHAEGKTPWEGAQVAALEVLTTICYQKREEIQATSMRLFPAVALSDPLVYHHQARLMESIPIGQDSVESASARVLMAVLELQLTRGHSRQKWQQLYTGSYAAFKMMETAKNRACTQAQERLEEIKVQAEQVIGLKHQVTELQTQHQADQNRIKELEHQLTNAHSKSKVMSQQQEEIHLYAVAVREDLKETLSFISQQDQTIKELNRAHPMEFQVAQRLVNHLQQAVHRLNVAFYPTPTSAD

SEQ ID NO: 77289 - protein, 102 aa, Zea mays
  Coding DNA Sequence Number=SeqID_35510
  Subcellular localization annotation: CTP_CleavageSite=52; ConfidenceScore=5.02e-01
MAGDAAFVLGRWAIMPGHRLVPCLVKTTATNGQGQGLGGRGGSTRATVMAVLAMGGERCLRPIDVILKDLLDLWVRTHTRFRCASLILLVDVDRIVFIGVSG

SEQ ID NO: 77290 - protein, 93 aa, Zea mays
  Coding DNA Sequence Number=SeqID_35511
  Subcellular localization annotation: CTP_CleavageSite=37; ConfidenceScore=5.14e-01
MKTMRLTSTNKIRVAQRKRVWVLTHRSKRSSRIASIRLKHLKVKEVSPQVKLVESKSTQESCEQPRNQSYFLASLFLNLEGEIPVKGVRFVTP

SEQ ID NO: 77291 - protein, 601 aa, Zea mays
  Coding DNA Sequence Number=SeqID_35512
MVFGNLDVVSANDIAASLASRLEVDEGSLVIRQLSASFLLMLLSDRLVQQLCGRWSVVHANSFSLSCKRWSRLMNSSGSTLPQLLEVELDGIPVHAWEVPTVESLLSPFAWIESVHEDTLQLRNLSSFCCSIWCLDPVSIPPARDLWVVEPLQLGIREEPHRHLRSRSPPAYRGQCSGASLGRDQGTNHYVQGSSSYHGFREARCGDPCVVQNVNLEPPHGSVIVPTFVTARTSSSIHGLPEAGLQNVILELPPSSVTAPTLESGHPTPSTQGFIEDDGGGLCVVQNVILEPPPGSVIVMTLVSAHTTTSTQGSLEVDDDLLCVEQNMNLKPPPSSVTVLTLENAQTSSIWLDSRAEGRKTLAENQLKSTSMLPVGTYGDRAALQVSHPSNMVTKVYYRRRLCGKQEGSLISEQLSMSELDGRICPGVSQSSDSPRCQEEVCGGLLQRFARMRPLATFEHWKKQTATCSTPSAALEHAPARARAAPKPSQRPAIPSPVQPSEKTVRVSVKLPERGIGLCFTGEAGPRSPDFNRPPATVDRGRSTRHRRAHPPAHVDRAIPAVPDDEPYLDVIARPSPSQPYTSPELPRRRDLGANCFSRKT

SEQ ID NO: 77292 - protein, 589 aa, Zea mays
  Coding DNA Sequence Number=SeqID_35513
MVFGNLDVVSANDIAASLASRLEVDEGSLVIRQLSASFLLMLLSDRLVQQLCGRWSVVHANSFSLSCKRWSRLMNSSGSTLPQLLEVELDGIPVHAWEVPTVESLLSPFAWIESVHEDTLQLRNLSSFCCSIWCLDPVSIPPARDLWVVEPLQLGIREEPHRHLRSRSPPAYRGQCSGASLGRDQGTNHYVQGSSSYHGFREARCGDPCVVQNVNLEPPHGSVIVPTFVTARTSSSIHGLPEAGLQNVILELPPSSVTAPTLESGHPTPSTQGFIEDDGGGLCVVQNVILEPPPGSVIVMTLVSAHTTTSTQGSLEVDDDLLCVEQNMNLKPPPSSVTVLTLENAQTSSIWLDSRAEGRKTLAENQLKSTSMLPVGTYGDRAALQVSHPSNMVTKVYYRRRLCGKQEGSLISEQLSMSELDGRICPGVSQSSDSPRCQEEVCGGLLQRFARMRPLATFEHWKKQTATCSTPSAALEHAPARARAAPKPSQRPAIPSPVQPSEKTVRVSVKLPERGIGLCFTGEAGPRSPDFNRPPATVDRGRSTRHRRAHPPAHVDRAIPAVPDDEPYLDVIARPSPSQPYTSPELPRR

SEQ ID NO: 77293 - protein, 137 aa, Zea mays
  Coding DNA Sequence Number=SeqID_35514
MQISYTLHSLDCNLADGEYMLIPEQGPVQEEDQEQASEAVIEDLPAAPAIEGKPRYGGYKCGHCTAAAGVSGALYAKAVRPGRERGIDGDGCHVWGQSTLTCRTIQEMVDGVTWPTTLPPGWMVEWDVAPAGEEHEE

SEQ ID NO: 77294 - protein, 59 aa, Zea mays
  Coding DNA Sequence Number=SeqID_35515
MRPGRERGIDGDGCHVWGQSTLTCRTIQEMVDGVTWPTTLPPGWTVEWDVAPAGEEHEE

SEQ ID NO: 77295 - protein, 62 aa, Zea mays
  Coding DNA Sequence Number=SeqID_35516
MAVGVSEALYAKAVSPDLLLGNRWGRLMYLLDLVDGVTWPSSLPPGWTVEWVFASAGEDQEE

SEQ ID NO: 77296 - protein, 62 aa, Zea mays
  Coding DNA Sequence Number=SeqID_35517
MVSHSGYGGYKCGHCTTAVGVSEALYAKAVSPDLLPGNRWGRLMYILDLVDGVTWPSSQPPG

SEQ ID NO: 77297 - protein, 374 aa, Zea mays
  Coding DNA Sequence Number=SeqID_35518
MAHTLDEVRSSEAPTEARPSETAPITLEKESVTQKSKSPAPEAPVKELEFIVRHASGKQLSEDRSSSLLPPSPALGPQPQRPAEPFPSRELPCLPWPHVWHPLPQHARACVLRRGSLELPAMAAISHGRCALAACSIVAPQAPSARLHGAPSLRSFLAVRCRRPVHGHAQLLAPPTRPASSFSLRARSSLLTGVSPCFLIHLALPAFSLVAHGANSGHPCPLADRRYATVRLPDAHPCHLPAGAPSRRHGLAGFPPPCCAHGFGCVFPPRSASTSSRVRDVPVEPQQKPEPGSHHCFREVQAGYIILEVDLVLKPNPASLLFFVVNPHRVHDVPVDPDDLSASCAPLVMSSKVLCRARPWKPPTRQHPLCRRKI

SEQ ID NO: 77298 - protein, 339 aa, Zea mays
  Coding DNA Sequence Number=SeqID_35519
METGALSGGGGRRERGRGELAGRRRIARGPRLSESELGRSSSLLPPSPALGPQPQRPAEPFPSRELPCLPWPHVWHPLPQHARACVLRRGSLELPAMAAISHGRCALAACSIVAPQAPSARLHGAPSLRSFLAVRCRRPVHGHAQLLAPPTRPASSFSLRARSSLLTGVSPCFLIHLALPAFSLVAHGANSGHPCPLADRRYATVRLPDAHPCHLPAGAPSRRHGLAGFPPPCCAHGFGCVFPPRSASTSSRVRDVPVEPQQKPEPGSHHCFREVQAGYIILEVDLVLKPNPASLLFFVVNPHRVHDVPVDPDDLSASCAPLVMSSKVLCRARPWKPPT

SEQ ID NO: 77299 - protein, 94 aa, Zea mays
  Coding DNA Sequence Number=SeqID_35520
MDPTRQQLSPRTVLSSSTPVTGDPEFGVGGARLTPEFLAVAAPPPSAADRAGHHSGSAEAGSHSIVQPGGKMDDQVTPATMSSREPVKLCHKQG

SEQ ID NO: 77300 - protein, 139 aa, Zea mays
  Coding DNA Sequence Number=SeqID_35521
MAPSWIKDKATQSLIIMDLRLPKHYVHMVCAVLTVCGSAGPFAIRTYLRVISVSPTDGTVLSAAVCAILFAEPRGVVVRNLESGSARLTPKFLAVAAPPPSAADRVGHHSNSDEQATEDTGVQQVETTEQELVEGKLCP

SEQ ID NO: 77301 - protein, 319 aa, Zea mays
  Coding DNA Sequence Number=SeqID_35522
  Gene Ontology: Mol. function=oxidoreductase activity; Cellular component=integral to membrane; Biological process=cell death
  Homolog annotation: Hit_ID=Q94CH1; Match level="QueryCoverage=89%, HitCoverage=53%, E-value=1e-143, Identity=89%"; Hit description =Seven transmembrane protein Mlo4
  Pfam annotation: Domain name=Mlo; Domain location=4-318; Score=108.2; E_value=2.4e-29; Accession=PF03094.6; Description=Mlo family
MAVEQGRSLAETPTWSMATVTTLMVAACFLVERSLSRFAKWLRKTKRKAMLAALEKIREELMLLGVISLLLSQTTRFISEICVPSSLFTSRFYICSESDYQDLLRNTDANQTTLDKNMFGGQRLHVCGVVLVIQMSCSQPIEGHEPFVLYEGLEQLHRFLFILGITHVLYSFVTVVLSMIKIYSWRKWETLAGPIAAEELKARRTKVMRRQSTFVFNNASHPWSKNKILIWMLCFLRQFKGSIIRSDYLALRLGFVTYHKLPHSYDFHKYMVRSMEDDYNGTIGISEAFKYTGLEIVSHEIQYGGCVEETGPAGHIKSY

SEQ ID NO: 77302 - protein, 226 aa, Zea mays
  Coding DNA Sequence Number=SeqID_35523
  Homolog annotation: Hit_ID=Q94CH1; Match level="QueryCoverage=23%, HitCoverage=10%, E-value=1e-23, Identity=96%"; Hit description=Seven transmembrane protein Mlo4
MCNGRRPLWDYAEVRETNSYIFQRKETKRTGVNISYMLIQLLELNSVVYKAKKLEILDLKVLLGLHFMPQSTTGPEISPAAVPELMSKPTEAVPPAGSMVRSGTEVISSCGGRRCALGHVVCIYVFESLTLFGFTGHACLLRFISEICVPSSLFTSRFYICSESDYQDLLRNTDANQTTLDRNMFGGQRLHVCGEVLVTQMSCSQPIEVNGTGSGAHCSLIAWVGT

SEQ ID NO: 77303 - protein, 102 aa, Zea mays
  Coding DNA Sequence Number=SeqID_35524
MARVACTLRGKRLDGGVSVLSHTLESLFLSRVRKRQTFVAFAPRWYQTRKNKTEVREDSVLHLGSFAYSLSGGVCASHGLYNITTLHSLLALVCNKITQPCF

SEQ ID NO: 77304 - protein, 164 aa, Zea mays
  Coding DNA Sequence Number=SeqID_35525
MTWTPHRLAVVHLLWLTAHEREEEIEVTEEETPPPPSESQAGNSFYFDICGSEPDSPVNEGKPRLKNPGGGLTYARVKCYICRVIGDPQLSIIDSDRRTFVHTLESLFLSRVRKRQIFVAFAPRWYQMKKNKTEVREDLVLHLGSLLIAYREEFVPPLVCMTNL

SEQ ID NO: 77305 - protein, 120 aa, Zea mays
  Coding DNA Sequence Number=SeqID_35526
MTWTPHRLAVVHLLWLTAHEREEEIEVTEEETPPPPSESQAGNSFYFDICGSEPDSPVNEGKPRLKNPGGGLTYARVKCYICRVIGDPQLSIIDSDRRTFVVMKTWSLPCNLKSGCGHYG

SEQ ID NO: 77306 - protein, 249 aa, Zea mays
  Coding DNA Sequence Number=SeqID_35527
  Gene Ontology: Mol. function=catalytic activity; Cellular component =nucleus; Biological process=metabolic process
  Homolog annotation: Hit_ID=Q9SNJ6; Match level="QueryCoverage=100%, HitCoverage=43%, E-value=7e-98, Identity=73%"; Hit description=EST AU070346(S12172) corresponds to a region of the predicted gene
  Subcellular localization annotation: CTP_CleavageSite=76; ConfidenceScore=5.24e-01
MDQLPKRPANYVPLSPVGFLPRANAVYGDRTSVIYRGVRFTWRQTYARCRRLASALLSLGVVRRGDVVSVLAPNVPAMYEMHFAVPMAGAVLNTINTRLDAAAVATILRHSGAKLFFVDYDYVRLASDALRLLDAADVPLVAVIDDIHSPTGARLGELEYEALLAHGDPDADLPPLQDEWDAVTLSYTSGTTSAPKGVVYSHRGAYLSTTSLLLQWGVPAEPVYLWTLPMFHCNGWTFTWGMAARGGVN

SEQ ID NO: 77307 - protein, 578 aa, Zea mays
  Coding DNA Sequence Number=SeqID_35528
  Gene Ontology: Mol. function=catalytic activity; Cellular component =nucleus; Biological process=metabolic process
  Homolog annotation: Hit_ID=Q9SNJ6; Match level="QueryCoverage=99%, HitCoverage=100%, E-value=0.0, Identity=74%"; Hit description=EST AU070346(S12172) corresponds to a region of the predicted gene
  Pfam annotation: Domain name=AMP-binding; Domain location=41-470; Score=365.3; E_value=9.7e-107; Accession=PF00501.18; Description=AMP- binding enzyme
  Subcellular localization annotation: CTP_CleavageSite=76; ConfidenceScore=5.24e-01
MDQLPKRPANYVPLSPVGFLPRANAVYGDRTSVIYRGVRFTWRQTYARCRRLASALLSLGVVRRGDVVSVLAPNVPAMYEMHFAVPMAGAVLNTINTRLDAAAVATILRHSGAKLFFVDYDYVRLASDALRLLDAADVPLVAVIDDIHSPTGARLGELEYEALLAHGDPDADLPPLQDEWDAVTLSYTSGTTSAPKGVVYSHRGAYLSTTSLLLQWGVPAEPVYLWTLPMFHCNGWTFTWGMAARGGVNVCIRDARPADIYRAIARHRVTHMCCAPVVFSILLDGDGDSDGAARQLQAPVHVLTGGAPPPAALLERVERIGFNVTHAYGLTEATGPALACEWRDQWDRLPLPERARLKARQGVSVLSLADADVKNADTMLSVPRDGRTVGEIVLRGSSVMKGYLNNPEANESAFRAGWFLTGDVGVVHPDGYIEIKDRSKDVIISGGENICSKELEEVLFRHPAVADAAVVAMPHPRWGETPCAFVVPRDKAAVLSEGDVLAFCSKRMARFMVPKKVEVVGALPRNALGKVEKVKLREAARKLAPTVAAAQKPKAKTTTVGGRRDGQPVAHVMAVSRL

SEQ ID NO: 77308 - protein, 200 aa, Zea mays
  Coding DNA Sequence Number=SeqID_35529
  Gene Ontology: Mol. function=catalytic activity; Cellular component =nucleus; Biological process=metabolic process
  Homolog annotation: Hit_ID=Q9SNJ6; Match level="QueryCoverage=99%, HitCoverage=34%, E-value=7e-72, Identity=69%"; Hit description=EST AU070346(S12172) corresponds to a region of the predicted gene
MLSVPRDGRTVGEIVLRGSSVMKGYLNNPEANESAFRAGWFLTGDVGVVHPDGYIEIKDRSKDVIISGGENICSKELEEVLFRHPAVADAAVVAMPHPRWGETPCAFVVPRDKAAVLSEGDVLAFCSKRMARFMVPKKVEVVGALPRNALGKVEKVKLREAARKLAPTVAAAQKPKAKTTTVGGRRDGQPVAHVMAVSRL

SEQ ID NO: 77309 - protein, 108 aa, Zea mays
  Coding DNA Sequence Number=SeqID_35530
MATETRRQPESTVADLGGCAENGGERGQSDSGRGRGNWSASRVADVGAELTVAEGTAGLQRRRRNELGRRRFNGGGALACAQRGGGLRGVCRCANEGGGEGVRGSGLK

SEQ ID NO: 77310 - protein, 152 aa, Zea mays
  Coding DNA Sequence Number=SeqID_35531
MATETRRQAESTVADLGGCAENGGAQMREGERACEALGSSDRGEVVASSTRDVGVESAAREDRGGGYAKTEELTARAHEQRERKAGADAGKAVALTGGPARAEREGGGGKARAGDGPDGPKGRGGGGSGPSFPFSFILAFVSLLTNQADSSD

SEQ ID NO: 77311 - protein, 301 aa, Zea mays
  Coding DNA Sequence Number=SeqID_35532
MGLTQLKGKCIAQPSQDNRDHMVKKLETGITVACTTSLEENVKDLRIAMRREQNMKFNTSSKSLNHASTKGNIQGNPKLQLVLERKKRQIQREDSQMKKEDIKNNTTYLDSKIYKIIYGVIVSKIQHKTNKKNKTRVKRKEQKGNRSAPWSGAPDCPVCHRTVSGAPPDSVRCTREDCLQTLRLRVSQAQPTIIHRTVRCTPDSVRCSNGTRPQELGSLGISRRLLRYNSPDMSGVHRTVRCNLGATATSRQRSTLTVNSARGRSQSRGSERHRTVRCAPDCPVPHEDKSLQRSTSSNPNG

SEQ ID NO: 77312 - protein, 62 aa, Zea mays
  Coding DNA Sequence Number=SeqID_35533
MGRPRHRPSSGDAWDEGVAGEGIERRVASSPSPQHLPSEGPVRLSHLVPKASLDGGDYGPDL

SEQ ID NO: 77313 - protein, 95 aa, Zea mays
  Coding DNA Sequence Number=SeqID_35534
MQGLLQWAGSHVGLHVGRGHEVRRPRHRSSSGDAWDEGEVGEGIERRVASSPSPQHLPSEGPVRLSHLVPKTSLDGGDAALARSCFAGVFDMTVD

SEQ ID NO: 77314 - protein, 63 aa, Zea mays
  Coding DNA Sequence Number=SeqID_35535
MACCNGPDHHVGLHVGRGREVRRPRHRSSSGDAWDEGHCVTLGKLCMNRVGKCPMEGADSQQF

SEQ ID NO: 77315 - protein, 138 aa, Zea mays
  Coding DNA Sequence Number=SeqID_35536
  Gene Ontology: Mol. function=ATP-dependent helicase activity; Cellular component=intracellular; Biological process=translation
  Homolog annotation: Hit_ID=Q53NR4; Match level="QueryCoverage=77%, HitCoverage=7%, E-value=4e-35, Identity=68%"; Hit description =Similar to probable ATP-dependent RNA helicase-fission yeast
  Pfam annotation: Domain name=ResIII; Domain location=39-121; Score= -17.4; E_value=0.0013; Accession=PF04851.6; Description=Type III restriction enzyme, res subunit
MTLVALKPPTEASKRQQDPCRTASYASTWLKALLQQPPNVEVREYQKYMVEKALFTNTLIALPTGLGKTFIVEVVMYNYFRWFPEGKIIFTCPSRPLVTQQIEACHNTVGIPQVEVYFWPSNYCPSLFLDMQLKNYKS

SEQ ID NO: 77316 - protein, 360 aa, Zea mays
  Coding DNA Sequence Number=SeqID_35537
  Homolog annotation: Hit_ID=Q6QP51; Match level="QueryCoverage=36%, HitCoverage=85%, E-value=3e-17, Identity=70%"; Hit description =Putative growth-regulating factor 1
MGDENQPLKPKSRRSAVQQPPAHGTTVARVEDGQLHPDQAVAVRLPPDSWRTSPPQGWRMPFSPECWRKKRVAGPSGRQDPTRRALPPARMMNILEAEGGAEAAARLASPHHKAGTGKGDIPKRILPSEGNGPRAPLLIRGSKVAPSGVRQPPQSTQALSPLLIKGSKAGPSKGFNSRPRARRVRDDPGYVRYMAEARATLPRELCLARPQASASASALGEGLRLARPQASASASASGGVTSSPDLDLGLGLGRRSPPRSTWASDRLRYRGYIITLLLASYLRLRRNKTDVPSKVTPVTSNDGSPRAPMTSVALKPPTEASKRQQDPCRTASYASTGSRHFSGSHVSARTGLKALLRQPR

SEQ ID NO: 77317 - protein, 132 aa, Zea mays
  Coding DNA Sequence Number=SeqID_35538
MAGSVREEPEAEHHLRVEKARDSLRSYSTEKGIATLAFNKISLFLKVDHTCIMAKEIKKKVCSNIVNCVLEFTLGAMDVLMIRNLGEDQQGLGKGQDVKEEKLGRSRQEGAKSDSTSSRARSPRLVCTKTDA

SEQ ID NO: 77318 - protein, 103 aa, Zea mays
  Coding DNA Sequence Number=SeqID_35539
MAGSVREEPEAEHHLRVEKVRDVSTKSSIVETAMSVREEPEAEHHLRVEKARDSLRSYSTEFGTAGNEPASYSVRPPLEPLVDPHEGTGTSIRATPSIALLSE

SEQ ID NO: 77319 - protein, 48 aa, Zea mays
  Coding DNA Sequence Number=SeqID_35540
MAGSVREEPEAEHHLHVEKTRDSLRSYSTEVKNRYRKMRSMKDATMSS

SEQ ID NO: 77320 - protein, 380 aa, Zea mays
  Coding DNA Sequence Number=SeqID_35541
  Homolog annotation: Hit_ID=Q5I7K6; Match level="QueryCoverage=33%, HitCoverage=52%, E-value=2e-46, Identity=74%"; Hit description =Ribosomal protein L7
  Subcellular localization annotation: CTP_CleavageSite=47; ConfidenceScore=5.24e-01
MSGGGFFIRTVESPGAVLMNGAVKRPAQQFLSPSSNKENVPPVGALRATPKRRTPLPDWYPKTPLRDITSIVKIFNGVFLKVNKATINMLRRVEPYVAYGYPNLKSVRELIYKRGYGKLNKQRIPLSNNQVIEEGLGKHNIICVEDLVHEIMTVGPHFKEANNFLCRAVMPSTKKTLVKEPHRYVVSIVIAMCIVGAFAQATVLQNTGAFQNSERIGRSHRRQVPAEEFLKIIHLLNNSFQLARLYLRLRQSFLYFCLWWNQHGLGGDNVFGSCRPLHNGLVSLMHWSGKGKPWDRLDADKPCALDHTWKLKPGADGSFPVDRAEATSGEKLLCDVMNENKIKLYAAYIIDGKELLNERTSTENRYLKKVVVQRLPQWKR

SEQ ID NO: 77321 - protein, 214 aa, Zea mays
  Coding DNA Sequence Number=SeqID_35542
  Homolog annotation: Hit_ID=Q6Z5N7; Match level="QueryCoverage=27%, HitCoverage=16%, E-value=6e-27, Identity=86%"; Hit description =Putative Avr9/Cf-9 rapidly elicited protein 231
  Pfam annotation: Domain name=Fer2; Domain location=102-182; Score =17.0; E_value=0.016; Accession=PF00111.17; Description=2Fe-2S iron -sulfur cluster binding do
MVSTHGDTARPSSSQEDLAVTMKKCISNRPQDHPFTQQQLPACKTILATQTNQHGLGGDNVFGSCRPLHNGFVSLMHWSGKGKPWDRLDAGKPCALDHTWKAYDLYTGENDSSSASASSGVVLLYRSQGKVMNCGGGGSCGTCIIEIIDGKELLNERMSTENRYLKKKPDSWRLACQTIIGNKENSGKASFVLFPTHPAINTSLPYALKKKVVQ

SEQ ID NO: 77322 - protein, 116 aa, Zea mays
  Coding DNA Sequence Number=SeqID_35543
MATTPEEFFIKDLMEQPPLSPPVFLELPHKPNASNEDRHQVPNNDMTLPYISRMLMEDDDDELGDHPALLQVQQSFAKILSSPPLVGTNTNNSEGPNDFLHEGTRLDRMIKLELGN

SEQ ID NO: 77323 - protein, 370 aa, Zea mays
  Coding DNA Sequence Number=SeqID_35544
  Homolog annotation: Hit_ID=Q53MB3; Match level="QueryCoverage=20%, HitCoverage=12%, E-value=4e-18, Identity=60%"; Hit description=GRAS family transcription factor, putative
  Subcellular localization annotation: CTP_CleavageSite=46; ConfidenceScore=5.80e-01
MTNPASAPSRSSHPSSFLWPQPSRTRRKRIRFSLPPCSCRPLNRVQQGARRGCGKKGGTAVEPTKWGEVSASWFQRHPELRSDRAPQVARQSPTLGRKVPRRGDEGGAAREGVCFVGGETRPERWALQAKRVEIGLEVGGIIAAGARRGGRTSEKRTAAAPHTVVDWRQPSAATSTRLAASPNESYCPAALPFMSMATTPEEFFIKDLMEQPPLSPPVFLELPHKPNASNEDRHQVPNNDMTLPYISRMLMEDDDNELGDHPALLQVQQSFAKILSSPPLVGTNTNNSEGTNDFLHEDVFIQSVVNQSYGSSFLSRFREILFYCTAMFDMLDATLPRESESRLVFEKLVLGCYVFNGISCEGSDLVLRPK

SEQ ID NO: 77324 - protein, 393 aa, Zea mays
  Coding DNA Sequence Number=SeqID_35545
  Homolog annotation: Hit_ID=Q53MB3; Match level="QueryCoverage=22%, HitCoverage=15%, E-value=3e-26, Identity=64%"; Hit description=GRAS family transcription factor, putative
  Subcellular localization annotation: CTP_CleavageSite=46; ConfidenceScore=5.80e-01
MTNPASAPSRSSHPSSFLWPQPSRTRRKRIRFSLPPCSCRPLNRVQQGARRGCGKKGGTAVEPTKWGEVSASWFQRHPELRSDRAPQVARQSPTLGRKVPRRGDEGGAAREGVCFVGGETRPERWALQAKRVEIGLEVGGIIAAGARRGGRTSEKRTAAAPHTVVDWRQPSAATSTRLAASPNESYCPAALPFMSMATTPEEFFIKDLMEQPPLSPPVFLELPHKPNASNEDRHQVPNNDMTLPYISRMLMEDDDNELGDHPALLQVQQSFAKILSSPPLVGTNTNNSEGTNDFLHEDVFIQSVVNQSYGSSFLSRFREILFYCTAMFDMLDATLPRESESRLVFEKLVLGCYVFNGISCEGSDLVLRPKKYRQWQARNERAGLFWMATKTRS

SEQ ID NO: 77325 - protein, 135 aa, Zea mays
  Coding DNA Sequence Number=SeqID_35546
  Subcellular localization annotation: CTP_CleavageSite=40; ConfidenceScore=5.58e-01
MPLFPRSELAQLPSHVCSPLSVSLRAAACRRRPVSSTRARCLMGVEVVEHVTEVTEKLAADAASSMPENGSLHKVAVEVECVAEAVDKDAHKVEAVNDKDLPAAHPQRLIMPHDRAQATASLCYTGGEASYQVRG

SEQ ID NO: 77326 - protein, 344 aa, Zea mays
  Coding DNA Sequence Number=SeqID_35547
MATLALPPTTKAAGQDATQESLAENPAKDAADPGSMESEWVLLGKSDIVPADVAAAAAAGHHHLNFSPLPMIPIWVQMVLGGVVYTAVPFYKRVLKVEGETLANVETAVEVVEHVAEVTEKLAADAASSLPENGSLHKVAVEVECVAEAVDKDAHEVEAVIDKRKITAARTFTVGDGQGWMSGIDYTDWTSGKTFAVGDKLPAAHGSRPRRAQQAKTTAPGVRHRQQGKATAGRQQPAGAADRACRRAHRMRWARTRTQARAPLPHRPLRPRHLTIGISGHRSPTAPAGAHPRFLFAASWSSPTLLLLYSTAPDREGGSPSSRSRNNGELYTTVTLHYSQSTTQ

SEQ ID NO: 77327 - protein, 243 aa, Zea mays
  Coding DNA Sequence Number=SeqID_35548
MDYMVFEVAELDGAAMICHTNNKMKVYMGIVWMFAIRKKWRGQIRCVVRRRWSVEKKVKVWASKPDGTFWRELGEACGVITNGASRQSNFVNNVWSSDQNVGSWSILPMAEWISSMHLGSISYRVWEICNLEKRVEDKLNELCFFTDILSGLCSMALGEDVVGDDDKDHGDDSTSEVSLSTDDLSAEVDELTATLAGQDKLLRLAARERKEYKCKYESTLREHESARDSIVVYDKTECDECTL

SEQ ID NO: 77328 - protein, 41 aa, Zea mays
  Coding DNA Sequence Number=SeqID_35549
MDYMVFEVAELDGAAIICHTNSKMKVYVGIVVNRRNARATD

SEQ ID NO: 77329 - protein, 55 aa, Zea mays
  Coding DNA Sequence Number=SeqID_35550
MDYMVFEVVELDGAAMIYHTNSKMKVNRCELSSNRSLHWPCCTKTYLYGVNNNIR

SEQ ID NO: 77330 - protein, 219 aa, Zea mays
  Coding DNA Sequence Number=SeqID_35551
MAEMYQLPRSCVPPTMRRKDGGPMGERGGQPCRRHATAPSGRASPTPDTPAWRPRPTHHATGAPDAACKQLHRHLRHDRASSSAEPIPRLEATQRTTQQRQPDAAVNAAKSGPAVMTMAGGREQRSRHQPSSRPIRGQQENPLSRREDNAPMIRSSNGSRTRNGCPANHSPRRINSAARQAALPVGAVGDASPSPRDRERGIPQKGSFPVKEPGSEPPY

SEQ ID NO: 77331 - protein, 160 aa, Zea mays
  Coding DNA Sequence Number=SeqID_35552
  Subcellular localization annotation: CTP_CleavageSite=81; ConfidenceScore=5.17e-01
MTVADGREQRSRRQPSSRPIQGQQENPLSRREDNAPVIRSSNGSRTRNGRPANRSPRRINSRTGGASGGSSGRRFAFAVITATKKQGPGKGDTPKRILPREGTRLRASLLIRGSKAGPPKGSTAASDRVGPTPTTGQRFEGRPPEGFHGRLRLLGLRAHY

SEQ ID NO: 77332 - protein, 286 aa, Zea mays
  Coding DNA Sequence Number=SeqID_35553
  Homolog annotation: Hit_ID=Q6QP54; Match level="QueryCoverage=25%, HitCoverage=39%, E-value=2e-14, Identity=50%"; Hit description =Putative kinase
  Subcellular localization annotation: CTP_CleavageSite=14; ConfidenceScore=5.04e-01
MAERYQLPRSCVPPTMRRKDGGTGGTSGGSSGRRFAFAVITATKKQGPGKGDTPKRILPREGTRLRASLLIRGSKAGPPKGFQQPPQIAWALHPLLVRGSKAGPPKGSTAASGYSGSAPITDQGFEGWPPKEDGELRSARPRARTRAQPQKTTNSASPDPRARTPPWPLPNDLRLARPRGSDSASAMEDRLDLGFGGASTSPNLGRRPATSTGSAIITLPRADSGRREQDRLRRSSDGHDITPAGCQNLSGCHIGMALLEKVGRAGTRMGQALSWGRSLPSPAWTL

SEQ ID NO: 77333 - protein, 302 aa, Zea mays
  Coding DNA Sequence Number=SeqID_35554
MALPVDVAGLCPRRGDVGAPPKPRLSLSSVAEAESEPWGRARRRSFGRGQGGVRALGSGEAEFRRLPGLSPSPSPGVGQSGVRRLPGLSPSPSPGVVSSSLGRICPGVSQLSDSPRCQEESTPEHAPRRARAKPVPWSASAAIKRPGALAVPLRTRSSLTGAQFAAPSEKTVHVSVKLPERGIGLCFTGEAGPRSPDFNRPPTTVDRDPPRANPTLRRDSLAAEYILVPEQGAAQEVAPDPAPEPAPEDLPATALEGKPRNPFEMNTSSLEEMVAGITWPSTLPPGWTVEWDPASAEEEHEE

SEQ ID NO: 77334 - protein, 280 aa, Zea mays
  Coding DNA Sequence Number=SeqID_35555
MGKNKKGGSSSHHSDNKRKREPSPPLEDFEVSLDEENSSDSSEEETGGDDDDEGDDGDGGDGGDDGDDDDKGDGGSSGKGNDNGKGSSGNSEASGKAPLLVFAPNATNYIRNNYQVITGRICPGVSQLSDSPRCQEESTPEHAPRRARAKPVPWSASAAIKRPGALAVPLRTRSSLTGAQFAAPSEKTVPVSVKLPERGIGLCFTGEAGPRSPDFNRPPATVDRDPPRANPTLRRNSLAAEYILVPEQGAAQEVAPDPAPEPAPEDLPATALEGKPRFYA

SEQ ID NO: 77335 - protein, 181 aa, Zea mays
  Coding DNA Sequence Number=SeqID_35556
MDKRGKRVSKCAKHGSPSLGRICPGVSQLSDSPRCQEESTPEHAPRRARAKPVPWSASAAIKRPGALAVPLRTRSSLTGAQFAAPSEKTVPVSVKLPERGIGLCFTGEAGPRSPDFNRPPATVDRDPPRANPTLRRNSLAAEYILVPEQGAAQEVAPDPAPEPAPEDLPATALEGKPRFYA

SEQ ID NO: 77336 - protein, 297 aa, Zea mays
  Coding DNA Sequence Number=SeqID_35557
MNSGCPVGHRTVRDWAVGFDGGEEAHYRRRWRAPYAAIRHLRTRRPTPEEYDSWARAPVSETGSLLSAEVKRRITAGGGVLLSRRFAFSAHGGRRPKSMTRGPRSPCQRLGRCFRRRRRGALPQAVACSSRGGSPSPRMEADARRVRLMGPGPRARGWATAFGGDEEARRFAPFMAVRLHRTRGPTPKEHDSWAQAPVPEAGALSPSSALHSNAAVSAMALLDPPERLQPEVALNLVRNLLGWGVSAFSRKIRVGASPHSNLAVEEFVFFVSNLPSGLALPISSFFVLLLEELGLQS

SEQ ID NO: 77337 - protein, 203 aa, Zea mays
  Coding DNA Sequence Number=SeqID_35558
  Subcellular localization annotation: CTP_CleavageSite=43; ConfidenceScore=5.01e-01
MAHQTLSVAPPDSSVCQTELDFGSQRPYVWLRPLAYVTGSRSRGSIGSPPERGVGALVAWSVHVSAPDPRLALIKAWVLNPARKSGLCLQGSGPTVATLEYIVFLGYVAALEPLTWWGQGTDSDPRTRLREDTSLQEPAPMEDDSWARALVSETGLLVSAEVKRRTAADGGVLLTRRVLSLLSYPRSSAAVAAIALLNPPERL

SEQ ID NO: 77338 - protein, 212 aa, Zea mays
  Coding DNA Sequence Number=SeqID_35559
MGQRTLAFTRLLLRKVFGNTLRNHGLLVVYAKLGQGRNKVSGSGEGSVWRPDRWGSGQRHALATRSRINGLGLTNRANRYPSAWANGSRMNGQDLVEGGYGLATGAAPSAVVKSPETGQAASEGVLGSPVRAGTGEERSDELTSRTPTARTGSEMGEQRRGGALGGSGNSGEESRPQGGFGRAKAWTGSGRLMVGWTTGSVATDLQRARAAM

SEQ ID NO: 77339 - protein, 57 aa, Zea mays
  Coding DNA Sequence Number=SeqID_35560
MPLRPPAGSDVGHSFTIVRLRKPDTPSHDDEQPVVPECVAEHLPEQQPGEGKCPLTY

SEQ ID NO: 77340 - protein, 47 aa, Zea mays
  Coding DNA Sequence Number=SeqID_35561
MARVRALSLSLPDNEQPVVPECVAEDLPEQQPGEGKYPLTYYVLLTL

SEQ ID NO: 77341 - protein, 173 aa, Zea mays
  Coding DNA Sequence Number=SeqID_35562
MQIKSSGTLLELALLSELIQLRSKSGVSECPASIVKDACALRRLGYPRNIPIKQAGVAKAFERRVASSPSPQHLPSEGPVRLSHLVPKALLDGGNAALARSGSAGDMQQLVYFGDGSGECRGQRRFPSPRKFGVQVHQLTPNAMVALAKYVWATTSYGSQPSVEVFAKHYCLH

SEQ ID NO: 77342 - protein, 404 aa, Zea mays
  Coding DNA Sequence Number=SeqID_35563
MTSYGGQPSVEVFAKHYCLHWQKRKIGHKIAQFGSCTFTPKSGKTSMEVVELVPCARNKWGNWWNYWFYVSEAEVKDRPGLPAAIMCSHYYVAYPPFEVAEDDENEVALRIAARTSSGRDLVEEFIGVFELNRLPYGGYPGEDVVDRRGKRSAAVAEEDPAPEAAPATKKRKLGTAVGELEVSNRFAMELMGTCVAPGGRMSSPELRESSARMLEVTGGRWRKNVPIPRAAGEDFFTSRMARDLRVFPYRRNIAAVVSAVMNKDRRDAAQKHRPVVRMVDPVREAKRARGSAKAAASGSGKLVPARRRQARRLQLLAKPSLSRARCVAGSGEGHLVVVPPSLAVTSPSAVVKVKGVTQDPWAAFCASSEILTAAAARDVAGTMSQRLREVSQQLSQQLTQQLKQ

SEQ ID NO: 77343 - protein, 318 aa, Zea mays
  Coding DNA Sequence Number=SeqID_35564
MSQRLKEVSQQLSQQLTQQLKQAADFADRVESGVLTADVTAKVENLRAQHADAVRDKSAAESKSRRLVEKVVTLEAEKTDLRRRLAEERREANQTVDEAQAAQAEAKVALAKGSLASQHAEEWEARFNALRSRVDKVETLEELLVLPTIVQGFMSYASLVTCEGAMNALSREGCKHYEVFDQSDENFEREIFKVEDPVVKDSAGALFDRMWGPHGREAVREWSDRAREQMARAEDVEDFGDLNGARPEAKVNPVLPEAEVDPALPSEAGEGSSAAPVPTASGEGSLPAPAPMVEDPPKAVEELAAEDPMAAAGPSQVA

SEQ ID NO: 77344 - protein, 396 aa, Zea mays
  Coding DNA Sequence Number=SeqID_35565
  Gene Ontology: Mol. function=cysteine-type peptidase activity; Biological process=proteolysis
  Homolog annotation: Hit_ID=Q53MK8; Match level="QueryCoverage=61%, HitCoverage=26%, E-value=4e-20, Identity=26%"; Hit description=Ulp1 protease family, C-terminal catalytic domain, putative
  Subcellular localization annotation: CTP_CleavageSite=39; ConfidenceScore=5.21e-01
MPSSKKRNLDDSPGKVLKKVVTKRRKAVPPPRQQKLNVRCNPQDVLVSIQILNDRQQQAIARRGFSSILDMRLDALGNRSHLAWLMEKLDPNDMTIRAGPGKELKITKDTVHLILGLPNAGGGTALGIDEAVVANNLRAELGLSKEDFGGYSSTRSFEERLLFPTASWGITNHEVLLTEQMDRFHQIDWCQLIFNDLCQAAKKWHNRSVTNVSTTIYGCSIVVLLYYLDHLHDSAAPLNKRGTPRIKYFDRNIIQALTRADKGKIRKGEEAFGHCSHKTRTNAFDVPRPDPSGQHSIHIELPLIRDLISSKLNQLPSRHRMGFIEKLSHFDAEVGKACSVIKQTLQQIVEKQFNLSDVFGELIDEVLRAEVGDNEDAYDVQKTTSKSDDILPQTAG

SEQ ID NO: 77345 - protein, 496 aa, Zea mays
  Coding DNA Sequence Number=SeqID_35566
  Gene Ontology: Mol. function=cysteine-type peptidase activity; Biological process=proteolysis
  Homolog annotation: Hit_ID=Q53MK8; Match level="QueryCoverage=41%, HitCoverage=21%, E-value=3e-20, Identity=28%"; Hit description=Ulp1 protease family, C-terminal catalytic domain, putative
MKNVDRPPSNPKRIIIQSTQECFNVDIPRAPAGTVRPETRCKCLRYSFYIFFQQRLNIRCNPQDVLVSIQILNDRQQQAIARRGFSSILDMRLDALSSRSHLAWLMEKLDHNDMTIRAGPGKELKITKDTVHLILGLPNVGGGTALGIDEAVAANNLRAELGLSKEDFGVTALQGRLRKGSDDDLSIICFFLILFNRLLFPTASWGITNHEVLLTEEMDRFHQMDWCQLIFNDLCQAAKKWHTRSVTNVSTTIYGCSIVILHSIHIELPLIRDLISSKLNQLPSRHRLGFIEKLSHFDAEVGKACSVIKQTLQQIVEKQYNLSDVFGELIDEVLRAEAGDNEDAYDVQKTTSKSDDILPQTAESCPDEADIDPLVHTNITKQNKTPTTSVGKHGDGGKNMPANTNVTPKATPHMDPDAPIFDATPQIKSTGGIQQAAETDLPDSGPCFDQTPSEHVSVETDPATNTPQVGQASLDSEMQTVLALREYLCGLQSDTD

SEQ ID NO: 77346 - protein, 194 aa, Zea mays
  Coding DNA Sequence Number=SeqID_35567
  Gene Ontology: Mol. function=cysteine-type peptidase activity; Biological process=proteolysis
MEARIMAERAAADQRMAEMFQYMQSLGAAQGIAPPPPLFPPVDPALFHTPVSVETDPATNTPQVGQASLDSEMQTVLALREYLCGLQSDTDRTIIDYGEYSATCSDIYESFADGKCLDNVFMQCFIQCVIDDAKNQQTSMSSNNLILDVNVGSLLNFEEQERHSRNHQPFDESVLQTLLDNSLPETDELDQCKA

SEQ ID NO: 77347 - protein, 156 aa, Zea mays
  Coding DNA Sequence Number=SeqID_35568
  Gene Ontology: Mol. function=cysteine-type peptidase activity; Biological process=proteolysis
MDLTSRYLMRLRNQGQEVIHILDSNPYGPTLGGTTWKDYHFAHLGSGGRKLPWAKVIMSRLNKAIQHVRPSTCFPKFGNFTIDLCPNCPNMAAGSNNCGFYVMGYILFYQCDEGSLRSDIEAGNTSEIRSLALHYIRFHPKNKALSLLQDIQRFKV

SEQ ID NO: 77348 - protein, 89 aa, Zea mays
  Coding DNA Sequence Number=SeqID_35569
MEGAAGEGGDGWASREGAAMGEGHQPGSVHGRGEREKAGAGRSEPPQRETASGGDDSWGSESMIIGRRRSFPREALGVYGEKASRMETK

SEQ ID NO: 77349 - protein, 112 aa, Zea mays
  Coding DNA Sequence Number=SeqID_35570
MEIQGSHGRGRDDFCMGRDGGSGWGGRRWLGEQGGRGMGEGTDQGASMDQEVKGKRCGEEAGAGRSEPPQRETASSGDDSWGSESMIIGQRLSFPREALGVYGEKASRMETK

SEQ ID NO: 77350 - protein, 123 aa, Zea mays
  Coding DNA Sequence Number=SeqID_35571
MEGDPAGGSSAMEIQGGHGRGRDDFCVGRDGGSGWGGRRWLGEQGGRGMGEDTGQGASMDQEVKGKRCGEEAGAGRSKPPQRETASSGDDSWGSESMIIGRRLSFPREALGVYGEKASRMETK

SEQ ID NO: 77351 - protein, 89 aa, Zea mays
  Coding DNA Sequence Number=SeqID_35572
MTNFWKDSKVKPGLYRPDLHYQGEWPGIHYVAFTKIPLVHSCSFGFASRTNAVHLPKLRASHSTLMVALLSRVVTPRTGPYREVLRKKA

SEQ ID NO: 77352 - protein, 96 aa, Zea mays
  Coding DNA Sequence Number=SeqID_35573
MTKIQPKPATRLDHGHDLTFVVGEGRIRVERDPALCGCLNEEVGHLLWQLSPWPFTSVVKIGSVQPRLERDHDSWCSGENAGNMEDFEEFSGYDNF

SEQ ID NO: 77353 - protein, 52 aa, Zea mays
  Coding DNA Sequence Number=SeqID_35574
MACRRSRARCAAPSTTPLKPVLVVDAALRALPIRWNAEPCGQPMRLVTTRSG

SEQ ID NO: 77354 - protein, 64 aa, Zea mays
  Coding DNA Sequence Number=SeqID_35575
  Subcellular localization annotation: CTP_CleavageSite=31; ConfidenceScore=5.26e-01
MDAQKFQQRAPFLAVRRGARRLFDKMRSKPRAAAALPFDLHSPRRVSSLSCSLRSPIRDAVRVD

SEQ ID NO: 77355 - protein, 235 aa, Zea mays
  Coding DNA Sequence Number=SeqID_35576
MGLRSEHESDDTRRGEWRSNGRTAAARGLLRILSNSRRAPRRTARKGARCWFFHGRKWGTLDRESWAQGTARGVHGGGRSGHGMLLLAALRRIATTGKKSRGAELLGAGHGEKNSRGVKKGRGHAGRWRRHGRGASRGAARPWERGELAGGSLAGRCGVREEMPSAGSRGPAMGERPAPWEEGSRAPCALGKKAPCYAWGKKPGRKMLWRLKEMEGWECKTAKDKGEGSVFIEKP

SEQ ID NO: 77356 - protein, 173 aa, Zea mays
  Coding DNA Sequence Number=SeqID_35577
MEEWNYAGRGAGFLRDVHGRGIRPWRAPGRGRAQPRQAQGRGGNLDAMDREVENTMAGACGAGRRGSGRSLAGQGRAGEADAMEGGEQREPGENGSQGELTAMEKIIGQRGARPCPGTGAMGKLELAGRGTTICCRVRAGAWRREMPWRQQRASAKPCRTPARSWFPCENERW

SEQ ID NO: 77357 - protein, 95 aa, Zea mays
  Coding DNA Sequence Number=SeqID_35578
MDVAQEASAPPCVVPFLHGRELFPCCDYLPRTARSGLPMAVPRGQHAVDGRRAFAVLRSPVRDALDVAAEPRVMHVLVKPLNRGRMCNPNPSLTG

SEQ ID NO: 77358 - protein, 112 aa, Zea mays
  Coding DNA Sequence Number=SeqID_35579
  Subcellular localization annotation: CTP_CleavageSite=35; ConfidenceScore=5.61e-01
MAASFSLAATTSQGQRAVASPWPWSATRSRALHVRCFAQQPRRLRALSARCFVEPCGQHAVDARRVFAVLRSPSATPSKTMLAVDVALRALPVRRNVEPCGQPMRLVTTRSG

SEQ ID NO: 77359 - protein, 151 aa, Zea mays
  Coding DNA Sequence Number=SeqID_35580
  Subcellular localization annotation: CTP_CleavageSite=40; ConfidenceScore=5.43e-01
MQGHSVPTHINRPHRFPGNRSGLTALAYNAPLTPTSRRAVAALVPTITGMGDLVSGRVRGKVCGQVHSGTRLTDLPYFSVMHKTGACLPKQWQAGPLVQARVLDLGLPPEQLLAPARGCTLRQQDYSLSKCNEHVCHDYARFKNIKLKKLS

SEQ ID NO: 77360 - protein, 195 aa, Zea mays
  Coding DNA Sequence Number=SeqID_35581
  Subcellular localization annotation: CTP_CleavageSite=49; ConfidenceScore=5.08e-01
MGKPVPSLLMLLLSRGRVPLDSPTRWQGGRPSYSSNHFLQRTCKNYATSKAEYTNTQLDLPGLTALAYNAPLTPTGRRAVTALVPTITGMGDHVSGRVRGKVCGQVHSGTRLTDLPYFSVMHKTGACLPKQWQAGPLVQARVLDLGLPPEQLLAPARGCTLRQQDYSLSKCNEHVCHDYARFKNIKLKKLSQELT

SEQ ID NO: 77361 - protein, 152 aa, Zea mays
  Coding DNA Sequence Number=SeqID_35582
  Subcellular localization annotation: CTP_CleavageSite=49; ConfidenceScore=5.06e-01
MGKPVPSLLMLLLSRGRVPLNSPTRWQGGRPSYPSNHLLQRTCKNYATSKAEYTNTQLDLPGHGSSSLISCEKQTIRIEFLNLARLCIKPGLAFQSSGRQVLWCRLGCWIWGYLLSSSLLRHEDVLSVSKITVYRNAMNMYVMIMQDLRTLS

SEQ ID NO: 77362 - protein, 290 aa, Zea mays
  Coding DNA Sequence Number=SeqID_35583
MAGRSLPSSRTQCTTVYATSSTASASCAMGSDPSRAGPALLELPSIDAGHRVVHHAHGAPTLCLLENPNANRDTPLYLECAPENILSPTSAPVDEEVNNEVGERILTKANIDQTVEGVSAEDIDPDRVERLVLDNWKPQFHYANTLGFIALTLVLTFPNYSQLATLSAPRLHIAACLVIIYGWEMNTTRSEHFVVAKRISNKQPIGLKFIHQILFGRLEKATNIITLYDVSNIWHIRLLLQVVGFEDDFLQDSASLIASPNESSAMLVTILYPDFVVVLREMAHLNLVAS

SEQ ID NO: 77363 - protein, 148 aa, Zea mays
  Coding DNA Sequence Number=SeqID_35584
  Homolog annotation: Hit_ID=Q9LY50; Match level="QueryCoverage=34%, HitCoverage=5%, E-value=1e-08, Identity=57%"; Hit description =Receptor kinase-like protein
MAHEAEAVELVAYTVVHCVRLEGKDRPAMADIVANLETALALCEGSATGGGDHGTDGFRNISSSASLCHRAMASTTAMSKTALRLESAQVAFRYGALLRAAGPTAAGTGSSLEVGDTHGEEELVRSICGDESTPGVLATGVEARSLGF

SEQ ID NO: 77364 - protein, 71 aa, Zea mays
  Coding DNA Sequence Number=SeqID_35585
MSETALRLESAQVAFRYGALLRAAGPTAAGTRSSLEVGDTHGEEELVRSICGDESTPGVLATGVEVRSLGF

SEQ ID NO: 77365 - protein, 327 aa, Zea mays
  Coding DNA Sequence Number=SeqID_35586
  Gene Ontology: Mol. function=nucleic acid binding
  Homolog annotation: Hit_ID=Q2QU58; Match level="QueryCoverage=68%, HitCoverage=41%, E-value=3e-07, Identity=24%"; Hit description=Zinc knuckle family protein
MARRRSHKNKKTPPKENNEVTLEILLSEEDQRCFRLNYLAFDILSNSLSNEDYRAFISNYNESIHDAHDIWTRIKIKFDESKHDSSFCASTSFGICETNPLKEEEENERWRPNDESTSPKGLSSHFDSHICCVANENDSGSTNEDEEEERSFMQLYARLSQEDKAVMLKLLERAREQSEARQRLENVLSVKMLYFDELTKEHEELKCSHVDLVQSKSSFELEFAGTNDDTYQKLKEENERLKMSLTQLKGKCIPQPSQDNRNHMVKKLETGTTEACTNSLEENVKDLRIAKRKEQKKKINTSSKSLNHASIKGNIQDIERYSKFLKE

SEQ ID NO: 77366 - protein, 84 aa, Zea mays
  Coding DNA Sequence Number=SeqID_35587
  Homolog annotation: Hit_ID=Q8SA97; Match level="QueryCoverage=28%, HitCoverage=4%, E-value=5e-07, Identity=100%"; Hit description =Ornithine carbamoyltransferase
MAPEAGPDCLSASLCLVALQPMRRRRRCPSVRSLCADGGYQLRIRSLEGTPNYGPRQIFISKLKRYVISNTSTSFPFVIIFDKE

SEQ ID NO: 77367 - protein, 392 aa, Zea mays
  Coding DNA Sequence Number=SeqID_35588
  Gene Ontology: Mol. function=nucleic acid binding
  Homolog annotation: Hit_ID=Q2QU58; Match level="QueryCoverage=56%, HitCoverage=41%, E-value=4e-07, Identity=24%"; Hit description=Zinc knuckle family protein
MARRRSHKNKKTPPKENNEVTLEILLSEEDQRCFRLNYLAFDILSNSLSNEDYRAFISNYNESIHDAHDIWTRIKIKFDESKHDSSFCASTSFGICETNPLKEEEENERWRPNDESTSPKGLSSHFDSHICCVANENDSGSTNEDEEEERSFMQLYARLSQEDKAVMLKLLERAREQSEARQRLENVLSVKMLYFDELTKEHEELKCSHVDLVQSKSSFELEFAGTNDDTYQKLKEENERLKMSLTQLKGKCIPQPSQDNRNHMVKKLETGTTEACTNSLEENVKDLRIAKRKEQKKKINTSSKSLNHASIKGNIQGNPKLQFVLERETSACVTNDISLELTYENLQESKCMIEVTSLKGYSSPKGRKNRFLIGPKSARCAFNLILINALVH

SEQ ID NO: 77368 - protein, 92 aa, Zea mays
  Coding DNA Sequence Number=SeqID_35589
MTYFCAWQEIQNQTASVRATRFRNIIVDCFLIRPAITIFRVCMCLQCITEAFGGSIYLYTRKDVVRYYKQNADKTWVDVSLNNLLPGSALNC

SEQ ID NO: 77369 - protein, 101 aa, Zea mays
  Coding DNA Sequence Number=SeqID_35590
MRLLLLVNPTWFNWICPRSWLSLLPSIDVNVFELGQLSQFFEFAWACNALRRHLEVAFICIPDVVRYYKQNADETWVDVSLNSLLPGSVLNCQRQLSGCLI

SEQ ID NO: 77370 - protein, 204 aa, Zea mays
  Coding DNA Sequence Number=SeqID_35591
  Homolog annotation: Hit_ID=Q9LEE6; Match level="QueryCoverage=32%, HitCoverage=8%, E-value=3e-12, Identity=56%"; Hit description=OCL5 protein
MHISYALHSLDCNLADGEYVLIPEQGPVQEEDQEQASEAAIEDLPAAPAIEGKPRRLPLQLRFQGGKDLASSRTGQRGALLTRAAVARLYLVVLNVDTHMCWARDYYNNYAQFWLVYDCGTACAPDYYIEEEELNAYETWVDVSLNNLLPGSVLNCQRQLSGCLIQEKRNGYSKVEHVEVDDRSVRNIYKLLGASSSSAVVQKH

SEQ ID NO: 77371 - protein, 110 aa, Zea mays
  Coding DNA Sequence Number=SeqID_35592
MDKICRFGPLRSPRKNDLTNYWALGPFVRPFTSLVDPGDIYPPQAPDLWVDLEVINSKIQGPKNDFLLSSLALITRSTKVWFCACALEVGILDCKTLDFIGCTGGAPNGV

SEQ ID NO: 77372 - protein, 167 aa, Zea mays
  Coding DNA Sequence Number=SeqID_35593
MHISYSLHSIDCNLADKYILVPEQGVAQEVARSQHQSLSSRICLPQLWKSHVFFIGCLSLGPRKNDLTNYWALGLFVRPFTSLVDPGDIYPPQAPDLWVNLEVINSKIQGPENDFLLSSLALITRPTKVWFCACALEVGILDCKTLDFIGCTGGAPNGCSPRPLSRF

SEQ ID NO: 77373 - protein, 242 aa, Zea mays
  Coding DNA Sequence Number=SeqID_35594
  Subcellular localization annotation: CTP_CleavageSite=9; ConfidenceScore=5.19e-01
MSPLLLVRSASSLDSPSRRLVFTASATALLTLLVALTAVWLWVQLTSRLCSAHPSQMGHDVLRQILLQQPSIYMSLSDGLFCRGWDIGRLPLIFSFGSCRCFGSDRTPGVAPQGPRKNDLTNYWALGLFVRPFTSLVDPGDIYPPQAPDLWVDLEVINSKIQGLENDFLLSSLALITRPTKVWFCACALEVGILDCKTPDFIGCTGGAPNGCSPRPLSRFCKIIYSKVFFQRLSPFALLHLG

SEQ ID NO: 77374 - protein, 120 aa, Zea mays
  Coding DNA Sequence Number=SeqID_35595
  Subcellular localization annotation: CTP_CleavageSite=45; ConfidenceScore=5.02e-01
MGKPVPSLLMLLLSRGGVPLDSPPRWQDGRPSHSSNHVLQGTCKNCSTSKAEYTNTQLDLPVTALVPTITGMGDHVLGRVRGKVYCQVQSGLGFARDRHREFVLPQYISVDKLIKVSSVD

SEQ ID NO: 77375 - protein, 117 aa, Zea mays
  Coding DNA Sequence Number=SeqID_35596
MGKPVPSLLMLLLSRGRVPLDSPTRWQDGRPSHSRNHVLQRTCKIMPQSKYNGSSSLISCEKQTIRIEFLSLQVTALVPTITGMGDHVSGRVRGYDHCQVPSGSRLTDLPYFSVSAR

SEQ ID NO: 77376 - protein, 137 aa, Zea mays
  Coding DNA Sequence Number=SeqID_35597
MGKRVPSLLMLLLSRGRVPLDSPNPGGKMDGQQHGSSSLISCEKQTIRIEFLNLASDRTCTHHNRNGRPRLRSHEEGNLRAGSLRLCIKPGLAFQSWGRQILWGRLGCWIRGYLLSSSLLRHEDVLSVSEVAIYRMP

SEQ ID NO: 77377 - protein, 247 aa, Zea mays
  Coding DNA Sequence Number=SeqID_35598
  Homolog annotation: Hit_ID=Q8H046; Match level="QueryCoverage=46%, HitCoverage=5%, E-value=2e-41, Identity=77%"; Hit description =Putative callose synthase
MVIKVDSVNSHDTLLAVVQVIADLNLVIYKAYFSDGSSFMDVFNVTDREGNMVLDAYHITSRRLPCCFSQTLEADDWYYLEARNTVGIVALEDYTSIDLTGTDPGLLFESFLLTFTLVMGALMFMLMSLRQGTTESSDLKKGLVNAIQDLYDVVHHEAFSVDMSGHIEDWDQINLARAEGHLFNKLKWPNDPKLKDLIKRLYSLLTIKESSATIPKNLEARRSLQFFYDLTVHGNACCTACFGNGLL

SEQ ID NO: 77378 - protein, 185 aa, Zea mays
  Coding DNA Sequence Number=SeqID_35599
  Homolog annotation: Hit_ID=Q8RW69; Match level="QueryCoverage=20%, HitCoverage=9%, E-value=1e-11, Identity=86%"; Hit description =Isocitrate dehydrogenase
MPHRETTTVGQAREHNPMVRRLAHVCHAALMHGTSTRRAPVWKANSEGIESIHDFANASMATAYEKKWPLYLRTKNTILKKYDGKFKYLQFLVLSYPIKFVHGPPMTPWSSPTSTSSSRRHTSPLMAAGSWTTLEADDWYYLEARNTVRIVALEDYTSIDLTGIDPGLLFEGFLIASIATQEMRH

SEQ ID NO: 77379 - protein, 70 aa, Zea mays
  Coding DNA Sequence Number=SeqID_35600
MGVWERKLVDTVSAITVVKHILVRHTLESVFLSQVRKRQIFVAFAPRWYQMKKNKTEVRKDLVLHIGSFA

SEQ ID NO: 77380 - protein, 132 aa, Zea mays
  Coding DNA Sequence Number=SeqID_35601
MDPQLSIIDLDRRTFAVMKTWSLFYNHTLESLFLSRVRKRQIFVAFAPRWYQMRKNKTEVREDSVLHIGSFVYNLSGGVCASLGLYNITTLHSLLALDNCRWAYLLGRFRHTLKHYQGEQAGFHYVAFTKIP

SEQ ID NO: 77381 - protein, 72 aa, Zea mays
  Coding DNA Sequence Number=SeqID_35602
MDPQLSIIDSDRRTFAVMKTWSLFYNHTLESLFLSRVRKRQIFVAFAPRWYQMRKNKTEVREDLVLHIGSFA

SEQ ID NO: 77382 - protein, 72 aa, Zea mays
  Coding DNA Sequence Number=SeqID_35603
MDPQLSIIDLDRRTFAVMKTWSLFYNHTLESLFLSRVRKPQIFVAFAPRWYQMKKNKNEVREDLVLHIGSFA

SEQ ID NO: 77383 - protein, 72 aa, Zea mays
  Coding DNA Sequence Number=SeqID_35604
MDPQLSIIDSDRRTFAVMKTWSLFYNHTIESLFLSRVRKRQIFVAFAPRWYQMKKNKNEVREDLVLHIGSFA

SEQ ID NO: 77384 - protein, 443 aa, Zea mays
  Coding DNA Sequence Number=SeqID_35605
MHKNPFYNRFVFVTINKVGNFKSEKLSKTGIVHNFYDTDPFYKDNLSEKIKEYYGIRILCDGRAHRTGTHETKKLHDKIKQDVGGLHLPKVLKNTTNIFSKHNILTGTFGLGIEVYTIGKARSGRRLKGGTYKDVEPRHVGPGAKRREYIIEVTNASTPGQSPGAMISVVHAVLICGGCFLGNARVMMMSIVHAAVWAYCLPVEWTGTSPAEWTSRRQPAEWTGLIKCGGGTSPASGMDRAQLMPRQHIACQWTGQATCLIHNKCRGRAAQRPYVRPRPLAYITCTMPRGSIGAPPERGAEAYTVRSGHVSAPDPRLALIKAWVFPVLESRDPAVSGPDPTQRGPEPILGVRFALAEVLDLTRRFGLYIQGSGTIPWGSGLTIDTLEYTIFSGHVAVPEPSTWWGRVLLLAQISCPRLGRAMVWSHAQLLYHATKDSRVGTGY

SEQ ID NO: 77385 - protein, 217 aa, Zea mays
  Coding DNA Sequence Number=SeqID_35606
MVWSHAQLLYHAIKDSRVGTASSYGSKGYVSFKMGWHEMEHKGENVAHVILRQGDALVVGVTSVREGERVSLFVSPFSRATLPHEGSGPPFYRCKERVQRLLLRPRSGSGEDAIPPEVEVEAEPWGRTRQSFLLCVRLNLAVVSITLAILALNAPAIRSVGEAIWPRLLHNEACPSWASGESRVRPLLEEALGRGVNSSGTTVPAQGWAQARRDRVP

SEQ ID NO: 77386 - protein, 226 aa, Zea mays
  Coding DNA Sequence Number=SeqID_35607
MGPMGVLLTLPSRSCVQVQVPVEAASWGPGHQFFLRYTDLATHHQQYPAGNVRPPGPRHLVRPLGRCLQCRPPDQRSPAPRRWPGSWLRKHVGMYSITARQSLPPSASKRAPRIWSRRRRRSTVESSTGSASEMDVGSCDTGMGLIPSGTRAVLVSPTHAAMRWTPARCSAWRSSSVFFVASTTWGPVSPVPPGTGGPATPASAPSPPPRAHARPATSPAFQAFPP

SEQ ID NO: 77387 - protein, 101 aa, Zea mays
  Coding DNA Sequence Number=SeqID_35608
MEASQKEKRLAKKEEALNQREEVVTELQAKLSAFNKILEEQRVQQTMAVESLQRLQREADLARQEKDLAFKEEMLERREKLLAEHELEAEEKERTLEERVR

SEQ ID NO: 77388 - protein, 177 aa, Zea mays
  Coding DNA Sequence Number=SeqID_35609
  Subcellular localization annotation: CTP_CleavageSite=30; ConfidenceScore=5.33e-01
MAGFLPLCSQGRASLASGCCRRDSATGFPRSSWGSGSANAKRHRSGGGGPNCPDGCRSINDGDAVEYTIGSGRGGSNCARPRHRGRRWGRVQLHPSVHSRGDRGDFWATSPFASERSELERDRKDYKKDLQKVYAWELEVAQNEKRLAKKEEHLDQREEVVTELQAKLSAFNKILEE

SEQ ID NO: 77389 - protein, 253 aa, Zea mays
  Coding DNA Sequence Number=SeqID_35610
  Homolog annotation: Hit_ID=Q1SFF2; Match level="QueryCoverage=25%, HitCoverage=56%, E-value=2e-09, Identity=50%"; Hit description=Heavy metal transport/detoxification protein
  Pfam annotation: Domain name=HMA; Domain location=141-212; Score =20.8; E_value=0.0048; Accession=PF00403.16; Description=Heavy-metal -associated domain
  Subcellular localization annotation: CTP_CleavageSite=14; ConfidenceScore=5.48e-01
MASSPVLAVSSIPVGTMLRRRRLRPVPINSEQYSFTVHAFCGRGIRSSGTYSSGRRARTRPLQDKPLVPGKLRRRQVHPSLDALFTYFSLPLPKPGIWDGNRIAWVMKAGEHREDKEGESFVRFGHGGGPTPSGITVKQKIVIKLGVPNAKNRSKAMQLASKFVGVSKVGITGDGKDRLEVEGEGVDTVLLVNYLRKKVCRSADIVKVEVKDKKDEKKPEEPPYYCWPNYYYCPPPPPPLPMVERADDSCHVM

SEQ ID NO: 77390 - protein, 86 aa, Zea mays
  Coding DNA Sequence Number=SeqID_35611
  Subcellular localization annotation: CTP_CleavageSite=16; ConfidenceScore=5.35e-01
MAPSPAVALLGRKHARARARACGRGIRSSGTYSSGRRARTRPLRDKPLVPGKLRRRQVHPSLDALFTYFSLPLPKPGIWDGNRIAW

SEQ ID NO: 77391 - protein, 120 aa, Zea mays
  Coding DNA Sequence Number=SeqID_35612
  Subcellular localization annotation: CTP_CleavageSite=61; ConfidenceScore=5.92e-01
MASSPVLTVLSIPLPPPSAYKSTRPSPVFTTPAPAISTAFPRANRASAAVPPSSLRGRGIRSSGTYSSGRRARTRPLRDKPLVPGKLRRRQVHPSLDAFFTYFSLPLPKPGIWDGNRIAW

SEQ ID NO: 77392 - protein, 89 aa, Zea mays
  Coding DNA Sequence Number=SeqID_35613
MVKGPLGLDFAVATPNYWVHKGIAFICEIRTSLCGSPTHTTQAIVRLQPDIGSSGDDTSFHLQQPMEADGGASRVWNNGRVDAPTPQGM

SEQ ID NO: 77393 - protein, 58 aa, Zea mays
  Coding DNA Sequence Number=SeqID_35614
MVKGPLGLDFAVATPNYWVHKGIAFICEIRFSSLSCFDLSWFNVVEAVELSACPFGQI

SEQ ID NO: 77394 - protein, 89 aa, Zea mays; identical to SEQ ID NO: 77392
  Coding DNA Sequence Number=SeqID_35615

SEQ ID NO: 77395 - protein, 201 aa, Zea mays
  Coding DNA Sequence Number=SeqID_35616
MAADLAYHGKSMSTDATGLATAVGVDDAAATCAWMSEGGALNAGGDWGSGCISTALCHRSATRCGRGEGQGRVVVVAASSATEAPEPGLERPQGAPACSGPSTGDGGDGRHRERMRRLGRRGEAEMCVDAGGRQECASTTRARGAEASWLDPMMAALMAWGGGWGEEREACVVERISGVRRGEETGRTVHHTNVDVYTTVL

SEQ ID NO: 77396 - protein, 652 aa, Zea mays
  Coding DNA Sequence Number=SeqID_35617
  Homolog annotation: Hit_ID=Q84LB4; Match level="QueryCoverage=17%, HitCoverage=58%, E-value=3e-39, Identity=69%"; Hit description=Cold acclimation protein COR413-PM1
  Pfam annotation: Domain name=WCOR413; Domain location=108-247; Score =101.8; E_value=2e-27; Accession=PF05562.2; Description=Cold acclimation protein WCOR413
  Subcellular localization annotation: CTP_CleavageSite=61; ConfidenceScore=5.17e-01
LRSKPGHLSASQQRVHEDFVHVWHPHNQNVGATGSGLSGVATVSSTLGVLRAYSPNSTSASSSNLSTVHMGGLTCITQPTTELGSEDTVIAQFLSNPAQVGPSESPVLFSGTVGAASTFSPLASNDLPVSEISAMVPPPSTSADRLGPVLLGCIRDVLWHGHFLRGEVGKWIAIIAVILRLFFPRHFTAVAPSLFAHTFRDDLVGVFICLAIGCYLLQEHIRASDGLRNAFRKGNGVSNSIGILLLFIYPVWTGVLRILRPHSYGARFCQSPLHDARLPLLAPPSSPRHQRRHHRIRPRRLRPTRPSRRGTLLPASGVHAHLRFTSAPESSHAFAVASIPTVARARPAAGRRALGPPEPRLRSLRRRRRSDHHHSPLPLSPPAPLNQIIILASPFHPSPPSPCRSHHLRRLEPDLDAMDDLNPTPPVDLERWPSPSRSGGTRRRCVVDPDRRRKSGRVGAHGLAMVKGPLGLDFAVATPNYWVHKGIAFICEIRTSLCGSPTHTTQAIVRLQPDIGSSGDDTSFHLQQPMEADGGASRRSLRVPVDKQSLGMAVEVDARWEPMGAQEYYDYWRAMYNARGNSKLFFTIYNYRGVDIEGRPIMVNIQKDNGVQMKIIGTHVDATEIVYDEDSYNKGKYDNIIAAVKSYYMSMS

SEQ ID NO: 77397 - protein, 506 aa, Zea mays
  Coding DNA Sequence Number=SeqID_35618
  Gene Ontology: Mol. function=sequence-specific DNA binding; Cellular component=nucleus; Biological process=regulation of transcription, DNA-dependent
  Homolog annotation: Hit_ID=Q41813; Match level="QueryCoverage=77%, HitCoverage=52%, E-value=0.0, Identity=62%"; Hit description=Hox2b protein
  Pfam annotation: Domain name=Homeobox; Domain location=109-165; Score= 9.7; E_value=0.00048; Accession=PF00046.19; Description=Homeobox domain
MAEYMLVVQSNLNQCNNEDIPLSGTKIEMESYEQESYDSSNEEWSTLSTPRKTKLQGNEKVSLTESVRFAKRCSRRAPAREQNNEHTQSEQLHGSASELESNFMVLSGDASKCHFGPIVTQKLKEHFEKDPYPCHATKEGLAQELGLAFNQISKWFSATRHYSRVIVAKNQKYPGENTTENNSSAIFDGIQVIEPNFGLIDKPDADTNDMISEKLMVQINLNEGIEEDIPPSQYTTRCEEKLTMTQAAISREAGPPGYDPGENCLQVSSMITSCEQSVIMAPSAIARGVGPPGYTPGEHQGNGAPWNTSYERRPFTSPVTSSREVRPPGYGPEENQGSGISCNTSREQILFMSPTTISRELGPPGYLPRENQRSDTSWNTSCESGLFMSLATTSIEHEIAQSFSQQRKKREGGGPTYHETFAYAQGPFARVPEAYVLSLGIYLLPNRECTRTLFTCGIPTIKMWEQQVLVCLVLLLSRVLLVYFELTVQIRHQHPPVICQLYIWVD

SEQ ID NO: 77398 - protein, 152 aa, Zea mays
  Coding DNA Sequence Number=SeqID_35619
  Homolog annotation: Hit_ID=Q2QYH0; Match level="QueryCoverage=52%, HitCoverage=11%, E-value=1e-13, Identity=45%"; Hit description =Expressed protein
MIRCFRNPKGELTFASNPLGFQCKGSFLELGGPPTRTGTGILDCTFSTYMNCSSCSLFDKMSSLSSLDNETYVECEESETLMKKPWSSQSSEPVIAGTMLITWRSMDRYSPHTFTSELIFLRTFNSIPGVRDAIIFEPAYSFPLKETESNGS

SEQ ID NO: 77399 - protein, 102 aa, Zea mays
  Coding DNA Sequence Number=SeqID_35620
  Subcellular localization annotation: CTP_CleavageSite=77; ConfidenceScore=5.22e-01
MDAQNDVTQEWLDRVKIARKGLRGTKRRQVQPGSRASSTGVQRGSTGVQEKFSRGIFPRPHWSKPVEPVLGEVQPVSGSPDRSDLLTGRLTASLTPRRLNRP

SEQ ID NO: 77400 - protein, 152 aa, Zea mays
  Coding DNA Sequence Number=SeqID_35621
MNKNTRYTRFIPRFDHTTKVPYFLVEAPTKSRVSFNPNPPFDDHKGQAHTLIFAQTSGDLKRERQELCEREWEVFFKLEMEFGSCSSVGREVEDRFNRLGQADSQSTNQIGRLQVRLQKQVLTPVELPLGPVQPPGGQTGNQSASQEVRPVR

SEQ ID NO: 77401 - protein, 84 aa, Zea mays
  Coding DNA Sequence Number=SeqID_35622
MNKNTRDTRFIPRFGHTTKVPYFLIEAPTKSQVSFNSNRPFTDHKDLKWERQEMCEREWEVFFKLEMEFGSCYSCGERGRSEYI

SEQ ID NO: 77402 - protein, 92 aa, Zea mays
  Coding DNA Sequence Number=SeqID_35623
MDSAVQLLWTASKWWLRGSLSYTAAHATTSLISDANLDMSRTGNGNGNELCGAGGGNEMGMIDMGMGTVAEREWQNTRMADYSCSLNSSRDF

SEQ ID NO: 77403 - protein, 180 aa, Zea mays
  Coding DNA Sequence Number=SeqID_35624
MSRAFDDYYIEDCGIILASEVTQRRIDNSDQLVILATVRRARIPQKFLGLVTAFHSQNSSAWSSAAHFLLLVVMVRRSRLRNVVLSREAEPPLPAAFRATGERGDDLLFSAPPEWWSLCAGDGRPLPPLLPETHRRFWSLQSPEEVGRVDGAAGIFDELPPRDKMRVFSDESATWCVPDK

SEQ ID NO: 77404 - protein, 546 aa, Zea mays
  Coding DNA Sequence Number=SeqID_35625
  Gene Ontology: Mol. function=protein serine/threonine kinase activity; Cellular component=nucleus; Biological process=response to brassinosteroid stimulus
  Homolog annotation: Hit_ID=Q70YQ4; Match level="QueryCoverage=83%, HitCoverage=99%, E-value=1e-165, Identity=63%"; Hit description =Putative casein kinase I
  Pfam annotation: Domain name=Pkinase; Domain location=9-257; Score =101.8; E_value=2.1e-27; Accession=PF00069.15; Description=Protein kinase domain
  Pfam annotation: Domain name=Pkinase_Tyr; Domain location=9-252; Score=-128.9; E_value=0.00015; Accession=PF07714.7; Description =Protein tyrosine kinase
  Pfam module annotation: Pfam domain module=Pkinase::Pkinase_Tyr; Domain location=9-257::9-252
MEHVIGGKYKLGRKIGSGSFGELYLGVNIQNGEEVGIKLGGNGIPHLKWYGVEGEYNVMVIDLLGPSLEDLFNSCNRKFSMKTVLMLADQLINRVEYMHSKGFIHRDIKPDNFLIGLGRKANQVYIIDYGLAKKYKDLQTHKHIPYRENKNLTGTARYASVNTHLGIEQSRRDDLESVGYLLLYFLRGSLPWQGLKAGTKKQKYDKISEKKMLTSAEILCKSYPPEFVSYFHYCRSLRFEDRPDYSSMKKLFRDVFIREGYQFDYVFDWTALKYPQMGSNNKLVQQPSARMAGVGPSVERTDKASMGQEIRDRFTGAVEAFARRNPGSGRPADHSSHSRHKSFADSFGTSNEAVADSSEKTRILSRGGSSSKMPAAPSTRPTSSGDCSDQNRRWVSGSSGGSGRPSPAQRLHHSGGAENSRSSPRSPVARNAAGRGGSASRDNTTFRSLERLTITTSRRNVQNNPRVVDVGDNHEASLLNDGQCGAAALDRVQVVASRELVVHSGACDHVGLLLEVELTVAKLLLVIDERRQRGCLLLIVFVRGFK

SEQ ID NO: 77405 - protein, 330 aa, Zea mays
  Coding DNA Sequence Number=SeqID_35626
  Homolog annotation: Hit_ID=Q943L0; Match level="QueryCoverage=43%, HitCoverage=59%, E-value=9e-60, Identity=80%"; Hit description =Putative thaumatin-like cytokinin-binding protein
  Pfam annotation: Domain name=Thaumatin; Domain location=167-330; Score=-9.9; E_value=1.8e-07; Accession=PF00314.8; Description =Thaumatin family
MCGRRRRRLCTRLMCCPHATRRHSTSQALPVIPLEPRKNHRAVSLSVCRALELRTCGGLQPFSPFPPTASSFQDLVGRRTIIYFRHQPLDGLNSEATAFLQDRSRCIRALLRSQHVPATNKHVKKTWSKTSIKAPPAIFIKQQPEEQLNLPEAESLMVSIGVVIIDQQAPAVVLPLAALPQVVPRRRPTPGLAASGRARGCAGRRRAAPLCHGDCGGLGGAVPATLAWVNLHHDNDQTTYGVSVVDDFNVGLSVTPHEGRDNCPVLACHKNLTETCPGELQLRSSTGSILACKSGCEAFRIDELCCRNMYNSPRTCRASKYSEFFKHECP

SEQ ID NO: 77406 - protein, 149 aa, Zea mays
  Coding DNA Sequence Number=SeqID_35627
  Homolog annotation: Hit_ID=Q5ZDR4; Match level="QueryCoverage=19%, HitCoverage=8%, E-value=6e-08, Identity=86%"; Hit description =Putative mitochondrial carrier protein
MCGRRRRRLCTRLMCCPHATRRHSTSQALPVIPLEPRKNHRAVSLSVCRALELRTCGGLQPFSPFPPTASSFQDLVGRRTIIYFRHQPLDGLNSEATAFLQDRSRCIRALLRSQHVPATNKHVKKTWSKTSIKAPPAIFIKQQPGNFHD

SEQ ID NO: 77407 - protein, 155 aa, Zea mays
  Coding DNA Sequence Number=SeqID_35628
MCGRRRRRLCTRLMCCPHATRRHSTSQALPVIPLEPRKNHRAVSLSVCRALELRTCGGLQPFSPFPPTASSFQGETISGAIRHKRTRPKGSSWTRLQVPLVEISVCRMNSFHTHTAWRQRDLGLCHWKDMGDDYGPDAWKFVHKGVSVMTMLITV

SEQ ID NO: 77408 - protein, 180 aa, Zea mays
  Coding DNA Sequence Number=SeqID_35629
  Homolog annotation: Hit_ID=Q8SBA4; Match level="QueryCoverage=19%, HitCoverage=14%, E-value=3e-08, Identity=75%"; Hit description =Autophagocytosis protein AUT1-like
  Subcellular localization annotation: CTP_CleavageSite=26; ConfidenceScore=5.64e-01
MPRPPVASTLPLTTSPRTSPRPGCLRATTFAAPALARAPRRSPSTPARVNSLSPPYVDQGKGGALGDEVVAGEDEPGDGEEALLEEDRNGVRARDRKFVGREGGAGMVRSGRGRGWIAGCRRLGKPGGGKDADASPVPGGWASSEGARTQTDLSEDGGGGRRLGKDADARVRPPRELRER

SEQ ID NO: 77409 - protein, 144 aa, Zea mays
  Coding DNA Sequence Number=SeqID_35630
  Homolog annotation: Hit_ID=Q8SBA4; Match level="QueryCoverage=25%, HitCoverage=15%, E-value=3e-10, Identity=75%"; Hit description =Autophagocytosis protein AUT1-like
  Pfam annotation: Domain name=Autophagy_N; Domain location=57-144; Score=-61.7; E_value=0.089; Accession=PF03986.4; Description =Autophagocytosis associated protein, N-terminal domain
  Subcellular localization annotation: CTP_CleavageSite=23; ConfidenceScore=5.21e-01
MDSAVQLLWTASKRRLRGSLSYTAAHATTPGLSLTNGSPDQPPTTSDPSTPSPAPDHARAAFAPYELPVTGPYTVSVFLEKGFLSIPGFILAGDNLIAKCPSWFWCILYSYRPALVIFIPKYVFYANLNVLLCSITRSRVRSAL

SEQ ID NO: 77410 - protein, 207 aa, Zea mays
  Coding DNA Sequence Number=SeqID_35631
  Homolog annotation: Hit_ID=Q5KQN0; Match level="QueryCoverage=25%, HitCoverage=11%, E-value=2e-21, Identity=100%"; Hit description =Vacuolar cation/proton exchanger 2 (Ca(2+)/H(+) exchanger 2)
MDLNFQLFETATLFITVLVVAFMLQEGTSNYFKGLMLILCYLIVAASFFVHVDPDANPSASSPPLNSPSRRAPVMRPRPCPLRACPAAGHRRPVRTLAPSGLAQPPTTSDPSTPSPAPDHARAASAPYELPVTGTYTVSVFLEKGFLSIPGFILAGDNLIAKCPSLFWCILYSYRPALVFFIPKYVFYANLNVLLCSITRSRVRSAL

SEQ ID NO: 77411 - protein, 215 aa, Zea mays
  Coding DNA Sequence Number=SeqID_35632
  Pfam annotation: Domain name=F-box; Domain location=62-109; Score =34.0; E_value=5.2e-07; Accession=PF00646.23; Description=F-box domain
MDNARDARETGHCQVSGVPRAAACEVPAPDLKRRAIFRRFESHPELLGECDNWAGELGKPRGDMDGLPRELCLKIFHLLDHQSLASSPQVCRKWRALTSDDELWRKLFNDRWGADAAAFYAPEGSKSWKDVFAVQDRCDRYGLGVRIIREGKDYYLIYQGEIQRYLGSRQDTDGDCGEDAPRRDAGDEHRQISDRILFFLGDLEKACADAKRVKA

SEQ ID NO: 77412 - protein, 179 aa, Zea mays
  Coding DNA Sequence Number=SeqID_35633
MKINSDQTDSKALPRVTWRFPLDDTSRFWSTAAASARDGANDNKRLPTAPPPIWESLEETWMGCPESCASRSSTSWITSPSPLLPKLFNDRWGADAAAFYAPEGSKSWKDVFAVQDRCDRYGLGVRIIREGKNYYLIYQGEIQRYLDKELKNLLLEHIKAAKRRLLTNQLPPSSSVIFM

SEQ ID NO: 77413 - protein, 351 aa, Zea mays
  Coding DNA Sequence Number=SeqID_35634
  Homolog annotation: Hit_ID=Q6L511; Match level="QueryCoverage=31%, HitCoverage=21%, E-value=3e-47, Identity=86%"; Hit description =Putative auxin-independent growth promoter
  Pfam annotation: Domain name=DUF246; Domain location=66-350; Score= -104.9; E_value=1.6e-08; Accession=PF03138.5; Description=Plant protein family
  Subcellular localization annotation: CTP_CleavageSite=36; ConfidenceScore=5.53e-01
MAARAPLIMPRAASSTGPLPAASTTVARHQSAQCLRARGAVGGLFFDQRPESLIQRSSWYDTQIECVAISRFGQLRIPINCDGAGPGSSVCRKWRALTSDDELWRKLFNDRWGADAAAFYAPEGSKSWKDVFAVQDRCDRYRLGVRIIREGKNYYLIYQGEIQRYLDNQKFAMTSFLTKKNCQAQVSEADMNAMWKHPDVYKEWIKSGERRGNVRFSHDAKNRPYLSRVEVKDMIALSCVYDGGDEEKEMDAAREIGWRRKFTKRGRVIRPGIIRMNGKCPLTPLEVGLMLRGMGSSNKTAIFLASGKIYKAEKNMASLLEMLPLLQTKETLASEEELAPFKVDGIEAALA

SEQ ID NO: 77414 - protein, 254 aa, Zea mays
  Coding DNA Sequence Number=SeqID_35635
MTTRSNAGRARRRGHGDCDIAAVHDIELHSDISSNTHEAPTLRGCGGNSVARSCAAGRGSRAATSCHEEGIAEPLLGEMPVCYGGRLVSRGDVGRRETGGVGMELGDVLEVGGCARERSNKRPRPWASSCHEEEGALGGLEAPAPCCSRSPGGAGRAPLTSAGRGARSREPAATTAGMWSRGRARVLEPAQGRGRRRHGWTGRELPACFVGKKKWLAAVGSVGVGMQKWLRARERAPIYRHMVGLGFFLVGLLG

SEQ ID NO: 77415 - protein, 115 aa, Zea mays
  Coding DNA Sequence Number=SeqID_35636
MGERSCGRRAAEGRTPLEELSLEPLARRSREGAADHCWSWSKEQGAGGHHGWDVEQRTRALRRRTGSTDIEGARRPREAAGDPGAPALAAVAVGGLLREVEEDRGNRLEKREDFD

SEQ ID NO: 77416 - protein, 152 aa, Zea mays
  Coding DNA Sequence Number=SeqID_35637
MGERSCGRRAAEGRTPLEELGLEPLARRSREGAADHCWSWSKEQGAGGHHDWDVEQRTRALRRRTGSTGVEGARRPREAAGDPGAPALAAVAVGGLLREVEEDRGNRLEKREGEWRLKIFRGGSAKLLRARERAPIYRHMVGLGFFLVGLLG

SEQ ID NO: 77417 - protein, 97 aa, Zea mays
  Coding DNA Sequence Number=SeqID_35638
  Homolog annotation: Hit_ID=Q70KS9; Match level="QueryCoverage=45%, HitCoverage=29%, E-value=1e-15, Identity=84%"; Hit description=TA11 protein
MLGTGYKIVLKPALLAHAEENKRICLSNLENLNDLQKQLQGNAKLCYAEVGTFLGSGRSRMDFHELIEIPHGDRRRYHDDVSVIVISLEGRIWRSCV

SEQ ID NO: 77418 - protein, 122 aa, Zea mays
  Coding DNA Sequence Number=SeqID_35639
  Gene Ontology: Mol. function=protein phosphatase type 2C activity
  Homolog annotation: Hit_ID=Q6ZC35; Match level="QueryCoverage=75%, HitCoverage=16%, E-value=4e-23, Identity=53%"; Hit description =Putative Hec1 protein
MVNVKDVDRMRREMQAIEDDIANAEKGKAALEDKVWEVEAKLVTKLEELERHADQCNQALKKLKPTVAFQYMIDSKGSSPAEMLGMDFHELIEIPHDNRRRYHDDVSVIVISFEGRIWRSCV

SEQ ID NO: 77419 - protein, 46 aa, Zea mays
  Coding DNA Sequence Number=SeqID_35640
MVNVKDVDRMRREMQAIEDDIANAEKGKAALEDKKLTIGTPKNNQC

SEQ ID NO: 77420 - protein, 153 aa, Zea mays
  Coding DNA Sequence Number=SeqID_35641
  Homolog annotation: Hit_ID=Q6ZC35; Match level="QueryCoverage=78%, HitCoverage=21%, E-value=3e-31, Identity=57%"; Hit description =Putative Hec1 protein
MDNEREQSLGDLEKELEAKVSDTQCAAAEIQDLLKQVDAQPVNVKDVDRMRREMQAIEDDIANTEKGKAALEDKFWEVEAKLVTKLEELERHAHQFNQALKQLKPTVAFQYMIDSKGSSPAEMLAMLCSSGNFFRFWKVRVNEYSCGVDTLNI

SEQ ID NO: 77421 - protein, 35 aa, Zea mays
  Coding DNA Sequence Number=SeqID_35642
MQDSGGRLQKHVLLKRDNGDVEEMLQYANMVLKRK

SEQ ID NO: 77422 - protein, 488 aa, Zea mays
  Coding DNA Sequence Number=SeqID_35643
  Homolog annotation: Hit_ID=Q6ZC35; Match level="QueryCoverage=18%, HitCoverage=15%, E-value=2e-19, Identity=57%"; Hit description =Putative Hec1 protein
  Pfam annotation: Domain name=Peptidase_C1; Domain location=322-457; Score=-121.1; E_value=0.0055; Accession=PF00112.13; Description =Papain family cysteine protease
  Subcellular localization annotation: CTP_CleavageSite=27; ConfidenceScore=5.03e-01
MVRPILQPILRRLPSTPHATAPAASTPATARAGCPRPRPPPHNHDHGLNRSASSAIYAHDFNLVRLRLRDGRHLAYCESGVPRDQARFAVVFSHGFTGSQEDSVSASQVPTDPSTTTALSTSPSLPICCRTRTPAFASLARQVEVPNAIPSVCRHVLGESFFSKEQQPPPRPDEVASSLALRASRNSEDERRRRKISSLRRKAIHAFKKRGRRHIDFGFLPAAISIEDVRDADEERAIASFRDRLAAHSLLQAGKPKRCCRCLVQKGGTCFEVDGLLLFKGKIFIPDASELWATLLADAHDSGHEVPSEVWSDISMDFVEGFPEVGDWRYHGAVTAVKDQWQCGSCWAFSAVGADSGGRLQKHVLLKRDNGDVKELEAKVSDTQCAAAEIQDLLKQVDAQPVNVKDVDRMRREMQAIEDDIANTEKGKAALEDKFWEVEAKLVTKLEELERHAHQFNQALKQYEHAAASPIFSKFYFSNLLEIAYRYT

SEQ ID NO: 77423 - protein, 69 aa, Zea mays
  Coding DNA Sequence Number=SeqID_35644
VSEALYAKAVSPDLLTGNRWGRLMCVETECLATSRSLEDMVAGVTWPSILPPGWGVEWDPTSAEEEGED

SEQ ID NO: 77424 - protein, 83 aa, Zea mays
  Coding DNA Sequence Number=SeqID_35645
MGGTSAVTARRPVGVSEALYAKAVSPDLLTGNQWGRLMCVGTECPYMSCSLEEMVAGVTWPSILPPGWTVEWDPASAEEEHEE

SEQ ID NO: 77425 - protein, 87 aa, Zea mays
  Coding DNA Sequence Number=SeqID_35646
MYAKAVSPDLLPGNRWGRLMCVETECPYMSSSAFGNRTPQPNSCMSRGRGVDSSHRDMVAGVTWPSILPPGWTVEWDPASAEEEHEE

SEQ ID NO: 77426 - protein, 108 aa, Zea mays
  Coding DNA Sequence Number=SeqID_35647
TATSLTGEYVLMPEQGVAQEVAPDPTPEPTPEDLPATALEGKPRNPVEMNTTSAFGNPTPQPNSCMSRGRGVDSSHRDMVAGVTWPSILPPGWTVEWDPASAEEEHEE

SEQ ID NO: 77427 - protein, 97 aa, Zea mays
  Coding DNA Sequence Number=SeqID_35648
MPEQGVAQEVAPDPTPEPTPEDLPATALEGKPRNPVEMNTTSAFGNPTPQPNSCMSRGRGVDSSHRDMVAGVTWPSILPPGWTVEWDPASAEEEHEE

SEQ ID NO: 77428 - protein, 101 aa, Zea mays
  Coding DNA Sequence Number=SeqID_35649
MTESTFSCQSKELLRRHIPLRDLRRGLPFRLWWVQVRSLRDGSRASAFGNQTPLPNSCMSRGRGVDSSHRDMVAGVTWPSILPPGWTVEWDPASAEEEHEE

SEQ ID NO: 77429 - protein, 397 aa, Zea mays
  Coding DNA Sequence Number=SeqID_35650
  Gene Ontology: Mol. function=hydrolase activity, acting on glycosyl bonds; Cellular component=beta-galactosidase complex; Biological process=carbohydrate metabolic process
  Homolog annotation: Hit_ID=Q5K3Q1; Match level="QueryCoverage=60%, HitCoverage=26%, E-value=5e-87, Identity=65%"; Hit description=Beta -galactosidase
  Pfam annotation: Domain name=Copine; Domain location=3-117; Score =7.6; E_value=2.8e-07; Accession=PF07002.6; Description=Copine
MSFGQRQSARQINLVVSHPNTSGDKDVTSDNKSQHGSSELPPRAELIGPTSFAPLIYAAIYVVENSNWQYHVLVIIADGQVTAANIIDGRLSPQEQATIQAIVDARSTVRSTAICLGDTTRTVRPWSRTVRASYIIPFAQLVTFGLNQVFTCGLSANYSRTVFVQHSERSFHTSDVTSKNNQWEMYSETVPKYRDTKVRTKEPLEQYNQTKDDTDYLWYTTSFRLESDDLPFRNDIRPVLQVKSSAHAMMGFANDAFVGCARRNKQVKGFMFEKPVDLKVGVNHVVLLSSTMGMKDSGGELAEVKGGIQECLIQGLNTGTLDLQVNGWGHKAALEGEYKEIYSEKVWAKFSGNRPRTTGQPLGISFGCNPHPRCHYVHCHARVTLMSQMEMIPLYLT

SEQ ID NO: 77430 - protein, 173 aa, Zea mays
  Coding DNA Sequence Number=SeqID_35651
  Gene Ontology: Mol. function=metal ion binding
  Homolog annotation: Hit_ID=Q5JMT9; Match level="QueryCoverage=39%, HitCoverage=17%, E-value=1e-21, Identity=76%"; Hit description =Copine I-like
  Pfam annotation: Domain name=Copine; Domain location=37-167; Score =8.3; E_value=2.5e-07; Accession=PF07002.6; Description=Copine
MEVARTFHPRGAHRFLWASCGQQIHRPQACKLVVSWFLSVELALEFACTVLSCVAAPGKVLVPSFGQRQSARQINLVVSHPNTSGDKDVTSDNKSQHGSSELPPRAELIGPTSFAPLIYAAIYVVENSNWQYHVLVIIADGQVTAANIIDGRLSPQEQATIQAIVDARFKRHF

SEQ ID NO: 77431 - protein, 75 aa, Zea mays
  Coding DNA Sequence Number=SeqID_35652
  Subcellular localization annotation: CTP_CleavageSite=17; ConfidenceScore=5.13e-01
MASFAVSGARLGVVRPGGSARSGGERRSAVDLPSLLFRRKDAFSPCKLVVSWILSVELALEFAGTVLSCAGAPGK

SEQ ID NO: 77432 - protein, 86 aa, Zea mays
  Coding DNA Sequence Number=SeqID_35653
MERRQIAGAAGGEIAAGGRFWAQGCGGGFGAADCGGCAWRNHGVLAGGTTGPVDAYAKNIFYITKSIQNGKGHGIHVGKNFWTARF

SEQ ID NO: 77433 - protein, 122 aa, Zea mays
  Coding DNA Sequence Number=SeqID_35654
  Subcellular localization annotation: CTP_CleavageSite=49; ConfidenceScore=5.04e-01
MALPLSPPQPPQEPPPAPPLLDPGRRFGAVARGWRSGAADLAQCRGPNRASIRASKEDLAQGQALRAQGRGGGFGWVHGMAKRWGRGIGDGCAAHEDEGWVKAGHTVGCTLGQWATRWDDGP

SEQ ID NO: 77434 - protein, 343 aa, Zea mays
  Coding DNA Sequence Number=SeqID_35655
  Homolog annotation: Hit_ID=O24421; Match level="QueryCoverage=11%, HitCoverage=4%, E-value=6e-11, Identity=85%"; Hit description=Starch branching enzyme IIa
MMMILGFRLRLLCLHAHMIMRLGVPVLFLLPLLRLTLLWLRSFRLLHSSRLFWHPCRLDWHPSRLDSSVSAQPPVPPALAVTTAAVAVSVTSSAPIAPAAQPQSESVPAPASTIDPGSETDSDPQLAPRNPPRQIRRHNPAPKNARPPRFLHPQPPQSAAFPSAAAIISIRDRNPPRQIRRHTPAPATPAPAPNPPWTRPDGWRNPCSCHDLRRMEGPWSNSSLIERRMEGHRTTLVERRRLRMDARNATPAPAPMEGLLSNPADGRWRMEVARTFHPRGAHRFLWASCGQQIHRPQVELALEFACTVLSCVAAPGKVLVPVGGSDDLLSSAEPIVDTQPEEL

SEQ ID NO: 77435 - protein, 382 aa, Zea mays
  Coding DNA Sequence Number=SeqID_35656
MAPSNLTVRTWVPSNLWEKIRRPPSNLKTHVLNLKFDGTHVLNVKFDGTHVLNLKNVGAVELTSLSSSKNRRRLYSSVNPRSYVSCSEWSSRMVTISFVVGKRRPGCGPPPALSFKDVHHPCWGGGWAELGLYLPYGPASRFFLQHSREKGILQPCGGDVLQPCGGKANWCCLVRVQLSVLHPGDGRAMRGWPLSPALRRGRTSTTWVRSAASVGATYGRTSGSLACPRPSCGGWGRGPFRSSVCTEVVAAAVLPLETEVAVALLVQRSPAKEVQQRQLELGQVVREQDEPQSRAAEAVSRAEVLGGLLAEASEWLAGASAWAGTLVENLATRAPVRSWRPPLGWRPFRPCRRLGRSRIPPRMETTPREPLLRCLNLQEQFV

SEQ ID NO: 77436 - protein, 376 aa, Zea mays
  Coding DNA Sequence Number=SeqID_35657
  Homolog annotation: Hit_ID=Q67X81; Match level="QueryCoverage=32%, HitCoverage=57%, E-value=1e-39, Identity=68%"; Hit description =Putative poly(A) binding protein II
  Pfam annotation: Domain name=RRM_1; Domain location=125-197; Score =69.2; E_value=1.3e-17; Accession=PF00076.12; Description=RNA recognition motif. (a.k.a. RRM, RBD, or
MEQEILKFIHDPSRTEYEFNGLPTSYLRLAAHRLAQHYFLQSIDIPDNSLPDGTGSRIILRKTTFDCRLPAVRLADIPVNLPQEDISMARVAIKQRPQKNFHGMNSSNPNATTSENKEEMDSRSVFVGNWPVVDYACTPEEVQQHFNSCGTVNRVTILTDKFGQPKGFAYVEFVEVEAVQEAIKLNESELHGRQLKVAPKRTNVPGMKQPRGRVLTDQRRTHKFDGYVAPSNLTVRTWVPSNLWEKIRRPPSNLKTHVLNLKFNGTHVLNVKFDGTHVLNLKNVGAVELTSLSSSKNRRRLYSWVNPRSYVEVGFNKMVRFVPHVAYNEMEKASQFHQGLKPFIRHALGAFPLVYFRTTVEQALGVEMQHQYTMES

SEQ ID NO: 77437 - protein, 151 aa, Zea mays
  Coding DNA Sequence Number=SeqID_35658
  Gene Ontology: Cellular component=nucleus; Biological process=cell cycle
  Homolog annotation: Hit_ID=Q658I2; Match level="QueryCoverage=72%, HitCoverage=15%, E-value=1e-48, Identity=84%"; Hit description =Putative glycine-rich protein
MAYDCWSCDLLCAASSPDLYRINLEQGRFLASLSSESPAINAVTRSKIHGLVACGGEDGAVECFDMRKKTSVGRINIPAVSSEDYSQEVTSLQFDEDQGYFMAVGTSTGKTVGSWGGPYMVFGQAILFVFNTQHRNGEFGLKDSFFGQSNN

SEQ ID NO: 77438 - protein, 183 aa, Zea mays
  Coding DNA Sequence Number=SeqID_35659
  Gene Ontology: Mol. function=protein binding; Cellular component =nucleus; Biological process=cell cycle
  Homolog annotation: Hit_ID=Q658I2; Match level="QueryCoverage=93%, HitCoverage=23%, E-value=8e-80, Identity=83%"; Hit description =Putative glycine-rich protein
  Pfam annotation: Domain name=WD40; Domain location=122-161; Score =7.4; E_value=5; Accession=PF00400.22; Description=WD domain, G-beta repeat
  Pfam annotation: Domain name=WD40; Domain location=27-65; Score=9.0; E_value=3.3; Accession=PF00400.22; Description=WD domain, G-beta repeat
  Pfam annotation: Domain name=WD40; Domain location=76-115; Score =11.1; E_value=1.8; Accession=PF00400.22; Description=WD domain, G -beta repeat
  Pfam module annotation: Pfam domain module=WD40::WD40::WD40; Domain location=122-161::27-65::76-115
MAYDCWSCDLLCAASSPDLYRINLEQGRFLASLSSESPAINAVTRSKIHGLVACGGEDGAVECFDMRKKTSVGRINIPTVSSEDYSQEVTSLQFDEDQGYFMAVGTSTGKISIYDLRMSSPLRDKDHMYGSPILNIKWHQTLNSTEPKLITADKHIVRIWDPNTLPHMLPSENAFSAAVSALE

SEQ ID NO: 77439 - protein, 98 aa, Zea mays
  Coding DNA Sequence Number=SeqID_35660
  Gene Ontology: Mol. function=thiosulfate sulfurtransferase activity; Biological process=sulfate transport
  Homolog annotation: Hit_ID=Q9ZPK0; Match level="QueryCoverage=52%, HitCoverage=13%, E-value=2e-14, Identity=73%"; Hit description =Thiosulfate sulfurtransferase
MNVCELTLAVSHTPQLPHMLPSEKAFSAAVSALRIYNKDVIVVYDGKGLFSAARVWWVKNVGTHVLNVKFVGTVELNAQPTQTHGGQISSTATWPRRT

SEQ ID NO: 77440 - protein, 45 aa, Zea mays
  Coding DNA Sequence Number=SeqID_35661
MEEDSGSAAVISAIGRVEEGPRRNTDDNLAMVPLFIEDSIVVATV

SEQ ID NO: 77441 - protein, 193 aa, Zea mays
  Coding DNA Sequence Number=SeqID_35662
MAQWWRRARWRSRGGGAASAVAGGGAVEECARHVQWTRKKRVVWAVIGEGMQPGCMMKILEAERWLKGASPHEAALLQRQQEQGSTSAPHLGARKEEGRGFSPHDAKAGSHAPCALIRNALISVKGGMEKDSGSAAMISAIGRVEEGPRRNTDDVRCSIGGKWMIGWFGNCSPAQNLAMVPHFIEDSTAVATI

SEQ ID NO: 77442 - protein, 247 aa, Zea mays
  Coding DNA Sequence Number=SeqID_35663
  Homolog annotation: Hit_ID=Q94IR3; Match level="QueryCoverage=23%, HitCoverage=28%, E-value=2e-18, Identity=81%"; Hit description=Small GTP-binding protein
EAKAYAQENGLFFMETSAKTATNVNDVFYEIAKKLLQWQQVQNPQGGMVLNQRPPERMHCDPDSEGEAVRLTFPSAQPRSGRQSRRPPDPPCPCLSFPSTHPHSHGVAGRFGGRPSRHAPAWCPRPRSSDPAADGEGKATQVPRPCPQSRDFPTVNIAQSLLVVGIVHLHTLIDSAIPLQRHCPPVAAMRAGGRRGLCRQEVLASRAELSCVDWDQKKRSALVAGALANTPAAMRGRTVQCSGQGYL

SEQ ID NO: 77443 - protein, 463 aa, Zea mays
  Coding DNA Sequence Number=SeqID_35664
  Homolog annotation: Hit_ID=Q5VMB6; Match level="QueryCoverage=28%, HitCoverage=37%, E-value=3e-56, Identity=80%"; Hit description=SF16 protein-like
  Pfam annotation: Domain name=Ras; Domain location=299-439; Score= -86.8; E_value=0.009; Accession=PF00071.12; Description=Ras family
  Pfam annotation: Domain name=Ribosomal_L23; Domain location=1-65; Score=31.5; E_value=2.1e-06; Accession=PF00276.10; Description =Ribosomal protein L23
  Pfam module annotation: Pfam domain module=Ras::Ribosomal_L23; Domain location=299-439::1-65
MKKIEDNNTLVFIVDLKADKKIKAAVKKMYDIQAKKVNTLIRPDGKKKAYVKLPCKHPSDFPSLPSMSLSPAGSNRPFHTPLAPHPRWCLGMGVAYETTKSGVGVASMGVMRLKLVMKSIVLIVMARVLGIYDLIIAAIISAGINPKAKPKPYFLDGYAHLSFELACSLAGLVAGMAISIVRDTRVSTVKHVVDAQQSGTGEKDAPFVVDGIEMANIEWNGGSDTMDEILVRIQQLEEAVVKRERAMAYTFNHQWRARSATSLGNFSYEVGKGGWGWSWMDRWIVARPWESRSMVHPENPKKAQAKKENTTNPLALKLQGSITLSNNINDRKTLKKKPLPSASLTDQKKPSPSPSSDQKKPVPKEQRAKAAGTPPKPKAKYMKGSQEKKPQPQQRVSPPLSQEAKAYAQENGLFFMETSAKIATNVNDVFYEIAKKLLQGQQVQNPQGGMVLNQRPPERMSVK

SEQ ID NO: 77444 - protein, 296 aa, Zea mays
  Coding DNA Sequence Number=SeqID_35665
  Homolog annotation: Hit_ID=Q07761; Match level="QueryCoverage=39%, HitCoverage=75%, E-value=1e-42, Identity=76%"; Hit description=60S ribosomal protein L23a
  Pfam annotation: Domain name=Ribosomal_L23; Domain location=214-293; Score=101.8; E_value=2e-27; Accession=PF00276.10; Description =Ribosomal protein L23
  Pfam annotation: Domain name=Ribosomal_L23eN; Domain location=156 -208; Score=70.6; E_value=5e-18; Accession=PF03939.4; Description =Ribosomal protein L23, N-terminal domain
  Pfam annotation: Domain name=TP2; Domain location=83-199; Score= -54.6; E_value=0.098; Accession=PF01254.8; Description=Nuclear transition protein 2
  Pfam module annotation: Pfam domain module=Ribosomal_L23::Ribosomal _L23eN::TP2; Domain location=214-293::156-208::83-199
MGRAAKAAKKQAKRESQTRWTGGHHSEAGGGQFAAGFGEILGGVWLPGGGESRLAPATRGIGRAGGRVTGNSAAVVCSGGMLACATCTTRHRLASASARRQESRLGRFVEDPGSALSRGLSAGVVSRGVASQGLVACSGEFREAEMAPKAAPAKKGDAKTQALKVAKAVKSGSVKKTKKIRTSVTFHRPKTLKKARDPKYPRISTTGRNKLDQYQILKYPLTTESAMKKIEDNNTLVFIVDLKADKKKIKAAVKKMYDIQAKKVNTLIRPDGKKKAYVKLMPDYDALDVANKIGII

SEQ ID NO: 77445 - protein, 81 aa, Zea mays
  Coding DNA Sequence Number=SeqID_35666
MAENGEESEVIEEKTPPPLESQAGTWLYFDNCESKPDSPTNKGKPRSGVILRKDGFYLQEYFHLEQWWDLTAKFPVMLFSS

SEQ ID NO: 77446 - protein, 126 aa, Zea mays
  Coding DNA Sequence Number=SeqID_35667
MVGSYCKVPCDALFILRNGNNPKDGSVLTVDPLTGHMPRHGSGLKNPGGGLTYARVKCYICRVIGDPQLSIIDSDRRTFAHTLESLFLSRVRKRQIFVAFAPRWYQMRKNKTEVREDLVLHIGSFA

SEQ ID NO: 77447 - protein, 202 aa, Zea mays
  Coding DNA Sequence Number=SeqID_35668
MVGSYCKVPCDALFILRNRNNPKDGSVLIEDPLTGHMPRHGLCNRFRISISPMFCNVCKTGETFLERNDLWVADATIRYLQDQLAKRDLALDWAVNSRPFAWAKEAKARARVEELSSAMNNLQDCYNTLHEDVHVLYSQLHPNVPADLVGTEAGPSRVAGEALDGALDLFRPPPSMKLVDEWSSTPDSKATKSEKKWLIRCP

SEQ ID NO: 77448 - protein, 106 aa, Zea mays
  Coding DNA Sequence Number=SeqID_35669
  Homolog annotation: Hit_ID=Q10QD6; Match level="QueryCoverage=50%, HitCoverage=16%, E-value=6e-10, Identity=56%"; Hit description =Surfeit 1, putative, expressed
MAQWLSRGSAKTNACLLHVVASQRTRVAINPSQAVLLDCPLRISIVNRGWVPRGWHDKKVKDLQILDEASESPEAVKPYEKGSWWKFWSNKPKSSPEVMFVPYLFA

SEQ ID NO: 77449 - protein, 142 aa, Zea mays
  Coding DNA Sequence Number=SeqID_35670
MAMAIGSMAAWRLDHRIIAQRYYTVLTKDLLSIGFDQGWPSFLLSMDSTSSMRKSLVLACVPTELADYVFGEKSIFSWSLSTIGYTTVQLAIGCFTTGECPCVATETYNTVEGREQRGECIGWTGKKSTDLGMTIAAATCKG

SEQ ID NO: 77450 - protein, 208 aa, Zea mays
  Coding DNA Sequence Number=SeqID_35671
MRVPAAQRGGEDSAWSARHRGGGDGAWAARLPGGVEGGVATSGGRAILYSADEGSVINWVRPRMAFIPAVDHNDCQVARKESQQNTIPQEINHRDDTMVYPVVRPRPTLAYSTLWRPNGRGLQSTPLKRSKDPLEYHGVLLAFSQSRLRGISTTWSLSPLQLKFTKKHRARGNEQRTQDFKRSEQQHAHKAQQELATQLKEFATQQEL

SEQ ID NO: 77451 - protein, 60 aa, Zea mays
  Coding DNA Sequence Number=SeqID_35672
MGKTLSTQVLSKTYPTKEKTLKGMLVSKRDSSLPEAKLTHDEACDQLKGPRSASLHRQGP

SEQ ID NO: 77452 - protein, 50 aa, Zea mays
  Coding DNA Sequence Number=SeqID_35673
MGKTLSTQVLSKTYPTKEKNLKGMLVSKRDSRMQRELDQGNEDATPQKKT

SEQ ID NO: 77453 - protein, 90 aa, Zea mays
  Coding DNA Sequence Number=SeqID_35674
MDKIYRFRPLRSPRKNDLTNYWALGPFVRPFTSLVDPGDIYPPQAPDLWVDLEFCACALEIGILGYKILDFLGCTEGAPNGCSPRPLSRF

SEQ ID NO: 77454 - protein, 92 aa, Zea mays
  Coding DNA Sequence Number=SeqID_35675
MGFSDTSCDGTSQGPRKNDLTNYWALGPFVRPFTSLVDPGDIYPPQAPDLWVDLEFCACALEIGILDYKILDFLGCTEGAPNGCSPRPLSRF

SEQ ID NO: 77455 - protein, 962 aa, Zea mays
  Coding DNA Sequence Number=SeqID_35676
MEDEDVENLLEYHGFGLRQYEELYLVKEGPFLNSESDFPSGCSQLVHSKKSQRVVDDVSSGPDCAPTSKEKTVFPYTSQPVAGKRDLFLPQNAPAIPPDGRMDLDPSFPGPISITPDRQISPLFSDPFSPRAASKLFSSTHPKPLSPTDGRKDRFSSVLTAVSPRTGKRDILSKTPKVASPKAEGKTKLVNGLIAEDQDSGVAEIPQKVEMQTDILWSQANTQNANALAEPIISHPLADSMSLNYSSMYGAEDDFRAHVSGIGADMDEGTPPDHECLVIGAGLPISSPLSYHEEYEDHSISNGTNDDWLPIVMPAKKLISDENLKAILRKWRQHAADKRLLREQKNALAVAALCSLSLGPPVHKSTTVSKLAVEELDIGHAFKERQARKQRSWSRLNVSELSGPILNENNPDARCLCWKLLVLVPTGMESQTNSFVSKWLLRKLMGYGIGDIGLVVSSAGLSIWTEWISFPNACCLSVVRASDQQVIDNDIANSTSCIVFVVSESISWEMQKERFNSLLACIPDESNLPLLIFSGDTYNEGYEYASKYIINRLGLNGLNRGKIGSSLVIFLVENYTEDHANGFFDDDKLREGLKWLVSSLPVQPDVTLVKTHELLLEYLNPQLELLNTHVAPGAGPGDCISVFNNAVNQLAEEILAAANANRSQWPAPEIDLLERTSNERIYAEMFLPSIGWSSPSRIQPLLAAINSCKIPEFSYDLSWLNHGSHMGKQIQDQKKLLEECLARYLTESARLLDESQVVTEVNVMVQNCVGLELRDSSYYLAPRWVAIFRRIYNWRLAKLSTGKFSEAYVLTQHLYQAPAAAGSNGTTQGLTANTASSDAVDHIMMPAVSTGITLDEIIEISCDLDAVDAQPVTLAPRLPVHVHEEPQALADNNGVHGVDEMYIPRRVELGEVMPIETDDKLSQLRVELGEVMPIETDDKLSRLLEQCTKLQDRIDETLSIYF

SEQ ID NO: 77456 - protein, 596 aa, Zea mays
  Coding DNA Sequence Number=SeqID_35677
MEDEDVENLLEYHGFGLRQYEELYLVKEGPFLNSESDFPSGCSQLVHSKKSQRVVDDVSSGPDCAPTSKEKTVFPYTSQPVAGKRDLFLPQNAPAIPPDGRMDLDPSFPGPISITPDRQISPLFSDPFSPRAASKLFSSTHPKPLSPTDGRKDRFSSVLTAVSPRTGKRDILSKTPKVASPKAEGKTKLVNGLIAEDQDSGVAEIPQKVEMQTDILWSQANTQNANALAEPIISHPLADSMSLNYSSMYGAEDDFRAHVSGIGADMDEGTPPDHECLVIGAGLPISSPLSYHEEYEDHSISNGTNDDWLPIVMPAKKLISDENLKAILRKWRQHAADKRLLREQKNALAVAALCSLSLGPPVHKSTTVSKLAVEELDIGHAFKERQARKQRSWSRLNVSELSGPILNENNPDARCLCWKLLVLVPTGMESQTNSFVSKWLLRKLMGYGIGDIGLVVSSAGLSIWTEWISFPNACCLSVVRASDQQVIDNDIANSTSCIVFVVSESISWEMQKERFNSLLACIPDESNLPLLIFSGDTYNEGYEYASKYIINRLGLNGLNRGKIGSSLVIFLVENYTEDHANGFFDDDKLREGLKWL

SEQ ID NO: 77457 - protein, 610 aa, Zea mays
  Coding DNA Sequence Number=SeqID_35678
  Subcellular localization annotation: CTP_CleavageSite=14; ConfidenceScore=5.24e-01
MVKSPPSDTRGNIRSSSVDFGSNNSVQNLHAYADVQKSDASFSKFRNQIQSRIGGACSPSQQMSHLSDSNELNTLAISPPKPSILSATRRTGISSLDATDDDHLTPSTELEREEQAKAKRLARFHVELSRPVQNTNDFVKTVKSSADKSKQATSVGRTPLRTNDDTDDNTLVDMDSTALAAIVGLCPDMCPEPERAERERKGDLDRYERLDGDRNLTTELLAVKKKLILNWELVKSLYAFIFSFKDEDVENLLEYHGFGLRQYEELYLVKEGPFLNSESDFPSGCSHLVHSKKSQRVVDDVSSGPDCAPTSKEKTVFPYTGQPVAGKRDLFLPQNAPAIPPDGRMDLDPSFPGPISITPDRQISPLFSDPFSPRAASKLFSSTHPKPLSPTDGRKDRFSSVLTAVSPRTGKRDILSKTPKVASPKAEGKTKLVNDLIAEDQDSGVAEIPQKVEMQTDILWSQANTQNANALAEPIISHPLADSMSLNYSSMYGAEDDFRAHVSGIGADMDEGTPPDHECLVIGAGLPISSPLSYHEEYEDHSISNGTNDDWLPIVMPAKKLISDENLKAILRKWRQHAADKRLLREQKNALAVAALCSLSLGPPVHKSTT

SEQ ID NO: 77458 - protein, 115 aa, Zea mays
  Coding DNA Sequence Number=SeqID_35679
MWWGREPLTSGEDASLQVGPEFDWRLDRCSYAPVAAITVGPPMAMPTSMPIPTANWPVTIVLNVTVGPCAGVPRVAALVLKILPFQTPVTVPKRRGIGASGGAVFSHSVTGAPVA

SEQ ID NO: 77459 - protein, 108 aa, Zea mays
  Coding DNA Sequence Number=SeqID_35680
  Subcellular localization annotation: CTP_CleavageSite=30; ConfidenceScore=5.03e-01
MAIGGPAVIAATDARKQRSNRQSDSGPTCRLASSPEAGPRAIVGILNQGYPLLQHKGITPMRRLLAARRTAPNSTGWASQRAPRGEERHHASKKKKTGTDPNIRVFTG

SEQ ID NO: 77460 - protein, 343 aa, Zea mays
  Coding DNA Sequence Number=SeqID_35681
MATSGLMVGESEPGCGLCPSLSLKDFHHQGWGGESAELGVPGLQPRVASGPLAAPASATAAGRGSSAGAAAGTGHGLTSNFSAFCPSLPHKFWHGRGPPSSGIDPEVSAAAVRPPGAEVVVVAAAGAGDGAPFVGLPLLRRPSPSEWGRSCLRRGNRSSVRNGTSNASVFCSLRLSGPEHESLGPFGLVVWGSSSLVKETPRLPFGGPRPGPTPKSISRGLGSGWRPWKPVDRGPRGNRSSRLLGPDSRRSPWTASPPEAGSGFAEDVVDAEGATAPFSVKTRACRIRSSCSVCFLRPPRPEKHTLAALAKLRLFSSCFEHLDSVGNRDVCVSESSFSWKGRV

SEQ ID NO: 77461 - protein, 216 aa, Zea mays
  Coding DNA Sequence Number=SeqID_35682
MATSGLMVGESEPGCGLRPSLSLKDFHHQGWGGESAELGVPGLQPRVASGPLAAPASATAAGRGSSAGAAAGTGHGLTSNFSAFCPSLPHKFWHGRGPPGSGIDPEVSAAAVRPPGAEVVVVAAAGAGDGAPFVGLPLLRRPSPSEWGRSCLRRGNRSSVRNGTLNASVFCSLRLSGPEHESLGPFGLVVWGSSSLVKETPRPPFGGPRPGVAISV

SEQ ID NO: 77462 - protein, 216 aa, Zea mays
  Coding DNA Sequence Number=SeqID_35683
MATSGLMVGESEPGCGLCPSLSLKDFHHQGWGGESAELGVPGLQPRVASGPLAAPASATAAGRGSSAGAAAGTGHGLTSNFSAFCPSLPHKFWHGRGPPSSGIDPEVSAAAVRPPGAEVVVVAAAGAGDGAPFVGLPLLRRPSPSEWGRSCLRRGNRSSVRNGTSNASVFCSLRLSGPEHESLGPFGLVVWGSSSLVKETPRLPFGGPRPGVAISV

SEQ ID NO: 77463 - protein, 86 aa, Zea mays
  Coding DNA Sequence Number=SeqID_35684
MGSLMLGAGRGRQERGHLASSYSSGSIRLDTGIVPKALPCSLDYKLVTKSQMKIMMLNSMDASLVIPPVIFLWMDVHVRCTLMNKG

SEQ ID NO: 77464 - protein, 122 aa, Zea mays
  Coding DNA Sequence Number=SeqID_35685
MESGIKGKKTASLNFITTREEERSQQGVEALGARKPGAGSRHCLVRLLGERGSTGSARSGVDQVPSGVAALAGWCGYAEKLQGRGSRLGDEDMMLNSMDASLVIPPVIFLWMDVHVRLYFDE

SEQ ID NO: 77465 - protein, 195 aa, Zea mays
  Coding DNA Sequence Number=SeqID_35686
MGSLMLGAGRGRQERGHLASSYSSGSIRLDTGIVPKALPCSLDYKLVTKSQMKIMMLNSMDASLVIPPVIFLWMDVHVRCTLMNKVWWLGVFIAPTTKSGRWGRLLSKGAPDSPRCQSTVELDRCAGDRCSTWHTGQSGATPDSPVNYSGVAPQKPEAEQFKVDLPGAPDTVRWHTGQSGAPDQGNVRLSFAPFF

SEQ ID NO: 77466 - protein, 464 aa, Zea mays
  Coding DNA Sequence Number=SeqID_35687
MGENDGADRRARAARERERREREGVESLTGGAELLCEVLLSFQVYAHDEKRQRTTGGVREAGSPAQGSQRRVSPPPAPPSVPPPPPPPSSSLPPPQGQQHQQQQQQQGQRTSRFQGGWKVQGPKASSPSISKVAPIGESGSQQQVSAGLDAGDLPLPSTAEAAPSGPQVPAGTAEAVPSAPQAPARSPVAVAPPTATADPTAATMPSNIPSTTTEAAGGVPNSIPQPILEEPEVILGRWLQTGIGPETTPPTLPRVLSRAHQALRKTEAAILQEWEALEIEHQRLGDWRTQPEERTKAASCQFASERSELEQGREDLKEDLEKVLERERKATREEKRLVKRKEHLDQRDAVITEFHEKLKAYNAMLEKQRDEQTATEAALQKLQQELDDMASNISLAKENLKEKDASLEERAMDLIRQEKDLTWREEMWERRDKLLAEHELEAEEKEKKLEEKERTLEERVRQF

SEQ ID NO: 77467 - protein, 110 aa, Zea mays
  Coding DNA Sequence Number=SeqID_35688
  Subcellular localization annotation: CTP_CleavageSite=35; ConfidenceScore=5.40e-01
MDTGCFDTGMGLTPSGTRAKLASSAHAAIRWTPMRCSAQRSSSVFFIVSAAWEPRAACAVWATCAAYTAWNRRTRSSSVHSSSSTFFSFSSASSSCSASNLSRLSHISSL

SEQ ID NO: 77468 - protein, 138 aa, Zea mays
  Coding DNA Sequence Number=SeqID_35689
MKKTLEDLRAEHRIEVQHIAAWADEASSALVPLGVSPIPVSKQPVSISNALPVLDSAADRLRRLDQILGARLKAEGSRLCQAVIEYILTCFRSHNPTISLGSVIAGPVADTEDAAWGSVQDVVDVVAKRFQRDPADDE

SEQ ID NO: 77469 - protein, 249 aa, Zea mays
  Coding DNA Sequence Number=SeqID_35690
SGHDGREQRGKTDAFPATRGYSEQIKGLAGITTINKNTPTWKKRLQALSGGDPIEDDPTIVYMAGYLHTLNNHYDELSSRCTHLNSRVESLEQQVKELTQEKASLQESLSIVEGEEANTREAYRTLKTDFDKKLKALAPKKKIQKKTTSQGCQTEKKNKKAPLALPPRRIDYWSDEEDVSLASLDDLLKAFGDTLDKELASTSKNALVWLRIKPRLPPQGLEQVSPKELKGKSLERKVKPTSPHLHLYP

SEQ ID NO: 77470 - protein, 114 aa, Zea mays
  Coding DNA Sequence Number=SeqID_35691
MAVSSAVRPTRSRRPEATPCKLRVWQASQRCESAQTRKQGTGADRNRAGDGELGFTVAEVGFGANSKFASSNEGLPAINGGWEDDDVMQLGEGSIYRRLRRRRSIWMKLCSGRR

SEQ ID NO: 77471 - protein, 122 aa, Zea mays
  Coding DNA Sequence Number=SeqID_35692
MPHNICKEGLRSDTSCDRTSQKQQKSATSSPKNNEGINPEYGILSKSYPTKEKTLKGMLVIWESSKAKHQKAFVKQVIKEGNPIQGRSSGHGGREQRGKTDAFPATRGYSVQIKGLAGITTM

SEQ ID NO: 77472 - protein, 156 aa, Zea mays
  Coding DNA Sequence Number=SeqID_35693
MTIVPIDSPFASRPHRLGIQCSTDPDCRRAVAALVPTISRMGDQVSGRMRDKVRARLHSVNKYFLEILGNSLQLWYHHLNMIRLLARSNCANTAALSRFGQIQTCDFKNSQLQVQTSKQIDPRLSGKITRKSDPRLFGKLSKSTKYFYNHQELILC

SEQ ID NO: 77473 - protein, 97 aa, Zea mays
  Coding DNA Sequence Number=SeqID_35694
MEAKSHHQPNQGGTCKNYATSKAEYTNTQLDLPGLSRLDRFRLATSKIHYYRLRHPNKLILDFLERDWTDSVNEFAKNTTSKRSDLWLSNFNTSKKT

SEQ ID NO: 77474 - protein, 114 aa, Zea mays
  Coding DNA Sequence Number=SeqID_35695
MKAKSHHQPIILRSACKNCATSKAEYTNTQLDLPVTALVPTITGMGDHVSGRVRGKVFGQVHSDLSRFGQIQICNFKNSQLKIQTSKQIDPRLSGKITKKSDPRLFGKLSKSTT

SEQ ID NO: 77475 - protein, 154 aa, Zea mays
  Coding DNA Sequence Number=SeqID_35696
MAGQASRKPRRRRSKANREIWAGKKWRLGGLRRGKHAEQRAKPSWGRQPWEVRGERQASAGSFDDWARRGKNQGHREDAGARVGGAVRLDAVRAAERLGGRRSRRAQGSFGLASAREIGSKGARHAGELSREEHTQMAGPSLREIRPGAAGAGN

SEQ ID NO: 77476 - protein, 126 aa, Zea mays
  Coding DNA Sequence Number=SeqID_35697
METGRALQGQTRRSEDQAELGQTAMGGQGRVPGECRELRRLGAQGKEPESLDQEVALVTNGGDPVRGRLQGAVKRCLPWRPALREFGRYFGSGFLAMVKVSTYNTYRLKNKLDQNLTHDFSEAMRD

SEQ ID NO: 77477 - protein, 245 aa, Zea mays
  Coding DNA Sequence Number=SeqID_35698
MEAGWVLQGQTRRTEGQAELGQTAMGGQGRAPGECRELRRLGAQGKEPGSLDQEVALVTNGGDPRNWCWAARGGNFGAEKTGRRREYRAGRWSSTWRKEERAVRPLGWALGMGAAEQEAPASRAQGREPQRLALERDGGRRERAVGRGDHAQRHTAREIRPTVPWEQLELGQRSREEIEEGHREEWADWSREARGHGWKDEMEGRRRRIREKLSSRTGIRRSQQRNINRGAAQQDKNDGCDLHRR

SEQ ID NO: 77478 - protein, 125 aa, Zea mays
  Coding DNA Sequence Number=SeqID_35699
  Homolog annotation: Hit_ID=Q8LQJ9; Match level="QueryCoverage=24%, HitCoverage=4%, E-value=5e-10, Identity=100%"; Hit description=Cell division protein-like
MDSKTKFSDVKGVDEAKAELEEIVHYLRDPKFSCLRSFRVGSQSNPQLIEQLLARRTLLCTPISFILVLTLTSEHAKQEVPTVERPESLGKKFEGKTSSKEVKISDDKHKEDKKESTGSIKSHKK

SEQ ID NO: 77479 - protein, 107 aa, Zea mays
  Coding DNA Sequence Number=SeqID_35700
  Homolog annotation: Hit_ID=Q8LQJ9; Match level="QueryCoverage=28%, HitCoverage=4%, E-value=5e-10, Identity=100%"; Hit description=Cell division protein-like
MDSKTKFSDVKGVDEAKAELEEIVHYLRDPKDALEEILYQFEEKLQVEREEAARKQEELQAQLQAQQAAVQENQSLLRQAQEEVKGMHTKFEETNALLRAVLKLQED

SEQ ID NO: 77480 - protein, 106 aa, Zea mays
  Coding DNA Sequence Number=SeqID_35701
  Subcellular localization annotation: CTP_CleavageSite=53; ConfidenceScore=5.38e-01
AALSFCQTGQWSSGVTAVTSALPGARVRIEVSGHLCVKCPRNLVSRCGDLVKVASERSQGLGQAGDVSAIKRGPRARRKSLELYADGGYQLRIRRLEGTPNYGPRQ

SEQ ID NO: 77481 - protein, 104 aa, Zea mays
  Coding DNA Sequence Number=SeqID_35702
MVSPVSCKRVIRVDVRAPFVGGRLGAQRHAQKYLRQLARRLLDAWAWVPKLACQKSEKRVRLARLHAACMAARPFCPLDPASESQGRALERVGEDSARGAWGHT

SEQ ID NO: 77482 - protein, 478 aa, Zea mays
  Coding DNA Sequence Number=SeqID_35703
PSLSPGVGRSGVRRLPGLARIRALGSGGAEFAVAPLSRPDYRSDSLLSSGAAVESGRRAALSLCQTVKVASERSQGLGRAGDVSAIKRGLRARRKSLELYADGGYQLRIRRLEAPEPPHRARGRSGTDSTFYIRPYVAFPQGGGGECAMLPSMGTEHGVSGELQAGWDVSLADDVTAAPVRLPPLLLPAPESQGRALERVGEDSACGAWGVVSSHLPSPRMGGIRRLSTSSLEERNSVGVGTSQPSFGFKDFSSRSPGRTPSPAVTRDGDLRLDGGGKRAGLRSPPLPQPQGFSSPRLGRGECRVGVDPCVGGGPLLHSVMGGGAGIARGARQLQHAWSSAASGFGAARGAGVRHGSWKSGVDPEVSAVAVRPPPPPEHKSKLSLLPEQVTARRSSAFRCSAGLPPWRGVVRTCGGGNRSSVGSGISNAGVLRSLWLSGPEHESLGPFGLVVWGSSSLVKETPRPPFGGPRPGVAISV

SEQ ID NO: 77483 - protein, 177 aa, Zea mays
  Coding DNA Sequence Number=SeqID_35704
MAKKGQYVKSQGLVDMNKPPEMISSNMKFKEIQFQKLQRLLDGCHPDFDNDHLCSVNNHDLLLEMSTPSADLHLLPETGVENIRTPKSLHAELKRELSKLNTVLKLPDNVLFLANQFIEYLLHNHLVVREPRSILHAFNIALCWRAASFLKYTELDHRESVALASDGLNYECNEAPS

SEQ ID NO: 77484 - protein, 218 aa, Zea mays
  Coding DNA Sequence Number=SeqID_35705
MAKKGQYVKSQETGTTLDRASVEQLKMSSPILPLPKLHTQEKKRKKKYYLKQGLVDMNKPPEMISGNMKFKEIQFQKLQRLLDGCHPDFDNDHLCSVNNHDLLLEMSTPSADLHLLPEIGVENIRTPKSLHAELKRELSKLNTVLKLPDNVLFLANQFIEYLLHNHLVVREPRSILHAFNIALCWRAASFLKYTELDHRESVALASDGLNYECNEAPS

SEQ ID NO: 77485 - protein, 166 aa, Zea mays
  Coding DNA Sequence Number=SeqID_35706
MAKKGQYVKSQGLVDMNKPPEMISGNMKFKEIQFQKLQRLLDGCHPDFDNDHLCFVNNHDLLLEMSTPSADLHLLPETGVENIRTPKSLHAELKRELSKLNTVLKLQDNVLFLANQFIEYLLHNHLVVREPRSILHAFNIALCWRAASFLKYTELDHRESVALASD

SEQ ID NO: 77486 - protein, 133 aa, Zea mays
  Coding DNA Sequence Number=SeqID_35707
  Gene Ontology: Mol. function=nucleic acid binding
  Homolog annotation: Hit_ID=Q7XIP0; Match level="QueryCoverage=35%, HitCoverage=7%, E-value=2e-13, Identity=78%"; Hit description =Putative ABI3-interacting protein 2; CnAIP2
DDPKSRVLLALRAVIKCIEEYKLQKEYSLGPIQKCVSELNPKDEKRPSTEREEIRNMIEHDGSAKGIVFSQFTSFLDLIQFSLGGSTRFVIKDTVEERILQLQQKKQLVFKGTMGDSPDAMSKLTEADLKFMF

SEQ ID NO: 77487 - protein, 395 aa, Zea mays
  Coding DNA Sequence Number=SeqID_35708
  Gene Ontology: Mol. function=nucleic acid binding; Cellular component= nucleus; Biological process=regulation of transcription from RNA polymerase II promoter
  Homolog annotation: Hit_ID=Q5EAL1; Match level="QueryCoverage=55%, HitCoverage=42%, E-value=1e-28, Identity=35%"; Hit description =Htatsf1-prov protein
  Pfam annotation: Domain name=RRM_1; Domain location=211-267; Score =1.2; E_value=0.11; Accession=PF00076.12; Description=RNA recognition motif. (a.k.a. RRM, RBD, or
  Pfam annotation: Domain name=RRM_1; Domain location=58-139; Score =31.8; E_value=2.3e-06; Accession=PF00076.12; Description=RNA recognition motif. (a.k.a. RRM, RBD, or
  Pfam module annotation: Pfam domain module=RRM_1::RRM_1; Domain location=211-267::58-139
MARLRPEPIDREKTCPGSAAQGFHEVAPCQSSAPTTIVAQEANKPPDSWFDLKVNTHVYVTGLPDDVTVEEIVEVFSKCEIIKEDPETKKPRVKIYTDRETGRKKGDALVTYFKEPSVALAVLLLDGTPFCPGGKTHMSVSPAKFEQKGDVFVSKKTDKQKKRKIKKVEDKMLGWGGHDDKKLMIPATVILRHMFTPVELRADEELLFELEADVREECIKFGLVDNVKVCENHPQGVILVRFKDRKDGAKCIEKMSGRWRFDCTSQLTFALWDDDHNVINADDDPKSRVLLALRAVIKCIEEYKLQKEYSLGPIQKCVSELNPKDEKRPSTEVRHNYAKKPRGYGIWIKWRDGDPQPQAHREEIRNMIEHDGSAKGIVFSQFTSFLDLIQFSLGG

SEQ ID NO: 77488 - protein, 165 aa, Zea mays
  Coding DNA Sequence Number=SeqID_35709
  Gene Ontology: Mol. function=nucleic acid binding; Cellular component= nucleus; Biological process=regulation of transcription from RNA polymerase II promoter
  Homolog annotation: Hit_ID=Q6RZU2; Match level="QueryCoverage=27%, HitCoverage=14%, E-value=2e-16, Identity=88%"; Hit description =Putative RNA-binding protein
  Pfam annotation: Domain name=RRM_1; Domain location=58-139; Score =31.8; E_value=2.3e-06; Accession=PF00076.12; Description=RNA recognition motif. (a.k.a. RRM, RBD, or
MARLRPEPIDREKTCPGSAAQGFHEVAPCQSSAPTTIVAQEANKPPDSWFDLKVNTHVYVTGLPDDVTVEEIVEVFSKCEIIKEDPETKKPRVKIYTDRETGRKKGDALVTYFKEPSVALAVLLLDGTPFCPGGKTHMSVGHDDKKLMIPATVILRHMFTPVELR

SEQ ID NO: 77489 - protein, 160 aa, Zea mays
  Coding DNA Sequence Number=SeqID_35710
  Gene Ontology: Mol. function=protein serine/threonine kinase activity; Cellular component=cytoplasm; Biological process=protein amino acid phosphorylation
  Homolog annotation: Hit_ID=Q8S5V9; Match level="QueryCoverage=55%, HitCoverage=16%, E-value=2e-39, Identity=87%"; Hit description =Putative serine/threonine kinase
  Pfam annotation: Domain name=Pkinase; Domain location=2-142; Score= -109.7; E_value=0.05; Accession=PF00069.15; Description=Protein kinase domain
MEFWGKKESGKLLGGRDIDLFSLDSSLKKSYADPAEDGLLHTACGTPNYVAHEVLADKGYDGMAADVWSYGIILFVLMAGYLPFDDANLMRLYKLICHATFSYPPWFSSGARKFIKRILDPNPDTGWKSGAVTTLGQGGSDLIATTIGKALGPREIYVYV

SEQ ID NO: 77490 - protein, 137 aa, Zea mays
  Coding DNA Sequence Number=SeqID_35711
  Gene Ontology: Mol. function=kinase activity
  Homolog annotation: Hit_ID=Q6QP54; Match level="QueryCoverage=68%, HitCoverage=33%, E-value=3e-16, Identity=50%"; Hit description =Putative kinase
MGHRSCSLRPESTRGRVMMVLPVDVAGLCPRLGDVEAPPKPGSSLSSMAEAESEPLGRARRKSSAEARAVSEPWGRMKRGSSSSGAELESEPWVWKDVDGVLTCDPNIYSHAKTVLYLTFEEATELAYFGAQDLNRV

SEQ ID NO: 77491 - protein, 297 aa, Zea mays
  Coding DNA Sequence Number=SeqID_35712
  Gene Ontology: Mol. function=aspartate kinase activity; Cellular component=chloroplast; Biological process=amino acid biosynthetic process
  Homolog annotation: Hit_ID=Q9MAX0; Match level="QueryCoverage=90%, HitCoverage=88%, E-value=1e-124, Identity=75%"; Hit description =Aspartate kinase
  Pfam annotation: Domain name=AA_kinase; Domain location=1-166; Score =36.5; E_value=8.9e-08; Accession=PF00696.18; Description=Amino acid kinase family
MSTAEQEIPSTSIYIPHSSTLCNDYDAFDIGFITTDEFGNADILEATYPAVAKRLHGDWIQDPAIPVVTGFLGKGWKSGAVTTLGRGGSDLTATTIGKALGLREIQVWKDVDGVLTCDPNIYPHAKTVPYLTFEEATELAYFGAQVLHPQSMRPAREGDIPVRVKNSYNPKAPGTLITRQRDMDKVVLTSIVLKSNVTMLDIVSTRMLGQYGFLARELDHVVEELEKIAIVRLLQQRAIISLIGNVEQSSLILEKTGRVLRKSGVNVQMISQGASKNCLQTPQSELRAPIVNKMASL

SEQ ID NO: 77492 - protein, 345 aa, Zea mays
  Coding DNA Sequence Number=SeqID_35713
  Gene Ontology: Mol. function=protein kinase activity; Cellular component=cell surface; Biological process=protein amino acid phosphorylation
  Homolog annotation: Hit_ID=Q9ATQ4; Match level="QueryCoverage=92%, HitCoverage=49%, E-value=1e-126, Identity=66%"; Hit description=TAK33
  Pfam annotation: Domain name=Pkinase; Domain location=65-310; Score =70.1; E_value=7.1e-18; Accession=PF00069.15; Description=Protein kinase domain
  Pfam annotation: Domain name=Pkinase_Tyr; Domain location=66-310; Score=34.9; E_value=1.3e-14; Accession=PF07714.7; Description =Protein tyrosine kinase
  Pfam module annotation: Pfam domain module=Pkinase::Pkinase_Tyr; Domain location=65-310::66-310
MAAYCPSTRHKPLGTLMQKSSKIFIISYLQWKTRITIDGVEKFLQMQQVLVLMRYAYTNIIAITDHFRDKLGQGGYGSIYKGVLQRGEVHVAVKMLGYSNCNGETFISEVATICKIHHVNVVRLIGFCSENNIRALIYEFMPRGSLDKYIFSSEKSFSWDKLNEIALGIARGLNCLHQGCDMQIVHFDIKPHNILLNSNFVPKVADFGFAKLFPRDDSFMPLSATPGTSFVMLLLEMTGEQRNTDPHAGSSSQAYYPSLVYSQLSQGDANGISEGVDMHKLENKLCIIGLWCIQMKPQDRPTMREVIEMLEASVDGIQMPPRPFFCDDEGDSSYSAISKLDIIEE

SEQ ID NO: 77493 - protein, 109 aa, Zea mays
  Coding DNA Sequence Number=SeqID_35714
  Gene Ontology: Mol. function=protein serine/threonine kinase activity; Biological process=protein amino acid phosphorylation
  Homolog annotation: Hit_ID=Q9ATQ4; Match level="QueryCoverage=99%, HitCoverage=15%, E-value=1e-32, Identity=60%"; Hit description=TAK33
MTGEQRNVDPHAGSSSQAYYPSLVYSQLSQGDANGISEGVDMHKLEKKLCIIGLWCIQMKPQDRPTMREVIEMLEASVDGIQMPPRPFFCDDEGDSSYSAISKLDIIEE

SEQ ID NO: 77494 - protein, 106 aa, Zea mays
  Coding DNA Sequence Number=SeqID_35715
  Gene Ontology: Mol. function=protein serine/threonine kinase activity; Biological process=protein amino acid phosphorylation
  Homolog annotation: Hit_ID=Q9ATQ4; Match level="QueryCoverage=97%, HitCoverage=15%, E-value=8e-32, Identity=62%"; Hit description=TAK33
MTGEQRNVDPHAGSSSQAYYPSLVYSQLSQGDANGISEGVDMHKLEKKLCIIGLWCIQMKPQDRPTMREVIEMLEASVDGIQMPPRPFFCDDEGDSSYSAISKLDI

SEQ ID NO: 77495 - protein, 98 aa, Zea mays
  Coding DNA Sequence Number=SeqID_35716
MALLLTHAKSAEGKDPTARSRVSAMERRRRPREQVAGEADRWAQLVGHLSSMHAEAQARLTGGARVYADAIVDITPPTITLNQRSKSDKYHKNKHSSV

SEQ ID NO: 77496 - protein, 80 aa, Zea mays
  Coding DNA Sequence Number=SeqID_35717
MAVSQLGPEDPRRSGCGHSGVIFAVRLKEKKTRPDLRDPPGSDTGSGVYADAIVDITPQTIILNQRSKSDKYHKNKHSSV

SEQ ID NO: 77497 - protein, 90 aa, Zea mays
  Coding DNA Sequence Number=SeqID_35718
MVPSSYLRVIPLEIFPLKRGLQDCNYKGCPLQRLSAKTSSEGWRLCLRPNSHHQYAGVYADAIVDITPQTITLNQRSKSDKYHKNKHSSV

SEQ ID NO: 77498 - protein, 281 aa, Zea mays
  Coding DNA Sequence Number=SeqID_35719
MDREGSAHPRNEQRRACSVRWVSDWSRVRLRNGQRPSWGTAAPERTRRKNPRRGSSGKPRRVRRDEQGIESRTPSASHRSRELGELHGRAGVELAGEEARGSRAVELSYGGHGDKRTEGRGAGEESGVGGRAAELGWELGLGAGEVERLGAQEAEACRESGAGSFEQRIHIRPGAGEKRSRGWASHQGEATAPWGLGREQGRGTRLRAEDGHRDGIFIQGGRADGNEATTADTKPEEDLTIPTNEAQAVTSIRPIEETKRINLGFTDERKTAIISSSLDDK

SEQ ID NO: 77499 - protein, 181 aa, Zea mays
  Coding DNA Sequence Number=SeqID_35720
  Subcellular localization annotation: CTP_CleavageSite=73; ConfidenceScore=5.43e-01
MEFAQLPAPVTSARRPALYALLVPAHAPRFPPSSLAVDSFCASSPALRCPSLASAHSSAAPCSSRSPIGRYTLASARSVGAHCLLCPWCALTSTSLLAGVFPAVDLLVCRVRLPDVPRCPSPCARSVSSRGFVLAWPLSWMCRSSVGACSRWILDIELGLEKTVLFRASLIRCSTECPTGR

SEQ ID NO: 77500 - protein, 321 aa, Zea mays
  Coding DNA Sequence Number=SeqID_35721
MAARFRQGRANTERGKRRLADTRSYHLPVGHSVEHRISDARNSTVFSNPSPISRIPQLQAPTLLLRIQDNGQASTKPREETERAQGDGHRGTSGSRTRHTRRSTAGKTPASREVEGAAEEWAEAKLGHRSAGEDAQKESTARELGGNRGAELGELHGRAGVELAGEEARGSRAVELSYGGHGDKRTEGRGAGEESGVGGRAAELGWELGLGAGEVERLGAQEAEACRESGAGSFEQRIHIRPGAGEKRSRGTRLRAEDGHRDGIFIQGGRADGNEATAFWSGYEFGTMDLSEDTTVGALEDFEDDFDIATETMVDIFPLED

SEQ ID NO: 77501 - protein, 306 aa, Zea mays
  Coding DNA Sequence Number=SeqID_35722
  Gene Ontology: Mol. function=cysteine-type peptidase activity; Biological process=proteolysis
  Homolog annotation: Hit_ID=Q53MK8; Match level="QueryCoverage=65%, HitCoverage=20%, E-value=2e-18, Identity=28%"; Hit description=Ulp1 protease family, C-terminal catalytic domain, putative
MEKLDHNDMTIRAGPGKELKITKDTVHFILGLPNAGGGTTLGIDEAVAANNLRAELGLLKEDFGVAALQDRLRKGSDNDLSIRSFFLILFNRLLFPTASWGITNHEVLLTEEMDRFHQMDWCQLIFNDLCQAAKKWHTRSVTNVSTTIYGCSIVILLYYLDHLHDSAAPQNKRGTPHIKYFDRNIIQALTRANKGKIRQGQEPFGHCSHTIHIELPLIRDLISSKLNQLPSRHRLGFIEKLSHYDTEVGKACSVIKQTLQQIVEKQYNLSNVFGELIDEVLRAESGDNEDGYDVQKTTTKSDDILP

SEQ ID NO: 77502 - protein, 113 aa, Zea mays
  Coding DNA Sequence Number=SeqID_35723
  Gene Ontology: Mol. function=cysteine-type peptidase activity; Biological process=proteolysis
MTNTFDVPRPDPSGQHTIYIELPLIRDLISSKLNQLPSRHRLGFIEKLSHYDTEVGKACSVIKQTLQQIVEKQYNLSNVFGELIDEVLRAESGDNEDGYDVQKTTKKSDDILP

SEQ ID NO: 77503 - protein, 230 aa, Zea mays
  Coding DNA Sequence Number=SeqID_35724
MYLVLTHLDSTQFTLNSRHRLGFIEKLSHYDTEVGKACSVIKQTLQQIVEKQYNISDIFGELIDEVLRAESGDNEDGYDVQKTTTKSDDILPQAAEGCTCPAPQTIPDMSTLASQQDTQLTDTQGKNGDGGKNMPTNTNVTPKATPHTESSASIFDATPQIKVPVETDPATNTPQVERVSLDSEMQTVLALREYLCGTQSDTSSHYSTLRNRNDTVGTLNLLMNLYCTHF

SEQ ID NO: 77504 - protein, 130 aa, Zea mays
  Coding DNA Sequence Number=SeqID_35725
MSAVSSSQRTRELCGAKSGRAEFGAGFVAQPVFLVPGYKDQDVSPGHCYLNSTTAVRNRACRKVRADPSLGCRLRSDSGGLSGIWGFTSSPWIRPGPRREDPEPRVTASLPPVAKSMASVPIRVHTVIGA

SEQ ID NO: 77505 - protein, 180 aa, Zea mays
  Coding DNA Sequence Number=SeqID_35726
MSAVSSSQRTRELCGAKSGRAEFGAGFVAQPEGAGGSITGMSSAFGFGRAQWDLGLHEFAVDSSRTATGGSGAEGHRVLASRCQINGQCSNQGAHGHRGMTTMRWVKPPPEYLEPQTPCALVTNLGRLRSLGEIVGTLQSNTRGLEHLAPVGALLGWKRAAAWLRHEEESAWDVRSYMDG

SEQ ID NO: 77506 - protein, 175 aa, Zea mays
  Coding DNA Sequence Number=SeqID_35727
MSAVSSSQRTRELCGAKSGWAEFGAGFVAQPEGAGGSITGMSSAFGFGRAQWDLGLHEFAVDSSRTATGGSGAEGHRVLASRCQINGQCSNQGAHGHRGMTTMRWVKPPPEYLEPQTPCALVTNLGRLRSLGEIVGECQPKGEPYAGGAPSFQSRHHRLEISPLILPLLGGIKGH

SEQ ID NO: 77507 - protein, 199 aa, Zea mays
  Coding DNA Sequence Number=SeqID_35728
MALLRTVGGGGRSASHEPERRRAKGAAEEEEQQDGGRLGFYGARKAKFKQRRPPPPFIGRARLFGKSAIRQAATLRETRNPTVRRPSTVTSKPPRNHFERGQRLRHLATSSAPGDFVELVPRRANVGAKAKTPPFARGLRRSHWSDRDKTGRDTLRRTRHFDKGLRRRLPAARPHSVPRPTCDLAHCNGPRVAASVLRA

SEQ ID NO: 77508 - protein, 172 aa, Zea mays
  Coding DNA Sequence Number=SeqID_35729
MALLRTVGGGGRSASLEPERRRAKGAAEEEEQQDGGRLGFYGARKAKFKQRRPPPPFIGRARLFGKPAIRQAATLRETRNPTVRRPSTVTSKTPAEPLRARAASPPSSDVFGTRLSVQKSPKGAAGLAQQVRKIEVFREDYPCKSRLRVQPDSHNNCEKSKSSAKTIRAKVA

SEQ ID NO: 77509 - protein, 83 aa, Zea mays
  Coding DNA Sequence Number=SeqID_35730
MRLSRPHGQGVAQQRVHGGSWRRSTQGARGKLGVDAVEFEGGIAEKTTNFSLYGGAPLGGTLLAGGKLDGGQGAHRGGRYARA

SEQ ID NO: 77510 - protein, 180 aa, Zea mays
  Coding DNA Sequence Number=SeqID_35731
  Subcellular localization annotation: CTP_CleavageSite=32; ConfidenceScore=5.60e-01
MFIFLTPLPNPTPVAGCGPRKRGSSVEAHSLSAARGPRRPGSPPRRTLCQSISRTSLAQEQRGTVEQELGNEGVDLLPWMSTTSKSQGAGQGWLGIIRLRGLREQGRTCGYLFSPSPSEEEAVTGRSARDLRGGLLRGADIGIRRNDTRRKMVCHSGPQSARGRWIQDNVLSSPTGPGLQ

SEQ ID NO: 77511 - protein, 228 aa, Zea mays
  Coding DNA Sequence Number=SeqID_35732
  Subcellular localization annotation: CTP_CleavageSite=32; ConfidenceScore=5.60e-01
MFIFLTPLPNPTPVAGCGPRKRGSSVEAHSLSAARGPRRPGSPPRRTLCQSISRTSLAQEQRGTVEQELGNEGVDLLPWMSTTSKSQGAGQGWLGIIRLRGLREQGRTCGYLFSPSPSEEEAVTGRSARDLRGGLLRCADIGIRRNNTRRKMERTQTIEIIYILFITFLSITNPTPLKNNLVLEISKPKGYTEVRREMVRVRLADGKKNLVREDSVQGGKFESSRDLI

SEQ ID NO: 77512 - protein, 85 aa, Zea mays
  Coding DNA Sequence Number=SeqID_35733
MVRVRLADGKKNLVREDSIQGDGIVVITPQLITLNQRSKSYMYHKNKHSGMQVPLGTRFQSVKSTFVFRRNRFRPTVNIPLIPLL

SEQ ID NO: 77513 - protein, 77 aa, Zea mays
  Coding DNA Sequence Number=SeqID_35734
MNVCELTLAVSHTPQVKSRTPVICKDVTFDSVPLYIICMRLGPSIPGVYVNPGFWIPKIRVLQKWYQRNVDCRTKPR

SEQ ID NO: 77514 - protein, 57 aa, Zea mays
  Coding DNA Sequence Number=SeqID_35735
MNVCELTLAVSHTPQVKSRTPVICKDVTFDSVPLYIICMRLGPSIPGVYVNPGVLDP

SEQ ID NO: 77515 - protein, 306 aa, Zea mays
  Coding DNA Sequence Number=SeqID_35736
  Homolog annotation: Hit_ID=Q6QP51; Match level="QueryCoverage=19%, HitCoverage=28%, E-value=2e-12, Identity=71%"; Hit description =Putative growth-regulating factor 1
MELGHGERAELGELETTRASWGNTELELRGAQGDPAKQAMLHLRHNDRVKKGTRKGDTPKGILLHEGSGPRAPLLIRGSKAGPSKGFNSRLRALGLRAHYRSEVRRLAPRKGSTAASGHPGSVPTTDQGFVGWPPKGSDSRLRARRARDDPGYVRYITKARATLPSCRGEEKGGGAYRRRDCSGEVAEGEGEVAGITTGGPRNTREAMSERNRAETHWIARSTRGGGRPKSGEVDLGPPVKSGRVRGLGELHRLLAELAEALVGLEGGWSGLATAAVALAAMAGGNELAGAKEKWLAGEGECGAKR

SEQ ID NO: 77516 - protein, 102 aa, Zea mays
  Coding DNA Sequence Number=SeqID_35737
MELGHGERAELGELETTRASWGNTELELHGAQGGPVGVEEIRAQGGRNSWAARKSAPGSRAREGINTDSQEISRENDGGSFGCRKNLAMAEDDGIEDSDGRR

SEQ ID NO: 77517 - protein, 102 aa, Zea mays
  Coding DNA Sequence Number=SeqID_35738
MELGHGERAELGELETTRASWGNTELELRDAQGDPVGVEEIRAQGGRNSWAARKSAPGSRAREGINTDNQEISRENDGGSFGGRKNLAMAEDDGREDSDGRR

SEQ ID NO: 77518 - protein, 41 aa, Zea mays
  Coding DNA Sequence Number=SeqID_35739
MRLHILRGMKAEVILAFADICTHEEEKTLHDMSTICFTSTE

SEQ ID NO: 77519 - protein, 138 aa, Zea mays
  Coding DNA Sequence Number=SeqID_35740
MRLHILRGMKAEVILAFADICTHEEFYARERDERDHDSGEQRRHSRMGVGRRGVAQPTGGGAGWDDGGAVVVEAGGGRGRHGGAEEEDMTYGEGFTVYRGVRAIDLGADPPPRGTRRRGVDTKIYGADPLAPATSPAT

SEQ ID NO: 77520 - protein, 265 aa, Zea mays
  Coding DNA Sequence Number=SeqID_35741
  Gene Ontology: Mol. function=small conjugating protein ligase activity; Cellular component=mitochondrion; Biological process =protein modification process
  Homolog annotation: Hit_ID=P93404; Match level="QueryCoverage=48%, HitCoverage=52%, E-value=3e-63, Identity=90%"; Hit description=L -ascorbate peroxidase 1, cytosolic
  Pfam annotation: Domain name=peroxidase; Domain location=1-117; Score= -13.5; E_value=9.8e-08; Accession=PF00141.13; Description=Peroxidase
MTEKGRPVAVDKPQPPPEGRLPDATKGSNHLRQVFGKQMGLSDQDIVALSGGHTLGRCHKERSGFEGAWTTNPLVFDNSYFKELLSGDKEGLLQLPSDKALLSDPVFRPLVEKYAADEKAFFDDYKEAHLKLSELGILTGLLSFMMDDALTTGSIKTSDAEKRRLAKASLAYNCESKNCPHFRKLFPEYVEKYNQQLQLENTAAEPVPQENPAPAPSPAAQQAPTVANRAQPLAEARRDKNQKKAVPFWMVLVMFSVFGAVMACP

SEQ ID NO: 77521 - protein, 95 aa, Zea mays
  Coding DNA Sequence Number=SeqID_35742
  Gene Ontology: Mol. function=nucleotide binding; Cellular component =membrane; Biological process=small GTPase mediated signal transduction
  Homolog annotation: Hit_ID=Q9LZD4; Match level="QueryCoverage=53%, HitCoverage=23%, E-value=8e-18, Identity=86%"; Hit description=GTP -binding protein-like
  Pfam annotation: Domain name=Ras; Domain location=8-80; Score=-65.3; E_value=0.00022; Accession=PF00071.12; Description=Ras family
MAALGSHSLTVQVGYYRPRTFLHNYHCLLQGSNGHLTCVVPTSKGQALADEYGIKFFETSAKTNLNVEQVFLSIARDIKQRLSETDSKPEVRSFA

SEQ ID NO: 77522 - protein, 491 aa, Zea mays
  Coding DNA Sequence Number=SeqID_35743
  Homolog annotation: Hit_ID=P93404; Match level="QueryCoverage=25%, HitCoverage=51%, E-value=5e-63, Identity=92%"; Hit description=L -ascorbate peroxidase 1, cytosolic
  Pfam annotation: Domain name=peroxidase; Domain location=56-278; Score=44.6; E_value=8.9e-12; Accession=PF00141.13; Description =Peroxidase
MGSKNIKLVWRDRAHRTFYLGVGVAFPKPTLLPSPSGSYVLGAVFLQLCQVLQLAEHPVVQKLVDPSLFIHRFTKPFQRAEKKRLEAAKRAEEAAAAKEAALEESLCDTQNSEVESAMTPRKGLSGDKSSKMGSEGLINDSMPPKDPEEGAESAYSGWLVSRNLPDVFAVQDKPQPPPEGRLPDATKGSNHLRQVFGKQMGLSDQDIVALSGGHTLGRCHKERSGFEGAWTTNPLVFDNSYFKELLSGDKEGLLQLPSDKALLSDPVFRPLVEKYAADEKAFFDDYKEAHLKLSELGILTGLLSFMMDDALTTGSIKTSDAEKRRLAKASLAYNCESKNCPHFRKLFPEYVEKYNQQLQLENTAAEPVPQENPAPAPSPAAQQAPTVANRAQPLAEARRDKNQKKAVPFWMVLVIDSVGPLDYLPPRSRIDEPVMSAKTNLNVEQVFFSIARDIKQRLSETDSKPEDQTIKIKAEGEADAAEAQKSACCDS

SEQ ID NO: 77523 - protein, 112 aa, Zea mays
  Coding DNA Sequence Number=SeqID_35744
  Subcellular localization annotation: CTP_CleavageSite=52; ConfidenceScore=5.57e-01
MACRVLGVAVPPPPPSTTSSSSGGSCSGGPPPANCCLEHAMHVSILPPKVVRSQKRGDSVSMIAYREGGEGSVPLSPKESCRSSGLWTTRSISASDAGHGEGEVVIAQGASS

SEQ ID NO: 77524 - protein, 182 aa, Zea mays
  Coding DNA Sequence Number=SeqID_35745
  Homolog annotation: Hit_ID=Q8RZ63; Match level="QueryCoverage=36%, HitCoverage=18%, E-value=6e-21, Identity=61%"; Hit description=ABC transporter-like protein
  Pfam annotation: Domain name=ABC1; Domain location=117-181; Score= -20.9; E_value=0.0018; Accession=PF03109.7; Description=ABC1 family
MRRDATMIGNDGPTNLEKEQVGWRTLLLHFVFRFMYLLFIALYSSGGSPIDVGGGCRMWLDKANDTKCYTRLARSFSLLWEDESMMMKARGNDRAIDRANVTALTSWTTTPRNVVEKQLGKNFDDMFEFFDVEPVGSASIAQVHRARLKLSKTDVTVKKHDLNFDLFSATKEMEKQVSPPLP

SEQ ID NO: 77525 - protein, 347 aa, Zea mays
  Coding DNA Sequence Number=SeqID_35746
  Gene Ontology: Mol. function=hydrolase activity
  Homolog annotation: Hit_ID=Q7XDP2; Match level="QueryCoverage=54%, HitCoverage=90%, E-value=2e-63, Identity=71%"; Hit description =Inosine triphosphate pyrophosphatase, putative, expressed
  Pfam annotation: Domain name=ABC1; Domain location=141-233; Score= -10.4; E_value=0.00021; Accession=PF03109.7; Description=ABC1 family
  Pfam annotation: Domain name=Ham1p_like; Domain location=171-334; Score=18.2; E_value=1.9e-11; Accession=PF01725.7; Description=Ham1 family
  Pfam module annotation: Pfam domain module=ABC1::Ham1p_like; Domain location=141-233::171-334
MAACRDIESQRHESQGSLVSSPMRRDATMIGNDGSTNLEKEQCPTPHPFLFGFTSALASCHSSSGKHSPEGKIPPYTLAMIAYREGGEGSVPLSPKESCRSSSLWTMKEHFSFRGNDRAIDRANVTALTSWTTTPRNVVEKQLGKNFDDMFEFFDVEPVGSASIAQVHRAKLKLSKTYVAVKAVPELQGEPEYISKEKARIAASQVNGHVLVEDTCLCFNALKGLPEFDMHIFLLQDPTCLNNLLNSYEDKSVFAMCIFSLALGHGEEPITFVGQNCVLIVQGKIVPARGPNDFGWDPVFQPDGFEQTYAEMPKSVKNQISHRGKALALVKEHFASASYTVQSDDSA

SEQ ID NO: 77526 - protein, 211 aa, Zea mays
  Coding DNA Sequence Number=SeqID_35747
MAERYQLPRSCVPPTTRQKDCGCSPSGGSEGGKTRCIRERENMVAFQGGRPPFKGDSPYLRPQTSWAESSPTCSKVLPLWCRGWVPRVMQAGPGQKKPNRRARCMQPPSGYKRPSTFAQTSGGSERRFAFAIMTASRKGPGKGDTPKRILLREGNRLGASLLIRGSKAGPSEGFNSRLRARGLHTHYWLALEGFIAASDTERGMTLGTFDT

SEQ ID NO: 77527 - protein, 249 aa, Zea mays
  Coding DNA Sequence Number=SeqID_35748
MGDTHNPSALSLEERDFMEVGTFQPSISPAAFPRRWSPKTVTTSPWVGRSKPGCDLGPALSFKDVHHPRWGGGQAEPELYLPREFVGQPLLQHSRERALTGPASGADFDNAGLADGGRRQLQRVRLAGLAPGAPSCREGSCRAARTGGPPKTSHAARAAFVFWGRSCLCTGTAPPRGGRCSTRLGGSEWGPAGGLTAPVVGAEVGAAREVPVADGITATIRASGLRLFVLVLAPRASAWAWARLQQHPP

SEQ ID NO: 77528 - protein, 329 aa, Zea mays
  Coding DNA Sequence Number=SeqID_35749
MGDTHNPSALSLEERDFMEVGTFQPSISPAAFPRRWSPKTVTTSPWVGRSKPGCDLGPALSFKDVHHPRWGGGQAEPELYLPREFVGQPLLQHSRERALTGPASGADFDNAGLADGGRRQLQRVRLAGLAPGAPSCREGSCRAARTGGPPKTSHAARAAFVFWGGPAFAPVRRLRAEESLGSVGLAVRGPSCLVKGTPRPLFDEPKPGVAVSARTEAELALKEDLVGQSLAGSSTGGTDAGIELPRPRAGLMSSGDSWPRSRGDRPSRLLEPDSRRRPWRRWPGRDDDVVLQSGDPRTASPSEARSDLAEGVVDAEGAAAPFNCQDPSL

SEQ ID NO: 77529 - protein, 76 aa, Zea mays
  Coding DNA Sequence Number=SeqID_35750
MRTSKPTPAIWIWSSQKGLTPEGLSPEFGPVPAWWRQFGPVPAWWPLNFMELEDVWILGTSHLSASSTPSKEKIIV

SEQ ID NO: 77530 - protein, 187 aa, Zea mays
  Coding DNA Sequence Number=SeqID_35751
MRTSKPTPAIWIWSSQKGLTPEGLSPETIRIYELVGVPPPPQGTPRWRVWSSPVRLYAYRGGSLGPVPAWWRQFGPVPAWWPLNFMELEDVWILGTSHLSASSTPSKEKIIVAPSLKSLHLCLCHYVTNQGFAEAVNCFPQLEELDITFCSLYGIVCETAGRACPTTSSSSSAGAGKDVYPLKCYAA

SEQ ID NO: 77531 - protein, 112 aa, Zea mays
  Coding DNA Sequence Number=SeqID_35752
MRTSKPTPAIWIWSSQKGLTPEGLSPETIRIYEFGWGAAAAAGNPSLAGLVESGALVRVSWRQFGPVPAWWRQFGPVPAWWPLNFMELEDVWILGTSHLSASSTPSKEKIIV

SEQ ID NO: 77532 - protein, 85 aa, Zea mays
  Coding DNA Sequence Number=SeqID_35753
MASGRMLLQPCPRLRRRSRGEDKYKEPEARSVDGGGDPVGNGDFSSRLHVTEPPKLQGSDQVFITAKVEAILSRVKLRTTSIHKI

SEQ ID NO: 77533 - protein, 51 aa, Zea mays
  Coding DNA Sequence Number=SeqID_35754
MPLISAKQGYAPIPAVTEPPKLQGSDQVFITAKVEAILSMVKLRTTSIHKI

SEQ ID NO: 77534 - protein, 106 aa, Zea mays
  Coding DNA Sequence Number=SeqID_35755
MMVLRSGLRIALRWANQFMPKTTFMSWPFGTIILAGKSRLANAKGTWNVSPVLQTLQNIGDKDMRKLLHNLHLFRKLQGSDQVFITAKVEAILSRVKLRTTSIHKI

SEQ ID NO: 77535 - protein, 164 aa, Zea mays
  Coding DNA Sequence Number=SeqID_35756
MGRDRLMKIAGRCVDTLDAHDGDRFASEKAAEKIVEKIYQTERFKLTREEENAIFQTTFKETTGCKANRLHGHGYLSRYPTRSQVMESKFLEQARATVATNQKNIELESQVQLLNQKLACEVAERERILQEKMQALQEEEERKRKVQVFRSVSFSTVKPKLLHP

SEQ ID NO: 77536 - protein, 89 aa, Zea mays
  Coding DNA Sequence Number=SeqID_35757
  Subcellular localization annotation: CTP_CleavageSite=58; ConfidenceScore=5.24e-01
MKAKGRNQLGENAKSAAATRRPTCGSTKPPVVGTVGQSAAGTDMAVDVTEGGFTVGASADVLKQCANHRSGHVEAKYKLWPHLQARILP

SEQ ID NO: 77537 - protein, 159 aa, Zea mays
  Coding DNA Sequence Number=SeqID_35758
  Subcellular localization annotation: CTP_CleavageSite=85; ConfidenceScore=5.34e-01
MRHPARGLTKPPGMGAAAMLKQSTSFGPTCRLASSPKVGPGANVGTLKLGYPLLLYKDAVPTRLSLSRVVEVMCVGPSHDSPQPRGTTLGPQQRLTPPHGWVQSRHDLHVCKPDPWNGIRTPAYGVRATHNGVPRFQDRTYSDLEQDLGGGPVPTRVRT

SEQ ID NO: 77538 - protein, 172 aa, Zea mays
  Coding DNA Sequence Number=SeqID_35759
  Subcellular localization annotation: CTP_CleavageSite=85; ConfidenceScore=5.34e-01
MRHPARGLTKPPGMGAAAMLKQSTSFGPTCRLASSPKVGPGANVGTLKLGYPLLLYKDAVPTRLSLSRVVEVMCVGPSHDSPQPRGTTLGPQQRLTPPHGWVQSRHDLHVCKPDPWNGIRTPAYGVRATHNGVPRFQDRTYSDLEQDLGGGPAGTHCCHVAYCVRLKPTGGT

SEQ ID NO: 77539 - protein, 318 aa, Zea mays
  Coding DNA Sequence Number=SeqID_35760
MGEYGRFWRLKNNRHGTVTEQIRTPAQLADVDRRPDSCTKINENEEESEVTEEKTPPPLESQAGTWLYFNICESEPDSPTNEGKPRFRISLSPMFCNVCKTGETFLMNQQEAPTEVGEFLRDFGVPVVLWRLLQEFGYTEAPKYQWSRTVLRGQPWYEVVVRIPERARKPSWPHWMFHAEGMTPWEGAQGCTQAQERLEETKVQAEQVIGLKHQVTELQTQHQADQNRIKELEHQLTNAHSKSKVLSQQQEEIHWYVVAVREDLKETLRFISHQDQAIKELNCAHPMEFQAAQRLVNHLQQAMHMLIVAFYPTPASAD

SEQ ID NO: 77540 - protein, 377 aa, Zea mays
  Coding DNA Sequence Number=SeqID_35761
MGEYGRFWRLKNNRHGTVTEQIRTPAQLADVDRRPDSCTKINENEEESEVTEEKTPPPLESQAGTWLYFNICESEPDSPTNEGKPRFRISLSPMFCNVCKTGETFLMNQQEAPTEVGEFLRDFGVPVVLWRLLQEFGYTEAPKYQWSRTVLRGQPWYEVVVRIPERARKPSWPHWMFHAEGMTPWEGAQARLLESIPIGQDSAESASARVLMVVLELQLTRGHSRQKWQQLYTGSFAAFKMMETAKNRACTQAQERLEETKVQAEQVIGLKHQVTELQTQHQADQNRIKELEHQLTNAHSKSKVLSQQQEEIHWYVVAVREDLKETLRFISHQDQAIKELNCAHPMEFQAAQRLVNHLQQAMHMLIVAFYPTPASAD

SEQ ID NO: 77541 - protein, 221 aa, Zea mays
  Coding DNA Sequence Number=SeqID_35762
  Homolog annotation: Hit_ID=Q6H725; Match level="QueryCoverage=41%, HitCoverage=36%, E-value=2e-15, Identity=50%"; Hit description =Immunophilin / FKBP-type peptidyl-prolyl cis-trans isomerase-like protein
  Pfam annotation: Domain name=Ribosomal_L23eN; Domain location=170 -221; Score=60.2; E_value=6.8e-15; Accession=PF03939.4; Description =Ribosomal protein L23, N-terminal domain
MALSTPTSARAEQPDITRYRKLGSGVILKDVVEGEAAEVREGDLVQFNYVCRRANDYFVHRCVVEFPDAIALLFDATVDQFNGESRPVTLALGGEEVTSFTPEFVYPPEMIPLWCDRVKDGCFSGDGELHNSVLNHYAIGVCTIDFSTHFMEELVGTRPQAEAAAPAKKGDAKIQALKVAKAVKSGVGKKKTKKIRTSVTFHHPKTLKKARDPKYPRISTT

SEQ ID NO: 77542 - protein, 388 aa, Zea mays
  Coding DNA Sequence Number=SeqID_35763
  Homolog annotation: Hit_ID=Q6H725; Match level="QueryCoverage=34%, HitCoverage=62%, E-value=8e-21, Identity=43%"; Hit description =Immunophilin / FKBP-type peptidyl-prolyl cis-trans isomerase-like protein
  Pfam annotation: Domain name=Ribosomal_L23eN; Domain location=337 -388; Score=60.2; E_value=6.8e-15; Accession=PF03939.4; Description =Ribosomal protein L23, N-terminal domain
MTMFTKSRTLDRGRHSAKTALPSAKHSANSDAQQRAISSHVHNHTVHGSARRLPPRSAHAPDPPQSRSVTSPPQSRSVTPSPRGGRGHLAQNPSDCASTPVARTPGIDSSPQIDRTSSSSPWVSPTSRLLPVPAAVRPVGRSRAPYLKATCALSRRRAVSDMAVVGAMALSTPTSARAEQPDITRYRKLGSGVILKDVVEGEAAEVREGDLVQFNYVCRRANDYFVHRCVVEFPDAIALLFDATVDQFNGESRPVTLALGGEEVTSFTPEFVYPPEMIPLWCDRVKDGCFSGDGELHNSVLNHYAIGVCTIDFSTHFMEELVGTRPQAEAAAPAKKGDAKIQALKVAKAVKSGVGKKKTKKIRTSVTFHHPKTLKKARDPKYPRISTT

SEQ ID NO: 77543 - protein, 128 aa, Zea mays
  Coding DNA Sequence Number=SeqID_35764
MSETALRLESAQVAFRYGALLRPTGLTAAGTGSSLEVGDTHGEEELVRSICGDESMPGVLATGVGGAVARVLSEMTATAARGRGHRARLGWRGHGARLGWIGGVRGPGGQPSGRTVHRVIVDVYVSVL

SEQ ID NO: 77544 - protein, 436 aa, Zea mays
  Coding DNA Sequence Number=SeqID_35765
MGRYVPKTEGLRSWDIHGSNDRLNRVFELNRLLYGGYPGEDATDRRGKKPMGVTEEGPSQEAAPATKKRKLGSGEGQLVVVPPSVATTSPSAVVRAKGAAQDPWAAFCVSSEILTAAAAKDVAGTMSQRLTQQLKQVADFADRVASGVLTADVAAEVESLRAQHADAVREKSAAESKNRRLAEKVAALEAEKTDLRRRLADERREANQAIAEAQAARAEAKVARAENRLASQRAEEWEARFNALRGRVDKAEASACSEVGRMHAQFVDAYRDLGARTGFMSFASLVTCEGTLNALSREGCRHYEVFDQSSENFEREVFKAEDPVVKQSAGALFDRMWGPHGQEAVKERSDRVIEQMACAEDVEVLGDLVGVPPEAEVDPVPPSSAGEGSSAAFVATVASEGPLPAPAPTVEEPPKVVAKPVTEDPTAAAGPSQVAQ

SEQ ID NO: 77545 - protein, 110 aa, Zea mays
  Coding DNA Sequence Number=SeqID_35766
  Subcellular localization annotation: CTP_CleavageSite=40; ConfidenceScore=5.34e-01
MADPAREAKRARGSAKAAASGSSKPVAPAKAAAPGPSKALASAKAAASGGGRPPLGEPMKGQELPSPGRRVADFGTNISVEDYLVGSGEGQLVVVPPSVAMTSPSAVVRV

SEQ ID NO: 77546 - protein, 356 aa, Zea mays
  Coding DNA Sequence Number=SeqID_35767
MGSTSEKMYLCQVPNFGFEMIKLRPGGSLARERSLGVVSPFESIKDRHDVGLLTGDPLTSHMPRHGKHFCKTESLIIEKPYLDSLTTSIPLRVFSLVGDPATFVREAEDGAARIVGCYVPKTEGLRSWDIRGSNDRLNRVFELNRLPYGGYPGEDATDRRGKKPMGMTEEGPSQEAAPATKKRKLGTTAVMNKDRQDTAQKRRAVVRMADPTREAKRARGSAKAAASGSSKLGNHFAIGGGKGEGGRAGPVAAFCASGEIPTAAAAKDVAGTLSQRLREVSQQLTQQLKQKSAVESKNRRLAEKVAALEAEKTDLRHQLAEERREANQAIAEVQAAQADAKVAWAESSLASQRVEE

SEQ ID NO: 77547 - protein, 99 aa, Zea mays
  Coding DNA Sequence Number=SeqID_35768
  Subcellular localization annotation: CTP_CleavageSite=44; ConfidenceScore=5.89e-01
MASSSVLAVSPIPLPPPSTYKRTRPSPVFATQLQPSPLPSSPSRSSKRRRAPCLAPLWPKLRHTLTSTGHHFASPIVAGNITGGFAAAGTRHCSVDRPP

SEQ ID NO: 77548 - protein, 66 aa, Zea mays
  Coding DNA Sequence Number=SeqID_35769
  Subcellular localization annotation: CTP_CleavageSite=44; ConfidenceScore=5.78e-01
MASSPVLAVSPIPLPPPSAYKRTRLSPVFATQLQPPPLPSSPSRSSKRRRAPFTAPRKRDLILRNS

SEQ ID NO: 77549 - protein, 139 aa, Zea mays
  Coding DNA Sequence Number=SeqID_35770
  Gene Ontology: Mol. function=aminoacyl-tRNA ligase activity
  Homolog annotation: Hit_ID=Q84T06; Match level="QueryCoverage=64%, HitCoverage=13%, E-value=3e-09, Identity=51%"; Hit description =Unknow protein
MLRLEAMEAKADSGIIGGLRRRRVGCARGPRDDDPEEGPVPARMPQPFERAAAHTLASVPTAEAERECGVQDARVSRGDATALLEESTSLAELPRWRLCGMWELTSALNFLHVFRPLLNIAVGVDNFRKLKIYFKTSGT

SEQ ID NO: 77550 - protein, 152 aa, Zea mays
  Coding DNA Sequence Number=SeqID_35771
  Gene Ontology: Mol. function=aminoacyl-tRNA ligase activity
  Homolog annotation: Hit_ID=Q84T06; Match level="QueryCoverage=58%, HitCoverage=13%, E-value=3e-09, Identity=51%"; Hit description =Unknow protein
  Subcellular localization annotation: CTP_CleavageSite=54; ConfidenceScore=5.24e-01
MADGNPCCCLLPAAAGRSRKGHSFFFLSSVCIRRRRVGCARGPRDDDPEEGPVPARMPQPFERAAAHTLASVPTAEAERECGVQDARVSRGDATALLEESTSLAELPRWRLCGMWELTSALNFLHVFRPLLNIAVGVDNFRKLKIYFKTSGT

SEQ ID NO: 77551 - protein, 193 aa, Zea mays
  Coding DNA Sequence Number=SeqID_35772
  Gene Ontology: Cellular component=membrane
MWELTSALNFLHASGLILPCPSAFNCFWSPLDKVFRPLLNIAVGVDNFRKLKIYFKTSGGLLFSMGLLEYIFSRSTISLVLGIAPGLATLLLGTLSLKFRRSGRSSFLLMLAQATISAFLAWKYSHAYFLTNRLLPWGFYASLRSFSLYRPSPSKAFSPFGQRSDGLSCLKIMQHCNGLFLRLCATCGTKSRK

SEQ ID NO: 77552 - protein, 131 aa, Zea mays
  Coding DNA Sequence Number=SeqID_35773
MEKKPLRIEVVEQEMVAGFLLPENRGRASVAGALGRRGWSFGRRPWKGGSSCWQPRTRREGSDQRGEQGAQGGEAAGGGAMGKKLGSHGAAARQQGGGRRLEVEEGYGTPWEEEETPCCSTWKKTGRESGG

SEQ ID NO: 77553 - protein, 287 aa, Zea mays
  Coding DNA Sequence Number=SeqID_35774
MGLVLARRESSAPWLLAGAGARQQKRGGLGLQLGSINGEEAPAHRGGRAGDGRWLLAAGEQGKGFSCWCPWEEGLELWALTMEGRELLLAIPHMQRRQRPRGEQGAQGGEAAGGGAMGKKLGGHGAAARQQGGGRRLEVEEGEVRLDDGGGQNRLVLVRKGVNSSEARNRKMVQRFTRSTFTGDWVKSGDPWTGFSGEAKSDSLLGELHRGMHGLLRGSGADGRGSAGRSTVAGDRVAAGTLFAGQTLVISGSERVEHVEVFFCPCSTARQDRKRANLGKNPAQASS

SEQ ID NO: 77554 - protein, 167 aa, Zea mays
  Coding DNA Sequence Number=SeqID_35775
MGLVLARRESSAPWLLAGAGARQQKRGGLGLQLGSINGEEAPAHRGGRAGDGRWLLAAGEQGKGFSCWCPWEEGLELWALTMEGRELLLAIPHMQRRQRPRGEQGAQGGEAAGGGAMGKKLGGHGAAARQQGGGRRLEVEEGYGTPWEEEETPCCSAWKKTGRESGG

SEQ ID NO: 77555 - protein, 106 aa, Zea mays
  Coding DNA Sequence Number=SeqID_35776
MSDDRVSLPVPSLQAMDEHSFATDESQPVVRSPISTTPPPKPVDAAAETLSTFSSSDEADAGGSGEAAGGVDVLGPTAHPGLPLKRCVTPYVLVSMFGERGYKRAL

SEQ ID NO: 77556 - protein, 603 aa, Zea mays
  Coding DNA Sequence Number=SeqID_35777
  Homolog annotation: Hit_ID=Q5WA92; Match level="QueryCoverage=39%, HitCoverage=26%, E-value=2e-09, Identity=47%"; Hit description =Putative TSI1
  Pfam annotation: Domain name=AP2; Domain location=205-268; Score =87.9; E_value=3.1e-23; Accession=PF00847.10; Description=AP2 domain
  Pfam annotation: Domain name=AP2; Domain location=34-97; Score=87.6; E_value=3.8e-23; Accession=PF00847.10; Description=AP2 domain
  Pfam annotation: Domain name=AP2; Domain location=376-439; Score =88.2; E_value=2.6e-23; Accession=PF00847.10; Description=AP2 domain
  Pfam annotation: Domain name=AP2; Domain location=518-581; Score =96.7; E_value=7.1e-26; Accession=PF00847.10; Description=AP2 domain
  Pfam module annotation: Pfam domain module=AP2::AP2::AP2::AP2; Domain location=205-268::34-97::376-439::518-581
MEEHRPRCNATAPSGRIAGGGKRKVAAVAGAPAEPRYRGVLRRRRGRYVARTYDRKGNQMWLCTFDTAEEASRRYDSETRRLHGSSAITNFPATSDNRVPLLAPSLHAVDEHSFAADESQPVVESSVSTTPPPKPVDATAETLSTFSSSDEADAGGGAEAAAGPRKFVMEIHMEEHHPRCNATVPTGRVAGGSKRKAAAAGASAEPRYKGVLRRRRGRYAVRTCDRKGKRMWLSTFDTAEEAARRYDSETRRLRGSSAITNFPATSDDRVSLPAPSLHAVDKHSFAADESQPVVGSPVSTTPLPKHVDAAAETLSMFSSSDEADAGGGAEAAAGPRKFVMEIHMEEHRPRCNATVPTGRVAGGGKRKAAAASASAEPRYRGMLRWRRGRYIARTRDRKGKRMWLGTFDTTEEAARRYDSETRRLRGPSAITNFPAMSDDRVPLPTPLLHAVDEHSFAPDESQPVVDDGGGAEAAAGSRKFVMEIHMEEHRPRCNATTPTGRVASGGKRKAAAASAPAEPRYRGVLRRRRGRYVARTRDRKGKRMCLGTFDTAGEAARRYDSETRRLRGPSAITNFPVTSDDRVPLPVPSLHAVDEHSFAADES

SEQ ID NO: 77557 - protein, 528 aa, Zea mays
  Coding DNA Sequence Number=SeqID_35778
  Gene Ontology: Mol. function=transcription factor activity; Cellular component=nucleus; Biological process=regulation of transcription, DNA-dependent
  Homolog annotation: Hit_ID=Q5WA92; Match level="QueryCoverage=53%, HitCoverage=36%, E-value=2e-09, Identity=40%"; Hit description =Putative TSI1
  Pfam annotation: Domain name=AP2; Domain location=205-268; Score =87.9; E_value=3.1e-23; Accession=PF00847.10; Description=AP2 domain
  Pfam annotation: Domain name=AP2; Domain location=34-97; Score=87.6; E_value=3.8e-23; Accession=PF00847.10; Description=AP2 domain
  Pfam annotation: Domain name=AP2; Domain location=377-440; Score =88.2; E_value=2.6e-23; Accession=PF00847.10; Description=AP2 domain
  Pfam annotation: Domain name=AP2; Domain location=446-506; Score =30.7; E_value=1.9e-07; Accession=PF00847.10; Description=AP2 domain
  Pfam module annotation: Pfam domain module=AP2::AP2::AP2::AP2; Domain location=205-268::34-97::377-440::446-506
MEEHRPRCNATAPSGRIAGGGKRKVAAVAGAPAEPRYRGVLRRRRGRYVARTYDRKGNQMWLCTFDTAEEASRRYDSETRRLHGSSAITNFPATSDNRVPLLAPSLHAVDEHSFAADESQPVVESSVSTTPPPKPVDATAETLSTFSSSDEADAGGGAEAAAGPRKFVMEIHMEEHHPRCNATVPTGRVAGGSKRKAAAAGASAEPRYKGVLRRRRGRYAVRTCDRKGKRMWLSTFDTAEEAARRYDSETRRLRGSSAITNFPATSDDRVSLPAPSLHAVDKHSFAADESQPVVGSPVSTTPLPKHVDAAAETLSMFSSSDEADAGGGAEAAAGPRKFVMENTHGGAPPTLQCHGAHGESCRAVARGKRRRRARRRKPRYRGMLRWRRGRYIARTRDRKGKRMWLGTFDTTEEAARRYDSETRRLRGPSAITNFPAMSDDRVPLPTPLLHAVDEHSFAPDESQPVGKRMCLGTFDTAGEAARRYDSETRRLRGPSAITNFPVTSDDRVPLPVPSLHAVDEHSFAADES

SEQ ID NO: 77558 - protein, 487 aa, Zea mays
  Coding DNA Sequence Number=SeqID_35779
  Homolog annotation: Hit_ID=Q6QP51; Match level="QueryCoverage=12%, HitCoverage=27%, E-value=2e-13, Identity=67%"; Hit description =Putative growth-regulating factor 1
MTRQKNRGRSPSGGSEGGRTRCMKGVRRHGAGSHASCKLAQDRRSQTAARGAHNCPAVTSTPPLSPRPAGERADRHAGGMQPYLGAHPFDSDASSVGAEAHTSCNRRPVTTCGKLHRHLRQYRAFSTAEPVPRLEATLRMTQQCQPSTSIMGQSAAGEGATVNMAKSGPAVMAVAGRRKQRAGGTFGRRHLWQAKQATLHLRHNDRVKKGTGKGDTPKGILLHEGSGPRAPLLIRGSKAGPSEGFDSRLRALGLYAHHWSEVRRLAPRMGLTAASSHSGSASTTDQGFIGWPPKGSTAASEHAERGMTLGSGAALANPAPAKPLTASTYQPENLEPDYAPRLWPGSDSASTPEDGLRLARPQGSDSASALEDGLRLARPRARTQPRPRKTDSASPDPRARTQPRPRKTDSTSPDPRARTQPRHRKTNSALTDPRAQTRPRPRRSLRLAQPRARTRHVIGKAIITLPLASSGYGEQDWRPIWLAPVKK

SEQ ID NO: 77559 - protein, 187 aa, Zea mays
  Coding DNA Sequence Number=SeqID_35780
MSSYSLHASRPSTFQAPEWGAPAPGCIPSPVVTQDGDHQFDGGEKRAGLRPLSRPQLQGFWGGNHPPTLRRRRPPCMPGKANCCCPARVQHSVLCPRFRGEDGSEDLPVRFGAAGARWCSVGGQVDAAVGADVVAAGESFSAVEPVSATRGPTSGSLALMSGSRPLSGDANESFPAAASVLGPSLLL

SEQ ID NO: 77560 - protein, 314 aa, Zea mays
  Coding DNA Sequence Number=SeqID_35781
MPGKAKCCCPARVQHSVLCPGDGGQQHREVSLHSRFRGEDGSEDLPMRFGAASAHRCGVGGQVDATVGAEVVAAGEVGFFADETVSATRGPTSGSLALISGSHPLSGGREREPSGGCVRPGTMAAAVEVAGESPGESLGSVGLAARGFTCLVEETLGRFAVSRGRGQRCQHGQRRSWFEKGSFIDRGLAGSSTGGTNAGVELSRPRVGLVSSGDSWLRLRGGWPSRLLGPGSWRRPWRRWPGRGADVVLRSGDPSPVLPSEARSDFAEGGVDAEGAAAPPPSTSEPAGSVRLYIRACSSVAESFIQARVTSHGR

SEQ ID NO: 77561 - protein, 197 aa, Zea mays
  Coding DNA Sequence Number=SeqID_35782
MTGDKQRQKLKQKPSSKISNTYIKKVNKKDATPYFIKKKKNGKVIAIKANKQANKGKGAKRIWVPKEIISTMKSTKKVWIPKGNLLPSGLVKILDPNFPPMTKDARTTWTKELRKSNTSKEDIKKIKKSPRKEACAACGLSVRGAPDCPVAHRTVRCPHAGLFGAPGNYSPTASSRWHPEPAAPTVTCSDRSQTGNG

SEQ ID NO: 77562 - protein, 112 aa, Zea mays
  Coding DNA Sequence Number=SeqID_35783
MTGDKQRQKLKQKPSSKISNTYIKKVDKKDATPYLIKKKKNGKVIAIKANKQANKGKGAKRIWVPKEIISTMKSTKKVWIPKGKLLPSELVKTLDPNFPPMTKICVSILLCI

SEQ ID NO: 77563 - protein, 124 aa, Zea mays
  Coding DNA Sequence Number=SeqID_35784
MTGDKQRQKLKQKPSSKISNTYIKKVNKKDATPYLIKKKKNGKVIAIKANKQANKGKGAKRIWVPKEIISTMKSTKKVWIPKGNLLPSGLVKTLDPNFPPMTKFTGCEESWTKANEDATPQKKT

SEQ ID NO: 77564 - protein, 124 aa, Zea mays
  Coding DNA Sequence Number=SeqID_35785
  Subcellular localization annotation: CTP_CleavageSite=63; ConfidenceScore=5.14e-01
MTSSQVFVRCRMGRRVSLPAVLSPLDQRLRRRPRAKGGVFAFAPTAATQPHALHAFSLLGGARSSNAQQYNASTHALSRRSAGPTGSTPSSHSQPYANSSASSTVAVIAAVGGLRLPKVLKNMI

SEQ ID NO: 77565 - protein, 77 aa, Zea mays
  Coding DNA Sequence Number=SeqID_35786
MEAKSHRQPIILRSTCKNYATSKAEYTNTQLDLPGVPSDSDQNHSVKKHKEYEAFENKSPTLAPTSGELFSTTFGKH

SEQ ID NO: 77566 - protein, 235 aa, Zea mays
  Coding DNA Sequence Number=SeqID_35787
MAKSVPNELVAGGSRLSLTVAILAKGRGYCWGPSASEGPQKHEQVPSDSDQNHSVKKHKEYKGTFGFEMKVHTAVKIKPQGQEGPRGVTIYGQILAEEMSHLGFRGPKPGREIITQVVHLYPQVMLPIDEDITIIDTTIPVTTSPFVANQGPMARARARKLKYQVNSFLAIEANSSLNEVLKPCDDFIMLRCLGGETILNWRRQQGNKGCCTREDFVTASSTNLNGAYLPTSKVV

SEQ ID NO: 77567 - protein, 229 aa, Zea mays
  Coding DNA Sequence Number=SeqID_35788
MDCLKRMPMLFNDYREEDFYGLPRKYSIVARGAKIEAITYMYETVKHFDNLLHEKHVYKMHNVKFSLHPGEFNFHHLNGPMELCLDQQTIVEPYTVPIQMAPFPKQILLNLADIAELPNRTLVDIMAIVVHLDTIHRTMWGPFRKIVIMDARGYLHIIKVWGDLQNKNALRWALAKEDYGIIIGTMFRRFRRQECLESSDHTAIHFNPFHHNTHHFGPIQKALVALNNR

SEQ ID NO: 77568 - protein, 286 aa, Zea mays
  Coding DNA Sequence Number=SeqID_35789
MNCKVVKVLMEPVVLNRERAAADRLKRMPMLFDDYREEDFYGLPRKYSIVARVEVKFPKEPRFRDRQHFVLSDINGAKIEAITYMYETVKHFDNLLHEKHVYKMHNVKFSLHPGEFNFRYLNGPMELCLDQQTIVEPYTVPIQMAPFPKQILLNLADIAELPNRTLVDIMAIVVHLDTIHRTMWGPFRKIVIMDARGYLHIIKVWGDLLNKNALRWALAKEDYGIIIGTMFRRFRRQECLESSDHTAIHFNPFHHNTHHFGPIQKALVALNNRQFAVTFLEEQRRR

SEQ ID NO: 77569 - protein, 286 aa, Zea mays
  Coding DNA Sequence Number=SeqID_35790
MNCKVVKVLMEPVVLNRERAAADRLKRMPMLFDDYREEDFYGLPRKYSIVARVEVKFPKEPRFRDRQHFVLSDINGAKIEAITYMYETVKHFDNLLHEKHVYKMHNVKFSLHPGEFNFRHLNGPMELCLDQQTIVEPYTVPIQMAPFPKQILLNLADIAELPNRTLVDIMAIVVHLDTIHRTMWGPFRKIVIMDARGYLHIIKVWGDLLNKNALRWALAKEDYGIIIGTMFRRFRRQECLESSDHTAIHFNPFHHNTHHFGPIQKALVALNNRQFAVTFLEEQRRR

SEQ ID NO: 77570 - protein, 243 aa, Zea mays
  Coding DNA Sequence Number=SeqID_35791
  Gene Ontology: Mol. function=translation initiation factor activity; Cellular component=transcription factor complex; Biological process =regulation of transcription, DNA-dependent
  Homolog annotation: Hit_ID=Q8W0W3; Match level="QueryCoverage=48%, HitCoverage=37%, E-value=4e-60, Identity=94%"; Hit description =Transcription initiation factor IIB
  Pfam annotation: Domain name=TFIIB_Zn_Ribbon; Domain location=91-134; Score=57.7; E_value=3.9e-14; Accession=PF08271.2; Description=TFIIB zinc-binding
  Subcellular localization annotation: CTP_CleavageSite=86; ConfidenceScore=5.25e-01
QSAPSINMRQIITVRHRRRAWLPLLLAPLAQTHATVSLPRSRCIPRNPRPSAMRSRLLLPPSWRSRAPPPRARRLSRPCHPRPAPREMSDSYCPDCKKQTEVAFDHSAGDTVCTESGLVLEAHSVDETSEWRTFANESNDNDPVRVGGPSNPLLTDGGLSTVIAKPNGAQGDFLSSSLGRWQNRGSNPDRSLILAFRTIANMADSVVKPSVIQLRGPTKVSVFIASNDAEQACDFRITGIYHD

SEQ ID NO: 77571 - protein, 177 aa, Zea mays
  Coding DNA Sequence Number=SeqID_35792
  Gene Ontology: Mol. function=transcription regulator activity; Cellular component=transcription factor complex; Biological process =regulation of transcription, DNA-dependent
  Homolog annotation: Hit_ID=Q8W0W3; Match level="QueryCoverage=66%, HitCoverage=37%, E-value=6e-61, Identity=94%"; Hit description =Transcription initiation factor IIB
  Pfam annotation: Domain name=TFIIB_Zn_Ribbon; Domain location=4-47; Score=57.7; E_value=3.9e-14; Accession=PF08271.2; Description=TFIIB zinc-binding
MSDSYCPDCKKQTEVAFDHSAGDTVCTESGLVLEAHSVDETSEWRTFANESNDNDPVRVGGPSNPLLTDGGLSTVIAKPNGAQGDFLSSSLGRWQNRGSNPDRSLILAFRTIANMADRACGRGGHVREQGRDPCVPAVQRSCAIKFLKYDEIQLAPEAASVGLEIWVVGNDNGKNVP

SEQ ID NO: 77572 - protein, 245 aa, Zea mays
  Coding DNA Sequence Number=SeqID_35793
  Gene Ontology: Mol. function=transcription regulator activity; Cellular component=transcription factor complex; Biological process =regulation of transcription, DNA-dependent
  Homolog annotation: Hit_ID=Q8W0W3; Match level="QueryCoverage=42%, HitCoverage=33%, E-value=9e-53, Identity=96%"; Hit description =Transcription initiation factor IIB
  Pfam annotation: Domain name=TFIIB_Zn_Ribbon; Domain location=76-110; Score=32.7; E_value=1.3e-06; Accession=PF08271.2; Description=TFIIB zinc-binding
MASKKFGEKVTSFTMTCSLLSRYIRSNGATAMDIDLTIRDEISSIVRRTIVHCDSEMDAHLIMVFLDNRHANVDMTEVAFDHSAGDTVCTESGLVLEAHSVDETSEWRTFANESNDNDPVRVGGPSNPLLTDGGLSTVIAKPNGAQGDFLSSSLGRWQNRGSNPDRSLILAFRTIANMADSANAILLTQIFVLFSANRYMILVFFRYDPGAIKFLKYDEIQLAPEAASVGLEIWVVGNDSGENVP

SEQ ID NO: 77573 - protein, 119 aa, Zea mays
  Coding DNA Sequence Number=SeqID_35794
MKSYNMLMHQQGDLKPCFELIHGDMVQVTGFDLFLLQKLNFKFNRGPDRFNRGPGQVQQGSREVQPVFRESSAGVFPRTSLSDLQSASLTGRLSVSLPQAVEPVLGAVQPVLVNLTSLQ

SEQ ID NO: 77574 - protein, 76 aa, Zea mays
  Coding DNA Sequence Number=SeqID_35795
MNKNTRDTRYIPRFGHTTKVPYFLVEAPTKSRVSFNPNPPFADHKAVEDRLNRPYDRFNRLGQADSQYASQTGRLQ

SEQ ID NO: 77575 - protein, 95 aa, Zea mays
  Coding DNA Sequence Number=SeqID_35796
MVRERRTRIITMNKNTKDTRFIPRFGHTTKVPYFLVEAPTKSRVSFNPNPPFADHKGRLNRPWQVRQTVCQSDCQTDWQTDLQTGQVDQDRLNRP

SEQ ID NO: 77576 - protein, 95 aa, Zea mays
  Coding DNA Sequence Number=SeqID_35797
MVRERRTRISTMNKNTKDTRFIPRFGHTTKLPYFLVEAPTKSRVSFNPNPPFADHKGRLNRPWQVRQTVCQSDCQTDWQTDLQTGQVDQDRLNRP

SEQ ID NO: 77577 - protein, 64 aa, Zea mays
  Coding DNA Sequence Number=SeqID_35798
MVRERRTRISIMNKNTKDTRFIPRFGHTTKVPYLLVEAPTKSRVSFNPNPPFADHKDLETHRDT

SEQ ID NO: 77578 - protein, 105 aa, Zea mays
  Coding DNA Sequence Number=SeqID_35799
MVRERRTRISIMNKNTKDTRFIPRFGHTTKVPYFLVEAPTKSQVSFNPNPPFSDHKVEVQLELRKLNSAEVQLQLKKLSSAEVQLQLKKLSSAEVQLSCFSTRTL

SEQ ID NO: 77579 - protein, 95 aa, Zea mays
  Coding DNA Sequence Number=SeqID_35800
MVRERRTRISTMNKNTRDTRFIPRFDHTTKVPYFLVEVPTKSRVSFNPNPPFADHKGRLNRPWQVRQTVCQSDCQTDWQTDLQTGQVDQDRLNRP

SEQ ID NO: 77580 - protein, 84 aa, Zea mays
  Coding DNA Sequence Number=SeqID_35801
  Subcellular localization annotation: CTP_CleavageSite=26; ConfidenceScore=5.10e-01
MNKNTKDTRFIPRFGHTTKVPYFLVEAPTKSRVSFNPNPPFADHKGRLNRPWQVRQTVCQSDCQTDWQTDLQIGQVDQDRLNRP

SEQ ID NO: 77581 - protein, 84 aa, Zea mays
  Coding DNA Sequence Number=SeqID_35802
  Subcellular localization annotation: CTP_CleavageSite=26; ConfidenceScore=5.22e-01
MNKNTKDTRFIPRFSHTTKVPYFLVEAPTKSRVSFNPNPPFADHKGRLNRPWQVRQTVCQSDCQTDWQTDLQTGQVDQDRLNRP

SEQ ID NO: 77582 - protein, 84 aa, Zea mays
  Coding DNA Sequence Number=SeqID_35803
  Subcellular localization annotation: CTP_CleavageSite=41; ConfidenceScore=5.24e-01
MNKNTRDTRFIPRFGHTTKVPYFLVEAPTKSRVSFNPNPPFANHKGRLNRPWQVRQTVCQSDCQTDWQTDLETGQVDQDRLNRP

SEQ ID NO: 77583 - protein, 84 aa, Zea mays
  Coding DNA Sequence Number=SeqID_35804
  Subcellular localization annotation: CTP_CleavageSite=26; ConfidenceScore=5.08e-01
MNKNTRDTRFIPRFGHTTKVPYFLVEAPTKSRVSFNPNPPFADHKGRLNRPWQVRQTVCQSDCQTDWQTDLQTGQVDQDRLNRP

SEQ ID NO: 77584 - protein, 84 aa, Zea mays
  Coding DNA Sequence Number=SeqID_35805
  Subcellular localization annotation: CTP_CleavageSite=41; ConfidenceScore=5.10e-01
MNKNTKDTRFIPRFGHTTKVPYFLVEAPTKSWVSFNPNPPFANHKGRLNRPWQVRQTVCQSDCQTDWQTDLQTGQVDQDRLNRP

SEQ ID NO: 77585 - protein, 189 aa, Zea mays
  Coding DNA Sequence Number=SeqID_35806
  Gene Ontology: Mol. function=helicase activity; Cellular component =membrane; Biological process=protein amino acid phosphorylation
  Homolog annotation: Hit_ID=Q1EPC6; Match level="QueryCoverage=98%, HitCoverage=11%, E-value=1e-84, Identity=80%"; Hit description=DNA helicase homolog, putative
  Pfam annotation: Domain name=DUF889; Domain location=1-90; Score= -11.9; E_value=1.1e-10; Accession=PF05970.5; Description=Eukaryotic protein of unknown function (DUF889)
MDDPHNYYPPEFLNTLTPNGLPPHVLKLKIGCPVILLRNIDSANGLCNGTRLVVRGFQRNSIDAKIVLGQHAGKRIFLPRIPLCPSDDEMFPFQFNRKQFPIRLSFAMTVNKAQGQTIPNVGVYLPESVFSHGQLYVALSRATARSNIKILVIPAVDGNKRSRKGVRKNPTVDCGTYTKNIVYKEVLTN

SEQ ID NO: 77586 - protein, 123 aa, Zea mays
  Coding DNA Sequence Number=SeqID_35807
  Gene Ontology: Mol. function=voltage-gated ion-selective channel activity; Cellular component=mitochondrial outer membrane; Biological process=anion transport
  Homolog annotation: Hit_ID=Q8VXC7; Match level="QueryCoverage=62%, HitCoverage=26%, E-value=6e-11, Identity=50%"; Hit description =Voltage-dependent anion channel
MRNESIISEIQAQLKHKNVTVDVKANSDPHISPIQLSTTVTVEELGLPGLKNIMAISYPHQAFGRERQRGQPHCVLHSYHLANTEKDTTVGMEVTRNFSTKASIVTFGTCHALDPTTTMKACN

SEQ ID NO: 77587 - protein, 2001 aa, Zea mays
  Coding DNA Sequence Number=SeqID_35808
  Gene Ontology: Mol. function=helicase activity; Biological process =viral genome replication
  Homolog annotation: Hit_ID=Q1EPC6; Match level="QueryCoverage=71%, HitCoverage=88%, E-value=0.0, Identity=72%"; Hit description=DNA helicase homolog, putative
  Pfam annotation: Domain name=DUF889; Domain location=1482-1718; Score= 442.2; E_value=6.8e-130; Accession=PF05970.5; Description=Eukaryotic protein of unknown function (DUF889)
  Subcellular localization annotation: CTP_CleavageSite=18; ConfidenceScore=5.19e-01
MVGEQFGWIMVTSISSSVASSPPSPPGRPRHLPEGFLSEKGLLTLSIRLLFIHQGTVLVMDQLGYNVDRTPFTNISNTIITGTDTNPQSYIVGNQNESNSLGPIVDAREHSFPDDCSTIDLKYLSTQGIAGGDEQVNVDLDDDSDWLHRNETFQVNNIVASNDLLTTGCVHESVDNTPNHTMKRAAYFSERYKNLTPIERESRREHLRLYNKTPKRKDAKTEYGRKRRALQSATLNQESIAMEDPTYTPEVGRHRTDATQPYGSSVTTCDWVIPEFVGTPFLPTSIQIEDVGSLTMSTEPLSRKHHVLSGARPAILGSRNQQFEAAISRNVATVTEDTISDAVEGDDWTQPHTTTEIHNNGDDDEGVIFEEDDDDNDGYLFAGQYDETDEDIKIDGTQEESIDTDLPDTYNKVYSNVPEETHMLKSVPNCGYCNAKKFEYEPPRFCCRGGKVELAPLETPPQLRRLWDSADSDARHFRDNIRFFNGHFSFTSLYCCLDSMTTNVRDSGIYTFRAQGMMYHNIKSFGREGGAEHKHLELYFYDDDPNLEHRYRMCREEHQQKDKDVIKQIVSILRENPYSEHLRSMGHVENLDDYRITLNLDQSLNQKTYNTPITSEVAAVWIEGSERRGQFNKSVMLHGKDRSSHGIRSYHGCYDALSYPLFFPRGELGWHANIPKVGVSMGEVDAYRATHRASNANDEDAESPNHLCVSVRDYYCYKFQIRPGVFNPILHGKRLFQQFAVDTYIKIESSRLDFIRKNQDRLRADLYQGLVDTMLDGDIRAEKVGKRTVLSSSFIGGPRDMRRRYMDAMALVRKFGKPDIFLTMTCNPNWDEIRRELLSGQTPQDRSDLVVRVFHAKLQELKYRLTKQDILGKVRAYVYVVEFQKRGLPHAHFLLIMQRKYKLTCPEQYDLLISAEIPDKKYHELRKMVIKHMMHGPCGSLNPNCPCTKGRASCKNHYPRPFSDATLQGKDSYPVYRRRDDGRKEKVRGCELDNRWVVPYNPYLLRLFNCHINVEACGSIKAVKYLFKYIYKGHDRASVVMRDASKTDDDVDEIKQYRDARWVTPPEALWRIYGFELSQNSPPVMQLQLHLPNMHMVAFHDRQMVQRVVNRLGADRSMLTAYFEANRLHEEAPGILYCDFPEWFTWQSGKGKVWQRRKRDTGGQVGRIVSAHPAEGERYYLRVLLNHVAGAISYVDLRTVDGVTLPTFREAAERRGLLESDNTLDECLTERALFQMPSALRRLFATILVYCEPSDVAVLWRKHLDAMSEDYQRRSESKTHVEQMVLIDIRNMLQSMGKDIKTFPLPPIIDTYDDAIGTAREVYEEESIEPTVADVALKETLNEEQRAAYDKIMSAVDTDQGGLFFVDGPGGTGKTYLYRVLLATLRSQNKIAVATATSGVAASIMPGGRTAHSRFKIPLTIDDGAVCSFTKQSGTAELLRKASLIIWDEASMTKRQAVEALDNSMRDIMGRPGLPFGGKTIVFGGDFRQVLPVVRKGSRAQVVASSLRMSYLWESMSHLKLVSNMRAKNDPWFAEFLLRIGGGTEVTNRDGDIRLPGEVCVPYSGSDSDLDNLIDYVFPNLNENISDSTYITSRVILSTRNDWVDMINVKMIDRFQGAHTVYHSFDSAMDDPHNYYPPEFLNTLTPNGLPPHVLKLKIGCPVILLRNIDPANGLCNGTRLVVRGFQRNSIDAEIVLGQHAGKRIFLPRIPLCPSDDEMFPFQFKRKQFPIRLSFAMTVNKAQGQTIPNVGVYLPESVFSHGQLYVALSRATARSNIKILVIPAVDGNKRSRKGVRKNPTVDCGTYTKNIVYKELEISSMADTRDITALSTMRNESIISEIQAQLKHKNVTVDVKANSDPHISPIQLSTTVTVEELGLPGLKNIMAISYPHQAFGRFGIQYLRNYVGINVSSSMNTKPSVNLDTRSRLAMIFLVALKSELAAEVYAKQKVDDQWALHVSHHTSDILHCWMEQSWLPTSTVVQAGTTPQPNKRCLDLEQDEGG

SEQ ID NO: 77588 - protein, 143 aa, Zea mays
  Coding DNA Sequence Number=SeqID_35809
  Gene Ontology: Mol. function=hydrolase activity
  Homolog annotation: Hit_ID=Q10SN5; Match level="QueryCoverage=81%, HitCoverage=33%, E-value=3e-19, Identity=45%"; Hit description =Hydrolase, alpha/beta fold family protein, expressed
MASAGVAPSGYKNSSSNPPSLPPKGCLLPWSPEAYLKGHEAELALAMIFLVALKSELAAEVYAKQKVDDQWALHVSHHTSDILHCWMEQSWLPTSTVVQAGTTPLPNKRRLDLEQDEGGRHRFTHIKCQETLHNKCISSYYCQ

SEQ ID NO: 77589 - protein, 298 aa, Zea mays
  Coding DNA Sequence Number=SeqID_35810
  Homolog annotation: Hit_ID=Q6ATV4; Match level="QueryCoverage=29%, HitCoverage=8%, E-value=3e-29, Identity=74%"; Hit description =Calcium-transporting ATPase 2, plasma membrane-type (EC 3.6.3.8) (Ca(2+)-ATPase isoform 2)
  Pfam annotation: Domain name=Cation_ATPase_C; Domain location=163 -289; Score=-40.8; E_value=0.064; Accession=PF00689.11; Description =Cation transporting ATPase, C-terminus
  Pfam annotation: Domain name=Nuc_sug_transp; Domain location=113-268; Score=-158.1; E_value=0.0045; Accession=PF04142.6; Description =Nucleotide-sugar transporter
  Pfam module annotation: Pfam domain module=Cation_ATPase_C::Nuc_sug _transp; Domain location=163-289::113-268
MVKATMSGKLKEMDWEKKIKICELVEQDPGLAMIFLVALKSELAAEVYAKQKVDDQWALHVSHHTSDILHCWMEQSWLPTSTVVQAGTTPLPNKRRLDLEQDEGGRHRFTHIKCQETLHNKCISSYYCQTFRVYPIPAMLYLVKNLLQYYIFEYVYAPSYHILKNLNIISTGVLYRIILKKKTMQQLTLKSETDTFVESNTMLPSYLVIVFNEISSRDMEEINVLKGLPQNSIFMCILGGTIIFQFILVQFLGDFANTMPLTHLQWLVSILFGLLGMPIAAAIKLIPVEPREDDGRIP

SEQ ID NO: 77590 - protein, 177 aa, Zea mays
  Coding DNA Sequence Number=SeqID_35811
  Gene Ontology: Mol. function=ATPase activity, coupled to transmembrane movement of ions, phosphorylative mechanism; Cellular component=membrane; Biological process=calcium ion transport
  Homolog annotation: Hit_ID=Q6ATV4; Match level="QueryCoverage=50%, HitCoverage=8%, E-value=1e-29, Identity=74%"; Hit description =Calcium-transporting ATPase 2, plasma membrane-type (EC 3.6.3.8) (Ca(2+)-ATPase isoform 2)
  Pfam annotation: Domain name=Cation_ATPase_C; Domain location=42-168; Score=-40.8; E_value=0.064; Accession=PF00689.11; Description=Cation transporting ATPase, C-terminus
  Pfam annotation: Domain name=Nuc_sug_transp; Domain location=1-147; Score=-168.9; E_value=0.023; Accession=PF04142.6; Description =Nucleotide-sugar transporter
  Pfam module annotation: Pfam domain module=Cation_ATPase_C::Nuc_sug _transp; Domain location=42-168::1-147
MGTNIYYQTFRVYPIPAMLYLVKNLLQYYIFEYVYAPSYHILKNLNIISTGVLYRIILKKKTMQQLTLKSETDTFVESNTMLPSYLVIVFNEISSRDMEEINVLKGLPQNSIFMCILGGTIIFQFILVQFLGDFANTMPLTHLQWLVSILFGLLGMPIAAAIKLIPVEPREDDGRIP

SEQ ID NO: 77591 - protein, 173 aa, Zea mays
  Coding DNA Sequence Number=SeqID_35812
MVKGCSNWERMRKRNCYTQGESLFKADSPTQKANCRARPKSEPPPAVARLFVSAPRNISPYSDTGAWAHESYSLAVSRRLARGPAKPSRVGATGQSATGTDMAVGVSKGGLAVITLANAQKRRTIHQSSFGPTCRLVSSPEVGPGATVGILKLGYPLLQYEDAVPTRLSLVAW

SEQ ID NO: 77592 - protein, 956 aa, Zea mays
  Coding DNA Sequence Number=SeqID_35813
  Gene Ontology: Mol. function=oxidoreductase activity; Cellular component=integral to membrane; Biological process=electron transport
  Homolog annotation: Hit_ID=Q0MRQ8; Match level="QueryCoverage=70%, HitCoverage=88%, E-value=0.0, Identity=64%"; Hit description =Respiratory burst oxidase protein A
  Pfam annotation: Domain name=FAD_binding_8; Domain location=455-565; Score=107.5; E_value=4e-29; Accession=PF08022.2; Description=FAD -binding domain
  Pfam annotation: Domain name=Ferric_reduct; Domain location=257-414; Score=149.6; E_value=8.3e-42; Accession=PF01794.9; Description =Ferric reductase like transmembrane component
  Pfam annotation: Domain name=NADPH_Ox; Domain location=52-150; Score =40.7; E_value=1e-09; Accession=PF08414.1; Description=Respiratory burst NADPH oxidase
  Pfam annotation: Domain name=NAD_binding_1; Domain location=575-676; Score=-16.2; E_value=0.082; Accession=PF00175.11; Description =Oxidoreductase NAD-binding domain
  Pfam annotation: Domain name=NAD_binding_6; Domain location=571-752; Score=128.6; E_value=1.7e-35; Accession=PF08030.2; Description =Ferric reductase NAD binding domain
  Pfam annotation: Domain name=efhand; Domain location=96-124; Score =17.0; E_value=0.07; Accession=PF00036.22; Description=EF hand
  Pfam module annotation: Pfam domain module=FAD_binding_8::Ferric _reduct::NADPH_Ox::NAD_binding_1::NAD_binding_6::efhand; Domain location=455-565::257-414::52-150::575-676::571-752::96-124
  Subcellular localization annotation: CTP_CleavageSite=43; ConfidenceScore=5.43e-01
MASSSGYADGGTGGLGDGDPPVPSMRKQPSRIASGMRRLASKVSAAVPEMRGLKRTQSGAQSGLRGLRFLDKTSAGKDGWKTVEKRFDEMSTDGRLQRENFAKCDKNGDGKLTEDEVKEVIVLSASANKLAKLKKHAATYASLIMEELDPDHRGYIEGTGKQIWQLETLLRGMVTASGPTNMGASASLARTMVPSSHRTPLQRRMNKAVDLVHENWKRIWVLSLWGVLNMALFVFKFTQYRRRAVFEVMGYCVCIAKGAAETLKLNMALILLPVCRNTLTRLRSTALSKVVPFDDNINFHKVIALAIAIGSATHTLAHVLCDFPRLVACPKDKFMEKLGPFFNYAQPTWATLLSSIPGWTGILLILIMSFSFTLATHSFRRSVVKLPSPLHHLAGFNAFWYAHHLLVIAYVLLVMHSYFIFLTKQWYKRTTWMYLAVPVVFYASERSIRRIREKSYRVSIIKAAIYPGNVLSLYMKKPTSFKYKSGMHPFSITSAPGDDYLSVHIRTLGDWTSELRNLFGKACEAEVTSKKATLARLETTVVAHGLAEDTRFPKVFIDGPYGAPAQNYRKYDILLLIGLGIGATPFISILKDLLNNIKSNESMHDTELGCSFKTNGPGRAYFYWVTREQGSFEWFKGVMNDVAESDHDDVIEMHNYLTSVYEEGDARSALIAMVQSLQHAKDGVDIVSGSKQYHDDPVPFPQRELLTSNGATHISVALVALWNWELGLGLTGPRAVCLVRFGVGAKWKEITNAYNAWAISERHNVRSPYSIDMSRLLPRGRATQRPYVRLRPLAYVTCAMPRGSIGAPPERGARAFTLWSGHVAAPDPRLALIKAWVFFVPESRDPAVSGPDPTQRGPEPILGVRFAPVEVLDLTRGSGLYIRGSGTFPWGSGPTVDTLEYIIFFGHMAVPEPSTWWGRAMSTMRLEIAAWVSRLHTVVRAPAQTPGAGCDDDRQR

SEQ ID NO: 77593 - protein, 250 aa, Zea mays
  Coding DNA Sequence Number=SeqID_35814
  Subcellular localization annotation: CTP_CleavageSite=54; ConfidenceScore=5.21e-01
MVLFLFRFGVIAIFLAERPGSKSQGSRGVWRLATGLAAATADVATTAFAATVVVAAVVTSTAAATIVAAAAVTVTAVVAAATALIVVVVAAPLLGRARGVLLIRADLRLIRPLEPDTLDRTDESSESLEDVGGEARASDPSDSEETSSTEYSESQKSSEGGLGSRFRLSPTRRGEPRPLLPLPMVGWRRREGEKKAADDRRMSEENNGASRLFIEAGSDRPLPTTLAEQSQVFNRQFKPPENESGKRRRF

SEQ ID NO: 77594 - protein, 151 aa, Zea mays
  Coding DNA Sequence Number=SeqID_35815
MAGASHRRALAGEREWVRVGLKKELGRVGQIHELRIPYSLSQSAISALVEQLNNPERRCFSEDDGNEERSYPSPFFKARAQNVLVNYGQYQVTSEISRMEKKLMRRSLKILGNTPNGCAQGVSWRLELLIEYMRLFGERGRKWAVTPGLYK

SEQ ID NO: 77595 - protein, 85 aa, Zea mays
  Coding DNA Sequence Number=SeqID_35816
MAGASHRRALAGEREWVRVGLKKELGRVGQIHELRIPYSLSQSAISALVEQLNNPERRCFSEDDGNEERSYPSPFFKARAQVYKQ

SEQ ID NO: 77596 - protein, 141 aa, Zea mays
  Coding DNA Sequence Number=SeqID_35817
MARRRFQKNKKTSPKENNEVTLDILLSNCSNYVSWSTSVINAFRTIDSQLEQILDKSIIPYSYNGKNASKEDQRCIRLNYLAYDILSNSLSKEDYRCRCFGSARTPGVAPQEISALPLAYALEINIRFSGFQDSLGVAPEL

SEQ ID NO: 77597 - protein, 141 aa, Zea mays
  Coding DNA Sequence Number=SeqID_35818
MARRRSQKNKKTSPKENNEVTLDILLSNCSNYVSWSTSVINAFRTIDSQLEQILDKSIIPYSYNGKNASKEDQRCIRLNYLAYDILSNSLSKEDYRCRCFGSDRTPGVAPQEISALPLAYALEINIRFSGFQDSLGVAPEL

SEQ ID NO: 77598 - protein, 141 aa, Zea mays
  Coding DNA Sequence Number=SeqID_35819
MARRRFQKNKKTSPKENNEVTLDILLSNCSNYVSWSTSVINAFRTIDSQLEQILDKSIIPYSYNGKNASKEDQRCIRLNYLAYDILSNSLSKEDYRCRCFGSDRTPGVDPQEISALPLAYALEINIRFSGFQDSLGVAPEL

SEQ ID NO: 77599 - protein, 55 aa, Zea mays
  Coding DNA Sequence Number=SeqID_35820
MALLVALSLPFLPLPEVHGLVGAALFHRCLASRMFISLALVESELGCGSASYLSW

SEQ ID NO: 77600 - protein, 319 aa, Zea mays
  Coding DNA Sequence Number=SeqID_35821
  Subcellular localization annotation: CTP_CleavageSite=84; ConfidenceScore=5.56e-01
MNILEAKHRWKSAAPTRLCTSGSGRKGKLSATNLLGRVKTKSTISPAVSSLGRMAPAQILPLNSGASHPSKRQTEMHSTTRHPGATTNGSCIVGKLSLDMLGVSLQGHGQTTATQGRNLEGKGAQRARRRKGTTGGREARHGCYSRDEPPFKGRFSCSSPKASRASLPRCTSGYPSYGMGPDPACHTAGPLVRRRQIVARGACYCPAVGAPLHLRRDRRSNLGHGVQAHMSGTWRGRFLCAEKTDRRVRSMPPPTVARLFASAKSNSPVPDTGAWDPRVIPRVPVPGYREVKPPLAPIPRLLGAATEDGEVKFSKLMRQ

SEQ ID NO: 77601 - protein, 175 aa, Zea mays
  Coding DNA Sequence Number=SeqID_35822
MAATRGMNPLLKADSPARAPKRHGRVSPDAHQGPHVRHLACRFLCAEKTDRRVRSMPPPTVARLFASAKSNSPVPDTGAWTHESSLGYRSLGTEKSNRRSRQYRASSGPPQKMERRRADAATWPIARDVSQWAKPDVRALGHAAPAFIAERKCRLADDVPPQHLLRPVHSTGRRR

SEQ ID NO: 77602 - protein, 104 aa, Zea mays
  Coding DNA Sequence Number=SeqID_35823
  Gene Ontology: Mol. function=protein binding; Cellular component =nuclear chromosome; Biological process=chromosome organization and biogenesis (sensu Eukaryota)
  Homolog annotation: Hit_ID=Q016T1; Match level="QueryCoverage=69%, HitCoverage=13%, E-value=2e-20, Identity=67%"; Hit description=[D] KOG1213 Sister chromatid cohesion complex Cohesin
  Pfam annotation: Domain name=Rad21_Rec8_N; Domain location=4-87; Score=92.8; E_value=1e-24; Accession=PF04825.4; Description=N terminus of Rad21  Rec8 like protein
MDNYQPEVQCQGCLVKKYSIIFPDVPIALRLSSHLMLGVVRIYSRKVNYLFHDCSEALLKIKQAFRSTAVDLPPEESTAPYHSITLPETFDLDDFELPEAAFQG

SEQ ID NO: 77603 - protein, 1144 aa, Zea mays
  Coding DNA Sequence Number=SeqID_35824
  Gene Ontology: Cellular component=nuclear chromosome; Biological process=chromosome organization and biogenesis (sensu Eukaryota)
  Homolog annotation: Hit_ID=Q016T1; Match level="QueryCoverage=15%, HitCoverage=31%, E-value=2e-21, Identity=38%"; Hit description=[D] KOG1213 Sister chromatid cohesion complex Cohesin
  Pfam annotation: Domain name=Rad21_Rec8; Domain location=1085-1139; Score=57.6; E_value=4e-14; Accession=PF04824.7; Description =Conserved region of Rad21  Rec8 like protein
  Pfam annotation: Domain name=Rad21_Rec8_N; Domain location=4-96; Score=101.3; E_value=2.8e-27; Accession=PF04825.4; Description=N terminus of Rad21  Rec8 like protein
  Pfam module annotation: Pfam domain module=Rad21_Rec8::Rad21_Rec8_N; Domain location=1085-1139::4-96
MDNYQPEVQCQGCLVKNVLAEDHYLLDSIIFPDVPIALRLSSHLMLGVVRIYSRKVNYLFHDCSEALLKIKQAFRSTAVDLPPEESTAPYHSITLPETFDLDDFELPEAAFQGDTDHHVSTKEQITLQDNPEKTGYSTSQFGLDERFGDASSSHIGFDLEEELILNKDHSIHLQSDDGIIIQGRSSVPSTDMDIDDNKSQDIIAEGYHNMDGGHSSHGKLGSLNLNAIDLGGNSIPNWTGYNGPSASYIQPSPYTCDEPASPEFISAQAPATPGLMEETVPSRVHESPVLSPQRKPSPSTNDETAKTDTPAAPASDFLHSATGNANDVGAERTELGLAKHVQVESSAFWDADASGQQHTSEGLPSQGQADHLEPAADKLVNSDGIAASVETVTVNATIKDVPLAVNDSEPCVDGSTEPSVVENLVQINGPLIDAQDFQHEAQAMQQVVASNDRLNELATSEFAEPEKMLSVPDSEFNHPIDLGLITAEKGTTESDGSNIIGSLASRKRHLEDSLPALESETTERLSSRPHGIRTNDFVPHDDDILASILVGRRTPGFTLDSTPLPPRESSLKRRRLGSKMGTLKRKVQIDDAMVLHADTIRQQLINTEDIRRIRKKAPCTRSEIWMIEKGSLEDDIFHEPIFSCLSEELNKLHNRTYEAIVHPAVQNMELQGQLDMPEAITEDSNIAGFGAATIDGPLHIPDGIQSDAMLPRANDAYGATAAFSLQVPPNNQVNGASNDFVIGTLFQGVTGPFIGNEKEVALADRERAQVNTLYSDHFQDVPSDLHSTDANISSQDVTLDNSGQACAHATDGMTRELTHFVHSNANIFESNEVPASEITGVEYNQGASGFPQSTEDENAVGYNQDVSGFPRPTEDENAVDYNQDASGFSRPTEDVQDASGFPRPTEDENMVDYNQDASGFPRPTEDVNAVGYNQDASGFARPTEDVNAVGCNQDASGFPRSMKDENAVEYNQDGSGFPRPAENENDVSAMGDNSGFHENNMGSLTDLDMVNDYELKESNDFGSAINGVDTDFLNYDDDDGGDFDDANDDEPNPNEFQSLDNSGWSSRTRGVARYLKALFDDESGLERKSVAIDHLVRGKTRKEASRMFFETLVLTTKDYISVDQPNPFDLVRIKPGSKLLMSEF

SEQ ID NO: 77604 - protein, 114 aa, Zea mays
  Coding DNA Sequence Number=SeqID_35825
  Homolog annotation: Hit_ID=Q2RA23; Match level="QueryCoverage=31%, HitCoverage=4%, E-value=1e-07, Identity=72%"; Hit description =Expressed protein
MAPGRSRHRCGPTAQHGWSAGTDRRHGQAGGPLEAQGGSIQSGLVINLSRFGLGQSKPAFGDQSVLIIFVLGGINTLEGKSKMCSALGKGSGFDHFWGGFVSKLQGRCACRCLL

SEQ ID NO: 77605 - protein, 39 aa, Zea mays
  Coding DNA Sequence Number=SeqID_35826
MAPAEVGTVAGPLPNTAGLQALTGAMDKLEALLRPKEEF

SEQ ID NO: 77606 - protein, 1097 aa, Zea mays
  Coding DNA Sequence Number=SeqID_35827
  Gene Ontology: Mol. function=nucleoside-triphosphatase activity; Cellular component=membrane; Biological process=cell division
  Homolog annotation: Hit_ID=Q10LK8; Match level="QueryCoverage=99%, HitCoverage=100%, E-value=0.0, Identity=67%"; Hit description=AAA -type ATPase family protein, putative, expressed
  Pfam annotation: Domain name=AAA; Domain location=832-1017; Score =272.3; E_value=9.9e-79; Accession=PF00004.19; Description=ATPase family associated with various cellular activities (AAA)
  Pfam annotation: Domain name=AAA_3; Domain location=832-958; Score= -9.2; E_value=0.0033; Accession=PF07726.2; Description=ATPase family associated with various
  Pfam annotation: Domain name=AAA_5; Domain location=832-964; Score =19.1; E_value=6.3e-05; Accession=PF07728.4; Description=ATPase family associated with various cel
  Pfam module annotation: Pfam domain module=AAA::AAA_3::AAA_5; Domain location=832-1017::832-958::832-964
MVETRRSAAAKRPAAGEEDKGAPASPASAPAENAGAGPRAGDDVASSQPPKRAKVGCTEADTEKPLVAPAEVGTVAGPLPNTAGLQALTGAMDKLEALLRPKEGQSNPAGHKRGTNDKDITAKIKRAMDLSEDLSAKIKKTKDNVAGILNKPQAAATSRRQEPWCRLISQYTMHPTLSIYGALFTIGHGAHHDFRLGESSTASPVCRLKQAKRGALLEVFESKVVRVNGKSLDKAAKVTLNGGDEIIFRSPIFEQLHQEKSSTPALSSTCSSIQQGQCSHFKDIQGHLSSKGHKVPTIYFGRGSSADPLLLNLCKTMEGQSQHSSEDNISSGRFQLIKEDLINATVDASDIFESFDSCPYYLSDHTKCALMSSAYVHLHCKDYLKFTKDISSLSQRVLLSGPTGTDIYQEYLVKALAKNFGARLLTVDSSMLFGGQTSKEPETYKKGDRVRYIGSVQSTGVILDGQSPPDFGSQGEIFLPFEENRSSKVGVRFDKKILGGNDLGGNCEVDHGLFCPVDSLCLDIPGWEVTSKHPLDVIFEFISEEIRHGPFILFLKDTEKICGNNDYYHGLKSKLKHFPAGAFIIGSQIQPANRKEKAKGSSPFLSKFPYSQTILDLALQDIDAINGNNKETSKAAKHLIKLFPNKVILEAPQDEMELSRWNQMLNRDIEVLKGNANISKMRSFLTRVGLECTDLEAILVKDRVLTNECIDKIIGFALSHQLKNCTNPDPPLSNVQFVLSSESLKHGIDMLESIQSGSKSSTKRKSLKDIATENEFEKRLLADVIPPHEIGVTFEDIGALESVKDTLKELVMLPLQRPELFNRGQLMKPCKGILLFGPPGTGKTMLAKAVATEAGANFINISMSSISSKWLGEGEKFVKAVFSLASKIAPSVIFVDEVDGMLGRRENPGEHEAMRKMKNEFMVNWDGLRTKEKERVLVLAATNRPFDLDEAVIRRLPRRLMVNLPDASNRRKILSVILAKEDLADDVDLEAIANLTEGYSGSDLKNLCVTAAHRPIREILEKEKKERASAETENRPLPLSHTSNDVRALRISDFIHAHEQVCASVSSDSSNMNELVQWNDLYGEGGSRKKTTLSYFM

SEQ ID NO: 77607 - protein, 263 aa, Zea mays
  Coding DNA Sequence Number=SeqID_35828
  Gene Ontology: Mol. function=zinc ion binding; Cellular component =intracellular; Biological process=regulation of transcription
  Homolog annotation: Hit_ID=Q9SJU5; Match level="QueryCoverage=60%, HitCoverage=81%, E-value=1e-41, Identity=53%"; Hit description =Putative CONSTANS-like B-box zinc finger protein
  Pfam annotation: Domain name=zf-B_box; Domain location=108-153; Score= 47.1; E_value=5.9e-11; Accession=PF00643.14; Description=B-box zinc finger
MADLMYHKLGPWNTRLTAPAPRFSGAPNDLVHEHHQIFWRWSYPKQSLRSSARTRQLCLGAKQTAPNVLVDCQFWMLLKLSSCYAVCEVHMCNKLASRHVRVGLADPNKLVRCDICENSPAFFYCEIDGTSLCLSCDMTVHVGGKRTHGRYLLLRQRVEFPGDKPGHMDDVPMEIQDPENQRDQKKPPKEQTANHHNGDDPATDGNCDDQGNIDSKMIDLNMRPVRTHGQESNSQTQGVGLSVNNHDSPGVVPTSNSERDTSK

SEQ ID NO: 77608 - protein, 371 aa, Zea mays
  Coding DNA Sequence Number=SeqID_35829
  Gene Ontology: Mol. function=zinc ion binding; Cellular component =intracellular
  Homolog annotation: Hit_ID=Q9SJU5; Match level="QueryCoverage=43%, HitCoverage=81%, E-value=2e-41, Identity=53%"; Hit description =Putative CONSTANS-like B-box zinc finger protein
  Pfam annotation: Domain name=zf-B_box; Domain location=108-153; Score= 47.1; E_value=5.9e-11; Accession=PF00643.14; Description=B-box zinc finger
MADLMYHKLGPWNTRLTAPAPRFSGAPNDLVHEHHQIFWRWSYPKQSLRSSARTRQLCLGAKQTAPNVLVDCQFWMLLKLSSCYAVCEVHMCNKLASRHVRVGLADPNKLVRCDICENSPAFFYCEIDGTSLCLSCDMTVHVGGKRTHGRYLLLRQRVEFPGDKPGHMDDVPMEIQDPENQRDQKKPPKEQTANHHNGDDPATDGNCDDQGNIDSKMIDLNMRPVRTHGQESNSQTQGVGLSVNNHDSPGVVPTSNSERDTSKNSGNLSGVPVILNDPLYLFTSWMPNNPRVVDVGDNHEALLLNDGQHGAAALDRVQAVASRELVVHSGACDHVRLLLEVELTVAKLLLVIDERRQRECLLLMEFVRGLK

SEQ ID NO: 77609 - protein, 351 aa, Zea mays
  Coding DNA Sequence Number=SeqID_35830
  Gene Ontology: Mol. function=RNA binding; Cellular component =ribonucleoprotein complex; Biological process=regulation of translation
  Homolog annotation: Hit_ID=Q9FYT6; Match level="QueryCoverage=72%, HitCoverage=49%, E-value=1e-126, Identity=70%"; Hit description=CRS1
  Pfam annotation: Domain name=CRS1_YhbY; Domain location=260-335; Score=69.5; E_value=1.1e-17; Accession=PF01985.11; Description=CRS1 YhbY domain
MDSGAAALDRVQATASRELVVHSSACDHVRLLLEVELTVAKLLLVIDERRQRECLLLMEFVRVLINNYGEADDAFQENDQSICGQKDEEPVKGFKTPYRLCPPGVRPTLADEELTYLRKLARLLPTHFALGEGKDFLPGGVAQTVIQREAQVHDEQVKEEEARLKAVDSLQMVGELSEESSLGTFREYQGFHAKFVHENTENSNTMIELEAEKYRLEKELKDHEWKLSVLNKKIERSNQALAKLHSSWSPSEQSADREHLTEEEKIMFRRIGRKMDGLVLLGRRGIFDGVIEEIHQHWKHKEVVKVITKQNQTRQIMYAASLLEVETEVCDKANQVSNPMIMKSLDSMVSK

SEQ ID NO: 77610 - protein, 234 aa, Zea mays
  Coding DNA Sequence Number=SeqID_35831
MGDIRRLSASSLEERNSVGVGTFQPSFGFKDFHQPARLYPPPAVTQDGRAEPELYLPRGFVGHPLLRRSRERALAGPAGGSDFNNAGPVDGRRRQPQRVGLVGLAPGAPSCWKVAAAPCAREDRPRCRALLGRRSCSGAVLPLHWYGASAGRSVPCSSGRIRVGIRRRADGPCRRCRGGGGSRSPRRRRDHRHHLRFGPPDLCTCPRPSSVGVGEGKVAAAFARRPSPLQFGHP

SEQ ID NO: 77611 - protein, 117 aa, Zea mays
  Coding DNA Sequence Number=SeqID_35832
MAERYQLPRSCVPPTMRRKDGGYPPSGGLEGGKTRCIREREDMVPGKGDTPKRILPREGTRLRASLLIRGSKAGPPKGSTAASDRVGPTPTTSQRFEGRPPEGFHGRLRLLGLRAHY

SEQ ID NO: 77612 - protein, 351 aa, Zea mays
  Coding DNA Sequence Number=SeqID_35833
  Subcellular localization annotation: CTP_CleavageSite=58; ConfidenceScore=5.17e-01
MAERNQLPRSCVPPTTRQKDGGPTGERGRQPCRRHATTPSGRASPTPDTPAWRPRPTRRATGAPDAARKQLHRHLRHHRASSIAEPIPRLEATQRATQQRQPDAAVNAAKSGPVVMTVAGAREQRSRRQPSSRPIRGQQENPLSRREDNAPVIRSSNGSRTRNGRPANYSPHRINSAAGQAALLAGAAGDASPSPKQPRQKRLRASLLIRGSKAGPPKGSTAASDRVGPTPTTGQRGSKAGPRRVHSRLRRRARDDQGEASSPRTPSPGDRVRQITRSSPETPCSAPIEGNMALSPLLLAERRRRGICKKAESVPDRPLALCRGSGAALANPAPAKPLTASTYQPENLGPD

SEQ ID NO: 77613 - protein, 105 aa, Zea mays
  Coding DNA Sequence Number=SeqID_35834
  Gene Ontology: Mol. function=RNA-directed DNA polymerase activity; Cellular component=chromatin; Biological process=RNA-dependent DNA replication
  Homolog annotation: Hit_ID=UPI00004C1730; Match level="QueryCoverage =79%, HitCoverage=16%, E-value=3e-31, Identity=70%"; Hit description =UPI00004C1730 related cluster
MDESGVVWQLVFCFQKKKKGDRETKFLGHTVSQEGIAVDPDKVQVVMDWKPPTTIRDRCFIPDFCRIAKPMTELLKKGVKFEWSQKCKDAFHSLMQHLTTAPVLA

SEQ ID NO: 77614 - protein, 175 aa, Zea mays
  Coding DNA Sequence Number=SeqID_35835
MARLGHAAQDRATVVHRRAYLRKPQGTWGTALLDFPSTIAHGSTVGPFKNHFSQKHLFFRKQNTICHTTPDSSIPVDTDYSNRFSNSAQRCTLYPLVRLCDLTAMRSDTESLSFLARPNLNGYTGRSQATAMSKPDKTFPLLIFPVLPSLHNPGVGPYEFRLSDCPHSLEWLYLS

SEQ ID NO: 77615 - protein, 82 aa, Zea mays
  Coding DNA Sequence Number=SeqID_35836
MKAGEHQEDKEGECFVRFGHGCGLTPSGITVKVRTCEERKRFGVGSHEKGDRVRVTHVPNLVCGCWIADLLRCVYRAASAPL

SEQ ID NO: 77616 - protein, 122 aa, Zea mays
  Coding DNA Sequence Number=SeqID_35837
MWAVTQSELVRSNPRVMKAGEHREDKEGECFVRFGHGGGLTPSGITVKVRTCEERKRFGIRFSQCLLGLVIVSHLSPKGLGRFTVPSVATAAVPLEQPIRWKPVPETEQLDTSSSCPSNQSE

SEQ ID NO: 77617 - protein, 107 aa, Zea mays
  Coding DNA Sequence Number=SeqID_35838
  Subcellular localization annotation: CTP_CleavageSite=51; ConfidenceScore=5.20e-01
MSSLKPVIGAFVLSRGGQINKSMPGSGARAPLPPSPDKHVTQSELVRSNPRVMKAEEHREDKEGECFVRFGHGGGLTPYGITVKVRTCGERKRFGFGFIDREIAEPD

SEQ ID NO: 77618 - protein, 217 aa, Zea mays
  Coding DNA Sequence Number=SeqID_35839
MTTNKELRDGAKIGGRKDGQDGAQIGATETKTGRRDAHHFSGRDGGLGQNRPWPGGMHSHHGRPSEQKTAAPEEQGEQGDPGWGKMEAGPTLQGQTRRTEGQAELGQTAMGGQGRAPGKRTRELGPGSGAGHKWRGSSEGAPGQRELTHAQASQEAGAPELGPGATATSEQSIWVRAIETSRGSREGSGRRREGAGDWHTAGRGSSHGENKGPGRKL

SEQ ID NO: 77619 - protein, 217 aa, Zea mays
  Coding DNA Sequence Number=SeqID_35840
MTTNKELRDGAKIGGRKDGQDGAQIDATETKTGRRDAHHFSGRDGGLGQNRPWPGGMHSHHGRPSEQKTAAPEEQGEQGDPGWGKMEAGPTLQGQTRRTEGQAELGQTTMGGQGRAPGKRTRELGPGSGAGHKWRGSSEGAPGQRELTHAQASQEAGAPELGPGATATSEQSIWVRAIETSRGSREGSGRRREGAGDWHTAGRGSSHGENKGPGRKL

SEQ ID NO: 77620 - protein, 300 aa, Zea mays
  Coding DNA Sequence Number=SeqID_35841
MADNLHGELSDGTGASREIEAELRIHSNQGTAAMAGTRGYGDERAEDMGARHRNKQGKQRRERAPQGRSWGLAHGWKRLRPWGKQGAGEEAVGELAEDPPPGAQLPWSGEPWPGAQEARRARTEPEGREGDALEKMGGRQAREEKATALSGEVATRHGVLWRGARPGVNTGRPWVLEQRRWEPEHLKQTPKVEDKAEALVDAGEMDTAAGEDKTRASRKKSRQTNLQRATRIEIGCGIFSLVKSPSTLRIRPREGAGKNAAGGDRGEEKPARATPGRQDARQKKILERERWKDEAEKKSS

SEQ ID NO: 77621 - protein, 250 aa, Zea mays
  Coding DNA Sequence Number=SeqID_35842
  Pfam annotation: Domain name=AP2; Domain location=143-196; Score =23.7; E_value=1.2e-06; Accession=PF00847.10; Description=AP2 domain
MAFEKYNEKSLVALHIKGVFGSMESLVMPCHTALRWERKINAATDGDADADADADGVVRAVAGGRDGGDRVRSHARRRQRPRAAAPGAGASHAVAPRGRQRRPAQAGGWGGGAGHDAGAGARSGGARAGSTGGRQGGAPWGEVGRRRSGDPAEGGRGVVAGAPFPTAEDAARAYDAAALRFRGGRAKLNFPEDAAARRARDAEAASAAARAGAARRAARLAGRRRRHGRLPRLFEDSRSHRAQRHRGRAL

SEQ ID NO: 77622 - protein, 202 aa, Zea mays
  Coding DNA Sequence Number=SeqID_35843
MTTSSPSPARKNGSTRETEAVKAEMVDPGPAEGGAGVAGHLPHRRGRRALLRRRRAKLNSPEDATAHRARDTEAGLRRGQGGAARRAARLAATEPSGIVDGLFSGHGNRRFLGSGFEMGSAAAGADEGWWGRARAGATEHIHAHRRWAAPLLVSVLLSSLLISASLSFSSSRALLISFSPLPSAASAEPLFVEAPRGAPCLG

SEQ ID NO: 77623 - protein, 244 aa, Zea mays
  Coding DNA Sequence Number=SeqID_35844
MDGSRGAAWPEKMIYPKMQSVGPDLYEEAPYPCGVQAILQAAGLSSPLPNSTPVLQGQTAPALPKAYRTPAPRETSARPHVPRIRRGSHPPPPPADLTLAHNHVPSHARWNAPPTTTVQHRPPHHPRHGAPRGASTKRGSAEAAEGSGEKEMSSAREEEKESDAEMRSDESRTDTSSGAAPPPVSVDVFRRPRPRPSPPPLIRAGRRRAHFKPGAEEASVPVATKEPVHDAAGLGGFENPRIVK

SEQ ID NO: 77624 - protein, 300 aa, Zea mays
  Coding DNA Sequence Number=SeqID_35845
  Gene Ontology: Mol. function=thymidylate kinase activity; Cellular component=cytosol; Biological process=dTTP biosynthetic process
  Homolog annotation: Hit_ID=Q0WW55; Match level="QueryCoverage=59%, HitCoverage=67%, E-value=1e-63, Identity=68%"; Hit description =Thymidylate kinase-like protein
  Pfam annotation: Domain name=Thymidylate_kin; Domain location=112 -288; Score=154.1; E_value=3.7e-43; Accession=PF02223.8; Description =Thymidylate kinase
MGLKEQESEAEVGVDECVTDQKILWEAERIRCPGLQSVRSGKLADAQLPAHEPCMIALVRLAGRAASRSRVGIAAAAAPPPVGLSVQRRRAFQGVRMETGGSKGGRGALVVLEGLDRSGKTSQCARLLSFLKGKGYNAEGWRFPDRATSVGQMISSYLANDSQLDDRTIHLLFSANRWEKRALMESKLLSGTTLIVDRYSYSGVAFSAAKGLDIEWCKAPENGLIAPDLVIYLDVQPEKAAERGGYGGERYEKIEFQKKVAEHYHSLRDSTWKEAYQSVSQPRPRSFVPDSSGNYTTLLL

SEQ ID NO: 77625 - protein, 137 aa, Zea mays
  Coding DNA Sequence Number=SeqID_35846
  Gene Ontology: Mol. function=thymidylate kinase activity; Cellular component=cytosol; Biological process=dTTP biosynthetic process
  Homolog annotation: Hit_ID=O81650; Match level="QueryCoverage=61%, HitCoverage=43%, E-value=4e-21, Identity=58%"; Hit description =Thymidylate kinase
MAIRVLKSALNAAEDGHAGLQELGGNATHIFYGTEEAKEGKNAALMESKLLSGTTLIVDRYSYSGVAFSAAKGLDIEWCKAPENGLIAPDLVIYLDVQPETGGSLGRRVKCRRVPQPRWVCARPSAKGGKKGSRRRA

SEQ ID NO: 77626 - protein, 448 aa, Zea mays
  Coding DNA Sequence Number=SeqID_35847
  Homolog annotation: Hit_ID=Q2L3S2; Match level="QueryCoverage=41%, HitCoverage=18%, E-value=4e-61, Identity=61%"; Hit description =Putative ATPase
  Pfam annotation: Domain name=Thymidylate_kin; Domain location=1-106; Score=-34.7; E_value=0.0064; Accession=PF02223.8; Description =Thymidylate kinase
MESKLLSGTTLIVDRYSYSGVAFSAAKGLDIEWCKAPENGLIAPDLVIYLDVQPEKAAERGGYGGERYEKIEFQKKVAEHYHSLCDSTWKLATRSDAFLASTLQDNGEGCRFDMLKSLDDCIHVLSCGYENKTQWGKETAPALPKAYRTPAPRETSARPHVPRIRRGSRPPADLALAHNRVPSHARWNAPPTTTAQHHPGHGAPRGASTKRGSAEAAEGSGEKEMSSAGEEEKESDAEMRSDESRTDSSGAAHRRPPREARSFCPFPTRPRFALLFAVAACLSTDEALGRAGAKTGNPSVYSDHLWASAFLVFGFKSEPPAVQLKAVDMILFIKNTTLPLAVDPFMSFSRCGLALELLKVCTNVLEEVEKSYTSRMQDWSRGSLCWRKKLQPNHRVDELVWQEVTLPKATLLETSAKLLLHGGLFDTGEELCRTCISIRTVMLGHGHA

SEQ ID NO: 77627 - protein, 54 aa, Zea mays
  Coding DNA Sequence Number=SeqID_35848
MSRLLDCRTSAATRGNPARDPTVSIECNDHGDRERGYLEEGSFPAKETGPEPSY

SEQ ID NO: 77628 - protein, 224 aa, Zea mays
  Coding DNA Sequence Number=SeqID_35849
  Homolog annotation: Hit_ID=Q6QP51; Match level="QueryCoverage=29%, HitCoverage=30%, E-value=3e-18, Identity=71%"; Hit description =Putative growth-regulating factor 1
MRDRERGYFERILLSEGNGPRALLLIRGSKVAPYGVRRSPQSTRAPSPLLIRGSKAGPSKGFDSRPRACRVRDDPGYVRYMAKARATLLRYPKTFLRPAGTVLLERASGPLADPYRTGLGRSLGLPNSNSLETPCSAPTEGNMACSPSSLRKGDEGAYNKKPRQSSIVLSLRAEARRMLSHQATAKLLTTSTKQLENSELVHAPGLRPGRMREQQGRPRNHKKN

SEQ ID NO: 77629 - protein, 130 aa, Zea mays
  Coding DNA Sequence Number=SeqID_35850
  Homolog annotation: Hit_ID=Q6QP51; Match level="QueryCoverage=70%, HitCoverage=34%, E-value=1e-09, Identity=46%"; Hit description =Putative growth-regulating factor 1
MARPHEGTTRPTEGSQEELRPQRSQTTPLRPQGLHPMASGVTGSSASPDPMPQLQPRPREKVSALPDPRPQPRPRPREKVSASPDPRPRPREESRPHPTSVSASGEVTASLDLGLGPTTLQGIHHYPTSS

SEQ ID NO: 77630 - protein, 335 aa, Zea mays
  Coding DNA Sequence Number=SeqID_35851
  Gene Ontology: Mol. function=pyridoxal phosphate binding; Biological process=metabolic process
  Homolog annotation: Hit_ID=Q6ZHE5; Match level="QueryCoverage=97%, HitCoverage=100%, E-value=1e-116, Identity=59%"; Hit description =Putative 1-aminocyclopropane-1-carboxylate deaminase
  Pfam annotation: Domain name=PALP; Domain location=29-298; Score= -110.4; E_value=0.096; Accession=PF00291.15; Description=Pyridoxal -phosphate dependent enzyme
  Subcellular localization annotation: CTP_CleavageSite=58; ConfidenceScore=5.19e-01
MAGVTATGMAGVPATFSSATAQIGGFLSKKPYAPPLWATHLSPMPCHTFSLGHRDDLSGMQLSGNKVRKLEFLMADAVAQGADCVITVGVDHVQLLVDKDPGLVGNLLVERLVGAHVDLVSKEEYGKIGSVALADLLKKRLLEEGRKPGYIEAIREIEQQIQQSSDVQFDDIVVACGSGGTIAGLALGSRLSSLNTKVHAFSVCDDPEYFYDYVQGLIDGLNSGFDSHDIVSMENAKGLGYAMNTAEELKFVKDIAASTGIVLDPVYSGKAVYGLLKDMAGNPAKWKGRKVLFIHTGGLLGLYDKADQLSSLAGSWRRMDLEDSVPRKDGTGKMF

SEQ ID NO: 77631 - protein, 164 aa, Zea mays
  Coding DNA Sequence Number=SeqID_35852
  Gene Ontology: Mol. function=pyridoxal phosphate binding; Biological process=metabolic process
  Homolog annotation: Hit_ID=Q6ZHE5; Match level="QueryCoverage=83%, HitCoverage=35%, E-value=7e-64, Identity=83%"; Hit description =Putative 1-aminocyclopropane-1-carboxylate deaminase
MEGGGGAAAAHAGWGRGTNVGVGVWTVHAFSVCDDPEYFYDYVQGLIDGLNSGLDSRDIVSIENAKGLGYAMNTAEELKFVKDIAASTGIVLDPVYSGKAVYGLLKDMAGNPAKWKGRKVLFIHTGGLLGLYDKADQLSSLAGSWRRMDLEDSVPRKDGTGKMF

SEQ ID NO: 77632 - protein, 162 aa, Zea mays
  Coding DNA Sequence Number=SeqID_35853
  Gene Ontology: Mol. function=pyridoxal phosphate binding; Biological process=metabolic process
  Homolog annotation: Hit_ID=Q6ZHE5; Match level="QueryCoverage=73%, HitCoverage=30%, E-value=1e-53, Identity=84%"; Hit description =Putative 1-aminocyclopropane-1-carboxylate deaminase
  Subcellular localization annotation: CTP_CleavageSite=25; ConfidenceScore=5.02e-01
MKRSSGTAGRNAGCSFRNRRSPNVVGAQPARRQGGGAEQWPRGLIDGLNSGLDSRDIVSIENAKGLGYAMNTAEELKFVKDIAASTGIVLDPVYSGKAVYGLLKDMAGNPAKWKGRKVLFIHTGGLLGLYDKADQLSSLVGSWRRMDLEDSVPRKDGTGKMF

SEQ ID NO: 77633 - protein, 181 aa, Zea mays
  Coding DNA Sequence Number=SeqID_35854
  Homolog annotation: Hit_ID=Q8L4C2; Match level="QueryCoverage=26%, HitCoverage=26%, E-value=1e-09, Identity=72%"; Hit description =Putative SnRK1-interacting protein 1
MSFDIPNQENEHLIGNLDETTNIQCPSPLQINKLFCNSLRLSYLSNPKSLPHCGIVCHNQDIVYSIVYKECLRTLYWLEQQVQECYELGCCDFADSEVVALTENIGKPLAEVLKELGKRVPDSLVKTRVEDDGFTIKYILRITRTRFSSCDFAFYYNFTCSTALTTQEEGSRVPCEDPRRG

SEQ ID NO: 77634 - protein, 302 aa, Zea mays
  Coding DNA Sequence Number=SeqID_35855
  Homolog annotation: Hit_ID=Q8L4C2; Match level="QueryCoverage=15%, HitCoverage=26%, E-value=1e-08, Identity=70%"; Hit description =Putative SnRK1-interacting protein 1
  Subcellular localization annotation: CTP_CleavageSite=56; ConfidenceScore=5.37e-01
MAGAADFASIPLGPLRAQPATCPRMADPPPPPPTSMRQHPILARSAMPSLGPFRARANHRSPACSTDPHPPQILPANQIPTPAAPRLGCSTSIPRPMRSESRSPAALLQNGTVSTRGHLSSLSLPLLHSGVQQVAGHDGALRDQGQDLLRRRDGSGALPPGVRRYAAAACLFARLLGATVGGGNVASLRSYLHINGIYLHAQVQECYELGCCDFADSEVVALTENIGKPLAEVLKELGKRVPDSLVKTHVEDDGFTIKYILRITRTRFSSCDFAFYYNFTCSTALTAQEEGSRLPCEDPRRG

SEQ ID NO: 77635 - protein, 302 aa, Zea mays
  Coding DNA Sequence Number=SeqID_35856
  Homolog annotation: Hit_ID=Q8L4C2; Match level="QueryCoverage=15%, HitCoverage=26%, E-value=1e-08, Identity=70%"; Hit description =Putative SnRK1-interacting protein 1
  Subcellular localization annotation: CTP_CleavageSite=56; ConfidenceScore=5.32e-01
MAGAADFASIPLGPLRAQPAACPRMADPPPPPPTSMRQHPILARSAMPSLGPFRARANHRSPACSTDPHPPQILPANQIPTPAAPRLGYSTSIPRPVRSESRSPAALLQNGTVSTRGHLSSLSLPLLHSGVQQVAGHDGALRDQGQDLLRRRDGSGALPPGVRRYAAAACLFARLLGATVGGGNVASLRSYLHINGIYLHAQVQECYELGCCDFADSEVVALTENIGKPLAEVLKELGKRVPDSLVKTHVEDDGFTIKYILRITRTRFSSCDFAFYYNFTCSTALTAQEEGSRLPCEDPRRG

SEQ ID NO: 77636 - protein, 120 aa, Zea mays
  Coding DNA Sequence Number=SeqID_35857
  Subcellular localization annotation: CTP_CleavageSite=64; ConfidenceScore=5.20e-01
MDGGCSGFCLHPAWPPPRTASRMPAHGGSASPFANEHAPAPDPRSLSHALARPPPRTRKPRSPACSTDPHPPQILPANQIPTPAAPRLGCSTSIPRPGFSKSLAMTVLSEIRDKTFFAVA

SEQ ID NO: 77637 - protein, 155 aa, Zea mays
  Coding DNA Sequence Number=SeqID_35858
  Subcellular localization annotation: CTP_CleavageSite=64; ConfidenceScore=5.15e-01
MDGGCSGFCLHPAWPPPRTASRMPAHGGSASPFANEHAPAPDPRSLSHALARPPPRTRKPRSPACSTDPHPPQILPANQIPTPAAPRLGCSTSIPRPGFSKSLAMTVLSEIRDKTFFAVATGRVHSHQVFGGMPSRRASLLGCWVRPWEVVMWHL

SEQ ID NO: 77638 - protein, 266 aa, Zea mays
  Coding DNA Sequence Number=SeqID_35859
  Homolog annotation: Hit_ID=Q7G6W2; Match level="QueryCoverage=13%, HitCoverage=8%, E-value=3e-08, Identity=66%"; Hit description =Putative serine carboxypeptidase
  Subcellular localization annotation: CTP_CleavageSite=56; ConfidenceScore=5.37e-01
MAGAADFASIPLGPLRAQPATCPRMADPPPPPPTSMRQHPILARSAMPSLGPFRARANHRSPACSTDPHPPQILPANQIPTPAAPRLGCSTSIPRPMRSESRSPAALLQNGTVSTRGHLSSLSLPLLHSGVQQVAGHDGALRDQGQDLLRRRDGSGALPPGVRRYAAAACLFARLLGATVGGGNVASLRSYLHIMPFTVANVRLIYVFSPEGESCMSEFHLGPVLSTLTMQEKKMTYPPTCPSTYHGLQSFTIEKLRDLIQDCVPI

SEQ ID NO: 77639 - protein, 173 aa, Zea mays
  Coding DNA Sequence Number=SeqID_35860
MHQRVPSNSYEPNAHFTRLKDHSSDDKVDDEPHGVNDDVVVSTTWRRMTTTAQRHEQKGLARAESERVDGEPDRDRSRLRLRESDRATSKLRELRAWPWKSRGWASSDQGDNAMELAGKPVQGATFGELRREEGSDGKYVEQGVLGEFHIELEEKDRGRSSAESKTPRRCAGE

SEQ ID NO: 77640 - protein, 148 aa, Zea mays
  Coding DNA Sequence Number=SeqID_35861
MTTTAQRHEQKGLARAESERVDGEPDRDSSRLRLRESDRATSKLRELRAWPWKSRGWASSDQGDNAMELAGKPVQGATFGELRREEGSDGKYVEQGVLGEFHIELEEKDRGRSSAESKTPRRCAGEVRGRRHDLLNAEENIQGRAVVG

SEQ ID NO: 77641 - protein, 145 aa, Zea mays
  Coding DNA Sequence Number=SeqID_35862
MELAGKPVHGATFGELRREEGSDGKYVEQGVLGEFHIELEEKDRGRSSAESKTPRRCAGEVEYLLYIVTLAQSIGVAQDFLLVTSAEMQEFVQLFSYLIHVFPNQVDDSSDMKKQMNNLTKWISTQMYDLLLANVNSQPLAYRGY

SEQ ID NO: 77642 - protein, 332 aa, Zea mays
  Coding DNA Sequence Number=SeqID_35863
  Homolog annotation: Hit_ID=Q2R3L0; Match level="QueryCoverage=81%, HitCoverage=67%, E-value=2e-25, Identity=29%"; Hit description =Expressed protein
MGCGASSHKDAGARRRRPGSVGDVVVFLPGLRVPRAVDFAQALGGCLARAIVERLSALRSRVVEMAMQESAAALKPRRKAAARHGSSTANLLQALEDYLPVLLGLAQQGSVLRHKVQFTWSNQEDNAELYVNSSAFQSQETAISDVWPTPCFSQGHTAMATPQEFLKCSCADKTTYFQCATESRRATVDVFLKAAGYLDCAIRHGVDMQLGLAIDSPKATLAVKRRLACEMVKYWQQVQESIPELPVSDGWGKKHRLFVKWKSPNAFGTAKYLFDKIPRDASSKVRIKQDLYTQEKVIGAPPPLPDFALALTPEDYDLPPLDPLWNKEDTHH

SEQ ID NO: 77643 - protein, 240 aa, Zea mays
  Coding DNA Sequence Number=SeqID_35864
  Homolog annotation: Hit_ID=Q2R3L0; Match level="QueryCoverage=25%, HitCoverage=14%, E-value=3e-09, Identity=53%"; Hit description =Expressed protein
  Subcellular localization annotation: CTP_CleavageSite=59; ConfidenceScore=5.51e-01
MASWLLLPFSSFSWPAPPPASSSSCHDSGSDGGGDNGYWRPTVVTAFVGSLMSYRCSVSLAVGASGAIFGLGVDMQLGLAIYSPKATLAVKRRLACEMVKYWQQVQESIPKLPVSDGWRKKHQLFVKWKYVEAKEDIRSVPNSVHHNNEIESDSPPHVCEIKSVKSNQEGYQSSDGRAFPKTRSERSNDQCVFAKSKYEESIDQWSEIPSNVESFREGKRYLSSEELSDVEGIAPISMTC

SEQ ID NO: 77644 - protein, 459 aa, Zea mays
  Coding DNA Sequence Number=SeqID_35865
MDQWSEIPSDVESFREGKRCLSSEELSDVDSANVVVMDKYMDSLLSDRRNLPYASSSVRRDSVRQKPASSANYSRRPPQPTPPASLSKKESWDVIEDSEFDILDNILLQILPPIIAKIFVSLPFSPLFHSSHNGNNVLHGELEQTGTMNMIIGFQRQIDMVSQRKELKDHRWPDLQDDMTHFRKKMAAILLSSDVNKRNGCLLYKYEKEVDMGSPSDVQILDSPTNSKKRKILCAPDDSEVLMEDDDGPITQADLERWFVHYWDKGTIKVLADECTNDFLMSGVSTKDMLMTKADRCSMRLHHDNPRRYDITRMVGFGKLPKYHEDRTTEELAKTLDCWPSMNYYITGCRYALMPWKFNECYALFVIDHGKKHMTFIDFTPTQDWCKHMPYKRLIPATSFYKLWSCGEMVGEWNLEFVRNAKILRRNFVVDLLSYKDNSCRYAIPANIQQRLINISTKE

SEQ ID NO: 77645 - protein, 95 aa, Zea mays
  Coding DNA Sequence Number=SeqID_35866
MQESLAGPPSQQNPPEGLPTLTTPLLPLPLSEHEWVKRSDQGHNLPGTSDSSLNKLWTGPHLNRNIGGSGGSLTKVPAKGYRGCSAVRSEPDGED

SEQ ID NO: 77646 - protein, 186 aa, Zea mays
  Coding DNA Sequence Number=SeqID_35867
MRLILWYLFLTCGGCETARVSSHTFIAQQVVGNNVHELAKGPPSQQNPPEGLPTLTTPLLPLPLSEHEWVKEVIKGTTCLGLEIPVGWTGRQLPERSGLLAKDVQGTGNMERDGGLVSTFYRGLSVNLTGRRGILQSRPHDPKRTPLPAKSTDHADHLPPTNRDGGAAPIPTQSSSGEVESVLPGC

SEQ ID NO: 77647 - protein, 76 aa, Zea mays
  Coding DNA Sequence Number=SeqID_35868
  Subcellular localization annotation: CTP_CleavageSite=18; ConfidenceScore=5.28e-01
MPQPAAFVSVQPSDGQPTPSNVSNKNMKHGGEVLFLDGTGEVAVTISRNSQQPLSTVPAPGGQLVQHAAHPRATGL

SEQ ID NO: 77648 - protein, 142 aa, Zea mays
  Coding DNA Sequence Number=SeqID_35869
MDTDNEIQVLRDQLAEKSSDSLCLLKELGILGRTGCRDCGERLLRVATDGDGDLPGAIQEQHLATVLHILVRDVARRGFTIGRLHGDKSSGLGHPKRLQILKFLTTNLSLVLNWGGTGWSCNGRTLNLTTSLLLLIFTEPPP

SEQ ID NO: 77649 - protein, 267 aa, Zea mays
  Coding DNA Sequence Number=SeqID_35870
  Gene Ontology: Mol. function=protein domain specific binding; Cellular component=nucleus; Biological process=intracellular signaling cascade
  Homolog annotation: Hit_ID=Q84J55; Match level="QueryCoverage=62%, HitCoverage=61%, E-value=4e-76, Identity=87%"; Hit description=14-3 -3-like protein GF14-A
  Pfam annotation: Domain name=14-3-3; Domain location=9-239; Score =242.2; E_value=1.1e-69; Accession=PF00244.10; Description=14-3-3 protein
  Subcellular localization annotation: CTP_CleavageSite=49; ConfidenceScore=5.07e-01
MGLLMGSNGNPTVGMGNPLGTRNPHGYGFGQNFIPVMGMGFLAGVFFLRGYEFGQVIPSGFYPLPSLDTLVLNEWPHEGCRARVEAELSGICAGILRLLDERLVPAAATVDARVFYLKMKGDYHRYLAEFKTGAKRKDAADSTLAAYQAAQDIAVKELPPTHPFRLGLALNFFVFYYEILNSPDRACSLVKHVPLLLAFDEAISELDGLGEESYKDSTLIMQLLRDNLTLWTSDMQEDGGDEMRDQYKIIYYIQFVLIYSTFKVEMK

SEQ ID NO: 77650 - protein, 81 aa, Zea mays
  Coding DNA Sequence Number=SeqID_35871
MWCSGRDGNGYPLPETWRVFALLGYGFGSISLPMGLLMGSNRNPTVGMGNPLGTRNPHGYEFGQNFIPIMARRRLYEGMRM

SEQ ID NO: 77651 - protein, 124 aa, Zea mays
  Coding DNA Sequence Number=SeqID_35872
MGREIDPNPYPNRAKTHQVSGSGYPLPSLALAAEVIGGSCSGQTTARLTRSTCSGGVPNSGEHDCAIPVARVLGSSSCKLHGLQGELSKGLDRADEGGKGFGHGGCPRAALASRGEVAGAMGEL

SEQ ID NO: 77652 - protein, 301 aa, Zea mays
  Coding DNA Sequence Number=SeqID_35873
  Subcellular localization annotation: CTP_CleavageSite=72; ConfidenceScore=5.44e-01
MDTVGLQPPELQPWLPVFGFGRAPTPFPRPVTAAASALSRLLLFPGAFLLQPCRALSLLVAPWPHRAPPRVVASELDPKLLCVLSCLPVEVPPSTLCLVAQLGLCSVPAAARALIGVPQVARPEFSCARRFSQLGFRQPPLSYPRQHVIVVVFIEFANALLSIRPSSLLCASLRVRRVSFVIPSTRACLWLVLTLARLLVVTTAHSLFVHRASRVLAFVVELLNLSSLTCDFVVARARANLLDPTSPARSKLDLVVVPYVIKKSYGSGEDEASSMIFTKCSTKSSNKSSIVILVYAKIRED

SEQ ID NO: 77653 - protein, 156 aa, Zea mays
  Coding DNA Sequence Number=SeqID_35874
MAATPAAGDLQCPWTRAGIRRSGRRAEARSERMGAPGRAAHRPERERRARLGKAGGAPGSFTASGRQGTAAMEVGAGRGARRGGRWSREGTGASTATMEEKRAQGDEGGRGARPERGAPRWRDSASAGDDGAEDAARKKIGERNVDEWEAGELRGE

SEQ ID NO: 77654 - protein, 217 aa, Zea mays
  Coding DNA Sequence Number=SeqID_35875
  Subcellular localization annotation: CTP_CleavageSite=69; ConfidenceScore=5.50e-01
MAGAGTRRGRAAAGRGRSQQPSPARKGVGARPKPNTGSHGCNSGGWRPTVSMDASRDPAKWKTSRGAVRAHGSSRTCGTQTRERKKGAAWESRRRARELHSERTPGNRSHGGGRRQRSAARREMEQGGHWRVHGDHGREACAGRRGRERSSTRERGATMEGLGQRWGRRSRGRGQEEDRGEERRRMGSRGIARRISPGRLKNMGRRAAGKKNLKRGG

SEQ ID NO: 77655 - protein, 188 aa, Zea mays
  Coding DNA Sequence Number=SeqID_35876
MTKNTRDTRFIPRFGHTTKVPYFLVEAPTKSRVSFNPNPPFADHKAQMKKNKRDLEMKHKNRSSQAHSKIPLQRFEMGEARDVCEGEGGVSWVRNGVQIVLTTLGRELNRPGGRLNRFWPLLTSWLVSWVVDWGSRGDRGERPGELALRTGSTGLDQIVCEIKPPLNCPEASSAGVWSKRFTAEVEFS

SEQ ID NO: 77656 - protein, 126 aa, Zea mays
  Coding DNA Sequence Number=SeqID_35877
MTKNTRDTRFIPRFGHTTKVPYFLVEAPTKSRVSFNPNPPFADHKARMKKNKRDLEMKHKNRSSQAHSKIPLQRFEMGEARDVCEGEGGVSWVRNGVQIVLTTLGREVRQTVCQSDCQTDLQTGQG

SEQ ID NO: 77657 - protein, 126 aa, Zea mays
  Coding DNA Sequence Number=SeqID_35878
MTKNTRDTRFIPRFGHTTKVPYFLVEAPTKSRVSFNPNPPFADHKAQMKKNKRDLEMKHKNRSSQAHSKIPLQRFEMGEARDVCEGEGGVSWVRNGVQIVLTTLGREVRQTVCQSDCQTDLQTGQG

SEQ ID NO: 77658 - protein, 112 aa, Zea mays
  Coding DNA Sequence Number=SeqID_35879
MGSSSLRAEWESRLVGGYEIDDSGYDYGAGKWYSFRWKGYIGLITWVNAKTWLSTTSPLQPNRILAEYVDVYSPLLYTPNPPSPGCQHCNHCSGEDEAVEGDFQEFQDYDEF

SEQ ID NO: 77659 - protein, 95 aa, Zea mays
  Coding DNA Sequence Number=SeqID_35880
MRSIGFGYDYGAGKWYSFRLEGYIGLITWVNAKIWLSTTSPLQPNRILAEYVDVYSPLLYTPNPPSPGCQHCNHCSGEDEAVEGDFQEFQDYDEF

SEQ ID NO: 77660 - protein, 272 aa, Zea mays
  Coding DNA Sequence Number=SeqID_35881
MVLVSGILSVWKGYIGLITWVNAKTWLSTTSPLQPNRMLAEYVDVYSPLLYTPNPPHPQVVSIATTAQEKMKLWKETSRSSKITTSSRCGLAATPSRLPVKAAMARLRHTARKSVIPFLPSRLAERPLRRPVAGQSSHLERLHHRLREEQERQRQEQQGSSFSLHQEIESVRSCSPVLPLEPPPAPPLGAPASGVAAGGDPDDGGGDDSSSHDTDFSANPEPEGWVARPITRDAARGCHFHDALDTLLRRAFNRHTWSVEYRCVVYQHSRGV

SEQ ID NO: 77661 - protein, 332 aa, Zea mays
  Coding DNA Sequence Number=SeqID_35882
  Homolog annotation: Hit_ID=Q5MD07; Match level="QueryCoverage=9%, HitCoverage=5%, E-value=1e-12, Identity=93%"; Hit description =Glutamine synthetase
MCQDKVSGDPRIEYSCDTVGWRGDLAKVASLRSLPELGLGRVEGSAACADGDYQPRLGILGPTPPPNPNYSGAAPRRADLPRSAPAAARRGGCAVVALTLSRAGPRGSLRAAGPVHGVEARASRRVQAEGQNCSGDDTEARGRGFTSEAVNGSGGALRAAAAYMEAGAPPLIWMILDLVLTYDRIQPDTWSGAYLCWGKENREAPLRTACPPGSANSFERKRPGKGTLGQAFGVLVHSSRALPEPEAATPGDIIILDLSTCSLDCLVRVKVIRMIGETTEAVGAGVGGGSSGNKMPTLEEYGTNLTKLAEEPQIECVIPHIHKSLINKSSKE

SEQ ID NO: 77662 - protein, 147 aa, Zea mays
  Coding DNA Sequence Number=SeqID_35883
  Gene Ontology: Mol. function=nucleoside-triphosphatase activity; Cellular component=chloroplast; Biological process=nucleotide -excision repair
  Homolog annotation: Hit_ID=Q2QVG9; Match level="QueryCoverage=64%, HitCoverage=10%, E-value=1e-25, Identity=65%"; Hit description=ATP -dependent Clp protease ATP-binding subunit clpA CD4B,chloroplast, putative, expressed
  Pfam annotation: Domain name=Clp_N; Domain location=36-81; Score =51.9; E_value=2.2e-12; Accession=PF02861.11; Description=Clp amino terminal domain
MWEHLQRPSPTPVMTFSFYAVPEKKDLSQALNTCFARHNYIGSEHLLLGLLREGEGVVARVLESLGADPSNIRTQVIRMIGETTEAVGAGVGGGSSGNKMPTLEEYGTNLTKLAKEGKLDPVVGRQPQIERVIPHIHKSLINKSSKE

SEQ ID NO: 77663 - protein, 72 aa, Zea mays
  Coding DNA Sequence Number=SeqID_35884
  Homolog annotation: Hit_ID=Q2QVG9; Match level="QueryCoverage=79%, HitCoverage=6%, E-value=5e-13, Identity=67%"; Hit description=ATP -dependent Clp protease ATP-binding subunit clpA CD4B,chloroplast, putative, expressed
VIRMIGETTEAVGAGVGGGSSGNKMPTLEEYGTNLTKLAKEGKLDPVVGRQPQIERVIPHIHKSLINKSSKE

SEQ ID NO: 77664 - protein, 301 aa, Zea mays
  Coding DNA Sequence Number=SeqID_35885
MTDTGLILGQPSSHLLFTIFFSLTLSFSLLFPLEDSIKEYYYHTLEETKDYEPCATVFNPRITKHCDLRGEGVENGVACDLAKGILSGVWFALSEMGVEGAGGRGILLASGMQGCGVVVMEQVLRGSKRDGGEGGLVLATMVAVGALQRGVVGGSALQRGCGAVVVRMEAGTRAGARLVPGFKGKLPGIFLGKALFSSDGLRCEWKHKIRPVTQRRPRRARYNGPDHTWASELNEAALRDGVAAGLRLVPNGAKGVPARFVSVRPATAAKASSEGWRLCLCPNICPPRDQFDKVTWCRRRR

SEQ ID NO: 77665 - protein, 160 aa, Zea mays
  Coding DNA Sequence Number=SeqID_35886
  Subcellular localization annotation: CTP_CleavageSite=85; ConfidenceScore=5.56e-01
MRRRLSQNQPCVSHLSAAWSSSNSRRRPHNTLVMRYFKEFKSPRFRRSTLIHFKWGSVPIRFLSWRKRRRPIASLWRTRSPKLISFWMRSGHTSFIDEAPEDQSRKESMWEFARESYRSVRAVSWRPDLQVYARRWSQKPVPRAPLPPSPNKHGKLTGSL

SEQ ID NO: 77666 - protein, 61 aa, Zea mays
  Coding DNA Sequence Number=SeqID_35887
MSKPDKTFPLLILPVLPSLHNPEVIYASKGSSELAVLIRRRGKGSSRNWVLAPSPSVDLRI

SEQ ID NO: 77667 - protein, 266 aa, Zea mays
  Coding DNA Sequence Number=SeqID_35888
  Subcellular localization annotation: CTP_CleavageSite=43; ConfidenceScore=5.09e-01
MWRIPDVRYPGSGSGSRGGEKSGAAVVPSLATSIQVGEGGSRRCSSAASPKLGSKRPCSSGSGGGLLSVAGGKEVGADDSKIQGAGGSVGVRRRRTAIAKKLRRSTAPTKEAGEKRKRISTPPSSSSSIRSGGPDPKKKSFVDIGLETMDSENAKLRRALAHLIRVVEQRCADIVDVVHGAFQPVSGPVLNEMNRALVQIEDLAKDLDHLALEKDWEMEHMAPSPIASSSETEDELLLDYDSELNPDDIVGYDDGRDYSTDDTYPY

SEQ ID NO: 77668 - protein, 139 aa, Zea mays
  Coding DNA Sequence Number=SeqID_35889
  Subcellular localization annotation: CTP_CleavageSite=43; ConfidenceScore=5.09e-01
MWRIPDVRYPGSGSGSRGGEKSGAAVVPSLATSIQVGEGGSRRCSSAASPKLGSKRPCSSGSGGGLLSVAGGKEVGADDSKIQGAGGSVGVRRRRTAIAKKLRRSTAPTKEAGEKRKRISTPPSSSSSIRSGGPDPKKK

SEQ ID NO: 77669 - protein, 263 aa, Zea mays
  Coding DNA Sequence Number=SeqID_35890
  Subcellular localization annotation: CTP_CleavageSite=40; ConfidenceScore=5.18e-01
IPDVRYPGSGSGSRGGEKSGAAVVPSLATSIQVGEGGSRRCSSAASPKLGSKRPCSSGSGGGLLSVAGGKEVGADDSKIQGAGGSVGVRRRRTAIAKKLRRSTAPTKEAGEKRKRISTPPSSSSSIRSGGPDPKKKSFVDIGLETMDSENAKLRRALAHLIRVVEQRCADIVDVVHGAFQPVSGPVLNEMNRALVQIEDLAKDLDHLALEKDWEMEHMAPSPIASSSETEDELLLDYDSELNPDDIVGYDDGRDYSTDDTYPY

SEQ ID NO: 77670 - protein, 223 aa, Zea mays
  Coding DNA Sequence Number=SeqID_35891
MKNLQGSGGFPRVREGHEHTPGSRRGAQTVPQPQIEATDRARRSPSSEAKTRAEPLGSGEAELPMAPEAGLGCCQPHSVEWHSSRSDAGGAVFLSGDPCIKCSYDTNGWRGDLAKVASRRRLGLGRAEGGLSLDLIAPIRPLQLCADGGYQLRLGVLGSSPKFSGWYVDAVNGSARAGRRGESAMLPSEGAEHGVSSELLTGLDASLWWDSVTKSFPSVLEMS

SEQ ID NO: 77671 - protein, 111 aa, Zea mays
  Coding DNA Sequence Number=SeqID_35892
MGKEVIKGTTCLALEIPEIWKVQGPQRKIPQTQSTVTLDCGLISNIYGRMSGWDGHGEGRYGGGGHIPMKNLQGSGGFPRVREGHEHTPGSRHGAQTVPQPQIEATEFASR

SEQ ID NO: 77672 - protein, 111 aa, Zea mays
  Coding DNA Sequence Number=SeqID_35893
MGKEVIKGTTCLALEIPEIWKVQGPQRKIPQTQSTVTLDCGLISNIYGRMSGWDGHGEGRYGGGGHIPKKNLQGSGGFPYVREGHEHTPGSRRGAQTVPQPQIEATEFASR

SEQ ID NO: 77673 - protein, 210 aa, Zea mays
  Coding DNA Sequence Number=SeqID_35894
MAMSTSGSHRAAKRSFGMHTSDAGMRWILRVTYLGAIDLGAESLWKFRKGPLTGTAFDPLPLPSGVPVPMCFCGDPCKIDKSEDHETYRQRYWMCANFAFEPTIVQRRMNLMTPPPLCDFEQWIDTEISEKDKKWLDNLKKWDAEDKERIEKRREELAAEQQREDEQKMRRVAECREEKEKKLERAHRAKEAMKDNPDAFRKGKWPRCTQ

SEQ ID NO: 77674 - protein, 119 aa, Zea mays
  Coding DNA Sequence Number=SeqID_35895
MPIFTSKKDNLQQKDTKGRPSNGLSSKIHLKWIDTEISEKDKKWLDNLKKWDAEDKERIEKRREELAAEQQREDEQKMRRVAECREEKEKKLERARRAKEAMKDNPDAFRKGKWPRCTQ

SEQ ID NO: 77675 - protein, 96 aa, Zea mays
  Coding DNA Sequence Number=SeqID_35896
MELMQKPSSKISSTYIKKVNKKDATPYLIKKKKNGKVTAIKANKQANKGKGAKRIWVPKEIISTMKSTKKKSYFRKFGLWSLFRGYRFRINDPRFF

SEQ ID NO: 77676 - protein, 189 aa, Zea mays
  Coding DNA Sequence Number=SeqID_35897
  Subcellular localization annotation: CTP_CleavageSite=45; ConfidenceScore=5.15e-01
MVTGQSAVGIGAAVGMAIGGPTVITATGAQKQQSNRQSDSGPTCRLASSPEAGPGATVGTLNQGYPLLQHEYAAPMRRLLATRGTAPDPTAWAGQRVPRGKKRQHIPVSPDPLRRTPDPYTYKSGASGYVRTSAGFRNEEDPGMSRGPVLTRVRALPSTSRSDGDPLLVAHDISYRAEPDVKSCSPCIY

SEQ ID NO: 77677 - protein, 277 aa, Zea mays
  Coding DNA Sequence Number=SeqID_35898
MKERVTAGQLHAPSSGIRVKAVFSGDFIAGERVLVVVPSVLFSSCCCWRGATPWELSSFRHHSASRIFITQPGRNLQLVVIHKDDYQPCGGEKRAGLRPPSCPQHQGCSSSALGRRASRVCGLAVRFFLQHSGEKAFASLAEEANSGCVGPAVCGAISCRVSSSPAWVALVPPPALPPAAGVERGCPSTARATVAPCAGRPHPRLLPRHRPHREVPLPIGVEVVAATGGADVVASAGEASYRREDEYSALLGTGAARLHVRFGPIAYVMGHKQRVSA

SEQ ID NO: 77678 - protein, 283 aa, Zea mays
  Coding DNA Sequence Number=SeqID_35899
MVKGCQLPWGCTPPTAARRKQDRRHHHERALPGGEVARKDGLDADPSKEHRRTPSGGPEGVKARWSQEERGMSTAREIDPFLKADPPTRAPEASQARILALRRAPGATVGTLNQEEGMPGPSGKPQVPQSRDRALAGLRDLEDPGSNKGLVPTRVHLSSRGFLPRRSPAAAAWPEARDISRWAEPDVRPMQPFDLSIYYGRDTLPATTLVTPQCHLGFSLKMPNQEPSFYVNQSRTPRRRRAPPPAHVDRPTPAIPDGDPHTVVIPRDLPYVLDHFTGAISPP

SEQ ID NO: 77679 - protein, 346 aa, Zea mays
  Coding DNA Sequence Number=SeqID_35900
  Gene Ontology: Mol. function=kinase activity; Biological process =protein amino acid phosphorylation
  Homolog annotation: Hit_ID=Q5Z824; Match level="QueryCoverage=99%, HitCoverage=100%, E-value=1e-125, Identity=65%"; Hit description=3 -phosphoinositide-dependent protein kinase-1-like
MGTSAQESPLWKRIDDAEYYLVSGSFDQAVLTALSVADEIHMASLESASDQDELLEMLESAGMVLVQALKELRRASEMFAQLKMMFGSVPSVPARVFLTGATIQMAEGSISDLRPIFEEYLANWRYTDDEVYVFDGGNDSTSNGFVVKSIMSTGQYFEVAELYTVTFLCIVSQDSETAISWAEKAHLTEQSRQDLLKKLHAVQLAANKKLSTVEGVKQTAERNLSTSTNDSTPSPHEDPPKIVPACDGLKKVLLKSAQQAQHVANHFDPFFWWFHSIRLKFGKIHIVLPSAMYVLRRKTAGLKRAVFQQAASLRRAFFDALQLAFSVQMNPLAAVQQVPQAPRGSW

SEQ ID NO: 77680 - protein, 473 aa, Zea mays
  Coding DNA Sequence Number=SeqID_35901
  Gene Ontology: Mol. function=kinase activity; Biological process =protein amino acid phosphorylation
  Homolog annotation: Hit_ID=Q5Z824; Match level="QueryCoverage=71%, HitCoverage=97%, E-value=1e-115, Identity=63%"; Hit description=3 -phosphoinositide-dependent protein kinase-1-like
  Subcellular localization annotation: CTP_CleavageSite=60; ConfidenceScore=5.59e-01
MTFISEFSHRSAVTSFPSSSHPSRPPPPGSRRRQFLGPDRDTPAILHQVPRPSPIKEIPDSSYLVSGSFDQAVLTALSVADEIHMASLESASDQDELLEMLESAGMVLVQALKELRRASEMFAQLKMMFGSVPSVPARVFLTGATIQMAEGSISDLRPIFEEYLANWRYTDDEVYVFDGGNDSTSNGFVVKSIMSTGQYFEVAELYTVTFLCIVSQDSETAISWAEKAHLTEQSRQDLLKKLHAVQLAANKKLSTVEGVKQTAERNLSTSTNDSTPSPHEDPPKIVPACDGLKKVLLKSAQQAQHVANHFDPFFWWFHSIRLKFGKIHIVLPSAMYVLRRKTAGLKRAVFQQAASLRRAFFDALQLAFSVQMNPLAAVQQVPQAPRGSCVGADVSPYSSDTSLDTDPRNSYCTSTGTFHSMLAPSFSPLSDVPFVFSAFALFFLPNLLPPAHSRSREPTDARRRGYGASRSCS

SEQ ID NO: 77681 - protein, 105 aa, Zea mays
  Coding DNA Sequence Number=SeqID_35902
MVAAASQPMLFDVGTGRVGLAPDLSSCVPPRKTRWRLPRLGYVGDEESSGIIYMSRPDAHVFVVSFSGKEQIEMEMEYLTKIRLPLHSIGIIYPSPSLHITLKLV

SEQ ID NO: 77682 - protein, 230 aa, Zea mays
  Coding DNA Sequence Number=SeqID_35903
MRLRDFRGHTSRSARWLMSRATSHAAAAGLLLSGERRARPRHMPTPYPYSCRGSPRPGALPWSGPYLKGPEAHPRDSTCLLGSSGLYTQGSGVPLWRFGSNDASWGVLSFLATWCPLTCPCGGVGCRSPCGQETSYVYNVFILLKRVPLIHGTDSGPGPASGEDASLQVGPESDWRFARCSCAPVDAFTVGLPMAVPTATLIPTVDWPVTFVLNVTVGPCVGCLGSLHWF

SEQ ID NO: 77683 - protein, 72 aa, Zea mays
  Coding DNA Sequence Number=SeqID_35904
MGPRPTCHATGAPVTGCGKIAPPLAPMPRLLGAVTEDWKDKFLEPVQRLEASHAWPNSDIKYEGAQEQQANR

SEQ ID NO: 77684 - protein, 103 aa, Zea mays
  Coding DNA Sequence Number=SeqID_35905
MAEERQPPWGCAPLTAASRRQDRHHNHERELSGAVRKMNRHARSIQPPRSCAPPQLRCNWQSGMGAQAHMSCSRRAGYRVQKNRTATRDNATSSRGRHGRLKR

SEQ ID NO: 77685 - protein, 83 aa, Zea mays
  Coding DNA Sequence Number=SeqID_35906
MNVCELTLAVSHTPQVKTRTPVIYKDVTFDPVPLYIICVRLGPSIPGVYVSARIYLNQDTNTKKINLIKERIRVIVNEGDRQG

SEQ ID NO: 77686 - protein, 70 aa, Zea mays
  Coding DNA Sequence Number=SeqID_35907
MAECAANPGARCVDPSLFPGRYKTADLRCARAAVSVVWFLIYLNQDTNTKKINLIKERIRVTVKEGHRQG

SEQ ID NO: 77687 - protein, 39 aa, Zea mays
  Coding DNA Sequence Number=SeqID_35908
MAIYLNQDTNTKKINLIKERIRVTVKEATHGNEENFWEH

SEQ ID NO: 77688 - protein, 45 aa, Zea mays
  Coding DNA Sequence Number=SeqID_35909
MELVIAEPDGHTGVQDVVTKLAGDAAHGDRDVGCQDDVTKVVCGA

SEQ ID NO: 77689 - protein, 200 aa, Zea mays
  Coding DNA Sequence Number=SeqID_35910
MAAPSGVAHGDGDAINEDDVAKFGVVHRDGHAGVQGVVTKLAGDAAHGDRDTGCQDGVTKVMELPLDAQSSGRRLDVDERVEQCRAVVGVLHVLARFVLVLQMQHLRAAASGGSSFPLGAAPFPVASATTGHIPAAAARAPHHRPLGLTFPAHSAGATAALLPRPDLLQPRFPIALGHRDSLRSDARDVEGNLGARGGRL

SEQ ID NO: 77690 - protein, 338 aa, Zea mays
  Coding DNA Sequence Number=SeqID_35911
  Gene Ontology: Cellular component=membrane
  Homolog annotation: Hit_ID=Q75KS0; Match level="QueryCoverage=47%, HitCoverage=69%, E-value=1e-75, Identity=86%"; Hit description =Expressed protein,3'-partial
  Pfam annotation: Domain name=IQ; Domain location=71-91; Score=28.5; E_ value=2.3e-05; Accession=PF00612.17; Description=IQ calmodulin -binding motif
MASPSPWATPPGAATAQQSSAPSMGDLWTNIKADLAKMQATLQKVEQGLLQIKAAVQHEQHQLALSARLRTSAAVGIQAAARGFLARRRVREMRRQMLEAALVTVDLGTRGCDLALSDGHQQWHRAAISKCEYGLQSSTYYTSVADKKLHPVDRRDCWGRNVLESSCMPMLYTPRRYRSLGFRSFALPIPLKEIPLVKNTSLALTRSCDALLANPATSLVVPAIGIIVFALWGFLPLMRDIRNRFDHGGNWKKSPTYLISSSYLQPLLLWTGATLICRGLDPVVLPSAASQAVKTRLITFVRSLSTVLAVAYILTRCTCYILRKTAVVFCNDNIYAVK

SEQ ID NO: 77691 - protein, 93 aa, Zea mays
  Coding DNA Sequence Number=SeqID_35912
MRKPVPSLLMLLLSRGGVPLDSPTRWQDYNGSSSLISCEKQTIRIEFLSLQVTALVPTITGMGDHVSGRMRGKVCGQVHSGFNNIMLKEEKLS

SEQ ID NO: 77692 - protein, 122 aa, Zea mays
  Coding DNA Sequence Number=SeqID_35913
MSKVDALPKPRQDPTRLSNPVARWTAKSLQQSCPPESLKNYATSKAEYTNTQLDLPGYNGSSSLISCEKQTIRIEFLSLQVTALVPTITGMGDHVSGRVRRAICGQVHSGFNNIMLKEEKLS

SEQ ID NO: 77693 - protein, 85 aa, Zea mays
  Coding DNA Sequence Number=SeqID_35914
MYNGSSSLISCEKQTIRIEFYPCKIRAHRLGVQCLTDPDCRRAVTALVPTITGMGDHVSGRVRGKVCGQVHSGFNNIMLKEEKLS

SEQ ID NO: 77694 - protein, 103 aa, Zea mays
  Coding DNA Sequence Number=SeqID_35915
MGKPVPSLLMLLLSRGRVPLDSPTRWQDGRPTHSSNHVLQRTCKNYATSKAEYTNTQLDLLVTALVPTITGMGDHVSGRVRGKVCGQVHSGFNNIMLKEEKPS

SEQ ID NO: 77695 - protein, 153 aa, Zea mays
  Coding DNA Sequence Number=SeqID_35916
MGKPVPSLLMLLLSRGRVPLDSPTRWQDGRPSHSSNHVLQRTCKNYATRKAEYTNTQLDLPGYNGSSSLISCEKQTIRIEFLSLQVTALVPTITGMGDHVSGRVRGYVCGQVHSGFNNIMLKEEKTKLMSNLGFLGHTWLLVVYEYHSRFTFY

SEQ ID NO: 77696 - protein, 49 aa, Zea mays
  Coding DNA Sequence Number=SeqID_35917
MGKPVPSLLMLLLSRGFNNIMLKEEKLSLMSNLGFLGHTWLLVVYAYHF

SEQ ID NO: 77697 - protein, 181 aa, Zea mays
  Coding DNA Sequence Number=SeqID_35918
  Subcellular localization annotation: CTP_CleavageSite=68; ConfidenceScore=5.22e-01
MWAPMHTGNTSSQSTMIPASQSAMYWNHYLNFVRNPLGPPEVNPFPDCIPPSNTSTPLQGSNTIPSIPVNLDSDAEHSVQDINSPEKNAPPIQKPKKAKEQNFTGPEDLLLCTTWLQISSDPVVHTGQRREGLWARIEKGTIGSIPLKDPNFRYIPWTPHVIDSCGPTWLTGKRPRGRDFQ

SEQ ID NO: 77698 - protein, 149 aa, Zea mays
  Coding DNA Sequence Number=SeqID_35919
  Gene Ontology: Mol. function=diacylglycerol kinase activity; Cellular component=membrane fraction; Biological process=protein kinase C activation
  Homolog annotation: Hit_ID=Q4RLF1; Match level="QueryCoverage=68%, HitCoverage=33%, E-value=1e-20, Identity=50%"; Hit description =Chromosome undetermined SCAF15021, whole genome shotgun sequence
  Pfam annotation: Domain name=DAGK_cat; Domain location=4-103; Score= -8.1; E_value=0.0063; Accession=PF00781.14; Description =Diacylglycerol kinase catalytic domai
MAERLALPTAYEAIIIAHQNLQNPKIQKLIEPISRRASRPVVVNGLLQREDWETAITVPLGIIPAGTGNGMARSLLHAAGEPFSISNVVFAIIRGHKRALDVTSVVQGKARFFSVLMLTWGLVADVDIESEKYRWMGSARLDFYVYSLH

SEQ ID NO: 77699 - protein, 247 aa, Zea mays
  Coding DNA Sequence Number=SeqID_35920
  Gene Ontology: Mol. function=diacylglycerol kinase activity; Cellular component=membrane fraction; Biological process=protein kinase C activation
  Homolog annotation: Hit_ID=UPI00004BB1E6; Match level="QueryCoverage =57%, HitCoverage=32%, E-value=2e-28, Identity=38%"; Hit description =Sphingosine kinase 2 (EC 2.7.1.-) (SK 2) (SPK 2).
  Pfam annotation: Domain name=DAGK_cat; Domain location=33-153; Score =97.3; E_value=4.7e-26; Accession=PF00781.14; Description =Diacylglycerol kinase catalytic domai
TIGSIPLKDPNFRYIPWTSHVIDSCGPTCRPKKLFIIVNPYGGKRSGRSIFQNEVLPLIEASGVLYTMQETKHRLHAQEIARSLDLRKYDGIICVSGDGVMVEVVNGLLQREDWETAIKVPLGIVPAGHKRALDVTSVVQGNTRFFSVLMLTWGLVADVDIESEKYRWMGSARLEFYLLLRMLNLRRYNGRILFVPAPGYEEVGDPVEQTTGHETNGVSGATDKNGETCGFHPSIKEADLRWRTNQA

SEQ ID NO: 77700 - protein, 98 aa, Zea mays
  Coding DNA Sequence Number=SeqID_35921
MKCLIFWNSTLNRILDETLIVTKYITLGSFSVDLIDDVLRHLKVILRIRPLFGRRLYTVLLAAPVFGKVEPRGLSRREAAGIGIRAAVGCRVSKQSDA

SEQ ID NO: 77701 - protein, 76 aa, Zea mays
  Coding DNA Sequence Number=SeqID_35922
MSGEYSGAADAIYRSWRVPEDALPWSTGHCPVYTGQSRTLNRILDETLIVIKYITLGSFLVDLIDAVLRHLKVILR

SEQ ID NO: 77702 - protein, 54 aa, Zea mays
  Coding DNA Sequence Number=SeqID_35923
MTCALLIMKCLIFWNSTLNRILNETLIMLKYITLGSFPVDLIDAVLHHLKVILR

SEQ ID NO: 77703 - protein, 178 aa, Zea mays
  Coding DNA Sequence Number=SeqID_35924
  Subcellular localization annotation: CTP_CleavageSite=45; ConfidenceScore=5.61e-01
MPRATASPQSAHAASPCLPRACPRLPPVRPRREAPRRRDSLPTLAASAVTVPLSPLRDRDCRRPHATATVQLPPCPPFVTAQSPRNRSRQATARDGVLVAVNERQLAEQVPPPGPFDSVLGAGSKTCQERAAGALANLAADDKCSLEVAKAGGSRTPSHPENFETHGLEVTTGCQLKH

SEQ ID NO: 77704 - protein, 142 aa, Zea mays
  Coding DNA Sequence Number=SeqID_35925
  Gene Ontology: Mol. function=structural constituent of ribosome; Cellular component=ribonucleoprotein complex; Biological process =translation
  Homolog annotation: Hit_ID=Q6SPR2; Match level="QueryCoverage=23%, HitCoverage=35%, E-value=9e-12, Identity=88%"; Hit description =Ribosomal protein L37
EEQVLFWRWKLRRPQRMHNVCVLFRRLLKLPVPFPCKPQQLHVSEPAGSVVARSWARFTLGVLVMGAAASCEWGRLLGAIVGGSRLLGAISGYGGVARLATGGDFKTMCFKIFRVARSPATTSLCNFQATFVVSSQNGGYFE

SEQ ID NO: 77705 - protein, 95 aa, Zea mays
  Coding DNA Sequence Number=SeqID_35926
  Gene Ontology: Mol. function=structural constituent of ribosome; Cellular component=ribonucleoprotein complex; Biological process =translation
  Homolog annotation: Hit_ID=Q014K1; Match level="QueryCoverage=48%, HitCoverage=51%, E-value=3e-16, Identity=74%"; Hit description=[J] KOG3475 60S ribosomal protein L37
  Pfam annotation: Domain name=Ribosomal_L37e; Domain location=46-93; Score=76.2; E_value=1e-19; Accession=PF01907.9; Description =Ribosomal protein L37e
  Subcellular localization annotation: CTP_CleavageSite=65; ConfidenceScore=5.84e-01
MAPSSRPHSQLAAAPMTSTPSVNLAQLRATTLPAGSLTCSCCGLQGKGTGSFSKRRNKTHTLCIRCGRRSFHLQKSTCSSCGYPAARIRNCVNLA

SEQ ID NO: 77706 - protein, 170 aa, Zea mays
  Coding DNA Sequence Number=SeqID_35927
MDAIYQRKMWATPWRADKGLTGEEAPWEGEGQPRKRSVPVGEGDLSQGGDGDGQREVGREEDAGREEDDEDEVTCGFAAVLGGGAVPRLAAVEATEEARGGQGARCRIAEGGGRGGSADDADMQAVEDHRSVELGGGQRVERSTRRWFVGSGREGDATFLLTANAWAERK

SEQ ID NO: 77707 - protein, 227 aa, Zea mays
  Coding DNA Sequence Number=SeqID_35928
  Homolog annotation: Hit_ID=Q6YZ10; Match level="QueryCoverage=33%, HitCoverage=32%, E-value=2e-10, Identity=50%"; Hit description=27k vesicle-associated membrane protein-associated protein-like
MILNRLHVRVIRRSPASAALRDAATRALASAGLFRGLHGGEAGDGASSEHGREPAGNLVLVILLPARVLLPASTKDARLLRPSLLAVTPVPPPGTPTSRCPSPSPPCDKSPSPTGTLLFLGCPSPSQGASSPNSLHVASNFAGDGACENSPRIGRLKVIRSLLPTRRRLRLNPPAKFYFPYEPGKQVRSAVRIKNISKSHVAFKQDYFSEGLYTFDIGQNDLAGCYL

SEQ ID NO: 77708 - protein, 490 aa, Zea mays
  Coding DNA Sequence Number=SeqID_35929
  Gene Ontology: Cellular component=nucleus
  Homolog annotation: Hit_ID=Q6Z5M6; Match level="QueryCoverage=62%, HitCoverage=21%, E-value=7e-55, Identity=49%"; Hit description =Transducin / WD-40 repeat protein-like
MPVTARDMHSRYIPQQDYFSEGLYTFDIGQNDLAGEFYSRTEDQVIVSIPTILLEFENGLKTVISSRRLSNYLSTLEHHSSELNASADLLNHHFKSSSVAELNIVLRDISLQLQKGLFIAIVGEVFLESYVVGVHNFVNGLFGTDLSFSPSFEQACKTMFEQVDGAFQKGMSEQMYAIQQQVEAAHTPLALTLKETINSRRWRWAQLAFEQACKTMFEQVDGAFQKGMSEQMKPSIRADGDGHNWVREAASDEAMSETAGRAKANFRIESAIHSVSGGAVIKGLEAMAVTSLMMFVESLQVNIKAAMKLDEGSCSRLTTLTETHTRQSYIEFLGDLLFKFDEAFTMALQRSDVSIVSWLCSQVDLRALCAMVPVPLNQGVFLALLQQLAIDIHNETSRKVQWMTDVAMAINPADQIIAVHVPPIFEQVYSQLAHQRTLPTAASDGTSIRVIMHVACPEMDYLTPGGEIETSTTKQKLLGSLMTYERVACG

SEQ ID NO: 77709 - protein, 64 aa, Zea mays
  Coding DNA Sequence Number=SeqID_35930
MHTDRVTDWNYTRWIGAPLGFTSSVPVQSRDRVVDYMRRGVGDRDVGARAMPRNINCEPPMDFI

SEQ ID NO: 77710 - protein, 675 aa, Zea mays
  Coding DNA Sequence Number=SeqID_35931
  Homolog annotation: Hit_ID=Q10PS3; Match level="QueryCoverage=17%, HitCoverage=16%, E-value=5e-54, Identity=90%"; Hit description=HEAT repeat family protein, expressed
  Pfam annotation: Domain name=DUF707; Domain location=296-601; Score= -86.8; E_value=0.0037; Accession=PF05212.3; Description=Protein of unknown function (DUF707)
  Subcellular localization annotation: CTP_CleavageSite=64; ConfidenceScore=5.64e-01
MARVRPLPRQPSLTLARSLRSRLFLLRSSRVATAPSTPEIVARRRAAPETAPQSRGTSSPMHRRAPEPASRRHPHTTCPLSPSRRDDTGLEKGPETGASPPRIHTIDVVLPLVSPSTFLQWLSATGLVARSCDGEIESRVAEQGWSQRAAGAVTCVRGRTPGRCAASCGGRVAGGVAWRTRRPYNLQGLLPPHGVDLDGLHGRGGRGATAASEDIVDVPYHLDWRWHRQPPATARANGGVDLTVFKQFERMNPEPANGDDDGALSLPETGLGLSLNTDGVLKACSYRLGLRLFNIDMIREHPPLSSNSHHYKIYTTWHLHRQGLAQLSAVLTADTWRCDTARCVAQASHTALLFFKEQPLAASSRGRPVSDDSCKNPWEKASGPGNVTRTSLAPQGLQAQVVQINEFVKLGGEQLVPYYADILGAVLPCISDEEEKIRVVARETNEELRAIKADPAEGFDIGAILSIAKRELNSEHEATRIEALHWFFTLLDRYCAEFLAYLNDIFDPLLNALSDPSDAPAHEKIGVVDSQWIVHQVIPSLGNQGQSENGRAPWYKFQPTFFPLCPAVALRIELDIDECLELIFSEHEHSESTALCAHENSAENISDGQGWPSSLPQVNRKSSWVIAMSDSSAHRASNASDSCVSLPPFFGHHLSQMKSIGGSQFMFRGIARAPT

SEQ ID NO: 77711 - protein, 248 aa, Zea mays
  Coding DNA Sequence Number=SeqID_35932
  Subcellular localization annotation: CTP_CleavageSite=45; ConfidenceScore=5.30e-01
MGRKQSLEVVWASGPPCDAASHPPAAASGTTARRGRLCEGGVGKRARGRVGASVRTFRGFVARSRERHGVGPRSREWRERLLRERSEAGRGGYGGSELGLSWVAGAGDERGPLDGTEGASAAVVAGDEDADLGGPPQLDHGRLHDAEHEVPPAGAVALEPGLPRRGGGGSARCRRSMGGREGSTRGSDSGAAAGSVGDAGSGGGAMRGGESVRIGRLRIGRLRDSKVYWTVEIVGRQNQTEAAYPLEP

SEQ ID NO: 77712 - protein, 174 aa, Zea mays
  Coding DNA Sequence Number=SeqID_35933
MQAACNRAKGAHPFDFNTSSMVAQAHTSCNQCAGCYMQETAPPLAPLPCLLDCGTSTATRGNPAHDPTVPTKHIGHGTGGTFGRRSRRRFTSAIMTVSKKGPGKGIPRKGSFSAKETGPEPPTDQRFEGWPLGGVQQPPQSARAPRPLLVRGSKAGPSEGFNGRLRPLGLRAHY

SEQ ID NO: 77713 - protein, 180 aa, Zea mays
  Coding DNA Sequence Number=SeqID_35934
  Homolog annotation: Hit_ID=Q6QP51; Match level="QueryCoverage=27%, HitCoverage=22%, E-value=6e-15, Identity=79%"; Hit description =Putative growth-regulating factor 1
  Subcellular localization annotation: CTP_CleavageSite=44; ConfidenceScore=5.35e-01
MAAVGGRKQQSSHLQAHVPSYDSERALSHGVKTTCLCPVPRTARARTTAASPTTRPVALTLWQDRRHLWQAKQATLHLRHNDRVKKGTEKENTLKGILLREGSEPRALLLIRGSKADPSEGFDSRLRALGLRAHYWSEVRRLAPRKGSTAASGHSSSAPTTDQGFVGWPPKGSTAASEHA

SEQ ID NO: 77714 - protein, 374 aa, Zea mays
  Coding DNA Sequence Number=SeqID_35935
  Homolog annotation: Hit_ID=Q6QP51; Match level="QueryCoverage=35%, HitCoverage=41%, E-value=1e-17, Identity=55%"; Hit description =Putative growth-regulating factor 1
  Subcellular localization annotation: CTP_CleavageSite=46; ConfidenceScore=5.38e-01
MVAIQGSHPPFKGDSPHLRPQPSRTESSPTRSKILPLRHGGWSHASCKLAQDRRSQTAPRGAHNWPAVTSTPPLLPRPAGERADRHAGGMKPYQGVHPFDSDASSVEAQAHTSCNQRAGYYVREAAPPLAPVPRLLDCGTSAETRGDPAHDPTVPTEHIDHGSISRGRRHNGQYGQKTGGTFGRRSRRRFTSAIMTASEKRAPSPPTDKRFEGWPLGRVRQPPQSTQAPRLLLIRGSKAGPSEGFDSRLRALRLRAHYWLEVQRLAPRRGSTAASSHSGSAPTTDQGFVGWPPKGSTAASEHAERGMTLGTFDTQPRLGLRSRGSGAALANPAPAKPLTASTYQPENLELDYAPGLRPVRIREQPDRLKHHETR

SEQ ID NO: 77715 - protein, 305 aa, Zea mays
  Coding DNA Sequence Number=SeqID_35936
  Gene Ontology: Mol. function=protein binding; Cellular component =membrane; Biological process=meiosis
  Homolog annotation: Hit_ID=Q655Y4; Match level="QueryCoverage=64%, HitCoverage=55%, E-value=1e-88, Identity=78%"; Hit description=LEM3 -like
  Pfam annotation: Domain name=CDC50; Domain location=1-203; Score =221.1; E_value=2.4e-63; Accession=PF03381.6; Description=LEM3 (ligand-effect modulator 3) family  CDC50 family
YVKSRNDAQLRDKSKASDTTNCDPEAKTVDGKPIVPCGLIAWSLFNDTYTLIHNNKTLRVDKKDISWKSDRDHKFGSDVFPTNFQKGPLQGGKILNPKIPLSEQEDLIVWMRTAALPTFRKLYGRIHVDLKENDTITVQLENNYNTYSFSGKKKLVLSTATWIGGKNDFLGLAYLTVGGICFVLAFAFTLLYLIKPRLYIKLKQIALCSPKLYNQKLMSVSMLCSSSLKELNLTYMTKQVIAEILALRVCGVDRVITCCPSLTSIRKATKSRSRGAFRFALRESRLLEKAASWIHPFGWLLAFRG

SEQ ID NO: 77716 - protein, 136 aa, Zea mays
  Coding DNA Sequence Number=SeqID_35937
MTKKDAAPVIYPGLGTSWRRNRRIPCVLLRDPRPWRICCGRFGIGTDLTVRSHTSATYAGTDAWSPYGRGTGLGTHAHSSIRKATKSRSRGAFRFALRESQLLEKAASWIQPFGWLLAFRGAKAKAKSQTKHTHRI

SEQ ID NO: 77717 - protein, 85 aa, Zea mays
  Coding DNA Sequence Number=SeqID_35938
MTEDPLTGHMPRHGIHFSKHFCKTESLIIEKPYLDSLNQHTLESLFFSRVRKRQIIVASAPRLFPRKKNKSEAAGGLGPPYRTFV

SEQ ID NO: 77718 - protein, 85 aa, Zea mays
  Coding DNA Sequence Number=SeqID_35939
MTEDPLTGHMPRHGIHFSKHFCKTKSLIIEKPYLDSLNQHTLESLFFSRVRKRQIFVASAPRWFPRKKNKSEATGGLGPPYRTFV

SEQ ID NO: 77719 - protein, 406 aa, Zea mays
  Coding DNA Sequence Number=SeqID_35940
MMIGKVGGRFSKIKLDGGSVKGLDGFNIGKDVPLPGLLTEDPLTGHMPRHGIHFSKHFCKTESLIIEKPYLDSLNQHTLESLFFRRVRKRQIFVASAPRWFPRKKNKSEAAGGLGPPYRTFVKELIGRSFCLPCLCNRFRISISPMFCNVCKTGETFLERTTVGGPNYLGGSVTAGIGAKPFFADIMRHLQKDFLKDLSRNSLPFLPKCSKEFILKTRRTTCKHTGPIDVPSHQLAPRHDNSSSGSNDPIGDLEAEVSRLQAELRRRTAIWVVDGDHINELRRDVRHLRDQLADRDLALDWVVQSRSLAWDKEQKAQALVAELNLAVDELQTYCNTLHEEVHVLYSQMHPSEPTNPVESEAGPSHVAGHALGGELDLFQPPPSMRLVDEWSPTPDDEAAKSNGKQE

SEQ ID NO: 77720 - protein, 100 aa, Zea mays
  Coding DNA Sequence Number=SeqID_35941
MVVAPWVRYLSQEYVPMLTWAASTYRSPTCPYFRYKQNMQREKSTYLAQTRPADRLRTNSRWMGARLVASTKGSGKGQRMTAGRSGNFSAAASRAQERRR

SEQ ID NO: 77721 - protein, 36 aa, Zea mays
  Coding DNA Sequence Number=SeqID_35942
MVVAPWVRYLSQEYVPMLTWAANTYRSPSCPYFRNK

SEQ ID NO: 77722 - protein, 44 aa, Zea mays
  Coding DNA Sequence Number=SeqID_35943
MVVAPWVRYLSQEYVPMLTWAANTYRSPSCPYFRWSLHVPINMQ

SEQ ID NO: 77723 - protein, 73 aa, Zea mays
  Coding DNA Sequence Number=SeqID_35944
MRLSQNTLNTKQPAKVSKDDGGGPWVRYLSQEYVPMLMWAANTYRSPSCPYFRVCRGRSPLALLIENLRFFHG

SEQ ID NO: 77724 - protein, 59 aa, Zea mays
  Coding DNA Sequence Number=SeqID_35945
MEFCIIASSANYDQNLSKGELTYGRGSTSGGKTNAGSNRVCRGRSPLASLIENLRFFHG

SEQ ID NO: 77725 - protein, 56 aa, Zea mays; identical to SEQ ID NO: 55940
  Coding DNA Sequence Number=SeqID_35946

SEQ ID NO: 77726 - protein, 54 aa, Zea mays
  Coding DNA Sequence Number=SeqID_35947
MVVAPWVRYLSQEYVPMLTWAANTYRSPSCPYFRVCRGRSPLALLIENLRFFHG

SEQ ID NO: 77727 - protein, 69 aa, Zea mays
  Coding DNA Sequence Number=SeqID_35948
MVVAPWVRYLSQEYVPMLTWAANTYRSPSCPYFRVCRGRSPLALLIENLRFFHGIALDSQLLDQSLNIT

SEQ ID NO: 77728 - protein, 54 aa, Zea mays
  Coding DNA Sequence Number=SeqID_35949
MVVAPWVRYLSQEYIPMLTWAANTYRSPSCPYFRVCRGRSPLALLIENLRFFHG

SEQ ID NO: 77729 - protein, 54 aa, Zea mays
  Coding DNA Sequence Number=SeqID_35950
MRLSQNTLNTKQPAKVSKDDGGGPLGESMQREKSTCLAYRKLEVLPQIGIDLDS

SEQ ID NO: 77730 - protein, 50 aa, Zea mays
  Coding DNA Sequence Number=SeqID_35951
MATLACSCALFSVLPVVDLVVKNQDLFLSVEETQVFNKQGKWTSPSAYSV

SEQ ID NO: 77731 - protein, 172 aa, Zea mays
  Coding DNA Sequence Number=SeqID_35952
  Subcellular localization annotation: CTP_CleavageSite=35; ConfidenceScore=5.27e-01
MASPLSSPPPSHLPPPLSLPAHNSRQEPAEAVVSRAQATEPRLPEAPRACALSPTRPRQAAPGPSPAQRRDRPFFFPRYGVYCSRFFPINSDSFFSITSSWRRSPFPAPIKLDVVSLRTDSQRLLHASLLCCSPSGAVVDLIVKNQDLFLSVEEPHVFNKQGKWTSPSAYSV

SEQ ID NO: 77732 - protein, 46 aa, Zea mays
  Coding DNA Sequence Number=SeqID_35953
  Homolog annotation: Hit_ID=Q6K6Z3; Match level="QueryCoverage=96%, HitCoverage=7%, E-value=4e-08, Identity=64%"; Hit description =Putative NAC2
AAAGEVPHASAFNDEELVSSYLRHRILGCRLRVDAIAEIDLYHLEP

SEQ ID NO: 77733 - protein, 746 aa, Zea mays
  Coding DNA Sequence Number=SeqID_35954
  Homolog annotation: Hit_ID=Q4VYU4; Match level="QueryCoverage=35%, HitCoverage=59%, E-value=1e-112, Identity=78%"; Hit description =Glycosyltransferase
  Pfam annotation: Domain name=Glyco_transf_43; Domain location=176 -378; Score=-17.1; E_value=3e-08; Accession=PF03360.6; Description =Glycosyltransferase family 43
  Subcellular localization annotation: CTP_CleavageSite=34; ConfidenceScore=5.40e-01
MRGLLASVISLDFFLLSSKLKSVCAAMTSQRHSRSQERSKSKGLTCRRVAVHLLFFFMVGIFIGFMPLFSVDVYKKIVSENERLPFHDGVIEVEMMGTKVKELETVVVEKEVELIDEPQVQESPPVPAMLDDEADFAESSPALPAIEESDIPVKKLLIIVTITSVRPQQAYYLNRLAHVLKAVQAPLLWLVVEWPEQSYETAEILRSSGVMYRHLICRKNTTSVRKIAVCQRNNAIYHVKRHHLDGIMHFADEERSYSADVFEEMQKISQSTPSIYMRQIITVRPSPPLQASDTVVAPGSPSSSPHSPWTHATVSLPRSRCIPRNPRPSAMRSRLLLPPSWRSRAPPPRQRHRRDRPLPPRAPHAQPPPRERCPTPRPSTTRSSSPPISVTAFSAVASASTPSPRSTSTISSPRTSPPSSTSAVTTPMGSSSPVRSRRSQQQDQPRTLASRSLMLPGKDHDVHADAHLYNALMKANVAADDPGAVLRVFRQVSVTGTFLVNKEHVESHRWSCMFGDVEVPAEVLTDGTLRCYAPAHQSGRVPFYVTCSNMVACSEVREFEYRDSEAHYMETSRSQANGVNEMHLHIRLEKLLTLGPDDHQMLAINSLMLDGKWSNQESSVKEVVSTARVQSLKKLVKEKLHQWLICKVNDDGKGPNVLCKEGQGVIHLVAALGYDWAIRPIIIAGVNVNFRDAHGWTTLHWVASLGRVEGLPQHPFLHRRDIGQLICDDEASSTDFPTPHPPSMRL

SEQ ID NO: 77734 - protein, 179 aa, Zea mays
  Coding DNA Sequence Number=SeqID_35955
  Homolog annotation: Hit_ID=Q6K6Z3; Match level="QueryCoverage=43%, HitCoverage=14%, E-value=4e-15, Identity=61%"; Hit description =Putative NAC2
MTDWNKLRLASCCLPTNRDVPPAANTIITDDLACIRERKSTAQTQRLEQRLASSDKHRKNDSSEGEGQGGREEAEEMERDASVRGWSCCWDRLDRMGEELPIGVVTADVEEGGEVLGLEMVEVDLGDGVDAEATAENAVTEIGGDKLLVVEGRGVGHLSRVGGCACGARGGRGRSRRWR

SEQ ID NO: 77735 - protein, 145 aa, Zea mays
  Coding DNA Sequence Number=SeqID_35956
  Gene Ontology: Mol. function=DNA binding; Biological process =regulation of transcription
  Homolog annotation: Hit_ID=Q6K6Z3; Match level="QueryCoverage=53%, HitCoverage=14%, E-value=4e-15, Identity=61%"; Hit description =Putative NAC2
MKERKSTAQTQRLEQRLASSDKHRKNDSSEGEGQGGREEAEEMERDASVRGWSCCWDRLDRMGEELPIGVVTADVEEGGEVLGLEMVEVDLGDGVDAEATAENAVTEIGGDKLLVVEGRGVGHLSRVGGCACGARGGRGRSRRWR

SEQ ID NO: 77736 - protein, 145 aa, Zea mays
  Coding DNA Sequence Number=SeqID_35957
  Gene Ontology: Mol. function=DNA binding; Biological process =regulation of transcription
  Homolog annotation: Hit_ID=Q6K6Z3; Match level="QueryCoverage=51%, HitCoverage=14%, E-value=1e-15, Identity=64%"; Hit description =Putative NAC2
MKERKSTAQTQRLEQRLASSDKHRKNDSSEGEGQGGREEAEEMERDASVRGWSCCWDRLDRTGEELPIGVVTADVEEGGEVLGLEMVEVDLGDGVDAEATAENAVTEIGGDELLVVEGRGVGHLSRGGGCACGARGGRGRSRRWR

SEQ ID NO: 77737 - protein, 116 aa, Zea mays
  Coding DNA Sequence Number=SeqID_35958
MAVQISGAAGIVLGAETWRGAKGGRGKIAGRHGRKRGNREGAGRVEPMEEQGVAPWLESACSKGARPFAAVAGGVHGGWPSRGGGAMGGASMRWGRRAPCRMGVECHGEKEPSSLR

SEQ ID NO: 77738 - protein, 197 aa, Zea mays
  Coding DNA Sequence Number=SeqID_35959
MAVQISGAAGIVLGAETWRGAKGGRGKIAGRHGRKRWASCCSPWATAARCGCCFMGKRGGEGPGRHGSYCCPWKINRTQEQQGKGGRRPALVLVQGKQGGRREGRAHGGAGRRALAGERLLQGSSAICSSRRGRPWRLAEQRCRPWELLAAMKQKGALGGEAAGGGAMGGASMRWGRRAPCRMGAECHGEKEPSSLR

SEQ ID NO: 77739 - protein, 181 aa, Zea mays
  Coding DNA Sequence Number=SeqID_35960
MERSKGRKGEDCRASWEEEVGRAAARRGATAARCGCCFMGKRGGEGPGRHGSYCCPWKINRTQEQQGKGGRRPALVLVQGKQGGRREGRAHGGAGRRALAGERLLQGSSAICSSRRGRPWRLAEQRCRPWELLAAMKQKGALGGEAAGGGAMGGASMRWGRRAPCRMGAECHGEKEPSSLR

SEQ ID NO: 77740 - protein, 195 aa, Zea mays
  Coding DNA Sequence Number=SeqID_35961
MDVALLDCMFPEVPRHVYKKAGAARAVSYPCVRRETLTLSNRSPARLPSLFFCFEDLARVKQTAHHRRRYVAMSSSSSDPSSKDTLSDLVATELQPGHTVEFDTSMISSVRMQEMQQLGYFGDSVGCVPGAEEIPQTEEVRRLGPPIDAERRGCLGEVGKSKIFLGSLRLLCDPTVMWRSHHLRWWRTMRTKGPS

SEQ ID NO: 77741 - protein, 122 aa, Zea mays
  Coding DNA Sequence Number=SeqID_35962
MADGLTRKHGSNEHWNREYPNSAKSPSSAHIPHNSHFSILYFTHKRGWVPDAQIQGKGRTSHQLLAQGRHLERAQFAKYPAVRQGPYSISNELFNQITPATHAGSIPEGPFVLIVLRHLKRW

SEQ ID NO: 77742 - protein, 577 aa, Zea mays
  Coding DNA Sequence Number=SeqID_35963
MEALRSWDIRGSNVRLNRVFELNRLPYGGYPGDDAATTVDRRGKKPAAAAEEGPSRGVVPAIKKRKLGTAAEGLGGLPPFCCGFNGNLCDPRGKDVFARAQGIFGTNAGAKSSSGTRAVASSSSKPPSAELTKEQGPTSPLRAAKAAAGGADLAMDICVDDYRVGGVMMFDAHTGRDLLVSVYILLLLSFFTRGLGLGQDYGAGSDAEQLAVVPAPVAAVPAVAAVEAKAASQDPWSKFCASGKITSAAAVKYVAGSVSQHLKHATQQLKHHTEAVRDKSAAKNKSHRLMEKLAAVEAEKEDLNRQLVVERKDANRACAEAQAAQTEAKLARAEASLARQRAEEVETSYSSLRDHLDKAEEELEVLPTIVMGLMSFASLITCEGAVNALSREGCWHFKVFDRSDEDFERGIFQVEDPVLKRLAEALYDRMWGPHGREAVRERSDQAMEQMAHDEEVEDLGDLDSALPEASSAKEGTGGSWRRHPISGCFSSDGESRSPFSWTEESSDGDLDYFAVLDVAAAESSPRVEVGEVADLSSARTKCWRRRVVPKHSVGEVSWSGRRCRMGMERDRLRVDRI

SEQ ID NO: 77743 - protein, 61 aa, Zea mays
  Coding DNA Sequence Number=SeqID_35964
MVYDAEITPSEPTTLPLKFSRIIGDAQDTSRVFGGRDNKSNNSEEPDPMRDCGGGRPKPGQ

SEQ ID NO: 77744 - protein, 123 aa, Zea mays
  Coding DNA Sequence Number=SeqID_35965
MTYGAEVTLIGAIEHGAEVTLIGAIEHGAETTYQKELHSRANQTVYPNNKHFYYDLVATLAVLPCYICFEIKGETALCVGSLPIIGDAQDTSRVFGGRVNESNNSEEPDPMRDCGGGRPKPGQ

SEQ ID NO: 77745 - protein, 111 aa, Zea mays
  Coding DNA Sequence Number=SeqID_35966
MTYGAEVTLIGAIEHGAETTYQKELHSRANQTVYPNNKHFYYDLVATLAVLPCYICFEIKGETALCVGSLPIIGDAQDTSRVFGGRVNESNNSEELDPMRDCGGGRPKPGQ

SEQ ID NO: 77746 - protein, 123 aa, Zea mays
  Coding DNA Sequence Number=SeqID_35967
MAPRYQSRWHLVVVLALTWRDLGAIDHGAETTYQKELHSRANQTVYPNNKHFYYDLVATLAVLPCYICFEIKGETALCVGSLPIIGDAQDTSRVFGGRVNESNNSEELDPMRDCGGGRPKLGQ

SEQ ID NO: 77747 - protein, 77 aa, Zea mays
  Coding DNA Sequence Number=SeqID_35968
MVPRYQSRWHLVVVLALTWRDLSAIDHGAELLRFLALAVTLTALLVLASFTLTAALAALVLLSPLVSCPSQSRSGRP

SEQ ID NO: 77748 - protein, 33 aa, Zea mays
  Coding DNA Sequence Number=SeqID_35969
MAPRYQSRWHLVVVLALTWRDLGAIDHGAEGSK

SEQ ID NO: 77749 - protein, 120 aa, Zea mays
  Coding DNA Sequence Number=SeqID_35970
MDKWYKGKKEAVEAEKGRNEGVGRGRVGPAGAGSRERRTGVAVGLSPPIAFAINNKSTIAFWMSLDLSGRGLSTEFVSRSWDLMETDAAGMEGIDDKSPTLGTMTGIGGSVTFGMRWVLQ

SEQ ID NO: 77750 - protein, 251 aa, Zea mays
  Coding DNA Sequence Number=SeqID_35971
  Gene Ontology: Mol. function=oxidoreductase activity; Cellular component=proton-transporting two-sector ATPase complex; Biological process=ethylene biosynthetic process
  Homolog annotation: Hit_ID=Q10A95; Match level="QueryCoverage=63%, HitCoverage=42%, E-value=9e-21, Identity=38%"; Hit description =Oxidoreductase, 2OG-Fe oxygenase family protein, expressed
  Subcellular localization annotation: CTP_CleavageSite=16; ConfidenceScore=5.04e-01
VKRFALPTWIYGTMPTAGTVGMTSISGRVATGRIGGFDTIGMPRTLHSKLSVYYFARARPVENEIEMVGGLSMQSMDDRYAQTHMSVAAALGRADELRALDDTLAGVRGLVASGAKQVPRIFRVPYPEELLHHEQPPAAATVPVIDLSGDRAAVIDAVRGAAAGWGFFQVTGHAVPEQVMSAAVAAMRAFHEADGGEGSDKARLYSREPGRAVKYHCNFDLYQSPVANWRDTVYLRMAPDPPAADDLPEIC

SEQ ID NO: 77751 - protein, 588 aa, Zea mays
  Coding DNA Sequence Number=SeqID_35972
  Gene Ontology: Mol. function=oxidoreductase activity; Cellular component=proton-transporting two-sector ATPase complex; Biological process=ATP synthesis coupled proton transport
  Homolog annotation: Hit_ID=Q9XH70; Match level="QueryCoverage=55%, HitCoverage=91%, E-value=5e-90, Identity=50%"; Hit description =Hypothetical protein p69RF
  Pfam annotation: Domain name=2OG-FeII_Oxy; Domain location=369-468; Score=154.8; E_value=2.2e-43; Accession=PF03171.10; Description=2OG -Fe(II) oxygenase superfamily
PIHRVRVAFMGPNGDRRYRDGGHRRLGTSHTEGISGKSLTLGTTTGIGGKAPTFDMTTGIGSNVTFGMTAGTIVSIGSSAAVFDTTWIYGTMPTAGTVGMTSISGRVATGRIGGFDTIGMPRTLHSKLSVYYFARARPVENEIEMVGGLSMQSMDDRYAQTHMSVAAALGRADELRALDDTLAGVRGLVASGAKQVPRIFRVPYPEELLHHEQPPAAATVPVIDLSGDRAAVIDAVRGAAAGWGFFQVTGHAVPEQVMSAAVAAMRAFHEADGGEGSDKARLYSREPGRAVKYHCNFDLYQSPVANWRDTVYLRMAPDPPAADDLPEICRDALFEYAKQVKDLGQRLFGLLSESLGLKPSYLTDIECDQGQIILGHYYPPCPQPELAIGTSRHSDSGFLTILLQDKVGGLQILHDGQWVDVAPTPGAFIVNIGDLLQLVSNDKFSSVEHRVVAKNAEPRVSIACFFSTHFHPASTRTYGPIKELLSEENPPLYRETLVREGVPVAAMQGKGAPRGYRCGQPKLLRLSAAVSARPPSPLHLATTEALYGRNGILYKAPHTADVNSNTLQLARIRCPPSTIHLYDCFFNR

SEQ ID NO: 77752 - protein, 48 aa, Zea mays
  Coding DNA Sequence Number=SeqID_35973
MAWFHRDNCGARVWIRGWSPRLDPAGGGRKTSLRKCLKEWNGEPLSIY

SEQ ID NO: 77753 - protein, 49 aa, Zea mays
  Coding DNA Sequence Number=SeqID_35974
MIWRCRSWKGPGRFMNKEMIITSTSSAHLRKTSLRKCLKEWNGEPLSIC

SEQ ID NO: 77754 - protein, 49 aa, Zea mays
  Coding DNA Sequence Number=SeqID_35975
MICRCRSWKGPGRFMHREMIITSTSSAHLRKTSLRKCLKEWNGEPLSIC

SEQ ID NO: 77755 - protein, 175 aa, Zea mays
  Coding DNA Sequence Number=SeqID_35976
  Gene Ontology: Biological process=intracellular transport
  Homolog annotation: Hit_ID=Q75HB3; Match level="QueryCoverage=72%, HitCoverage=23%, E-value=4e-14, Identity=42%"; Hit description =Expressed protein, 5'-partial
MCSELNRDPEKCKDVVNWLRQNQAGSIAVSSPSSLKDDKFNLLAADDSKLLVQPSSDNKQKAPIMASSSSSFHNSSLPNLFSSPSQQKKHQITVKNTSSDSNKPAFQFGGNNVIFGGKKDAPVDSSKPFQFGPNNGIFGDKKDTPSDSNKPFHFGANKGIFGDKKTTSGDSSNPI

SEQ ID NO: 77756 - protein, 264 aa, Zea mays
  Coding DNA Sequence Number=SeqID_35977
  Gene Ontology: Biological process=intracellular transport
  Homolog annotation: Hit_ID=Q75HB3; Match level="QueryCoverage=58%, HitCoverage=37%, E-value=1e-32, Identity=50%"; Hit description =Expressed protein, 5'-partial
GENRSGIPVGYRIRIVQILVFSDMDPGRMRNEDYPVNTRIFGVRYEYPEFEAESSHQHVMAGPASLDPRRAEAASKHVRALNTQFASWVQLQLQNHPAELWEDGLKDYISHASEIMNSSLPNLFSSPSQQKTPDYSGMFADKKNTSSDSSKPAFQFGGNNVIFGGKKDAPVDSSKPFQFGPNNGIFGDKKDTPSDSSKPFHFGANKGIFGDKKTTSGDSRGEVGEQEGPSDDVLISSLVRSHRRLETAAVQQASRTAGEGAGDA

SEQ ID NO: 77757 - protein, 87 aa, Zea mays
  Coding DNA Sequence Number=SeqID_35978
MEYREGGEVGEQEGPSDDMLISSLVRSHRRLETTTVQQVSRIQEKGQGTQGVVAAGVAADNQQSRTGGAVPREERRNVQVGDCWRLG

SEQ ID NO: 77758 - protein, 645 aa, Zea mays
  Coding DNA Sequence Number=SeqID_35979
  Gene Ontology: Mol. function=catalytic activity; Cellular component =nucleus; Biological process=metabolic process
  Homolog annotation: Hit_ID=Q5ZDP1; Match level="QueryCoverage=67%, HitCoverage=80%, E-value=2e-67, Identity=28%"; Hit description =Pentatricopeptide (PPR) repeat-containing protein-like
  Pfam annotation: Domain name=PPR; Domain location=248-282; Score =28.5; E_value=2.4e-05; Accession=PF01535.11; Description=PPR repeat
  Pfam annotation: Domain name=PPR; Domain location=285-319; Score=0.3; E_value=6.9; Accession=PF01535.11; Description=PPR repeat
  Pfam annotation: Domain name=PPR; Domain location=352-386; Score =37.9; E_value=3.6e-08; Accession=PF01535.11; Description=PPR repeat
  Pfam annotation: Domain name=PPR; Domain location=454-488; Score =34.5; E_value=3.8e-07; Accession=PF01535.11; Description=PPR repeat
  Pfam annotation: Domain name=PPR; Domain location=489-522; Score=9.2; E_value=0.61; Accession=PF01535.11; Description=PPR repeat
  Pfam annotation: Domain name=PPR; Domain location=525-558; Score=4.2; E_value=2.4; Accession=PF01535.11; Description=PPR repeat
  Pfam module annotation: Pfam domain module=PPR::PPR::PPR::PPR::PPR::PP R; Domain location=248-282::285-319::352-386::454-488::489-522::525 -558
MERGGMAGAQRIGKTAEPCTVLKYDGIGPPDTPSDVLGSRLTNGPVTNLQATALRFAAHHTAAPSPSRMSTGGGTTLRELTALLSTLRRARLQHPAHAAQLHARLLISAGARPHPHPVLLTQLVSLYAAAGRLADALRAFRAHLPSANLHTYAVLVSAFARPYPDLAFSLFSGSRRQLRPSPHVISAVLAACAGLQPLCGRQVHTCAAKVVPPGDVFVYTGMVDVYAKGGDMESSRKVFDEMLNRGAASWNALLVGYARNKMCLEALSVFRELAAQGREVSLDQVSVSSVLSACAVAGALNYGRQVHACATKVGLELSAVCVSNALLDMYTRCGCSRESSALLNAVGCRDVVTWNIIIRSCIHDNRFKEACVLFRSMVRNGTLPDDVAFATVLQASACMSAWAIGASMHASVVKTGFLYSDGVTSSLITMYSKCGCLDDAHRAFVGAKDHLHIMSWTAMITALQQHGHGMQAIDVFENMLENGIPPDHITFVSVLSSCSHSGLVEQGRRYFDSMTRVHKITPQNEHYACMVDMFGRAGLLTEAKRFIHQMGPKQDASVLGALLWACMNCRDLEMGKEVAKKLFVIEPGVKEGKGMQFNQQLRTKSVPYEYFSKDTIKAIRPTGVSAYSRVHGHPRLPAVESARQT

SEQ ID NO: 77759 - protein, 281 aa, Zea mays
  Coding DNA Sequence Number=SeqID_35980
MQQREGSGKQAHVPPRALLSFGHDGIGRRRDLDPRAVCTMQLQQHDWIASAFDRCIYGSRTASTFENGARFCRLPYALRACHPSALPPPPSALHPGIQRSLHAPSVLHALSIEGDILRPRSRICDILHPGSWDPAVSASALSMDGEEGFAAPYTMRSGDATAAGRRPGSRRGKSRRRPLWWSRGWERERHEGRWSWRWEAAFLRGVGWGGCGGDPGRLQEDGAEILADRLEGEIYATLYDCGMDPDIAVKRLICQDCRSQNSILARMLRDFDGLARVLFRE

SEQ ID NO: 77760 - protein, 182 aa, Zea mays
  Coding DNA Sequence Number=SeqID_35981
MDGEEGFAAPYTMRSGDATAAGRRPGSRRGKSRRRPLWWPRGWERERHEGRWSWRWEAAFLRGVGWGGCGGDPGRLQEDGAEILADRLEGEIYATLYDCGMDPDIAVKRLICQAADQAQASTPDVDEECKRALTPLGFSNEDAEKMLKKAFSWTHSPYWSEEREKEVPTAEAVAGVLGSCDP

SEQ ID NO: 77761 - protein, 273 aa, Zea mays
  Coding DNA Sequence Number=SeqID_35982
  Homolog annotation: Hit_ID=Q6QP54; Match level="QueryCoverage=20%, HitCoverage=19%, E-value=2e-08, Identity=58%"; Hit description =Putative kinase
MVPNEYPYPVPVSGTLPVFTPTWSHIGQIHIQVLLPSEERGRFEPKVRRGGDSSEVEAESEPWGQARRRPSSGVEVESEPWGRAKRIPSSEAEAGAEPWGRARRSFLWRLRLDLAAVSLTLAGGTAVGAGQAALFSCQWVCASAPAGCSPRGLGGVVRLLRGLSAFRDTSAGLVVPSCELVVARVHGQVSSSRAGILTLSTVWPGPGLREQPPSLRTEREEGQGLTRLLSYAPSSPFRKEEGESAMLPSEGVEHGVSSELLMGDPSGRPCPIR

SEQ ID NO: 77762 - protein, 217 aa, Zea mays
  Coding DNA Sequence Number=SeqID_35983
  Homolog annotation: Hit_ID=Q6QP51; Match level="QueryCoverage=54%, HitCoverage=56%, E-value=2e-17, Identity=68%"; Hit description =Putative growth-regulating factor 1
KRKNGYPNSGYPYPTRISGYLPGSTRSVSDPNPKLYYPGITRIRPEYKNTRIRIRKMVPNEYPYPVPVSGTLPVFTPTWSHIGQIHIQVLLPSEERGRFEPKVRRGGDSSEVEAESEPWGRARRRPSSGVEVESEPWGRAKRIPYSEAEAGAEPWGRARRSFLWRLRLDLAAVSLTLAGGTAVGAGQAALFSCQVSQWRGEMTAVTSALSTEERASG

SEQ ID NO: 77763 - protein, 257 aa, Zea mays
  Coding DNA Sequence Number=SeqID_35984
MSGVGLGLRACGSWRWCGVVWPCRAGGVVLYMYGDWRRRRDLEKLRGRGRSQWATAPAPGNPAPASARPHAGNLAAGNRGPYHPPALPPARKSFREPPYHPLPRRNPTATAANRPTSRRNPASFSCYSSNLRERTSGTVSGAGPYYWVKCKPADEPIPVSQPNQGSVRGRKEKKRIKQRKDFIMKKKKRVPEFRVPVSDPNIRAEKKKRRALYSAAVKRKEAERTERKMAAVARERAWAARLIELKQLEEEIKAVMA

SEQ ID NO: 77764 - protein, 152 aa, Zea mays
  Coding DNA Sequence Number=SeqID_35985
  Homolog annotation: Hit_ID=Q40734; Match level="QueryCoverage=32%, HitCoverage=16%, E-value=2e-09, Identity=65%"; Hit description =Protein cdc2 kinase
MKILMYQLCNSVAFVHDPKVLHRELKLHILLNDHKTMVLKITDLSLSHAIRQQESNLRYALQEFLFFSRVRCGLHENVNAQIDGSLGGIGPLLSSMKPKKKDQLMKLLDPRMGVLILLAVDINKDIIELQVYLRLKGNESTSVTQKANAQSA

SEQ ID NO: 77765 - protein, 55 aa, Zea mays
  Coding DNA Sequence Number=SeqID_35986
  Gene Ontology: Mol. function=protein serine/threonine kinase activity; Biological process=protein amino acid phosphorylation
  Homolog annotation: Hit_ID=Q40734; Match level="QueryCoverage=87%, HitCoverage=16%, E-value=2e-09, Identity=65%"; Hit description =Protein cdc2 kinase
MKILMYQLCNSVAFVHDPKVLHRELKLHILLNDHKTMVLKITDLSLSHAIRFMEI

SEQ ID NO: 77766 - protein, 210 aa, Zea mays
  Coding DNA Sequence Number=SeqID_35987
  Homolog annotation: Hit_ID=Q38775; Match level="QueryCoverage=25%, HitCoverage=16%, E-value=3e-09, Identity=61%"; Hit description=Cell division control protein 2 homolog D
MARPQRLAPPSDLRTWGPNSPCASDVDEPAADDDVASSLLEMGALVLSTADPLTKARRTHVAFSRWAVGLPVGQAKAPYHPKRKDRLVERAPYARPSSPAEKKTVKPASALASWLGLGSTEADRLTIATWSAPPSSPRSCETWVYPVAARPLNLQAQILMYQLCNSVAFVHDPKVLHRELKLHILLKDHKTMVLKIADLSLSHAIRFTKI

SEQ ID NO: 77767 - protein, 168 aa, Zea mays
  Coding DNA Sequence Number=SeqID_35988
  Homolog annotation: Hit_ID=Q41525; Match level="QueryCoverage=23%, HitCoverage=1%, E-value=8e-14, Identity=92%"; Hit description=Acetyl- CoA carboxylase
MALCGDWRGFDLFGTRCKPNSLSHVHSGAVTTDVGAAYRELPVGDSVGDSAFYFDAGLLLTPSRGGDAHGRCCRCCGGWSGRGGLHIVVGGFLDAGHGAVGGFPTAIEYHENKIHTGWLDSRIAMCVRAERPPWYLSVVGGALYVCLFYYNHDFLPAFELGSQLSLLT

SEQ ID NO: 77768 - protein, 265 aa, Zea mays
  Coding DNA Sequence Number=SeqID_35989
  Gene Ontology: Mol. function=binding; Biological process=metabolic process
  Homolog annotation: Hit_ID=Q8S6N5; Match level="QueryCoverage=31%, HitCoverage=3%, E-value=2e-37, Identity=91%"; Hit description =Putative acetyl-CoA carboxylase
MVLSAFSNGDCAGCLDREQIRKAKPMSLNCFAANRDETHTAESLSCRYWATEYHENKIHTGWLDSRIAMRVRAERPPWYLSVVGGALYEASSRSSSVITNYVGYLNKGQIPPKHISLVNLTVILNIEGSKFTAFSQHKELALLFLEYTLSILHKEPVIINSSEKGESTSESLADDCILQATMFALNAFMRYWSPFDGSLLMLRMVGTFSSSDFTYFKKTSKLYRGGGKIGKQAVEKSYPSVLSGLILKLGSLNGVAELGRNELLR

SEQ ID NO: 77769 - protein, 421 aa, Zea mays
  Coding DNA Sequence Number=SeqID_35990
  Gene Ontology: Mol. function=binding
  Homolog annotation: Hit_ID=Q10RT3; Match level="QueryCoverage=69%, HitCoverage=37%, E-value=2e-89, Identity=55%"; Hit description=HEAT repeat family protein, expressed
  Pfam annotation: Domain name=HEAT; Domain location=249-285; Score =18.1; E_value=0.031; Accession=PF02985.12; Description=HEAT repeat
MIMPSSSFHLNLKQISCLAENTNHVVVFDEVLSVAGKDICTKDIPRIRGGWAIQDVFYAFSQHKELALLFLEYTLSILHKEPVIINSSEKGESTSESLADDCILQATMFALNAFMRYWSPFDGSLLMLRMVGTFSSADFTYFKKTSKLYRGGGKIGKQAVEKSYPSVLSGLILKLGSLNGVAELGRNELLRSLLIAFQSFCECVGDVEMGKVLPTCVILCNALNRNQRAEREAAAAALSEFIHHIEKEPTLLEQMVEEMCQHVSDDSPTVRSLCLRGLVQVGLYSLTNIEFKVLNLSEQDAVGPILINLLVRLRNLQAAVEAAQAVAAQETEQEALPKPSKVRATVAATHARECVVVLAWEKATLIALEWQLKDAEEDATFKEDDDHSIPDDGGTYEATKVANPTCRRLLSRTSAPSSCLF

SEQ ID NO: 77770 - protein, 73 aa, Zea mays
  Coding DNA Sequence Number=SeqID_35991
MATGRHGCSALRLGRKRGVRPWRTGQKPRFGHGPGNKLSPSVWKDTEGQGGTEGKREEARGDGRQGCSALRLG

SEQ ID NO: 77771 - protein, 85 aa, Zea mays
  Coding DNA Sequence Number=SeqID_35992
MGGRAVRPCVWAENEVFAMAHGPKTESRARPQKLVKVKVERREKGRRRAVTGGMAVRPCVWAENEAFAMARGPKKGGWGTASEIS

SEQ ID NO: 77772 - protein, 95 aa, Zea mays
  Coding DNA Sequence Number=SeqID_35993
MAVRPCVWAENEAFAMARGPKTTGTLELRENDTEACGMAVRPCVWAENENSPKSWEGVSSAEPRTPSRPSRGRSAPYRAQLRLALLAAWPAMVRP

SEQ ID NO: 77773 - protein, 67 aa, Zea mays
  Coding DNA Sequence Number=SeqID_35994
  Subcellular localization annotation: CTP_CleavageSite=29; ConfidenceScore=5.02e-01
MANGPKRIFGHGRENGHVDGHGTLPWSPRVSSAEPRTPSRPSRGRSAPYRAQLRLALLAAWPAMVRP

SEQ ID NO: 77774 - protein, 67 aa, Zea mays
  Coding DNA Sequence Number=SeqID_35995
  Subcellular localization annotation: CTP_CleavageSite=29; ConfidenceScore=5.37e-01
MANGPKTDFRARPRKRAHGWARDPPVVPRVSSAEPRTPSRPSRGRSAPYRAQLRLALLAAWPAMVRP

SEQ ID NO: 77775 - protein, 210 aa, Zea mays
  Coding DNA Sequence Number=SeqID_35996
  Subcellular localization annotation: CTP_CleavageSite=39; ConfidenceScore=5.02e-01
MANGPKTDFRPRPRKRSRGRARDPPVVPPRETWKFGSTREGKRNSPKSWEGVSSAEPHTPSRPSRGRSAPYRAQLRLALLAAWPAVRLRWRMSCLGPVTAWRTPAAVQPTPGARVPSLVRASYACCAEKCLRAATRPTGSRARYTLPSSSSPPGVRLVGSRAPAAFASCRRRPMAGGTEDTSLALLVSDVAHAEGRRRVGVTRPRIGPPE

SEQ ID NO: 77776 - protein, 205 aa, Zea mays
  Coding DNA Sequence Number=SeqID_35997
MKENNVDAESNKERRGLTGVNDDDYGAAQKQQTTGGHHSVLLTAQHPTWKDHRTHGTRAERAARKPGKVPGLQEQRRFAEGLRSEGRWGELLLWRGSQAGEGRWPWEGAAARKCGRPWGGNSRGKHLGSGERAQEADSALRDGPWLGRAELLATCVSAMERLLAAMEQKGALGGDELGAGNNKGASMEGVDPAMACSCSQLCAES

SEQ ID NO: 77777 - protein, 142 aa, Zea mays
  Coding DNA Sequence Number=SeqID_35998
MATGRLLRAVLGRQSQQGKARGHGEMELRILSSTYGASIWWGCGEKEIGALLLAAQGTRGEQSCWPPVRQPWRGFLQPWSRRGRWEGMSCCWNSWAPWTGSWATMEVEKGAARLGKQGRWSWEGAAKERARRGALRRLGRHG

SEQ ID NO: 77778 - protein, 165 aa, Zea mays
  Coding DNA Sequence Number=SeqID_35999
METSKTIAVEAIEKTPLGSKMIEASAAVVDAPSILLGTTKIEDSRMEQQPKLQDPPAAQGLPKIALVLEVTPKKGRRMANVLDAVLTPSKVVMPSATKISKDKSEELKKASESTALDYVVAKPSESRPTKQLSERSCRLVKARSASLHQAVEPEASSASSHPFAG

SEQ ID NO: 77779 - protein, 105 aa, Zea mays
  Coding DNA Sequence Number=SeqID_36000
  Subcellular localization annotation: CTP_CleavageSite=62; ConfidenceScore=5.46e-01
MSSLKHVIGAFVSSRGGQICKSTPGGGARSQFRKLSFPLRRISMLLWPPNCLPQSILDIFVPNDLRKEKGDRPPGTSNCITFESQRIWGASGGIRAVRLAAGRNP

SEQ ID NO: 77780 - protein, 164 aa, Zea mays
  Coding DNA Sequence Number=SeqID_36001
MDESGVKKEIGLLGLVMVSHLSPRGSGTLQVVSELLGWPQDVTLSSIQKFLSQNYFLNKILALIPSFQTCFPPFLLSEVRWRFAAKPAFARMKMVSPSCLRACTVRLGIRSQPEYDGREFVEHGIEKCVVTVYIGSSPYLRGHRFKDTCQVIARKALMVPVSDL

SEQ ID NO: 77781 - protein, 99 aa, Zea mays
  Coding DNA Sequence Number=SeqID_36002
MPWIWDRVSLNPAIPYMKRQSRTGSGEMARVARTLLAKDRLKRMVNDVAEVPDLSASRDNSDLAEDDPCDPTTTSKPEAPMQSLNQLPMVTDLADARSA

SEQ ID NO: 77782 - protein, 66 aa, Zea mays
  Coding DNA Sequence Number=SeqID_36003
MPWIWDRVSLNPTIPYMKRQSRTGSGEMARVAHTLLAKDRLKGVVMRSTLGVPVAGGRFQFWRRIS

SEQ ID NO: 77783 - protein, 159 aa, Zea mays
  Coding DNA Sequence Number=SeqID_36004
  Homolog annotation: Hit_ID=Q5K448; Match level="QueryCoverage=48%, HitCoverage=69%, E-value=2e-26, Identity=74%"; Hit description =Putative integrase
MGKWLINLDQALSRQSRPSVSIKDRTVDWPVVVETLPLATYPGMGQGKLEPGYSIREGTIAHWEWRDGESSMYPPGTEHACNAAEDALSKLGSSRAQVPPRVFVQEVPRPSILSDQAEECNALSQPESDSNDWREPIIKYIKNEEEPDDKAAAERIARQ

SEQ ID NO: 77784 - protein, 170 aa, Zea mays
  Coding DNA Sequence Number=SeqID_36005
  Subcellular localization annotation: CTP_CleavageSite=63; ConfidenceScore=5.43e-01
MGRGNGHTCSTVADTSGSRPFVHRASQPDFTGGPRSTSPDFGLSPPRVDRAHRPDSSPPTSIPACARGPTDGDPHTVVIPETSPTSSTTSPEQSRRRSYTSKVVISKSTYHIMHISYALHSLDCNLADGEYVLIPEQGLVQEEDQEQASEAAIEDLPAAPAIEGKPRFYA

SEQ ID NO: 77785 - protein, 109 aa, Zea mays
  Coding DNA Sequence Number=SeqID_36006
MDRPTPAISDGVLHTVVIPETSPSSSTTSPEQSRRRSYTFKVVISKSTYHIMHISYALHSLDCNLADGEYVLIPEQGPVQEEDQEQASEAAIEDLPAAPAIEGKPRFYA

SEQ ID NO: 77786 - protein, 99 aa, Zea mays
  Coding DNA Sequence Number=SeqID_36007
MDNKNPVNLQPPEPHYKNKEHLSPTLSYTSKVVNSKSTYHIMHISYALHSLDCNLADGEYVLIPEQGPVQEEDQEQASEAAIEDLPAAPAIEGKPRFYA

SEQ ID NO: 77787 - protein, 98 aa, Zea mays
  Coding DNA Sequence Number=SeqID_36008
MTVGVSEALYAKAVSPDLLTGNRWGRLISEVEDLLGLPAAVMCSNCYVAFPQFEVAEDDEDEGALRWCEVQPSLWIYVAETQPRSFVKWEDVAVRIVG

SEQ ID NO: 77788 - protein, 645 aa, Zea mays
  Coding DNA Sequence Number=SeqID_36009
MCSHCYVAFPQFEVAEDDEDEGPLRCAARMSSERDLVEDFIGYGVWPLPHGWVLGEDGSVRIVGRYAPRTESLQSWDIRGSNVRLNWVFELNRLPYGGYPGDDAAAAVDCRGKKPVVVAKEGPSREAAPTTKKRKIGTAVGGLGVSDRFAVELMGTCAALGGRMSSPELRESSARMLKIFPYGRNIAAVVSALMDKDRQDAARKRRAITRVGDHMREVKRAWGGAKSTTPGSSKPPPAAKPAVPGPSKSSAGSRAAASGAGKPPSTEPVKERRSPSPVRTDKAATGGADFDMNICVDDYLIGSDAGQLAIVPSPVAATSRAAVVRAKDTSQDPWSNLCASGQISSAAAIKDVAGSVSEQLRHVSRQLKHAAAIANHVESGTLTSEFAVERQRLEGTIERLRAQHTDVVQDKSAVENKRRRLAERLAAAEAEKEDVRRRLAEERRDANKACAEAQSAQAEAKLTRAEASLARQRAGEMETMLGSLLDRLDKTESSMRAEVERTHTQLVDAYREMGARTTPFEAPSQEVGLRFLGWLQKELEVLPTIVTSLMSFASRVTCEGAVNALSREGCRHFEAFDQSDEGFEREIFQVEDPVLKQSVGALFDRMWGLTAERLSERGPIGRWIRWRMTKRLRTLVIWTARCPRH

SEQ ID NO: 77789 - protein, 85 aa, Zea mays
  Coding DNA Sequence Number=SeqID_36010
MDQMAHDEGVEDLGDLDSTLPEASGVELAPPSDAGEGPSATPTPIGAGGDPAPATALTGEDASKVVGEPAAEAPTASAGPSQVAE

SEQ ID NO: 77790 - protein, 86 aa, Zea mays
  Coding DNA Sequence Number=SeqID_36011
MWAVTQSELVRSNPRVMKAGEHREDKEGESFVRFGHGGGLTPSGITVKKKGDRPPGTSNCITFESQRIGDASGGIRAVRLAAGRNP

SEQ ID NO: 77791 - protein, 44 aa, Zea mays
  Coding DNA Sequence Number=SeqID_36012
MDESGMKKGDRPPGTSNCITFESQRIGDASGGIGAVRLAAGRNP

SEQ ID NO: 77792 - protein, 44 aa, Zea mays
  Coding DNA Sequence Number=SeqID_36013
MDESGYEKGDRPPGTSNCITFESQRIGDASGGIRAVRLAAGRNP

SEQ ID NO: 77793 - protein, 65 aa, Zea mays
  Coding DNA Sequence Number=SeqID_36014
MAPKRKTASSSAAVIPPIDPNSQLPFAEKGDRPPGTSNCITFESQRIGDASGGIRAVRLAAGRNP

SEQ ID NO: 77794 - protein, 54 aa, Zea mays
  Coding DNA Sequence Number=SeqID_36015
MPQSISDIYVPNDLIKEKGDRPPGTSNCITFESQRIGDASGGIRAVRLAAGRNP

SEQ ID NO: 77795 - protein, 324 aa, Zea mays
  Coding DNA Sequence Number=SeqID_36016
LLGLVIVSHLSPRGLGTLQVVSELLGWPQDMEVQCQTSFCHNEDGFPKLLRACTIRLVIRSQAEYDGREFVEHGTEKCVVIIYIGSSPYHVEWSVTAAGHRFKDTCQVVARKALRALCQIYEEEVANTPLRFFPPFQRDRPAWMARMRALEEQQLLEDDPTVVYLTAYMLTLDAQYDFLARHHRQMIAREEDAEKLNPLKQAKDEHVQKLMEAYVVTHNQRRALRIQEPASYNPVQPRRAEDPQILEVSPKAMDKQEHPESSQDPPPELCEPLTMKKIPAPSLEVKEKAASTPPAPSPSEELQEPVPLEEEFDPVLPSQSPLEE

SEQ ID NO: 77796 - protein, 151 aa, Zea mays
  Coding DNA Sequence Number=SeqID_36017
  Subcellular localization annotation: CTP_CleavageSite=26; ConfidenceScore=5.38e-01
MASSPLQRALSPNLLAANTMEPSSFSAAAAAPFPFSPLWCAAPSLPLNAADRTAPLLLHSSPSNIFGARFGALSICVASLRTRALCRAIPLLQPSLVHAQRRTSLLHVPLRACQAFGEMSRWGAAQRTARRGAHRVLAAFAQPRRRHHSFR

SEQ ID NO: 77797 - protein, 151 aa, Zea mays
  Coding DNA Sequence Number=SeqID_36018
  Subcellular localization annotation: CTP_CleavageSite=26; ConfidenceScore=5.23e-01
MASSPLQRALSPNLLAANTMEPSSFYAAAAAPFPFSPLWCAAPSLPLNAADRTAPLLLHSSPSNIFGARFGALSICVASLRTRALCRAIPLLQPSLVHAQRRTSLLHVPLRACQAFGEMSRWGAAQRTARRGAHRVLAAFAQPRRRHHSFR

SEQ ID NO: 77798 - protein, 209 aa, Zea mays
  Coding DNA Sequence Number=SeqID_36019
  Subcellular localization annotation: CTP_CleavageSite=26; ConfidenceScore=5.38e-01
MASSPLQRALSPNLLVANTMEPSSFSAAAAAPFPFSPLWCAAPSLPLNAADRTAPLLLHSSPSNIFGARFGALSICVASLRTRALCRAIPLLQPSLVHAQRRTSLLHVPLRACQAFGEMSRWGAAQRTARRGAHRVLAAFAQPCRRRHSFRKGTPCFVWRRRQVVQRSSMFGAMHKSESPSFLQTPFGFDMVKLGEKRKLRDIYLVFGR

SEQ ID NO: 77799 - protein, 178 aa, Zea mays
  Coding DNA Sequence Number=SeqID_36020
  Subcellular localization annotation: CTP_CleavageSite=58; ConfidenceScore=5.35e-01
MEDGVLKLFGMMSKRNSGHGRAPSPSARHVRWRGAVSGRGQSPGYGSGVAARGREGVRGSQWRDDATGGTETSGTGTTTTAREFHGSIGLDGKITLTFPYRPLRHPSTGSHVHLLDRAPPLHYHIPEIAPSPRLPPSTSRASQTGDLASRARCSTVARVSLRHHPEQLENAILHLITV

SEQ ID NO: 77800 - protein, 57 aa, Zea mays
  Coding DNA Sequence Number=SeqID_36021
MEDGVLELFGMTSKRNSGHGRAPSPRCEWRDDATGGRAASGSVSDRASRCGGGRERQ

SEQ ID NO: 77801 - protein, 158 aa, Zea mays
  Coding DNA Sequence Number=SeqID_36022
MAGMKAKSHQQPIILRSTCKNCVTSKAEYTNTQLDLPVTALVPTITGMGDHVSGRVRRASAGRFTQFFYYHWILTLEEMEDGVLKLFGMMSKRNSGHGRAPSPRCEVGPSARHARWRGAVSGRGQSPGYGSGVAARSREGVRGSQWRDDATGGRETSG

SEQ ID NO: 77802 - protein, 225 aa, Zea mays
  Coding DNA Sequence Number=SeqID_36023
  Homolog annotation: Hit_ID=Q653X2; Match level="QueryCoverage=18%, HitCoverage=12%, E-value=9e-09, Identity=65%"; Hit description =Solute carrier family 35, member F5-like
  Subcellular localization annotation: CTP_CleavageSite=38; ConfidenceScore=5.10e-01
MTENLASVPYTSFPAQAELTVVGCSKGLDAKGRWTRARVAQLTSNLSLRYTTVTFLASFEFGEENSNVFADLKDDNGSDSGINFDYNDPDMPNNIDVDLDVPTYPDELSGIWVMIHFHFSYAQIIVATPKSTHGTHDGIDTHESLDDDLCWLHQCYAFPFNFPFARNLHNLESLALTLEIHKEIQSKGGKQHTQIHSKIRTHTAKNRAQKTIPKFSLERSSNHLE

SEQ ID NO: 77803 - protein, 126 aa, Zea mays
  Coding DNA Sequence Number=SeqID_36024
MTQQSGEMEMEHSLRMSPSKGAHTILSFEFGEENSNVFAYLKDDNGSDSGINFDYNDPDMPNNIDVDPDVSTYPDEIIAATPKSTHGTHDGIDTHESLDDDLCWLHLFNCALLNIFSHPASCFRHL

SEQ ID NO: 77804 - protein, 331 aa, Zea mays
  Coding DNA Sequence Number=SeqID_36025
MVGIVSPEHTKSFEAQQSQEEQHYGFQSPSCFEKELKIEFSSKLGGPVGPNTRTFVDEIVLFTKKKALLIGVKKWKYIELNIRSSIASDILRDLETGIEPTDLTLWISTHCKNGEWSKEASHGIYEKAPEKIVEKVYQDDIFVLTREEENAIFQTSFKETTGCKANRLHDHGYLSRYPTRSQVMNSKFLEQACATAATNQKNIELESQVQLLNEKLSNRESITPVDPPLVIPTKTLRLIPADPLAPTPSSENNIRTPDTNNKKDNVPVNYINSYTLRNGTICKCKREAKQINLRSYIEVCLSFLASFEFGEENSNVFGDLKDHNGSDTGII

SEQ ID NO: 77805 - protein, 89 aa, Zea mays
  Coding DNA Sequence Number=SeqID_36026
METVGSIREESEAEHRLRVEKACGSLRSYSTVVFVKVSSPAKGVPARFASVGPAAAAKAWSEGWRLCLRPNICPPRDQFDKVTWCRRRR

SEQ ID NO: 77806 - protein, 255 aa, Zea mays
  Coding DNA Sequence Number=SeqID_36027
MSVDRAKQRGREKTHGVSRVDGDEAELTETTDATETRRRPQNEQRTTVELHGCARGARERGARGSARAQLSEWVHVLERGRARGGGQETRVHVEECGREVREGEVADRWGQRASEGAYANRRSTLTERAHRTEGGSKHVRERTGADKPAPPRNGRERARTRAIADSWLTGGTQLAHRWHTFGAPDYPPPSCTGGNEARGVSARSSIVETAGSIREEPEAEHHLRVEKARGSLRSYSTEVLGPRVGFPLRRGTNED

SEQ ID NO: 77807 - protein, 79 aa, Zea mays
  Coding DNA Sequence Number=SeqID_36028
MAVGRVIPALELPINYSGNAQLQPSSLKLKSKVEMQTLMDDAGLYRGIRNHAMSCLILVGAAMQREAHTRAKHLGRVTP

SEQ ID NO: 77808 - protein, 159 aa, Zea mays
  Coding DNA Sequence Number=SeqID_36029
  Subcellular localization annotation: CTP_CleavageSite=71; ConfidenceScore=5.23e-01
MAQSIVGSLRAIGAPDMSSAHWTVRCPLLAVGLATCPAQIARPTVGSPEQSGAHRTVRVNYSHTSSVKFPRAATSLEPAWRTGHCPALVLDTKSPKYLEMAQGHISLSTLRGKRLDGGVSVLPVRKRQFFVAFALRWFPRKKNKSEATGGLGPPYRTFV

SEQ ID NO: 77809 - protein, 57 aa, Zea mays
  Coding DNA Sequence Number=SeqID_36030
MAIVVCTLRGKRLDGGVSVLSVRKRQFFVAFAPRWFPRKKNKSEAAGGLGPPYRTFV

SEQ ID NO: 77810 - protein, 78 aa, Zea mays
  Coding DNA Sequence Number=SeqID_36031
MARVACTLRGKRLDGGVSVLSVRKRQIFVAFAPRWFPRKKNKSEAAGGLGPPYRTFVKELIGRSFYLPWYCNNITLHS

SEQ ID NO: 77811 - protein, 82 aa, Zea mays
  Coding DNA Sequence Number=SeqID_36032
  Gene Ontology: Mol. function=binding; Cellular component=thylakoid; Biological process=photosynthesis
METVKTSALYSIDHSGDELFAKFYAALDEINFFKTSPAGAEDPGLLSKATQYFDDALLAMQKLGKKRASLVDIAESFKSREN

SEQ ID NO: 77812 - protein, 252 aa, Zea mays
  Coding DNA Sequence Number=SeqID_36033
  Gene Ontology: Mol. function=binding; Cellular component=thylakoid; Biological process=photosynthesis
MGVLPANGMDMHVACRMAWSPPHIACQWDEQGSLNAEAARHLPVEWTESRDPAMSGPDPTQRGPKTVLGVRLAPVEVLDLTQGSDTFPWGPGPTVDALSNIVFSGHVAAPEPSTWWVELAPGVDPEALEVDKDCLESIFSVNSTATGDAIQPGLLFELFASLEANERDQARAALLSQSVSNKPSQTAGDELFAKFYAALDEINFFKTSPAGAEDPGLLSKATQYFDDALLAMQKLGKKRASLVDIAESFKSR

SEQ ID NO: 77813 - protein, 227 aa, Zea mays
  Coding DNA Sequence Number=SeqID_36034
  Gene Ontology: Mol. function=actin binding; Cellular component =cytoskeleton; Biological process=sensory perception of sound
  Homolog annotation: Hit_ID=Q9AWU6; Match level="QueryCoverage=82%, HitCoverage=30%, E-value=1e-101, Identity=92%"; Hit description =Putative WD40-repeat protein
  Pfam annotation: Domain name=WD40; Domain location=127-165; Score =42.2; E_value=1.7e-09; Accession=PF00400.22; Description=WD domain, G-beta repeat
  Pfam annotation: Domain name=WD40; Domain location=39-78; Score=19.2; E_value=0.015; Accession=PF00400.22; Description=WD domain, G-beta repeat
  Pfam annotation: Domain name=WD40; Domain location=82-120; Score =32.2; E_value=1.8e-06; Accession=PF00400.22; Description=WD domain, G-beta repeat
  Pfam module annotation: Pfam domain module=WD40::WD40::WD40; Domain location=127-165::39-78::82-120
MDEVFVEIGTILVGALNDQPAPGPRHPSELFALCRWDSDSTVGEFDGHSKRVLSCDFKPTRPFRIVTCGEDFLANFYEGPPFKFKHSIRDHSNFVNCIRYAPDGSKFITVSSDKKGLIYDGKTGEKIGELSTEGGHTGSIYAVSWNPDSKQVLTVSADKSAKVWDIFEDASGKLNRTLVCPGIGGVDDMLVGCLWQNGHLVTVSLGGTFNVFSASNLDQEPVTFEDS

SEQ ID NO: 77814 - protein, 393 aa, Zea mays
  Coding DNA Sequence Number=SeqID_36035
  Homolog annotation: Hit_ID=Q9AWU6; Match level="QueryCoverage=22%, HitCoverage=14%, E-value=7e-41, Identity=91%"; Hit description =Putative WD40-repeat protein
  Pfam annotation: Domain name=WD40; Domain location=21-58; Score=35.9; E_value=1.4e-07; Accession=PF00400.22; Description=WD domain, G-beta repeat
MTSLLQGPGMHLRSEPQCWKFKGMGELPGPGSIYAVSWNPDSKQVLTVSADKSAKVWDIFEDASGKLNRTLVCPGIGGVDDMLVGCLWQNDHLVTVSLGGTFNVFSASNPDQEPVTFEDVEEELVTSGYDYKPSVLPFCDLSRPILPTNPTRPLPPCLPSPPILFLPVAASPAATGFASRLTVVSMGDNYDDEGEPIMNLNEREPSPEHQPYEDLDDDLDGGGDWTRDRSPTPVHGDDGAGSSSKPRKHLLKKGGGGGMPSDDGLDDYGLADEDADPSDEARKRKGRASKEPLFPSPSARVRRRRSALVRRPSGRGAEKKDDRVLVPDLGSLTSIHDRARELFYYLKGGQVDYGEDHNKTCGHNRFGRIYHTGHYPICYEHNPVHFVGHSAGA

SEQ ID NO: 77815 - protein, 96 aa, Zea mays
  Coding DNA Sequence Number=SeqID_36036
MARITTRLAATTGLGEYITQGTILFVTSTTQCILWGTLLARRGSCGGKDQNNDKKPLHLVKGAFGQVALLSVLGRGCSTRKLSFKPLDSVMIVQTV

SEQ ID NO: 77816 - protein, 100 aa, Zea mays
  Coding DNA Sequence Number=SeqID_36037
MVHDQRPWYRQAPSSKILGAHSQEALSFAAVPYVLNHDTITKLAPILNRMCFAVGRRRPFVSQLHRGRGPEKVQFTIKCFSRYMRRSGFHPDRIRRDVRV

SEQ ID NO: 77817 - protein, 102 aa, Zea mays
  Coding DNA Sequence Number=SeqID_36038
  Subcellular localization annotation: CTP_CleavageSite=22; ConfidenceScore=5.02e-01
MSARRTHKVPCVQFASSDDTVLSESVGRAAITQFYPNRIRCTILGKTQRKSFTVGHRRPFVNQLHRGRGPEKVQFTMKCFSRYMRRSDFHPDMIRKDVRVQL

SEQ ID NO: 77818 - protein, 131 aa, Zea mays
  Coding DNA Sequence Number=SeqID_36039
MKKVAVVATILSGIWNQVEQLQSELRYRNDLWVADAVIRYLQDQLAKRDLVLDWTGNSRLLTWAKEAKARDCVKELSLVTDNLQVCGNTLHEEVHVLYSQLHPNVPANPVGMEARPSHVAGEALHGELDLF

SEQ ID NO: 77819 - protein, 298 aa, Zea mays
  Coding DNA Sequence Number=SeqID_36040
  Homolog annotation: Hit_ID=Q6QP51; Match level="QueryCoverage=47%, HitCoverage=71%, E-value=1e-15, Identity=40%"; Hit description =Putative growth-regulating factor 1
MTSGRMLLPQGPRPRPHSRGEDEQKAVELEVPTSVKLRSSNDDKAEELRAPPIRGLGRWKNVMHEGSAKTLLPFEGVTLLLKATHPTRVLGHRGLSLLQHAPRSSPYDTGAGSHASCKLAQGRRSQTVAHGIGKGDTPKGILLREGSGPRAPLLIRGSKACPSEGFNSRLRALGLHAHYWSEVRRPAPWKGSTAASGHSGSAPTTDQGFVGWPPKGSTAASDAERGMTLGQGSVHSRDTISPHPSPASGKGSRPRRIHVSPEDPLKQRTHLRLARGPIFAKKQPWPDRHANRPNRRSI

SEQ ID NO: 77820 - protein, 361 aa, Zea mays
  Coding DNA Sequence Number=SeqID_36041
  Subcellular localization annotation: CTP_CleavageSite=37; ConfidenceScore=5.19e-01
MGSARDSSALSSSEERNFSEVGSPAASPRRWSPKTVTTSSGVGRSKPGCDLCPALSFKDLHHPGWGRGRTKPELYLPRSFVGHLLPQHSGERALTGLAGGSDFDNAGLVGGECRQLQRVELAGSVGSGSAPGAPSCHESGRRASRTGGPPKTSRAARAAFVFLGCLAFAPMASVVGAEVVAAKEVLVADGITATILAPGLRLFGFDSLSSPLEWGRGRGPCCSSVRAEAIAAAVWPPGAEVVVAAAGAGIGEPPGVSSPRRPSNVGGCSYLRGWNRSSVCNDTLSAGVCSLWLSGPEHESLGSVGLAARGFSCLVKGTLGRSVARSDFAEGGVDAEGAAAPPPSRIVCPSKSYFSRKAMSE

SEQ ID NO: 77821 - protein, 397 aa, Zea mays
  Coding DNA Sequence Number=SeqID_36042
  Subcellular localization annotation: CTP_CleavageSite=37; ConfidenceScore=5.19e-01
MGSARDSSALSSSEERNFSEVGSPAASPRRWSPKTVTTSSGVGRSKPGCDLCPALSFKDLHHPGWGRGRTKPELYLPRSFVGHLLPQHSGERALTGLAGGSDFDNAGLVGGECRQLQRVELAGSVGSGSAPGAPSCHESGRRASRTGGPPKTSRAARAAFVFLGCLAFAPMASVVGAEVVAAKEVLVADGITATILAPGLRLFGFDSLSSPLEWGRGRGPCCSSVRAEAIAAAVWPPGAEVVVAAAGAGIGEPPGVSSPRRPSNVGGCSYLRGWNRSSVCNDTLSAGVCSLWLSGPEHESLGSVGLAARGFSCLVKGTLGRSVARSDFAEGGVDAEGAAAPPPSRIVCPSKSYFSRKAMSEKVMSEASVSRRRRSASARSALAAYVYSVVFRIPLSK

SEQ ID NO: 77822 - protein, 493 aa, Zea mays
  Coding DNA Sequence Number=SeqID_36043
  Gene Ontology: Mol. function=transferase activity; Cellular component= nucleus; Biological process=regulation of transcription, DNA-dependent
  Homolog annotation: Hit_ID=Q8L8G6; Match level="QueryCoverage=84%, HitCoverage=98%, E-value=0.0, Identity=65%"; Hit description=Histone acetyltransferase complex component
  Pfam annotation: Domain name=C1_3; Domain location=51-81; Score=6.4; E_value=0.09; Accession=PF07649.3; Description=C1-like domain
  Pfam annotation: Domain name=ZZ; Domain location=47-92; Score=41.6; E_ value=2.7e-09; Accession=PF00569.8; Description=Zinc finger, ZZ type
  Pfam module annotation: Pfam domain module=C1_3::ZZ; Domain location =51-81::47-92
MGRSRGVLSSGDDDTGHRSKRRRVSSGGDATDSISASIGGAGEGGGKKALYHCNYCNKDISGKIRIKCSKCPDFDLCVECFSVGAEVTPHRSNHPYKVMDMSHVNGKNRKELLAMAKVQGESKKGTLLLPGELTPKVESQFSPSRVKVEDALGEGPAGRSPSHMAVDVHVDRSVGVKKPRYSADEGPSLTELSGYNAKRHEFDPEYDNDAEQALAEMEFKETDSETDRELKLRVLRIYLSRELYHRYKVFMRFLSKEEHEALVRSVIEERKIRRRIQELQECRSAGCRTLAEAKIHIEQKRKKEYELNAQKAKDSSQLNANNKSVQKMNRPMKIESDGNLDPKKGGAGLDSPKTTGPTSVKQWDDWDIVGLPGAELLSASEVLMQEIFKGSVLKKEDAHVLFKVDPTKVDSVYDMTNEKGEFWVAIHCRRSLYARLMSRHVKLRKFLLSLPIPAKYHYLMQIGGKLHAEKDGKLWIGSVLMPFIAVFDLTMSG

SEQ ID NO: 77823 - protein, 429 aa, Zea mays
  Coding DNA Sequence Number=SeqID_36044
  Gene Ontology: Mol. function=transferase activity; Cellular component= nucleus; Biological process=regulation of transcription, DNA-dependent
  Homolog annotation: Hit_ID=Q8L8G6; Match level="QueryCoverage=99%, HitCoverage=100%, E-value=0.0, Identity=67%"; Hit description =Histone acetyltransferase complex component
  Pfam annotation: Domain name=C1_3; Domain location=51-81; Score=6.4; E_value=0.09; Accession=PF07649.3; Description=C1-like domain
  Pfam annotation: Domain name=ZZ; Domain location=47-92; Score=41.6; E_ value=2.7e-09; Accession=PF00569.8; Description=Zinc finger, ZZ type
  Pfam module annotation: Pfam domain module=C1_3::ZZ; Domain location =51-81::47-92
MGRSRGVLSSGDDDTGHRSKRRRVSSGGDATDSISASIGGAGEGGGKKALYHCNYCNKDISGKIRIKCSKCPDFDLCVECFSVGAEVTPHRSNHPYKVMDMSHVNGKNRKELLAMAKVQGESKKGTLLLPGELTPKVESQFSPSRVKVEDALGEGPAGRSPSHMAVDVHVDRSVGVKKPRYSADEGPSLTELSGYNAKRHEFDPEYDNDAEQALAEMEFKETDSETDRELKLRVLRIYLSRELYHRYKVFMRFLSKEEHEALVRSVIEERKIRRRIQELQECRSAGCRTLAEAKIHIEQKRKKEYELNAQKAKDSSQLNANNKSVQKMNRPMKIESDGNLDPKKGGAGLDSPKTTGPTSVKQWDDWDIVGLPGAELLSASEVLMQEIFKGSVLKKEDAHVLFKVDPTKVDSVYDMVSKKLGNHEEAPTV

SEQ ID NO: 77824 - protein, 498 aa, Zea mays
  Coding DNA Sequence Number=SeqID_36045
  Gene Ontology: Mol. function=transferase activity; Cellular component= nucleus; Biological process=regulation of transcription, DNA-dependent
  Homolog annotation: Hit_ID=Q8L8G6; Match level="QueryCoverage=83%, HitCoverage=98%, E-value=0.0, Identity=65%"; Hit description=Histone acetyltransferase complex component
  Pfam annotation: Domain name=C1_3; Domain location=51-81; Score=6.4; E_value=0.09; Accession=PF07649.3; Description=C1-like domain
  Pfam annotation: Domain name=ZZ; Domain location=47-92; Score=41.6; E_ value=2.7e-09; Accession=PF00569.8; Description=Zinc finger, ZZ type
  Pfam module annotation: Pfam domain module=C1_3::ZZ; Domain location =51-81::47-92
MGRSRGVLSSGDDDTGHRSKRRRVSSGGDATDSISASIGGAGEGGGKKALYHCNYCNKDISGKIRIKCSKCPDFDLCVECFSVGAEVTPHRSNHPYKVMDMSHVNGKNRKELLAMAKVQGESKKGTLLLPGELTPKVESQFSPSRVKVEDALGEGPAGRSPSHMAVDVHVDRSVGVKKPRYSADEGPSLTELSGYNAKRHEFDPEYDNDAEQALAEMEFKETDSETDRELKLRVLRIYLSRELYHRYKVFMRFLSKEEHEALVRSVIEERKIRRRIQELQECRSAGCRTLAEAKIHIEQKRKKEYELNAQKAKDSSQLNANNKSVQKMNRPMKIESDGNLDPKKGGAGLDSPKTTGPTSVKQWDDWDIVGLPGAELLSASEVLMQEIFKGSVLKKEDAHVLFKVDPTKVDSVYDMTNEKGEFWVAIHCRRSLYARLMSRHVKLRKFLLSLPIPAKYHYLMQIGGKLHAVIIKYSPEGQVLDILEDTKGEVRRRTGSSG

SEQ ID NO: 77825 - protein, 207 aa, Zea mays
  Coding DNA Sequence Number=SeqID_36046
MSKQTGAASFIHTQILENHECISRRHLTGARQGRDSKIERIIGSGLAIGRGAGRMREHRHCKDEHEPQPGCGEGAGQAAANCAAVCCCFPLALLDVLLLVTVRLPTGVMRRVRRRRRHRGPTGAGAGANRKRPASAGAAPAPPSGSSAKAMIGATLVTEKEEKARGEAESSAATAELEREIMDSHFYGAGFWRSVSSSSSSSSMRCQ

SEQ ID NO: 77826 - protein, 394 aa, Zea mays
  Coding DNA Sequence Number=SeqID_36047
  Homolog annotation: Hit_ID=Q75LL2; Match level="QueryCoverage=17%, HitCoverage=5%, E-value=2e-16, Identity=57%"; Hit description =Kinesin-like protein
FKGAHIRILSPDMWVRDKWKEETTACNAKHRVSAWAGSSSVMRTGPHQAGPGHVSAPDPCLSKAWVFSVPESRDPVVGSPDPHRGVRDPSRGSGSRPWGSRTLPEGPVYMNRHPRSMTRGPGPVSETGPLLSSSMLEIDIERFVRDNTFAEIWEGRAKDMEASLVEYQDCVFQVNLKEEEIKVRNESLQYQARDSDELQSKLKPNDAGAGRRHLTGARQGRDSKIERIIGSGLAIGRGAGRMREHRHCKDEHEPQPGCGEGAGQAAANCAAVCCCFPLALLDVLLLVTVRLPTGVMRRVRRRRRHRGPTGAGAGANRKRPASAGAAPAPPSGSSAKAMIGATLVTEKEEKARGEAESSAATAELEREIMDSHFYGAGFWRSVSSSSSSSSMRCQ

SEQ ID NO: 77827 - protein, 510 aa, Zea mays
  Coding DNA Sequence Number=SeqID_36048
  Homolog annotation: Hit_ID=Q75LL2; Match level="QueryCoverage=13%, HitCoverage=5%, E-value=2e-16, Identity=57%"; Hit description =Kinesin-like protein
NSPFSGRGADPRCAQQRRNRGGIHIVPRKKRKKENTHRSVSISCHQRNQRDTTSPQVEEGKAVRTERSCKRKHTLDPVEHLLDLGTAAAAFQPRFAVAGLVHPAHDAWTVAPAVPCLQGAHIRILSPDMWVRDKWKEETTACNAKHRVSAWAGSSSVMRTGPHQAGPGHVSAPDPCLSKAWVFSVPESRDPVVGSPDPHRGVRDPSRGSGSRPWGSRTLPEGPVYMNRHPRSMTRGPGPVSETGPLLSSSMLEIDIERFVRDNTFAEIWEGRAKDMEASLVEYQDCVFQVNLKEEEIKVRNESLQYQARDSDELQSKLKPNDAGAGRRHLTGARQGRDSKIERIIGSGLAIGRGAGRMREHRHCKDEHEPQPGCGEGAGQAAANCAAVCCCFPLALLDVLLLVTVRLPTGVMRRVRRRRRHRGPTGAGAGANRKRPASAGAAPAPPSGSSAKAMIGATLVTEKEEKARGEAESSAATAELEREIMDSHFYGAGFWRSVSSSSSSSSMRCQ

SEQ ID NO: 77828 - protein, 78 aa, Zea mays
  Coding DNA Sequence Number=SeqID_36049
MPGKANCCCPARMQHSVLLLAFVARTCRCALEWPALAGAALVERRTLPSVLTWWQLEEASPSSRPSAPPTDRPPALWL

SEQ ID NO: 77829 - protein, 179 aa, Zea mays
  Coding DNA Sequence Number=SeqID_36050
  Subcellular localization annotation: CTP_CleavageSite=56; ConfidenceScore=5.06e-01
MVAAGGSFPTVEAIGAAYGPTSGSLALMSDSPVGYLNRFTKRESPRAKVTSEVAVSARTEAKLAQKEDLVGQSLAGSSTGGTDARVESPMPRAGLMSSGDSWLRLRGGRPSRLLEPDSWRRPWRRWPGRGADVVLWSGDPPTVSPSEARPDLAEGVVDAEGAAAPFNCQDPSLQDRVIL

SEQ ID NO: 77830 - protein, 226 aa, Zea mays
  Coding DNA Sequence Number=SeqID_36051
  Subcellular localization annotation: CTP_CleavageSite=56; ConfidenceScore=5.06e-01
MVAAGGSFPTVEAIGAAYGPTSGSLALMSDSPVGYLNRFTKRESPRAKVTSEVAVSARTEAKLAQKEDLVGQSLAGSSTGGTDARVESPMPRAGLMSSGDSWLRLRGGRPSRLLEPDSWRRPWRRWPGRGADVVLWSGDPPTVSPSEARPDLAEGVVDAEGAAAPFNCQDPSLQDRGSVTDVVEKARKIVSAEEFSSVKTCSVRGITYPSVSYLSQKVISEDPLSK

SEQ ID NO: 77831 - protein, 153 aa, Zea mays
  Coding DNA Sequence Number=SeqID_36052
MRKWARPSPLLLMLLSCRSNIPLDRPTRWQGGRPSHTINYILHVPAAEERAEGLTGGEIAPTGELVGGKESGLSRAQLTNQTGQRASSGIKKGLRTWKASRANGEANRSAGATWGDWSGLATVAEALAAMAGGKELVGAKEGCLAGDGEHGVK

SEQ ID NO: 77832 - protein, 164 aa, Zea mays
  Coding DNA Sequence Number=SeqID_36053
MTRPDSSPPTSIPACARGPTDSGHLRRRPAHRCDPRDLPFVLDHFTGAISPPERSMRNSGLGLAHFLITDDIDYPLHFIFNLADGEYVLVPEQGAAQEVAPDPAPEPAPEDLPATALEGKPWNPFEIDTSSLEDMVAGVTWPSILPPGWTVEWDPASAEEEHEE

SEQ ID NO: 77833 - protein, 74 aa, Zea mays
  Coding DNA Sequence Number=SeqID_36054
MAAPSSLTEAGRRQQGLDRSNSCPSARLRRTSDSHDITPARGCALYPQAVIPILPGDHDSPLITTKVTQQGITT

SEQ ID NO: 77834 - protein, 111 aa, Zea mays
  Coding DNA Sequence Number=SeqID_36055
DALLGHLGSDQWRVMISGQNGNHGLWRYFGTGGYEIDGFGYDYGAAVGDHTTCSHDRLHWAVCNSCSTALVASGLALEAEVAVDAAELAASLLRSNQLPGLLGSASRTSAQ

SEQ ID NO: 77835 - protein, 362 aa, Zea mays
  Coding DNA Sequence Number=SeqID_36056
DALLGHLGSDQWRVMISGQNGNHGLWRHYGTGGYEIDGSGYDYGAGKWYSFRLERMARLRHTARKSVIPFLPSRLAERLLRRPVAGQSSHLERLHHRLHEEQERQRQEQQGSSFSLQQEIESVRSCSRMLPLEAPPAPPLGAPASGVAAGGDPDDGGGDDISSHDTDFSADQEPEGWVARPITRDAARGIVAGSTPDRWEATCLVRRPENSLQGAEACSEHYSISERDSAEAAMQDVARRALSHYCSVLGEVADGLDLKYYPRRPSGSTGGVIVSPVGEGNPRLNSTVNLAAVLNTELDHALDELSRARAEIALLRAERAERRHLDDGSPAPVGTQHPYRSPRRGRQPYGNPDCKTKINLEP

SEQ ID NO: 77836 - protein, 206 aa, Zea mays
  Coding DNA Sequence Number=SeqID_36057
  Homolog annotation: Hit_ID=Q6K647; Match level="QueryCoverage=49%, HitCoverage=15%, E-value=5e-24, Identity=87%"; Hit description =Putative leucine zipper-containing protein
MATSTAARYCAMSSSGASKTSASGVASPELDELVGGVEGGGGGGDLGGGGGGKVGGGEEVVVGDGGEAVVEAGEYADHVVSGVLGGGEGLDDVLRCGQDLVAAGGGRLQLLLGRWRGHRRRHHRRSAQSRGRVGIFGARGGGDLGVTPLPLPAGCRCLCLTAALGPCGVWGVCARSALRHREVKKIPESCRQIECWRKLRVFGFED

SEQ ID NO: 77837 - protein, 323 aa, Zea mays
  Coding DNA Sequence Number=SeqID_36058
  Gene Ontology: Cellular component=exocyst; Biological process =exocytosis
  Homolog annotation: Hit_ID=Q5ZCH7; Match level="QueryCoverage=45%, HitCoverage=28%, E-value=8e-69, Identity=81%"; Hit description=O -acetyltransferase-like
  Pfam annotation: Domain name=Cas1p; Domain location=102-322; Score =193.3; E_value=5.7e-55; Accession=PF07779.2; Description=Cas1p-like protein
MKKWVHGVKTVVRVLLAGECRLYDQVLDASDELMDACFLESTKGCIMQIISFGGVVAVCPRSPEKVPRILDMYEALAEVIPEMKDWCIGCSGDGVISDVQAILDRLGDVVWGNMFEFGKMFQQETSRRAMTAGEIHPMTRTLGENGPFWKASSEADILPGGQFARVYHYFAASEIYNAIRVFIACYVWMTGFGNFSYYYIKKDFSIARFAQMMWRLNFFVAFCCIVLDNDLMLYYICPMHTLFTLMVYGSLGLFNKYNEVPSIMAIKIACCFLSVILIWEIPGVFELLWAPFTFLLDHANLNMELLTYKEVHFLVLVFVIYTL

SEQ ID NO: 77838 - protein, 207 aa, Zea mays
  Coding DNA Sequence Number=SeqID_36059
  Homolog annotation: Hit_ID=Q10H93; Match level="QueryCoverage=73%, HitCoverage=19%, E-value=4e-30, Identity=49%"; Hit description =Expressed protein
MKRKDELTIEEEKQRAKAKEKLDKCVKDTLLDLCWTLGIPTPKANIRKENIVSKLLDYIVEPHSAAESWGSDDQGSNSKKRKRGGESASKTPDGTPSRSRKKFFDDDTSSKRQNKALQYDTDEDESMKSDSEENIDEDSDEVADKQEGYGSRKEKAWKKLSEVKESSGHNAGAMTDAKCSTTSLCKGIELPLAFHSGFVYKKRCIRS

SEQ ID NO: 77839 - protein, 265 aa, Zea mays
  Coding DNA Sequence Number=SeqID_36060
  Homolog annotation: Hit_ID=Q10H93; Match level="QueryCoverage=57%, HitCoverage=19%, E-value=7e-30, Identity=49%"; Hit description =Expressed protein
MKRKDELTIEEEKQRAKAKEKLDKCVKDTLLDLCWTLGIPTPKANIRKENIVSKLLDYIVEPHSAAESWGSDDQGSNSKKRKRGGESASKTPDGTPSRSRKKFFDDDTSSKRQNKALQYDTDEDESMKSDSEENIDEDSDEVADKQEGYGSRKEKAWKKLSEVKESSGHNAGAMTDAKCSTTSLCKDDGYIKNHTCKNFSHNLSKGNEPGVKNIKAMFGFFDTAIGIERTPLITTDETISSSVRSRATTVVVQGYLDIDVFGAWG

SEQ ID NO: 77840 - protein, 308 aa, Zea mays
  Coding DNA Sequence Number=SeqID_36061
  Homolog annotation: Hit_ID=Q10H93; Match level="QueryCoverage=48%, HitCoverage=19%, E-value=5e-34, Identity=54%"; Hit description =Expressed protein
MAWSSVKICLSPLSYGNHAPEDVQEDLCSALEDLRLDYVDLYLEKQRAKAKEKLDKCVKDTLLDLCWTLGIPTPKANIRKENIVSKLLDYIVEPHSAAESWGSDDQGSNSKKRKRGGESASKTPDGTPSRSRKKFFDDDTSSKRQNKALQYDTDEDESMKSDSEENIDEDSDEVADKQEGYGSRKEKAWKKLSERLCHHGAVTYEGWGWTTTVADPGITDGGGERERGREREASNPRYIHGGVLGGRDTGRWEQGGGRGRLRGTGAGTGEGATLEQRGRRACESHELAVWVPEGCLGADFAVAAGVRH

SEQ ID NO: 77841 - protein, 240 aa, Zea mays
  Coding DNA Sequence Number=SeqID_36062
MQAACDRTKGAHPFDFDASSMEAQAHTSCNQFAGCYVQETALPLTPLPCLLDCGTSTTTRGNPAHDPTVPTRHIGHGSVSRGRRRYSRYDQKWAGSNGGGRRAEAAVKSSAKLMDRERGYPERYPSPRRKRAPSPLLIRGSKAGPSEGFNSRLRALGLRAHYWSEVQRLAPRKGSTAASGHSGSTPTTDQGSLETPCSAPSKGNMALSPLLLAERRRRGRQHTSPRTWDPTIHPGYGQLA

SEQ ID NO: 77842 - protein, 108 aa, Zea mays
  Coding DNA Sequence Number=SeqID_36063
  Subcellular localization annotation: CTP_CleavageSite=51; ConfidenceScore=5.61e-01
MGAIQVKALSTQGTRSRLTRAQPRAKAADPGGFTSRPRIPSSNGRTFDSPEARLGQASRRSNLGHIATPTDRIAGAFNERKQRRLRCSDCCATRQGEADSRQDRPQAP

SEQ ID NO: 77843 - protein, 213 aa, Zea mays
  Coding DNA Sequence Number=SeqID_36064
  Homolog annotation: Hit_ID=Q6BTJ4; Match level="QueryCoverage=68%, HitCoverage=25%, E-value=8e-09, Identity=28%"; Hit description =Similar to CA1621|CaIFF6 Candida albicans CaIFF6 unknown function
MALSPLLLAERRCRGENSATCAAPTVVPPVRVRLIAAKTGLRRHRKLRLAQPPGLGLNLDLGRRTPPRPTPGLGLNLDLGRRTPPCPTPGLGLNLDLRRRTPPRPTPGLDPRLGLGRRSPPRPTPGLGLHLDLGRRTPPHPTPELGLSLDLGRRSPPRPTPGLGLSLDSGRQSPPRPTPGFGLSLDLGGVTASPDLRLRPTMSQGGHHYPTPS

SEQ ID NO: 77844 - protein, 1088 aa, Zea mays
  Coding DNA Sequence Number=SeqID_36065
  Gene Ontology: Mol. function=helicase activity; Biological process =viral genome replication
  Homolog annotation: Hit_ID=Q1EPC6; Match level="QueryCoverage=98%, HitCoverage=69%, E-value=0.0, Identity=69%"; Hit description=DNA helicase homolog, putative
  Pfam annotation: Domain name=DUF889; Domain location=755-991; Score =455.0; E_value=9.6e-134; Accession=PF05970.5; Description=Eukaryotic protein of unknown function (DUF889)
MDEVDAYRDQHRRSDANNDDTERPSHLCVSVRDYYCYRFQIRPSIFNPILHGKRLFQQFAVDTYIKIESSRLDFIRKNQDRLRADLYKGLVDSLHEGENRADKIGKRTVLSTSFIGGPRDMRRRYMDAMALVRKFGKPDIFLTMTCNPNWDEITRELLPMQSPQDRPDLVVRIFRAKLEELKKRLTKHHILGKIRAYVYVVEFQKRGLPHVHFLLIMQRKYKLTCPDQYDHLISAEIPDKKKYPELYKMVIKHMMHGPCGLLNPKCPCTKGHASCKNHYPRAFSNATSQGKDSYPIYRRRDDGRKETIRGCELDNRWVVPYNPYLFRLFNCHINVEACGSIKAVKYLFKYIYKGHDRASVAVTDANKADGDVDEIKQYRDARWVTPPEALWRIFSFDLSQNSPPVMQLQLHLENMHMVSFHERAKVNHVVQRPGADRSMLTAYFEANRLHEEAQGILYRDFPEWYTLQQGKVWQRRKRNTGGQVGRIVSAHPAEGERFYLRLLLNHVTGATSYADLRTVDGDTLPTFREAAQRRGLLEADDTIDECLNEAAIYQMPSALRRLFATILSMGKDIKTFPLPAIIDRYDDLHGTDREIYEEESIVPTTEDVALKETLNEEQRSAYDKILSVVDTNNGGVFFVDGPGGTGKTYLYKALLAALRSQDKIAVATATSGVAASILPGGRTAHSRFKIPLTIDDGVVCSFTKQSGTAKLLQKASLIIWDEASMTKRQAIEALDNSMRDIMGQSRLPFGGKTVVFGGDFRQVLPVVRKGSRAQIVAASLRSSYLWESMCHLKLFQNMRAQSDPWFAEYLLRVGGGTEEANNDGDVRLPDEVCVPYTGNDRDLDRLIDDIYPNLNENMSNTSYITSRAILSTRNDWVDMINMRMIDRFQGEQMMYHSFDTAVDDPNNYYPSEFLNTLTPNGLPPHVLKLKVGCPIMLLRNIDPANGLCNGTRLVVRGFQKNSIDAEIVLGQHAGMRIFLPRIPLCPSDDEMFPFQFKRKQFPIRLSFAMTVNKAQGQTIPNVGVYLPEPVFSHGQLYVALSRATARSKVKILAIPVHDEKKKKGVERNSAINGATYTKNIVYKEVLTP

SEQ ID NO: 77845 - protein, 1084 aa, Zea mays
  Coding DNA Sequence Number=SeqID_36066
  Gene Ontology: Mol. function=helicase activity; Biological process =viral genome replication
  Homolog annotation: Hit_ID=Q1EPC6; Match level="QueryCoverage=98%, HitCoverage=69%, E-value=0.0, Identity=69%"; Hit description=DNA helicase homolog, putative
  Pfam annotation: Domain name=DUF889; Domain location=755-991; Score =455.0; E_value=9.6e-134; Accession=PF05970.5; Description=Eukaryotic protein of unknown function (DUF889)
MDEVDAYRDQHRRSDANNDDTERPSHLCVSVRDYYCYRFQIRPSIFNPILHGKRLFQQFAVDTYIKIESSRLDFIRKNQDRLRADLYKGLVDSLHEGENRADKIGKRTVLSTSFIGGPRDMRRRYMDAMALVRKFGKPDIFLTMTCNPNWDEITRELLPMQSPQDRPDLVVRIFRAKLEELKKRLTKHHILGKIRAYVYVVEFQKRGLPHVHFLLIMQRKYKLTCPDQYDHLISAEIPDKKKYPELYKMVIKHMMHGPCGLLNPKCPCTKGHASCKNHYPRAFSNATSQGKDSYPIYRRRDDGRKETIRGCELDNRWVVPYNPYLFRLFNCHINVEACGSIKAVKYLFKYIYKGHDRASVAVTDANKADGDVDEIKQYRDARWVTPPEALWRIFSFDLSQNSPPVMQLQLHLENMHMVSFHERAKVNHVVQRPGADRSMLTAYFEANRLHEEAQGILYRDFPEWYTLQQGKVWQRRKRNTGGQVGRIVSAHPAEGERFYLRLLLNHVTGATSYADLRTVDGDTLPTFREAAQRRGLLEADDTIDECLNEAAIYQMPSALRRLFATILSMGKDIKTFPLPAIIDRYDDLHGTDREIYEEESIVPTTEDVALKETLNEEQRSAYDKILSVVDTNNGGVFFVDGPGGTGKTYLYKALLAALRSQDKIAVATATSGVAASILPGGRTAHSRFKIPLTIDDGVVCSFTKQSGTAKLLQKASLIIWDEASMTKRQAIEALDNSMRDIMGQSRLPFGGKTVVFGGDFRQVLPVVRKGSRAQIVAASLRSSYLWESMCHLKLFQNMRAQSDPWFAEYLLRVGGGTEEANNDGDVRLPDEVCVPYTGNDRDLDRLIDDIYPNLNENMSNTSYITSRAILSTRNDWVDMINMRMIDRFQGEQMMYHSFDTAVDDPNNYYPSEFLNTLTPNGLPPHVLKLKVGCPIMLLRNIDPANGLCNGTRLVVRGFQKNSIDAEIVLGQHAGMRIFLPRIPLCPSDDEMFPFQFKRKQFPIRLSFAMTVNKAQGQTIPNVGVYLPEPVFSHGQLYVALSRATARSKVKILAIPVHDEKKKKGVERNSAINGATYTKNIVYKE

SEQ ID NO: 77846 - protein, 162 aa, Zea mays
  Coding DNA Sequence Number=SeqID_36067
MGQGGPRNAREDMSARNWAETHWIAWSTRGGGRPKSGEVDLGPPVKFGRVQGLGKLHRLLAELAEALARLEGGWSGLATVAEALAAMAGGIELAGAKERWLAGEEIWSQEIRSVSLSKPEANPRRTFDSPEAQLGQASRRSNLGQIATPTDRIAGAFNARIV

SEQ ID NO: 77847 - protein, 49 aa, Zea mays
  Coding DNA Sequence Number=SeqID_36068
MAGEIELAGAKERWLAGEGQCGAKREIWSQEIRSVSLPKPEANPRFCRV

SEQ ID NO: 77848 - protein, 123 aa, Zea mays
  Coding DNA Sequence Number=SeqID_36069
MAGGIKLAGAKERWLAGEGGCGAKRGFELGIKVNIPDLWLKYSRGVYPDRWEATYLVRRPENSLQGAEICSEHYSISERDSAEATMQDAARRALSHYCSVLGGVADGLNLKYYRRYPSGSTGA

SEQ ID NO: 77849 - protein, 42 aa, Zea mays
  Coding DNA Sequence Number=SeqID_36070
MPHKRFNTSYLVLQAMTMWENDRRMKFVGDAKTKDSSKELCD

SEQ ID NO: 77850 - protein, 176 aa, Zea mays
  Coding DNA Sequence Number=SeqID_36071
MAVRLLANKESCGPKGEIINNRKHYMDMRFWRMVGFGKLPKYHQDPTAEELAKTLDCWPSMNYYITGCRYVLMPGKFNGCHTLFVIDHVKKHVTFIDFTLNQDWCKHMPHKRFNTSYLVLQAMTMWGNDRRMKFVGDAKILRRNFVIDLLSYEDNSCRYAIPANIQQRLIDIARKD

SEQ ID NO: 77851 - protein, 99 aa, Zea mays
  Coding DNA Sequence Number=SeqID_36072
MAVRLLANKESCGPKGEIINNRKHYMDMRFWVVDMFNTSYLVLQAMTMWGNDRRMKFVGDAKILRRNFVIDLLSYEDNSCRYAIPANIQQRLIDIARKD

SEQ ID NO: 77852 - protein, 152 aa, Zea mays
  Coding DNA Sequence Number=SeqID_36073
MGGAESSRPWGEKKGRRGKLLQGSPTMDNEGRAAEGVHGRGLGFRALEESLHVSREGGHARRGEGEAGARVQGAEEQGARARRRIGRALGCSAAMGGGEQSCCSGHGREGALVVCCWRKKKRGRGHRAHGAGEGAGLGAMERSTAPCWLLMP

SEQ ID NO: 77853 - protein, 71 aa, Zea mays
  Coding DNA Sequence Number=SeqID_36074
MEVSSPEVGANVGDLFSNASAREKGAGRERRDRGCRHGAGEQGLAQRTLAMGGAESSRPWAEKKGHRGKLL

SEQ ID NO: 77854 - protein, 118 aa, Zea mays
  Coding DNA Sequence Number=SeqID_36075
  Subcellular localization annotation: CTP_CleavageSite=103; ConfidenceScore=5.61e-01
MASVLWASPCSPAPCRHPLSLPSLPAPSPKQQVPAPPTSPMENSKPPPRPGVLAAQLGLASSLSRHPSRCSTARTTCSTICATGCVWSCWCSAQRLRDAIDLRSAYESSSKPADHICG

SEQ ID NO: 77855 - protein, 160 aa, Zea mays
  Coding DNA Sequence Number=SeqID_36076
  Gene Ontology: Mol. function=nucleotide binding; Cellular component =membrane; Biological process=small GTPase mediated signal transduction
  Homolog annotation: Hit_ID=Q338Z5; Match level="QueryCoverage=45%, HitCoverage=33%, E-value=1e-30, Identity=93%"; Hit description=Ras -related protein Rab11D, putative, expressed
  Pfam annotation: Domain name=Miro; Domain location=13-108; Score= -6.8; E_value=0.025; Accession=PF08477.3; Description=Miro-like protein
  Pfam annotation: Domain name=Ras; Domain location=13-153; Score=29.3; E_value=1.8e-11; Accession=PF00071.12; Description=Ras family
  Pfam module annotation: Pfam domain module=Miro::Ras; Domain location= 13-108::13-153
MAGAGDKVDYVFKVVLIGDSAVGKSQILARFARNEFSLDSKATIGVEFQTRTLVIDHRSVKAQIWDTAGQERYHYQQLTHPSASPLCSRSLSAALLARWSLAPIMLLDPFLLRIRSLWTVAVAQTLSAMVDLSACEAFAFSRVHTYLTSRAAQDNVLLGD

SEQ ID NO: 77856 - protein, 421 aa, Zea mays
  Coding DNA Sequence Number=SeqID_36077
  Gene Ontology: Mol. function=nucleotide binding; Cellular component =membrane; Biological process=small GTPase mediated signal transduction
  Homolog annotation: Hit_ID=Q338Z5; Match level="QueryCoverage=53%, HitCoverage=100%, E-value=1e-95, Identity=82%"; Hit description=Ras -related protein Rab11D, putative, expressed
  Pfam annotation: Domain name=MMR_HSR1; Domain location=12-134; Score=- 21.6; E_value=0.094; Accession=PF01926.13; Description=GTPase of unknown function
  Pfam annotation: Domain name=Miro; Domain location=13-134; Score =59.3; E_value=1.2e-14; Accession=PF08477.3; Description=Miro-like protein
  Pfam annotation: Domain name=Ras; Domain location=13-181; Score =240.1; E_value=4.6e-69; Accession=PF00071.12; Description=Ras family
  Pfam module annotation: Pfam domain module=MMR_HSR1::Miro::Ras; Domain location=12-134::13-134::13-181
MAGAGDKVDYVFKVVLIGDSAVGKSQILARFARNEFSLDSKATIGVEFQTRTLVIDHRSVKGPDLGHRRPGEENPDFIESLAVTSAYYRGALGALLVYDITRRQSFDHIPRWLDELRAHADKNIVIMLVGNKSDLEEQRAVSTEDAKEFAEKENLFFLETSALQATNVESSFQTVLTEIFKIHSKKNMVSEPKSNGAAPAMPGTKVLVPGPAQEIPKSKCCSSMSKEAQGLRLGFQRPLPTWNGQAQQRHTMDPGKDTASTGRTAHGSAIALPPRSLPSPKRTSAILAPASNCAPQPHIFLATDRMSRDNPTIGDTHSPPKPTLHLRRGLHPQSSVAPAAGGKREGGRHRPTTNSVVAAAMREDLRLAYANLVVAKADDDFSRAEESFRVRVKKYSSKIVDEAIPQKLRDGVNPGLIPSHP

SEQ ID NO: 77857 - protein, 143 aa, Zea mays
  Coding DNA Sequence Number=SeqID_36078
  Gene Ontology: Mol. function=electron carrier activity; Biological process=protein amino acid phosphorylation
  Homolog annotation: Hit_ID=Q5N6W3; Match level="QueryCoverage=63%, HitCoverage=18%, E-value=3e-35, Identity=80%"; Hit description=ABC1 -like
  Subcellular localization annotation: CTP_CleavageSite=43; ConfidenceScore=5.01e-01
MEVAPDHAPSNVRPGLPWKPSVVPAAGGKREGGRHRPTTNSSVAAAKREDLRLAYANLVVAKADDDFSRAEESFRELGIQTWAITDNKLEELFQLSLRMFDTRLPPCVTVMLPFANDSSLNKIGVESFPEELFSVLPEGAIFM

SEQ ID NO: 77858 - protein, 88 aa, Zea mays
  Coding DNA Sequence Number=SeqID_36079
MAPTCANSYTPDHINTDLLTLRSRGGRCFNPDTVHDHTPYAFNSYPPQPAVTSVVRPPSPIVGGRGLRGRIDACRKAGAKGGNTSTYS

SEQ ID NO: 77859 - protein, 139 aa, Zea mays
  Coding DNA Sequence Number=SeqID_36080
  Homolog annotation: Hit_ID=Q10PK0; Match level="QueryCoverage=36%, HitCoverage=25%, E-value=5e-18, Identity=82%"; Hit description =Expressed protein
  Pfam annotation: Domain name=X8; Domain location=36-93; Score=-30.7; E_value=0.019; Accession=PF07983.3; Description=X8 domain
  Subcellular localization annotation: CTP_CleavageSite=32; ConfidenceScore=5.14e-01
MQALVVLSGEAAKEYAGTNSTLCRNLRQVKPFCSEVWCRSATSSRRSTRMTNIRLDLQGGRCFNPDTVHDHASYAFNNYPPQPAATSVVVCTFGSMVFASILLVRGIWSEVTYSRKNRYSYIHRIDNDENRWSRVQTVG

SEQ ID NO: 77860 - protein, 123 aa, Zea mays
  Coding DNA Sequence Number=SeqID_36081
  Homolog annotation: Hit_ID=Q8RZK0; Match level="QueryCoverage=29%, HitCoverage=14%, E-value=7e-09, Identity=81%"; Hit description=Beta 1,3-glucanase-like
  Pfam annotation: Domain name=X8; Domain location=7-61; Score=-34.4; E_ value=0.043; Accession=PF07983.3; Description=X8 domain
MTNIRLDLQGGRCFNPDTVHDHASYAFNSYPPQPAATSVVRPPSPIVGGRGLRGRIDACRKARAKGGNVASLRSYLHIKMKNQRALKGIIPTKRMLFRAMAATSVATDEIAAAGKGRSNLANR

SEQ ID NO: 77861 - protein, 149 aa, Zea mays
  Coding DNA Sequence Number=SeqID_36082
MSESRSPAGWRSAPALNPEMRRGLGVSLDRLDELKNTQGFRVLKGGMLKDLCIFGVLGKLLIEGITQCTAWHGCTVRQQTQQAHRLLDDLDAACQQMGRDALNAEKRHVARQRSGRRRVLSLINAGTARLHVRLEPIAYVMGHKQRVST

SEQ ID NO: 77862 - protein, 219 aa, Zea mays
  Coding DNA Sequence Number=SeqID_36083
MARQLKKGVMALFKLRVVQGKYDNIIAEVKSYYMSMSGYRDDKKRKGEIMMAYANDQIKTCVEFPECLYEDSCGRKRADEHDHHGCGHHDKGRRVLGYHLCRPIGGGDLTRGPMNVLSFKNLNKPREQSWIVYISLFTVTNNSGLTVTHRQLKSKVETFSTDVLKKHPYMSAEFKRLRIAVNNRAQSLARRPASPEVIASDPIGEQISGRVAECTRPKS

SEQ ID NO: 77863 - protein, 50 aa, Zea mays
  Coding DNA Sequence Number=SeqID_36084
MARQLKKGVMVLFKLRVVQGKYDNIIAAVKSYYMSMSGYTTNSVGEELPI

SEQ ID NO: 77864 - protein, 195 aa, Zea mays
  Coding DNA Sequence Number=SeqID_36085
VKGPLGLDFAVATPNYWVHKGIAFICEIRTSLCGSPTHTTQAIVRLQPDIGSSGDDTSFHLQQPMEADGGASRRSLRVPVDKQSLGMAVEVDARWEPMGAQEYYDYWRAMYNARGNSNYNYRGVDIEGRPIMVNIQKDNGVQMKIIGTHVDATEIVYDEDSYNKGKYDNIIAAVKSYYMSMSGYTTNSVGEELPI

SEQ ID NO: 77865 - protein, 94 aa, Zea mays
  Coding DNA Sequence Number=SeqID_36086
MGSGCGPQISFQTAKLEGDSPTRADLPCPFPAPIPKSALNHACTHINGLLLSALAALLFWLAGTWGGQRAVGAGFRSRNTELLGAQGHCLHLRD

SEQ ID NO: 77866 - protein, 137 aa, Zea mays
  Coding DNA Sequence Number=SeqID_36087
  Subcellular localization annotation: CTP_CleavageSite=73; ConfidenceScore=5.11e-01
MAADLAYHGRGPPTMEGRPLSGCRLRVWQFGRRSVARIRSPWVWTWRRLSRRVKWARLSRQGFASRTGEGEISSEGTMGLHDLGRSPHAHIGRRSRDLWARVKGKNVYLEQQEGRKKRRLDRAARAALAAAAAAEQA

SEQ ID NO: 77867 - protein, 85 aa, Zea mays
  Coding DNA Sequence Number=SeqID_36088
  Homolog annotation: Hit_ID=Q7FS89; Match level="QueryCoverage=52%, HitCoverage=25%, E-value=6e-18, Identity=95%"; Hit description =Putative argonaute protein
MTSSGSPFSSSSSASHMPDSGDRCDLDLRGGSDRGGRELLISFYKRTGKKPKRIIFYRDGISEGQFNHVLILEMDAIRKACASLD

SEQ ID NO: 77868 - protein, 279 aa, Zea mays
  Coding DNA Sequence Number=SeqID_36089
  Gene Ontology: Mol. function=translation initiation factor activity; Cellular component=cytoplasm; Biological process=multicellular organismal development
  Homolog annotation: Hit_ID=Q8S478; Match level="QueryCoverage=57%, HitCoverage=83%, E-value=2e-85, Identity=95%"; Hit description =Putative pinhead protein
  Pfam annotation: Domain name=Piwi; Domain location=14-253; Score =81.6; E_value=2.5e-21; Accession=PF02171.8; Description=Piwi domain
MTSSGSPFSSSSSFVSRMPDSGDRCDLDLRGGSGRGGSGNLEVIFHSTFEHKVVASMDWPQVTTYKALVSAQAHMEEIIQNLDGMIRELLISFYKRTGKKPKRIIFYRDGISEGQFNHVLILEMDAIRKACASLEDGYLPPVTFVVIQKRHHTRLFPGVHGRRDVTDRSGNILPGTVVDTEICHPREFDFYLCSHAGIQIRFSREPAGQYTIMSSTMKTVSRLMGCRYLQTACATHTHDAHALSQLIFAYFLVFMYHLSEIDELRQKPFKRNGPDFDAK

SEQ ID NO: 77869 - protein, 262 aa, Zea mays
  Coding DNA Sequence Number=SeqID_36090
  Gene Ontology: Mol. function=glutamate-5-semialdehyde dehydrogenase activity; Cellular component=cytoplasm; Biological process=amino acid biosynthetic process
  Homolog annotation: Hit_ID=Q0GH81; Match level="QueryCoverage=63%, HitCoverage=36%, E-value=7e-59, Identity=62%"; Hit description=P5cs
  Subcellular localization annotation: CTP_CleavageSite=79; ConfidenceScore=5.71e-01
MAVGCGSLPVSLSLSSGGPAAVALSLSPLSSARSKTVAGAPSAEPEPETAATASPSSSPMPSRRSYFGSKNNLTQISVLAKSIRTLARMEDPINQILKRTEVAENLILEKTSCPLGVLLVIFESRPDALVQIASLAIRSGNGLLLKGGKEAMRSNKVLHKVITGAIPSNVGEKLIGFVTSRDEIADLLKHIYFHSRNLCDIYDIFSTIHDTLTFSETLLVHKDLIKAPGLDDLLLSLKTEDVESSELYRYSRSFVILRICLC

SEQ ID NO: 77870 - protein, 269 aa, Zea mays
  Coding DNA Sequence Number=SeqID_36091
  Gene Ontology: Mol. function=glutamate-5-semialdehyde dehydrogenase activity; Cellular component=cytoplasm; Biological process=amino acid biosynthetic process
  Homolog annotation: Hit_ID=Q0GH81; Match level="QueryCoverage=78%, HitCoverage=37%, E-value=1e-100, Identity=88%"; Hit description=P5cs
MDEVIPLPWAKIGSRKMRLQLPECVNSKGILFTIYRHRTQPISVLAKSIHTLARMEDPINQILKRTEVSENLILEKTSCPLGVLLVIFESRPDALVQIASLAIRSGNGLLLKGGKEAMRSNKVLHKVITGAIPSNVGEKLIGLVTSRDEIADLLKLHDVIDLVIPRGSNKLVSQIKASTKIPVLGHADGICHVYIDKSANMNMAKQIVMDAKIDYPAACNAMETLLVHKDLIKAPRLDDLLLSLKTEDVESSELYRYSRSFVILRRCLC

SEQ ID NO: 77871 - protein, 257 aa, Zea mays
  Coding DNA Sequence Number=SeqID_36092
MSGGEQRTREITRGSHGDGMSRPAMTTAWAGLPDSGQEWFVLVDAGLIPAPVLIPSIPNPLPSVVRHMLLGGEDWLVLSMLLVASVVFHNKAQNGKLVVNYKLCVPRRVYLYFRFGFISEGVLDTEELAIVNSTFRKAQGSRLPGIIEETRRSGESTTSTLESETWAMESLETELFDNACASIQRSLGKPDKLSGRPVAASTPPKATANAPRVAGLAEAGLISSKLSRSDMNIPEDVHDNHISAVESEMEVLLLSLK

SEQ ID NO: 77872 - protein, 46 aa, Zea mays
  Coding DNA Sequence Number=SeqID_36093
MSGGEQRTREITRGSHGDGMSRPAMTTAWAGLPDSGQEWFVLVDAG

SEQ ID NO: 77873 - protein, 157 aa, Zea mays
  Coding DNA Sequence Number=SeqID_36094
MAGLLMPSSWLPRVISLVLCSPPDILVWERRHEMATEGLGEVVCECDEVVEAAVHRMAALVGAAYAGDEVGDIAGRRSGDERGDDRLGFSGSKTRADLGNVEAMTRADLKNVEEGEEAEHKEETASVEAARSQPLKYVATSTARRSKEMTTRALMKV

SEQ ID NO: 77874 - protein, 196 aa, Zea mays
  Coding DNA Sequence Number=SeqID_36095
  Homolog annotation: Hit_ID=Q8W1N8; Match level="QueryCoverage=35%, HitCoverage=11%, E-value=1e-13, Identity=58%"; Hit description=CSLC9
MDADGRASRSPSSFSNGTFQEHQPDHVAAAPQGAHRLSGIGWPWGGPMCEAGVVVSTGKSPVVRSMFYTFIKAFLVISLLLLAVEVATYFNGWDLAASTLALPVLCLESLYPLGCASLLDLRPLDVGAGRDDGPDDSYVAGAVREPGHGCLVQRDGVGGRVALFLALAEGALDGLLAMVQAVLSNDPTVQLMPSIV

SEQ ID NO: 77875 - protein, 276 aa, Zea mays
  Coding DNA Sequence Number=SeqID_36096
MATEGLGEVVCECDEVVEAAVHRMAALVGAAYAGDEVGDIAGRRSGDERGDDRLGFSGSKTRADLGNVEAMTRADLKNVEEGEEAEHKEETASVEAARSQPLKYVATSTARRSKEMTTRALMKAPFGERRGRPRGPTVGVNDWRSGGRWRGRTGARVSLETFLRRGMRISAHERVKEEGAVAAVWRHRAEDGVERVETGERGEEKQRHARRRHQGCGMGRGIWVPWHGAEGCSPRRLDEIWRPRRRGGVAMDDGSLGRAMIEQADAPREGEVPAHD

SEQ ID NO: 77876 - protein, 652 aa, Zea mays
  Coding DNA Sequence Number=SeqID_36097
  Homolog annotation: Hit_ID=Q9AXE9; Match level="QueryCoverage=42%, HitCoverage=98%, E-value=3e-56, Identity=48%"; Hit description=Zinc finger transcription factor ZF1
  Pfam annotation: Domain name=zf-C2H2; Domain location=468-490; Score =23.7; E_value=0.00066; Accession=PF00096.16; Description=Zinc finger, C2H2 type
  Pfam annotation: Domain name=zf-C2H2; Domain location=555-577; Score =18.6; E_value=0.023; Accession=PF00096.16; Description=Zinc finger, C2H2 type
  Pfam module annotation: Pfam domain module=zf-C2H2::zf-C2H2; Domain location=468-490::555-577
MEHTTGILPVETTTPASHIGPPHGHLMPGRTGQPRWRTTRATERPYRRRQRLEIWRPVARKDWSEGFLGDLSETGNANQSGDIARRTAWREWRLGRGERRSSDTLVVVIKGVGWGVGFGRRGTGRRGAALDDLLEAEQAERQNRQRQTTFAVLISSTDIIMVEYGRYAKDPCNPVPLQPTEAHTRWVILTDPLEVPRLLESSMRAVAGPPTAWSAPDLLVATGSVLVCFGLGTVCLARTGGDGEPRTTAQAPLAASVHHPCTHPNETTQLNVSTQPVSSRHSTGFPPTAAAPPPVTVPRACPRRDHLTTPTYDATSHAPSHTRHRFKTLTPLTHHTRTVSPQRARARRPSNHRENKSQPNSPVSQRSLSLHYSTMSSMELLHAVVPEKQSEEEVAPAATTTSSSATATGGDEGAHVPQGWAKRKRSRRQRSEEENLALCLLMLSRGGHHRVQAPPTPVPSAAPAAAEFRCSVCGKSFSSYQALGGHKTSHRVKLPTPPPPPTAAAVTVSAAVPVPEAPAPITVVVPPLPPVEVGREPATSSTAASSDGAASSRVHRCSVCHKEFPTGQALGGHKRKHYDGGVGSAAASTDVPAAPAETSAEVGSSAARAFDLNLPAVPEFVFRCGKPGKMWEEDEEVQSPLAFKKPRLLMTA

SEQ ID NO: 77877 - protein, 233 aa, Zea mays
  Coding DNA Sequence Number=SeqID_36098
MTPWEGAQVAALEVLTTICYQKREEIQATSMRLFPAVALSDPLVYHHQARLMESIPIGQDSVESASARVLMVVLELQLTRGNSRQKWQQLYTGSYAAFKMMEMAKNSACTQAQERLEETKVQAEQVIGLELQVTELQMQHQADQNRIKELEHQLTNAHSKLKILSQQQEEICLYAVAVREDLKETMSFISHQDQAIKELNRAHPMEFQVAQRLVNHLQQAVHRLNAAFDPTPA

SEQ ID NO: 77878 - protein, 304 aa, Zea mays
  Coding DNA Sequence Number=SeqID_36099
MVGSYCKVPCDALFILRNRNNPKDGSLMIEDPLTGHMPRHGLCNHFRISISPMFCNVCKTGETFLESSSGAPTGLSEMNQQEAPTGVGEFLRDFGVPVVLWRLLQEVGYTEAPKYQWSRTVLRGQPWYEVVVRIPERARKPSWPYWMFHAEGMTPWEGAQVAALEVLTTICYQKWEEIQATSMRLFPAVALSDPFVYHHQARLMESIPIGQDSVELASARVLMVVLELQLTRGHSRQKWQQLYTGSYAAFKMMEMAKNSACTQAQERLEETKVQAEQVIGLEHQVTELQMQHQADQNRIKELEH

SEQ ID NO: 77879 - protein, 85 aa, Zea mays
  Coding DNA Sequence Number=SeqID_36100
WINKKRLQELESFYKILVFPWSCDDYFKKFDIPKHPSTSGHALFLEDNHELQLTQGHNRQMWQQLYTGSYATFKMMEMAKNRACT

SEQ ID NO: 77880 - protein, 94 aa, Zea mays
  Coding DNA Sequence Number=SeqID_36101
MEVSSPEVGANVGDLFSNASAREKDLRKPKAPNNAHKDLANGLHILARTISGTLPLLTSRIYEVPSGNDNLNYEIFSLHRRVIERELGLHLVPK

SEQ ID NO: 77881 - protein, 110 aa, Zea mays
  Coding DNA Sequence Number=SeqID_36102
MGQIQRCETPQGQSRKLTKGKRVQQLSSGQISILWDLDSIESSTRANIRKCAPPDPCKTVSIRQKHLLLEVYAHKDLANRLHILARTISGTLPLLTSRIYEVPSGNDDLN

SEQ ID NO: 77882 - protein, 145 aa, Zea mays
  Coding DNA Sequence Number=SeqID_36103
MVRTGTKAAAQRRQKPTSREKLRIGGDSGVGRTGGGVDAREPSDDTDDLANRLHILARTISGILPLLTSRIYEHNDIARIARNFIIKMNLFARQITSRASSPEESYYRPRESAIRTYALTKTNGSYSQASPRIDQMPISQMWIQY

SEQ ID NO: 77883 - protein, 47 aa, Zea mays
  Coding DNA Sequence Number=SeqID_36104
MARWRSRAKARGGSAVKDVIVGITPQPITLNQRSKSDKYHKNKHSSA

SEQ ID NO: 77884 - protein, 122 aa, Zea mays
  Coding DNA Sequence Number=SeqID_36105
  Subcellular localization annotation: CTP_CleavageSite=56; ConfidenceScore=5.19e-01
MGWMAPAQPWWMLLGKGRPSVLSQSRARFQGEKRSARSEIRMTNDPSSAEPLLHPPAQEAEKSFFPALIRYLLVDNVEHVDYLLFNEEVMEQSQDSKGMETNPERAITRIRVTSDGGGATGR

SEQ ID NO: 77885 - protein, 155 aa, Zea mays
  Coding DNA Sequence Number=SeqID_36106
MQRSLPWGLGRSGRAVRAGSLRHGMDGARAAVVDVAGEGAAFDFIPESSSIPGGEAVSEERDSHDERPELRGATPPSTRVGSREEVGEGMGMDVPAGAHMVATTKTFACTRVRLLFTVELVQDVIVDITPQPITLNQRSKSNKYHKNKHCTHRYL

SEQ ID NO: 77886 - protein, 90 aa, Zea mays
  Coding DNA Sequence Number=SeqID_36107
MTPIDKEISQKDKKWLENLKKWDTKDKERVEKRREKLATEQQWVDKQEMRHIVECGEEKKKKLERARRAKDAIGENRDAFRKGKWPRCTQ

SEQ ID NO: 77887 - protein, 86 aa, Zea mays
  Coding DNA Sequence Number=SeqID_36108
MDLGAMNLGAEVDKSTDHDTYRQRYWMCANYAFEPTIVQCRMNLMTPRPLCDFEQWINTEISQKDKKWLENLKKWDTEDKERIEKR

SEQ ID NO: 77888 - protein, 97 aa, Zea mays
  Coding DNA Sequence Number=SeqID_36109
MCRRGKSAKQRKGPLTGTAFDPLPLPTSVSVPMCFCGDPCKVDKSTDHDTYRQRYWMCANYAFEPTIVQRRMNLMTPRPLCDFEQWINTEISQKDKK

SEQ ID NO: 77889 - protein, 107 aa, Zea mays
  Coding DNA Sequence Number=SeqID_36110
MYFKQDLQGVKEGGAVNDEIDEALSPNRDGNEEASKIRFNDSGPTVSKGFDTTYVTPGFGRSHTLPTSRDSHSARRSWLSIDHYQGDLAGSHYVAFTKDFPEVIAAR

SEQ ID NO: 77890 - protein, 146 aa, Zea mays
  Coding DNA Sequence Number=SeqID_36111
MGARWGTGRPTRRGWGHGGCAYAHARMQRRGGGWGGCGLEFGARGCGERGCRAAGPPKQAGGEGALVGCSERMGQGEDLQGVKEGGAINDEIDEALSPNRDVNEEASKSRFNVSRKAADWGRSLAFLELVEVLELLEIRLDTFLFT

SEQ ID NO: 77891 - protein, 118 aa, Zea mays
  Coding DNA Sequence Number=SeqID_36112
MGARWGAGRPTRRGWGRGGCAYAHARMQRRGGGWGGCDLEFGARGCGERGCRAAGPPKQAGGKARWWAAASEWAKGRWADLQGVKEGGAINDEIDEALSPNRDVNEEASKSRFNVSRK

SEQ ID NO: 77892 - protein, 151 aa, Zea mays
  Coding DNA Sequence Number=SeqID_36113
MPGLPEFCPEVRLLPHACFTLFAPAFSQFGLADAEIPHRSYSGPPETFPPPFSPLCPRIRGLFPAIEFVVAFSPSLPNFGDPGATLAHTCLNSDDLTAAERSSAARSHSPLPDNEQSEVPECVVGDLPEQQPGGDAGNMDDFEEFQDYDEF

SEQ ID NO: 77893 - protein, 86 aa, Zea mays
  Coding DNA Sequence Number=SeqID_36114
  Subcellular localization annotation: CTP_CleavageSite=46; ConfidenceScore=5.43e-01
MTGMPHQNYSSPPKTFPPLFSPLCRRIRGLFPAIEFTVVFSPSLPNSDNEQSEVPECVVGDLPEQQPGGDAGNMDDFEEFQDYDEF

SEQ ID NO: 77894 - protein, 71 aa, Zea mays
  Coding DNA Sequence Number=SeqID_36115
MGFAPIPAVTEPPKLLGPPTVVTPGFGSAEMRNVEAKPTQAADWGFATKKELELVVVLKLLEVFHVASITS

SEQ ID NO: 77895 - protein, 78 aa, Zea mays
  Coding DNA Sequence Number=SeqID_36116
MYPSSHAASSKTEKLSHPVLEGKQNANHVRARIRNSQLRKVDAKPTQAADWGFATKKELELVVVMKLLEVIHVASITS

SEQ ID NO: 77896 - protein, 53 aa, Zea mays
  Coding DNA Sequence Number=SeqID_36117
MARHVIGSGGAPDRSGEFAEESKPTQAADWGFATKKELELVIVLVGVSRQGGP

SEQ ID NO: 77897 - protein, 162 aa, Zea mays
  Coding DNA Sequence Number=SeqID_36118
MAREGEAGDGRSNHADSTVYFMAKIARTQQEIVWKRRPPGTGCPEHNQPTTSESSRTHTTTTNNNLTTTSTSSIHPTTHTSTVRKCKFFHLHLHLRLHITQIHTTIITPKHHVTPGFARQTECEPYAKPTQAADWGFATKKELELVVVLKLLEILHVASITS

SEQ ID NO: 77898 - protein, 219 aa, Zea mays
  Coding DNA Sequence Number=SeqID_36119
MEAGMNRRCDSCFIRAHRSAVAHAILASTTKRPADLRWVVERSSRRQGSYTQVRVKQPARKPRWPAWDRRLLLRIKDRKVRARITRGKKVYVGLLFLKVALGTRFQGVKSTFVFRRKRRNRVKEKLAVYSQEAVRSGAPDCPVVHRTVSGGAPDSVRFSLTPYFFVSLKCKGERLQVVEIPRKRDIERQSKTPWYSSWSLDCLRGVDCNPRPLGRHNVE

SEQ ID NO: 77899 - protein, 173 aa, Zea mays
  Coding DNA Sequence Number=SeqID_36120
MDISALASMKNVAKCDTWCELQNPANHRVFERKLRPKPSGGGHVCLGVTPKDTPNTPPTGRGTWRLAPRAAGRGGPKKGLPANRAGRSTWWATSSCSRCSVPTRGRPFGPKDPSSDRACPRTATPEASSATDRAQVLWKGTPGRVRAPSGPDPVAPRGAVNESGCLGMQPKSG

SEQ ID NO: 77900 - protein, 140 aa, Zea mays
  Coding DNA Sequence Number=SeqID_36121
  Homolog annotation: Hit_ID=Q6CQF2; Match level="QueryCoverage=26%, HitCoverage=45%, E-value=3e-08, Identity=72%"; Hit description =Kluyveromyces lactis strain NRRL Y-1140 chromosome D of strain NRRL Y- 1140 of Kluyveromyces lactis
  Subcellular localization annotation: CTP_CleavageSite=46; ConfidenceScore=5.03e-01
VPACGRPFGPKDPSSDRACPRTATPEASSATDRAQVLWKGTLGRVRAPSGPDPVAPRGAVNESGCLGMQPKSGGFELEHACRDPKDGELCLSGAKPEETLVEARSDTDDSWSPHEFYRVKPMIRGIGGATPSTYSQTLNR

SEQ ID NO: 77901 - protein, 140 aa, Zea mays
  Coding DNA Sequence Number=SeqID_36122
  Homolog annotation: Hit_ID=Q6CQF2; Match level="QueryCoverage=26%, HitCoverage=45%, E-value=3e-08, Identity=72%"; Hit description =Kluyveromyces lactis strain NRRL Y-1140 chromosome D of strain NRRL Y- 1140 of Kluyveromyces lactis
  Subcellular localization annotation: CTP_CleavageSite=46; ConfidenceScore=5.07e-01
VPARGRPFGPKDPSSDRACPRTATPEASSATDRAQVLWKGTPGRVRAPSGPDPVAPRGAVNESGCLGMQPKSGGFELEHACRDPKDGELCLSGAKPEETLVEARSDTDDSWSPHEFYRVKPMIRGIGGATPSTYSQTLNR

SEQ ID NO: 77902 - protein, 187 aa, Zea mays
  Coding DNA Sequence Number=SeqID_36123
  Subcellular localization annotation: CTP_CleavageSite=46; ConfidenceScore=5.03e-01
VPARGRPFGPKDPSSDRACPRTATPEASSATDRAQVLWKGTPGRVRAPSGPDPVAPRGAVNESGCLGMQPKSGGGKRMGAGDAHRPYAERLLLVRRSARGVDRCLPRRRPKPGGPRRPRQPSSARTVSARLWRAPTACELPIRPVLKHGPRSLTCVRVDGFRNLRCARKLTSRRPSRAAPLADPDLL

SEQ ID NO: 77903 - protein, 240 aa, Zea mays
  Coding DNA Sequence Number=SeqID_36124
  Homolog annotation: Hit_ID=Q6CQF2; Match level="QueryCoverage=15%, HitCoverage=45%, E-value=4e-07, Identity=70%"; Hit description =Kluyveromyces lactis strain NRRL Y-1140 chromosome D of strain NRRL Y- 1140 of Kluyveromyces lactis
MDISALASMKNVAKCDTWCELQNPANHRVFERKLRPKPSGGGHVCLGVTPKDTPNTPPTGRGTWRLAPRAAGRGGPKKGLPANRAGRSTWWATSSCSRCSVPTRGRPFGPKDPSSDRACPRTATPEASSATDRAQVLWKGTPGRVRAPSGPDPVAPRGAVNESGCLGMQPKSGGFELEHACRDPKDGKLCLSGAKPEETLVEARSDTDDSWSPHEFYRVKPMIRGIGGATPSTYSQTLNR

SEQ ID NO: 77904 - protein, 241 aa, Zea mays
  Coding DNA Sequence Number=SeqID_36125
  Homolog annotation: Hit_ID=Q6CQE5; Match level="QueryCoverage=33%, HitCoverage=71%, E-value=2e-11, Identity=50%"; Hit description =Protein TAR1
MDGGLIHVKCGVSLANLPGRRGTVPPPTGEARRRARDTTLQCPKPKIDGFYAVPARGRPFGPKDPSSDRACPRTATPEASSATDRAQVLWKGTPGRVRAPSGPDPVAPRGAVNESGCLGMQPKSGGKLRPRLNTGERPIANKYREGKDEKDFEKRVKECLKLPGGKRMGAGDAHRPYAERLLLVRRSARGVDRCRPRRRPKPGGPRHPRQPSSARTVSARLWRDPRGAAPQWPASSPSDPS

SEQ ID NO: 77905 - protein, 143 aa, Zea mays
  Coding DNA Sequence Number=SeqID_36126
MELCSTMGREMAGGAMASRRRGQARRLHEHLVVVRPWMDGGAREVGVEVREEAAAAFWNREEEKWRVGEGKERGGLPFIELELWTCQVAVSSGRWKNMDIGRPFLAFSACFRTLVAVEDFFLDVHSTIVVQNLRRIQADSSDA

SEQ ID NO: 77906 - protein, 134 aa, Zea mays
  Coding DNA Sequence Number=SeqID_36127
MELCSTMGREMAGGAMASRRRGQARRLHEHLVVVRPWMDGGAREVGVEVREEAAAAFWNREEEKWRVGEGKERGGLPFIELELWTCQVAVSSGRWKNMDIGRPFLAFSACFRTLVAVEDFFLDVHSTIVVQNLR

SEQ ID NO: 77907 - protein, 348 aa, Zea mays
  Coding DNA Sequence Number=SeqID_36128
MELCSTMGREMQGRHGQQAPCQARRLHEHIVVVRPWMDGGAREVGVEVREEAAAAFWNREEEKWRVGEGKERGGLPFIELELWTCQVAVSSGRWKNMDIGRPFLAFSACFRTLVAVEDFFLDMVHTIQTTRINTNYIPPPRQVPIYPVVVEEIPVDLPRIRVENGVILEDSSEEFLPTPTPLAESLAFAAGLSASAPPAPAVQAHAPEGDDPDDSGDDDEDVDEEEEDEENINKEANKEQQDHYVGLWPVTEHYTSMFEIGHFPNLLQDVLHALGTYVRPLYETWRVYEPPRACYYITRIHVRVMDAGDRGFRTLSAHESLTPLSTYAASISDVARRTLWSLSHTYRQ

SEQ ID NO: 77908 - protein, 38 aa, Zea mays
  Coding DNA Sequence Number=SeqID_36129
MELGLRLKADVILLLFVRPIGRAYEGGPHRAGVHVCVT

SEQ ID NO: 77909 - protein, 139 aa, Zea mays
  Coding DNA Sequence Number=SeqID_36130
MELGLCLKADVITFAFRKVLVWEAKLCARTPWTVVPDTRTPVAEWWSVQAYGQQAEFMRADLTGLAYTYAQPSYKRKKNSTPQAAPMDRTYRDAPEVRKRHSFSYSEVITLGSAYFRRLEGSFLAGGEFAEPFLVQYSP

SEQ ID NO: 77910 - protein, 213 aa, Zea mays
  Coding DNA Sequence Number=SeqID_36131
  Subcellular localization annotation: CTP_CleavageSite=29; ConfidenceScore=5.35e-01
MTTSLAVGRSKPGCSFLPSFSFKDVHHPRWSGGRAKSGVRPPRGLVTRFFLQHSEEKGVHQPCGGGEPQLRGAGWLQAVSCSVSGPLGWTASVPPPTLPPIVWLEAWLPVHRTGDGRAVRRQPSPTGTEVGAVVGAEVVAVAGGRGRGPPCNGAHPEVDAAAGKPLGVVVVVAVDAEVVAIAGDPSMQRWPPLDLSLGSQVVRPDPLDGGSRY

SEQ ID NO: 77911 - protein, 140 aa, Zea mays
  Coding DNA Sequence Number=SeqID_36132
CAVAKLDDDARQGTELLQDPREDAVHGWESLARTALMPIWNSEGKEEGAMGEEIELPAGCLEQGTRPWGELAPVEQGRRSAGGRGELLAAMWGEERAPSRELQQWSARLQGCSPWTAEGGAMVGAKVPAPMEKPLRAGKQ

SEQ ID NO: 77912 - protein, 175 aa, Zea mays
  Coding DNA Sequence Number=SeqID_36133
CAVAKLDDDARQGTELLQDPREDAVHGWESLARTALMPIWNSEGKEEGAMGEEIELPAGCLEQGTRPWGELAPVEQGRRSAGGRGELLAAMWGEERAPSRELQQWSARLQGCSPWTAEGGAMVGAEGEGAGFHGEEGPCAGGLTEEAAGRVSCARTGKEMSGVWERRKKVVAARG

SEQ ID NO: 77913 - protein, 139 aa, Zea mays
  Coding DNA Sequence Number=SeqID_36134
  Subcellular localization annotation: CTP_CleavageSite=18; ConfidenceScore=5.04e-01
MAPSSFPSLFQIGIRAVRAKLSQPWTAPSLRSLHPLAERPCCVPPACNAHLPACVLLRSAHWRLLGVRQNAQQVARCSSPPVRSPLPSSRVVALVLAAQPHPRRSSGRRRASRLARSTKCRAMWTAHAFSHDSFRLIDL

SEQ ID NO: 77914 - protein, 86 aa, Zea mays
  Coding DNA Sequence Number=SeqID_36135
  Gene Ontology: Mol. function=ion channel activity; Cellular component= integral to membrane; Biological process=ion transport
  Homolog annotation: Hit_ID=Q4VDM4; Match level="QueryCoverage=63%, HitCoverage=11%, E-value=1e-11, Identity=70%"; Hit description =Cyclic nucleotide-gated ion channel 2
MDAGLASAVTALRTCTDVAHLAHVLEQFRLARCGKLVRDARAVAPSRAYASTSSSLGLETELSMHVGGSPYSQGVEAVIDHVMPLR

SEQ ID NO: 77915 - protein, 259 aa, Zea mays
  Coding DNA Sequence Number=SeqID_36136
  Homolog annotation: Hit_ID=Q5Z7K6; Match level="QueryCoverage=23%, HitCoverage=21%, E-value=7e-19, Identity=60%"; Hit description =Putative coclaurine N-methyltransferase
  Subcellular localization annotation: CTP_CleavageSite=73; ConfidenceScore=5.13e-01
MPNKTLHNTKTVPFSMLTEMFKYNSETLHNTKIVPFSMLTSMLTEMFKYNSVPSQEKIPRFGSVNNHPRQPSRLSSEVAGLPNQQHDIVQQSFLTDNLVPQNLTIPSVKYPNNHSQQSLKENKLPNIEIIVADINKFEHMKNYKSLLKKISRWMKEDGLLFVHLFCHKTFPYHFENPKVHLLALTVSLSVIMCTNFFTYLLILPMEKYWMGDCHEGMNLKKLMLMWYFKPCLYMDAGLASAVTTLRTCTDVAHLAHVLE

SEQ ID NO: 77916 - protein, 79 aa, Zea mays
  Coding DNA Sequence Number=SeqID_36137
MIPGFGSVNNHPRQPSRLSSEAAGLPNQQHDIVQQSFLTDNLVPQNLTIPSVKYPNNHNQQSLKYCIYTPTSPSTVSVG

SEQ ID NO: 77917 - protein, 309 aa, Zea mays
  Coding DNA Sequence Number=SeqID_36138
MTTPDLLKRQLERNGCVRSARRYPLPSAATLLSLTPDAGRHCALPLACFSRKNPHVPPTGHFALLFSPVRGVCGTAISGEAAANLPREGRVGAGPRRVCGRRSRGAQQAGPVVTEDEEAANPSPSRFVVTASFVSRSEHRHLPRIRTSSLRFLFFRPKSSDLEWNKWYCKLLRPNAHLRMASSKEDTMKSLLKVLVDCAEDATKSLGGLVDHALDHMHDEEILARTLFAMKEKLDLLHQDALEAKVQAFPEIAKYDGDDISVEPTSPSTPPTITEPSVDEEEFYCPDVSDEWYFSDSDRSTRNSYWNLY

SEQ ID NO: 77918 - protein, 144 aa, Zea mays
  Coding DNA Sequence Number=SeqID_36139
MKRSQIRLRRAHFRMASSKEDTMKSLLKVLVDCVEDATKSLGGLVDHALDHMHDEEILARTLFAMKEKLDLLHQDALEAKVQAFPEIAKYEGDDISVEPTSPSTPPTITEPSVDEEEFYCPDVSDEWYFSDSDRSTRNSYWNLY

SEQ ID NO: 77919 - protein, 80 aa, Zea mays
  Coding DNA Sequence Number=SeqID_36140
MAHGRKLRFGHDPENKLRHGGTEGKRHGGARRRAAWLFVLASGPKTRGSPMAQGAKTKGMAERRENGTEARGDGRQGRSS

SEQ ID NO: 77920 - protein, 113 aa, Zea mays
  Coding DNA Sequence Number=SeqID_36141
  Subcellular localization annotation: CTP_CleavageSite=37; ConfidenceScore=5.46e-01
MAHGPKNEARHGPGNKLSPSVAWRNGGKTARRRTATGGMAVRPCVWAENEGFAMARGPKTTVGHGRENGLSPSVWKDTEPRAHVLSEGKGGTEGKREEARGDGRQGCSALRMG

SEQ ID NO: 77921 - protein, 155 aa, Zea mays
  Coding DNA Sequence Number=SeqID_36142
VERRENGRRRAATGGRAVRPCVWAENEVFAMARGLKTEAAGLFGLAFGLKTRGSPWRTGRKLRLGHDPENKLSPSMWKDTEPKVHVLSEGHGGTEGKRLGGALPRAAGLFGLAFGLKTRDGFRGVLGKYPGFLKAELPEVLGGGLLGRAPHPLAA

SEQ ID NO: 77922 - protein, 46 aa, Zea mays
  Coding DNA Sequence Number=SeqID_36143
NSPKSWEGVSSAEPRTPSRPSRGRSAPYRAQLRLALLAAWPAVFRP

SEQ ID NO: 77923 - protein, 46 aa, Zea mays
  Coding DNA Sequence Number=SeqID_36144
NSPKSWEGVSSAEPRTPSRPSRGRSAPYRAQLRLALLAAWPAVVRP

SEQ ID NO: 77924 - protein, 172 aa, Zea mays
  Coding DNA Sequence Number=SeqID_36145
  Subcellular localization annotation: CTP_CleavageSite=72; ConfidenceScore=5.03e-01
MANGPKTDFRPRPRKRARGWARDPPVVPPRLLGRAPHPLAAKPWPVGTLPRPAPAGAVGCLAGRGSAVTQPRPAMAGYRRLDALDEWLHRGMARCSMRFPFLPRSVDLRSPSSQADPPRPARRDALDGSTVAATLAHELSWTRDCLEDPRYRAADSRRPCPIARAGILCLLR

SEQ ID NO: 77925 - protein, 92 aa, Zea mays
  Coding DNA Sequence Number=SeqID_36146
MEAKSHQQQIILRSTCKNCATSKAEYTNTQLDLPGLTALAYNAPLTPTGRRAVTALVPTITGMGDLVSGRVRGYVCGQVHSGTRLTDLPYFS

SEQ ID NO: 77926 - protein, 92 aa, Zea mays
  Coding DNA Sequence Number=SeqID_36147
MEAKSHQQQIILRSTCKNCATSKAEYTNTQLDLPGLTALAYNAPLTPTGRRAVAALVPTITGMGDLVSGRVRGKVCGQVHSGTRLTDLPYFS

SEQ ID NO: 77927 - protein, 118 aa, Zea mays
  Coding DNA Sequence Number=SeqID_36148
MEAKSHQQQIILRSTCKNCATSKAEYTNTQLDLPGLTALAYNAPLTPTGRRAVAALVPTITGMGDLVSGRVRGKVCGQVHSGTRLTDLPYFSITKNSDPRLFGKLRKKYYTTFIITKG

SEQ ID NO: 77928 - protein, 127 aa, Zea mays
  Coding DNA Sequence Number=SeqID_36149
MAGEMQGGARLLQRWNSPFGAVAGASMAAGEIRAPSMGRRRSSLQGRAGGHGREGAVLPALGKKGRSPWLAGLPASRCGEERCHGEELEASAPRARPAPKQGGGGAMNRERSQACCRGARRKKGSGG

SEQ ID NO: 77929 - protein, 133 aa, Zea mays
  Coding DNA Sequence Number=SeqID_36150
MTAARCGISSSTQQAPHKQGGRRVASHGEGDAGRCSAAAEMELAIWSSGRGRPWLLEKSGRHPWEEGGARCKEGLAAMGGKEPCSLRWGRRGGRHGWPVSLLAAVGKKGAMEKSWRRLLQGLGQRPSREVEAP

SEQ ID NO: 77930 - protein, 70 aa, Zea mays
  Coding DNA Sequence Number=SeqID_36151
MASVDIGGRKQEQRGNMAPVRQHLGKMAAGWGRRGHGREGAVLPALGKKGRTPWLAGLPARRCGEEGCHG

SEQ ID NO: 77931 - protein, 261 aa, Zea mays
  Coding DNA Sequence Number=SeqID_36152
MEAFGLRNPMVDGSLEWLSPRSLTTANTISPENRSLGQRSLLAPVGEERLLASSNTNLLWCSSPSFSFDYSTSAALPMAATAALTSSKVWVTIRMASASTAAPLRPRDTRLLRRIDGGNVGTVYLCRHGLRLLNVHTSKPFSLISKLMEEKNSAVELNNKLRQELDLLRRDISCGYLNTYCMLHGRTLNIMNLWRKLGLPATGNVLECSVCRDRATKVVVGEISAEAQKKKKKKNVKAWLNWVCRNCYSRRREQNAAAQLT

SEQ ID NO: 77932 - protein, 61 aa, Zea mays
  Coding DNA Sequence Number=SeqID_36153
  Pfam annotation: Domain name=LRR_1; Domain location=33-55; Score =16.5; E_value=0.098; Accession=PF00560.23; Description=Leucine Rich Repeat
MARRWTVRTSWRGEIFGNNISGPIPSEFGSLANLISLDLSSNSISGAIPAALGNAKSLKFL

SEQ ID NO: 77933 - protein, 213 aa, Zea mays
  Coding DNA Sequence Number=SeqID_36154
  Homolog annotation: Hit_ID=Q4W1G0; Match level="QueryCoverage=27%, HitCoverage=43%, E-value=5e-14, Identity=67%"; Hit description =Putative leucine-rich repeat protein
MGNVPNPTPFLTRGIVATEAVGGLAKDRCGPDSAVAHHPATAVTYTNQTRRRGIAHHTRLLDGIDSRAQPDLSRSERRVVIWPPLVPAPMVVAAPVQLNPRRGIKCDCVMMSDAPVQQGQDRLFPLPALLLIGLQFLKQQHLRSYTRSPRERQVPEVPVSPGIQWRLDHNRLTGPIPRELAGLPNLGIVDFSNNDLCGAIPTDGAFQNIPRSR

SEQ ID NO: 77934 - protein, 175 aa, Zea mays
  Coding DNA Sequence Number=SeqID_36155
  Subcellular localization annotation: CTP_CleavageSite=36; ConfidenceScore=5.01e-01
MEEHGGARPFTAVRPPEIPNPARPGPRRAAAAPMPSAVATRTNAPRPIPSYSKRARDSSETWEGELTEDGGGHRADHDGLRVCGGVESTATNSGAAGGLSSEIRLRPPSTRPKGAPGFLTPSTVVGTPGFAYGGVTDHWVQAVSATEELRARSLADGWALVVGVVMPGGRAGQNR

SEQ ID NO: 77935 - protein, 53 aa, Zea mays
  Coding DNA Sequence Number=SeqID_36156
MDLARAVTDPRVTDHWVQAVSATEELRARSLADGWALVVGVVMPGGRAGIPSY

SEQ ID NO: 77936 - protein, 331 aa, Zea mays
  Coding DNA Sequence Number=SeqID_36157
  Subcellular localization annotation: CTP_CleavageSite=36; ConfidenceScore=5.01e-01
MEEHGGARPFTAVRPPEIPNPARPGPRRAAAAPMPSAVATRTNAPRPIPSYSKRARDSSETWEGELTEDGGGHRADHDGLRVCGGVESMATNSGAVGGLSSEIRLRPPSTRPKGAPGFLTPSTVVGTPGFACGGVTDHWVQAVSATEELRARSLADGESSLSSSEKRKPDALAPSEFGDSTLTELRFAHSPICAPRLRSIKAGDGIGTTDGGGGMTSSSLKKGGHPVLAALVGGRPKPGGAGVGGLQRGAVGSTSGVVLAGSGESSLQHAGVAQSTWSESVEWTVTVRVLVWTLLSPAVEGEPPLVVLDDDEMNCDYDCGDLESRHRWHRC

SEQ ID NO: 77937 - protein, 180 aa, Zea mays
  Coding DNA Sequence Number=SeqID_36158
  Homolog annotation: Hit_ID=Q9FUA7; Match level="QueryCoverage=95%, HitCoverage=75%, E-value=4e-30, Identity=43%"; Hit description=PRLI -interacting factor N
  Pfam annotation: Domain name=Smr; Domain location=84-157; Score=31.3; E_value=3.4e-06; Accession=PF01713.11; Description=Smr domain
AAFAYSKGDRSYASYLAEEKKLAHHMLLPIIRVYTRMLLLAVTLSSKSTYLGKHYRELGRIEDEKASRNIFEARNKHITNTVTIDLHGQHVQHAMNLLKIHMMICICIPSVLLRVITGCGSEGTGKGKIKRSVIELAEKEHIEWREENSGTVALRLGGPREYRFLEHESDSDLVGNFNID

SEQ ID NO: 77938 - protein, 231 aa, Zea mays
  Coding DNA Sequence Number=SeqID_36159
  Homolog annotation: Hit_ID=Q9FUA7; Match level="QueryCoverage=89%, HitCoverage=97%, E-value=2e-35, Identity=42%"; Hit description=PRLI -interacting factor N
  Pfam annotation: Domain name=DUF1771; Domain location=30-127; Score =36.4; E_value=1e-07; Accession=PF08590.1; Description=Domain of unknown function (DUF1771)
  Pfam annotation: Domain name=Smr; Domain location=135-208; Score =31.3; E_value=3.4e-06; Accession=PF01713.11; Description=Smr domain
  Pfam module annotation: Pfam domain module=DUF1771::Smr; Domain location=30-127::135-208
MDWKKVVKKLQTINYTAASNNHERPKDGGGYRELRGVAARHYDKMKEYYQKAAFAYSKGDRSYASYLAEEKKLAHHMLLPIIRVYTRMLLLAVTLSSKSTYLGKHYRELGRIEDEKASRNIFEARNKHITNTVTIDLHGQHVQHAMNLLKIHMMICICIPSVLLRVITGCGSEGTGKGKIKRSVIELAEKEHIEWREENSGTVALRLGGPREYRFLEHESDSDLVGNFNID

SEQ ID NO: 77939 - protein, 339 aa, Zea mays
  Coding DNA Sequence Number=SeqID_36160
  Homolog annotation: Hit_ID=Q9FUA7; Match level="QueryCoverage=60%, HitCoverage=97%, E-value=5e-35, Identity=42%"; Hit description=PRLI -interacting factor N
  Pfam annotation: Domain name=DUF1771; Domain location=138-235; Score =36.4; E_value=1e-07; Accession=PF08590.1; Description=Domain of unknown function (DUF1771)
  Pfam annotation: Domain name=Smr; Domain location=243-316; Score =31.3; E_value=3.4e-06; Accession=PF01713.11; Description=Smr domain
  Pfam module annotation: Pfam domain module=DUF1771::Smr; Domain location=138-235::243-316
MDPYGIPMRYGDAGISILTDEISNTGLQSELGHEFLWGEPQISDYEGCQIEVQVSSEPIPPIRYAEAVKEAPRSSTLPSRSTVMKAGPQQVLDSLFKIPETRTYEPSSMDWKKVVKKLQTINYTAASNNHERPKDGGGYRELRGVAARHYDKMKEYYQKAAFAYSKGDRSYASYLAEEKKLAHHMLLPIIRVYTRMLLLAVTLSSKSTYLGKHYRELGRIEDEKASRNIFEARNKHITNTVTIDLHGQHVQHAMNLLKIHMMICICIPSVLLRVITGCGSEGTGKGKIKRSVIELAEKEHIEWREENSGTVALRLGGPREYRFLEHESDSDLVGNFNID

SEQ ID NO: 77940 - protein, 360 aa, Zea mays
  Coding DNA Sequence Number=SeqID_36161
MGGIRRLSASLLEERNSMGVGTSQPSFGFKDFHHAAWPHPATGGHPRWPRWKMRRVGGPPPRGSAAPFFPLRPGVKGVLEPHGDFLQPCQDMQGARGPGSPSPCLNGWFSSPAGGSPSAVTPSPKLLPKPLRCLGQGWLPSRLERAAASRPSFFSYSAGLPLRRGVVRTCGGGNRSSIGSGVSYASVLRSLRLSRPERESLGPFGLVVWGSSSLVEETPGRPSVDRGQGGNRLSRLLGPDSRRSPWTAAPPEAGSGFAEDVVDAEGATAPFSVKTRACRIRSSCSVCFLRPPRPEEHTLAALAKLRLFSSCFERLDSVGNRDVCVSESCFSRKGRVRSPSARSALAAYVYLVVSRIRFPK

SEQ ID NO: 77941 - protein, 393 aa, Zea mays
  Coding DNA Sequence Number=SeqID_36162
MGGIRRLSASLLEERNSMGVGTSQPSFGFKDFHHAAWPHPATGGHPRWPRWKMRRVGGPPPRGSAAPFFPLRPGVKGVLEPHGDFLQPCQDMQGARGPGSPSPCLNGWFSSPAGGSPSVVTPSPKLLPKPFRCLGQGWLPSRLERAAASRPSFFSYSAGLPLRRGVVRTCGGGNRSSIGSGVSYASVLRSLRLSRPERESLGPFGLVVWGSSGLVEETPRPPFGGPRPGPTPKSISRCLGLDWRPWKPVDRGPRGNRLSRLLRPDSRRSPWTAAPPEAGSGFAEDVVDAEGATAPFSVKTRACRIRSSCSVCFLRPPRPEENTLTALAKLRLFSSCFERLDSVGNRDVCVSESCFSRKGRVRYPYPGGVGIPRLGRPCGLRVLSLVHEALSPT

SEQ ID NO: 77942 - protein, 189 aa, Zea mays
  Coding DNA Sequence Number=SeqID_36163
  Homolog annotation: Hit_ID=Q6U1J5; Match level="QueryCoverage=93%, HitCoverage=11%, E-value=7e-07, Identity=32%"; Hit description =Chihuahua
MVSPVSCKRVIRVDVRAPFVGGRLGAQRHAQKYLRQLARRLLDAWAWVPKLACQKSEKRVHLARLHAACMAARPFCPLVWAKTGGRFVVSSHLPSPRMGGIRRLSASSLEERNSMGVGTFQPSFGFKDFHHAAWPHPATGGHPRWPRWKMRRVGGPPPRGSAALFFPPRPGVKGVLEPHGDFLQPCRDR

SEQ ID NO: 77943 - protein, 776 aa, Zea mays
  Coding DNA Sequence Number=SeqID_36164
MEKCKPIKTPMPTNGHLDLDEGGNPPQALCLQAPRLCFAVVRRPLRRPPSPAIIADDLASLHLPLVTLCDRVPSPVLPGSSPLVMPRTKNASASGGGDDEDPRRPFRQVKGKTVYLEQQEGRKKRRSDREARAAAAAAAAAAQAALWRSAGYSIRSDCFPCSSFRLPVSLLHSHLRFHFRQPTLPAPVTPIAPSTSHRHTPLPAPRQLPLLPLPPLPLQLHLSLHLASGSAMRLRSVHWVRILVYLIFSRATAARVRRFRYVPVESWLPAQRDPAAGVLFSTRIQESFFRAQMSAQIALRVHRLLDLPAFLLAAGAESEAHLTYLPGLLSFLTISGRYVEEWVRVFYASVWIDPDHQWMRFRFEREDVTITASQIRQLFGFPDSSTRLHSLCYGTSDPPRRPHGGVAPGTAHVAALFRPPFSDGSRRSPADFTPAAKYLYELVRRTLLPRMGYREATTHIQLWLLGALVSHSEFDVVDFLICEIEDTVLDGIRARRQLPYAHYLCHIFAQLIQPPRFQSTLEASRLVFGSYRPAPEIPVPAYAPVFDTQAEDAALRQFDTLGAADDDDDDDDFGIPPPPPPPMPPRSHDHEAGSSSAAPATPQAMDPALASILQTLPQQQAQLAAEQARMSERMLSMFQTMQDRQDSLQQQLIQDRAENRAFMALMLQHSGISAPPVQSAPPSSLHAPVVPSILSAPPAVTSPLRPVTLAFTSPVLSSVCPQPPVPPASAVSTTAVAVSVTASAPVAPAALPASESVPAPASTADPGSEPDSDPPS

SEQ ID NO: 77944 - protein, 128 aa, Zea mays
  Coding DNA Sequence Number=SeqID_36165
MERGEVAGDDGRRWWPPERSPDYRKAETRRLETESLRLGEEMRQSPWLGRAGGYFLKREMGTPDSLQWLSGAHRTAHSRCPVNHRTAHRKKGTSRAAAGAPDIAQCSVRCTPDCPVLAPSYTFQNILP

SEQ ID NO: 77945 - protein, 128 aa, Zea mays
  Coding DNA Sequence Number=SeqID_36166
MERGEVAGDDGRRWWPPERSPDYRKAETRRLETESLRLGEEMRQSPWLGRAGGDFLKREMGTPDSLQWLSGAHRTAHSRCPVNHRTAHRKKGTSRAAAGAPDIAQCSVRCTPDCPVLAPSYTFQNILP

SEQ ID NO: 77946 - protein, 132 aa, Zea mays
  Coding DNA Sequence Number=SeqID_36167
MGDREDDRSPPAQPKPKHWRSVRSSPDRGMGIMSFVPEEAERALSSCFVQGTELTPDVSHRKELFKKFVRLCFGTQIIRYNISAQQLHENKQYLTNSSGDILSPYVATIHYDHLMDTDQAVCVANLFLLSLT

SEQ ID NO: 77947 - protein, 101 aa, Zea mays
  Coding DNA Sequence Number=SeqID_36168
MGDREDDRSPPAQPKPKHWRSVRSSPDRGMGIMSFVPEEAERALSSCFVQGTELTPDVSHRKELFKNSYDYVLVHKLSDTILVHNNYMKTNNISQIQVEIF

SEQ ID NO: 77948 - protein, 372 aa, Zea mays
  Coding DNA Sequence Number=SeqID_36169
  Gene Ontology: Mol. function=polynucleotide adenylyltransferase activity; Cellular component=nucleus; Biological process=RNA polyadenylation
  Homolog annotation: Hit_ID=Q9LMT2; Match level="QueryCoverage=47%, HitCoverage=24%, E-value=1e-57, Identity=63%"; Hit description =F2H15.20 protein (Hypothetical protein At1g17980) (At1g17980) (Poly(A) polymerase)
  Pfam annotation: Domain name=NTP_transf_2; Domain location=191-288; Score=19.0; E_value=0.0012; Accession=PF01909.13; Description =Nucleotidyltransferase domain
  Pfam annotation: Domain name=PAP_central; Domain location=129-338; Score=-94.6; E_value=6.1e-06; Accession=PF04928.8; Description =Poly(A) polymerase central domain
  Pfam module annotation: Pfam domain module=NTP_transf_2::PAP_central; Domain location=191-288::129-338
MGDQEDDRSPPAQPKPKHWRSVCSSPDHGMGFMSFVPEEAGRALSEFMQGAAEAVGEFGKSTGRDKQSLTAKGYEVVSNGIDNHLVSVNLKNKEAKGTRAGLMGTTILAMLSVRRVCEGCGMSKVKNNNGYHGVTEPISLSGPTEKYLMQTDEVEKYLSDARLYERQDEAILREEVLGKLDQTVKAWIKKATRINGYGEQFVHEANAKTFTFGSYCLGVHGPDADIDTLCVGPRHATRNEYFFRWLHDILAEMPEVSELHPVPDAHVPVLGFKINGVSIDLLYANLAHAVIPESREIMIHYKHRKDGDYDSRSYIGPTVKESQILKDKYKLRTIFGLQATTTLPNPILNPRTALVAMGKKGIANPHAKKLAK

SEQ ID NO: 77949 - protein, 678 aa, Zea mays
  Coding DNA Sequence Number=SeqID_36170
  Homolog annotation: Hit_ID=Q6QP54; Match level="QueryCoverage=16%, HitCoverage=40%, E-value=7e-29, Identity=74%"; Hit description =Putative kinase
MRRKDGGYPPSGGLEDGKTRRIREEEDMTNGRKGRAAMQAACNRAKWTRFSDSQHASMEAQAHASRNRRARCCMQATAPPLAPPPRLFGCGTNTATRGGPAHDPASPAWRDDQCSRKWAGSNDGGRRAGAAEKRATLRLRRNNRAKKKGPGKGDTPKRILPREGTGLRAPPTDQRFEGWPSEGFNSRLRSRGPYTHYWSEVRRPAPRRAPRPPQATRAPRPLLIRGSKAGPRRVHSRLRRRARDDQGYVRYITKARAALPSSPETPCSVPIEGLGAALANPAPAEPLTASTYQPKNLGPDRAPGLRPVRMKRTTRPAEALRKALRPRGSETIPPRPRGLHPTGVLARTHRNKMQPRKAGPLAKKCDESLQASANTPFEARGLLSGTIIRGTLKTPNSQLVTPISIKLQRPDGARTWAKPRKTANSAPPDPGLRLGLSPGRRRTPLRPTQGSDSGSTPEDDELRFARPQGSDSALASAEQPPPRPTQGLGLGLGHGRQTRPRLRRSLHVARPRAQARHVNRKRHHHPTPSRLGPQRTRPGGRQQGLDHSDSCPSARLRHSSDGHDITPTGCQDLSGCHIGMAFLEKVGRAGTRTGQALSWGRSLPSPAWTLVTPYCKRTRPGRGTNTKAAGFPPLSRPSPATSLSPFALAHALDPSGLGHAAHSLVGLGTPGLETPTII

SEQ ID NO: 77950 - protein, 206 aa, Zea mays
  Coding DNA Sequence Number=SeqID_36171
  Subcellular localization annotation: CTP_CleavageSite=54; ConfidenceScore=5.52e-01
MSSSSLMRRVFPFSKPPDGGYPPSFCLIVVVRGAGSCSVPGFRTRVASEPLAAPASATAAGRGSSAGVIARAGHGLTSNSTAFCPSLPYEFWHGRGPPGSSIRPEVSAAAVRPPGAKVVVVAAAGAGGGAPFVGLPLLRRPSPMEWGCSYLRRGNRSSVCNGTLNAGKDGLAFVEALLAQKIYFRKFGLRPFFRSYGIRICGSRFF

SEQ ID NO: 77951 - protein, 71 aa, Zea mays
  Coding DNA Sequence Number=SeqID_36172
MPKPDKTFPLLILPVLPSLLNPGVGPYEFGSRKDGLAFVEALLAQGIYFRKFGLRPFFRGYGIWICGSRFF

SEQ ID NO: 77952 - protein, 383 aa, Zea mays
  Coding DNA Sequence Number=SeqID_36173
  Homolog annotation: Hit_ID=Q8H046; Match level="QueryCoverage=23%, HitCoverage=4%, E-value=5e-37, Identity=88%"; Hit description =Putative callose synthase
MGTTGRRHREMVSCDECSVWVHTREKPKEMPDDVLIGTEPKKEKHYVRSLSCRGKKIDSDQQAMTPLTKSLIVGRMGVSGVRAEDARCRKREDVETATKKSEESDTESEEEEQTRTESSTIEKQGPIIINLVPQFDFVFELYLYDTLSNLLIQMVDAFYVFTLQTVCPLLFSVCSLILITLRYFVDSEILVTKFTIEIGNVQIVCEHGYTLAQNLDPNSEGRGVLQFKTDLMSVIWQKLAKRGGVAIDRSRDIAKLQEFYKLYREKHKVDELIEDEMKLRESAVFSGNLGFPLLGPSEAALRLILDLSSTIITLLPHQNPLILHAFTDLFCSYARVNILFSSKGSCGGGFSTIMGATLENKNFSSDSGEGGNKVVGSAGESSK

SEQ ID NO: 77953 - protein, 65 aa, Zea mays
  Coding DNA Sequence Number=SeqID_36174
  Subcellular localization annotation: CTP_CleavageSite=24; ConfidenceScore=5.31e-01
MGLGVSRCTFCRIQLVQPASNAPAASRVPAAAPAIPFPSMASLPQHLRSRLPSMASPRPLPLQPP

SEQ ID NO: 77954 - protein, 318 aa, Zea mays
  Coding DNA Sequence Number=SeqID_36175
  Subcellular localization annotation: CTP_CleavageSite=26; ConfidenceScore=5.10e-01
MASPRPLPPQPRRRLPRRLSRPAGVPLYMEGTPQQPKTIPQCSPIIYLRSANHSRRSARRSQPTVVHVLPHPERPTRIQRPCRARSSVPAAAFLPQPRDSSRASQRSCRSPAIPPAKHGVAAAIAPAAPPSFTPLSLSPRRRSTLHGRHATTTKDHSPALSHNLPVLCQSFSALCQRFLLAWLWLVKEIVCFTKDKVDAGVVTDIGNEQFVYSWHLPCGMWVVELDFLSCRGKKIDSDQQAMTPLTKAKKREPDSWKNGCQKSEGCGIHDSICDDGHIETDKTKKKMEESLEPSEENNNCEQAEISEVEVVLQAKQFL

SEQ ID NO: 77955 - protein, 41 aa, Zea mays
  Coding DNA Sequence Number=SeqID_36176
MAAGTDSWFTANRGRVRRRKHPTEATTDGNRANGQPLLVND

SEQ ID NO: 77956 - protein, 113 aa, Zea mays
  Coding DNA Sequence Number=SeqID_36177
  Homolog annotation: Hit_ID=Q5JLS4; Match level="QueryCoverage=37%, HitCoverage=10%, E-value=7e-11, Identity=72%"; Hit description =Putative CDP-diacylglycerol synthetase
MAAGCRDRLLFPVVLKACDCVHGCREDSWFPANRGRVRRRKHPTKATTDGNRANGQPLLVNDQNKYKSMLTHTYSTMPTIRHDSILEDPDGDTSQPQHISNYYHVNLKNVMIT

SEQ ID NO: 77957 - protein, 238 aa, Zea mays
  Coding DNA Sequence Number=SeqID_36178
  Homolog annotation: Hit_ID=Q75LL5; Match level="QueryCoverage=35%, HitCoverage=17%, E-value=2e-28, Identity=78%"; Hit description =Putative strictosidine synthase
MASPLEYLPSEHICSRPLGLCFNKIGDLYIVDAYFGLLKVGPEGGWPHRSQRRPRSCASTSPTTPTSTTRETSTSLTPESTTRDVDEGCLGQPRAKFICSFLQELNDAVKAKFVDESPAHLIDTNPSFFSQFTVVIATQGAGTDSCSPWYSRPVIACMAAGRTLGSRRIEATTDGNRANGQPLLVNDQNKYKSMLTHTYSTMPTIRHDSILEDPDGDTSQPQHISDYYHVNLKNVMIT

SEQ ID NO: 77958 - protein, 97 aa, Zea mays
  Coding DNA Sequence Number=SeqID_36179
MEGEASGRSSVGGVGGRGAQELTCADWASSMLGPETCAEAPGKKKTRGRERSPGRSRTKLGEPLAILPLLFVGFANTLSDPQIIDTDGPTSHKQGMA

SEQ ID NO: 77959 - protein, 170 aa, Zea mays
  Coding DNA Sequence Number=SeqID_36180
MGEHHGELGGEDTITREQGATGPNLSWSSRHRRSRGKAPQRAQGGFRPGAQEARRDVHGEHREMGKSGLVRAPWKGKLRGGARLEEWEAAARRSLRAQTGRAPCWGQRRAQKLQGRRRREGGERSPGRSRTKLGEPLAILPLLFVGFANTLSDPQIIDTDGPTSHKQGMA

SEQ ID NO: 77960 - protein, 122 aa, Zea mays
  Coding DNA Sequence Number=SeqID_36181
MGEHHGELGGEDTITREQGATGPNLSWSSRHRRSRGKAPQRAQGGFRPGAQEARRDVHGEHREMGKSGLVRAPWKGKLRGGARLEEWEAAARRSLRAQTGRAPCWGQRRRLALKIRPLAVTR

SEQ ID NO: 77961 - protein, 190 aa, Zea mays
  Coding DNA Sequence Number=SeqID_36182
MAQGHISLSQRTGTLQVVSKLLGWPHDITLSLIQKSQMEVRCQTSFCQNEDGFPKLLRACTVCFGIRSQPEYDGHEFVEHGTEKMRALEGKQLLEDDPTIMYLTAYLLTLDAQYDFLARHHRQMIARAEDAEKRNRKLYVDLTTSQARVAALESREVIAVEALKQAKDEHVQKMMEAYLVTHNQRRALWI

SEQ ID NO: 77962 - protein, 50 aa, Zea mays
  Coding DNA Sequence Number=SeqID_36183
MRLMVLGNDSSNEKGDRPPETSNCITFESQRIGGASGGIRAVRLVAGRNP

SEQ ID NO: 77963 - protein, 351 aa, Zea mays
  Coding DNA Sequence Number=SeqID_36184
MEVEVALNLSAGTPLDGVFLPEEFYIDELLANYDDAQTDDVDGANDVDAQAADVEYVLEAIPIVQEVPLRQDVVNNLLVPGRLSQSIHSSLFSPTVNFTVLHHIHPAINTPSYLSTHTQHPQPRQTPHPLSYSALLATRIVSLRLQSTLLLLECSCHLVEARYASLRQEVELEASSTSSPSPSPDKHVTQSELIRSNPRVMKAGEHQEDKEGECFVRFGHGGGLTPSGIIVKKKEIGLLGLVIVSHLSPRGSRALQVVSELLGWPQDVTLSLIQKFLSQSLHFKNAFRLSFSQKSDGEKCVMTVYIGSSPHHVEWSVTATGHRFKDTCQVVARKALRALCQIYEEEVADTA

SEQ ID NO: 77964 - protein, 101 aa, Zea mays
  Coding DNA Sequence Number=SeqID_36185
MDPQLSIIDSDRRTFAVMKTWSLFYNHTLESLFLSRVRKRQIFVAFAPRWYLMRKNKTEVREDSVLHLGSFAFSLSGGVCASLGLYNIITLHSLLVWSVIK

SEQ ID NO: 77965 - protein, 101 aa, Zea mays
  Coding DNA Sequence Number=SeqID_36186
MDPQLSIIDSDRRTFAVMKTWSLFYNHTLESLFLSRVRKRQIFVAFAPRWYLMRKNKTEVREDSVLHLGSFAFSLSGGVCASLGLYNIITLDSLLVWSVIK

SEQ ID NO: 77966 - protein, 157 aa, Zea mays
  Coding DNA Sequence Number=SeqID_36187
MRKNKTEVREDSVLHLGSFAFSLSGGVCASLGLYNITTLHSLLVWNDLWIADAAIRYLQDQLAKRDLALDWTVNSRLLAWAKEAKARAHVEELNLAMDNLQVYYNTLHEEAHGLCSQLHPNVPADPVGIEAGPSHVAGEALDGELDLFRTPSLYEVG

SEQ ID NO: 77967 - protein, 195 aa, Zea mays
  Coding DNA Sequence Number=SeqID_36188
MAVRREIPALLFLETVAGFLKLVELGNGLIVLPCLASLEEYNGSSSLISCEKQTIRIEFLSLQVTALVPTITGMGDHVSGRVRGKVHCQVQSGYVHKESKNGAEDYPVYVHRRSGEVRRLWTGFSGEAKSDSLLGQLHRGVHSLFQGLGVAGKGSVGRSTGAGARVAAGTPCKGQTPVVSGSGEVERARRSTVYA

SEQ ID NO: 77968 - protein, 43 aa, Zea mays
  Coding DNA Sequence Number=SeqID_36189
MAVRREIPALLFLENVAGFLELVELGEEQVAQEEPHNEGFDLI

SEQ ID NO: 77969 - protein, 86 aa, Zea mays
  Coding DNA Sequence Number=SeqID_36190
  Subcellular localization annotation: CTP_CleavageSite=28; ConfidenceScore=5.47e-01
MRPLPSSTSFRKPATVSRKSNAGISRLTAIAAKSTRQPPYMPTPLLPLPLSGSLEDMVAGVTWPSILPLGWTVEWDPASAEEEHEE

SEQ ID NO: 77970 - protein, 91 aa, Zea mays
  Coding DNA Sequence Number=SeqID_36191
MAQGLDNGHHKLDGHCKSDTRVRSSETTDQAKDGGKKSFEVPSAREKVKETEEPKAKGEEESLQSQGMLELRNVNLMIYESNIKAQACEML

SEQ ID NO: 77971 - protein, 139 aa, Zea mays
  Coding DNA Sequence Number=SeqID_36192
MDITSKMDIAKVILRCIARRQLIKPRTEARRASRYQVHGRRSRWLRNPKPRVKKKACKVKEKPRLSSVWHTGLSGGAPDSVRCARLNSGELAALGNSPAMYGYNSPDCLVCTGLSGEPTVGRANGRPRDLRGTCGQANG

SEQ ID NO: 77972 - protein, 82 aa, Zea mays
  Coding DNA Sequence Number=SeqID_36193
MDITSKMDIAKVILGCVARRQLIKPRTEARRASRYQVHGRRSRRLRNPKPRDVGAKECQSRSSQADLMSYESNIKAQACEML

SEQ ID NO: 77973 - protein, 58 aa, Zea mays
  Coding DNA Sequence Number=SeqID_36194
MEARRASRYQVHGRRSRRLRNPKPRDVGAKKCQSRSSQVDLMIYESNIKAQACEMLWM

SEQ ID NO: 77974 - protein, 56 aa, Zea mays
  Coding DNA Sequence Number=SeqID_36195
MEARRASRYQVHGRRSRRLRNPKPRDVGAKKCQSRSSQADLMIYESNIEAQACEML

SEQ ID NO: 77975 - protein, 58 aa, Zea mays
  Coding DNA Sequence Number=SeqID_36196
MEAREASRYQVHGRRSRRLRNPKPRDVGAKKCQSRSSQTDLMIYESNIKAQACEMLWM

SEQ ID NO: 77976 - protein, 109 aa, Zea mays
  Coding DNA Sequence Number=SeqID_36197
MTEEALELLCEVVRDTSSSFTSWQGPVRHSCHLLIHLLFIVRVTAGPAPLAPVRLALQANLDWRVCVSAVSVVFSLEDGPCGNIWGAIGVPVSILPEDANLPISVDWLE

SEQ ID NO: 77977 - protein, 121 aa, Zea mays
  Coding DNA Sequence Number=SeqID_36198
MELFGPRSVIPLRFIGLEGDMMVEVILHVALLSAVALVRGACCLALTSLALSSPSPTTLAVLEVCLHYFCSYDVILVNSIEARPVFSRPPSEAFQVDSFIAKSYHEDVKISLHVKIRVKGL

SEQ ID NO: 77978 - protein, 757 aa, Zea mays
  Coding DNA Sequence Number=SeqID_36199
  Gene Ontology: Biological process=biosynthetic process
  Pfam annotation: Domain name=Glycos_transf_1; Domain location=335 -521; Score=0.1; E_value=0.0017; Accession=PF00534.10; Description =Glycosyl transferases group 1
  Subcellular localization annotation: CTP_CleavageSite=28; ConfidenceScore=5.03e-01
MGSLENGAGAGAAAAAGSYKRGPGPALRAGGARKARARSRLARFLLLEKVDYLQWIAAAAAFFFVAIVFVAFLPGSGVIERPRLTLPSSRAGEGRVGGGVEDRSGLVRWEAGAAFEFEPARLREKWARERREEAKSLAELGTPVRRLGVRKPRLAMVFGDLYPSAMQLQMVSVASVLEAMGYEMKVCVSAVSVVFSLEDGPCGNIWGAIGVPVSILPEDANLPISVDWLDIICPVLLLLIRYVASASLSNYFLIRILSQSQMFDLDHVSVASYSLLHEPFKSIPIIWTVHEYSLAHRAKEYNVMYAAFDSGNYFVIPGPPSEAFQVDSFIAKSYHEDVKISLGLNPKDFLIAIVGNSFSYGDNLMEEALVLQALSPLLQRYRSENSAQSELKVKIFTGNITEKHRMALESVALSVGFPRGAVEHVAAEDKDNLLGTADLVIYYSCLEEQLFPSVLVQAMSLEKLVIAPDLAIIRKHINDGVNGLLFPRKNIGMLAQVLLRAVSNSKVSLSGQKIASAGKAHAKNLMASETIEGYAMLLKNVVKLPTDALSPLTADEIPLALKQEWKWHLFDDVKHLHRVNTSLSGYKILQKLEQEWHSNQMENSSLSTKNINDAFSAIAWEEQRVNEVMDIKRKMEEDELKDRNDQPHGTWEEVYRNVKRVERLKNELHERDDKELERTGRRPGADDIDASSRLPLLNNVYYRDILGEFGAFFALANRIDRIHKNSWIGFQSWRATARKETRALSAARTIHIVFQNN

SEQ ID NO: 77979 - protein, 150 aa, Zea mays
  Coding DNA Sequence Number=SeqID_36200
  Subcellular localization annotation: CTP_CleavageSite=90; ConfidenceScore=5.31e-01
MAGSGALCSRRSLDLAYWFQRYGALKSGLSLSPSPRQIFGFVVSRDRVPMPSSDMWRPFVSKVPGRRGTKKVQLSIRFSRDALSSATRARAFASQSQAKEHELTAQSMVVSRSEIPYRRRLTSADSSTILWLSRSCTLFLWHSSDQSCST

SEQ ID NO: 77980 - protein, 187 aa, Zea mays
  Coding DNA Sequence Number=SeqID_36201
MVVGGGRSTCAGGGARRRRGVRPNQGTIDQLNGSGSFTRGQGRCAREELENGSPDCSVYARPRATEVRRRRSLVSGEVLSGLRAWKASRATGEANREAGATWTWLERAGRAGRGLGSDGGRWRGVLEAKSGELWLRQGLRARGEDLAYWFQRYGALKSDLSLSPSPRQIFGFVVSRARVLMPSSDMW

SEQ ID NO: 77981 - protein, 63 aa, Zea mays
  Coding DNA Sequence Number=SeqID_36202
  Homolog annotation: Hit_ID=Q7XCD7; Match level="QueryCoverage=68%, HitCoverage=6%, E-value=5e-10, Identity=72%"; Hit description=GRAS family transcription factor containing protein, expressed
MPVVLRLVKRLGAKVVVSVDRGCDRTELSFATHLLQAFQSCVSCLTPSTPWGARTPMRALCLY

SEQ ID NO: 77982 - protein, 335 aa, Zea mays
  Coding DNA Sequence Number=SeqID_36203
  Gene Ontology: Biological process=regulation of transcription
  Homolog annotation: Hit_ID=Q7XCD7; Match level="QueryCoverage=86%, HitCoverage=53%, E-value=2e-36, Identity=51%"; Hit description=GRAS family transcription factor containing protein, expressed
  Pfam annotation: Domain name=GRAS; Domain location=15-258; Score= -70.8; E_value=4.7e-05; Accession=PF03514.5; Description=GRAS family transcription factor
  Subcellular localization annotation: CTP_CleavageSite=48; ConfidenceScore=5.04e-01
MPFAPTMEDAKPPKRPHPMAGAPTPKLPSFPGPVAQAGGGFASALKPKAKAGNDEAAAAVDQLAEGPRPATPSAPARYWRGSIIGSPPSPWPGRHCSAQPSTSRRPCALRSPRPARPWRPRAVLTSYDVVLKLGAYKVFSEVSPMLQFAHPTCVQAVLDELDVFLQFAAYNEDALDAAELVAITSGDAVAVHLPVGSAHVAAMPAVLRLVKRLGAKVVVFVDRGCDSTELPFATHLLQAFQSCVSLLRVPAGLRRRRGGGANAEAVGKIERLMDKPPPLPWRTMLASAGFVLVQASTFAESQAEALLKRIALMEFRVEKRGELVSMSGVAVLTVG

SEQ ID NO: 77983 - protein, 129 aa, Zea mays
  Coding DNA Sequence Number=SeqID_36204
  Gene Ontology: Biological process=regulation of transcription
  Homolog annotation: Hit_ID=Q7XCD7; Match level="QueryCoverage=82%, HitCoverage=17%, E-value=4e-21, Identity=49%"; Hit description=GRAS family transcription factor containing protein, expressed
MPAVLRLVKRLGAKVVVFVDRGCDSTELPFATHLLQAFQSCVSLLRVPAGLRRRRGGGANAEAVGKIERLMDKPPPLPWRTMLASAGFVLVQASTFAESQAEALLKRIALMEFRVEKRGELVSMSAWQC

SEQ ID NO: 77984 - protein, 107 aa, Zea mays
  Coding DNA Sequence Number=SeqID_36205
MEDAAAGMPSAGSRGPAGAQGVWTPWLLAELPAMGSREEGTCAMGSGHRASSQGSKGADQEPAGERCHKGGSHERPLLRGEGADALVFNRVGEGGKRRAGLGGWGWE

SEQ ID NO: 77985 - protein, 103 aa, Zea mays
  Coding DNA Sequence Number=SeqID_36206
MEDAAAGMPSAGSRGPAGAQGVWTPWLLAELPAMGSREEGTCAMGSGHRASSQGSKGADQEPAGERCHKGGSHERPLLRGEGADALVFNRVGEGGKRRAGLGG

SEQ ID NO: 77986 - protein, 130 aa, Zea mays
  Coding DNA Sequence Number=SeqID_36207
MAAGGAELERGRHWRRPTAPGKTSHRSKQGCRAMEEKDPAPCALLHGMGSASRGGRLEHREFGLHGCWSSSQQWGPGRRARAPWGLATERRAKGARAPTRNLQGKDATREAAMRGPCFVGKELTPWCSTV

SEQ ID NO: 77987 - protein, 205 aa, Zea mays
  Coding DNA Sequence Number=SeqID_36208
MDGRGSTVDLQPWRAEHVAQGAKASAMAASGREQKEKNGAGRGAAWGSAGGFSGRPGWEQGGARRRLEMLDWWPALEEADGAGEDEPPEQIGMSRHGGKRPCSLRAASWNGEREQRRPAGAQGVWTPWLLAELPAMGSREEGTCAMGSGHRASSQGSKGADQEPAGERCHKGGSHEGPLLRGEGADALVFNHVGEGGKRRAGLGG

SEQ ID NO: 77988 - protein, 155 aa, Zea mays
  Coding DNA Sequence Number=SeqID_36209
MEQGGALLGARLGDFLGALAGSREEQDAGWRWWIGGRRWRRPTAPGKTSHRSKQGCRAMEEKDPAPCALLHGMGSASRGGRLEHREFGLHGCWPSSQQWGPGRRARAPWGLATERRAKGARAPTRNLQGKDATREAAMRGPCFVGKELTPWCSTV

SEQ ID NO: 77989 - protein, 113 aa, Zea mays
  Coding DNA Sequence Number=SeqID_36210
MASRACRAGSKGERYGCQWPRAKGKKKNGAGRGAAWGSAGGFSGRHGWEQGGASLLLATERGGAWEAAGGRRPWRSLTAPGKTSIRSKQGRAQGAPGLGVSWPGSEEQGTPWA

SEQ ID NO: 77990 - protein, 206 aa, Zea mays
  Coding DNA Sequence Number=SeqID_36211
MSYTSTVHVWRFLMEPAVLNRERVALDKKNRMPVLFDDYSDDDFYGVQRKYSIVARVEVKFPIEPRYRDRQHYILSDINGAKIEAIANRYEIVKYFNSLLHEKHVYKMHNVWFGLNPGAFNFRHLNGTMELYFTHQTIVEPYAVPVQMPPFPKHIFLNLDDIAELPNRTLVDIMAIVVQLDTIHRTMWGTFRRIVIQDNWYNPLIY

SEQ ID NO: 77991 - protein, 268 aa, Zea mays
  Coding DNA Sequence Number=SeqID_36212
  Gene Ontology: Mol. function=helicase activity
  Homolog annotation: Hit_ID=Q1EPC6; Match level="QueryCoverage=83%, HitCoverage=14%, E-value=5e-81, Identity=63%"; Hit description=DNA helicase homolog, putative
MDDSTQPGSTIEINNTVDDDDEGVIFGEDNDENEGYLFAGKCTNFFSKKISNEDTNEDFEIGGTQDQSVVTDVPDPYDKVYSNIPEETHMLKHVPDCGYCTAKKFEYEPPGFCCRGGKVELAPLETPPQLRRLWDSADSNARHFRDNIWFFNGHFSFTSLYCCLDSMTTNMRDSGIYTFRAQGMMYHNIKSFGSECGAEHKHLELYFYDDDPSLEHRYRKCREDQIQKDQEVIKQIVGILRGNPYSEHLRSMGHVENLADYHIALNLD

SEQ ID NO: 77992 - protein, 96 aa, Zea mays
  Coding DNA Sequence Number=SeqID_36213
LSSEPTIGRATSRRAICRRNALPPALSNSRCIHSARREVGSIRCDVPPLQGEDREGTPSSGAASGGSGRVPDTPPGTVPSWGEAPCCGLQGHPEST

SEQ ID NO: 77993 - protein, 220 aa, Zea mays
  Coding DNA Sequence Number=SeqID_36214
  Pfam annotation: Domain name=IQ; Domain location=127-147; Score=19.6; E_value=0.011; Accession=PF00612.17; Description=IQ calmodulin -binding motif
  Pfam annotation: Domain name=IQ; Domain location=169-189; Score=27.0; E_value=6.6e-05; Accession=PF00612.17; Description=IQ calmodulin -binding motif
  Pfam module annotation: Pfam domain module=IQ::IQ; Domain location =127-147::169-189
MKQSLSHADNTSLETTPIDIRVLRLHQCSSAQHMGHSTSPGYPHHHQPPQRPPKDYTAISLDRRSMTPGISSRLSSPPPAAATSSHPPSPTPDVFTRLEESFGRFAEKWDQFVVMFHRYKEKTEKELQAAVRLQVAARGFLARRQVQSLRGEKHLVVASRATTWPSSHEQAVVRLQAAVRGFLVRRAVRKLHLLISSSLHQLAACAPNHQVSSILFEPPA

SEQ ID NO: 77994 - protein, 281 aa, Zea mays
  Coding DNA Sequence Number=SeqID_36215
  Pfam annotation: Domain name=IQ; Domain location=55-75; Score=25.0; E_ value=0.00027; Accession=PF00612.17; Description=IQ calmodulin -binding motif
  Pfam annotation: Domain name=IQ; Domain location=97-117; Score=23.1; E_value=0.001; Accession=PF00612.17; Description=IQ calmodulin -binding motif
  Pfam module annotation: Pfam domain module=IQ::IQ; Domain location=55- 75::97-117
MTPGIKARLSSPPPAAATPSHPPSPTPDAFTRLEEKWDQFVVMFHRYKEKTEKELQAAVRLQAAARGFLARRQVQSLRGEKHLVVASRATPWPSSHEQVVVRLQAAVRGFLVRRAVRKLHLLISSSLHQLAACAPNQQVSSILFEPPAEVEIWVCSPPARPKRVVSFIRATALVLDRPNIRTGWFLLHLSSNVKSVVQLFPWDPGGQEDIAAVQIYILVPQLFCIFVLNNKGKPRCKMLNLKSCQVSLWQLEDELVLKGGGDVMGIIGSEKQQPGWDKARE

SEQ ID NO: 77995 - protein, 89 aa, Zea mays
  Coding DNA Sequence Number=SeqID_36216
MWHNKALPKGKSKLDQMVFMQIKKYRARTEGASRITVSYGKGPDLKGLQQHGPLTVLHTDMDEEGSFDSVVVRYDYASLNGLAAHSSFG

SEQ ID NO: 77996 - protein, 34 aa, Zea mays
  Coding DNA Sequence Number=SeqID_36217
MDEEGSFDAVVVRCDYAFLNGLAAHSSFVSRCLF

SEQ ID NO: 77997 - protein, 195 aa, Zea mays
  Coding DNA Sequence Number=SeqID_36218
MAATVYALSIASAVIADWRRRKRFGLDITLRWVVEEEESKGGRRGCLAEPRGEGERHLQGHNLGETATMSVPHGRHQDLELAVDDFDEELIDPELRFSFQRNSKVCGVDLTDKVVDIIFHVFDANCDGRMCCKPIEEGVVAADDNGVEAPFLVHVGVEDRQRPVLLQALEVRTLPIAHCDPARSFGSCPVFFLFA

SEQ ID NO: 77998 - protein, 121 aa, Zea mays
  Coding DNA Sequence Number=SeqID_36219
MELLRAGKKKLPAADVVDKGALPWGPCSRDGVLLHPREPRGKNGAVAGWPWLEQRDPRPWSREGVAGGCCCREEEEAGKKEGGGWEKWRGGSAKLPRAREGVHIYRETLGLGFPSGPNEPS

SEQ ID NO: 77999 - protein, 109 aa, Zea mays
  Coding DNA Sequence Number=SeqID_36220
MELLRAGKKKLPAADVVDKGALPWGPCSRDGVLLHPREPRGKNGAVAGWPWLEQRDPRPWSREGVAGGCCCREEEEAGKKEGGGWEKWGGGSAKLPRARDWGLLFIEKP

SEQ ID NO: 78000 - protein, 121 aa, Zea mays; identical to SEQ ID NO: 77998
  Coding DNA Sequence Number=SeqID_36221

SEQ ID NO: 78001 - protein, 146 aa, Zea mays
  Coding DNA Sequence Number=SeqID_36222
MHNIDQGLNRLIHKIPSEQPGRIEASNMGCPQGLAFRRMGQARSAASTTSEGRRHSGRGCAQHIISHGGEKGSLLLTQWRRGGVGQRKKKGLGAMAEELQRAEEGAGAVERACRAATEQRHWGLGELGHGAPAHGEEKAPCCRRRG

SEQ ID NO: 78002 - protein, 247 aa, Zea mays
  Coding DNA Sequence Number=SeqID_36223
MQYNGSSSLISCEKQTIRIEFLSLQVTALVPTITGMGDHVSGRVRGKVHCQVQSGSVCWGSMIKHLARSKGVNTTALSRFGQIQTYDFKNSLLKIQASKQDDPRLSGKAWRFVEWAKREARRRPLARVDGIADGAVHNTLFLTGIPSNSQGALKRTARALSYGREAGAPWRLLPLLGVLKGGLLFFPALEGFPAHEQRGREVPWLPQRASAKGTAPCAQGRKRLPALNAVEKRGRWAEEEEGLGRHG

SEQ ID NO: 78003 - protein, 385 aa, Zea mays
  Coding DNA Sequence Number=SeqID_36224
  Homolog annotation: Hit_ID=P53443; Match level="QueryCoverage=32%, HitCoverage=18%, E-value=4e-46, Identity=74%"; Hit description =Phenylalanine ammonia-lyase
  Pfam annotation: Domain name=PAL; Domain location=42-363; Score= -184.4; E_value=1.5e-06; Accession=PF00221.9; Description =Phenylalanine and histidine ammonia-lyase
MEKASIAADRAVAVARRAELFHRLRCSYCDYGDVGPPPPPKTTRLLHGSPTPAAANPAAPQTARSTPAAANPARLRPPQTTRLLHGSPTPTAANPAAPQTARSTPAAANPARLRPPQTLPHRKPPRPQTHRTKSAPDALQTPQTKPRVPVPKEGLAMVNSTAVGSGLASTVLFEANILAILAEVLSAVFCEVMNGKPEYIDHLTHKLKHHPGHIEAAAIMEHILEGNSFMKLAKKLGELDPLMKPKQDQSKTNLQQIGLKGKAKSPKQPYNSFKHAPAPEGVLIRAQWWEQKMVYKHLATLYFVFVFDSSENELAMLDLVQEMEESGFAITSINGRINMAVWGPLNRTIVTARVDATIRIWDSEVRITWYYVPTNSIDGRYNLVI

SEQ ID NO: 78004 - protein, 139 aa, Zea mays
  Coding DNA Sequence Number=SeqID_36225
  Homolog annotation: Hit_ID=Q60EF6; Match level="QueryCoverage=42%, HitCoverage=17%, E-value=1e-09, Identity=55%"; Hit description =Putative TGF-beta receptor interacting protein
MEESGFAITSINGRINMAVWGPLNRTIVTARVDATIRIWDSEEAQEDEERERVCQKQGHQREGNHGGVVDAELDFGKKLPSFFFIQKRMAFSDDGKMKPNLFRTRGNRRIAMTNNGAEKKNKRSSNGRCAKVGAIEQSE

SEQ ID NO: 78005 - protein, 139 aa, Zea mays
  Coding DNA Sequence Number=SeqID_36226
  Homolog annotation: Hit_ID=Q60EF6; Match level="QueryCoverage=42%, HitCoverage=17%, E-value=5e-09, Identity=53%"; Hit description =Putative TGF-beta receptor interacting protein
MEESGFAITSINGRINMAVWGPLNRTIVTARVDATIHIWDSEEAQEDEERERVCQKQGHQREGNHGGVVDAELDFGKKLPSFFFIQKRMAFSDDGKMKPNLFRTRGNRRIAMTNNGAEKKNKRSSNGRCAKVGAIEQSE

SEQ ID NO: 78006 - protein, 126 aa, Zea mays
  Coding DNA Sequence Number=SeqID_36227
MGEKECVGRGVIKLSSIIALNSLNAAIHREKNTVEAAAAAGLQPQQAAANKLIVFKVLSVAGTRNGRSGRELREDIVDRVAKTMVPSGGRNNGGKGLGWDNMSGGRWSGEANGLEGLKPSHPATTT

SEQ ID NO: 78007 - protein, 274 aa, Zea mays
  Coding DNA Sequence Number=SeqID_36228
MALLTGGFGICILRRNANAGTAGRETLSAWSQPSRTPGPAVGCYSSRSCVRTGKGPCACGGWQARSECACHKYQDLHQQALSGVFGWLQADTVAAVWIAAAAIHREKNTVEAAAAARLQPQQAAANKLFFHSFNQWSSHCPSVCPSPCPAGCSLSDRPFRLSRCMCCWAGSPCRRQRYKARGRQAGGSAMGNENDSRKTADAVARDRATPPYVALASPAEGDEDRGSSAVGGVSCGLWWAYTGTHRRWDNGCLVVLGHRSWTSNPPERPMAECR

SEQ ID NO: 78008 - protein, 140 aa, Zea mays
  Coding DNA Sequence Number=SeqID_36229
MGVFGWLQADTVAAVWTAAAAIHREKNTVEAAAAAGLQPQQAAANKLNDSLSQLKYHRGMVLFALIPTNLGDPGYPASRLMVGAENVGFRRHSPTNYAVSGSTLSLNIIVLVLKKNALRSIQSVGVLFCCPCYSGPFRSM

SEQ ID NO: 78009 - protein, 230 aa, Zea mays
  Coding DNA Sequence Number=SeqID_36230
MAIEWRRGAKRRDEACWNQLMSSELTVAVDDDGRGGCQARSSRLGLGLGLVQVQPTSARARDKGRTDLQTNQYNGERWICSVCVCLKRPRSVFAAAAIRLRLRLLQYLSLYGLQLQQSKQLQQCRLVASRTRPKSSVRGKRMPRRRFPLVLSCLSTSLNADRAPPLSVARLGSSCSETRTAGHWTTLRLLLGIQVLPSTPHRHSRETCLPARRLWIVWTVEKVDPEPEVA

SEQ ID NO: 78010 - protein, 129 aa, Zea mays
  Coding DNA Sequence Number=SeqID_36231
  Subcellular localization annotation: CTP_CleavageSite=46; ConfidenceScore=5.06e-01
MERLTGGSSIPTKGLVRLGRSRRTLRWSARRRWYSEAFGPPAAIQTAATVSACSQPNTPRVVGSDQWLSSGEGLRLMPYQAKGIPARFVSVGPATAAEASSEGWRLCLRPNICPPRDQFDKVTWCRRRR

SEQ ID NO: 78011 - protein, 737 aa, Zea mays
  Coding DNA Sequence Number=SeqID_36232
  Gene Ontology: Mol. function=ubiquitin-protein ligase activity; Cellular component=ubiquitin ligase complex; Biological process =protein ubiquitination
  Homolog annotation: Hit_ID=Q1SAW5; Match level="QueryCoverage=40%, HitCoverage=64%, E-value=2e-25, Identity=28%"; Hit description=U box
  Pfam annotation: Domain name=Arm; Domain location=493-533; Score =23.1; E_value=0.00097; Accession=PF00514.13; Description =Armadillobeta-catenin-like repeat
  Pfam annotation: Domain name=U-box; Domain location=280-354; Score =74.2; E_value=4e-19; Accession=PF04564.6; Description=U-box domain
  Pfam module annotation: Pfam domain module=Arm::U-box; Domain location=493-533::280-354
MDWSEEGIDEEESTLRRRTARPRSPPGGRPLPPPRSPGSRSPSPHRGGLAASSGLRSPSPRRVTIMATRMGSSVRTIRRSPTPRRSGADAPASDGVDGTGVKEIIAKMREGFPTLESWDGADTGDSGPGGGEGGGADEEEPQVDQSSVAFSFQELVAPLVVDGAEVIDAFVGSDEARTGKAAAELLDATMGANTGPRTEAIKTELLVNRRLLDLAGLERWMRTVEAVSELEWFTGLCCDENSPPPHIDLFECAFRALENASDVELHHGADARKRWIGPVGVPEFFICPISNKVMENPVVIASGKTVDRSALEKWQKKNGRICPVTGELVPYTMFIPNVFIKLCIEHWRAENKIACVTTAATNPPHISNELQVLIGQATLMPHSPGSSKEVRKSLFLLHKVLADKESAVVHLIGCRPGTIAKLVTVLPETCLDPDPELEDVILRILEKAASYGPNKAVFGDDQYALPVLIARTLLGPAPMRARCARILGLLADDHYNKIKIGELGGFAPLVELLYVGDKGAKKTAAKVIGSLCEAQENQSKFLKEGVVDAAISALRSDGLVEEAQDILLRISGSSVAFGEAYLKLESIKDDDLCQKTSVLLWKTFVLMNGEDKHDAGCSMTASKSAWGESSSTSSDAAMSSTSSDSSADERALRKQNWEDAKIIASWLQKRCSFPNTYRSAEGVFGWLQADTVAAVWIAAAAIHREKNTVEAAAAAGLQPQQAAANKLLDSNAVAEMM

SEQ ID NO: 78012 - protein, 71 aa, Zea mays
  Coding DNA Sequence Number=SeqID_36233
MGAAGAGRSSEVEVEVEGGAEAGRTGEEEPSGSEGGRPCVSSGGSREAGMDGVGWLRSIAVRAAEDAGNRL

SEQ ID NO: 78013 - protein, 126 aa, Zea mays
  Coding DNA Sequence Number=SeqID_36234
MGAAGAGRSSEVEGSAEAGRTGGEEPSGSEGGRPCASSGGSREAGMDGVGWLRSIAVRAAEDAGYTETGVTGGRVGCDKACEEERCALHGQWSMTKVNIMRVRADGPGAAKDGHCALIEELKKLGD

SEQ ID NO: 78014 - protein, 69 aa, Zea mays
  Coding DNA Sequence Number=SeqID_36235
  Gene Ontology: Mol. function=protein serine/threonine kinase activity; Cellular component=cytoplasm; Biological process=protein amino acid phosphorylation
  Homolog annotation: Hit_ID=Q8S5V9; Match level="QueryCoverage=80%, HitCoverage=10%, E-value=6e-22, Identity=89%"; Hit description =Putative serine/threonine kinase
MWSNCMRSILEGEDEARIYFRQLINAVDYCHNRGVYHRDLKSENLLLDSNGALKVSDFGLCAFAPQTNV

SEQ ID NO: 78015 - protein, 142 aa, Zea mays
  Coding DNA Sequence Number=SeqID_36236
  Gene Ontology: Mol. function=protein serine/threonine kinase activity; Cellular component=cytoplasm; Biological process=protein amino acid phosphorylation
  Homolog annotation: Hit_ID=Q8S5V9; Match level="QueryCoverage=53%, HitCoverage=20%, E-value=2e-24, Identity=58%"; Hit description =Putative serine/threonine kinase
MDRDLTDNDELVCKKTAKWSSSGVAPKDYAPMVDSLLRHLLPSSYAFFASMSIKSKSCPSICNIKREISTMKLIKHPNVVQLHEVMASRTKIYMVLEFVDGGELFDRIPENLLLDSNGALKVSDFGLSAFASQTNVRSLVSS

SEQ ID NO: 78016 - protein, 145 aa, Zea mays
  Coding DNA Sequence Number=SeqID_36237
  Gene Ontology: Mol. function=protein serine/threonine kinase activity; Cellular component=cytoplasm; Biological process=protein amino acid phosphorylation
  Homolog annotation: Hit_ID=Q8S5V9; Match level="QueryCoverage=53%, HitCoverage=21%, E-value=2e-24, Identity=57%"; Hit description =Putative serine/threonine kinase
MAFPAKASQQGRRHSSRIFIRGASNRKGQIICGQLDKAQGPSLCDQQVHSFICLFVRSCVDRSKPEIKREISTMKLIKHPNVVQLHEVMASRTKIYMVLEFVDGGELFDKIQENLLLDSNGALKVLDFGLSAFAPQTNVRSLVSS

SEQ ID NO: 78017 - protein, 521 aa, Zea mays
  Coding DNA Sequence Number=SeqID_36238
MGGSEPGSFVEKDPFRGIPLSRSLLQEIEKEENGKRIRNRTTWRTFSDAFITAKQLARRLLDAWAWVPKLACQKSEKRVHLARLHAACMAARPFCPLVWAKMGGRLNATPWELVPLSHRSASRIFITQPGRTPSPAVTRDGDLQLDGGGKRAGLRPLPLPQPQGFSSPRLGRGECRVGVGPCVGGGPLLHSVMGGEAGIARGVRQLQRAWSSAASGFGATCGVGVCHGSWKRFFRRRGGRDRPRADLQLLRPSARPCLTSFGMGGGLLAAASILRSALPLFGPPEQKSSSSPLLEQVTACRSSAFRCSAGLPPRSGVVRTCGGGTGVPFVMALRMPESLGPFGLVVWGSSSLVEETPRPPFGGPRPGPTPKSISRCLGLDWRPWKPVDRGPRGNRLSRLLGPDSRRSPWSAAPPEAGSGFAEDVVDAEGATAPFSVKTRACRIRSSCSVCFLRPPRPEEHTLAALAKLRLFSSCFEHLHSVGNRDKVMSEVSVSRRRRSPSARSALAAYVYLVVSRIRFPK

SEQ ID NO: 78018 - protein, 106 aa, Zea mays
  Coding DNA Sequence Number=SeqID_36239
MGGSEPGSFAEKDPFRGIPLSRSLLQEIEKEEKRKRIRNRTTWRTFSDAVITAKQLARRLLDAWAWVPKLACQKSEKRVHLARLHAACMAARPFCPLVWAKMGGRL

SEQ ID NO: 78019 - protein, 153 aa, Zea mays
  Coding DNA Sequence Number=SeqID_36240
MAGMYCNARDCLNKRMQPPARTAAWILLSPVDKAKGSARKKRSARRFTFAVITASEKVRHVVRFRILFRFPLSLSLATGTGKGGYPERDPSPRRNRAPSPPLLIRGSKAGPPKGSTVASDRVGPTPTTGQGFEGQPPEGLHGRLRLLGLRAHY

SEQ ID NO: 78020 - protein, 184 aa, Zea mays
  Coding DNA Sequence Number=SeqID_36241
  Gene Ontology: Mol. function=motor activity; Cellular component =myosin complex
  Homolog annotation: Hit_ID=Q6UAL3; Match level="QueryCoverage=92%, HitCoverage=13%, E-value=3e-37, Identity=48%"; Hit description =Myosin heavy chain class XI E1 protein
MQECLSESHAWIVNEKEAAKLAIEQAPPKIVEVPVIDNAKLEELTTQNKELEIHQICLKEELSTFKQKAEDLENKLIEFQKQSDELSQETQEQAFQVIQLQELVERLESKIATLESEIELLHNNSALAIQAVVTPEMNQTTIIEEFDKGHQLEEVKTVNKMAIGVPKKRNDKWMANQLLKLHLE

SEQ ID NO: 78021 - protein, 292 aa, Zea mays
  Coding DNA Sequence Number=SeqID_36242
  Gene Ontology: Mol. function=motor activity; Cellular component =myosin complex; Biological process=signal transduction
  Homolog annotation: Hit_ID=Q6UAL3; Match level="QueryCoverage=77%, HitCoverage=16%, E-value=1e-71, Identity=59%"; Hit description =Myosin heavy chain class XI E1 protein
MTTHTAEELATQIEQQKLEEQKTESCLVMGFFPLALFLQIYRRFSAIRFLQLEYNCYKEARETGALKEAKDKLEKRVEELTWRLDVEKRLRADLEEAKSHEIEKLQSALQKMQENLKEAHAAIVNEKEAAKLAIEQAPPKIVEVPVIDNAKLEELTTQNKELEIHQICLKEELSTFKQKAEDLENKLIEFQKQSDELSQETQEQASKVIQLQELVERLESKIATLESEIELLHNNSALAIQAVVTPEMNQTTIIEEFDKGHQLEEVKTVNEQVVVPPVKNLSKQKSQQIQED

SEQ ID NO: 78022 - protein, 281 aa, Zea mays
  Coding DNA Sequence Number=SeqID_36243
  Homolog annotation: Hit_ID=Q2EN88; Match level="QueryCoverage=27%, HitCoverage=23%, E-value=2e-13, Identity=73%"; Hit description =Guanylyl cyclase-like protein
MEKIKKDGKKKKSVTFKATTSSKARERKEESNEDERGTKVSELRAMACMRRAPCVPACGWEPVVYFPQGHSEQEQLQKVLDAGISIKVWSISAYGIGFLLLSGHCIAIALVDKLKLKLRYWQNIIITIISKEVYHAGVIMMYNSIMRSQTTWPSDPAHTRRSLSHPVFRRQLATVRREQRAPVPLPRSPSPSLCPHIPSHDTETMTTHTAEELATQIEQQKLEEQKTELRDKIEEAERRKEGWDHLGPLHQLRGCVSGRVLAGILFPSAENHQASIQGGTN

SEQ ID NO: 78023 - protein, 166 aa, Zea mays
  Coding DNA Sequence Number=SeqID_36244
MTTVPIDSPFASRPHRLGIQCSTDPGCRCAVTALGGPRDAREGMSARNWAETHWIAQSKRGGGRPKSGEVDLGPPVKSGRVRGLGELHGLLAELAEALAGLEGGWSWLATVVETLAAMAGGIKLAGAKERWLAGEGECGAKREIWSQEIWSVSLLKPEANPGFCRV

SEQ ID NO: 78024 - protein, 61 aa, Zea mays
  Coding DNA Sequence Number=SeqID_36245
MTAVGVSGALYAKAVRPGRERGIDGDGTLQDMVDGVTWPTTLPPGWTVEWDAAPAGEEHEE

SEQ ID NO: 78025 - protein, 61 aa, Zea mays
  Coding DNA Sequence Number=SeqID_36246
MAATGVSGALYAKAVRPGRERGIDGDGTIQDMVDGVTWPTTLPPGWTVEWDVAPAGEEHEE

SEQ ID NO: 78026 - protein, 135 aa, Zea mays
  Coding DNA Sequence Number=SeqID_36247
  Gene Ontology: Mol. function=cysteine-type peptidase activity; Biological process=proteolysis
MRLETVDEDPNEHGRLPNINIQLPLMQDLMATKIQMLPVHQHSKFQAKLIDYDLEVGKIVATMKQCLNNIGTKQSNLAATFGELIDEVLRADESVTPNIQGQTVPGGIVDHDSGLVFDKTPIGSVCASGILLSEL

SEQ ID NO: 78027 - protein, 74 aa, Zea mays
  Coding DNA Sequence Number=SeqID_36248
MHSKGLISTVDIQRSTDIGDPTNTQCDGDPPHHRKRSVAADAKKIPMPNVDDDDDFEPPKKKCNITMDAPNKAQ

SEQ ID NO: 78028 - protein, 468 aa, Zea mays
  Coding DNA Sequence Number=SeqID_36249
  Gene Ontology: Mol. function=cysteine-type peptidase activity; Biological process=proteolysis
  Homolog annotation: Hit_ID=Q53MK8; Match level="QueryCoverage=60%, HitCoverage=29%, E-value=2e-14, Identity=24%"; Hit description=Ulp1 protease family, C-terminal catalytic domain, putative
MAIRLHPLPPARFAVLRRRTPSTSIAAAADSIVEPLPLSILRAPRHIGIRPRTICHPDSKAAASIMRKVDRPPTNPKRLIIESSQERFSVDIPRSTDIGDPTNTQCDGDPPQHRKRGVAADAKKIPMPNVDDDDDFEPPKKKCNITMDAPNKTQRLNIRCNPGDVLASIQILNERQRQAIVRKDFFSILDMTIDAIRCRTLLCWLMQKLDPRDMTLRIGPDKELKITQQTVHQILGLPNLGGGKPLNIDEANDAATLRSSLNISKDEFVISKLQDRLRLGQDDDLSIRCFFILFNRLLFPTASWSISYNEVLLTEELEWFPQIDWCHLIFSDLCEAAHKWHNRSINNVSTMIYGCSIVLLLYYLDHLHHVAAPNNKSGTPRIKYFNKNIIRALSMADKRKPRQGGEPFGVCPFQSSSETCYVSKSPSTGQLESPMRPETVDEDPNEHGRLPNINIQLPLMQDLMANKI

SEQ ID NO: 78029 - protein, 258 aa, Zea mays
  Coding DNA Sequence Number=SeqID_36250
  Gene Ontology: Mol. function=cysteine-type peptidase activity; Biological process=proteolysis
MTLRIGPDKELKITKQTVHQILGLPNLGGGKPLNIDEANAAATLRASLNISKDEFVILKLQDRLRLGQDDDLSIRCFFLILFNRLLFPTASCDLCEAAQRWHNRSINNVSATIYGCSIIVFLYYLDHLHHAAAPNNKNGTPRIKYFNKNIIRALSMADKWKPRQGGEPFGVCPFRSSSETCYVSKSPTTCQIEQGQTVVGGTVDNDSGPVFDKTPIGSVSAPGLFLSELECARALRAYLCSRFIELDRYIIFNLFDLA

SEQ ID NO: 78030 - protein, 175 aa, Zea mays
  Coding DNA Sequence Number=SeqID_36251
  Gene Ontology: Mol. function=cysteine-type peptidase activity; Biological process=proteolysis
MMISPKDAASIMRKVDRPPTNPKRLIIESSQECFSVDIPRSTDMADPTNTRSDGDPPQHRKRGVAADVKNIPMPNVDDDDDFEPPKKKCNISMDAPNKTQRLNIRCNPGDVLASIPILNERTSQAIVRKGFSSILDMTIDAICCPPFLCYIVQKSGSVPLLFVVALTKSSAYESS

SEQ ID NO: 78031 - protein, 289 aa, Zea mays
  Coding DNA Sequence Number=SeqID_36252
  Gene Ontology: Mol. function=cysteine-type peptidase activity; Biological process=proteolysis
MAALCGLPWDDTIMEKVGQHIGCEGAQLHQPLSDFLAVNNKEITGPYNTIDVNYTYLYEAVVDILMCKQDAASIMRKVDRPPTNPKRLIIESSQECFSVDIPRSTDMADPTNTRSDGDPPQHRKRGVAADVKNIPMPNVDDDDDFEPPKKKCNISMDAPNKTQRLNIRCNPGDVLASIQILNERQRQAIVRKGFSSILDMTIDAIGCRTLLCWLMQKLDPRDMTLRIGPDKELKITKQTVHQILGLPNLGGGKPLNIDEANAAATLRASLNISKDEFVISKLQDRLRLG

SEQ ID NO: 78032 - protein, 113 aa, Zea mays
  Coding DNA Sequence Number=SeqID_36253
  Gene Ontology: Mol. function=transferase activity, transferring pentosyl groups; Cellular component=imidazoleglycerol-phosphate synthase complex; Biological process=histidine biosynthetic process
  Homolog annotation: Hit_ID=Q10NW0; Match level="QueryCoverage=56%, HitCoverage=11%, E-value=9e-25, Identity=85%"; Hit description =Imidazole glycerol phosphate synthase hisHF, chloroplast, putative, expressed
LHYAIRYLGFDIRDVQSPEDIVFAERLVFPGVGAFGSAMDVLNRTGMADALREYIQRDRPFLGICLGLHSLHSLPTPLSRLHSLHSLPSPHSSLSPSSSSRSCPTLRMSLVSL

SEQ ID NO: 78033 - protein, 223 aa, Zea mays
  Coding DNA Sequence Number=SeqID_36254
  Homolog annotation: Hit_ID=Q10NW0; Match level="QueryCoverage=27%, HitCoverage=10%, E-value=2e-23, Identity=86%"; Hit description =Imidazole glycerol phosphate synthase hisHF, chloroplast, putative, expressed
MHMLTQILLSGLAVVCVDGSMEDLFNIPGEIIEGIWRRRRRNTVEHGPSHPCACIETRRGALPLAGRGRREEPGGAKTAGWTRKKNVDPGLVQASVSSPKDCCDDDNFSDTGDDACYSDTRLMRRVGQDLEEEEGEREEWGLGSEWREWRRERGVGSEWREWRPRQMPRKGRSLWMYSRSASAMPVLLRTSMAEPKAPTPGKTSRSAATMSSGLCTSRMSKPR

SEQ ID NO: 78034 - protein, 114 aa, Zea mays
  Coding DNA Sequence Number=SeqID_36255
  Gene Ontology: Mol. function=cysteine-type endopeptidase activity; Cellular component=lysosome; Biological process=proteolysis
  Homolog annotation: Hit_ID=Q70I35; Match level="QueryCoverage=57%, HitCoverage=16%, E-value=6e-16, Identity=71%"; Hit description =Papain-like cysteine proteinase-like protein 2
  Subcellular localization annotation: CTP_CleavageSite=77; ConfidenceScore=5.40e-01
MASQTTLTGWTTPSSGPSRTRSFSAESGFVWILLVVQRVGSAGGCALPHNWQVGGAFGAGVRRLRPQGCVQATSSMNCSAAGCSPTRGSSSKLAPRLVRLISGVSNWELLDIIQ

SEQ ID NO: 78035 - protein, 96 aa, Zea mays
  Coding DNA Sequence Number=SeqID_36256
  Subcellular localization annotation: CTP_CleavageSite=81; ConfidenceScore=5.37e-01
MARSVLHRVASVAPPDPLAVANTMWSVLVFVSVAGGGVQSCIGAQPRPPPSAPRSHTLPWHSALGVLEGAHYLTTGKLEVLSEQEFVRAPRGGVNR

SEQ ID NO: 78036 - protein, 476 aa, Zea mays
  Coding DNA Sequence Number=SeqID_36257
  Homolog annotation: Hit_ID=Q1L876; Match level="QueryCoverage=22%, HitCoverage=32%, E-value=1e-09, Identity=33%"; Hit description=Novel protein
  Pfam annotation: Domain name=DUF947; Domain location=303-448; Score =27.6; E_value=1.2e-07; Accession=PF06102.2; Description=Domain of unknown function (DUF947)
  Subcellular localization annotation: CTP_CleavageSite=81; ConfidenceScore=5.33e-01
MARSVLHRVASAAPPDPLAVANTMWSVLVFVPVAGGGVQSCIGPQPRPPPSAPRSHTLPWHSALGVLEGAHYLTTGKLEVLSEQEFVNCDHEILVPTSSVKGGSISIGGSLQLLGFCTFEACVGILAVNHEDEISVNAFPITVMFGMCSIFLFMAAILLHMQGRNLLIDMFLYYHNYLARAVAQPWCSTSERTHFSVAHLPIFDGHNGKDAAQYVCDNLPWVIMEDDDLSLELKKFKNELADDKYLRAEVVGTPCVEEFTPKNCEMLCNNTKLELRMTSVLTAVFSELEQLDLATVETDVDEKVEDKVCSYVDQLLAAMRAKDSTMHEASLLNTTNQACGLYNEAERLQKMIKKSKDLDAIGEMKSRVTWIDKQLKSHPPKNVESEILREHIKKEREAAKAGKRPYYLKKPELRERKLMNKYNELKEAGKLDAFMEKRRRKNASKDHRFMLYRRSATTSCAAASPPASPASATCST

SEQ ID NO: 78037 - protein, 120 aa, Zea mays
  Coding DNA Sequence Number=SeqID_36258
  Homolog annotation: Hit_ID=Q1L876; Match level="QueryCoverage=38%, HitCoverage=14%, E-value=2e-07, Identity=48%"; Hit description=Novel protein
  Pfam annotation: Domain name=DUF947; Domain location=1-92; Score= -26.8; E_value=0.00031; Accession=PF06102.2; Description=Domain of unknown function (DUF947)
RLQKMIKKSKDLDAIGEMKSRVTWINVESEILREHIKKEREAAKAGKRPYYLKKPEFRERKLMNKYNELKEAGKLDAFMEKRRRKNASKDHRFMPYRRSATTSCAAASPPASPASATCST

SEQ ID NO: 78038 - protein, 89 aa, Zea mays
  Coding DNA Sequence Number=SeqID_36259
MAGEHREDKEGGCFVRFGHGGGLTPSGITAKPPGTNNRFTFESQRIGMLQEQAQENEDQEDEPPQEEDNDQGGDDNDKYKEDDQEIEST

SEQ ID NO: 78039 - protein, 79 aa, Zea mays
  Coding DNA Sequence Number=SeqID_36260
MNLTIRHMAQINIFIRFFYLHPQSRSHSFDRQMPFAASWWFLLLSGHLEATMLQVNRQGNISRMADMYLTGPVTLVPLK

SEQ ID NO: 78040 - protein, 265 aa, Zea mays
  Coding DNA Sequence Number=SeqID_36261
  Gene Ontology: Mol. function=catalytic activity; Biological process =metabolic process
  Homolog annotation: Hit_ID=Q9M0X9; Match level="QueryCoverage=28%, HitCoverage=14%, E-value=5e-28, Identity=76%"; Hit description=4 -coumarate--CoA ligase-like protein
MNLTIRHMAQINIFIRFFYLHPQSRSHSFDRQMPFAASWWFLLLSGHLEATMLQVVSSYKERMRTARISPLPTRAEQCARNLFQKLRRVPNRQTDSTETGGQLFVVDRLKELIKYKGFQIAPAELEGLLLSHPEIMDVVVIPLPNAEAGEVPIAYIVRSPDSSLTEVDVQKFIEKQVMTTSPTGTHKLANPKGFSLHFSGSDIGGGYELYVDEAKPRGDDQRGGGRSSGRSGGRFGDRSCRRFETGGSLNRRVNVATCPSPDGST

SEQ ID NO: 78041 - protein, 170 aa, Zea mays
  Coding DNA Sequence Number=SeqID_36262
  Homolog annotation: Hit_ID=Q9M0X9; Match level="QueryCoverage=32%, HitCoverage=10%, E-value=4e-18, Identity=76%"; Hit description=4 -coumarate--CoA ligase-like protein
MEDNLPVNVQEYQELAKKLILKKKIAPAELEGLLLSHPEIMDAVVIPLPNAEAGEVPIAYIVRSPDSSLTEVDVQKFIEKQVTTTNPTGTHKLANPKGFSLHFSGSDIGGGYELYVDEAKPRGDDQRGGGRSGGRSGGRFGDRSCRRFETGGSLNRRVNVAACPSPDGST

SEQ ID NO: 78042 - protein, 151 aa, Zea mays
  Coding DNA Sequence Number=SeqID_36263
MGARFDMAYRRARSTRGGGRPSPGEVDLRLPVKFCRVRGLGKLHGPLAELTEALALLGGDWSGLATVVEALVAMAGGKELWHHLRAKAAKVCYFLTYNNMGSKTLSTKCTFTSLTRQNKRLSRICWLEGVKVRLNQESRLCLQKCLLIVDP

SEQ ID NO: 78043 - protein, 58 aa, Zea mays
  Coding DNA Sequence Number=SeqID_36264
MAVMGSTSDKMYLCQVPNFGIENDKDETERDPLIVSIFANRVFDLNKPYLDSLKPAYP

SEQ ID NO: 78044 - protein, 107 aa, Zea mays
  Coding DNA Sequence Number=SeqID_36265
MVYAESGKGSASISFLGTALAKILVSSEPRAVLLELAIQCLQNLVPLGQFLRQVEGKDGREMRRRYVEPLSHGTLQDMVDGVTWPTTLPPGWTVEWEAASAVEDQEE

SEQ ID NO: 78045 - protein, 206 aa, Zea mays
  Coding DNA Sequence Number=SeqID_36266
MDIAFNTHGLMLHPLIMILILKSNEPNGLESCFDTMHLQQTHRHHGIRREREGVSKHQFLGTALAKILVSSEPRAVLLELAIQCLQNLVPLGQFLRQVEGKDGLEMRRRYVEPLFHGLMHQAPELKLSGDLHPPAPMNPPVQFAAAHSLTPPTSPNRPKASRPSPRRATAPGTLQDMVDGVTWPTTLPPGWTVEWEAASAVEDQEE

SEQ ID NO: 78046 - protein, 1186 aa, Zea mays
  Coding DNA Sequence Number=SeqID_36267
  Gene Ontology: Mol. function=cytochrome-c oxidase activity; Cellular component=membrane; Biological process=electron transport
  Homolog annotation: Hit_ID=Q42806; Match level="QueryCoverage=43%, HitCoverage=99%, E-value=0.0, Identity=86%"; Hit description =Pyruvate kinase, cytosolic isozyme
  Pfam annotation: Domain name=DUF639; Domain location=526-1164; Score =592.5; E_value=3.8e-175; Accession=PF04842.3; Description=Plant protein of unknown function (DUF639)
  Pfam annotation: Domain name=PK; Domain location=24-370; Score=812.6; E_value=2.1e-241; Accession=PF00224.11; Description=Pyruvate kinase, barrel domain
  Pfam annotation: Domain name=PK_C; Domain location=384-515; Score =219.1; E_value=9.7e-63; Accession=PF02887.6; Description=Pyruvate kinase, alphabeta domain
  Pfam module annotation: Pfam domain module=DUF639::PK::PK_C; Domain location=526-1164::24-370::384-515
MANIDMAKILADLDRGASGGDARVPKTKLVCTLGPASRTVPMLEKLLRAGMNVARFNFSHGTHEYHQETLDNLRQAMHNTGILCAVMLDTKGPEIRTGFLKDGKPIKLTKGQEITVTTDYDIKGDENTIAMSYKKLPVDVKPGNVILCADGTISLAVLSCDPDAGTVRCRCENTAMLGERKNCNLPGIVVDLPTLTEKDKEDILGWGVPNDIDMIALSFVRKGSDLVTVRQVLGQHAKRIKLMSKVENQEGVVNFDEILRETDAFMVARGDLGMEIPVEKIFLAQKMMIYKCNIAGKPVVTATQMLESMIKSPRPTRAEATDVANAVLDGTDCVMLSGESAAGAYPEVAVKIMARICIEAESSLDHEAVFKAMIRSAPLPMSPLESLASSAVRTANKAKAALIVVLTRGGTTAKLVAKYRPRVPILSVVVPVLTTDSFDWTISSEGPARHSLIYRGLIPLLAEGSAKATDSESTEVILEAALKSAVQKQLCKPGDAIVALHRIGVASVIKICIVNRGTEDQERGGAEAAAMGSDVPPPSAIPPLSAAAASVVRQIAGVPVDQLLRRVDAEEQARGPLEYARSVVEYCSHVALRVEARRPDHLGDREFHTLTYDMMLAWEAPDEETDAVFQKTAFSVLRGDDADDDDSGSIFYSSPTQMAIQVSGLFLLRTVGPEAFAKIAPACPAMAHPITVRNLFDAITNSTGGRLHFLIYHKAFCSAKRVLGGHRAPALQLSDDEVILDIHGAATTKPVLQHIGTSTWPGRLTLTNHALYFEAIGVDFSYGEAVVYDLARDLKQSVKRESTGPWGAHLFDKAVMYKSSLTSEPVFFEFPQFKGHTRRDYWFAAIKEVLHAHKFIRKYKLAGFQKAEALSVATLGILRYRTVKEGFHILPAHFKTILAFNLAEKLPKGDKILEALYGQLKQHCPRFRGGQDLGQSSSEELMLADPFPLSAYTMVTMGLLKLKEEDNAEERDFAVRDVQIGGTSSVQMALERSVGYSGRVEAARATLDQVRVEDIDTNVAVLKELLFPLIEIGKRLLALSGWEEPFKSYVFLLCFLYMAYRYCFLAISQLEAHVQAGNIFLLKLRSLMLAAFPQSTNRVAAALVAVAAIFTFVPLRTIVLLILLEEYTRQMPVRKKSSEKLVRRLREWWLRIPAAPVQLFYTMFRAHSLSGRDLGITPSSESKTLV

SEQ ID NO: 78047 - protein, 194 aa, Zea mays
  Coding DNA Sequence Number=SeqID_36268
MPESGVPRRTTRCPPKVERESSGSWHGAAMSSCPHSGGETKILAAAGSGVLGFYAHALWSPGRLAGRLRGQGWRKARGAVTRRSRRGPCLREDLQCTTGSKTDQWDPQRQMRRCAMGCWHGGADNISDFFNGSGEFVPFMPIIRLIRSLKKGETLLMVFSNAEILIYRAFANSPLSGSLRASLGARKLEGDWRD

SEQ ID NO: 78048 - protein, 292 aa, Zea mays
  Coding DNA Sequence Number=SeqID_36269
MVSHPALRNKASFKLHRIGPRLLESPGAKPHLFPRLSSSKVDGGLIIGFKRVSLAIVLAEGVWHDLSRPIKNLRSRLDSAYNEPGSNPGRPAPIQRPAAFSPQHRPVRGGARPPAAVSSPANPAPRQYIAKSLTVRIYMKRKTRRAFYGVSYQRKSRRARQSTVEAEMRRSSVSGERFRDHRRCSRRENTMPDSGVPRRTTRCPPKVERESSGSWHGAAVSSCPHSGGETKILAAAGSGVLGFLCTRFMVARKVGGAAARPGMAKSPRSCYKEVSMGSVLEGRSTVHHRVKD

SEQ ID NO: 78049 - protein, 322 aa, Zea mays
  Coding DNA Sequence Number=SeqID_36270
MSTEKRHLDQIELLALWLLLNHLLFSCGGFMGRSSTGFLADRHRSKINQGPPYTDHSPTALAPFGFKLHWIGPRLLESPGAKPHLFPRLSSSKVDGGLIIGFQRVSLAIVLAEGGSNPGRPAPIQRPAAFSPQHRPVRGGARPPAAVSSPANPAPRQYIAKSLTVRIYMKRKTRRAVYGVSYQRKSRRARQSTVEAEMRRSSVSGERFRDHRRCSRRENTMPDSGVPRRTTRCPPKVERESSGSWHGAAMSSCPHSGGETKILAAAGSGVLGFLCTRFMVARKVGGAAARPGMAKSPRSCYKEVSTGSVLEGRSTVHHRVKD

SEQ ID NO: 78050 - protein, 95 aa, Zea mays
  Coding DNA Sequence Number=SeqID_36271
  Homolog annotation: Hit_ID=Q7F8U2; Match level="QueryCoverage=31%, HitCoverage=4%, E-value=1e-07, Identity=83%"; Hit description =Putative phosphatidylinositol-phosphatidylcholine transfer protein
  Subcellular localization annotation: CTP_CleavageSite=59; ConfidenceScore=5.23e-01
MAQGHISLSLRHISGSHLPSHAFANTSKALVTSTIYDLQSLAKFMSKATGNAANWVQIVGMKEERAVAAFHDHLTSHRLLPDKHDDYHMMLSIEL

SEQ ID NO: 78051 - protein, 87 aa, Zea mays
  Coding DNA Sequence Number=SeqID_36272
  Homolog annotation: Hit_ID=Q2EN88; Match level="QueryCoverage=29%, HitCoverage=9%, E-value=7e-07, Identity=96%"; Hit description =Guanylyl cyclase-like protein
MGTRADQEQVATHIFWCSQQTSALSQQGPCDLNSIGFTVIGKVHVQGDWKCCQLGANSWDEGSACAAGLHLGLRPRLRAHGAQDARD

SEQ ID NO: 78052 - protein, 196 aa, Zea mays
  Coding DNA Sequence Number=SeqID_36273
  Homolog annotation: Hit_ID=Q2EN88; Match level="QueryCoverage=84%, HitCoverage=56%, E-value=1e-52, Identity=66%"; Hit description =Guanylyl cyclase-like protein
MEKAGWQVPHVQQAFTWDYGLACVLMVLRTLGIDCCDGIADLERLCRTTSIWTVDLAYLLNKISVSFPFCTVTLGANPQYSAESFCREQLQEDIDRVDELFGKALDAGISIQATQPLEGCQYVGIHSIRIVCAFFGLGSKVAMFQYSSVEMYNACKPQPTLEIHNPDMHKDAPRGLLNKVVDLIDLTSERWDKDLI

SEQ ID NO: 78053 - protein, 95 aa, Zea mays
  Coding DNA Sequence Number=SeqID_36274
  Gene Ontology: Mol. function=zinc ion binding; Cellular component =integral to membrane
  Homolog annotation: Hit_ID=Q94LL0; Match level="QueryCoverage=78%, HitCoverage=20%, E-value=4e-27, Identity=76%"; Hit description =Putative nucleic acid binding protein
MPDKGDNDYLDMVFTQVSLEEVENLCRYELPNESWEVNLPAEKVSPELLEPTLGINFARDGIQGKEWLSMVDAHSDAWLLYVAFYLAARFGFNKN

SEQ ID NO: 78054 - protein, 331 aa, Zea mays
  Coding DNA Sequence Number=SeqID_36275
  Homolog annotation: Hit_ID=Q1XBU3; Match level="QueryCoverage=12%, HitCoverage=12%, E-value=5e-15, Identity=97%"; Hit description=Beta -carotene hydroxylase
  Pfam annotation: Domain name=Carotene_hydrox; Domain location=180 -279; Score=-38.0; E_value=4e-06; Accession=PF03897.5; Description =Carotene hydroxylase
MTDHALDTQQRRCQQRETVLLHATIEWQMFNVLSTRALGARSWTLELTDVWSGIKEEMFLIVFTLIKLMNLVHVITSKPLSALSNALSIVCSNACSLRTVFVCFGGGCRREALATGCCTPTANRGHRAGGQKQPATTVGHSFLSYICMFFKGMYMDLPNTLDFCKQPKILSEKKYGAEKELGANGHNLDRCDSVQEDEVSMAYMFVHMFGITLFGMAYMFVHDGLVHRCFPVGPIANVPYFRRVAAAHKGDNDYLDMVFTQVSLEGEEAGRGGGGKDALFVELWKACAGLLSCVPPLGQKVYYLPQGHIEQEYRIRRVVSLTFSHCSPFMV

SEQ ID NO: 78055 - protein, 110 aa, Zea mays
  Coding DNA Sequence Number=SeqID_36276
  Homolog annotation: Hit_ID=Q2QQX6; Match level="QueryCoverage=31%, HitCoverage=4%, E-value=2e-09, Identity=74%"; Hit description=Auxin response factor 2, putative, expressed
MCSGGGAPLPLQRARKPTQPYLSLIAPVNPPRGLGAEAGRGGGGKDALFVELWKACAGPLSCVPPLGQKVYYLPQGHIEQNIGIDTTLAAMVRDKHVKFTLKFEYGFGYE

SEQ ID NO: 78056 - protein, 145 aa, Zea mays
  Coding DNA Sequence Number=SeqID_36277
MTVVDQQCGHEFPPYGSAWLYVPPCIDRRGLSRSPRLVGLFSGDLVARPPRGLSRWRLNRSSRLTDLLDGWARKSFMGLAMGTLFLGTQQVTIHMVPDPSYDDLSTFFASYVELSALYDAETLSYHDGSNSGRDAFPPRLRHTRR

SEQ ID NO: 78057 - protein, 69 aa, Zea mays
  Coding DNA Sequence Number=SeqID_36278
MSDDLVVPVHFEVGQEFCFCLLDHTLLVLLELELFVSRQAESPKSMLTPFRSAKYSRRTDSGALWAGAD

SEQ ID NO: 78058 - protein, 208 aa, Zea mays
  Coding DNA Sequence Number=SeqID_36279
MSDDLVVPVHFEVGQELCFRLLDHPLLVLLELELLVSRQGFPSRLYDVAWRNIRAIPLNRPLRADLISLDMYFPNGVAKKYVDAFSERQILKKNRRRCSLVRRGRGDLVARPPRGLSRWRLNRSSRLTDLLDGWARKSFMGLAMGTLFLGTQQVTIHMVPDPSYDDLSTFFASYVELSALYDAETLSYHDGSNSGRDAFPPRLRHTRR

SEQ ID NO: 78059 - protein, 161 aa, Zea mays
  Coding DNA Sequence Number=SeqID_36280
MPPRTRLTARKSTGPIGVPRHQLAPRHESSSSGSNDPIGDLEARDQLADRDLALDWAVQSRLLMCAKEARAQARIKELSSTVDNLQVYCNTLHEEVHILYSQLHPSEPAHPAEAEAGPSHVAGRALGGELDLFEPPPSLRLVDVWTPTPDDEAAKSNGKQE

SEQ ID NO: 78060 - protein, 126 aa, Zea mays
  Coding DNA Sequence Number=SeqID_36281
MTPSEILKPDQLADRDLALDWAVQSRLLMCAKEARAQARIKELSSTVDNLQVYCNTLHEEDHILYSQLHPSEPAHPAEAEAGPSHIAGRALGGELDLFEPPPSLRLVDVWTPTPDDEAAKSNGKQE

SEQ ID NO: 78061 - protein, 105 aa, Zea mays
  Coding DNA Sequence Number=SeqID_36282
MAVMDSTSEKMYLCQFWSVIKKLKLAFEINVYCNTLHEEVHILYSQLHPSEPAHPAEAEAGPSHVAGRALGGELDLFEPPPSLRLVDVWTPTPDDEAAKTNGKQE

SEQ ID NO: 78062 - protein, 234 aa, Zea mays
  Coding DNA Sequence Number=SeqID_36283
MVAAAPGILPWPHLPLPSSSHPSDASDAAAAATDANTSAYDIQIFEPTSIEERRRLLIQRRRLRLAASHASRLTVASRVSSKLISATASCSSGVASDLPPPLLMARRCLPPLPQPRPCRPWRIPNPTTSSVGPRRRGCAMNFRRKKPATIQGSILTTRTRGDANKVYVNLSWGVDNLALANLFTEQGPSMTDLDDRSVLRYQHQSRLEAILNFHLRYIKLGNASSCYPIPIIDT

SEQ ID NO: 78063 - protein, 140 aa, Zea mays
  Coding DNA Sequence Number=SeqID_36284
MRRGGGRSDATPLEQEAVVLMSLEETREATVSREAWEAASRRRRRWIRRRRRSSMEVGSKIWMSYAEVLASVAAAAASEASDGWEEEGRGRGNLTSTIEGEGYTGNRRRRLPAVLDPLLGAIGRGAELTQLGATAYGAEL

SEQ ID NO: 78064 - protein, 96 aa, Zea mays
  Coding DNA Sequence Number=SeqID_36285
MDIARPLANLEKSTVQQKLMARRPGLRRERRDRKKRSGYQESDMAGGQLHLGARIFCILALKQNFGPLARRHRPWRRANTARRHSLWRRAVSGRNG

SEQ ID NO: 78065 - protein, 72 aa, Zea mays
  Coding DNA Sequence Number=SeqID_36286
MIVAHSAPVPPRSKWNSRCMSGLANRHAGATEDGWGSMDTDTDASVLDPLLGAIGRGAELTQLGATAYGAEL

SEQ ID NO: 78066 - protein, 60 aa, Zea mays
  Coding DNA Sequence Number=SeqID_36287
MHPEYAMRSWDSWSKCQAVLGTSYVLDPLLGAIGRGAELTQLGATAYGAELPDVAVLRGT

SEQ ID NO: 78067 - protein, 65 aa, Zea mays
  Coding DNA Sequence Number=SeqID_36288
MVRLVPGAWCLVVVPCLEQEGEWETMKKKWEDPLLGAIVRGAELTQLGATAYGAELRDVAAAWHT

SEQ ID NO: 78068 - protein, 673 aa, Zea mays
  Coding DNA Sequence Number=SeqID_36289
  Homolog annotation: Hit_ID=O23372; Match level="QueryCoverage=39%, HitCoverage=12%, E-value=5e-12, Identity=28%"; Hit description =Probable histone-lysine N-methyltransferase ATXR3
MDQLIGFRSDDHVLHTELLRLDAPSAITLRAAASSLRNRHRRVLRPKLCDGHERGEPRGARVLKRTVGHSVANDGPRHPARFSMGDGGVACAVRSVESFRAGALVRRGGAGEAMPDKGERAHGHRHQHQHWKNQQSATAADLEEGELLNGEAGTNGLPERSMPPKKWRKVLAASAAAVEVEPGEIVSTKQAVPLKKERRNGDVEKVELLPERQRKEKSSGKSTRKSIKDDVEPGEIALPGKRRDAKSQLAHDNSRRPSSSAQKGSLRDSDEEPGEIKPESGISGSVRKNRPTEPHSSNHKHHTDTSDQSGSKHRRKGEGKSSSAARHLSGRIREVSPPTRDRRDKHERSPGILGRFPHDRFRHDRYDRSPSRLERSPHRTRHYDSRDRSPYISPRHRARPPQFRDNTPSRVDNSPRGRVQHEDIRDRSPFRHDRSPSERCRPTDTHEASKKSRSSNNSEKSHHKSKSAKQSSKIKSGSNGKNEEKISKEKHTESSQYTELPPPPPLPLPPPPPPPPPPPPLPPAVPPPLPPSPEPEPPGVLAEDMIEDMDICDTPPHTSAVPEPTEPICDIGRWFYLDHFGIEQGPSKLAELKKLVQDGYLLSDHLIKHADSNRWVTVENAASPLVPSDFPSLYSDTSTQLVNPPEAPGNLLDEALEEASNLASGAEDKQMEE

SEQ ID NO: 78069 - protein, 95 aa, Zea mays
  Coding DNA Sequence Number=SeqID_36290
MRFDRSTGRIKTNECHKTRARVGRHGLDLEQDFGPCPPSPSKASQYYRCRNRRIWAGFVAAPLSTCFLFGKFGSIPLRSPLWIHTITISLTCGST

SEQ ID NO: 78070 - protein, 1851 aa, Zea mays
  Coding DNA Sequence Number=SeqID_36291
  Gene Ontology: Mol. function=histone-lysine N-methyltransferase activity; Cellular component=nucleus; Biological process=chromatin modification
  Homolog annotation: Hit_ID=O23372; Match level="QueryCoverage=95%, HitCoverage=71%, E-value=0.0, Identity=39%"; Hit description =Probable histone-lysine N-methyltransferase ATXR3
  Pfam annotation: Domain name=SET; Domain location=1709-1834; Score =14.0; E_value=4.1e-05; Accession=PF00856.18; Description=SET domain
MPDKGERAHGHRHQHQHWKNQQSATAADLEEGELLNGEAGTNGLPERSMPPKKWRKVLAASAAAVEVEPGEIVSTKQAVPLKKERRNGDVEKVELLPERQRKEKSSGKSTRKSIKDDVEPGEIALPGKRRDAKSQLAHDNSRRPSSSAQKGSLRDSDEEPGEIKPESGISGSVRKNRPTEPHSSNHKHHTDTSDQSGSKHRRKGEGKSSSAARHLSGRIREVSPPTRDRRDKHERSPGILGRFPHDRFRHDRYDRSPSRLERSPHRTRHYDSRDRSPYISPRHRARPPQFRDNTPSRVDNSPRGRVQHEDIRDRSPFRHDRSPSERCRPTDTHEASKKSRSSNNSEKSHHKSKSAKQSSKIKSGSNGKNEEKISKEKHTESSQYTELPPPPPLPLPPPPPPPPPPPPLPPAVPPPLPPSPEPEPPGVLAEDMIEDMDICDTPPHTSAVPEPTEPICDIGRWFYLDHFGIEQGPSKLAELKKLVQDGYLLSDHLIKHADSNRWVTVENAASPLVPSDFPSLYSDTSTQLVNPPEAPGNLLDEALEEASNLASGAEDKQMEETSAEDSEEFCIDDRVEALMDGSILVHGQELEIIGELLGADFQPADWQRWSRREVFSWWHHIILGKFGSIPLKDHHFGSIPLLSHLHVGPHESMTCGVHDFTRLNVHTEVNNEINGGTENRATDAYGLVSVEKNFHHNAESSEWFSGRWSCKGGDWRRNDELSQDTPFRKKLVLNEGYPLCQMPKGSCEDPRRPCKDELYYPVRAKKYELPLWAFSLTEEDIDSVNDTTKSGVVPGRPGQTRQPSRGVKGMMLSVVRINSRVVKDQSSVEPHTKPRGTDRPLSRSSRSHSIGAERSSVHEGSSHFRKHHDHDSQSSHKSKPVPNIPKDRVCTVDELSVYRGDWYYLDGTGHEHGPFSYSELQELVKNGTIIEQSSVFRKIDNTWFPVLKDLKPGSSVPSAARSSSFTAALMLPDQYNFGVNQGSGSFNQLHPQFVGYTRGKLHELVMKYFKSRELTLAINEVLDPWISAKQPKKEFEAYFSHNSASRNLLPEDGGSAKKAKLLPDQSDEDIHLSQDILASRKEDICFDELCDAEPSVDNDSLNPGAGNETWGLLNGHVLARIFHFMRADVKALISSAATCRSWNAAVKYYRNMCRFIDLSSVGPLCTDSVFCDIMAGYEKQNIRTLILAGCSNLSSHALGRVLEQLPQISYVDIHGCGHLGDLKNKFQHVKWIRSSLNPEESYRKIKTLKQIGDGNNYASKVARNFTNHLDGSDELDGYFADISNRENANLSFGQGFYKRSKLLDARKSSAVLSRDAEMRRLMQRQAETSYRKMEEFIINRLREIMRSNRFDFFIPKVSKIEGRLKNGYYARHGFRTIKHDIRTMCQDALRYKDGNDSGDIKQIVVSFIQLAKRLGNPRYISDRYGAGAQDSLDINQYSFDTKLKKKQNKIRGANSLAAGADNSSRAFDLEIKRSLSKLKKKDVYSGSETSDDDDGYSEVDETESETTVSDTESDLDVNSGAWDLKGNSLKLIEPGESVTDDRILGARMTKASLVPPVTRKYEVIEEYLIVADLEEVQRKMRVALPDDYSEKLLSQKNGTENLELPEVKDYQPRKVAGDEILEQEVYGIDPYTHNLLSDIMPADLELSPTDKHIFIEELLLNTLNKQVRHFTGSGNTPMTYNLRPVIEEIQRSAEDNGDRRTSKMCLGMLKTMRNRSEQNFVAYRKGLGVVCNKKGGFGVDDFVVEFFGEVYPSWRWYEKQDGIKHIQNNSEDQAPEFYNIMLERPKGDGDGYDLVFVDAMHKANYASRICHSCNPNCEAKICMLDMYGVFLEGVPLPPLSCIVQEKKNLYA

SEQ ID NO: 78071 - protein, 96 aa, Zea mays
  Coding DNA Sequence Number=SeqID_36292
  Homolog annotation: Hit_ID=Q9SYM5; Match level="QueryCoverage=34%, HitCoverage=4%, E-value=3e-11, Identity=84%"; Hit description =Probable rhamnose biosynthetic enzyme 1
MALCFKQKNYATAAHFCFGCFLRTALKRLKQGRLDRFVDNRPFNDQRYFLDDQKLKRLGWAERTPWEDQKLKGPTVARSIKMLMNLDLRLHPNCAT

SEQ ID NO: 78072 - protein, 449 aa, Zea mays
  Coding DNA Sequence Number=SeqID_36293
  Gene Ontology: Mol. function=protein transporter activity; Cellular component=endoplasmic reticulum; Biological process=ER to Golgi vesicle-mediated transport
  Homolog annotation: Hit_ID=Q6RYF4; Match level="QueryCoverage=97%, HitCoverage=36%, E-value=0.0, Identity=74%"; Hit description =Coatomer alpha subunit
  Pfam annotation: Domain name=COPI_C; Domain location=39-449; Score =957.6; E_value=4.8e-285; Accession=PF06957.2; Description=Coatomer (COPI) alpha subunit C-terminu
MHASWQYKRVEILEMLSSLPLRKSHSLLIPPAPLTACGDWPLLRVVRGIFEGGLDSTGRAELEEDDEASGADWGDEDLDIVDASEVVANGGDYFDAEGEPNEEEGEEGGWDLEDLELPPDTETPKSAGNARSPVFVTPTAGIPVSQIWTQKSSLAGEHAAAGNFDTAMRLLSRQLGIKNFAPLKPLFLDLHMGSHSYLRALAAAPVISVAVEKGWNESASPNVRGPPALIFSFSQMEDRLKAAYKATTEGRFPEALRQFLSILHTIPVIVVDSRREVDEVKELIEIVREYILGLKMELKRKELRDDVTRQQELAAYFTNCKLQRIHMRLVLSSAMALCFKQKNYATAAHFARMLLENSPQEAQARKARQVLQACQDKDDSHQLNYDFRNPFIVCGATYVPIYRGQKDISCPYCGSRFAPSIEGQLCTICELAIVGADASGLVCSPTQMK

SEQ ID NO: 78073 - protein, 90 aa, Zea mays
  Coding DNA Sequence Number=SeqID_36294
MAPKPLGFYTKNVQYHLGHPLEKVELETRTFDMPWHGFCRVMLNCNLADGEYILVPEQGAAQEVAPDPAPEPAPEDLPATALEGKPPVYA

SEQ ID NO: 78074 - protein, 90 aa, Zea mays
  Coding DNA Sequence Number=SeqID_36295
MAPKPLGFYTKNVQYHLGHPLEKVELETRTFDMPWHGFCRVMLNCNLADGEYILVPEQGAAQEVAPDPAPEPAPEDLPATALEGKPRFYA

SEQ ID NO: 78075 - protein, 90 aa, Zea mays
  Coding DNA Sequence Number=SeqID_36296
MAPKPLGFYTKNVQYHLGHPLEKVELETWTFDMPWHGFCRVMLNCNLADGEYILVPEQGVAQEVALDPAPEPAPEDLPAAALEGKPRFYA

SEQ ID NO: 78076 - protein, 121 aa, Zea mays
  Coding DNA Sequence Number=SeqID_36297
MAPKPLGFYTKNVQYHLGHPLEKVELETRTFDMPWHGFCRVMLNCNLADGEYILVPEQGAAQEVAPDPAPEPAPEDLPATALEGKPRFSGGDGCWDNLADHPATGLDGRGDPASAEEEHEE

SEQ ID NO: 78077 - protein, 90 aa, Zea mays
  Coding DNA Sequence Number=SeqID_36298
MAPKPLGFYTKNVQYHLGHPLEKVELETRTFDMPWHGFCRVMLNCNLADGEYILVPEQGAAQEVAPDPAPEPAPEDLPTTALEGKPRFYA

SEQ ID NO: 78078 - protein, 156 aa, Zea mays
  Coding DNA Sequence Number=SeqID_36299
MAPKPLGFYTKNVQYHLGHPLEKVELETRTFDMPWHGFCRVMLNCNLADGEYILVPEQGAAQEVAPDPAPEPAPEDLPATALEGKPRRLPSSRDLRRGLPFRLWWVQVRSLHDGQSGSVRHCSLEEMVAGITWPTTLPPGWTVEWDPASAEEEHEE

SEQ ID NO: 78079 - protein, 215 aa, Zea mays
  Coding DNA Sequence Number=SeqID_36300
MASNFLEPDRPCADAINGPTSTPHFLPLLNLSVMQLGGGISQGAKADLTTVSNHHFPSSPPGPLMPIGASPCPHRPKTTRPERNFTPTTATAARLLQRPLLSLVGHRTTPPQGIAHPMVWYHPRKQGWEGFCSGRGKQFVPRRSVDRRRGNRDFCYENSGIRGLVRMEKHELALRLTNWTHGAVIKAPIRGLVTCSLAPLFRCWWGHLGSSIPSA

SEQ ID NO: 78080 - protein, 213 aa, Zea mays
  Coding DNA Sequence Number=SeqID_36301
MASNFLEPDRPCADAINGPTSTPHFLPLLNLSVMQLGGGISQGAKADLTTVSNHHFPSSPPGPLMPIGASPCPHRPKTTRPERNFTPTTATAARLLQRPLLSLVGHRTTPPQGIAHPMVWYHPRKQGWEGFCSGRGKQFVPRRSVDRRRGNRDFCYENSGIRGLVRMEKHELALRLTNWTHGAVIKVSQYAGERWKGGGADARARPVSARTRC

SEQ ID NO: 78081 - protein, 219 aa, Zea mays
  Coding DNA Sequence Number=SeqID_36302
MASNFLEPDRPCADAINGPTSTPHFLPLLNLSVMQLGGGISQGAKADLTTVSNHHFPSSPPGPLMPIGASPCPHRPKTTRPERNFTPTTTTAARLLQRPLLSLVGHRTTPPQGIAHPMVWYHPRKQGWEGFCSGRGKQFVPRRSVDRRRGNRDFCYENSGIRGLVRMEKHELALRLTNWTHGAVIKECVNSKGILFTIYRHRTQPVRNYNHAPHKSLQH

SEQ ID NO: 78082 - protein, 180 aa, Zea mays
  Coding DNA Sequence Number=SeqID_36303
  Gene Ontology: Mol. function=DNA binding; Cellular component=nucleus
  Homolog annotation: Hit_ID=Q1EPC6; Match level="QueryCoverage=43%, HitCoverage=4%, E-value=3e-21, Identity=66%"; Hit description=DNA helicase homolog, putative
MTVNKAQGQSISNVGVYLPEPVFSHGQLYVALSRATARSNIKILAIPAVDGKKRSRKGVRKNPIVDCGTYTKNIVYKENFVGAKSKLTGYHSNSTMMPRTFAIHVLLSLFHLSPQKFENMSLKLDKLLSSSTDNFWASGLVFVMVLRHLAFMINGPWHPVLIITARFYLSDLLLHLIQQQ

SEQ ID NO: 78083 - protein, 233 aa, Zea mays
  Coding DNA Sequence Number=SeqID_36304
  Gene Ontology: Mol. function=helicase activity; Cellular component =membrane; Biological process=viral genome replication
  Homolog annotation: Hit_ID=Q1EPC6; Match level="QueryCoverage=99%, HitCoverage=13%, E-value=1e-107, Identity=81%"; Hit description=DNA helicase homolog, putative
  Pfam annotation: Domain name=DUF889; Domain location=1-134; Score =123.0; E_value=8.5e-34; Accession=PF05970.5; Description=Eukaryotic protein of unknown function (DUF889)
MSDSTYITSRAILSTRNDGVDMINAKMINRFQGEHMVYHSFDSAMDDPHNYYPPEFLNTLTPNGLPPHVLKLKIGCPVILLRNIDPANGLCNGTRLVVRGFQRNSIDAEIVLGQYAGKRIFLPRIPLCPSDDEMFPFQFKRKQFPIRLSFAMTVNKAQGQTIPNVGVYLPEPVFSHGQLYVALSRATARSNIKILAIPAVDGKKRSRKGVRKNPTVDCGTYTKNIVYKEVLTN

SEQ ID NO: 78084 - protein, 921 aa, Zea mays
  Coding DNA Sequence Number=SeqID_36305
  Gene Ontology: Mol. function=helicase activity; Cellular component =membrane; Biological process=viral genome replication
  Homolog annotation: Hit_ID=Q1EPC6; Match level="QueryCoverage=99%, HitCoverage=57%, E-value=0.0, Identity=71%"; Hit description=DNA helicase homolog, putative
  Pfam annotation: Domain name=DUF889; Domain location=586-822; Score =451.5; E_value=1.1e-132; Accession=PF05970.5; Description=Eukaryotic protein of unknown function (DUF889)
MQRKYKLTCPEQYDLLILAEIPDKKYPELQKMVIKHMMHGPCGSLNPNCPCTKGRASCKNHYPRPFCDTTLQGKDSYLVYRRRDDGRKEKVRGFELDNRWVVAYNSYLLRLFNCHINVEACGSIKAVKYLFKYIYKGHDRASVVMRDASKADDDVDEIKQYRDARWVTPPEALWRIYGFELSQNSPPVMQLQLHLLNMHMVAFHERQMVERVINRPGADRSMLTVYFEANRLHEEARGILYRDFPEWYTWQSGKGKVWQRRKRDMGGQVGRIVSAHPAEGERYYLRVLLNHVTGATSYVDLRTIDGVTLPTFREAAERRGLLESDNTLDDCLTERALFQMPSTLRRLFATILVYCEPSDVAVLWQKHLDAMSEDYQRMSQSKTHVEQMVLIDIRNMLQSMGKDIKTFPLPPIIDAYDNAIGTAREVYEEESIELASADAVLKDSLNEEQMVAYDKIMSAVNTDQGGLFFVDGPGGTGKTYLYRVLLATLRNQGKIAVATATSGVAASIMPGGRTAHSRFKIPLTIDDGVVCCFTKQSGTAELLRKSSLIIWDEASMTKRQAVEALDNSMRDIMGRLGLPFGGKTIVFGGDFRQVLPVVRKGSRAQVVASSLRMSYLWESMSHLKLVSNMRAKNDPWFAEYLLRVGGGTEVTNSDGDIRLPDEVCVPYSGSDNDLDNLIDFVFPNLNEKMSDSTYITSRAILSTRNDGVDMINAKMINRFQGEHMVYHSFDSAMDDPHNYYPPEFLNTLTPNGLPPHVLKLKIGCPVILLRNIDPANGLCNGTRLVVRGFQRNSIDAEIVLGQYAGKRIFLPRIPLCPSDDEMFPFQFKRKQFPIRLSFAMTVNKAQGQTIPNVGVYLPEPVFSHGQLYVALSRATARSNIKILAIPAVDGKKRSRKGVRKNPTVDCGTYTKNIVYKEVLTN

SEQ ID NO: 78085 - protein, 72 aa, Zea mays
  Coding DNA Sequence Number=SeqID_36306
  Gene Ontology: Mol. function=pyridoxal phosphate binding
  Homolog annotation: Hit_ID=Q1EPF9; Match level="QueryCoverage=86%, HitCoverage=12%, E-value=6e-21, Identity=71%"; Hit description=Gamma- aminobutyrate transaminase, putative
MSPLSISDLQDDSSRFKGHGMLAPFTAGWQSNDLHPLIIERSEGSYVYDIYGNKYLDSLAGLWCTALVTVTR

SEQ ID NO: 78086 - protein, 304 aa, Zea mays
  Coding DNA Sequence Number=SeqID_36307
  Gene Ontology: Mol. function=pyridoxal phosphate binding
  Homolog annotation: Hit_ID=Q6ZCF0; Match level="QueryCoverage=56%, HitCoverage=33%, E-value=4e-66, Identity=72%"; Hit description =Putative gamma-aminobutyrate transaminase subunit isozyme 3
MTRGPDFCALWRAFNAPAAVANSRGCQVPEPRPLGAPDTVRVVACFLCRPICRYQSGARGLGERDNTVDKIGHVFFSANLASSSPACLQVSPLPSPCLPRASLLALFLSCLRLPPGSNNPGGRRPPPPPGAMMIARRLLRSNNAPAQATSLLKHVTGTASLQGNADSLLDGTVRHFGSAPSAQPEENGFKGHGMLAPFTAGWQSNDLHPLIIERSEGSYVYDINGNKYLDSLAGLWCTALGGSEPRLVKAATEQLNKLPFYHSFWNRTTKPSLDLAQEILSMFTAREMGKVFFTNSGSEANDSQ

SEQ ID NO: 78087 - protein, 48 aa, Zea mays
  Coding DNA Sequence Number=SeqID_36308
  Homolog annotation: Hit_ID=Q6ZCF0; Match level="QueryCoverage=73%, HitCoverage=7%, E-value=8e-10, Identity=86%"; Hit description =Putative gamma-aminobutyrate transaminase subunit isozyme 3
DLAQEILSMFTAREMGKVFFTNSGSEANDSQVSLFYSPSVPSMITESV

SEQ ID NO: 78088 - protein, 415 aa, Zea mays
  Coding DNA Sequence Number=SeqID_36309
  Homolog annotation: Hit_ID=Q9ZQW0; Match level="QueryCoverage=32%, HitCoverage=87%, E-value=3e-60, Identity=89%"; Hit description =Response regulator 1
  Pfam annotation: Domain name=Response_reg; Domain location=226-346; Score=87.3; E_value=4.6e-23; Accession=PF00072.14; Description =Response regulator receiver domain
EASCRREDESSAPLGTGALFASRPSRRTACQWMGRDALNAERARRPSEQWQAARRFPNKYRGCMTSRQVRPDSLCHGPQATSLRLNGKWRARPGHVSAPDPCSYQGPPCSGTLLRFGPIRRLQTNMYRGPDLLECVVFSCHVAPFGLPIRWGQAPSPVWLGDVAWVQRLHSVEEAPAPPDCLFAAPGPVSMAAAAAAPASVAPSSPKAAGDNRKTVVSVDASELEKHVLAVDDSSVDRAVIARILRGSRYKVTAVESATRALELLALGLLPDVSMIITDYWMPGMTGYELLKRVKESAALRGIPVVIMSSENVSTRITRCLEEGAEGFLLKPVRPADVSRLCSRIRGDLRDHADAAFTVHTCGDRVTPSQQTTTFGPCPDGFRFLGMANTGLERGASCLIRNSARERGGAGPGIR

SEQ ID NO: 78089 - protein, 345 aa, Zea mays
  Coding DNA Sequence Number=SeqID_36310
  Homolog annotation: Hit_ID=Q9ZQW0; Match level="QueryCoverage=39%, HitCoverage=86%, E-value=1e-59, Identity=89%"; Hit description =Response regulator 1
  Pfam annotation: Domain name=Response_reg; Domain location=226-343; Score=80.9; E_value=4e-21; Accession=PF00072.14; Description =Response regulator receiver domain
EASCRREDESSAPLGTGALFASRPSRRTACQWMGRDALNAERARRPSEQWQAARRFPNKYRGCMTSRQVRPDSLCHGPQATSLRLNGKWRARPGHVSAPDPCSYQGPPCSGTLLRFGPIRRLQTNMYRGPDLLECVVFSCHVAPFGLPIRWGQAPSPVWLGDVAWVQRLHSVEEAPAPPDCLFAAPGPVSMAAAAAAPASVAPSSPKAAGDNRKTVVSVDASELEKHVLAVDDSSVDRAVIARILRGSRYKVTAVESATRALELLALGLLPDVSMIITDYWMPGMTGYELLKRVKESAALRGIPVVIMSSENVSTRITRCLEEGAEGFLLKPVRPADVSRLCSRI

SEQ ID NO: 78090 - protein, 228 aa, Zea mays
  Coding DNA Sequence Number=SeqID_36311
  Gene Ontology: Mol. function=two-component response regulator activity; Cellular component=voltage-gated potassium channel complex; Biological process=two-component signal transduction system (phosphorelay)
  Homolog annotation: Hit_ID=Q9ZQW0; Match level="QueryCoverage=59%, HitCoverage=86%, E-value=6e-60, Identity=89%"; Hit description =Response regulator 1
  Pfam annotation: Domain name=Response_reg; Domain location=108-228; Score=87.3; E_value=4.6e-23; Accession=PF00072.14; Description =Response regulator receiver domain
MLPADADLRQFTAKPHCVVDTGGWRSRYGARSIGGSGSAGWPGYRRPPAARKGYDRVSGEIPARDLPPGPVSMAAAAAAPASVAPSSPKAAGDNRKTVVSVDASELEKHVLAVDDSSVDRAVIARILRGSRYKVTAVESATRALELLALGLLPDVSMIITDYWMPGMTGYELLKRVKESAALRGIPVVIMSSENVSTRITRCLEEGAEGFLLKPVRPADVSRLCSRIR

SEQ ID NO: 78091 - protein, 123 aa, Zea mays
  Coding DNA Sequence Number=SeqID_36312
  Subcellular localization annotation: CTP_CleavageSite=51; ConfidenceScore=5.40e-01
MSVCANAARSKCKKFGPPAAGPRHDPATGRGAKQQTSVDADSRAWTPIVPSAQSRFRPALPPALTWQTEQWSSTLSFSMNKLLLASLYLVCTTARAEVAIRDTEQKWDIEHNQEQGHDIMKVA

SEQ ID NO: 78092 - protein, 404 aa, Zea mays
  Coding DNA Sequence Number=SeqID_36313
  Subcellular localization annotation: CTP_CleavageSite=28; ConfidenceScore=5.09e-01
MSGATATSPKPLQFDRWSSDFWARLDVRCTPDMNCRLSGAPAPACLTTARFWRALNASQSAGPPAALAPSIRSPGQHASCKLLDVKLTPGPPTPRRRRHQQRQSIGRAACRGADNRDPLSRTAVATNSDSREGEPPAAGPRHDPATGRGVKQQTSVDADSRAWTPIVPSAQSRFRPAPPPALTWQTEQWSSTLSFSMNKLLLASLYLVCTTARAEVAIRDTEQKWDIEHNQELAQEHHASVDPSSHTPLALPPVCRTSSGASTFHPFTRAARILQAARRQAHPGTPYAAPPPPPTATGDRASRQPWKFYYCFQNKLPVKVSIKQIAAASQTNSRAVASAFKKQCMVPKKIVNKKIQNQTKVDNKPDAITFYLLAPSKNLENQFDAMKQFATTIQNSAMFKITTA

SEQ ID NO: 78093 - protein, 345 aa, Zea mays
  Coding DNA Sequence Number=SeqID_36314
  Subcellular localization annotation: CTP_CleavageSite=52; ConfidenceScore=5.43e-01
SAGPPAALAPSIRSPGQHASCKLLDVKLTPGPPTPRRRRHQQRQSIGRAACRGADNRDPLSRTAVATNSDSREGEPPAAGPRHDPATGRGVKQQTSVDADSRAWTPIVPSAQSRFRPAPPPALTWQTEQWSSTLSFSMNKLLLASLYLVCTTARAEVAIRDTEQKWDIEHNQELAQEHHASVDPSSHTPLALPPVCRTSSGASTFHPFTRAARILQAARRQAHPGTPYAAPPPPPTATGDRASRQPWKFYYCFQNKLPVKVSIKQIAAASQTNSRAVASAFKKQCMVPKKIVNKKIQNQTKVDNKPDAITFYLLAPSKNLENQFDAMKQFATTIQNSAMFKITTA

SEQ ID NO: 78094 - protein, 250 aa, Zea mays
  Coding DNA Sequence Number=SeqID_36315
  Gene Ontology: Mol. function=DNA-directed RNA polymerase activity; Cellular component=nucleus; Biological process=transcription
  Homolog annotation: Hit_ID=Q1L5Z7; Match level="QueryCoverage=64%, HitCoverage=19%, E-value=1e-75, Identity=87%"; Hit description=RNA polymerase II second largest subunit
  Pfam annotation: Domain name=RNA_pol_Rpb2_2; Domain location=1-152; Score=-11.8; E_value=0.00029; Accession=PF04561.5; Description=RNA polymerase Rpb2, domain 2
MEHLRLCGSGGSSGQYVCATLPYIRANIPIIIVFRALGFVADKGILEHICYDFSDTQMMELLRPSLEEAFVIQNQQVALDYIRKHGATVGVTREKRIKYAKEILQKEMLRVGELCETKKAYYFGYIIHRLLMCALSRRAEDDRDHYGNKRLDLAGPLLGGLFRMIFVPFRIPVDQSDLSLRKLEELTKELQSLQKEKSDRLKQVMEHLNTLHSLCEVLGVDFKQTVNEVLMWWSYEQQSDVLIESDGANV

SEQ ID NO: 78095 - protein, 149 aa, Zea mays
  Coding DNA Sequence Number=SeqID_36316
  Gene Ontology: Mol. function=microtubule binding; Cellular component =phragmoplast; Biological process=positive regulation of microtubule polymerization
  Homolog annotation: Hit_ID=Q5N7P7; Match level="QueryCoverage=70%, HitCoverage=15%, E-value=9e-46, Identity=83%"; Hit description =Microtubule-associated protein-like
  Subcellular localization annotation: CTP_CleavageSite=53; ConfidenceScore=5.22e-01
MATSRLPRDRWTLWCCRSRLLWPSSSRNRRGRQLSPSTSPWLLKSNQKLQGLREEMNAIVPYLEEMRKKKVERWDQFVDVIEQIKKVASEIRPADFVPFRIPMDQSDLSLRKLEELTKELQSLQKEKSDRLKQVMEHLNTLHSLCECLV

SEQ ID NO: 78096 - protein, 300 aa, Zea mays
  Coding DNA Sequence Number=SeqID_36317
  Gene Ontology: Mol. function=DNA-directed RNA polymerase activity; Cellular component=nucleus; Biological process=transcription
  Homolog annotation: Hit_ID=Q1L5Z7; Match level="QueryCoverage=54%, HitCoverage=19%, E-value=4e-75, Identity=86%"; Hit description=RNA polymerase II second largest subunit
  Pfam annotation: Domain name=FlaC_arch; Domain location=167-282; Score=-15.2; E_value=0.085; Accession=PF05377.2; Description =Flagella accessory protein C (FlaC)
  Pfam annotation: Domain name=RNA_pol_Rpb2_2; Domain location=1-152; Score=-11.8; E_value=0.00029; Accession=PF04561.5; Description=RNA polymerase Rpb2, domain 2
  Pfam module annotation: Pfam domain module=FlaC_arch::RNA_pol_Rpb2_2; Domain location=167-282::1-152
MEHLRLCGSGGSSGQYVCATLPYIRANIPIIIVFRALGFVADKGILEHICYDFSDTQMMELLRPSLEEAFVIQNQQVALDYIRKHGATVGVTREKRIKYAKEILQKEMLRVGELCETKKAYYFGYIIHRLLMCALSRRAEDDRDHYGNKRLDLAGPLLGGLFRMSNQKLQGLREELNAIVPYLEEMRKKKVERWDQFVDVIEQIKKVASEIRPADFVPFRIPVDQSDLSLRKLEELTKELQSLQKEKSDRLKQVMEHLNTLHSLCEVLGVDFKQTVNEVLMWWSYEQQSDVLIESDGANV

SEQ ID NO: 78097 - protein, 110 aa, Zea mays
  Coding DNA Sequence Number=SeqID_36318
  Homolog annotation: Hit_ID=Q5N7P7; Match level="QueryCoverage=48%, HitCoverage=7%, E-value=5e-16, Identity=74%"; Hit description =Microtubule-associated protein-like
MMKITICLKHVSSFCAIPSGRARAQAVLAAALAPSHKDQRNVHCPCNIHYNDVSIPRHSMGGANRRLSLGGATMQAPKTDILHSKTARAAKKAEDLGALSPRLKNVQISN

SEQ ID NO: 78098 - protein, 171 aa, Zea mays
  Coding DNA Sequence Number=SeqID_36319
MATAVAQSKTSKAKGRSERKRNKAWLLPEGGPTPQVIRLAQQPPGLGVILLGRRPTCEEKANHRVRSMPPVVKSNRHSHQYRAFSGPPRKTEDEFSKPYAAVSRRPAHGLVKAIEREDHGSVSRGNRAVSVTKACLSPTKGGCSGPIAASGLTTWDSQGRSEASTYAYWAP

SEQ ID NO: 78099 - protein, 96 aa, Zea mays
  Coding DNA Sequence Number=SeqID_36320
MGHPLGQRFLGAEKLNRHSHQYRAFLGLPQKTEKGPQRRPASPPGRFRGCHVSIVMESSWASAGSDAGTCLDPIMYGSAPRPGGDPMLPRGPLPVT

SEQ ID NO: 78100 - protein, 774 aa, Zea mays
  Coding DNA Sequence Number=SeqID_36321
  Gene Ontology: Cellular component=nucleus
  Homolog annotation: Hit_ID=Q2QN39; Match level="QueryCoverage=49%, HitCoverage=94%, E-value=7e-23, Identity=25%"; Hit description =Expressed protein
MGPAFDEPMQGRSQRKDEDSTGELRCQAAAQNALCNQAPMQGGQRWEEPFKVTEICQPGGLAYAYASPVQIPVEAASWGMLPTLSGTLKANRRAGNDSLRLFISAKGSGPASGTGAWVQESYSSDVGQRVRRRRTAAATTEDREDEFSKPYAAVSRRPAHGPVKAIEREDHGGGTPVAGHTKLTQDTSFGPTCRLVSSLEAGPGGHCRYPESRRRLASPPGWVRDRHVSIMVEYSWASAVSPDPHGSAPKVADRTPREGSGAGTCLDPIMYGSAPHPGGDPMLPCGPLPMTSIPAVSRIRFGCTGRVVSLAGDPAGSGASPNGLILAGCGVLSPIHWFLYSGSDIGVCCGGNCMDTVREEAWPVAAPRQQPSAPQPQQQQQNGRIDLRELKAQMEKQLGPDRSRRYFGYLNGYLSERLGRQDFEKLCLHTLGRENLQLHNRLIRAILYNAYQGKCPPPPLDAGRPVGASVKKAYQAAEVLNACNGDARLLQIQRLRPVARAQDHTLKDSTNNTGPNCRVAAANHNQVTHDASGSLENGTLNQLELKRLRFQQCEPVEPVAKHPRVEQLPPNNLPVQRRSMSSTAEQSAEILRSPVRAPLGIPFCSASVGGARKFPPPLIVAGEDHFNSCSEHDGLFSTELLHRRMEKTAETLGLAGITMDSAELLNIALDKYMKNLIRSSVELVGGSVQRDARKGTPTYKQQAYGKQINGVRLPNHVHMQSASGSPGAKNEIGINHLISINDFKVAMQLNPQHLGENWPVLLEKICLCSSEEND

SEQ ID NO: 78101 - protein, 88 aa, Zea mays
  Coding DNA Sequence Number=SeqID_36322
MQQILMAATPSDPKSGEIHTPRHLLSLATDIDVHPSSALHGGTGNKGDLGFWEAWRLVRHLYPGAVMNPEVHGWRGPQFGRHLHGVRP

SEQ ID NO: 78102 - protein, 69 aa, Zea mays
  Coding DNA Sequence Number=SeqID_36323
MEAPWLDHPKFEPRPYYSDPNGLHAEGSQENQILMAATPSDPKSGEIHTPRHLLSLATDIDVHPSSALQ

SEQ ID NO: 78103 - protein, 74 aa, Zea mays
  Coding DNA Sequence Number=SeqID_36324
MADHPKFEPRPYYSDPNGLHAEGSQENQIPMAATPSDPKSGEIHTPRHLLSLATDTDVHPSSAPREIPPERPVE

SEQ ID NO: 78104 - protein, 77 aa, Zea mays
  Coding DNA Sequence Number=SeqID_36325
  Homolog annotation: Hit_ID=Q6K832; Match level="QueryCoverage=44%, HitCoverage=5%, E-value=5e-12, Identity=94%"; Hit description=Lipase class 3 protein-like
MTGWCAAPARDQIKVVSVNNEVDSDPPPVDVIISSDVTVEVDILFRRLGPIQVHEDSCSAGLVHAACATLRALLIKT

SEQ ID NO: 78105 - protein, 79 aa, Zea mays
  Coding DNA Sequence Number=SeqID_36326
  Homolog annotation: Hit_ID=Q6K832; Match level="QueryCoverage=43%, HitCoverage=5%, E-value=2e-12, Identity=97%"; Hit description=Lipase class 3 protein-like
MTGWCAAPARDQIKVVSVNNEVDSDPPPVDVIISSDVTVEVDILFRRLGPIQVHEDSCSAGLVHAACATLRALLITTWP

SEQ ID NO: 78106 - protein, 613 aa, Zea mays
  Coding DNA Sequence Number=SeqID_36327
  Gene Ontology: Mol. function=triacylglycerol lipase activity; Biological process=lipid metabolic process
  Homolog annotation: Hit_ID=Q6K832; Match level="QueryCoverage=95%, HitCoverage=95%, E-value=1e-163, Identity=75%"; Hit description =Lipase class 3 protein-like
  Pfam annotation: Domain name=Lipase3_N; Domain location=49-130; Score= 94.6; E_value=3e-25; Accession=PF03893.7; Description=Lipase 3 N -terminal region
  Pfam annotation: Domain name=Lipase_3; Domain location=183-292; Score= -1.4; E_value=0.00067; Accession=PF01764.16; Description=Lipase (class 3)
  Pfam module annotation: Pfam domain module=Lipase3_N::Lipase_3; Domain location=49-130::183-292
MATAAGAAALLYYTLNRRLQTERLNKEGECSDSRDVTPRAAQGSPSRSRVSRRDVRAPATWLETISTLSETLRFTYSETLGKWPIGDLAFGISFLLKRQGNLSVASIYAGNDSVELKGAEVIADLKYLLNLLTLCWHFSKKPFPLFLEATGYTTEDVLMQEPKAGILKPAFTILLDRDKKSILLLIRGTHSIRDTLTAATGAVVPFHHTIVQEGGVSDLVLGYAHFGMVAAARWIAKLSGALSGTSIADVPRLQNKGAAACMTWKLAESGVHFITTVINGADLVPTFSAASVDDLRSEVTASAWLNDLRHQIEQTRILSTFYRSASALGSRLPSMANAKARVAGAGAILRPVSTGTQVVMRRARSVAQAAWTRPALQLSSWTCIGPRRRNNISTSTVTSEEIIASTGGGSESTSLLTETTAETTETVTSEAVSEVVQSSVSVAVDAVDLVDDKGDSDDDIVDHHGDEDRMTDVELWQQLESELYRKREGEEDDIAEEMAESTIAEEVGGVAEDVLSETKEVHRFYPPGKIMHILFSSREEADRGEEPEDDVTDGEAQSSIGIFLTPRSLYGKLRLSKMMINDHYMPIYRRNIEQLIAELEKDSSDQIGCVRCS

SEQ ID NO: 78107 - protein, 118 aa, Zea mays
  Coding DNA Sequence Number=SeqID_36328
  Subcellular localization annotation: CTP_CleavageSite=35; ConfidenceScore=5.34e-01
MDSQVLTYSPQHSASIDGESPLNSQQTRAPRLTVRKRKASSNPTGNDQRPVDHIIYSRRSDRAIQVANTQKAEAEKKKAEIEMKNVEFEKKNAEAEEAEKRKAEAEQAENKRKTEAEP

SEQ ID NO: 78108 - protein, 514 aa, Zea mays
  Coding DNA Sequence Number=SeqID_36329
  Pfam annotation: Domain name=TolA; Domain location=14-398; Score= -105.5; E_value=0.00071; Accession=PF06519.2; Description=TolA protein
MTLEQEQDQELLQLHRRTNLEEVIVKKLYGVPLQLTLEQEQDQELLQMYRKTNLEESPPNSQQTRAPRLTVRKRKASSNPPGNDQRPVGALETEEEPLSRDIGMQHPTAKDHIIYSRRSDRAIQVANTQKAEAKKKKAEIEMKNAEMEKKNTEAEEAEKRKAEAEQADKRKAEEAEIKRKAAAEEAEKKADAEKKKAEEVENKRKVEAEEAKIKRKVAAEEAMKKEADAEKKKAEEAENKRKAEAEEAEIKRKAAAEEAVKKKADAEKKVEAEEKRIQEAKAEIDSLEKSIDGQAGSSSSFDDIQFPVESDDDINNLTQPIRLSQDEVSVGQADFSEFQRMIFKRLGDRVLKKPREYISPFKIPRNRPEIPLAKAVALRRKIASDPELKRRILLEFGLLVGLTGEEILTSFSNDTLGESGIIDFFVHCMQHDAIVHKEERHKAVFAKIPIIDATFQKVSNLKLPRFKGPIYICELLHYQIFHPLNQAEIPGSLDKFRIGGRPVPIEWDSSQSNN

SEQ ID NO: 78109 - protein, 486 aa, Zea mays
  Coding DNA Sequence Number=SeqID_36330
  Pfam annotation: Domain name=TolA; Domain location=14-398; Score= -105.5; E_value=0.00071; Accession=PF06519.2; Description=TolA protein
MTLEQEQDQELLQLHRRTNLEEVIVKKLYGVPLQLTLEQEQDQELLQMYRKTNLEESPPNSQQTRAPRLTVRKRKASSNPPGNDQRPVGALETEEEPLSRDIGMQHPTAKDHIIYSRRSDRAIQVANTQKAEAKKKKAEIEMKNAEMEKKNTEAEEAEKRKAEAEQADKRKAEEAEIKRKAAAEEAEKKADAEKKKAEEVENKRKVEAEEAKIKRKVAAEEAMKKEADAEKKKAEEAENKRKAEAEEAEIKRKAAAEEAVKKKADAEKKVEAEEKRIQEAKAEIDSLEKSIDGQAGSSSSFDDIQFPVESDDDINNLTQPIRLSQDEVSVGQADFSEFQRMIFKRLGDRVLKKPREYISPFKIPRNRPEIPLAKAVALRRKIASDPELKRRILLEFGLLVGLTGEEILTSFSNDTLGESGIIDFFVHCMQHDAIVHKFKGPIYICELLHYQIFHPLNQAEIPGSLDKFRIGGRPVPIEWDSSQSNN

SEQ ID NO: 78110 - protein, 429 aa, Zea mays
  Coding DNA Sequence Number=SeqID_36331
  Gene Ontology: Mol. function=cysteine-type peptidase activity; Biological process=proteolysis
  Homolog annotation: Hit_ID=Q53MK8; Match level="QueryCoverage=52%, HitCoverage=22%, E-value=1e-14, Identity=32%"; Hit description=Ulp1 protease family, C-terminal catalytic domain, putative
MRKLNPETMKLEIGGGKEIPITEHSVWCVLQLPNIGRDPPPMSDADARALRDELGEQICGNSYRRISGINLSVITDRLQKRILTGELGLRAFFMAAFQCLLFSNTDTRIRIDDVKYTQDIQNMANKNWCKAVVDRLNIAARLYKKDFAEKGINAPISGCGIFVAMLYVDNLQHGFDTSPFSIPRCNFLDSKTIDAIANKDLRGDVPPGTTEFGHLRLRSIADMCYGVPIGALAILHALVPTPALVADPNPTVAPNPGAAASALVAATPTATGTSADVLGTSHDPGGHASFNIQPPVFYQYPSFSSSFGQSIIDLVGRSRKSDALNILKAFDESTREAQSYAQKAAKYSTISRDLMAKAHHECYIGIQKLIADAIAEKRAAKERRRKVNNDTRAGAGSGTTSIASEDQSGGGDSEEIIRSPVAIDTRAGA

SEQ ID NO: 78111 - protein, 146 aa, Zea mays
  Coding DNA Sequence Number=SeqID_36332
MSGGVRQRRLDLAPRGTPLGRAIPSNRVWCHKWCSTRRNSWQLKHSKLHTRFFNSARECTQAELTRQEHLVRANLRSPRVQNKRKELDKNELKERRKRLRLKVPLSPIQDEESDDEQDPEFAPAGDGSGDDNVVIVGGDENKGTPS

SEQ ID NO: 78112 - protein, 227 aa, Zea mays
  Coding DNA Sequence Number=SeqID_36333
  Homolog annotation: Hit_ID=Q53MK8; Match level="QueryCoverage=37%, HitCoverage=9%, E-value=1e-07, Identity=35%"; Hit description=Ulp1 protease family, C-terminal catalytic domain, putative
MDQEQNVTGQQGADTVRRSPRVQNKRKELDKNELKERRKRLRLKVPLSPIQDEESDDEQDPEFAPAGDGSGDDNVVIVGGDENKGKTKTRAIRCSPGKFIKLVNALFDELKGEVVAKGFGGLLRFKPHLLSRKLLSWLMRKLNPETMKLEIGGGKEIPITEHSVWCVLQLPNVGRDPPPCLMQMLVPCGTSWESKFVATLIDADLDIHNMANKNWCKAVVDRHPEHG

SEQ ID NO: 78113 - protein, 95 aa, Zea mays
  Coding DNA Sequence Number=SeqID_36334
  Subcellular localization annotation: CTP_CleavageSite=45; ConfidenceScore=5.06e-01
MSSKPRAAAAPDPLRIRVLHRICVAPTSTPFTPKKASRSTLVDVRSDAQIGIAIVLTNTDWVCLWEYIDRCLCEKCIGFMHVIGDGDSRCKSGYD

SEQ ID NO: 78114 - protein, 155 aa, Zea mays
  Coding DNA Sequence Number=SeqID_36335
  Subcellular localization annotation: CTP_CleavageSite=67; ConfidenceScore=5.53e-01
MAQGTSLVRARAGAPPMGGPLPPMLGTPPQNSSRNSSSPYRRPCFSLSGQENTLPCFPLPQHAEAPYCSLRASSLRGALAAASLANSPSASASWPPHGHGLRQEVVRYMFDVLRSEPPSSLFIVVPAGCSSKCAAIRALQQPRIPSASACFTGSA

SEQ ID NO: 78115 - protein, 150 aa, Zea mays
  Coding DNA Sequence Number=SeqID_36336
  Subcellular localization annotation: CTP_CleavageSite=21; ConfidenceScore=5.13e-01
MESALKRPTALYAMGAGVLPRSSARAARRPWRSLLAAMEQRAGKVAAKGEQGRRYGEEMLRLLFWGGVPSTGARGRSGAGHRGRLHARHGRKWALALVLPARRGTAGEKRSSAMAAGGARLGREHGEGAGFHGEEVEEAMAAGRAPCWPP

SEQ ID NO: 78116 - protein, 113 aa, Zea mays
  Coding DNA Sequence Number=SeqID_36337
MAAFAGAGACGLRRSRPSIDDGGWRAVWERGRGHGVAPGGRLGRRDFSVNHGSSRRAWRRMEVGASPTMETLPGALIEGLRICASEADTVGSGNCAWIEGRRMRGGVLQRQNV

SEQ ID NO: 78117 - protein, 359 aa, Zea mays
  Coding DNA Sequence Number=SeqID_36338
  Homolog annotation: Hit_ID=Q5VQL9; Match level="QueryCoverage=21%, HitCoverage=12%, E-value=3e-18, Identity=64%"; Hit description =Putative brassinosteroid insensitive 1-associated receptor kinase 1
MAAFAGAGACGLRRSRPSIDDGGWRAVWERGRGHGVAPGGRLGRRDFSVNHGSSRRAWRRMEVGASPTMETLPGALIEGLRICASEADTVGSGNCAWIEGRRMRGGVLQRQNSLESSLRISSFCYCHDHVSRMFEVIRMLEGDRLIERWEVSQNVDTLEFVSSELLLQKYMDFAADECSLGVEAMELSGPSRRELILYVPAVIPRGSFSRFLSLGFTPPPLTTAPDAGRRSPPTPAAAHHRHRPAARGLGARSPPPPTVTAPERRPPRRLRPRSAAGPIAPPVARPRPRSAAHPRPRSAARSRSNDRRPPRLRSAVRRAAGPEAPSAARPRCAARLRSVARCSPPPTPPPRSAAAAPDR

SEQ ID NO: 78118 - protein, 359 aa, Zea mays; identical to SEQ ID NO: 78117
  Coding DNA Sequence Number=SeqID_36339
  Homolog annotation: Hit_ID=Q5VQL9; Match level="QueryCoverage=21%, HitCoverage=12%, E-value=3e-18, Identity=64%"; Hit description =Putative brassinosteroid insensitive 1-associated receptor kinase 1

SEQ ID NO: 78119 - protein, 114 aa, Zea mays
  Coding DNA Sequence Number=SeqID_36340
MESGLRRRSGLDWWIESFVKLSESGVGSSNLGAMACITRTAHRRKNTAADPRDAVGDPVAASITDHYVNWNMERPPGKTVLPQGFMDALGRLIRKANGGLPYPKGARAVGEWSV

SEQ ID NO: 78120 - protein, 69 aa, Zea mays
  Coding DNA Sequence Number=SeqID_36341
MAAAVVCGQNAAATWDPPARCVAPPDHYVNWNMENHPGKQCYHKGLWTPLADQLGKLVEDYLTRKGQGQ

SEQ ID NO: 78121 - protein, 86 aa, Zea mays
  Coding DNA Sequence Number=SeqID_36342
MKAKSHQQQIILRSTCKNCATSKAEYTNTQLDLPVTALVPTITGMGDHVSGRVRGKVHCQVQSGRPPTASCGWHHITARSSSLGPI

SEQ ID NO: 78122 - protein, 77 aa, Zea mays
  Coding DNA Sequence Number=SeqID_36343
MEAKSHQQQIILRSTCKNCATSKAEYTNTQLDLPVIALVPTITGMGDHVSGRMRRAICGQVHSGTRLTDLPYFSACV

SEQ ID NO: 78123 - protein, 110 aa, Zea mays
  Coding DNA Sequence Number=SeqID_36344
MEAKSHQQQIILRSTCKNCATSKAEYTNTQLDLPGYNGSSSLISCEKQTIRIEFLSLQVTALVPTITGMGDHVSGRVRGYVCGQVHSGRPPRHLVGGTTSLARSASLGPK

SEQ ID NO: 78124 - protein, 87 aa, Zea mays
  Coding DNA Sequence Number=SeqID_36345
MPEGFGPETSRWESWYFGCGKTPEESGIARGRCGTLGFVSTLSAVSTLGEIRPSLGRRREQKDLHLEGGRQHRAWARDGRVKPLNLG

SEQ ID NO: 78125 - protein, 245 aa, Zea mays
  Coding DNA Sequence Number=SeqID_36346
MGVPSASGIDRHAARHRNGQVLLNAEAAPCLPMEWTGRRLIAELRPLAYVMRSRSRGSIGSPHRRGAVAYVDRVPGPVYGRCGPHTEGSETRPGGPGRACGCSGPFPVVPVYTVPTVAPGPTSGEDTSLQVGPKLDWRLARRFRAPADEPTPKEDDSWAWALMPVTGQLVSAEMKRRTAAGGGMLLTRWFAFFAPRDRLPWSMTRGPEPPVLEAGLLLSVKMKRRGDSLLAWRFAFFALGDLQPS

SEQ ID NO: 78126 - protein, 117 aa, Zea mays
  Coding DNA Sequence Number=SeqID_36347
MGVPSASGIDRHAARHQNGQEPAPKEDDSWAWALMPVTGQLVSAEMKRRTAAGGGMLLTRWFAFFAPRDRLPWSMTRGPEPPVLEAGPLLSVKMKRRGDSLLAWRFAFFALGDLQPS

SEQ ID NO: 78127 - protein, 145 aa, Zea mays
  Coding DNA Sequence Number=SeqID_36348
  Subcellular localization annotation: CTP_CleavageSite=32; ConfidenceScore=5.01e-01
MAWVFSVTESQDPSTGGADPTQRGPRPVPGVQVAPVGVLVLSRWSGLHEPTPKEDDSWAWALMPVTGQLVSAEMKRRTAAGGGMLLTRWFAFFAPRDRLPWSMTRGPEPPVLEAGLLLSVKMKRRGDSLLAWRFAFFALGDLQPS

SEQ ID NO: 78128 - protein, 262 aa, Zea mays
  Coding DNA Sequence Number=SeqID_36349
MAERYQLPRSCVPPMTRRKDCGRPPSGGSEGGKTRCIREREDMVVLQGGHPPFKGDSPYLRPQPSRAESSPTRSKVLPLRRRGWVPRVMQAGPGQKKPNRRAQGMQLPSGYKHSSTFAQTSGPTRHATGAPVATCVQLHRHSHHYRASSTAEPVPRLEATLRMTQQCQPGATVNTAKNGPAVMAVAGGQEERSRRQPSLRPIQGQRGNPLSQREDGAPVFRSSNGSHTRHDRLTNHLPRRINSAAGQAAPQAGEASDASPSP

SEQ ID NO: 78129 - protein, 322 aa, Zea mays
  Coding DNA Sequence Number=SeqID_36350
MSSRSLHASCLSTFRAPRMGDARNPSTLSSEERNFVEVGRSEPGCGLCPSLSFKDVHHQCWGGECAELGSVPLPRARLSEPSGFGAAPGAAFRHGSWKRFRRRRASRRHPRTDLQLYGLLSVLASRVGGMGEGLMAAASALRSSLLLFGPPEQKSSSLPLPGRATTSRSSVFCCSAGPPPIAWGYSYLRSTETRLVDYLNRFTERELPRAKVTSESLAGSSTGGTDAEVELPRPQAELMSLGDSWPRPRGGRPSHLLGPDSRRRPWRRWPGCGADVVLQSGGPPTTSPSEARSDPVEGVVDVEGAAAPFGCRRPSLQDHVVL

SEQ ID NO: 78130 - protein, 380 aa, Zea mays
  Coding DNA Sequence Number=SeqID_36351
MSSRSLHASCLSTFRAPRMGDARNPSTLSSEERNFVEVGRSEPGCGLCPSLSFKDVHHQCWGGECAELGSVPLPRARLSEPSGFGAAPGAAFRHGSWKRFRRRRASRRHPRTDLQLYGLLSVLASRVGGMGEGLMAAASALRSSLLLFGPPEQKSSSLPLPGRATTSRSSVFCCSAGPPPIAWGYSYLRSTETRLVDYLNRFTERELPRAKVTSESLAGSSTGGTDAEVELPRPQAELMSLGDSWPRPRGGRPSHLLGPDSRRRPWRRWPGCGADVVLQSGGPPTTSPSEARSDPVEGVVDVEGAAAPFGCRRESCFSQKAMSEGSVTDAVKKARKIISAEELSSMKTCSVRGVTYPSASYLSQKVMSEENFDAEGVAPF

SEQ ID NO: 78131 - protein, 309 aa, Zea mays
  Coding DNA Sequence Number=SeqID_36352
MECRSISETFLRANAALCVLAPAICGLCGAHRRSIHFKPGPASPEEDDVRDRAPLPRRWYRAAYARLLRHSGSLAGVAGGFPWHGARGSLVACPHAATRAAHFDALAGEFVAAVATVSRGHPPLKMEVTSLRSLTQVCDVLGVSAQRRKSVRLNVCPQVTQHHVWRGALEAVLGDLQADMASLDSPSPGIKMAEQIASACNGFLSDTATSSSPSWMRPTPFKKPAEPTAPAKKWQEVLDMFTDLARSLEMEDRLTGHVQKPSRRRAGQDCLVQRKLSKSLGHSSRCLYTLLLFYLYGSVRDMEPYRQNI

SEQ ID NO: 78132 - protein, 580 aa, Zea mays
  Coding DNA Sequence Number=SeqID_36353
MTVKAKQLRVKGRGRQMKTLGVGPFCLRISETFLRANAALCVLAPAICGLCGAHRRSIHFKPGPASPEEDDVRDRAPLPRRWYRAAYARLLRHSGSLAGVAGGFPWHGARGSLVACPHAATRAAHFDALAGEFVAAVATVSRGHPPLKMEVTSLRSLTQVCDVLGVSAQRRKSVRLNVCPQVTQHHVWRGALEAVLGDLQADMASLDSPSPGIKMAEQIASACNGFLSDTATSSSPSWMRPTPFKKPAEPTAPAKKWQEVLDMFTDLARSLEMEDRLTGHVQKVEAMKEGLYQIRDVVIERDIAFKEARRQDCLVQRKLSKSLGHSSRCLYTLLLFYLYGSVRDMEVHVGKCISGEGGRNVTVHAAEFLIDGDESTIRSGIKQLSRALQIFRFVWEAANTDCHAANHNGKDVVGKKKNEDAKGLNQVAHGASQDAQDAIGARNRRKAYRGPRSTCDGGRLKSGDVDPVSPVRRGRGHGVGTAWGYARGRSAESVLWRRQGASNTWSCSSARVLAPAELQNEPRSVSKKFVGDLGAVSRHYCSRRGPSLLGISSSGSRSAGVPLRVGEKRLAVRLDAGGWD

SEQ ID NO: 78133 - protein, 79 aa, Zea mays
  Coding DNA Sequence Number=SeqID_36354
MAYRGARSTCDGGRLKSSDVDPVSPARLLVPLLSNLAYRVALTWVDRHTFLAETRGTHHELLTYEVATSTGILQVHKHL

SEQ ID NO: 78134 - protein, 973 aa, Zea mays
  Coding DNA Sequence Number=SeqID_36355
  Gene Ontology: Mol. function=cysteine-type peptidase activity; Biological process=proteolysis
  Homolog annotation: Hit_ID=Q109R5; Match level="QueryCoverage=50%, HitCoverage=53%, E-value=2e-63, Identity=29%"; Hit description=Ulp1 protease family, C-terminal catalytic domain containing protein
  Pfam annotation: Domain name=BRF1; Domain location=842-944; Score =87.3; E_value=4.7e-23; Accession=PF07741.3; Description=Brf1-like TBP-binding domain
  Pfam annotation: Domain name=TFIIB; Domain location=636-689; Score= -0.8; E_value=0.02; Accession=PF00382.10; Description=Transcription factor TFIIB repeat
  Pfam module annotation: Pfam domain module=BRF1::TFIIB; Domain location=842-944::636-689
MDIVVEEGNADVGNTAEPSYEVVAKSGCSAQLSTNDTDEHELAIESEDSKVSVGNAAKQSHDVVGVGIDCIFNHAKVSTEADLGPQPDVIHLTSLDVPNESSQISSDADMVEQNKKDALDTLIRISQHKKPKKSNVARVVSEDYKCTPEDVQLIEYIKTLPGKQVVVNIDSAWLNRNDMECLFHGDIELSVEALSAYIHCIRDEEHLLHREGGKVFLENTFISSLLKRDGDPKVFIPMNIENFHWYMAVLNAKKSELKGLERQIKLAAEHKELYQGKWSNLDVASWPVIEKITTQMQTDGVSCGLWMINYMEYWTGSSLSDNVTQDDITMFRFKLPAILWDSRLNTKKGHQNLDHNVDEDGESSSDVQIIDTPLTSTNTQELMFVLWTYIMGIDNAKYLKKHWIQSTKPYPISLSLQKLKDILDVNKPMDTDCFNMAVWMIACNDALFLLEDKYHYMDLQFCSITKFGRDPRLRAKPDINMLAKLLECWPDMEYDVSDCKQILLPFSFMGHFTLYVLNMDTRSIYIMDSMPIPSWFKGDHPSMHYIHNIHYIANNMNAAMELANPTWKDDIYMWRRIVPTWVPRTLNWDLSGFLVINFMHDWNGIRLPCICTVWRDRAHRTFYLGVGVAFPKPTLLPSPSRRCDSTSCPTGRKPSGLCGAALYIAALSHGCNYTKADIVSVVHVCEATLTKRLIEFENTDSGSLTPVSKHSPKSGEIICKHKDKGFEHFAHGLCEKCYNKFTKLSGGLEGGSVPPAFQRAEKKRLEAAKRAEEAAAAKEAALEKSLCDTQNSEVESAMTPRKGLSGDKSSKMGSEGLINDSMPPKDPEEGGENCEGNADPESLSDIDDAEVDGYLHNEEETQYKKIIWEEMNKEYLEEQADKEALAAELAARGIDPEAGKKKRKRNEDTKSSTPAETPAEATCNMLKRKGLGSKINVGAVDELYKSIYILELEAKHAVRTDHEIARGALALFG

SEQ ID NO: 78135 - protein, 369 aa, Zea mays
  Coding DNA Sequence Number=SeqID_36356
  Homolog annotation: Hit_ID=O23708; Match level="QueryCoverage=29%, HitCoverage=46%, E-value=4e-48, Identity=85%"; Hit description =Proteasome subunit alpha type 2-A
  Pfam annotation: Domain name=BRF1; Domain location=59-161; Score =61.1; E_value=3.6e-15; Accession=PF07741.3; Description=Brf1-like TBP-binding domain
  Pfam annotation: Domain name=Proteasome; Domain location=144-299; Score=48.2; E_value=2.9e-11; Accession=PF00227.16; Description =Proteasome A-type and B-type
  Pfam module annotation: Pfam domain module=BRF1::Proteasome; Domain location=59-161::144-299
MCAWKTAGALSGRTSVSKIRLMDGQGRTVDFRNTVIIMPSNLGAWHLLAGMVSKNSMEVARDLVMQEVDGYFHNEEETQYKKIIWEEMNKEYLEEQAAKEALAAELAARGIDPEAGKKKRKRNEDMKSSTPAETPAEATCNMLKRKGLGSKINVGAVDELYKFKNELTDDEYSKTEVVFCSVCDFAFSVEPQAGSGQWIFMSGFAWPGPARGVRPFGVSLLIAGYDDNGPQLYQVDPSGSYFSWKASAMGKNVSNAKTFLEKRYTEDMELDDAIHTAILTLKEGYEGQISSNNIEIGIIRADREFKVLSPSEIKDFMEEVECLLCSHCRFAVVHGFRGCRCPCDATEHKLRTSNGLHLRQVMPKKMGVN

SEQ ID NO: 78136 - protein, 50 aa, Zea mays
  Coding DNA Sequence Number=SeqID_36357
MAEWQAQHWASNASDSCVSLPPFSWASLVSNEVHWRFAIYVPWHRTGTYL

SEQ ID NO: 78137 - protein, 83 aa, Zea mays
  Coding DNA Sequence Number=SeqID_36358
  Subcellular localization annotation: CTP_CleavageSite=39; ConfidenceScore=5.07e-01
MALKVEKNAANKWDVRVPVPQVNRKSSWVIAVSDSSVHRASNASDSYVNLPLFSWASLVSNEVHWRFAIYVPWHRTGTYLVNK

SEQ ID NO: 78138 - protein, 184 aa, Zea mays
  Coding DNA Sequence Number=SeqID_36359
  Pfam annotation: Domain name=WRKY; Domain location=52-98; Score=15.0; E_value=1e-05; Accession=PF03106.6; Description=WRKY DNA -binding domain
MAKRGDYMDSSCDCSNGRTPKRLVQDCSSYAQAHAKKKVRISTRTEYTYAPYHDGYQWRKYGQKMIRGSTYPSLVPQVNRKSSWVIVVSDSSAHRASNTSDSCVSLPPFSWASLVSNEVHWSMCLHVKPGGIVELFDGGNQKLTVEHDAIRVCKTKPVAVVLLNSRQQSPSERLTPSDKDSSQN

SEQ ID NO: 78139 - protein, 484 aa, Zea mays
  Coding DNA Sequence Number=SeqID_36360
  Gene Ontology: Mol. function=nucleotide binding
  Homolog annotation: Hit_ID=O23508; Match level="QueryCoverage=68%, HitCoverage=38%, E-value=2e-16, Identity=26%"; Hit description =Growth regulator like protein
  Pfam annotation: Domain name=DUF246; Domain location=106-420; Score= -3.3; E_value=1.9e-14; Accession=PF03138.5; Description=Plant protein family
MAVDPRQVVAGFLTLSMFVMLGNMIKHDHFSPVTEELGFEATGVVSNTRKLDNDAEMSSVDTAGVEDLMDAVEEVKPCWTKPSPKNQPSNGFVTFSLTMGPEYHISQITDAVVIARYLGATLVLPDIRGNELGNKRKFQDIYNVDKFVRSLDGVVEVIEDIPDEVSAKKPAVIRVPNRVTESFITGTIQPIFQKNKYLRLAVIFSSVSLRPKETNNKDMDATACLAMFGGLELKHEYSEVARKMLDRLQELSKKSDGKVLAIDLRTDLLEKKSCKTTRGARRKGCYSPDEVLAFLRSVGFSANTTIYLTETSWYKGLDVLKEEFPNTWYKGDIMPAENKAEFLKSSNADLARALDLEICSQSDVFVPAVAGLFYGHVTGKRIASGRTQIVVPSQSSTSTHASDFISTYISNKNHLAYAPVPQVNRKSLWVIAVSDSSTHRASNASDSCVSLPPFSWASLVSNEVHWRFAIYVPWHRTGTLLVRL

SEQ ID NO: 78140 - protein, 194 aa, Zea mays
  Coding DNA Sequence Number=SeqID_36361
  Gene Ontology: Mol. function=serine esterase activity
  Homolog annotation: Hit_ID=Q010S2; Match level="QueryCoverage=54%, HitCoverage=27%, E-value=1e-13, Identity=39%"; Hit description=[R] KOG1516 Carboxylesterase and related proteins
  Subcellular localization annotation: CTP_CleavageSite=54; ConfidenceScore=5.12e-01
MTESLVQNKPGMASIKEMPVVQDGPPPGGFAPVRFAHRIPTSARGTRNFPQGTISDMVSDASEAISFICNNVVSFGGDPNKTYLMGQSAGAHIVACTLLEQAIKESKGENTYWNVAQIKAYFGLSGGYNIQNLVDHFHERGVFIVQYFSVFKEPEMDLLVSNSFCLLDIDMHMHFQPLSQIDNLLHSAYDQWDK

SEQ ID NO: 78141 - protein, 39 aa, Zea mays
  Coding DNA Sequence Number=SeqID_36362
MDLLVSNSFCLLDVDMHMHFQPLSHIDNLLQLAYDQGDK

SEQ ID NO: 78142 - protein, 165 aa, Zea mays
  Coding DNA Sequence Number=SeqID_36363
  Gene Ontology: Mol. function=protein serine/threonine kinase activity; Cellular component=plasma membrane; Biological process =protein amino acid phosphorylation
  Homolog annotation: Hit_ID=Q9STE0; Match level="QueryCoverage=65%, HitCoverage=12%, E-value=7e-19, Identity=73%"; Hit description=MAP3K epsilon 1 protein kinase
MDLLVSNSFCLLDVDMHMHFQITFCSQLMIKGTNKIMPTLLHVLLVSQVLNALFNLCKINKRRHEQATENRIIPHLMKFVMSDSPLRQKVEKTLLKKEAIQNLVKFFQDCPEQFFGHILDAFLKIITKSSRLNTTMATNGLTTLLIARLDHSNLVVAKVWRLEFI

SEQ ID NO: 78143 - protein, 37 aa, Zea mays
  Coding DNA Sequence Number=SeqID_36364
MAEAVTTSAGAGVARSRRSSQRDPVHAGKKKSAPARG

SEQ ID NO: 78144 - protein, 72 aa, Zea mays
  Coding DNA Sequence Number=SeqID_36365
  Subcellular localization annotation: CTP_CleavageSite=26; ConfidenceScore=5.22e-01
MAEAVTTSAGAGVARSRRSSQRDPVHAGKKKSAPARSPNSQDQKNMSLNLSGYPELNLLIPDLNVACHVGVT

SEQ ID NO: 78145 - protein, 338 aa, Zea mays
  Coding DNA Sequence Number=SeqID_36366
MAGCFQINRGSLMKKCLAEGVSANVSRPIIYGRLGLGFFYKQTGTHFRPLDPRSTDHNTPCPDPTQALDLQIGGHDLTRQGLCAASNRGCPLRSNGAQLFPQSDIGHGGALVPHGGGLAGDSHAGAQMPQSPLLRVLREAQNIGNRKGWFSPTIEVRSMLSTADCEPAAALRLRRWRRTSRLYWPWRAAETVKAGPSANDGFRNPRWWAWRLASWGIRAYASEGEKRGGHAVPASQQGEVSAEMAEAVTTSAGAGVARSRRSSQRDPVHAGKKKSAPARWVPLIVPRSSASCFGEGMTRGVHTEVGRNRPRGEVGHWFCDPTGRCMGREGSTWAEGAW

SEQ ID NO: 78146 - protein, 99 aa, Zea mays
  Coding DNA Sequence Number=SeqID_36367
MVGCRRHISPGPVLRPHLTPFLPIWILSHDIIVDSAHVCQSELLIQIIIYACCVLMSLTCPMKKSQAGYIVIRIQENRLLNEIFSGHQGQAPLRDGSTR

SEQ ID NO: 78147 - protein, 179 aa, Zea mays
  Coding DNA Sequence Number=SeqID_36368
  Homolog annotation: Hit_ID=Q2R029; Match level="QueryCoverage=23%, HitCoverage=10%, E-value=5e-13, Identity=91%"; Hit description=AAA -type ATPase family protein, putative, expressed
  Pfam annotation: Domain name=efhand; Domain location=151-179; Score =17.7; E_value=0.043; Accession=PF00036.22; Description=EF hand
  Subcellular localization annotation: CTP_CleavageSite=48; ConfidenceScore=5.05e-01
MQKKILVASVFQGKDSLPFARLISSLAAAGTWLQSAACRTNFFATLIYAAIFVVQNSNCHYHVLMIVAGGHVTHVWELGDFITSSEAHPGGFLFTKFASSNQTLFDLFPDSFGSRMKPYLQIGSSSWIPGTTSLRQPILPIWIISHDIVVDSAHVFDLFDTKHNGILRFEDFAQFMRET

SEQ ID NO: 78148 - protein, 896 aa, Zea mays
  Coding DNA Sequence Number=SeqID_36369
  Gene Ontology: Mol. function=nucleoside-triphosphatase activity; Cellular component=membrane
  Homolog annotation: Hit_ID=Q1RST2; Match level="QueryCoverage=79%, HitCoverage=58%, E-value=1e-140, Identity=42%"; Hit description =Peptidase S1 and S6, chymotrypsin/Hap; Immunoglobulin/major histocompatibility complex; ...
  Homolog annotation: Hit description=AAA ATPase, central region
  Subcellular localization annotation: CTP_CleavageSite=30; ConfidenceScore=5.71e-01
MVETRRSSAAAAGKRTSPSPSSSSVPPPKRSKAESSGSPTASAPGRAEEDSVAGAAPARSAGSVDDAAAVAQKDQGVDKPSSAAAESSKRRKEQEQQQPAVPWAKLLSECSQGLVLTTARQHSKGAFGRSREGKGACRGKGKPGAVVTGESCLTESPDCRNQYLLEECIFLNSFAIATGSMTPHYPISVDQISVGQSKNCNLWLKDQPVSKVLCKLRRLEQGGPCELEVIGKKGMVQLNGRSIFLYPLNDKVPKTVLSSAVSLLEAPVASVKRIRTDKRTGDTSAVAGTEMMTSTSNQKDVAAVPPASAGENSQRVVRPLASSASDKLKGRAVSPEKEFANGENANEVNSNIEDSPMVVAAAPISPDAAANDTCQQNGFVSDSHLGAEIGKTATYKIRPVLRMITGSTISEFDLTGDDLFKALEDQRDHIIRELNASTNVPPSRCQAFKDGMKQGIINPSDIDVTFENFPYYLSENTKNVLLSSAFIHLKKKEFIKQFVEISSINQRILLSGPAGSEIYQETLVKALAKHFSARLLVVDSLLLPGAPSKDPEFQKDVGKADKSGDKAAAEKFAIYQKHRSSLADTVHFRRPAAPTSSVNADIVGTSTLHSASLPKQESSTATSKSYTFREGFVNYSSLLLNVLSYFFSQAQPCSLSQRGPSYGYRGRVMLAFEDNGSSKIGVRFDKQIPDAELLRPDFSAGEEVERLAMTELIEVISEENKSGPLIVLLKDVEKSFTGVTESLSSLRSKLESLPPGVLIIGSHTQMDSRKEKAHPGGFLFTKFASSSQTLFDLFPDSFGSRLHERSKESPKTMKHLNKLFPNKILIQLPQDEALLTDWKQQLDRDVETLKAKSNIGSIRMFLSRNGIECNDLEELFIKDQSLSNERSFCFASFTFI

SEQ ID NO: 78149 - protein, 274 aa, Zea mays
  Coding DNA Sequence Number=SeqID_36370
  Gene Ontology: Mol. function=zinc ion binding
  Homolog annotation: Hit_ID=Q6YW60; Match level="QueryCoverage=77%, HitCoverage=94%, E-value=1e-86, Identity=87%"; Hit description=Zinc finger (C3HC4-type RING finger) protein-like
  Pfam annotation: Domain name=zf-C3HC4; Domain location=104-156; Score= 45.4; E_value=2e-10; Accession=PF00097.15; Description=Zinc finger, C3HC4 type (RING finger)
MEGASSAPDRHPGSLRARDSPLSMEGESAMLTWIGYPAPALSMEAQYAACVKNAIMKRISIFPVKNVKNRESESSVELSPPQPATVNLLEIEDEETDGSSAACCRICLENESEIGDGDELISPCMCKGTQQFVHRSCLDHWRSVKEGFAFSHCTTCKAQFHLRVETWEDNSWRKMKFRIFVARDVLLVFLAVQLTIAIIGAIAYFLDRDGSFRNSFSDGWDRFLSKHPIPFYYCIAEPFTNDMQEYVVEDLHGNYTAPKLDPEHEERLKMLKLL

SEQ ID NO: 78150 - protein, 307 aa, Zea mays
  Coding DNA Sequence Number=SeqID_36371
  Gene Ontology: Mol. function=zinc ion binding
  Pfam annotation: Domain name=AT_hook; Domain location=127-139; Score =16.8; E_value=0.029; Accession=PF02178.9; Description=AT hook motif
MEGASSAPNRHPGSLRARDSPLSMEGESAMLTWIGYPAPALSMEARGHLEHHPKASKLLPSDLKVFIYVCNKCLDEKVLKVESPQKKTAPKKLSPKKKQKKQKKQSHKIETRRNQIVLKCKKKTGKKGKRGRPRKNPTDLSKNEPSKIHVSEPSNVSKNEPVKRISKRLHDKYMKSNSNVSKNAASSTKRKRTVSQYSYWLNGLRWSQHPHDERARSFRKERVVFPSEDAKISEVSPVCCLCEKCYNEEDIYIAYEKCEETTGIVDYINYGVMKYAVGLVYGLLISFNVNSKPFFAVEEQRQLLDYS

SEQ ID NO: 78151 - protein, 116 aa, Zea mays
  Coding DNA Sequence Number=SeqID_36372
MSGAPATSPVPLESDRWSSDFWARHDVRWRTGHELFSVRCAGMGVPAFCARCARINACRSLHGSRVHDSPISMEGASSAPNRHPGSLRARDSPLSMEGESAMLTWIGYPAPALSME

SEQ ID NO: 78152 - protein, 261 aa, Zea mays
  Coding DNA Sequence Number=SeqID_36373
  Homolog annotation: Hit_ID=Q94KM3; Match level="QueryCoverage=51%, HitCoverage=61%, E-value=4e-36, Identity=57%"; Hit description=MURB -like protein hMURB17
  Pfam annotation: Domain name=Zea_mays_MuDR; Domain location=72-261; Score=227.5; E_value=2.9e-65; Accession=PF05928.2; Description=Zea mays MURB-like protein (MuDR)
  Subcellular localization annotation: CTP_CleavageSite=89; ConfidenceScore=5.19e-01
MTLPLPSKDDDSHADTYAVTQPLPAIGTSSPPNPSRQETAAKDPSRSLQFPWYATPFPLAPFLNRTLAAAPMDRNAPVVVVADAVDAARAAAVAAAEARCAALVAEKEARAAVQSASNAADKVKLVVEAVKYRSFVEDNSKEHVDLKYHVSVKNSLRYVIQEMRRQSSLLHNMNRMCCSIPEVEGGKVGKLAAHLNDICKNLEKTCIVCEEDLENKSPGWDLHHPPSDVEDGPDISDVEDQVDGYVSVDPELWEMVFEDMK

SEQ ID NO: 78153 - protein, 610 aa, Zea mays
  Coding DNA Sequence Number=SeqID_36374
  Homolog annotation: Hit_ID=Q94KM3; Match level="QueryCoverage=78%, HitCoverage=75%, E-value=7e-44, Identity=57%"; Hit description=MURB -like protein hMURB17
  Pfam annotation: Domain name=Zea_mays_MuDR; Domain location=290-451; Score=154.8; E_value=2.3e-43; Accession=PF05928.2; Description=Zea mays MURB-like protein (MuDR)
  Pfam annotation: Domain name=Zea_mays_MuDR; Domain location=457-610; Score=141.2; E_value=2.9e-39; Accession=PF05928.2; Description=Zea mays MURB-like protein (MuDR)
  Pfam annotation: Domain name=Zea_mays_MuDR; Domain location=74-289; Score=298.0; E_value=1.8e-86; Accession=PF05928.2; Description=Zea mays MURB-like protein (MuDR)
  Pfam module annotation: Pfam domain module=Zea_mays_MuDR::Zea_mays _MuDR::Zea_mays_MuDR; Domain location=290-451::457-610::74-289
  Subcellular localization annotation: CTP_CleavageSite=91; ConfidenceScore=5.07e-01
MDMTLPLPSKDDDSHADTYAVTQPLPAIGTSSPPNPSRQETAAKDPSRSLQFPWYATPFPLAPFLNRTLAAAPMDRNAPVVVVADAVDAARAAAVAAAEARCAALVAEKEARAAVQSASNAADKVKLVVEAVKYRSFVEDNSKEHVDLKYHVSVKNSLRYVIQEMRRQSSLLHNMNRMCCSIPEVEGGKVGKLAAHLNDICKNLEKTCIVCEEDLENKSPGWDLHHPPSDVEDGPDISDVEDQVDGYVSEDPELWEMVFEDMKWEENKVVVSLAEHCHIMGYDYDEIFDPVKYRSFVEDNSKEHVDLKYHVSVKNSLRYVIQEMRRQSSLLHNMNRMCCSIPKVEGGKVGKLAAHLNDICKNLEKTCIVCEEDLENKSPGWDLHHPPSDVEDDPDISDVEDQLDGYVSEDPDLWEMVFEDMKWEENKVVVSLAEHCHIMGYDYDEIFDRLLFILGLLFIRIREHVDLKYHVSVKNSLRYVIQEMRRQSSLLHKNRMCCSIPEVEGDKVGKLAAHLNDICKNLEKTCIVCEEDLENKSPGWDLHHPPSDVEDGPDISDVEDQVDGYVSEDPELWEMVFEDMKWEENKVVVSLAEHCHIMGYDYDEIFDRTI

SEQ ID NO: 78154 - protein, 127 aa, Zea mays
  Coding DNA Sequence Number=SeqID_36375
  Homolog annotation: Hit_ID=Q94KM3; Match level="QueryCoverage=99%, HitCoverage=60%, E-value=1e-33, Identity=54%"; Hit description=MURB -like protein hMURB17
  Pfam annotation: Domain name=Zea_mays_MuDR; Domain location=1-127; Score=56.0; E_value=1.2e-13; Accession=PF05928.2; Description=Zea mays MURB-like protein (MuDR)
MRRQSSLLHKNRMCCSIPEVEGDKVGKLAAHLNDICKNLEKTCIVCEEDLENKSPGWDLHHPPSDVEDGPDISDVEDQVDGYVSEDPELWEMVFEDMKWEENKVVVSLAEHCHIMGYDYDEIFDRTI

SEQ ID NO: 78155 - protein, 92 aa, Zea mays
  Coding DNA Sequence Number=SeqID_36376
MADRGSQAARLYSLQRNPRERCGTKVAIESARDTRRRRGNSVEVRCRRRRRVCHAGPTGVYAEAIMNITPQPITLNQRSKSNKYHKNKHSTA

SEQ ID NO: 78156 - protein, 120 aa, Zea mays
  Coding DNA Sequence Number=SeqID_36377
MATANEQNHSGGIDFLSLTLSLLTTQMHTAAVDLSTAGFLTIEGIGRIYTPERILRRPRKSAPHAEFVAGIRFHSWMQTCRDLMDLDVYADAIVDITPQLIPLNQRSKSDKYHKNKHSST

SEQ ID NO: 78157 - protein, 105 aa, Zea mays
  Coding DNA Sequence Number=SeqID_36378
MAGTNIRNARRGEFAMVVTVQGMNLTPRSHTVVSHDAIVDVTPQLITLNQRIKSDKYHKNKHSSIPISTKIVLLLFLRLGLPFLRVTIGTGFQSVKSTIVFRMKR

SEQ ID NO: 78158 - protein, 92 aa, Zea mays
  Coding DNA Sequence Number=SeqID_36379
MAGEHREDKEGECFVRFGHGGGLTPSGITVKMEGSFVIRTSYCSEVEGFPHLLRSCALRMGICKKLEHILKEYRENGIEKCSMAVYLGESRN

SEQ ID NO: 78159 - protein, 191 aa, Zea mays
  Coding DNA Sequence Number=SeqID_36380
MEWRSALWQSTWEKAEATQTTLLSNNKNTPAWRKRLQALSGRDPTEDDPTIVYMVGYLHTLDNQYDDLSSRCTHLNSRVESLEQQVKELKREKASLQESLEIAEGEETNTREAYRTLKMDYDKKLKKLAPAKKIRKKTEQKEEAPLALPPTRIENSSDTEDMSLASLDDLLKEFGDTLEKEFGSTLDSTCV

SEQ ID NO: 78160 - protein, 234 aa, Zea mays
  Coding DNA Sequence Number=SeqID_36381
MEALPFLLESHSMLPRRPTIYPGTEMALVQGWAAGGTDDLPLRGSTARYKNSMDGGQRSRWRTSMDGGPPSNGERRSAADGPATLTPPRPSRTTHRGDYLPARRFHSNRGRCSSLPPWCRYPTRPPRAWHERGSWGARATQRWIGAAKTIVTRASSTSSSLGLARVGSGGGEGGSESRRVGDCGGERGGVSVLTVGSIGRLGIGYSREGGSQDRTTGGIGRLKSIIIKQMVEIT

SEQ ID NO: 78161 - protein, 165 aa, Zea mays
  Coding DNA Sequence Number=SeqID_36382
  Gene Ontology: Mol. function=transporter activity; Cellular component= membrane; Biological process=oligopeptide transport
  Homolog annotation: Hit_ID=Q9SK95; Match level="QueryCoverage=71%, HitCoverage=21%, E-value=6e-26, Identity=47%"; Hit description =Similar to peptide transporter
MPWNTQSVYDMYSVLAAVRNNGGLVKEAKAIIRLFPIWVACLLYAVAYSQSSTFFTKQAATLDRRIRRHFQVPPAALHSFISITIVVIIPIYERVLVSVSRRYSGKPSGITMLQRIGTGMFFSLLSTGIATLVENRSCDLEAATWRLYPSYGRAIRCYLVDLRSI

SEQ ID NO: 78162 - protein, 242 aa, Zea mays
  Coding DNA Sequence Number=SeqID_36383
  Gene Ontology: Mol. function=transporter activity; Cellular component= integral to membrane; Biological process=oligopeptide transport
  Homolog annotation: Hit_ID=Q9SK95; Match level="QueryCoverage=49%, HitCoverage=21%, E-value=1e-25, Identity=47%"; Hit description =Similar to peptide transporter
MKKKSKRDLEMKHKTTALKLTQRFLSKDLKWERQEMCVREREVFLGLEMEFKSCSLLWGERGAVEPPLTAPGDLFASLTGRLQIRGHFVILQAAVRNNGGLVKEAKAIIRLFPIWVACLLYAVAYSQSSTFFTKQAATLDRRIRRHFQVPPAALHSFISITIVVIIPIYERVLVSVSRRYSGKPSGITMLQRIGTGMFFSLLSTGIATLVENRSCDLEAATWRLYPSYGRAIRCYLVDLRSI

SEQ ID NO: 78163 - protein, 72 aa, Zea mays
  Coding DNA Sequence Number=SeqID_36384
MGEEDPRWLQLSAEFARRHIRSYACSVSGVGDDSMARGPRTRGSGRHAQELVYIIGLGNMVKIGMDGIDYMM

SEQ ID NO: 78164 - protein, 72 aa, Zea mays; identical to SEQ ID NO: 78163
  Coding DNA Sequence Number=SeqID_36385

SEQ ID NO: 78165 - protein, 254 aa, Zea mays
  Coding DNA Sequence Number=SeqID_36386
MRVTQTSILGHPSGTRRPPMLESTTAAHFTHLPNTSLLAHPDGRGDGDTAGLGFIAEVGWGRDGRRGSVVVTAERGIRAAAHTELCVFCFWGRRRFYGAGPTHQRQRMTHPGDCAEQEGREAGAGAVGNLVRIPRVPFGGRKTPATGNQRVAQSKLGGRGAMDLRSKEGTDIEEKGEDEAKGLRSGLANATRRKRREREARVRAAMEMAVRRVSRGTPRLSLSRGKLRAWKIRLQRTAARRGKIKVRLEKSEHG

SEQ ID NO: 78166 - protein, 99 aa, Zea mays
  Coding DNA Sequence Number=SeqID_36387
MANAQGVVLPAVVGSAGSPTVTCDPRRKDYSGEQIPTPEKVPKSGNQRASSRGSDEVSPARRSQAIAHVEMATGGLTHRDPFVHGCYGGGEKGQCVEYQ

SEQ ID NO: 78167 - protein, 120 aa, Zea mays
  Coding DNA Sequence Number=SeqID_36388
MANAQGVVLPAVVGSAGSPTVTCDPRRKDYSGEQIPTPEKVPKSGNQRASSRGSDEVSPARRSQAIAHVEMATGGLTHRDPFVHGCYGGGEKGQCVEYQVSHPIPERGTGCGQAWFGWRR

SEQ ID NO: 78168 - protein, 104 aa, Zea mays
  Coding DNA Sequence Number=SeqID_36389
MATGGLTHRDPFVHGCYGGGEKGQCVEYQVSHPIPERGTGCGQAWFGWRRCYTGTHPNFPSPSPISSASAHPPFSAQSPRSATVDSGYRRAFAATEESPEFALR

SEQ ID NO: 78169 - protein, 82 aa, Zea mays
  Coding DNA Sequence Number=SeqID_36390
MAIFICDFSFSMQQLQLLCNSIFHLMFSVLREVPGEKNFLSLALIYQVIFHIAVNVFHVLCRGHEILKGKCALGPFLSILVI

SEQ ID NO: 78170 - protein, 497 aa, Zea mays
  Coding DNA Sequence Number=SeqID_36391
  Homolog annotation: Hit_ID=Q6J9W0; Match level="QueryCoverage=43%, HitCoverage=58%, E-value=4e-60, Identity=57%"; Hit description =Putative RNA-binding protein
  Subcellular localization annotation: CTP_CleavageSite=49; ConfidenceScore=5.33e-01
MDWAAAFGSPSWSAVATDPGPTMLSFAGPSSSATDAEVRLQDFTVGRMEAEATVASITHGWGQAIARHADAQVQQCWGITSGRGYRGVLPLPVTTPPAPAAPLPVTRCGAAPRRLLGLASALADDSSCSDLLPLFPVPAGYAASDAADPRCRELPVARCRQQRLQDLGFDDDDSFDADSILCGVHQSAAEGIDGIMGKLSMENNGASGSGSSVDSNMPESKMHPYLRNLMWQWRRKTKKKSLGTIYEEGTPEPANGDDDGALALPETGLGLSLNTDGVLKAWCGRGSAFADGNGPDLPLSPAHVVEQETSFYVIDMNYFPGKGAPSPRHAPWPLPTLVVITEGAATSQRMSVAIPLEQSITPLFNAATTTSLQLYFPSHVFSTEGGAGGENFSQFGADLSRRMTYCHRAKDDSTGLQRESWGRFPASIYVLISTTTATTSTVAKQSEPCGGEPPQEVPRRVPYLRRRYRVIDGPLHRYLAQGATPPSLAPSLFLAPI

SEQ ID NO: 78171 - protein, 182 aa, Zea mays
  Coding DNA Sequence Number=SeqID_36392
  Homolog annotation: Hit_ID=Q6J9W0; Match level="QueryCoverage=28%, HitCoverage=13%, E-value=7e-11, Identity=65%"; Hit description =Putative RNA-binding protein
  Subcellular localization annotation: CTP_CleavageSite=50; ConfidenceScore=5.27e-01
MNYFPGKGAPSPRHAPWPLPTLVVITEGAATSQRMSVAIPLEQSITPLFNAATTTSLQLYFPSHVFSTEGGAGGENFSQFGADLSRRMTYCHRAKDDSTGLQRESWGRFPASIYVLISTTTATTSTVAKQSEPCGGEPPQEVPRRVPYLRRRYRVIDGPLHRYLAQGATPPSLAPSLFLAPI

SEQ ID NO: 78172 - protein, 45 aa, Zea mays
  Coding DNA Sequence Number=SeqID_36393
HNDIARIARNFIIKMNLFVRQITIWASPQNRSNANKSNVDMILIP

SEQ ID NO: 78173 - protein, 36 aa, Zea mays
  Coding DNA Sequence Number=SeqID_36394
ELHHQDEPLREANHHQGVPENRSNANKSNVDMILIP

SEQ ID NO: 78174 - protein, 102 aa, Zea mays
  Coding DNA Sequence Number=SeqID_36395
MKKGHEFGWGTGTKATTIRWRAGGAVRANDAAWRKSWRLACHEQDCHGLDDGGSHNGAGMSMHNDIARIARNFIIKMNLFVRQITSRASPRIDQMPISQMWI

SEQ ID NO: 78175 - protein, 40 aa, Zea mays
  Coding DNA Sequence Number=SeqID_36396
HNDIARIARNFIIKMNLFVRQITIRASPRIDQMPISQMWI

SEQ ID NO: 78176 - protein, 43 aa, Zea mays
  Coding DNA Sequence Number=SeqID_36397
MNLFVRQITIMASSHNRSNANKSNVDMILIPGISTSTSSSEST

SEQ ID NO: 78177 - protein, 280 aa, Zea mays
  Coding DNA Sequence Number=SeqID_36398
MEAHPLRPGWRSLNSVTIGFRVDDTTEAAAMKTLATFCGYHPLEMVMHSLGLFPAEKRDDPMWYNRVSHVKDVWAMHPDQVRRITVQCMSTLYRLQALKSDAMAHLTNLAQTTKLTPRQLRGLCGRLVFRIGLHDVQEELGEANDHLEMHHQDMEHNDIVRIARNFIIKMNLFVRQITIRASPQNRSNANKSNVDMILIPASWAERAGSPATSSSSHGAGADGSAERDFAPPLFTKAKDLLDADVWLRVVESKFPLLMGACPDDTKTRFAAQHLRGPART

SEQ ID NO: 78178 - protein, 82 aa, Zea mays
  Coding DNA Sequence Number=SeqID_36399
MGGMFSKIKLDDGSIKGLDRFNIGKDVPLPGLMIEDPLTGHMPRHGIHFSKHFCKTESLIIEKPYLDSHITSIPLRVFSLVG

SEQ ID NO: 78179 - protein, 92 aa, Zea mays
  Coding DNA Sequence Number=SeqID_36400
MGRGAVARVACTLRGKRLDGGVVVLSVCVNLIRIHFSKHFCKTESLIIEKPYLDSHITSIPLRVFSLVGWFQKKKNKTEVREDSVLHLGPFA

SEQ ID NO: 78180 - protein, 381 aa, Zea mays
  Coding DNA Sequence Number=SeqID_36401
MGGMFSKIKLDDGSIKGLDRFNIGKDVPLPGLMIEDPLTGHMPRHGIHFSKHFCKTESLNIEKPYLDSHITSIPLRVFSLVGWFQKKKNKTEVREESVLHLGSFAYSLSGGVCASPDCNLADGEYVLIPEQGSVQEEDQEQASKATVEDLPAAPAIEGKPRSEGLTGYSHMNSPTPASGGDTRFSSDFLSRDGFPSILWEVLNSAGYPTPPLYTVQLYEEHRVPRCRVWLTLEAHPLQPGWRSLDSETIGLRTDDTVEAAAMKTLTTFCGYHPLEMVMHPLGLFPAEKKMIPWWCIRVSHVKVVWPMYPDLVGRVTVQCMSALYRLQALQSDDMALLANTAQTAKLTLESREDFVVDLSTELVEKDLQVERLSQRITTLEQ

SEQ ID NO: 78181 - protein, 705 aa, Zea mays
  Coding DNA Sequence Number=SeqID_36402
MEGLFLIDVSTEDDLLFNLVSPAPRRPDPLHAESLVGAEATSSGVSPSAVVRATDPDCVMEEREDPERTESPEQRKGQEGGVLDTEELAIVNSTYRKAQGSRLPGIIEETRRSGESTTSTLESETWAMESLETELFDNVRASIQRSLGKPDKLSGRPVAASNPPKATANAPRVAARKGVDRMPQSKMRAPVSTSQGAVSRQRPQVTINEPVAARDKNLTGAAEAKISSKPPRALPRVAMMRSSTNTTVTSRASDKRNSTGGAVNRQAVGKTASTSAVLRSGRGTNSSSILKSGFFTSAATSSHCMLMDTKPEAKTKSATLSIKNRPAQRVPVRPSSKSDISKTIPSRSSGNRIPAKGHADRASPSISPSSSMDSMSSVISGASTASTVGKMSHTSDNLNALSPSLRKSNDCHPNPKFRPPIVTEGHSSGTAASRDNLKATAEITNQGKGLKPSGLRRPTPKIGYFDAENYIDQNIGAQVQPQLSNIQCLPTQNMNLNAAPSTYGQQESKLTAAPHEESCVSKSKLMTPLSLMVEVEPFKVAELACTNLTDPVVVRPESVQPQSMEIQCLLPATPNPQPTFHQQVLKPIAAPLEAVQMEVEAFKVDKPEACIHLSSPVVVKPENKSIDQNAGALLQLQLVAEPESCTRKSKTVVAADYSKENIPALNQNIQANGDANSLVELLTQKLSSISLGEAAPNVAPRSCWE

SEQ ID NO: 78182 - protein, 144 aa, Zea mays
  Coding DNA Sequence Number=SeqID_36403
  Homolog annotation: Hit_ID=Q6Z6G1; Match level="QueryCoverage=57%, HitCoverage=9%, E-value=3e-27, Identity=74%"; Hit description =Putative DNA repair protein rhp54
MRNDYFSVKVKSVDGFQGAEEDIIIISTVRSNGAGTVGFLSNLQRTNVALTRAKLGKTLHSTTLLYTLLCQGFDDKPMVKRVVIVTPTSLVSNWESEIIKWLKGRVQVLALCESTHADVLSRIESFLKPLSRLQLQVNDNFCGA

SEQ ID NO: 78183 - protein, 244 aa, Zea mays
  Coding DNA Sequence Number=SeqID_36404
  Homolog annotation: Hit_ID=Q6EU00; Match level="QueryCoverage=35%, HitCoverage=23%, E-value=1e-24, Identity=68%"; Hit description=TRNA -splicing endonuclease positive effector-like
MYSVVVIKSVYVWAGYNVFAFLSIVETLSTRSKLSIGVVCPYNAQVRAIQEKVGKACRRNDYFSVKVKSVDGFQGAEEDIIIISTVRSNGAGTVGFLSNLQRTNVALTRAKLGKTLHSTTLLYTLLCQGFDDKPMVKRAVIVTPTSLVSNWESEIIKWLKGRVQVLALCESTHADVLSRIERVLDTEELAIVNSTFRKAQGSRLPRIIEETRRSGESTTSTLESETWAMESLETELFDNVRASI

SEQ ID NO: 78184 - protein, 105 aa, Zea mays
  Coding DNA Sequence Number=SeqID_36405
  Gene Ontology: Mol. function=oxidoreductase activity; Biological process=electron transport
  Homolog annotation: Hit_ID=Q10BT2; Match level="QueryCoverage=94%, HitCoverage=27%, E-value=9e-28, Identity=63%"; Hit description=Cell death suppressor protein Lls1, putative, expressed
METIKTPSPEILVELMEQIIRYWSHVVQCRSCNAALKAMKALEAAVQVTSVAVVGFLAVAKGMVLTSTIQRAAVVSAAVLCFAASRWLANFIQNFYFQDYIHAYK

SEQ ID NO: 78185 - protein, 340 aa, Zea mays
  Coding DNA Sequence Number=SeqID_36406
  Homolog annotation: Hit_ID=O82118; Match level="QueryCoverage=12%, HitCoverage=10%, E-value=9e-13, Identity=78%"; Hit description=Zinc finger protein
MESAIRDHPLWANATDQEIDHALEMLKNAGFSHVIAEDRTDQVYLSKQIFVVLYNRDNVESIGLDEAAKCLGCKPAAPLKKTSVAVAQKKKGDSSESDSDDDSDEPASVRCLEDYTSLCQNRDWNGHDAASGASRHKRQAINCYSGCRSAMSSRRSTRMTNIRLDLQGGRCFNPDTVHDHASYAFNSYPPQPAATSVLTSFQRKRPSTANDSALLWRVSSWQSRSASLGCLNQESRTRAQKLPFQTALMRKQRKHHCWQNGPDHDSRKLSYKAQLEWGQQAAALLGEQLVYHAVQRTIGYGAAMPPVALPSKEGVDVVLEVEVLDEVGKPAGGSEAQHGH

SEQ ID NO: 78186 - protein, 352 aa, Zea mays
  Coding DNA Sequence Number=SeqID_36407
  Homolog annotation: Hit_ID=Q6QP49; Match level="QueryCoverage=11%, HitCoverage=11%, E-value=4e-13, Identity=95%"; Hit description =Putative casein kinase I
  Pfam annotation: Domain name=DUF1645; Domain location=16-232; Score= -33.2; E_value=0.0038; Accession=PF07816.2; Description=Protein of unknown function (DUF1645)
MDLGADSFLISFSFHAPNAEEDGKIRPLKPRPKKTADDEPKIHPLKPPPGLLDGGSVTPSPRSPVVAGDAGAMWSPRRRSRVSSDVDFDRFTAALLEATKAPSPLGGKDDVGGVAAVAPHGSSPTRPTTRTALRSVGWRRWRLSDLLLFRSSSDGGHVNSLTCPSRGRAQQPPVVMIKASAAKREDMGKGWKHGDGDAAAATATAADSVAGCARLSPLQRLAKGLRAYSWHNHRGMAAPATKGCSRMLVSVMSLLKTELTSFVVLYNRDNVESIGLDEAAKCLGCKPAAPLKKTSVAVAQKKKGDSSESDSDDDSDEPASVRCLEDNTSLCQNRDWNGHDAASGASGIKGRP

SEQ ID NO: 78187 - protein, 232 aa, Zea mays
  Coding DNA Sequence Number=SeqID_36408
MDRAGQNKRDGQEKRAKELESRQRWRLLQMHLCLPSFPRTHKHAQQSLQSTPSLAPWLLQQYSTSDETARREKRVDPAHVQATTGYYSTSDESRGTEEPQREDEPRSRSVRELNERAAARRLTRPEAGALPRHGAWCAIYEQQPRGRAGAAGADVGLGVRTSSVITAPHLLKLGEPSGDARVGDQSTRATRRGAGLAPGACCFRVLAFWLLGQQKPHGFTRSVPASVTTPLD

SEQ ID NO: 78188 - protein, 210 aa, Zea mays
  Coding DNA Sequence Number=SeqID_36409
MHCDLVIVDARSSLVLLAGRLVLLASSDRVVASQLDGWCSVRCWCVCVIPFLILLCLRSGGPWLCALYGHWLTPHCLTGAVVPLLAAWTSIILFCFHFPPILVLLLTCLVARLSLVLGWSLLAVAGRSAPLLGCSSDLGSVPSSLVLRLGKPLNLLVVGLVSIVAVRLMDLDMAAEEEERRLEDFNETEDARFFIGFGENETHGASARDD

SEQ ID NO: 78189 - protein, 399 aa, Zea mays
  Coding DNA Sequence Number=SeqID_36410
MTDRPFELLHMDLIDYVSRGVRPRASASMKSLELFIIINTPTAAGAACRLHEAAEPQHMAASVLLAIFVLPAALPVPRRRLAASSGPPTVDGRRLATSDVSASQLDGWCSVRCWCVCVIPFLILLCLRSGGPWLCALYGHWLTPHCLTGAVVPLLAAWTSIILFCFHFPPILVLLLTCLVARLSLVLGWSLLAVAGRSAPLLGCSSDLGSVPSSLVLRLGKPLNLLVVGLVSIVAVRLMDLDMAAEEEERRLEDFNETEDARGVVTEAGTERVKPCGFCCPRSQKARTRKQQAPGARPAPRRVARVLWSPTRASPGRFAELLHRTRIYHVPSPLAILLVLALAHCTALHVHLRQIYGRRLTGGAVEEPIPRWPLGAPPGSAHAVVTGVYSSAFAAAAAG

SEQ ID NO: 78190 - protein, 159 aa, Zea mays
  Coding DNA Sequence Number=SeqID_36411
MDLCLHFRVMPSWHGSTGAVSPRGRRPTVALHQERATVALHRELARLAARSIARLLAGAGLGGSGTAEEAEMAAALMDVAAASAAASAAVFSAVTSVSAAASSCSNKKAPTAFVAAAFAKKPETPTTADVAQEKHEELERCIDECESGSEVVFRSIVRK

SEQ ID NO: 78191 - protein, 88 aa, Zea mays
  Coding DNA Sequence Number=SeqID_36412
  Subcellular localization annotation: CTP_CleavageSite=32; ConfidenceScore=5.66e-01
MAAALMDVAAASAAASAAVFSAVTSVSAAASSCSNKKAPTAFVAAAFAKKPETPTTADVAQEKHEELERCIDECESGSEVVFRSIVRK

SEQ ID NO: 78192 - protein, 100 aa, Zea mays
  Coding DNA Sequence Number=SeqID_36413
  Subcellular localization annotation: CTP_CleavageSite=32; ConfidenceScore=5.62e-01
MAAALNDVAAASAAASAAVFSAATSVSAAASSCSNKKAPTAFVAAAFAKKPETPTTADVAQEKHEELERCIDECESGSEVVFSSIVRNRVSLLNIHSPTI

SEQ ID NO: 78193 - protein, 214 aa, Zea mays
  Coding DNA Sequence Number=SeqID_36414
MPEFSPFFPLAPTMLQLVNGPGERGSAGFYGDGQGCRLLPRSEAPGGGWNGQWNPPDPGSERRGVQSPIEIKHQSAFFLHSVPNSKHSQFRRGSTDDRVAEDFGIRFAGRDKEGGGAVGLLREREESDWVHKIWVRLRTKNTLHHDASKVHRSISTKHGIIISSNITGVIIVTLTVRSTNVAIIRSNVPAKEGYQRVQRVSREYDSRQMCASVM

SEQ ID NO: 78194 - protein, 243 aa, Zea mays
  Coding DNA Sequence Number=SeqID_36415
MARRRSQKKKKTTPKENKDRGYPLPTSHVTHLPRDRDFPYTSTEEARQGFLPDRHRSKINQGPPYTDHSPTALAPFGYQDDLQVARNLALVVAIQTNMTAVGPGDQAGHGGGIDGKRPSKSELPSVTTVKLNGATREAWVTAKNRGHRDLPSSLPPPPDAIRMHDMSLLTAHQPPMENTRDSVRDPKLPAAVGTASGIRPILAADVAAYKVRARFCSEGRQKWAVRVTSTLKEILFVANLSLG

SEQ ID NO: 78195 - protein, 135 aa, Zea mays
  Coding DNA Sequence Number=SeqID_36416
MVVIPAHKNSWPNNPKVVGIGDDHEVPMIDDGQRDAAALDRVQAAAAPELAIHSGALATVSKSHVTHLPRDRDFPYTSTEEARQGFLPDRHRSKINQGPPYTDHSPTALAPFGYQDDLQKPRNLALVVAIQTNRI

SEQ ID NO: 78196 - protein, 212 aa, Zea mays
  Coding DNA Sequence Number=SeqID_36417
  Gene Ontology: Mol. function=DNA binding
MVWIIEHHAETSEDFVMEQEVASSAPRVPDRPDSGMLTAYGVVCGQRVATPPPSSTTSPGAMKQWRDDVDRLLGMAYSTSTRSRPRSSRRQHEAMASVRSPSVRGAQTDDLRAELNCRRTGEDARVSLERARECRQNINGRDLDQYFAAVAPQTPMGTRSPTGVPLVGVGCAALADHLRAASLKGKCALGPFLSILVIECQLKCLNVNLCNG

SEQ ID NO: 78197 - protein, 441 aa, Zea mays
  Coding DNA Sequence Number=SeqID_36418
  Homolog annotation: Hit_ID=Q53M91; Match level="QueryCoverage=38%, HitCoverage=81%, E-value=4e-48, Identity=63%"; Hit description =Expressed protein
MAPGDAVELGGGVATFWPQTAPDIKNIVLGSSNTQQARRLLDDLDAARQRMGRDALNAERARRPGSPPEREVEGKARTRVSTGPLHTPGSFSFWDPAGVRTYPEAPDLYVYSGPVFFCGGPDLLRCGVFPCHVAPFGLPIRWGQAPSSAWLGDLAWVRCLHAVGEGTPDLGYRQWLITTRKNTGWSSGILPVSLRTKGGLGSVPLNVSFKRGLTGANHEAWFRLVSLVVVVQVYRRAPARPAKTFLDKLQQRRSDHQPTAKRRMVAETKPAAGSGVAGEMEVEAYRRLFPVAFLERHLSESVRIDSRRLREARPTTVALGAVSSVHGSALARLGDTAMLASVKLEVMSPPAEHPDEGSIAVEFHMPPICSPLAMLASVKLEVMSPPAEHPDEGSVAVEFHMPPICSPLVRPGRPADVAPVISKALEDVLTRFFVSPLTSAL

SEQ ID NO: 78198 - protein, 460 aa, Zea mays
  Coding DNA Sequence Number=SeqID_36419
  Homolog annotation: Hit_ID=Q53M91; Match level="QueryCoverage=37%, HitCoverage=81%, E-value=4e-48, Identity=63%"; Hit description =Expressed protein
MPSEKISKNLKLSPLPGAPNVGEEISPAGWRIAPALNPKERRGLSVLLATRLTQQARRLLDDLDAARQRMGRDALNAERARRPGSPPEREVEGKARTRVSTGPLHTPGSFSFWDPAGVRTYPEAPDLYVYSGPVFFCGGPDLLRCGVFPCHVAPFGLPIRWGQAPSSAWLGDLAWVRCLHAVGEGTPDLGYRQWLITTRKNTGWSSGILPVSLRTKGGLGSVPLNVSFKRGLTGANHEAWFRLVSLVVVVQVYRRAPARPAKTFLDKLQQRRSDHQPTAKRRMVAETKPAAGSGVAGEMEVEAYRRLFPVAFLERHLSESVRIDSRRLREARPTTVALGAVSSVHGSALARLGDTAMLASVKLEVMSPPAEHPDEGSIAVEFHMPPICSPLAMLASVKLEVMSPPAEHPDEGSVAVEFHMPPICSPLVRPGRPADVAPVISKALEDVLTRFFVSPLTSAL

SEQ ID NO: 78199 - protein, 107 aa, Zea mays
  Coding DNA Sequence Number=SeqID_36420
MVDYGKKGEFLKSLINFSWNNSLYVSTMLETGKDQFGKDLSEQPRLCAVWVHRTVRWCTRQCPEDEVPADSASETDLLLTDCSDDSDTGAEDTAFGTADAEVDASSA

SEQ ID NO: 78200 - protein, 61 aa, Zea mays
  Coding DNA Sequence Number=SeqID_36421
MGMLLCGQGKLLDYLNVHQVVVATTVNDVLETGKDQFGKDLAEQPRLCAVWVHRTVSGAPG

SEQ ID NO: 78201 - protein, 309 aa, Zea mays
  Coding DNA Sequence Number=SeqID_36422
MSGVPLDCPVQLEDKGLQRSTAPNPNGLLTWQASDSKQYPVRCTTRLSVLETGKDQFGKDLAEKPRLCAVWVHRTVRWCTGLSGGAPDSVRCARLASVNWLLSGLRRRCTAINHRTVRWCTGLSGEPTVGPANGRPCNPRATLGRANGQKGHQTVRCAPDSVRCANDSEFPMVGFAKEGKKSAPDCPVRQATEGRNCLPGMLSTAPSCLGAIKGTPRRMEEYTKHPLSIVDHSHFILAHLFDILSDLSSVLVRTLRYCVELKSWSCVCVFAVVLSVSLPSLTLVLHFDSYCKGERLQVVEIPRKRERVK

SEQ ID NO: 78202 - protein, 404 aa, Zea mays
  Coding DNA Sequence Number=SeqID_36423
  Gene Ontology: Mol. function=protein binding; Cellular component =integral to membrane; Biological process=protein amino acid phosphorylation
  Homolog annotation: Hit_ID=Q2QXR6; Match level="QueryCoverage=70%, HitCoverage=52%, E-value=5e-83, Identity=59%"; Hit description =Leucine Rich Repeat family protein, expressed
  Pfam annotation: Domain name=LRRNT_2; Domain location=34-74; Score =13.1; E_value=0.037; Accession=PF08263.3; Description=Leucine rich repeat N-terminal domain
  Pfam annotation: Domain name=LRR_1; Domain location=102-124; Score =10.7; E_value=2.8; Accession=PF00560.23; Description=Leucine Rich Repeat
  Pfam annotation: Domain name=LRR_1; Domain location=126-149; Score =9.5; E_value=4.8; Accession=PF00560.23; Description=Leucine Rich Repeat
  Pfam annotation: Domain name=LRR_1; Domain location=151-172; Score =12.4; E_value=1.4; Accession=PF00560.23; Description=Leucine Rich Repeat
  Pfam annotation: Domain name=LRR_1; Domain location=177-199; Score =7.4; E_value=12; Accession=PF00560.23; Description=Leucine Rich Repeat
  Pfam module annotation: Pfam domain module=LRRNT_2::LRR_1::LRR_1::LRR_ 1::LRR_1; Domain location=34-74::102-124::126-149::151-172::177-199
MRVRLSFLLLSAAFLTILSAAAPSAVPDPEPEVKPSDTDALTIFRHGADAHGILAANWSTGDACAGRWAGVGCSADGRRVTSLTLPSLDLRGPLDPLSHLAELRALDLRGNRLNGTLDALLRGAPGLVLLYLSRNDVSGAVPTAALARLTRLVRLDLADNSLTGPVPPAPALAGLTALVTLRLQDNLLTGLVPDVAAALPRLADFNTSNNQLSGRLPDAMRARFGLASFAGNAGLCGPAPPLPHCEFLPREPAPTPPSSSTSSSSVLPSNPAASSSVASSSPALATQESLSRRPGLSPGAVAGIAVGNALFFALASLLVACCCCGRGGGGEPAAAKKRKRRGGRVGLEDGGGGGALFGHLKGEQQPARPGSAGQCSDGGDSDGARSKLVFFCADGGEDDHGYGD

SEQ ID NO: 78203 - protein, 280 aa, Zea mays
  Coding DNA Sequence Number=SeqID_36424
  Gene Ontology: Mol. function=protein-tyrosine kinase activity; Cellular component=integral to membrane; Biological process=protein amino acid phosphorylation
  Homolog annotation: Hit_ID=Q0WSR7; Match level="QueryCoverage=82%, HitCoverage=34%, E-value=2e-61, Identity=54%"; Hit description =Putative receptor-like protein kinase
  Pfam annotation: Domain name=Pkinase; Domain location=2-219; Score= -74.3; E_value=0.00039; Accession=PF00069.15; Description=Protein kinase domain
  Pfam annotation: Domain name=Pkinase_Tyr; Domain location=1-219; Score=-106.7; E_value=6.3e-06; Accession=PF07714.7; Description =Protein tyrosine kinase
  Pfam module annotation: Pfam domain module=Pkinase::Pkinase_Tyr; Domain location=2-219::1-219
RRFLILRLTSPNGNLHNRLHGTPPPPQAGHKMSGESALDWTTRVRLLLGAARGLACIHREYRTSGVPHGNVKSTNVLLDKDGAARVADFGLALLLSPAHAIARLGGYTAPEQQDDKRLSQEADVYSFGVLVLEALTGKAPAQHPQPDARKKGAAATSLSLPEWVRSVVREEWTAEVFDVELLRYRDIEEEMVALLHVALACVAPLPEQRPSMGDVVRMIESVPVEQSPAPEEDVDVSVTSPSHRHHHGRRRWSPQLLAAARCTAQLLFLFLVCDLDMDLP

SEQ ID NO: 78204 - protein, 945 aa, Zea mays
  Coding DNA Sequence Number=SeqID_36425
  Gene Ontology: Mol. function=protein kinase activity; Cellular component=integral to membrane; Biological process=protein amino acid phosphorylation
  Homolog annotation: Hit_ID=Q2LJM0; Match level="QueryCoverage=74%, HitCoverage=95%, E-value=1e-104, Identity=46%"; Hit description =Putative receptor kinase
  Pfam annotation: Domain name=APH; Domain location=454-645; Score= -13.1; E_value=0.049; Accession=PF01636.13; Description =Phosphotransferase enzyme family
  Pfam annotation: Domain name=LRRNT_2; Domain location=58-98; Score =13.1; E_value=0.037; Accession=PF08263.3; Description=Leucine rich repeat N-terminal domain
  Pfam annotation: Domain name=LRR_1; Domain location=149-172; Score =9.5; E_value=4.8; Accession=PF00560.23; Description=Leucine Rich Repeat
  Pfam annotation: Domain name=LRR_1; Domain location=174-195; Score =12.4; E_value=1.4; Accession=PF00560.23; Description=Leucine Rich Repeat
  Pfam annotation: Domain name=LRR_1; Domain location=200-222; Score =7.4; E_value=12; Accession=PF00560.23; Description=Leucine Rich Repeat
  Pfam annotation: Domain name=Pkinase; Domain location=452-729; Score =46.1; E_value=2.6e-11; Accession=PF00069.15; Description=Protein kinase domain
  Pfam annotation: Domain name=Pkinase_Tyr; Domain location=451-729; Score=49.9; E_value=1.6e-15; Accession=PF07714.7; Description =Protein tyrosine kinase
  Pfam module annotation: Pfam domain module=APH::LRRNT_2::LRR_1::LRR _1::LRR_1::Pkinase::Pkinase_Tyr; Domain location=454-645::58-98::149 -172::174-195::200-222::452-729::451-729
MPISLHLHSPRRRRRPHLRLPAAAMRVRLSFLLLSAAFLTILSAAAPSAVPDPEPEVKPSDTDALTIFRHGADAHGILAANWSTGDACAGRWAGVGCSADGRRVTSLTLPSLDLRGPLDPLSHLAELRALDLRGNRSTARWTRCSAAPGLVLLYLSRNDVSGAVPTAALARLTRLVRLDLADNSLTGPVPPAPALAGLTALVTLRLQDNLLTGLVPDVAAALPRLADFNTSNNQLSGRLPDAMRARFGLASFAGNAGLCGPAPPLPHCEFLPREPAPTPPSSSTSSSSVLPSNPAASSSVASSSPALATQESLSRRPGLSPGAVAGIAVGNALFFALASLLVACCCCGRGGGGEPAAAKKRKRRGGRVGLEDGGGGGALFGHLKGEQQPARPGSAGQCSDGGDSDGARSKLVFFGADGGEEDHGDGDGDGAPLTSHLQGRRGTRFQLEELLRASAEMVGRGSLGTVYRAVLSDGRMVAVKRLRDANPCARDEFHRYMDLIGRLRHPHLVPLRAFYYARQEKLLIYDYLPNGNLHDRLHGHKMSGESALDWTTRVRLLLGAARGLACIHREYRTSGVPHGNVKSTNVLLDKDGAARVADFGLALLLSPAHAIARLGGYTAPEQQDDKRLSQEADVYSFGVLVLEALTGKAPAQHPQPDARKKGAAATSLSLPEWVRSVVREEWTAEVFDVELLRYRDIEEEMVALLHVALACVAPLPEQRPSMGDVVRMIESVPVEQSPAPEEDVDVSVTSPSIGITTDDGDEVVPFTHKSCYPSAKGSRLPIHLYRGGEAGTAIAAKSSRGPPYTDHSPTALAPFGYQDDLQVLRVKEIKANSEEDFIPGIRSGSTPVHDTVRYAAMKELRRGIQCTRDDPDRWRSPCKLPRSLGDDTRAPTEAKSAANRSWPAAALRPIDDGELREGVAAAHAKLRRREERGCGRLLMEAQNGR

SEQ ID NO: 78205 - protein, 170 aa, Zea mays
  Coding DNA Sequence Number=SeqID_36426
  Subcellular localization annotation: CTP_CleavageSite=55; ConfidenceScore=5.30e-01
MQEFPCRTAIAAKSSRGSPYTDHSPTALAPFGSLDRASITSNSRGSRVLRVKEIKANSEEDFIPGIRSGSTPVHGTVRYAAMKELRRGIQCTRDDPDRWRSPCKLPRSLGDDTRAPTEAKSAANRSWPAAALRPIDDGELREGVAAAHAKLRRREERGCGRLLMEAQNGR

SEQ ID NO: 78206 - protein, 116 aa, Zea mays
  Coding DNA Sequence Number=SeqID_36427
MANSEEDFIPGIRSGSTPVHGTVRYAAMKELRRGIQCTRDDPDRWRSPCKLPRSLGDDTRAPTEAKSAANRSWPAAALRPIDDGELREGVAAAHAKLRRREERGCGRLLMEAQNGR

SEQ ID NO: 78207 - protein, 89 aa, Zea mays
  Coding DNA Sequence Number=SeqID_36428
MKELRRGIQCTRDDPDRWRSPCKLPRSLGDDTRAPTEAKSAANRSWPAAALRPIDDGELREGVAAAHAKLRRREERGCGRLLMEAQNGR

SEQ ID NO: 78208 - protein, 109 aa, Zea mays
  Coding DNA Sequence Number=SeqID_36429
MKLWKETSRSSKTTTSSRCGLAATPQSAACEGRVIYVSFPHFDLLWLDLDTLHESPSSPSYPPALLSVRFAVPWPDSPATWRDYTTACVRSRNVDDRSSRALLSLSTRR

SEQ ID NO: 78209 - protein, 109 aa, Zea mays
  Coding DNA Sequence Number=SeqID_36430
MKLWKETSRSSKTTTSSRSGLAATPSRLPVKAAVIYVSFPHFDLLWLDLDTLHESQSSPSYPPALLSVRFAVPWPDSPATWRDYTTACVRSRNVDDRSSRALPSRSTRR

SEQ ID NO: 78210 - protein, 337 aa, Zea mays
  Coding DNA Sequence Number=SeqID_36431
MKLWKETSRSSKTTTSSRCGLAATPSWLPVKAAVIYVSFPHFDLLWLDLDTLHESQSSPSYPPALLSVRFAVLWPDSPAPPAPPQGAPAPRVAAGGDPDDGDGDDSSSHDTDFSANHELEGWFARSITRDATRGCHFHDALDTLLRRAFDRHTWSVEYRCVVYQHSRGVYPDRWEATCLVRRQENSLQGVEACSEHYSISERDSAEAAMQDAARRALSHYCSVFGGVADGLDLKYYPRRSSGSTRGVIVSPVGEGNPRLSSTVNLAAVLNTELDHALDELSRARAEIAQLRAERVERRHLEDGSPAPVGTQHLYRSPRRGHQSYGNPDCKTKITLEP

SEQ ID NO: 78211 - protein, 113 aa, Zea mays
  Coding DNA Sequence Number=SeqID_36432
  Gene Ontology: Cellular component=integral to membrane
  Homolog annotation: Hit_ID=Q5N967; Match level="QueryCoverage=60%, HitCoverage=25%, E-value=2e-30, Identity=91%"; Hit description =Putative terbinafine resistance locus protein
  Pfam annotation: Domain name=Yip1; Domain location=6-107; Score=20.9; E_value=7.9e-06; Accession=PF04893.7; Description=Yip1 domain
MSRQLLKSTCLRDVDSQVFAVAFAVLAAGAIVLTLNVLLLGGNIIFFQSLSLLGYCLFPLDVGALICMLKDSVILKMVVVTVTLAWSSWAAYPLMSAAVNPKRKALALYPVFL

SEQ ID NO: 78212 - protein, 304 aa, Zea mays
  Coding DNA Sequence Number=SeqID_36433
  Homolog annotation: Hit_ID=Q6YZ10; Match level="QueryCoverage=39%, HitCoverage=43%, E-value=1e-39, Identity=73%"; Hit description=27k vesicle-associated membrane protein-associated protein-like
  Pfam annotation: Domain name=Motile_Sperm; Domain location=140-270; Score=55.3; E_value=2.1e-13; Accession=PF00635.16; Description=MSP (Major sperm protein) domain
  Subcellular localization annotation: CTP_CleavageSite=20; ConfidenceScore=5.30e-01
MPLWGTAASTQPAAKGDAARAPSGSGGGGVKVIRSLLPTRRRLRLDPPAKLYFPSIMRHATEIYMRNTGYSARAFLFGLTAALMRGYAAQELHANVTVTTTIFSMTLSLSMQIRAPTSSGNRQYPRRLRLWKKMMFPPCTKPLQPSPNIAMSDEPGKQVRSAVRIKNISKSHVAFKFQTTAPKSCFMRPPGGVLAPGESIIATAVVLASYNDLSVHSLTSSAVFKFVEHPENNEKPLDKCKVKFKIVSLKVKGPVEYVPELRLLYRWDVEGRERARRRGSVADQRVRDYSWLGFALLPEGSGQK

SEQ ID NO: 78213 - protein, 240 aa, Zea mays
  Coding DNA Sequence Number=SeqID_36434
  Homolog annotation: Hit_ID=Q6YZ10; Match level="QueryCoverage=49%, HitCoverage=43%, E-value=8e-40, Identity=73%"; Hit description=27k vesicle-associated membrane protein-associated protein-like
  Pfam annotation: Domain name=Motile_Sperm; Domain location=76-206; Score=55.3; E_value=2.1e-13; Accession=PF00635.16; Description=MSP (Major sperm protein) domain
  Subcellular localization annotation: CTP_CleavageSite=54; ConfidenceScore=5.27e-01
MRNTGYSARAFLFGLTAALMRGYAAQELHANVTVTTTIFSMTLSLSMQIRAPTSSGNRQYPRRLRLWKKMMFPPCTKPLQPSPNIAMSDEPGKQVRSAVRIKNISKSHVAFKFQTTAPKSCFMRPPGGVLAPGESIIATAVVLASYNDLSVHSLTSSAVFKFVEHPENNEKPLDKCKVKFKIVSLKVKGPVEYVPELRLLYRWDVEGRERARRRGSVADQRVRDYSWLGFALLPEGSGQK

SEQ ID NO: 78214 - protein, 632 aa, Zea mays
  Coding DNA Sequence Number=SeqID_36435
  Homolog annotation: Hit_ID=Q5VQ77; Match level="QueryCoverage=31%, HitCoverage=60%, E-value=2e-88, Identity=85%"; Hit description =Coatomer protein complex, beta prime subunit-like
  Pfam annotation: Domain name=Coatomer_WDAD; Domain location=4-348; Score=45.1; E_value=1.3e-18; Accession=PF04053.4; Description =Coatomer WD associated region
  Subcellular localization annotation: CTP_CleavageSite=47; ConfidenceScore=5.25e-01
MAGEEERKRVLLSYAVPTVSSRNTTASSTTGSGSRTGHRRRRSMWARSVEEEDCRPNHVYIWFVVVFTSRVYTTILQDLGTDFLINRSDGKEGGNRGGPDTISMEESSFGRRGEEDGSAYVNLHCKNYFNFTKNPEEIPWDEAGAEYVVESIGVFTYKDNTIAHLKDRPMYLLGYIANQSRVYLIDKELNVAHFLESRGMLEEALEIATDADYKFDLAVQLGKLEVAKAIAIEAQSESKWKQLGELAMSTGKLEMAEECLLQAKDLSGLLLLYSSLGDAEGIEKLASLAKEHGKNNVAFLCLFMLDKVEDCIQLLVDSNRIREAALLARSYLPSKVPEIVAIWRDDLSKINPKATESLADPSEYPNLFEDWQVALTVEKSVASQRLFSMRNLKMWLRKMENLINRHCVIHTSKVLPGLKENHPVSQSEKVEFDFEHKRMSKEEIRELIFQEILEYHPQLLSSYINGTERTTFLYPSAIDQFKKQFSHLEESGGNGPSVPTDRKHASLPRTTMVHSNPIPAKEQPLAVSSRVRPVSDDSCKNPWEKASGPGNVTRTSLTPQGLQAQAGSVRVNGPVMDSRYSAHQQIPQAYGYRQMPARLDSTNSSQAIGGYTLQSQKETLFEELLESNILLF

SEQ ID NO: 78215 - protein, 738 aa, Zea mays
  Coding DNA Sequence Number=SeqID_36436
  Homolog annotation: Hit_ID=Q5VQ77; Match level="QueryCoverage=26%, HitCoverage=60%, E-value=2e-88, Identity=85%"; Hit description =Coatomer protein complex, beta prime subunit-like
  Pfam annotation: Domain name=Coatomer_WDAD; Domain location=82-454; Score=63.1; E_value=1.6e-19; Accession=PF04053.4; Description =Coatomer WD associated region
  Subcellular localization annotation: CTP_CleavageSite=74; ConfidenceScore=5.61e-01
MAAAPSLLDLSPPTNRAMSATNRPPATPLPPLPSMAAAPPQIALHFTARASTPPLYSLSRHLGRGCTSWSGLPLATLREKLPRFLQKFASSLTPSAHGSVASRSLEMAGEEERKRVLLSYAVPTVSSRNTTASSTTGSGSRTGHRRRRSMWARSVEEEDCRPNHVYIWFVVVFTSRVYTTILQDLGTDFLINRSDGKEGGNRGGPDTISMEESSFGRRGEEDGSAYVNLHCKNYFNFTKNPEEIPWDEAGAEYVVESIGVFTYKDNTIAHLKDRPMYLLGYIANQSRVYLIDKELNVAHFLESRGMLEEALEIATDADYKFDLAVQLGKLEVAKAIAIEAQSESKWKQLGELAMSTGKLEMAEECLLQAKDLSGLLLLYSSLGDAEGIEKLASLAKEHGKNNVAFLCLFMLDKVEDCIQLLVDSNRIREAALLARSYLPSKVPEIVAIWRDDLSKINPKATESLADPSEYPNLFEDWQVALTVEKSVASQRLFSMRNLKMWLRKMENLINRHCVIHTSKVLPGLKENHPVSQSEKVEFDFEHKRMSKEEIRELIFQEILEYHPQLLSSYINGTERTTFLYPSAIDQFKKQFSHLEESGGNGPSVPTDRKHASLPRTTMVHSNPIPAKEQPLAVSSRVRPVSDDSCKNPWEKASGPGNVTRTSLTPQGLQAQAGSVRVNGPVMDSRYSAHQQIPQAYGYRQMPARLDSTNSSQAIGGYTLQSQKETLFEELLESNILLF

SEQ ID NO: 78216 - protein, 210 aa, Zea mays
  Coding DNA Sequence Number=SeqID_36437
  Subcellular localization annotation: CTP_CleavageSite=7; ConfidenceScore=5.39e-01
MGFASIPAMTEPPKSLGPPTVVLVQRTSDNPVGAPDHLTSSVSEFLTFPRAFYPSRRHYKSSEMQKCGSSYNNLLLLKNSGGGGSQFDHDVLAAGDREEHGGCNRGVHRCNGARIILLRVPRLLPHGNKIGRGAIEVTGASTATPLQSDEGGGDEDGNVMGKLAAEEIVGVYKLERAATGNSTREAAQVPAEVRFESDPLRPWFCRLQIS

SEQ ID NO: 78217 - protein, 114 aa, Zea mays
  Coding DNA Sequence Number=SeqID_36438
MAGGIELAGAKERWLAGEGFELGIKVNIPDLWLKTTPWGSLLRSGHTSGPSSARGWTDRMTRKRSSQRRRRTPKTPRRAATARATTVARAAATAVVGAVAVTATSVAMCHRLEY

SEQ ID NO: 78218 - protein, 42 aa, Zea mays
  Coding DNA Sequence Number=SeqID_36439
MAGGIELVGAKERGLAGEEIWSQEIWSVSLPKPEANPRFCRV

SEQ ID NO: 78219 - protein, 49 aa, Zea mays
  Coding DNA Sequence Number=SeqID_36440
MAGGIELAEAKERWLAGEGFELGIKVNIPDLWLKFYESKIPQKNVKCNI

SEQ ID NO: 78220 - protein, 565 aa, Zea mays
  Coding DNA Sequence Number=SeqID_36441
  Homolog annotation: Hit_ID=Q6QP51; Match level="QueryCoverage=8%, HitCoverage=22%, E-value=8e-13, Identity=73%"; Hit description =Putative growth-regulating factor 1
MNKHRHSKVPLQMELRFHLHRYEQPPTLEGLRSNRTPTNGSLMLAPAAATTTLRSRRPNSSSDDLRADAAVTRPSPVSPPKGRGHAEGRRVGGQSVGGADYLVGGETYSGCLGGRWHRKQRRSRSGRRARHAAAASATNGERPSPRSLREGAGRCPRGDRPQLGALPSPALMMNILEAEGGAEAAARLASPHPGTGAGADRVFSNTLQGPPPTTRGWVPRVMQAGPAWRPRPTRHVTGAPVTTCEKLHRHSRQYRAFSTAEPVPRLEATLRMTRQCQPSTSVTGQSAAGEGATVDTARNGPAVMAVAGGRRQQSSRQEAHVPSWDSERALSHGVKTTRPCSVPRTARACTTAAPRTTRLVALTLRQDRRHLWQAKQATLHLRHNDRVKKGTGKGDTPKGILLREGSGPRAPLLIRGSKAGPSEGFNSRLRALGLRAHYWSEVRRLATRKDLTAASGHSGSAPTTDQGGSGAALANPAPAKPLTASTYQPKNLGLDYPPRLRPDECPSGQGVTLHKIVTAIGGGVSVAKAQRLWKAVVGPSILLHGPESLAQVEGVAPGLEKVLLV

SEQ ID NO: 78221 - protein, 525 aa, Zea mays
  Coding DNA Sequence Number=SeqID_36442
  Homolog annotation: Hit_ID=Q6QP51; Match level="QueryCoverage=9%, HitCoverage=22%, E-value=7e-13, Identity=73%"; Hit description =Putative growth-regulating factor 1
MNKHRHSKVPLQMELRFHLHRYEQPPTLEGLRSNRTPTNGSLMLAPAAATTTLRSRRPNSSSDDLRADAAVTRPSPVSPPKGRGHAEGRRVGGQSVGGADYLVGGETYSGCLGGRWHRKQRRSRSGRRARHAAAASATNGERPSPRSLREGAGRCPRGDRPQLGALPSPALMMNILEAEGGAEAAARLASPHPGTGAGADRVFSNTLQGPPPTTRGWVPRVMQAGPAWRPRPTRHVTGAPVTTCEKLHRHSRQYRAFSTAEPVPRLEATLRMTRQCQPSTSVTGQSAAGEGATVDTARNGPAVMAVAGGRRQQSSRQEAHVPSWDSERALSHGVKTTRPCSVPRTARACTTAAPRTTRLVALTLRQDRRHLWQAKQATLHLRHNDRVKKGTGKGDTPKGILLREGSGPRAPLLIRGSKAGPSEGFNSRLRALGLRAHYWSEVRRLATRKDLTAASGHSGSAPTTDQGFVGWPPKGSDSRLRARRARDDPGGSGAALANPAPAKPLTASTYQPKNLGLDYATQATA

SEQ ID NO: 78222 - protein, 315 aa, Zea mays
  Coding DNA Sequence Number=SeqID_36443
  Subcellular localization annotation: CTP_CleavageSite=41; ConfidenceScore=5.59e-01
MSSYSLHASHRSTFRAPGWRTLTSLSSCCHWRNATSRKLVPFSHRSASRIFIRQPGRIPSQVVTQDGDHQSQGGEKQAGLRLLPLPQLQGCSSSVLGRGVHRVGAGLRAGSGPLLPSVIGGKGVRRSWRWQLPRVWLSGLSGFGAASGATSHRGSRNRFLRRRDSRRHPRTDLQLYGLLHVLAPWAGTRGEGLVTAASALRSSLLLFGRLERRVVVAAAGASISEPFVGVLLLRRPSNVGGCSYLWRWNRSSICNGTFECRNPRPLFDEPEPKAAVSVWTEAELARKKTSSAGAWPGRPLAGPAPESSCRGHEPG

SEQ ID NO: 78223 - protein, 120 aa, Zea mays
  Coding DNA Sequence Number=SeqID_36444
MDKGNTVLRWGPWRKSLSELHTGHRCIIHMSLRPRSFPNGTVAAEEERGGGAYRWRDCSGEVAEGVGEVLRVTAMCGSQSGMAGVGRSKCAGGEARRGRGVQPAHGAIVQSNGSESFTGC

SEQ ID NO: 78224 - protein, 284 aa, Zea mays
  Coding DNA Sequence Number=SeqID_36445
  Subcellular localization annotation: CTP_CleavageSite=55; ConfidenceScore=5.66e-01
MNDHTHQNSGRMNTHTCSTLVGTPAFAQPARVLASASGQVRRTPSPSAVLARTFKASPGRASPHTVLTLTGQTPLLSSIELFLRPPPLPKPQPSRPARSSRVQVAPGLAFNRWGCGEILDGSLGSLILVFLVDSSLLGDEHSFPNGTVAAEEERGGGAYRRRDCSGALAGELVGSEESGLTRARLVNQMGQGASSEIKEDMCARNLRIAHWIARSTRVGGRLKSGEDDLGSTVRSYRVRALGKLHGSLAKLTERPTQLGRDWSGLATVAEAWAVVAGGGKARRS

SEQ ID NO: 78225 - protein, 91 aa, Zea mays
  Coding DNA Sequence Number=SeqID_36446
MGRARAGWANAGVPTKVEHVCAFILPEFWRVWSFIRAYSRLVNLMLHAQFGLHEMMVLGLALRKALSDTGVSQPSPLKESRREIQVGVLPG

SEQ ID NO: 78226 - protein, 84 aa, Zea mays
  Coding DNA Sequence Number=SeqID_36447
MTGKKTVHSWRRTTVTLSVEKDALKNGHSGCAKCCIRTDGSYCSALSIVAYLGHRIAWDASLNVPYLGWMVYEKRHVVELVKIL

SEQ ID NO: 78227 - protein, 107 aa, Zea mays
  Coding DNA Sequence Number=SeqID_36448
MTGKKTTASSDGGTPKKAKVVVKDEEEAGLEDEEEATVTLSMEKDALKNGHSGCAKCCIRTDGSYCSALSIVAYPGHRIAWDASLNVPYLGWMVYEKRHVVELVKIL

SEQ ID NO: 78228 - protein, 65 aa, Zea mays
  Coding DNA Sequence Number=SeqID_36449
MTGKKTTASSDGGTPKKAKVVVEDEEEAGLEDEEEVTVTLSVEKDTLKNGHSGCAKCCIRTDESH

SEQ ID NO: 78229 - protein, 77 aa, Zea mays
  Coding DNA Sequence Number=SeqID_36450
MTGKKTTASSDGGTPKKAKVVVEDEEEAGLEDEEEATVTLSMEKDALKNEHSGCAKCCIRTDGSYCSTLSIVAYPGH

SEQ ID NO: 78230 - protein, 65 aa, Zea mays
  Coding DNA Sequence Number=SeqID_36451
MTGKKTMASSDGGTPKKAKVVVEDEEEAGLQDEEEATVTLSVEKDALKNGHSGCAKCCIRTVESH

SEQ ID NO: 78231 - protein, 111 aa, Zea mays
  Coding DNA Sequence Number=SeqID_36452
  Subcellular localization annotation: CTP_CleavageSite=29; ConfidenceScore=5.05e-01
MPINSAMNPDETPTTSPLQSHLPISPELVAATFSPFSVSGKWKFSALHGRTVLNYMSIHDYRWLYLENEEEIEVEEARTSPPPPKEPQAGNCFYFDICGAEPDSPITQGKP

SEQ ID NO: 78232 - protein, 97 aa, Zea mays
  Coding DNA Sequence Number=SeqID_36453
MAPLSSQAPHPANRASNHPLELPNLGFPPNQPRTPSENEEEIEVEEARTSPPPPEEPQAGNCFYFDICGAEPDSPITQGKPRCICHLLAILKSFSLT

SEQ ID NO: 78233 - protein, 120 aa, Zea mays
  Coding DNA Sequence Number=SeqID_36454
MKETSPWLARLRSAHTLCPFVSVFWCIPDAPRPRQLDLDPLDRRERVRLSVVPAATVDRAKNEEEIEVEEARTTPPPEEPQAGNCFYFDIYGAEPDSPITQGKPRCICHLLVILKSFSLT

SEQ ID NO: 78234 - protein, 324 aa, Zea mays
  Coding DNA Sequence Number=SeqID_36455
  Gene Ontology: Mol. function=protein heterodimerization activity; Cellular component=microtubule; Biological process=cell division
  Homolog annotation: Hit_ID=Q337H9; Match level="QueryCoverage=69%, HitCoverage=24%, E-value=1e-100, Identity=77%"; Hit description =Katanin p80 WD40-containing subunit B1, putative, expressed
  Pfam annotation: Domain name=WD40; Domain location=114-152; Score =40.8; E_value=4.6e-09; Accession=PF00400.22; Description=WD domain, G-beta repeat
  Pfam annotation: Domain name=WD40; Domain location=156-194; Score =51.1; E_value=3.8e-12; Accession=PF00400.22; Description=WD domain, G-beta repeat
  Pfam annotation: Domain name=WD40; Domain location=19-58; Score=11.9; E_value=1.5; Accession=PF00400.22; Description=WD domain, G-beta repeat
  Pfam annotation: Domain name=WD40; Domain location=198-236; Score =45.2; E_value=2.2e-10; Accession=PF00400.22; Description=WD domain, G-beta repeat
  Pfam annotation: Domain name=WD40; Domain location=62-100; Score =19.5; E_value=0.012; Accession=PF00400.22; Description=WD domain, G -beta repeat
  Pfam module annotation: Pfam domain module=WD40::WD40::WD40::WD40::WD4 0; Domain location=114-152::156-194::19-58::198-236::62-100
MRRDRQILKDVIEDFAGGVGASSEFVMHTLNVNCAKFGRRASRILITGGEDLKVNLWAIGKPGALLSLSGFISPVESVSFDSSEVTIGAGAASGTIKIWNIEEAKVSIDNLHKCVVVRTFTGHRSSCASLDFHPFGEFLATGSSNTNMKIWNTRQKRCIHTYKGHTQRINVLKFTHDGRWIVSGGADNSVKVWDLTAGKLMHDFCLHEGPVNCLDVHPYEFLLATGSVDKTVKFWDLGTFELISSSGPELMIGFSDIMERLHKDGILSRASKDGYTVNQILWRGYIKMVYYQGQAKMVIQLIRPCTVSAAKRRIRGYSIRRSKS

SEQ ID NO: 78235 - protein, 127 aa, Zea mays
  Coding DNA Sequence Number=SeqID_36456
  Homolog annotation: Hit_ID=Q337H9; Match level="QueryCoverage=42%, HitCoverage=6%, E-value=2e-19, Identity=78%"; Hit description =Katanin p80 WD40-containing subunit B1, putative, expressed
  Pfam annotation: Domain name=WD40; Domain location=1-36; Score=20.2; E_value=0.0076; Accession=PF00400.22; Description=WD domain, G-beta repeat
MHDFCLHEGPVNCLVVHPYEFLLATGSVDKTVKFWDLETFESIGSAGHENNREYFELINQLLIVGKCPQLVVNDWFFRYYGEILWRGYIKMVYYQGQAKMVIQLIRPCTVSASKRRIRGYSVRRSKS

SEQ ID NO: 78236 - protein, 393 aa, Zea mays
  Coding DNA Sequence Number=SeqID_36457
  Homolog annotation: Hit_ID=Q6YT74; Match level="QueryCoverage=12%, HitCoverage=17%, E-value=1e-15, Identity=80%"; Hit description =Putative glycine-rich protein
  Pfam annotation: Domain name=Copine; Domain location=119-245; Score= -43.3; E_value=0.0026; Accession=PF07002.6; Description=Copine
MGALPSTELALKLVDEAYTMMSDPEKREGYDYTCRFVRSGHIGPSTVSATKRRIRGYSVQRSKVLASTIFTVLIGVVSSYVLHGGQDILAPVCACFDAESMSVSLLSTVLFGVGSTADSPPNPWERSRAEGASGPAPFKPPSAGSTSDVVEASGTAKPDENVTVTESLHRSYHDGLEVRIECLSHHLKKVVLRGPTSFATLIYAAIFVVQNSNCHYHVLMIVAGGHVTHVWELGDFITSSEAHPGGFLFTKFASSSQTLFDLFPDSFGGRMKPYLQIGSSSWKQLARQVDLSARQVLGQLRHQLVIELPEACRRAAAAWRLQCQGRWCSGMTATIKLMQNEYFFRYRDDRNAAEIFRANGDINGLKSHCNSQHQCIPIQMLLNGGDVISCVMA

SEQ ID NO: 78237 - protein, 126 aa, Zea mays
  Coding DNA Sequence Number=SeqID_36458
  Subcellular localization annotation: CTP_CleavageSite=71; ConfidenceScore=5.06e-01
MGMEREGYAGGARIGLWPCGSGAAVGGRPRGSRRTRGRAMPGGPRLTASGWRTESGGGRSHHVRGGRSLVAASRVAGCRLGQRLVLDVGYVGLANPPKETTRKLSVGGYDEEDGADACTDGPDIPW

SEQ ID NO: 78238 - protein, 40 aa, Zea mays
  Coding DNA Sequence Number=SeqID_36459
MERPGGLANPPKQTTRKLSVGGYDEEDGADAYTDGPDIPW

SEQ ID NO: 78239 - protein, 116 aa, Zea mays
  Coding DNA Sequence Number=SeqID_36460
MENRPVIRGRAKTKLTHLVSKLLGLTPYRRGIDILNRGRQFCNIMSFDIFVSSLKFAPFWRNEADVPMDRRPSLSKRLQERGLANPPKETTRKLSVGGYDEEDGADAYTDGPDIPW

SEQ ID NO: 78240 - protein, 244 aa, Zea mays
  Coding DNA Sequence Number=SeqID_36461
  Homolog annotation: Hit_ID=Q6GQN4; Match level="QueryCoverage=44%, HitCoverage=96%, E-value=8e-09, Identity=34%"; Hit description =Protein FAM32A-like
  Pfam annotation: Domain name=DUF1754; Domain location=136-244; Score =141.7; E_value=2e-39; Accession=PF08555.1; Description=Eukaryotic family of unknown function (DUF17
MTWNSSSRTTALCECSTVRRPVADFLEREEEGIPHGRRRREQMGEGRDIGVPVEPNPTAGTTSLATAAASQMRRLNGECSAQRPKTAWNRSSDWDTNTDTAWNRSSDSDTDTAWNRSSDSDTDTLNDVIPFALMLEYQSVVGGRLQLKGKALNVKDGGVKKKKKYQREESSQTEFDKNGDERNPHSDYNYLTPAERSYMEQKQKIDMKKMAKVANKSYKDRMQDFNQYLANLSEHYDISKVGPG

SEQ ID NO: 78241 - protein, 220 aa, Zea mays
  Coding DNA Sequence Number=SeqID_36462
  Homolog annotation: Hit_ID=Q01DW1; Match level="QueryCoverage=29%, HitCoverage=54%, E-value=4e-07, Identity=38%"; Hit description=[S] KOG3410 Conserved alpha-helical protein
  Pfam annotation: Domain name=DUF1754; Domain location=122-220; Score =112.0; E_value=1.7e-30; Accession=PF08555.1; Description=Eukaryotic family of unknown function (DUF17
MTWNSSSRTTALCECSTVRRPVADFLEREEEGIPHGRRRREQMGEGRDIGEPVEPNPTAGTTSLATAAASQMRRLNSECSAQRPKTAWNRSSDSDTNTDTAWNRSSDSDTDTLNDVIPFALLKGKALDVKDGGVKKKKKKYQREESSQTESDKNGDEKNPHSDYDHLTRAERRYMEQKQKIDMKKMAKVANKSYKDRMQDFNQYLANLSENYDIPKVGPG

SEQ ID NO: 78242 - protein, 220 aa, Zea mays
  Coding DNA Sequence Number=SeqID_36463
  Homolog annotation: Hit_ID=Q01DW1; Match level="QueryCoverage=29%, HitCoverage=54%, E-value=4e-07, Identity=38%"; Hit description=[S] KOG3410 Conserved alpha-helical protein
  Pfam annotation: Domain name=DUF1754; Domain location=122-220; Score =112.0; E_value=1.7e-30; Accession=PF08555.1; Description=Eukaryotic family of unknown function (DUF17
MTWNSSSRTTALCECSTVRRPVADFLEREEEGIPHGRRRREQMGEGRDIGVPVEPNPTAGTTSLATAAASQMRRLNGECSAQRPKTAWNRSSDSDTNTDTAWNRSSDSDTDTLNDVIPFALLKGKALDVKDGGVKKKKKKYQREESSQTESDKNGDEKNPHSDYDHLTRAERRYMEQKQKIDMKKMAKVANKSYKDRMQDFNQYLANLSENYDIPKVGPG

SEQ ID NO: 78243 - protein, 85 aa, Zea mays
  Coding DNA Sequence Number=SeqID_36464
  Gene Ontology: Mol. function=protein phosphatase type 2C activity
MASGHCCRSTSTHLRCRDDATILDIIVVERARYGCDAQNNPRVVDIGDDHEVPMFDDEQRGAAALDHVQAAAAPELAVHSGAWAM

SEQ ID NO: 78244 - protein, 85 aa, Zea mays
  Coding DNA Sequence Number=SeqID_36465
  Gene Ontology: Mol. function=protein phosphatase type 2C activity
MASGHCCRSTSTHLRCRDDATILDIIVVERARYGCDAQNNPRVVDIGDDHEVPMFDDGQRGAAALDHVQAAAAPELAVHSGAWAM

SEQ ID NO: 78245 - protein, 85 aa, Zea mays
  Coding DNA Sequence Number=SeqID_36466
MASGHCCRSTSAHLRCRDDATILDIIVVERARYGCDAQNNPRVVDIGDDHEVPMFDDGQRGAAALDHVQAAAAPELAIHSGAWAM

SEQ ID NO: 78246 - protein, 85 aa, Zea mays
  Coding DNA Sequence Number=SeqID_36467
MASGHCCRSTSAHLRCRDDATILDIIVVERARYGCDAQNNPRVVDIGDDHEVPMFDDGQRGAAALDHVQAAAAPELAVHSGAWAM

SEQ ID NO: 78247 - protein, 85 aa, Zea mays
  Coding DNA Sequence Number=SeqID_36468
  Gene Ontology: Mol. function=protein phosphatase type 2C activity
MASGHCCRSTSAHLRCRDDATILDIIVVERARYGCDAQNNSRVVDIGDDHEVPMFDDGERGAAALDHVQAAAAPELAVHSGAWAM

SEQ ID NO: 78248 - protein, 85 aa, Zea mays; identical to SEQ ID NO: 78246
  Coding DNA Sequence Number=SeqID_36469
  Gene Ontology: Mol. function=protein phosphatase type 2C activity

SEQ ID NO: 78249 - protein, 85 aa, Zea mays
  Coding DNA Sequence Number=SeqID_36470
  Gene Ontology: Mol. function=protein phosphatase type 2C activity
MASGHCCRSTSAHLRCLDDATILDIIVVERARYGCGAQNNPRVVDIGDDHEVPMFDDGQRGAAALDRVQAAAASELAVHSGAWAM

SEQ ID NO: 78250 - protein, 85 aa, Zea mays
  Coding DNA Sequence Number=SeqID_36471
  Gene Ontology: Mol. function=protein phosphatase type 2C activity
MASDHCCRSTSAHLRCRDDATILDIIVVERARYGCGAQNNPRVVDIGDDHEVPMFDDGQRGAAALDRVQAAAASELAVHSGAWAM

SEQ ID NO: 78251 - protein, 85 aa, Zea mays
  Coding DNA Sequence Number=SeqID_36472
  Gene Ontology: Mol. function=protein phosphatase type 2C activity
MASGHCCRTTSAHLRCRDDATILDIIVVERARYGCGAQNNPRVVDIGDDHEVPMFDDGQRGAATLDRVQAVAAPELAVHSGAWAM

SEQ ID NO: 78252 - protein, 85 aa, Zea mays; identical to SEQ ID NO: 78246
  Coding DNA Sequence Number=SeqID_36473
  Gene Ontology: Mol. function=protein phosphatase type 2C activity

SEQ ID NO: 78253 - protein, 82 aa, Zea mays
  Coding DNA Sequence Number=SeqID_36474
  Gene Ontology: Mol. function=protein phosphatase type 2C activity
MASGHCCRSTSAHLRCRDDATILDIIVVERARYGCDAQNNPRVVDIGDDHEVPKFDDGQRGAAALDHVQAAAAPELAVHSGA

SEQ ID NO: 78254 - protein, 260 aa, Zea mays
  Coding DNA Sequence Number=SeqID_36475
  Homolog annotation: Hit_ID=Q8LD08; Match level="QueryCoverage=22%, HitCoverage=15%, E-value=7e-09, Identity=49%"; Hit description =Protein phosphatase-like
MASGHCCRSTSAHLRCRDDTTILDIIVVERARYGCDAQNNPRVVDIGDDHEVPMFDDGQRGAAALDHVQAAAAPELAVQSGAWAHVGLLPEVELAVAKFLLVVGERRQRERLVLVVFVRGRGNEKDRQLGMGMGFAVRTGNEKDRQLGMGMGFAVRTEWEWQNTEWGSLPLTVLIGSRDCNDEEAKARARVEELNTAIDNLQMPSRTRAHDSAGTSRGQDDTPNPSPVPPTLAEAIAASVTVTADNTRFLREMAGQQLQQ

SEQ ID NO: 78255 - protein, 156 aa, Zea mays
  Coding DNA Sequence Number=SeqID_36476
  Subcellular localization annotation: CTP_CleavageSite=8; ConfidenceScore=5.33e-01
SAQGARLPSSHGAQACSSSRPARARWPLPLPLLPHARCISQLGLAIAQQFPGSMAPVKLEQSSSQPWRPENPAAELPQPAVFSPSASLHSLPLDAANQRGARRRPFSSLCVLPQEQELFSPPAEPPSSALPAPWLKPELTPRRLDPWNAVALPSLP

SEQ ID NO: 78256 - protein, 174 aa, Zea mays
  Coding DNA Sequence Number=SeqID_36477
MERLTIGAEGRGLPTGFPWKKWGHAGEEGLGAMAAVLGHGREMAGRGAAAGHYGREGRATAFQGSKRRGVSSGLSHGAGRALLGGSAGGEKSSCSCGKAHREEKGRRRAPRWFAASRGSEWREALGEKTAGWGSSAAGFSGRHGWELDCSSFTGAMDPGNCCAMARPSWEMQRA

SEQ ID NO: 78257 - protein, 226 aa, Zea mays
  Coding DNA Sequence Number=SeqID_36478
MHNIDQSLNRLIHKIPSEQPGRIEASHMGCPQGLAFRRTDNAQSAASTTSCDNTQKIVGGSSWNITHVGKINSKDSGDFSHHGFRLRRGWGCVASTRATRRDVGSGERTGGLLQHAACCAFCRAPTTRRFGGAAGKTWLRGAALPGEGAEQRRCAGRRPWRDSPLELRGGGFLLVFHGRNGDMLERKGWAPWLLYSAMGGRWQGGAPRLRELGPEKCHARKEQRGP

SEQ ID NO: 78258 - protein, 85 aa, Zea mays
  Coding DNA Sequence Number=SeqID_36479
MVLNQIKPEKKYVKLQEESNGKRCISTKRGGTEDNPGMVERSRGRTTQRSPPSCPRTTSMSGQGVASKAWRGDGLSQPHGEGTFP

SEQ ID NO: 78259 - protein, 168 aa, Zea mays
  Coding DNA Sequence Number=SeqID_36480
  Gene Ontology: Mol. function=nucleotide binding; Cellular component =intracellular; Biological process=small GTPase mediated signal transduction
  Homolog annotation: Hit_ID=Q2QLR7; Match level="QueryCoverage=38%, HitCoverage=26%, E-value=8e-21, Identity=73%"; Hit description=Ras -related protein RHN1, putative, expressed
  Pfam annotation: Domain name=Ras; Domain location=46-138; Score= -44.7; E_value=6.3e-06; Accession=PF00071.12; Description=Ras family
LLEVAGNWRLVKPQTGATKVEEIHSKNHPVSLLVIEHSPFLAGLSVILNENLCGTVEQLKLSRECLACSFSVTSLQGNSNTIVALAGNKADLLDTRQVSADEAKVYAQENGLFFMETSAKTAINVNDVFYEIGGIQWEVVHIDQARWHRGQPENGGKKQGKDNATKPP

SEQ ID NO: 78260 - protein, 72 aa, Zea mays
  Coding DNA Sequence Number=SeqID_36481
MSYSRASSVQLLGKPCVLQAAHNMEWFYILRFLLLAGGIQWEAVQIDQARWHEGQPENGGKKQGKDNATKPP

SEQ ID NO: 78261 - protein, 110 aa, Zea mays
  Coding DNA Sequence Number=SeqID_36482
MVHRVTRSTCSGGFTNSSERDYTIPVGLVLGSCSGKLHGLLGKLSEGSDQVEVARKGLAMVVALEWLWQVARRSPELRASSEGLGVVRGRQRGRWPCPRVGFIAVREHGY

SEQ ID NO: 78262 - protein, 48 aa, Zea mays
  Coding DNA Sequence Number=SeqID_36483
MARVTRSTCSGGFTNSSERDCTIPVGLVLGSSSGKLQGLLGKLSEGSD

SEQ ID NO: 78263 - protein, 377 aa, Zea mays
  Coding DNA Sequence Number=SeqID_36484
MCAAAGRTSPPSLYGGRQQAIKAREPEVWQQVALTVSPAEATTSAVGSLTSGGGHVSTNDSGHLRTSIVLANGGRTSAHEEVFAPVLTTGVRTRPSKNVAPTRTAYDVLYDLPVRLVPQEKPWVWLARAWRDRRPCGGRAATLRPNGRRRHRRRHQSRSGQGARHAAADSATVDERPSPSNTEGRSGCCPRGGGSQLGAPSSPARMMNILEAEGRREAAARFASPHHKAAVKEANRHARGVQPSHGCTPPQLHTTGGPTQGPRPTRHITGAPVTVCKETAPPPAPTPRLLETITDSKKAAEVIGGSCSGQTTAVGFNQGARGAPRGDVEAMRARNREMVQWFTRSTCSGGFTNSSERDCTVPVGLVLGSSSGKLHGL

SEQ ID NO: 78264 - protein, 44 aa, Zea mays
  Coding DNA Sequence Number=SeqID_36485
NEQSEVPKCVVGDLPEQQPSEGKGLRLFPEYLSVRTYLRSDNPG

SEQ ID NO: 78265 - protein, 277 aa, Zea mays
  Coding DNA Sequence Number=SeqID_36486
  Homolog annotation: Hit_ID=UPI00004C1730; Match level="QueryCoverage =12%, HitCoverage=6%, E-value=4e-09, Identity=82%"; Hit description =UPI00004C1730 related cluster
  Subcellular localization annotation: CTP_CleavageSite=33; ConfidenceScore=5.16e-01
MNTEFIKYVKWAGAFVNPKDITRYSNNPYRIVNAVFVAYRRRRATPPRTAPLRCPCPDLAPTKRFPAPSPTFPATQVAPGTRRAPAPLVSGELSAAGWAPPPQLAGKETGASHPIPAVYIRSDGTDSNSPNPTSTVHPRSNGPEPFPPRPASLPTGPRLPVARALAARPAPPVSRSRRRAPERPPRDLILAVDLRSNGYNEQSVFPEAVAEEVPDQQFGEGKGLRLFPEYLSVRTAVVPSMGSRHSACSAEAECREGSETGISAVLTVKSSLGILFD

SEQ ID NO: 78266 - protein, 165 aa, Zea mays
  Coding DNA Sequence Number=SeqID_36487
MGSRHSACSAEAECREGSETGIKPCSRLRAALGSSLIRDTDGPRYNDYDMVLMARLRHTARKSVIPFLPSRLAEHPLHRTVSGQSSHLERLHHRLREEQERRRQHGEQQGSSSSPQQEVETVRPRSSVAQLEAPLVPPRDVPAVGGATGGDPGGDPDDDDSDHST

SEQ ID NO: 78267 - protein, 75 aa, Zea mays
  Coding DNA Sequence Number=SeqID_36488
MAGRYHQDQGGDGGASMEVVSTPNQELALTNCAYVSPADLRRFPNGLALVADAWVFTLRYPFVDGLVVPRLHSLF

SEQ ID NO: 78268 - protein, 78 aa, Zea mays
  Coding DNA Sequence Number=SeqID_36489
MEVVSTPNQELALTNCAYVCPADLRRFPNALADVPTRKKGRFRFHTTNVEVKVVLRWKIFSLGDYLFFYYGFFLVFYT

SEQ ID NO: 78269 - protein, 718 aa, Zea mays
  Coding DNA Sequence Number=SeqID_36490
  Gene Ontology: Mol. function=nucleoside-triphosphatase activity; Cellular component=endoplasmic reticulum; Biological process=ER to Golgi vesicle-mediated transport
  Homolog annotation: Hit_ID=Q40495; Match level="QueryCoverage=99%, HitCoverage=100%, E-value=0.0, Identity=72%"; Hit description=N -ethylmaleimide sensitive fusion protein
  Pfam annotation: Domain name=AAA; Domain location=244-443; Score =276.8; E_value=4.3e-80; Accession=PF00004.19; Description=ATPase family associated with various cellular activities (AAA)
  Pfam annotation: Domain name=AAA_2; Domain location=240-381; Score= -49.2; E_value=0.051; Accession=PF07724.4; Description=ATPase family associated with various
  Pfam annotation: Domain name=AAA_5; Domain location=244-386; Score= -4.7; E_value=0.004; Accession=PF07728.4; Description=ATPase family associated with various cel
  Pfam annotation: Domain name=CDC48_N; Domain location=13-86; Score= -7.9; E_value=0.013; Accession=PF02359.8; Description=Cell division protein 48 (CDC48), N-t
  Pfam module annotation: Pfam domain module=AAA::AAA_2::AAA_5::CDC48 _N; Domain location=244-443::240-381::244-386::13-86
MAGRYHQDQGGDGGASMEVVSTPNQELALTNCAYVSPADLRRFPNGLALVADAWVFTLRYPFVDGLRRQAKVSAGDSVTVSSFVPPDDFKLALLTLDLDYAKARANRNDELDAVVLAQQLRKRFLNQVMTSGQRVPFEFYGTNYVFTVNQALLEGQESSTPLDRGFLSSDTYIIFEAAPNSGIKVINQKEAASSKLFKHKEFNLEKLGIGGLSAEFTDIFRRAFASRVFPPHVVSKLGIKHVKGILLYGPPGTGKTLMARQIGKLLNGKDPKIVNGPEVLSKFVGETEKNVRDLFADAENEQRTRGDQSDLHVIIFDEIDAICKSRGSTRDGTGVHDSIVNQLLTKIDGVEALNNVLLIGMTNRKDLLDEALLRPGRLEVHIEINLPDENGRLQILQIHTNKMKENSFLSPDINLQELAARTKNYSGAELEGVVKSAVSFALNRQITMDDLTKPLDEESIKVTMDDFVNALHEITPAFGASTDDLERCRLRGIVDCGKAHKHIYQRAMLLVEQVKVYCFSGKTAMAASVGIDSDFAYVKIISAETMIGFSESSKCAQICKVFEDAYKSQFSMIILDDIERLLEYVAIGPRFSNLISQTLLVLLKRVPPKGKNLLVVGTTSEVGFLESVGMCDVFSVTYHVPKLKKEDAKKVLHHLDVFDDGDLDAAAEALDDMPIKKLYTLVEMAAQGPTGGSAEAIYAGEKIDINHFFSILSDIIRY

SEQ ID NO: 78270 - protein, 269 aa, Zea mays
  Coding DNA Sequence Number=SeqID_36491
  Homolog annotation: Hit_ID=Q1H8S8; Match level="QueryCoverage=97%, HitCoverage=43%, E-value=2e-10, Identity=24%"; Hit description=Cell surface flocculin
  Subcellular localization annotation: CTP_CleavageSite=52; ConfidenceScore=5.57e-01
MPTPTFNHSALPLKRRPRVQSLGITSKMPTPTFNHSALPLKRRPRVQSLGITSKMPTPTFNHSALPLKRRPRVQSLGITSKMPTPTFNHSALPLKRRPRVQSLGITSKMPTPTFNHSALPLKRRPRVQSLGITSKMPTPTFNHSALPLKRRPRVQSLGITSKMPTPTFNHSALPLKRRPRVQSLGITSKMPTPTFNHSALPLKRRPRVQSLGITSKMPTPTFNHLALPLKRRPRVQSLGITSKNADADLQSLGVVSKTLTRYSVARHYF

SEQ ID NO: 78271 - protein, 47 aa, Zea mays
  Coding DNA Sequence Number=SeqID_36492
MAGGIKLAGAKGSGWPERVSAGRKIWSQEIWSVSLPKPEANPRFCRV

SEQ ID NO: 78272 - protein, 49 aa, Zea mays
  Coding DNA Sequence Number=SeqID_36493
MAGGIELAGAKGRWLAGEGECGAKREIWSQEIWSVSLPKPEANPRFCRV

SEQ ID NO: 78273 - protein, 190 aa, Zea mays
  Coding DNA Sequence Number=SeqID_36494
MQYKESSSLISCEKQTIRIEFLNLASSRGEEKGGGAYRRRDCSGEVVEDEGEVAGITTGGPRDAREAISERNWAETHWIARSTRGGGRPKSGEVDLGPPVKSGRVRGLGKLHGLLAELAEALAGLEGGWSGLATAAEALAAMAGGIKLAGAKGKWLAGEGECGAKREIWSQEIWSVSLPKPEANPRFCRV

SEQ ID NO: 78274 - protein, 166 aa, Zea mays
  Coding DNA Sequence Number=SeqID_36495
MGWSGAGHDGRSSGGQWRGGMSSPGAKGKWLAGEGECGAKWGAPGKGLYRHGAVNGRSWTGECVRACTGKARCANGREPGVSATVEHVFPLPLPLFKRRLGANLREFGLGTGSCSVTMVPVSECLVPRSNCAKTMPNEFGLSSNFPRMCSREFGTTLIFGSPGFEF

SEQ ID NO: 78275 - protein, 290 aa, Zea mays
  Coding DNA Sequence Number=SeqID_36496
MGKGKRGRGSPRRAGDKRKRDPSPPSEDFGDSEYSEEEVSSGSKGSLALASPSMLSDDSNDSQGLATEVWMYIRSIERTGLEGSDESEVSSDEENSSGSSEERSGNDSDDEGSGSGDDNGDGDGGEGDGGSGGGGDDDDDSGGKGGSGDVGSGKAPLFVHMPDTAGVLETSSQRSSTFYAFRNSKPGDPNIKVVPNSLEHVLEKFELKPNSFGMVLAQLDLGTRHSDIGTLVTLQLPVPSLKPRDVHTQKTKLGQVNKSFTAILPKFAKICSQSALEQGQRQREHVFDRG

SEQ ID NO: 78276 - protein, 158 aa, Zea mays
  Coding DNA Sequence Number=SeqID_36497
MGKGKRGRGSPRRAGDKRKRDPSPPSEDFGDSEYSEEEVSSGSKGSLALASPSMLSDDSNDSQGLATEVWMYIRSIERTGLEGSDESEVSSDEENSSGSSEERSGNDSDDEGSGSGDDNGDGDGGEGDGGSGGGGDDDDDSGGKGGSGDVGSGKAPLV

SEQ ID NO: 78277 - protein, 407 aa, Zea mays
  Coding DNA Sequence Number=SeqID_36498
  Homolog annotation: Hit_ID=Q2QP84; Match level="QueryCoverage=43%, HitCoverage=18%, E-value=4e-60, Identity=70%"; Hit description =Vesicle tethering family protein, putative, expressed
  Pfam annotation: Domain name=Ank; Domain location=126-158; Score =22.4; E_value=0.0017; Accession=PF00023.20; Description=Ankyrin repeat
  Pfam annotation: Domain name=Ank; Domain location=93-125; Score=17.3; E_value=0.055; Accession=PF00023.20; Description=Ankyrin repeat
  Pfam annotation: Domain name=ECH; Domain location=2-74; Score=-66.9; E_value=0.028; Accession=PF00378.10; Description=Enoyl-CoA hydrataseisomerase family
  Pfam annotation: Domain name=Uso1_p115_C; Domain location=217-339; Score=131.6; E_value=2.1e-36; Accession=PF04871.4; Description=Uso1 p115 like vesicle tethering protein, C terminal region
  Pfam module annotation: Pfam domain module=Ank::Ank::ECH::Uso1_p115 _C; Domain location=126-158::93-125::2-74::217-339
MRRLRIRWTPLKLWGENAELGLPETSLAIIPGAGGTQRLPRIIGRSRAKELIFNGHRCGAAEAVTMGLANYCVPAGEAYQKALDIAFEITQKSKWLPLHTLAASGDLYLLNSLLKHNVDINALDKDGLPAIHKAILSKKAAIINYLLRNSANPFIQDKDLLARNAMLAEELLRTGGGTTTDTSQKPSSGRERVQSEALRQELEGAKRQIGALKSEKSQIEAEANNQRNFSVKLESDLKSLSEAYNSIEQANYRLDAEVKALRQGGSVPYPDVEAIKAQAKEEAEKESEAELNDLLVCLGQEQTKVEKLSTRLTELGEDVDTLLQGIGDDTAIPDDDDEDEDDEEFISALYNLLDGSSEEKPAAEKTTAGKKPKAEKRVPAGKSAGKEDGESKRGRKKGKKNINIKLL

SEQ ID NO: 78278 - protein, 201 aa, Zea mays
  Coding DNA Sequence Number=SeqID_36499
  Gene Ontology: Mol. function=protein transporter activity; Cellular component=cytoplasm; Biological process=intracellular protein transport
  Homolog annotation: Hit_ID=Q2QP84; Match level="QueryCoverage=84%, HitCoverage=18%, E-value=7e-59, Identity=70%"; Hit description =Vesicle tethering family protein, putative, expressed
  Pfam annotation: Domain name=Uso1_p115_C; Domain location=74-196; Score=131.6; E_value=2.1e-36; Accession=PF04871.4; Description=Uso1 p115 like vesicle tethering protein, C terminal region
MALKVLVLSLWLNLWDLLARNAMLAEELLRTGGGTTTDTSQKPSSGRERVQSEALRQELEGAKRQIGALKSEKSQIEAEANNQRNFSVKLESDLKSLSEAYNSIEQANYRLDAEVKALRQGGSVPYPDVEAIKAQAKEEAEKESEAELNDLLVCLGQEQTKVEKLSTRLTELGEDVDTLLQGIGDDTAIPDDDDEDEDDEE

SEQ ID NO: 78279 - protein, 241 aa, Zea mays
  Coding DNA Sequence Number=SeqID_36500
  Homolog annotation: Hit_ID=Q2QP84; Match level="QueryCoverage=30%, HitCoverage=7%, E-value=4e-23, Identity=76%"; Hit description =Vesicle tethering family protein, putative, expressed
  Pfam annotation: Domain name=Ank; Domain location=38-70; Score=22.4; E_value=0.0017; Accession=PF00023.20; Description=Ankyrin repeat
MEDNKSPKGRQKLFSNEEKILLNKRVPDLETATSFPQDGLPAIHKAILSKKAAIINYLLRNSANPFIQDKVLPYFYIPCSEELICNIEKDWLPSAPAIKRMDTGDPSNPSPLSSDPPIHSHSFHLRGGNGSKSARAESVAEFMGRNETIPSMKWFSDTDTGIYYNGICQDLLARNAMLAEELLRTGGGMTTDTSQKPSSGRERVQIEALRQELEGAKRQIGALKSEKSQIEAEANNQRNLS

SEQ ID NO: 78280 - protein, 183 aa, Zea mays
  Coding DNA Sequence Number=SeqID_36501
  Gene Ontology: Cellular component=cytoskeleton
  Homolog annotation: Hit_ID=Q10S45; Match level="QueryCoverage=63%, HitCoverage=26%, E-value=1e-42, Identity=74%"; Hit description =Ankyrin repeat protein, chloroplast, putative, expressed
  Pfam annotation: Domain name=Ank; Domain location=64-96; Score=15.8; E_value=0.16; Accession=PF00023.20; Description=Ankyrin repeat
  Pfam annotation: Domain name=Ank; Domain location=97-129; Score=22.4; E_value=0.0017; Accession=PF00023.20; Description=Ankyrin repeat
  Pfam module annotation: Pfam domain module=Ank::Ank; Domain location =64-96::97-129
MAPRVPCDDGGSQLPYGSRGTSREYVQDEIEDSKSLKGRQKLFSNEEKILLNKRVPDLETATSSKWLPLHTLAASGDLYLLNSLLKHNVDIDALDKDGLPAIHKAILSKKAAIINYLLRNSANPFIQDKRRDKLRDYITPFSLQKLLLDEATLYDSPHYWKFVSGPEPGQTQCRRQEWGLEKG

SEQ ID NO: 78281 - protein, 118 aa, Zea mays
  Coding DNA Sequence Number=SeqID_36502
  Gene Ontology: Cellular component=cytoskeleton
  Homolog annotation: Hit_ID=Q10S45; Match level="QueryCoverage=59%, HitCoverage=16%, E-value=3e-27, Identity=81%"; Hit description =Ankyrin repeat protein, chloroplast, putative, expressed
  Pfam annotation: Domain name=Ank; Domain location=28-60; Score=17.3; E_value=0.055; Accession=PF00023.20; Description=Ankyrin repeat
  Pfam annotation: Domain name=Ank; Domain location=61-93; Score=22.4; E_value=0.0017; Accession=PF00023.20; Description=Ankyrin repeat
  Pfam module annotation: Pfam domain module=Ank::Ank; Domain location =28-60::61-93
MGLANYCVPAGEAYQKALDIAFEITQKSKWLPLHTLAASGDLYLLNSLLKHNVDINALDKDGLPAIHKAILSKKAAIINYLLRNSANPFIQDKSLIIVMRCHALEFPSKPRRSTHPYP

SEQ ID NO: 78282 - protein, 126 aa, Zea mays
  Coding DNA Sequence Number=SeqID_36503
  Gene Ontology: Mol. function=isomerase activity; Cellular component =cytoskeleton; Biological process=metabolic process
  Homolog annotation: Hit_ID=Q10S45; Match level="QueryCoverage=56%, HitCoverage=16%, E-value=3e-27, Identity=81%"; Hit description =Ankyrin repeat protein, chloroplast, putative, expressed
  Pfam annotation: Domain name=Ank; Domain location=61-93; Score=17.3; E_value=0.055; Accession=PF00023.20; Description=Ankyrin repeat
  Pfam annotation: Domain name=Ank; Domain location=94-126; Score=22.4; E_value=0.0017; Accession=PF00023.20; Description=Ankyrin repeat
  Pfam module annotation: Pfam domain module=Ank::Ank; Domain location =61-93::94-126
AGGTQRLPRIIGRSRAKELIFNGHRCGAAEAVTMGLANYCVPAGEAYQKALDIAFEITQKSKWLPLHTLAASGDLYLLNSLLKHNVDINALDKDGLPAIHKAILSKKAAIINYLLRNSANPFIQDK

SEQ ID NO: 78283 - protein, 148 aa, Zea mays
  Coding DNA Sequence Number=SeqID_36504
MACAGISRVDDVEAARSAGSTRSEDHEQSREDASQKPPGAGSRRRMVPETCSPDRRCTSAVGTKGTKRQLSYEERRKRNWDDLEAGSKQPKIQTAKGSRACEDITMSTTTPAAPPHQAPLPSLAGPITQARARDLNFVMLLKNEGPEE

SEQ ID NO: 78284 - protein, 209 aa, Zea mays
  Coding DNA Sequence Number=SeqID_36505
MARAGISRVDDVEAAKSAGSARCTSAVGMKGTRRRLTYEERRKRNWDELDVGCQAPFIGPKKWRCRAATKRVTQSGDPNPVPAVHPPLHSFSPAGAAVTLGGWPTTSVATSGGAHAHLRRSSFSSTLPHPQASSIRWIFFGFCRLAPDLLSIHLDLASPLRKGNVVASFKPCVEHELGPTSTLDDTDTLGTIDLLGGIVREPHHPSSNP

SEQ ID NO: 78285 - protein, 250 aa, Zea mays
  Coding DNA Sequence Number=SeqID_36506
MARAGISRVDDVEAAKSAGSARCTSAVGMKGTRRRLTYEERRKRNWDELDVGCQAPFIGPKKWRCRAATKRVTQSGDPNPVPAVHPPLHSFSPAGAAVTLGGWPTTSVATSGGAHAHLRRSSFSSTLPHPQASSIRWIFFGFCRLAPDLLSIHLDLASPLRKGNVVASFKPCVEHELGPTSTLGLRGLPRLPLGAVILVGALPLACVGDFGDLGEIHAICIIYADDTDTLGTIDLLGGIVREPHHPSSNP

SEQ ID NO: 78286 - protein, 506 aa, Zea mays
  Coding DNA Sequence Number=SeqID_36507
  Gene Ontology: Mol. function=nucleoside-triphosphatase activity; Cellular component=membrane; Biological process=response to DNA damage stimulus
  Homolog annotation: Hit_ID=Q5D892; Match level="QueryCoverage=95%, HitCoverage=47%, E-value=1e-157, Identity=55%"; Hit description =Meiotic recombination protein MER3
  Pfam annotation: Domain name=DEAD; Domain location=30-221; Score =69.7; E_value=9.6e-18; Accession=PF00270.19; Description=DEADDEAH box helicase
  Pfam annotation: Domain name=Helicase_C; Domain location=285-370; Score=29.5; E_value=1.1e-05; Accession=PF00271.21; Description =Helicase conserved C-terminal domain
  Pfam annotation: Domain name=ResIII; Domain location=23-216; Score= -32.5; E_value=0.024; Accession=PF04851.6; Description=Type III restriction enzyme, res subunit
  Pfam module annotation: Pfam domain module=DEAD::Helicase_C::ResIII; Domain location=30-221::285-370::23-216
  Subcellular localization annotation: CTP_CleavageSite=48; ConfidenceScore=5.31e-01
MGSLADPYALRCVSDLPPPFRSMFRFRYFNSLQSECFHVCFFSDVNMVISAPTGSGKTVLFELCILRLLSRFLSPDWRFNLNKGTLKTIYIAPSKALVQEKLRDWNMKLGPLGINCLEMTGDGEFCNTKAIHDADLILTTPEKFDSMSRHGIKSGRLGFFCDIALVLIDEVHLLNDPRGAALEAVHTICIAISHSNKESDISLLNFSTVALSTPRRNQKIWRRNEASEVDNQRSLVMLQLKMTFFLRGGCRVLFMKYKWNMDYRYTDATFKGEVCTYFLFYEKRCNPVPFSVGFHNGGLCLKDRGLVEGLFLKGDLQVLCTTNTLAHGVNLPAHTVVIKSTQFFNKEKGLYVEYERSMVLQMCGRAGRPPFDDTGTIIIMTRKETVHLYENLLNGCEMVESQLLSCAVEHLNAEIVQLTVSDIILAVEWIKCSYLYIRIRKNPENYGVKRGTPQDLLEKQIQDICVDKIHELVEYGLIWTDEGAFVLQPLVTAMFLEALIPWHTYC

SEQ ID NO: 78287 - protein, 182 aa, Zea mays
  Coding DNA Sequence Number=SeqID_36508
  Gene Ontology: Mol. function=transferase activity, transferring hexosyl groups; Biological process=carbohydrate metabolic process
  Homolog annotation: Hit_ID=O23649; Match level="QueryCoverage=36%, HitCoverage=10%, E-value=2e-25, Identity=82%"; Hit description=UDP -glucose:sterol glucosyltransferase
  Pfam annotation: Domain name=Glyco_transf_28; Domain location=3-142; Score=53.2; E_value=8.8e-13; Accession=PF03033.10; Description =Glycosyltransferase family 28 N-terminal domain
MQIAMLIVGTRGDVQPFIAIGKCLQDYGHRVRLATHANFKDFVMTTGLEFYPLGGDPKILAGCIYFNSLQSECFHVCFFSDVNMVISAPTVSGKTVLFELRILRLLSRFLSPDWSMPFLENNKGLPVALWFVGPTFAVLMASSSRKGAIRDKYVFMFNTLLEEENKAWIQKLERQKGQELFE

SEQ ID NO: 78288 - protein, 229 aa, Zea mays
  Coding DNA Sequence Number=SeqID_36509
  Gene Ontology: Mol. function=transferase activity, transferring hexosyl groups; Cellular component=membrane; Biological process =carbohydrate metabolic process
  Homolog annotation: Hit_ID=Q8H5W0; Match level="QueryCoverage=85%, HitCoverage=35%, E-value=1e-77, Identity=77%"; Hit description =Putative UDP-glucose:sterol glucosyltransferase
  Pfam annotation: Domain name=Glyco_transf_28; Domain location=101 -229; Score=97.2; E_value=5e-26; Accession=PF03033.10; Description =Glycosyltransferase family 28 N-terminal domain
MSAAPALRTSVPRPKVDSGLLGADFEGGVMVCADRRLLAGFLLKMFSRMATLKDDGTVVVDIPTTIEAASLDLHSEDHQDVAFGGEPLDSSDLQDRPPMQIAMLIVGTRGDVQPFIAIGKRLQDYGHRVRLATHANFKDFVMTTGLEFYPLGGDPKILAGYMVKNKGFLPATPSEIPIQRKQIRDIIFSLLPACKDPDIDTGVSFSADAIIANPAAYGLPVNFRILSLM

SEQ ID NO: 78289 - protein, 665 aa, Zea mays
  Coding DNA Sequence Number=SeqID_36510
  Gene Ontology: Mol. function=identical protein binding
  Homolog annotation: Hit_ID=Q10CI8; Match level="QueryCoverage=74%, HitCoverage=92%, E-value=0.0, Identity=73%"; Hit description=Origin recognition complex subunit 5, putative, expressed
  Pfam annotation: Domain name=RNA_pol_L; Domain location=579-653; Score=69.4; E_value=1.2e-17; Accession=PF01193.14; Description=RNA polymerases L  13 to 16 kDa subunit
  Subcellular localization annotation: CTP_CleavageSite=39; ConfidenceScore=5.50e-01
MSHPITPRRATRSSAADPASPSGPRPKPTPRRQPVSTAAANAKQEEGEEHERSPVDALLEALPGRREQATDLLRLLAPAPALPLLLHGGAATGKTRALLLALRHVRPRPLRVAYAALRSLPSPRALFSSVLAQLSPPSSSSSSSRLRVPDKPSDFVAALRDALAGLSARGEAVYLVFDNLEVVRSWDKGGQLLALLLRLYDLLRLPQVVLVYVSSATPDAYYSMTGSVEPNHIYFPDYTVDEVRDILMRGHPNPKLYSSFLSVALKPLFRVTRRVDELVAALEPLFRRYCEPLGDLKAVPDESIKRRLFEHIQPHLAVAMNETFIVPTRVSVDECKDHSSRGKASSKRQFGSRDGLPTELEFHMSVSAKYLLLSAFLASRNPATLDAALFDSTGGSDNNRRKRKSSQASMNMKDTMAEEMLMKGPGTFPLERLLAIFQCITSVSEDDLGDVECSDSMMNGSGMTGLMSDVLLQLSTLCNSNFLSKSRSCPMEGSARYRSNIDEDLALKTIMGSNLSISQDGRASRDKANAICSIFFSVLTSDSPVSQSDNEVLPQRQAVSLLSSSALRVSYERDTKIVNAASFTVEREDHTVGNILRMQLHRDPNVLFAGYKLPHPLQYKIIVRIHTTSQSSPTQAYTQAINGLDKELEYLKQAFEQMHLYAMDQ

SEQ ID NO: 78290 - protein, 115 aa, Zea mays
  Coding DNA Sequence Number=SeqID_36511
  Gene Ontology: Mol. function=DNA-directed RNA polymerase activity; Cellular component=nucleus; Biological process=transcription
  Homolog annotation: Hit_ID=Q6ZA50; Match level="QueryCoverage=91%, HitCoverage=88%, E-value=3e-51, Identity=90%"; Hit description =Putative DNA-directed RNA polymerase II 13.6K chain
  Pfam annotation: Domain name=RNA_pol_L; Domain location=29-103; Score= 64.1; E_value=4.6e-16; Accession=PF01193.14; Description=RNA polymerases L  13 to 16 kDa subunit
MNAPDRYERFVVPEGTKKVSYERDTKIVNAASFTVEREDHTVGNILCMQLHRDPNVLFAGYKLPHPLQYKIIVRIHTTSQSSPTQAYTQAINDLDKELEYLKQAFEQMHLYAMDQ

SEQ ID NO: 78291 - protein, 74 aa, Zea mays
  Coding DNA Sequence Number=SeqID_36512
  Gene Ontology: Mol. function=DNA-directed RNA polymerase activity; Cellular component=nucleus; Biological process=transcription
  Homolog annotation: Hit_ID=Q6ZA50; Match level="QueryCoverage=86%, HitCoverage=88%, E-value=5e-23, Identity=59%"; Hit description =Putative DNA-directed RNA polymerase II 13.6K chain
MNAPDRYERFVVPEGTKKQLHRDPNVLFAGYKLPHPLQYKIIVRAYTQAINDLDKELEYLKQAFEQMHLYAMDQ

SEQ ID NO: 78292 - protein, 115 aa, Zea mays
  Coding DNA Sequence Number=SeqID_36513
  Gene Ontology: Mol. function=DNA-directed RNA polymerase activity; Cellular component=nucleus; Biological process=transcription
  Homolog annotation: Hit_ID=Q6ZA50; Match level="QueryCoverage=91%, HitCoverage=88%, E-value=4e-52, Identity=91%"; Hit description =Putative DNA-directed RNA polymerase II 13.6K chain
  Pfam annotation: Domain name=RNA_pol_L; Domain location=29-103; Score= 74.1; E_value=4.5e-19; Accession=PF01193.14; Description=RNA polymerases L  13 to 16 kDa subunit
MNAPDRYERFVVPEGTKKVSYERDTKIVNAASFTVEREDHTVGNILRMQLHRDPNVLFAGYKLPHPLQYKIIVRIHTTSQSSPTQAYTQAINDLDKELEYLKQAFEQMHLYAMDQ

SEQ ID NO: 78293 - protein, 72 aa, Zea mays
  Coding DNA Sequence Number=SeqID_36514
  Gene Ontology: Mol. function=DNA-directed RNA polymerase activity; Cellular component=nucleus; Biological process=transcription
  Homolog annotation: Hit_ID=Q6ZA50; Match level="QueryCoverage=79%, HitCoverage=48%, E-value=3e-24, Identity=89%"; Hit description =Putative DNA-directed RNA polymerase II 13.6K chain
  Pfam annotation: Domain name=RNA_pol_L; Domain location=3-55; Score =25.8; E_value=0.00016; Accession=PF01193.14; Description=RNA polymerases L  13 to 16 kDa subunit
QLHRDPNVLFAGYKLPHPLQYKIIVRIHTTSQSSPTQAYTQAINDLDKELEYLKQAFEVRGCMAFLCAILYR

SEQ ID NO: 78294 - protein, 137 aa, Zea mays
  Coding DNA Sequence Number=SeqID_36515
  Gene Ontology: Mol. function=DNA-directed RNA polymerase activity; Cellular component=nucleus; Biological process=transcription
  Homolog annotation: Hit_ID=Q6ZA50; Match level="QueryCoverage=77%, HitCoverage=89%, E-value=2e-48, Identity=85%"; Hit description =Putative DNA-directed RNA polymerase II 13.6K chain
  Pfam annotation: Domain name=RNA_pol_L; Domain location=46-120; Score= 64.1; E_value=4.6e-16; Accession=PF01193.14; Description=RNA polymerases L  13 to 16 kDa subunit
RRLGYRLPSSPPYTSSQVFVGPFSGNEHPSEGTKKVSYERDTKIVNAASFTVEREDHTVGNILCMQLHRDPNVLFAGYKLPHPLQYKIIVRIHTTSQSSPTQAYTQAINDLDKELEYLKQAFEDEKNRYEDMMKQGF

SEQ ID NO: 78295 - protein, 210 aa, Zea mays
  Coding DNA Sequence Number=SeqID_36516
  Gene Ontology: Mol. function=electron carrier activity; Cellular component=mitochondrial respiratory chain; Biological process =electron transport
  Homolog annotation: Hit_ID=P00056; Match level="QueryCoverage=99%, HitCoverage=100%, E-value=6e-35, Identity=70%"; Hit description =Cytochrome c
  Pfam annotation: Domain name=Cytochrom_C; Domain location=12-209; Score=53.1; E_value=9.3e-13; Accession=PF00034.11; Description =Cytochrome c
MASFSEAPPGNPKAGEKIFKTKCAQCHTVDKGAGHKQGSSVVLGLQQLTNWEFLLMQLAMQLEMAYKKCPNLNGLFGRQSGTTAGYSYSAGNKNKAVVWEEDTLYEYLLNPKKERIRMHIHELLDAFTFPIAQTDVDAVTPSSTKHFELTEASKRMKGGKVMGSNGIPIEAWGYIGDIAVYIPGTKMVFPGLKKPQERADLIAYLKEATA

SEQ ID NO: 78296 - protein, 230 aa, Zea mays
  Coding DNA Sequence Number=SeqID_36517
  Subcellular localization annotation: CTP_CleavageSite=54; ConfidenceScore=5.04e-01
MTFPFPASALYYDSHDPLWSLSRTPVAVAPLACGQSMRVPGCLPTLTRIGPAVYGAEVTQFGAIVYGAEYIPGTKMVFPGLKKPQERADLIAKTVDNTTKLGAKICGAELGATSTPRRPVCANAARFLGPQPFDTKYNELNPVRPNSHLRLSGSKPAPGAFNAGGMEMEWSHHQPSPGPPLCNVAPLLDQRISGNIIMAPSGVWRCVFPRLKIRFRDFTQRSCELSVCPR

SEQ ID NO: 78297 - protein, 161 aa, Zea mays
  Coding DNA Sequence Number=SeqID_36518
YIPGTKMVFPGLKKPQERADLIAKTVDNTTKLGAKICGAELGATSTPRRPVCANAARFLGPQPFDTKYNELNPVRPNSHLRLSGSKPAPGAFNAGGMEMEWSHHQPSPGPPLCNVAPLLDQRISGNIIMAPSGVWRCVFPRLKIRFRDFTQRSCELSVCPR

SEQ ID NO: 78298 - protein, 329 aa, Zea mays
  Coding DNA Sequence Number=SeqID_36519
  Homolog annotation: Hit_ID=Q41742; Match level="QueryCoverage=25%, HitCoverage=10%, E-value=3e-41, Identity=97%"; Hit description=Su1p
MTTQGGLQPTSNEANMCTNDNGSQLGTRIVDEIMAGKNVFFDLPDKLTGEIWTLKFHCIGAQPGKEIVTVNIDKAYVAFYNVVYIKSKLGYSGRDFLFYKKRCGIDRSRLLALDYIHQEEAMLSDNMDERKISFVLTKDPPSDLEVSITPIKRPRQRTNVDEETIEVSIDAYKEWLAILQHDNPETDLMDDFREDTIKTYKEWLRHQGDLPDILLYERMKNKPEDVDIVEWHYMVLYFGSEKFQKDETKGEFYVAFNTSHLPVVVGLLERSGFRWEPVVDTGKEAPYDFLTDGLPDRAVTVYQFSHFLNSNLYPMLSYSSIILVLRPDV

SEQ ID NO: 78299 - protein, 366 aa, Zea mays
  Coding DNA Sequence Number=SeqID_36520
MTTQGGLQPTSNEANMCTNDNGSQLGTRIVDEIMAGKNVFFDLPDKLTGEIWTLKFHCIGAQPGKEIVTVNIDKAYVAFYNVVYIKSKLGYSGRDFLFYKKRCGIDRSRLLALDYIHQEEAMLSDNMDERKISFVLTKDPPSDLEVSITPIKRPRQRTNVDEETIEVSIDAYKEWLAILQHDNPETDLMDDFREDTIKTYKEWLRHQGDLPDILLYERQSNDDLILSDEEIHGSSKPTANWPSHARRHRKRDPDNDGVFKKEGRGTLKGIAAATKRIKNGDHKLKIEFSSKLGGPVGPNARTFVDEIVLFTKKKAPLIGVKKWKDIELNVRSSIASDVLNEKEYYRKKCKHCKKKKKEKDKCLEKK

SEQ ID NO: 78300 - protein, 107 aa, Zea mays
  Coding DNA Sequence Number=SeqID_36521
MGAPENADHSGKGSAAVQLTPARNCAGSGAILGELRVWEGSSPRVRTLGRLENSGGAVEPRVDDGGAPIAQELLRSVSVTDRAFHYVAVCYNDAVAAYNLLDSTPTE

SEQ ID NO: 78301 - protein, 59 aa, Zea mays
  Coding DNA Sequence Number=SeqID_36522
  Subcellular localization annotation: CTP_CleavageSite=52; ConfidenceScore=5.41e-01
MSFALPSATRDTLRCALSLPTVPGPRSPEQFLRSRSPTVVDPRLHRTPAVLQASQSSHS

SEQ ID NO: 78302 - protein, 226 aa, Zea mays
  Coding DNA Sequence Number=SeqID_36523
MAPWRAGSAAAGLHKEEESLGFAVSTMHQTPACVGVQAGASPCQIALMTIPSGELVKVSEPILEYNVLLRLVPAKKIVVNRGRWDESSMGSTSPCNPPRVMDGPRRIPKFLGMCSRPWLLRTGAGRRRSGFWLGVLGKKAVGPSLTGAAQLMMCSSGMVAESLSPMAQWRSTAGGPARSCVPADRRKMIFGAMDGLYTVGIRCGLSTAGSLANGSDWRLSWADSGP

SEQ ID NO: 78303 - protein, 226 aa, Zea mays
  Coding DNA Sequence Number=SeqID_36524
MAPWRAGSAAAGLHKEEESLGFAVSTMHQTPACVGVQARASPCQIALMTIPSGELVKVSEPILEYNVLLRLVPAKKIVVNRGRWDESSMGSTSPCNPPRVMDGPRRIPKFLGMCSRPWLLRTGAGRRRSGFWLGVLGKKAVGPSLAGAAQLMMCSSGMVAESLSPMAQWRSTAGGPARSCVPADRRKMIFGALDGLYTVGIRCGLSTAGSLANGSDWRLSWADSGP

SEQ ID NO: 78304 - protein, 112 aa, Zea mays
  Coding DNA Sequence Number=SeqID_36525
MPELVRRPTWGRFRLRTEDGGNGTRSLRLGSSVVPCHSAYPLRFCQPNIVMVFPDEVIYWGRTNCSSVIESTAETQPAAVDRRMRHRLDPGMGLGAPSGSREEDRGQPGQMG

SEQ ID NO: 78305 - protein, 100 aa, Zea mays
  Coding DNA Sequence Number=SeqID_36526
MKKIPAPSLEIKEEAASTPPAPPPSQELQEPVPLEEEFDPVLPSQSLLEELNPSQEKSTLPKKIPGSLPLKPGISYRRNLSSCSAKRTDHENQSTASESK

SEQ ID NO: 78306 - protein, 79 aa, Zea mays
  Coding DNA Sequence Number=SeqID_36527
MGIEGASGGFYRRAVCEVVLGCEVAVMEQHKAAGAMEGGMVLLAVMAVGALQRGSGAVVLIPGFKGKLPGISLGKGLFS

SEQ ID NO: 78307 - protein, 44 aa, Zea mays
  Coding DNA Sequence Number=SeqID_36528
MEEDGVSGGNGGGLFQASRVSFPVSSWVRCFSLEMVKGENGSIR

SEQ ID NO: 78308 - protein, 64 aa, Zea mays
  Coding DNA Sequence Number=SeqID_36529
MQFNQQLRTKYVPYGYFSKDTIKVIRPTGVSAYSRVHGYPRIPAVESTRQFYCGTDQKAKALRS

SEQ ID NO: 78309 - protein, 75 aa, Zea mays
  Coding DNA Sequence Number=SeqID_36530
MGPKPDASVLGALLWACMNYRELEMDTIKVIRPTGVSAYSRVHGYPRIPAVESTRQTQHSLEHELSSLSNVPDMP

SEQ ID NO: 78310 - protein, 155 aa, Zea mays
  Coding DNA Sequence Number=SeqID_36531
MQLNQQLRTKYVPYGYFSKDTIKVIRPTGVSAYSRVHGYPRIPAVESTRYGSFEPYVEKFNFLISESEDRKQLYSVSKALSTHVQSSRYLQLAMGNSDSLFPRRPGRLNTRLNMNCLLCPMYQICPEQQIHEPVRRYIKWTQGDEWMSIYIQSSY

SEQ ID NO: 78311 - protein, 487 aa, Zea mays
  Coding DNA Sequence Number=SeqID_36532
  Gene Ontology: Mol. function=transferase activity, transferring glycosyl groups; Cellular component=membrane; Biological process =cell wall biogenesis
  Homolog annotation: Hit_ID=Q6YUI8; Match level="QueryCoverage=96%, HitCoverage=80%, E-value=1e-143, Identity=56%"; Hit description =Putative xyloglucan fucosyltransferase
  Pfam annotation: Domain name=XG_FTase; Domain location=63-487; Score =410.0; E_value=3.3e-120; Accession=PF03254.4; Description=Xyloglucan fucosyltransferase
MKMMGDTASSHKLGDLVAEAWPAATAVTRLGKERRWRKTGAVLVAAGLVTLPFLVFFTSGQESLSRAWESAAAKLTMMAGAGSLEASDARTTTGGGATKVGADELLGGLLVRGGFDRGSCLSRFESAQYYKHSPYAPSPYLLRKLRAYEARHKRCGPGTPLYAKSVEQIRSGGGGGGGAECNYLVWLPYNGLGNRMLSLVSTFLYALLSDRVMLVHFPADFTDLFCEPFPDATWVLPPDFPVANLSDLGMNPEQSYRNLLASKKIANDPTVQSSVPPWVFLNLCHEQDIDKLFYCSDDQLALAKVSWLLLFSDMYFVPSLYSMGEFHGELHRLFPAMESVCHLLSRYLFHPTNSVWGLVARYYNSYLARADQRIGIQIRIFEYFARISADDMYSQILACSRQEHILPETEDDNLTTTEAAAAAGNTTSTAILIASLYPDYYEMLRSRYYEHPAKGGVRVSVFQPTHEKVQVTGQHGHNQKALAEIFP

SEQ ID NO: 78312 - protein, 682 aa, Zea mays
  Coding DNA Sequence Number=SeqID_36533
  Gene Ontology: Mol. function=transferase activity, transferring glycosyl groups; Cellular component=membrane; Biological process =cell wall biogenesis
  Homolog annotation: Hit_ID=Q6YUI8; Match level="QueryCoverage=97%, HitCoverage=96%, E-value=1e-138, Identity=55%"; Hit description =Putative xyloglucan fucosyltransferase
  Pfam annotation: Domain name=XG_FTase; Domain location=63-656; Score =454.9; E_value=1e-133; Accession=PF03254.4; Description=Xyloglucan fucosyltransferase
MKMMGDTASSHKLGDLVAEAWPAATAVTRLGKERRWRKTGAVLVAAGLVTLPFLVFFTSGQESLSRAWESAAAKLTMMAGAGSLEASDARTTTGGGATKVGADELLGGLLVRGGFDRGSCLSRFESAQYYKHSPYAPSPYLLRKLRAYEARHKRCGPGTPLYAKSVEQIRSGGGGGGGAECNYLVWLPYNGLGNRMLSLVSTFLYALLSDRVMLVHFPADFTDLFCEPFPDATWVLPPDFPVANLSDLGMNPEQSYRNLLASKKIANDPTVQSSVPPWVFLNLCHEQDIDKLFYCSDDQLALAKVSWLLLFSDMYFVPSLYSMGEFHGELHRLFPAMESVCHLLSRYLFHPTNSVWGLVARYYNSYLARADQRIGIQIRIFEYFARISADDMYSQILACSRQEHILPETEDDNLTTTEAAAAAGNTTSTAILIASLYPDYYEMLRSRYYEHPAKGGVRVSVFQPTHEKVQWGIAQWGEEELDLKCDTAWWGRGRGIASRSGEEEDWKSSRAGGRRAVAQWRSRAAEGTAFPVSLQSFPNCVPKSLGTRSHASNERGSAVYPSTFHVALTDVPCSSFPFLVPNVPGTLSLRIFLLSFSEVLVTSGTSTFGYMSGSLAGIRPTMLYSARQHTVPDPPCVRMVTMEPCSHRPASMECQAKAVAKEDLAQHVMACEDEGVGIKLFD

SEQ ID NO: 78313 - protein, 161 aa, Zea mays
  Coding DNA Sequence Number=SeqID_36534
  Gene Ontology: Mol. function=transferase activity, transferring glycosyl groups; Cellular component=membrane; Biological process =cell wall biogenesis
  Homolog annotation: Hit_ID=Q69TW1; Match level="QueryCoverage=56%, HitCoverage=16%, E-value=2e-24, Identity=57%"; Hit description =Putative galactoside 2-alpha-L-fucosyltransferase
MRHGVVGKRKRNRVAQWGRGRLEEQSCRWEKSSRAVEESRSRGVRHGAHVPCSSFPFLVPNVPGTLSLRIFLLSFSEVLVTSGTSTFGYMSGSLAGIRPTMLYSARQHTVPDPPCVRMVTMEPCSHRPASMECQAKAVAKEDLAQHVMACEDEGVGIKLFD

SEQ ID NO: 78314 - protein, 91 aa, Zea mays
  Coding DNA Sequence Number=SeqID_36535
  Subcellular localization annotation: CTP_CleavageSite=18; ConfidenceScore=5.27e-01
MKLWKETSRSSKITTSSRCGLAATPSRLPVKAALSTFLFRTLIYFISRRHSRKVHNIEEMILSMDAQYDVTQEWLDRVKIARKGLRGTKRR

SEQ ID NO: 78315 - protein, 96 aa, Zea mays
  Coding DNA Sequence Number=SeqID_36536
MDAQYDVTQEWLDRVKIARKGLRGTKRRQLSNTYINKVDKKPATPYLIKKKKNGKVIAIKANKQPNKGKGTKHIWVPKEIISTMKSTKKVWIPRGK

SEQ ID NO: 78316 - protein, 101 aa, Zea mays
  Coding DNA Sequence Number=SeqID_36537
MDINENYLTSKEMSSLSKAKMKIHVYNEDHMAWNKEDIQARFTILKKWVLSMDAQFDVTQEWLDRVKIARKGLRGTKRSEGQATACRPRYHGLSEEEKYLH

SEQ ID NO: 78317 - protein, 84 aa, Zea mays
  Coding DNA Sequence Number=SeqID_36538
MDAQYDVTQEWLDRVKIARKGLRGTKRRWRPSDGLWTEVLWLRNHRTIKGSQKEGWCLPKLKHLYSEAIFENQKSLERFMVDSG

SEQ ID NO: 78318 - protein, 139 aa, Zea mays
  Coding DNA Sequence Number=SeqID_36539
MDAQYDVTQEWLDRVKIARKGLRGTKRKVKANRRLVDRVCQSDWQTGRQELSGAVQPPPWAVQPVLVNFDQSAGLLQQPRCPKVVQGASLAEVQGKEASQTSPPAEARVKSPAALGPAPAPGIGAPAPRAGDDAVSPAG

SEQ ID NO: 78319 - protein, 331 aa, Zea mays
  Coding DNA Sequence Number=SeqID_36540
  Homolog annotation: Hit_ID=Q6QP51; Match level="QueryCoverage=43%, HitCoverage=90%, E-value=1e-07, Identity=34%"; Hit description =Putative growth-regulating factor 1
MVTRSAITKQKRWRRKGLGERFHFSGYSLGLRKPKKEASSRAKNRHRSLSRIYKGPGETHSTLHPNPPRDSKLKDGRHLWWAKQATLRFRHNDRVKKGTGKGDTPKGIFLREGNGPRAPLLIRGSKSGPSEGFNSRLRALGLRAHYWSEVRRPAPRKGSTAASGHSGSAPTTDQGFVGWPSKGSTVASDEERGMTLEDSAACAAPTAVPLDRVRLAAAKSGLGHHRKLCLARPQGSALASAPEDDELRLARPQCSDSASASEDDELRLARPQGSDSALASADGLCLARPKGSDSTSTSEDRLDLDLGGASASPNPGLRPTTSQEGPSLAYP

SEQ ID NO: 78320 - protein, 206 aa, Zea mays
  Coding DNA Sequence Number=SeqID_36541
MGQVGLAAARRNGPELGRSRAAANPLNKSIDTHLMKMLPTLILTDLEELVVAKWTGARGKNNEKRQDLQGVKEGGAVNGEIGKTLSSNKDGKEKALKGRFKVSMKVRVRIFQGLKVITDKSVREEVEDINIARFKGDYRQGYMGKDEGIWRASGMSTTKNGVAPMLTRGKEEDIAKSEELRQDLLRDEVKKTIKDKISEVPTEELK

SEQ ID NO: 78321 - protein, 124 aa, Zea mays
  Coding DNA Sequence Number=SeqID_36542
MEGGGAPPPGKVRGEWERLCTDGKTKKRRNPRCNNGGFSPGKKTLAGAEEKSVDCRRFGDPIDEPNALRQSLRRDECSGLAANPLNKSIDTHLMKMLPTLILIDLEELEVAKRTGVRGKNNEKR

SEQ ID NO: 78322 - protein, 91 aa, Zea mays
  Coding DNA Sequence Number=SeqID_36543
MEGGGAPPPGKVRGEWERLCTDGKTKKRRNPRCNNGGFSPGKKTLAGAEEKSVDCRRFGDPIDEPNALRQSLRRDECSGTLGFRGRCTDWE

SEQ ID NO: 78323 - protein, 312 aa, Zea mays
  Coding DNA Sequence Number=SeqID_36544
  Homolog annotation: Hit_ID=Q9LWV8; Match level="QueryCoverage=68%, HitCoverage=32%, E-value=2e-33, Identity=38%"; Hit description =Putative SEU1 protein
MSCNRRTGYRVRRNCTTACANATSPLGCHGSLKRRCQGHPASGAPAGSAGEQYDRARQHAVPIIPSTRSFPCSSHKYWKIFIGNSSYVPCLYWRFFRVMIDANSSFSGGAQLQPSTSMNTYSFMPAPSSPISFSSNNISGSSVIDGSIVQQSPPQDQAQKQRSSSLTSHPIIEAGGALHAPKKLRIDVRQDELQQQLIQRLLHGQGSLHLQGQQNPQLQALIQQHNLAHMQQRQQQLLQSFAQTQPSQIGIPHQPQLPPSLAQPGIAVPVRTPVNNGLCSRRLMQYLYHKRRRPEDVWRCDICKTHGAKGYG

SEQ ID NO: 78324 - protein, 273 aa, Zea mays
  Coding DNA Sequence Number=SeqID_36545
MKILEAEWWWKDANPHGVAPLQQQQEEDKIGDTTTSARSPTVKSPKETTLTRIPPENTDAPHLEARKAKGRGGRKRSEASVKEANRRARSIQPSYGCAPPQLHRNWRSNAGAQAHMTSTRGSPAHGPTVPLSTMVTGQSAVGIGAAAGMAIGGPAVIATTVAQEQRSNRQSDSGPICRLASSPEVGLGATVGYPKSGRDTGPLYIKVRSPREVRTLAGSQNENPGSVKVIQQAARLLGLLANSTTVPGSTLAGALYHPAGDFLSDRNDWKKHF

SEQ ID NO: 78325 - protein, 628 aa, Zea mays
  Coding DNA Sequence Number=SeqID_36546
  Gene Ontology: Mol. function=kinase activity; Cellular component =nucleus; Biological process=regulation of transcription, DNA -dependent
  Homolog annotation: Hit_ID=Q1SVS0; Match level="QueryCoverage=49%, HitCoverage=32%, E-value=2e-76, Identity=48%"; Hit description =Bromodomain
  Pfam annotation: Domain name=Bromodomain; Domain location=268-357; Score=109.7; E_value=8.5e-30; Accession=PF00439.15; Description =Bromodomain
  Pfam annotation: Domain name=Extensin_2; Domain location=50-419; Score=-140.7; E_value=0.084; Accession=PF04554.4; Description =Extensin-like region
  Pfam module annotation: Pfam domain module=Bromodomain::Extensin_2; Domain location=268-357::50-419
  Subcellular localization annotation: CTP_CleavageSite=75; ConfidenceScore=5.48e-01
MGVGILPPSFGFKDFHNAPLAGGHPQGSSFSLHRKVNRSLGVGKARTRVSAGPLLVLGSSSFRDPAEVRTYPGLRAYMAASSAWPGDVTWVRRLHAVEEVPTPPPTHPLRVPPPPPKSPNPRLRSAADLDPPQPLTRPEWASGTPSPSGKPYSRKSHASSKAPSVPSFDAHNGRLLPTVTFPLPSTTASRRELRRRLSSELSQVRAAAKRLSSLPAPAPSSALSATDPSTPLPPHPPGSKHKSRKPGGAPYPQPHLSAEARRKLYAPVFKTCSALLQRLMKHKHSWVFNTPVDASALGLHDYHTIITKPMDLGTVKSKLAAGQYRSPREFAGDVRLTFRNAMTYNPKGQDVHFMAEQLLNMFEEKWLEIEAELAQLSPQPPTPSSAAPRKPKEIDNSRALERSDSTVHAAGMEATPKTHNGRPPVSKKPKAREPNKRDMTFWEKQRLSNNLQDLPPEKLDNVVQIIKKRNSSLNQHDDEIEVDIDSFDVETLWELDRFVTNYRKSITKNKRKAELSAVRPDEADPDQEPEKVERVRQDEADQDRIPAVQEPIPEPESVDVEPPKEIAADDNGRYVGESSPGHLEDQEGENPGRSSSSGSSSSDSGSSSSDTDTDSSSADGSDAAQSPR

SEQ ID NO: 78326 - protein, 779 aa, Zea mays
  Coding DNA Sequence Number=SeqID_36547
MATTRGRGLPHKTQMGTQGWDLVLQEVPNQEGLRNSPPAGKDPSRWREYADPGDLSAKAGGPDSLGAGSRERDPVPWGGPEPVWPLSLVPYPKACTLHHSVTGLGPSRGYLLGATAKLFLRYAERLASGGDHLSTDGSDHLSTDGSPAATTTSTPSGSPAEATTSATGSLTSGADHLCTRQPPQRWRPPQHARHGEEPKFASFTRLVIILFLRMLEEEAGTSPCGRRRPRLISLPTTARLMNILEAKHWWKSAAPTRPHTSNRGKTGLASHVIQVGLKREEGESSHKERATALRLYAFSSSSQPAVKKANRHTRSVQPPCGYTPFHLRRNQWSNLWHGGLGPHVMHPARRSPGAEKSHHRSRQYCASSRPSQKTEKINFQNQCNNSRHPAHDPTKALSAKVMGQSAAGTGMVVSVTRGGPAVIASTDAQEQRANHQSNFGPTCRLASSPEAGLGATIGTLNLGYPLLRCEDTDVSVEPDPREGAPDPRTHNPGPPRLWARDYRVSMPGPLEGTQIPLSEVRAATRSSLRGNSGVSKGQYCHASGPYLVRMSSPLRRRPDAATWLVAHDISLRAKPDVRPLGRTVSAFIAERTRRLSTLLTGDVPSQHLMRPVHSAGRRRQGHPTDDAPVQSVVEQYACAVRRTMLIIPCTRSFPCTPVLRSSWMSGHKKIAPTTNISRSKYYLRYVSGPTCWGSTLLYMPPLAIKWEACNVTRGRLKLPWTKLRLSTLKLPQQFNTQWSRVLRSGGPNHSKSSLVHVLDVRLAGQAKRLSPFLILGFRA

SEQ ID NO: 78327 - protein, 61 aa, Zea mays
  Coding DNA Sequence Number=SeqID_36548
MARLEEVFSPAIVAAKRSCTFESNVHLQICRRGNSPARWRNAPALNPKMSKGLKRFAYLAK

SEQ ID NO: 78328 - protein, 202 aa, Zea mays
  Coding DNA Sequence Number=SeqID_36549
MNPTSPKGLSSHFDSHICCVANENDSGSTNEDEEDERSMQLYAHLSLEDKAVMLKLLKRAREQSEARQMLEDVLSMKMLRFDELTKEHEELKCSHVDLVQRKCQGLEDCQEEETKEENQYLCQKPQPCLHVRQPKIATCARKEIKNYPVQKNQDLQHGGKPKDGNCRRGNSPAGWRSAPALNPKMRKGLKRFACPAKRTSST

SEQ ID NO: 78329 - protein, 69 aa, Zea mays
  Coding DNA Sequence Number=SeqID_36550
  Gene Ontology: Mol. function=transferase activity; Biological process= cell redox homeostasis
  Homolog annotation: Hit_ID=Q6EQX0; Match level="QueryCoverage=90%, HitCoverage=19%, E-value=9e-25, Identity=86%"; Hit description =Putative glutathione transferase
  Subcellular localization annotation: CTP_CleavageSite=24; ConfidenceScore=5.10e-01
MNARSALDEVTDMGAFGRSPSTFRSSVSRDRRFPAVAGRYHLYVSYACPWASGCLAFLKLKGLDHTNQS

SEQ ID NO: 78330 - protein, 302 aa, Zea mays
  Coding DNA Sequence Number=SeqID_36551
  Gene Ontology: Mol. function=transferase activity; Cellular component= cytoplasm; Biological process=autophagic vacuole formation
  Homolog annotation: Hit_ID=Q6EQX0; Match level="QueryCoverage=65%, HitCoverage=60%, E-value=9e-91, Identity=81%"; Hit description =Putative glutathione transferase
  Subcellular localization annotation: CTP_CleavageSite=24; ConfidenceScore=5.21e-01
MNARSALDEVTDTGAFGRSPSTFRSSVSRDRRFPAVAGRYHLYVSYACPWASRCLAFLKLKGLDHAIGVTVVKPIFERTKESDEHLGWVFPAADDEEPGAEPDLLNGARSVRELYEIARSNYAGKPTVPVPWDKQLKTVVNNESSEIIRMLNDEFNGITRNPGLDLYPAHLRASIDEANELVYDAINNDVYKCGFAKKKDDRVLVPDLGSLTSIHDRARELFYYLKGGQVDYGEEHSKACSHNRFGRIYHTGHYPICYEHNPVHFVGHSAGAQVVRVLQQMLADKRDGSCELEYRIRAPKLG

SEQ ID NO: 78331 - protein, 109 aa, Zea mays
  Coding DNA Sequence Number=SeqID_36552
MTVQTAEELTTQIEQQKLEGTILFVTSTTQCILWGTLLVRRFCEGAASDACRQGRGSCGGKDQNNDEKPLHLVKGAFGQVALLSVLGRGCSTRKLSFKPLDSVMIVQTV

SEQ ID NO: 78332 - protein, 392 aa, Zea mays
  Coding DNA Sequence Number=SeqID_36553
  Gene Ontology: Mol. function=transferase activity; Cellular component= Golgi apparatus; Biological process=metabolic process
  Homolog annotation: Hit_ID=Q6EQX0; Match level="QueryCoverage=50%, HitCoverage=60%, E-value=1e-90, Identity=81%"; Hit description =Putative glutathione transferase
  Subcellular localization annotation: CTP_CleavageSite=24; ConfidenceScore=5.21e-01
MNARSALDEVTDTGAFGRSPSTFRSSVSRDRRFPAVAGRYHLYVSYACPWASRCLAFLKLKGLDHAIGVTVVKPIFERTKESDEHLGWVFPAADDEEPGAEPDLLNGARSVRELYEIARSNYAGKPTVPVPWDKQLKTVVNNESSEIIRMLNDEFNGITRNPGLDLYPAHLRASIDEANELVYDAINNDVYKCGFAKKKDDRVLVPDLGSLTSIHDRARELFYYLKGGQVDYGEEHSKACSHNRFGRIYHTGHYPICYEHNPVHFVGHSAGAQVVRVLQQMLADKDRDNYWKMMHKYIGSDVTSLVTLPVIIFEPMTMLQKMAELMEYCELLDKAEECEDPYMRMVYASTWAVSVYFAYQRTWKPFNPILGETYEMVNHQGITFLAEQIYMA

SEQ ID NO: 78333 - protein, 64 aa, Zea mays
  Coding DNA Sequence Number=SeqID_36554
MDHNRVAEVLQCCPTFLVLTPSGPLQTCLFGCQVCQRFQQIVCHNHLSRRINPSTPKYRVVNLC

SEQ ID NO: 78334 - protein, 436 aa, Zea mays
  Coding DNA Sequence Number=SeqID_36555
  Gene Ontology: Mol. function=phospholipid binding; Cellular component= intracellular; Biological process=steroid metabolic process
  Homolog annotation: Hit_ID=Q10NC7; Match level="QueryCoverage=96%, HitCoverage=89%, E-value=0.0, Identity=87%"; Hit description =Oxysterol-binding protein, expressed
  Pfam annotation: Domain name=Oxysterol_BP; Domain location=24-412; Score=133.8; E_value=4.6e-37; Accession=PF01237.9; Description =Oxysterol-binding protein
MGIHGIPRRRQSYEGLEVINSDGGPDVAVEIALRGGWSQEIYGFKDRDSYWKMMHKYIGSDVTSLVTLPVIIFEPMTMLQKMAELMEYCELLDKADECEDPYMRMVYASTWAVSVYFAYQRTWKPFNPILGETYEMVNHQGITFLAEQVSHHPPMGAAHCENEHFTYDITSKVKTKFLGNSLEIYPVGRTRVTLKKSGVVLDLVPPLTKVNNLIFGRTWVDSPGEMVMTNLTTGDKAVLYFQPCGWFGAGRYEVDGYVYSAAEEPKIMITGKWNKSLSCQPCDQEGDPLPGTELKEIWRVAPAPQNDGYQYTHFAHKINSFSTAPKKLLASDSRLRPDRYALEKGDMSKSGSEKSRLEEQQRAEKRTREAKGEQFTPRWFNVTDAVASTPWGDLEICEYSGRYTEHPGCHRQLQQHRRRRRDRRHFGRVRPMAVWW

SEQ ID NO: 78335 - protein, 829 aa, Zea mays
  Coding DNA Sequence Number=SeqID_36556
  Gene Ontology: Mol. function=helicase activity
  Homolog annotation: Hit_ID=Q1EPC6; Match level="QueryCoverage=59%, HitCoverage=31%, E-value=1e-132, Identity=50%"; Hit description=DNA helicase homolog, putative
MPVLFDDYSDDDFYGAQRKYSIVARVEVKFPIEPRYHDRQHYILSDINGAKIEAIATRYEIVKYFNSLLHEKHVYKMHNVWFGLNPGAFNFRHLNGTMELYFTQQTVVEPYTVPVQMPPFPKHIFLNLDDIAELPNRTLVDIMAIVVHLDTIHRTIWGTFMKIVIMDARWSLHTIKVWGDLLNKNALRWALANENYSIIIGTMFRRFRKQDQMGHNAGRKPFTDISNIIIRGDQNELLGPMVDAKERKRKRDRERYAAMSIEQKNEKNRKRREARQRNKGHNVMPNVSGGDQNEQLRLYNQTPRRKEGKLEYIRKRRALQASTLNQGSIAMEVPTYTSEVVHPTAYVSEPDSSSDNACDWVIPEYTSTPFMPASTQTKDVGSLDMSTEPLRRKHHVLRGARQAILARQNKKFETNIARNVATLTEDTISDVGQMDDSTQPGSTIEINNTVQYRNTRQSAIVATNGSANMVEQRSGLEQSQSVPRFISNVDDDDEGVIFGEDNDENEGYIFVDEDTNEDFEKDGTQDQSVVTDVPDPYDKVYSNIPEETHMLKHVPDCGYCTAKKFEYEPPGFCCRGGKVELAPLETPPQLRRLWDSADSDARHFRDNIRFFNGHFSFTSLYCCLDSMTTNMRDSGIYTFRAQGMMYHNIKSFGSECGAEHKHLELYFYDDDPSLEHRFRKCREDQIQKDQEVIKQIVGILRGNPYSEHLRSMGHVENLADYHIALNLDQTLNQKTYNTPLTSEVAAVWIEGSERRGQFSKSVMLHGKDRSSHGIRSYHGCYDALSYPLFFPRGELGWHANIPKVGVSMDEVDAYRATHRRNNANDEDAG

SEQ ID NO: 78336 - protein, 429 aa, Zea mays
  Coding DNA Sequence Number=SeqID_36557
  Gene Ontology: Mol. function=helicase activity; Biological process =viral genome replication
  Homolog annotation: Hit_ID=Q1EPC6; Match level="QueryCoverage=99%, HitCoverage=30%, E-value=1e-177, Identity=68%"; Hit description=DNA helicase homolog, putative
MASAHTMDATMRYHIHCSSLEVNLDGMQISQRLVYPWTKWMHTGRRIGQVMQMMKMRIRRGVFNPILHGKRLFQQFAVDTYIKIESSHLDFIRKNQDRLRADLYQGLVDSMLDGDVRGKKVGKRTVLSPSFIGGPRGMRRPYMDVMALELKHRLTKQDILGKVRAYVYVVEFQKRGLPHAHFILIMQRKYKLTCSEQYDLLISAEIPSNRYPELRKMVIKHMMHGPCGSLNPNCPCTKGRASCKNQYPRHFREATMQGKDSYPNYRRRDDGCKEKVRGCELDNRWVVPYNPYLLRLFNCHINVEACGSIKAVKYLFKYIYKGHDRASVVMRDASKENGDVDEIQQYRDARWVTPPEALWRIYGFELSQNSPSVMQLQLHLPNMHMVTFHEQQMVERVVNRPGADRSMITAYFEAIAIRGGSGHPVSGLP

SEQ ID NO: 78337 - protein, 134 aa, Zea mays
  Coding DNA Sequence Number=SeqID_36558
MYRHTRPWLSEKPVAEVGQSDLSLSLKCGELDALVRTHSTSNEKLEESQLQTAMGASKIKVSQGCIDLLQEFHHLIDGNIEFLVKLRDLVIDGYKKVFKIFSRNLMGIFMCFLGEAKKFPGVNCYRDILQHVLV

SEQ ID NO: 78338 - protein, 239 aa, Zea mays
  Coding DNA Sequence Number=SeqID_36559
  Homolog annotation: Hit_ID=Q942Q0; Match level="QueryCoverage=21%, HitCoverage=12%, E-value=1e-11, Identity=50%"; Hit description =Putative RNA helicase
MYRHTRPWLSEKPVAEVGQSDLSLSLKCGELDALVRTHSTSNEKLEESQLQTAMGASKIKVSQGCIDLLQEFHHLIDGNIEFLVKLRDLVIDGYKKVFKIFSRNLMGIFMCFLGEAKNSQESTVTEERSLKRRRLFPQISNRSQENSLDSVEVKTEAKSTSKVSGQQELGPSITPLGLRYFATCACVDYWAVVLPLINSHKGGRQTRCTRRVSLLPEDEEAEKRAQARVREDEDADQWP

SEQ ID NO: 78339 - protein, 1405 aa, Zea mays
  Coding DNA Sequence Number=SeqID_36560
  Gene Ontology: Mol. function=helicase activity; Biological process =viral genome replication
  Homolog annotation: Hit_ID=Q1EPC6; Match level="QueryCoverage=81%, HitCoverage=83%, E-value=0.0, Identity=67%"; Hit description=DNA helicase homolog, putative
  Pfam annotation: Domain name=DUF889; Domain location=1026-1248; Score= 331.5; E_value=1.5e-96; Accession=PF05970.5; Description=Eukaryotic protein of unknown function (DUF889)
MEVPTYTSEVLHPTTYVSEPDSSSDNACDWVIPEYTSTPFMPASTQTEDVGSPDMSTEPLRRKHHVLRGERQAILARQNKKFEANVARNVATLTEEDISDVRQMDDSTQPGSTIEINNTVDDDDEGVIFGEDNDENEGYIFAGGKVELAPLETPPQLRRLWDSADSDARHFRDNIRFFNGHFSFTSLYCCLDSMTTNKRDSGIYTFRAQGMMYHNIKSFGSECGAEHKHLELYFYDDDPSLEHRLRKCREDQIQKDQEVIKQIVGILRGNPYSKHLRSMGHVENLADYHIALNLDQTLNQKTYNTPLTSEVATVWIEGSERGELGWHANIPKVGVSMDEVDAYRATHRAINANDEDAEPPTHLCVSVRDYYCYKFQIRPGVFNPILHGKWLFQQFAVDTYIKIESSRLDFIRKNQDRLRADLYQGLVDSVLDGDVRGEKVGKGTVLSPSFIGGPRDMRRRYMDAMALVRKFGKPDIFLTMTCNPNWDEIRRELLPGQTPQDRPDLVKRGLPHAHFLLIMQRKYKLTCPEQYDLLISAEIPSNKYPELRKMVIKHMMHGPCGSLNPNFPCTKGRASCKNQYPQHFREATMQGKDSYPNYRHRDDGRKENVRGCELDNRWVVPYNPYLLRLFNCHINVEACGSIKAVKYLFKYIYKGHDRASVVMGDASKENGDVDEIQQYSDARWVTTPEALWRIYGFELSQNSPSVMQLQLHLPNMHMVTFHERQMVERVVNRPGADRSMITTYFEANKLYEEARGILYRDFPEWYTWKQGKVWQRRKQNTGGQVGRIVSALPSEGERFYLRLLLNHVTGATSYVDLRTVDGDTLPSFCEAAQRRGLLEADNTIDECLNEAALYQMPSALRRLFATILVYCEPNDVAELWQRHLDTMSEDYHRITQSKTHLQQMVLIDIRNMLQSMGKDIKTFPLPAIIDRYDDSQVATATSGVAASIMPGGRTAHSRFKIPLTIDDGAICTFTKQSGTSKLLQKASLIIWDEASMAKRQSIEALDNSMRDIMGRPGLPFGGKTIVFGGDFRQVLPVVRKGSRAQIVAASLRSSYLWESMCHLKLVRNMRAKSDPWFAEYLLRVGGGTEEVNSDGDVRLPDEVCVPYTGDDRDLDRLIDDIYPSLNENMSNTSYITSRAILTTRNDWVDMINMRMIDRFQREQMMYHSFDTAVDDPNNYYPSEFLNTLTPNGLPPHVLKLKIGCPIMLLRNIYPANGLCNGTRLVGQTIPNVAVYLPEPVFSHGQLYVALSRATTRLNVKVLVIPVTDDKMKKGVEKKCREHLAEHVRVRASGLMAAPSSPSRRSASSSSRTRACARFSASSSLGSSDTLRVHLVCRPPIRNKTGFSCQPIARAHCARRPPPAHATRAHVEGDVDDEAEHVWREKSALLYQPVSSSHGKQLLENL

SEQ ID NO: 78340 - protein, 78 aa, Zea mays
  Coding DNA Sequence Number=SeqID_36561
MKLLEPRIEQYLTGDAGSTSSDFNRPPSHVDRAPRSLCHLIEPYRREQAGAHAADEPDRLRTRSALFRLSPSTIRTST

SEQ ID NO: 78341 - protein, 152 aa, Zea mays
  Coding DNA Sequence Number=SeqID_36562
  Subcellular localization annotation: CTP_CleavageSite=61; ConfidenceScore=5.69e-01
MTTAALSPLRKQGDVIKVPTAPTAVLLQGSSAPPTATTSHAQGSSTSSTATLAWPSYERVVAREDGLTNRISLSPSRTLVTPYCKRIRPGRRITRVAVSECPASWVKDACALRRLGYPQNIPIKQARLAKASSEGWRLRLRPNICPPRDQFD

SEQ ID NO: 78342 - protein, 204 aa, Zea mays
  Coding DNA Sequence Number=SeqID_36563
MQVLSGRIWCWLLDYLLSICLLQNEDAVGLVGGVCSGLLTAVGLNQMAHGASWDAKDAIGTRNRQMAYNGAWSTCDDGRLKSGDVDVASPVRYCSILGSRSISEAWAGAQCDTTRGCARGLSAEATFGTSFGLATFGATILQTDDRISVKDACAPRRLGYPQNIPIKQARSAKASSEGWRLRLRPNICPPRDQFDSVIWCRRCR

SEQ ID NO: 78343 - protein, 66 aa, Zea mays
  Coding DNA Sequence Number=SeqID_36564
  Subcellular localization annotation: CTP_CleavageSite=48; ConfidenceScore=5.11e-01
MARRCLVSTDQTMTRGPHSLILRLYASGGKAHGRYTMFTNVIDSSQVRVQRGGSSRSVARSYLANA

SEQ ID NO: 78344 - protein, 61 aa, Zea mays
  Coding DNA Sequence Number=SeqID_36565
MARRCLVSTDQTMTRGPHSLILRLYASGGKAHGRYTMFTNVIDSSQVRGSAWRFIERLIKP

SEQ ID NO: 78345 - protein, 64 aa, Zea mays
  Coding DNA Sequence Number=SeqID_36566
MHQGSLCKGYVVYPEPFTSVVKIGSVQPRLERDHDLWYFLLEECSGGDAGNMEDFEEFQDYDEF

SEQ ID NO: 78346 - protein, 188 aa, Zea mays
  Coding DNA Sequence Number=SeqID_36567
MTAAGLPSLDNASPSGLALHNGNMLCLCLALGMLDCSGWLLGRGGKCHTRFWKANQMRTIGCTLYPQVVIPFQPGLYRPDLHYQGEWPGIHYVAFTKTPLVHSCSLGFASRTNAVHLPKVLTERYSGKRPEPPKVVAQGGLQQHTQEPRTARCLNKFESLNLKFICESYEINKFGNSKYEIRANSVNI

SEQ ID NO: 78347 - protein, 243 aa, Zea mays
  Coding DNA Sequence Number=SeqID_36568
MLVDYTTILDRPCVSVEGLTQQGIESVVEVTPTSGVTSDGSSDPSLWLRLLQELHAVARTATGVVIVSVSVGVSSSSWDALGWCRGHLWLRCKGRRPLKLHLPLRRGGRVLLLLLLASVLMLHVQAIMQSLQHHLLSIEYTGDNLGWGWCVKQGGCTLYPQVVIPFQPGLYRPDLHYQGEWPGIHYVAFTKTPLVHSCSLVFASLTNAVHLPKVLTKRYSGKRPEPPKVSQDHPHNQDNNVVS

SEQ ID NO: 78348 - protein, 85 aa, Zea mays
  Coding DNA Sequence Number=SeqID_36569
GASLGGAAVGADLGGSSKYSNENFEGRRGERFHVNGTCTWPEVGSSGRKSTAHRAVSGAPPAALENPEDRIPSTPGRTHNRIRSP

SEQ ID NO: 78349 - protein, 77 aa, Zea mays
  Coding DNA Sequence Number=SeqID_36570
  Homolog annotation: Hit_ID=UPI00006A2900; Match level="QueryCoverage =64%, HitCoverage=25%, E-value=8e-11, Identity=68%"; Hit description =UPI00006A2900 related cluster
PEVGSSGRKSTAHRAVSGAPPAALENPEDRIPSTPGRTHNRIRSPSALNVKVKKFNQARVNGGSNYDSLKVAKCLVI

SEQ ID NO: 78350 - protein, 112 aa, Zea mays
  Coding DNA Sequence Number=SeqID_36571
  Homolog annotation: Hit_ID=UPI00006A2900; Match level="QueryCoverage =44%, HitCoverage=25%, E-value=7e-11, Identity=68%"; Hit description =UPI00006A2900 related cluster
VSSAEPRTPSRPSRGRSAPYRAQLQLALLAAWPAMPEVGSSGRKSTAHRAVSGAPPAALENPEDRIPSTPGRTHNRIRSPSALNVKVKKFNQARVNGGSNYDSLKVAKCLVI

SEQ ID NO: 78351 - protein, 71 aa, Zea mays
  Coding DNA Sequence Number=SeqID_36572
  Homolog annotation: Hit_ID=UPI00006A2900; Match level="QueryCoverage =69%, HitCoverage=25%, E-value=1e-10, Identity=68%"; Hit description =UPI00006A2900 related cluster
GRKSTAHRAVSGAPPAALENPEDRIPSTPGRTHNRIRSPSALNVKVKKFNQARVNGGSNYDSLKVAKCLVI

SEQ ID NO: 78352 - protein, 105 aa, Zea mays
  Coding DNA Sequence Number=SeqID_36573
  Homolog annotation: Hit_ID=UPI00006A2900; Match level="QueryCoverage =46%, HitCoverage=25%, E-value=7e-11, Identity=68%"; Hit description =UPI00006A2900 related cluster
LGGSSKYSNENFEGRRGERFHVNGTCTWPEVGSSGRKSTAHRAVSGAPPAALENPEDRIPSTPGRTHNRIRSPSALNVKVKKFNQARVNGGSNYDSLKVAKCLVI

SEQ ID NO: 78353 - protein, 73 aa, Zea mays
  Coding DNA Sequence Number=SeqID_36574
LGGSSKYSNENFEGRRGERFHVNGTCTWPEVGSSGRKSTAHRAVSGAPPAALENPEDRIPSTPGRTHNRIRSP

SEQ ID NO: 78354 - protein, 148 aa, Zea mays
  Coding DNA Sequence Number=SeqID_36575
  Gene Ontology: Mol. function=protein serine/threonine phosphatase activity; Cellular component=protein serine/threonine phosphatase complex; Biological process=protein amino acid dephosphorylation
  Homolog annotation: Hit_ID=Q5SMK6; Match level="QueryCoverage=59%, HitCoverage=30%, E-value=2e-28, Identity=59%"; Hit description =Putative DNA-binding protein phosphatase 2C
MCVEGLDDAAGTLAFGDHENDRRDGAAVRDMPLTFFPLLARLPGVKFRAFALAGDPPSWSSVVGRSTARREMERVCENNFVPFIRSGEWSDIGGRDYMEDAHVCISDLAKNFGSNSVDDEVISFYGVFDGHNGKDAAHYVRDTCHGSL

SEQ ID NO: 78355 - protein, 505 aa, Zea mays
  Coding DNA Sequence Number=SeqID_36576
  Gene Ontology: Mol. function=protein serine/threonine phosphatase activity; Cellular component=protein serine/threonine phosphatase complex; Biological process=protein amino acid dephosphorylation
  Homolog annotation: Hit_ID=Q5SMK6; Match level="QueryCoverage=60%, HitCoverage=88%, E-value=1e-116, Identity=67%"; Hit description =Putative DNA-binding protein phosphatase 2C
  Pfam annotation: Domain name=PP2C; Domain location=210-457; Score =212.6; E_value=9e-61; Accession=PF00481.12; Description=Protein phosphatase 2C
  Subcellular localization annotation: CTP_CleavageSite=54; ConfidenceScore=5.00e-01
MGHGGIPSAGERSANLGLTIAHGKVIAMLGSPQRASQASRSSQSEACAIYRVPRASTESELADRTHGGSYANALASKKLVVWDPCVSGSNEPARVGEGGFGPRRGEIRPKRGSSFALLCRPLERKRESETGSLGSRDRAAPPYPARDMCVEGLDDAAGTLAFGDHENDRRDGAAGGSAGVGFFIHCLLGTNNLFALRMERVCENNFVPFIRSGEWSDIGGRDYMEDAHVCISDLAKNFGSNSVDDEVISFYGVFDGHNGKDAAHYVRDNLPRVIVEDADFPLELEKVVKRSFVQTDSKFAEKFSHHKGLCSGTTALTAMIFGRSLLVANAGDCRAVLSRRGTAIEMSKDHRPCCMNERKRVESLGGYVDDGYLNGQLAVTRALGDWHLEVMKGTGRAGGGGAGGGPLSAEPELKMVTLSKDDEFLIIGSDGVWDSFSSQNAVEVVDEALRRGARDNLTAVLVAFHRDAPPRAQGGRASRSTGSRVAPSISAEGLHSLRVLLDEGQ

SEQ ID NO: 78356 - protein, 149 aa, Zea mays
  Coding DNA Sequence Number=SeqID_36577
  Gene Ontology: Mol. function=protein serine/threonine phosphatase activity; Cellular component=protein serine/threonine phosphatase complex; Biological process=protein amino acid dephosphorylation
  Homolog annotation: Hit_ID=Q5SMK6; Match level="QueryCoverage=96%, HitCoverage=42%, E-value=6e-42, Identity=58%"; Hit description =Putative DNA-binding protein phosphatase 2C
MNERKRVESLGGYVDDGYLNGQLAVTRALGDWHLEVMKGTGRAGGGGAGGGPLSAEPELKMVTLSKDDEFLIIGSDGVWDSFSSQNAVVDEALRRGARDNLTAVLVAFHRDAPPRAQGGRASRSTGSRVAPSISAEGLHSLRVLLDEGQ

SEQ ID NO: 78357 - protein, 335 aa, Zea mays
  Coding DNA Sequence Number=SeqID_36578
  Gene Ontology: Mol. function=2,3-bisphosphoglycerate-dependent phosphoglycerate mutase activity; Cellular component=cytoplasm; Biological process=steroid metabolic process
  Homolog annotation: Hit_ID=Q10NC7; Match level="QueryCoverage=45%, HitCoverage=35%, E-value=2e-76, Identity=81%"; Hit description =Oxysterol-binding protein, expressed
  Pfam annotation: Domain name=PGAM; Domain location=23-173; Score =18.1; E_value=9.9e-05; Accession=PF00300.12; Description =Phosphoglycerate mutase family
MEPTHLPSDGNNGHTPKKSSESALILIRHGESLWNEKNLFTGCVDVPLTPKGVEEAIEAVISSSMCINLPEKSCFAGDICIYRSQLSRIMRVNKLTSGVRYTLQGLNKQETVDRFGKEQVHEWRRSYDIPPPNGESLEKCAKRAVAYFKDQLMEYCELLDKADECEDPYMHMVYASTWAVSVYFTYQRTWKPFNSILGETYEMVSHHPPMGVAHCENEHFTYDITPKVKTKFLGNSLKIYPVGRTRVTLKKSGVVLDLVPPLTKVNNLIFGRTWVDSPGEMVMTNLTTGDKVVLYFQPCGWFGFNDESETFIVPVLPTVESYEKVKQERESAERS

SEQ ID NO: 78358 - protein, 171 aa, Zea mays
  Coding DNA Sequence Number=SeqID_36579
  Gene Ontology: Mol. function=intramolecular transferase activity, phosphotransferases; Biological process=metabolic process
  Homolog annotation: Hit_ID=Q6Z8J0; Match level="QueryCoverage=99%, HitCoverage=69%, E-value=5e-58, Identity=76%"; Hit description =Putative phosphoglycerate mutase
  Subcellular localization annotation: CTP_CleavageSite=40; ConfidenceScore=5.59e-01
MAGAISHHALAFSQSHWCSAKNSRFGKRTGNARLVYLKGRCGSGSKKLGLMWASSSQSSVMEPRHLPSDGNSGHTPKKSSESALILIRHGESLWNEKNLFTGCADVPLTPKGVEEAIEADDCNACHDAASAQEGMVSYKALISKKLQIDLAKNKFMSGATVMIFLRQMEKV

SEQ ID NO: 78359 - protein, 150 aa, Zea mays
  Coding DNA Sequence Number=SeqID_36580
  Gene Ontology: Mol. function=intramolecular transferase activity, phosphotransferases; Biological process=metabolic process
  Homolog annotation: Hit_ID=Q6Z8J0; Match level="QueryCoverage=66%, HitCoverage=48%, E-value=4e-33, Identity=80%"; Hit description =Putative phosphoglycerate mutase
MWFRQQKTGFDVELFGTELFFSIPIPFSDDDIELAGRFGISPILAIPQFQKARLMWASSSQSSVMEPTHLPSDGNSGHTPKKSSESALILIRHGESLWNEKNLFTGCVDVPLTPKGVEEAIEADDRNACHDAASAQEGMVSYKALISKKL

SEQ ID NO: 78360 - protein, 211 aa, Zea mays
  Coding DNA Sequence Number=SeqID_36581
  Gene Ontology: Mol. function=protein dimerization activity; Cellular component=nucleus; Biological process=regulation of transcription, DNA-dependent
  Homolog annotation: Hit_ID=Q9LLI9; Match level="QueryCoverage=51%, HitCoverage=8%, E-value=2e-39, Identity=74%"; Hit description =Cellulose synthase-1
  Pfam annotation: Domain name=C1_3; Domain location=146-179; Score =7.1; E_value=0.075; Accession=PF07649.3; Description=C1-like domain
  Pfam annotation: Domain name=PHD; Domain location=147-195; Score= -0.7; E_value=0.067; Accession=PF00628.19; Description=PHD-finger
  Pfam annotation: Domain name=zf-C3HC4; Domain location=148-192; Score= 2.1; E_value=0.097; Accession=PF00097.15; Description=Zinc finger, C3HC4 type (RING finger)
  Pfam module annotation: Pfam domain module=C1_3::PHD::zf-C3HC4; Domain location=146-179::147-195::148-192
MSQSPSFYPLSMEEDGPDSGVSVRVVATAHPQIGDETAKTVPRASDRRSALMAHKIRRSTIFSLYTFLGITPAATRLLMGACWCGLLIKMGMVAGSHNRNEFVMIRHDGDALVPSLLRVSARRFSMSISAMLPLRRAKPTKCANGQVCQICGDSIGVSATGDVFVACNECAFHVCRPCYEYEREGNQCCPQCKTRYKRQKCWFPGNFFECV

SEQ ID NO: 78361 - protein, 103 aa, Zea mays
  Coding DNA Sequence Number=SeqID_36582
MPGFAPCSPRSDRDFDFPTDAGAVGLTGRDPSSHGRLLVWFADQNGDGGGLAQPQQVHHDPPLRRCAGPRDYKDKDGVKGLCIVGAINNCTSQLPTYGRSSPP

SEQ ID NO: 78362 - protein, 121 aa, Zea mays
  Coding DNA Sequence Number=SeqID_36583
  Subcellular localization annotation: CTP_CleavageSite=26; ConfidenceScore=5.37e-01
MANRPPARPIATRRNPARPTHAARPPSATRGTLQPPPNQPKARPEGHERHRLFSRPPLPNFSRIVAPVLEFTPCSPRSDRDFDFPTDAGAVGLTGRDLSSHGRLLVWFADQNGDGGGLAQP

SEQ ID NO: 78363 - protein, 92 aa, Zea mays
  Coding DNA Sequence Number=SeqID_36584
MARRRSQKNKKTQENPTRKEVDDELDGVTAPLSNAVPRTTRESPALATTMRSPYLKMDSARSNWQSPSFFSSSMSDANTSASCQWCLFGVSK

SEQ ID NO: 78364 - protein, 76 aa, Zea mays
  Coding DNA Sequence Number=SeqID_36585
  Subcellular localization annotation: CTP_CleavageSite=27; ConfidenceScore=5.34e-01
MVVANAVDSRVVLGTTSDNGAVTLSSSSSTLSSTSHPSQESSVLAMSCAFDDYYIKDYGVCWGEGEDATLRLMPSP

SEQ ID NO: 78365 - protein, 76 aa, Zea mays
  Coding DNA Sequence Number=SeqID_36586
MGFEPATPQANVLVATTTPHLNQESSVLAISCAFDDYYIKDCVVILAPEVWHVLFNDETMQIVAYIEVYMILMVAI

SEQ ID NO: 78366 - protein, 47 aa, Zea mays
  Coding DNA Sequence Number=SeqID_36587
MSCMFDDYYIKDYGVILAPEVWHVLFNDETMQIVAYIEVCIILMVVM

SEQ ID NO: 78367 - protein, 47 aa, Zea mays
  Coding DNA Sequence Number=SeqID_36588
MSCVFDDYYIKDYGVILEPEVWHVLFNDETMQIAAYIEVCMILMVAT

SEQ ID NO: 78368 - protein, 47 aa, Zea mays
  Coding DNA Sequence Number=SeqID_36589
MSCASDDYYIKDYGVILAPEVWHMLFNDETMQIVAYIEVCMILIVVM

SEQ ID NO: 78369 - protein, 47 aa, Zea mays
  Coding DNA Sequence Number=SeqID_36590
MSCAFDDYYIKDYGVILAPEVWHVLFNDETTQIVAYIEVCMILMVVM

SEQ ID NO: 78370 - protein, 47 aa, Zea mays
  Coding DNA Sequence Number=SeqID_36591
MSCAFDDYYIKDYGVILAPEVWHVLFNDETMQIVAYIEVCVILMVVM

SEQ ID NO: 78371 - protein, 47 aa, Zea mays
  Coding DNA Sequence Number=SeqID_36592
MSCAFDDYYIKDYGVILAPEVWHVLFNDETMQIVSYIEVCMILMVVM

SEQ ID NO: 78372 - protein, 47 aa, Zea mays
  Coding DNA Sequence Number=SeqID_36593
MSCAFDDYYIKDYSIILAPEVWHVLFNDETMQIVAYIEVCMILMVVM

SEQ ID NO: 78373 - protein, 47 aa, Zea mays
  Coding DNA Sequence Number=SeqID_36594
MSCAFDDYYIKDYGVILALEVWHVLFNDETIQIVAYIEVCMILMVVM

SEQ ID NO: 78374 - protein, 47 aa, Zea mays
  Coding DNA Sequence Number=SeqID_36595
MSCAFDGYYIKDYGVILAPEVWHVFFNDDTMQIVAYIEVCMILMVVM

SEQ ID NO: 78375 - protein, 730 aa, Zea mays
  Coding DNA Sequence Number=SeqID_36596
  Gene Ontology: Mol. function=protein transporter activity; Cellular component=mitochondrial inner membrane; Biological process=protein transport
  Homolog annotation: Hit_ID=Q10QS4; Match level="QueryCoverage=62%, HitCoverage=67%, E-value=0.0, Identity=72%"; Hit description =Mitochondrial import inner membrane translocase subunit Tim17 family protein, expressed
  Pfam annotation: Domain name=PPR; Domain location=199-233; Score =37.3; E_value=5.3e-08; Accession=PF01535.11; Description=PPR repeat
  Pfam annotation: Domain name=PPR; Domain location=297-331; Score =41.2; E_value=3.5e-09; Accession=PF01535.11; Description=PPR repeat
  Pfam annotation: Domain name=PPR; Domain location=332-366; Score =16.2; E_value=0.09; Accession=PF01535.11; Description=PPR repeat
  Pfam annotation: Domain name=PPR; Domain location=97-130; Score=12.8; E_value=0.23; Accession=PF01535.11; Description=PPR repeat
  Pfam module annotation: Pfam domain module=PPR::PPR::PPR::PPR; Domain location=199-233::297-331::332-366::97-130
MYEHLPAFPIAPAAVGDCRGIPFDPSFLPRLLLSATSCTSPFLAERAVSALHATGLKLGALPSSLPASNALISAYSQADLLPSALRVFSLLSHPSTASYTTVLSALSRHGRPHEAISLFATSASAVAPDAELLSCLVSCCRRASALLPARAAHAYGIKNVAALAFYASAGPALVALYASRGKVGAARRVFGYMDGLDVVSWNAMIGGFASAGMDEESWACFREMHSRGVRGNARTAVVVLGSCDMESGRQVHGTIVSSHGGSSNAILWNALMSMYSRAGCVTDAERVFLEIVKKDVVSWNVMIGAFAKNGYGERALEFVDMVLQCGMKPDSVTFTAVLMACCHCGLVDEGLVLFQRFVSVVGLVPTMEQCACIVDLLARAGRFLEALEFIGQMSVRPNTVVWGALLSASKMHHNVEFAKIAFEQLVQVEPENAGNFVTMSNIYAKAGMVEDAKRVRMMIDSVEQQKIDMEKGLLELVANVSNKFVELRLERMADKKIKGTDSSRIISSTKYLQSSVGPKLIEGTNEDDLNNLQKTVSHSANFVASMQQEHPISLVLTENKSNLQEILVEQKIPTGVSINLSPKMDSSEVPCKAYSSEVDDPNTMKSNTSSCMFEASKQQECPISLSLLDKKHDLQEVYVEQNVPCGDYVALSPKADSRELTSANEVPDGFLTFSRKAYESKEAQDDYITLEASEVTYETPPAIMKRVKEDRPLIAYRFHKRQMSLGDTRH

SEQ ID NO: 78376 - protein, 254 aa, Zea mays
  Coding DNA Sequence Number=SeqID_36597
MADKKIKGTDSSRIISSTKYLQSSVGPKLIEGTNEDDLNNLQKTQEHPISLVLTENKSNLQEILVEQKIPTGVSINLSPKMDSSEVPCKAYSSEVDDPNTMKSNTSSCMFEASKQQECPISLSLLDKKHDLQEVYVEQNVPCGDYVALSPKADSRELTSANEVPDGFLTFSRKAYESKEAQDDYITLEASEGKMLLGTFGVRRSSKTGFNSISAVQCVNRYPRTKVGIAIDRNNTKVDTEPKVRAGKLRRDSKE

SEQ ID NO: 78377 - protein, 108 aa, Zea mays
  Coding DNA Sequence Number=SeqID_36598
  Subcellular localization annotation: CTP_CleavageSite=97; ConfidenceScore=5.51e-01
MVLRPALACSTDHSSEPRPSTSFRSLVCDNAFVFTPHVQQPRRRFDMTFGVRRSSKTGFNSIPAVQCVNRYPRTKVGIAVDRNNTKVDSEPKGASRKASARQQRVEPT

SEQ ID NO: 78378 - protein, 143 aa, Zea mays
  Coding DNA Sequence Number=SeqID_36599
  Subcellular localization annotation: CTP_CleavageSite=27; ConfidenceScore=5.54e-01
MVLRPALACSTDHSSEPRPSTSFRSLVCDNAFVFTPHVQQPRRRFDMTFGVRRSSKTGFNSIPAVQCVNRYPRTKVGIAVDRNNTKVDSEPKVRAGKLRRDSKEWNRLKDEKAIQTSIDYYRVIIKCKGHECNFVRAVSRVYK

SEQ ID NO: 78379 - protein, 131 aa, Zea mays
  Coding DNA Sequence Number=SeqID_36600
MQGRSQWPGSHVGLHVGRGREIRRPHHRSSPGDAWDKGVRRSSKTGFNSIPAVQCVNRYPRTKVGIAVDRNNTKVDSEPKVRAGKLRRDGKEWNRLKDEKAIQTSIDYYRVIIKCKGHECNFVRAVSRVYK

SEQ ID NO: 78380 - protein, 263 aa, Zea mays
  Coding DNA Sequence Number=SeqID_36601
  Homolog annotation: Hit_ID=Q5N9F2; Match level="QueryCoverage=17%, HitCoverage=23%, E-value=6e-15, Identity=93%"; Hit description =Putative geranylgeranylated protein NTGP1
MPPRTRKTARKSTGPFGVPRHQLAPQHEGSSSGSNDPIGDLEAQVDQLRVELRHRNDLWVADGDRINELRTEIRHLQDQLADQDLALDWAVNSRSLALAKEARARAREEELSSAVDNLQPAISVHPVERSCARGSLRGRDEDYGAPGAEAIDLSSRELLVRRRVGPGDGGDSLPAPSLNAPSQASGSPSSTKVHSHNRNGLCAVTFMDDHYPVRSAFSLLNQHTTYYVVVVALNIATMFCALDIGNAKTVCSSLDAIGCVSFK

SEQ ID NO: 78381 - protein, 81 aa, Zea mays
  Coding DNA Sequence Number=SeqID_36602
  Gene Ontology: Cellular component=integral to membrane; Biological process=vesicle-mediated transport
  Homolog annotation: Hit_ID=Q5N9F2; Match level="QueryCoverage=92%, HitCoverage=36%, E-value=9e-22, Identity=73%"; Hit description =Putative geranylgeranylated protein NTGP1
  Subcellular localization annotation: CTP_CleavageSite=56; ConfidenceScore=5.10e-01
MKITALLVLKPSTSGAGSSSSGGESGPEAVVLANAIDVSHFGYFQRSAAREFIVFVARTVAQRTQPGQRQSVQHEENSSNA

SEQ ID NO: 78382 - protein, 133 aa, Zea mays
  Coding DNA Sequence Number=SeqID_36603
  Gene Ontology: Mol. function=transferase activity; Cellular component= integral to membrane; Biological process=vesicle-mediated transport
  Homolog annotation: Hit_ID=Q7XYD1; Match level="QueryCoverage=67%, HitCoverage=52%, E-value=5e-36, Identity=82%"; Hit description =Geranylgeranylated protein ATGP1
MPAQVSNTRILVCDLVLANTMDVSHFGYFQRSAAREFIVFVARTVAQRTQPGQRQSVQHEEYKVHSHNRNGLCAVAFMDDHYPVQSAFSLLNQRKFSQLSFFGAWFIIKMLTTLFTTMEMLDKNVDNFIAIVK

SEQ ID NO: 78383 - protein, 350 aa, Zea mays
  Coding DNA Sequence Number=SeqID_36604
MAELVLGRRSPYGRCRGRVLSARSFVQAGQSGRGLPGLGQLFLVVGPRQRFGPNTMNQQEAPMGVGEFLRDFGVPVVLWRLLEEVGYTEAPKYQWSRTVLRGQPWYEVVVRIPERARKPSWPYWMFHAEGMTPWEGAQVAALEALTTICYQKWEEIQVTSMRLFPAVALSDPFVYHHQARLMESIPIGQDSVESASARVLMVVLELQLTRGHSRQKWQQLYTGSYAAFKMMEMAKNRACTQAQERLEETKVQAEQIIGLEHQVTELQTQHQADQNRIKELEHQLTNAHSKSKVLSQQQEEIRLYAVVVRADLKETISFISHQDQAIKELNRAHPMEFQVAQRLVNHLQQA

SEQ ID NO: 78384 - protein, 73 aa, Zea mays
  Coding DNA Sequence Number=SeqID_36605
MGTSPVRPRDGCGRSSTDSADSVLGGESDPRKEKMFLVSGPGCHLQKYRAMDMGQPLAGDKNATAADGRRRLR

SEQ ID NO: 78385 - protein, 79 aa, Zea mays
  Coding DNA Sequence Number=SeqID_36606
MTRDLDTNMRQAAESCVYIHRRLSVSPRFTVGRKRPFVNQLHRGRGPEKVQCTIKCFSRYMRRSDFCPDKIRRDVRVQL

SEQ ID NO: 78386 - protein, 312 aa, Zea mays
  Coding DNA Sequence Number=SeqID_36607
MDMGQPLAGDKNATAADGRRRLRAGELASTITAGEAHPIAAENEEESEVTEEKTPPPLESQTETWLYFDICESEPDSPVNEGKPRCADRGPFNWSHASSWHTLESLFLSRVRKRQIFVAFAPRWYQMRKNKTEVREDSVLHLGSFAYNLSGGVCASLGLYNITTLHSLLALTGETFLVRNDLWVTDAAIRYLQDQLAKRDLALDWAVNSRLLAWAKEAKARAHVEELSLAMDNLQVYNTLHKEVHVLYSQLHPNIPADLVGTEVGPSHVAGEALDGALDLFRPPPSMKLVDEWSFTPDSKATKSKKWLTKYP

SEQ ID NO: 78387 - protein, 333 aa, Zea mays
  Coding DNA Sequence Number=SeqID_36608
  Homolog annotation: Hit_ID=Q6YTI2; Match level="QueryCoverage=24%, HitCoverage=18%, E-value=6e-12, Identity=48%"; Hit description =Putative calmodulin-binding protein phosphatase
  Subcellular localization annotation: CTP_CleavageSite=16; ConfidenceScore=5.03e-01
MRTYGVAAPTSCASTSAAHAASTRDGLLALRCLDRDARLFKRCRDESAPAVPASNSTPTPTKAALPARITYPILIPSLSPDVAARRDAIESEVLALSVCIHLGLWLEAMTVQSAFTCNWKFVFWAMRSYEYAWLVTHHKLRWQEAVEAKGLRDDTTCIVIDIISPKKPKHTIQSQRTPGKGLVLLKNFFLRKTTSNSLSLHYKNNYSEPDLEEVFEGGCPSLSRRYHWNSVFSSTNNGLVALEKEGVMIPQSVQCAGSGTWNHQAENSAARSDPTVVSTTQTKTDNKSRSTTEFGLGRNRKLRLARPQAPASGGGFRLARPQAPASGGGLRLA

SEQ ID NO: 78388 - protein, 200 aa, Zea mays
  Coding DNA Sequence Number=SeqID_36609
  Homolog annotation: Hit_ID=Q6YTI2; Match level="QueryCoverage=40%, HitCoverage=18%, E-value=3e-12, Identity=49%"; Hit description =Putative calmodulin-binding protein phosphatase
MGNLLQPGALEAVEAKGLRDDTTCIVIDIISPKKPKHTIQSQRTPGKGLVLLKNFFLRKTTSNSLSLHYKNNYSEPDLEEVFEGGCPSLSRRYHWNSVFSSTNNGLVALEKEGVMIPQSVQCAGSGTWNHQAENSAARSDPTVVSTTQTKTDNKSRSTTEFGLGRNRKLRLARPQAPASGGGFRLARPQAPASGGGLRLA

SEQ ID NO: 78389 - protein, 141 aa, Zea mays
  Coding DNA Sequence Number=SeqID_36610
MQAACNRTRRAHPFDFAASGMEAQAHTSWTGKGDIPTSGSGLRRRSPPRLTPELGLDRGLGRNHATRSKTGVPSGLPRRRVMMVPRVRHDASGSQPLTTARRRQQDPRRAASCAPTGLRRSSGGHAITCTGPKLSPNGHVG

SEQ ID NO: 78390 - protein, 54 aa, Zea mays
  Coding DNA Sequence Number=SeqID_36611
MDIVLAFSLHGLRTEPAWTGNEPDYQTLNTNVISCRLKVGSRFLKILSLAKQIR

SEQ ID NO: 78391 - protein, 46 aa, Zea mays
  Coding DNA Sequence Number=SeqID_36612
MDIVLAFSLHGLRTEPAWTGNEPDYQTLNTNVISCRLKVGSRFLQY

SEQ ID NO: 78392 - protein, 46 aa, Zea mays
  Coding DNA Sequence Number=SeqID_36613
MDIVLAFSLHGLRTEPAWTGNEPDYQTLNTNVISCRLKVGSSFLQY

SEQ ID NO: 78393 - protein, 252 aa, Zea mays
  Coding DNA Sequence Number=SeqID_36614
MTVSSASIPVLHSAEVVPFTHKSCYPSAKGSRLPIHLYRGGEAGTAIAAKSSRGPPYTDHSPTALAPFGLKLATFGNFQGDSAIIHRTVRCTPDSVRCAKGGRPQELASFGKSQRLVHYNSPDCPVCTGLSGATPEQRLLRANGYLLRHLMRAQRAQESESPMLAHRTSNSTCPVCTGHPGGPTSQKLQRSESNGSDDVAGGTGLSGSVVARSTVNESVPRKSAKCRLALFRRLSDLRPSGRALPHSSPSAN

SEQ ID NO: 78394 - protein, 241 aa, Zea mays
  Coding DNA Sequence Number=SeqID_36615
  Homolog annotation: Hit_ID=P0ABC9; Match level="QueryCoverage=13%, HitCoverage=4%, E-value=2e-08, Identity=87%"; Hit description=High -affinity choline transport protein
MTVSSASIPVLHSAEVVPFTHKSCYPSAKGSRLPIHLYRGGEAGTAIAAKSSRGPPYTDHSPTALAPFGLKLATFGNFQGDSAIIHRTVRCTPDSVRCAKGGRPQELASFGKSQRLVHYNSPDCPVCTGLSGATPEQRLLRANGYLLRHLMRAQRAQESESPMLAHRTSNSTCPVCTGHPGGPTSQKLQRSESNGSDDVAGGTGLSGVHRTVRGKSTYYRLETFLLEGSQGNDLMDYSKEQ

SEQ ID NO: 78395 - protein, 55 aa, Zea mays
  Coding DNA Sequence Number=SeqID_36616
MARCMGVATPWQMGNMTCGYRHLRTSPQQGTTSAECKTGILAELTVMSSLGLSHD

SEQ ID NO: 78396 - protein, 47 aa, Zea mays
  Coding DNA Sequence Number=SeqID_36617
MSNFPTVPATRLWRSSTGRGSEDIRKPSNSSKAFKRLQHSSDGHDIT

SEQ ID NO: 78397 - protein, 163 aa, Zea mays
  Coding DNA Sequence Number=SeqID_36618
MGQRETEHEGGKGDRQKGKPAAFVLSCAQVRRKEKVQSSSSSGAEAESKPWGRARRSPSSEAETGAEPWGRARRSFLWRLGPDLATVSLTLSSGTTVGATQAALSSCQAGQWSGETILALNAPAIWSVGVAIWPRLLLGEDWASGEPKLCADGGYQLRLGVLG

SEQ ID NO: 78398 - protein, 73 aa, Zea mays
  Coding DNA Sequence Number=SeqID_36619
MSAARRLRLATEGGLEAWLPKLAASARRLGCGDGGHSSGSSGHGDVGRQICRQIRIRRRDQELKEPVRGGLDS

SEQ ID NO: 78399 - protein, 396 aa, Zea mays
  Coding DNA Sequence Number=SeqID_36620
  Homolog annotation: Hit_ID=Q6EPF2; Match level="QueryCoverage=21%, HitCoverage=23%, E-value=6e-09, Identity=42%"; Hit description=Ring zinc finger protein-like
MDARALAPCRHVTPWCRPAGPWAVQASATCAQQRDRVQLPAPREVMGLGPTPASLRRRDREEPLLWPPSPQPNLRADAASFGNQASNPPSVARRSRLAALIGRAAGRRGPSMLVHEMAALQLQRRRVDWAHSRPVLALDIAWNVAFAATAAAMLSSSAEESPIKPLHLWVFPSSFSDEAESPRGARRGGAVPRCWCARRRRCNCSGGARTGRTPAPSSCSTLPRTSGRRGPSMLVHEMAALQLQRRRVDWAHSRPVLALDIAWNVAFTAAAAAMLSSSAEESPIKPLHLWVFPSSFSDEAESPRGARRGGAVPRCWCARRRRCNCSGGARTGRTPAPSSCSTLPRTSPSPRRPPPCSCPLLRRAPSSRSDCGSSDSSDADSEDDERAEGRSRWDTI

SEQ ID NO: 78400 - protein, 390 aa, Zea mays
  Coding DNA Sequence Number=SeqID_36621
  Gene Ontology: Mol. function=metal ion binding; Cellular component =proton-transporting two-sector ATPase complex; Biological process =ATP synthesis coupled proton transport
  Homolog annotation: Hit_ID=Q8GUU2; Match level="QueryCoverage=68%, HitCoverage=48%, E-value=2e-23, Identity=43%"; Hit description=RES protein
MAALQLQRRRVDWAHSRPVLALDIAWNVAFAATAAAMLSSSAEESPIKPLHLWVFPSSFSDEAESPRGARRGGAVPRCWCARRRRCNCSGGARTGRTPAPSSCSTLPRTSGRRGPSMLVHEMAALQLQRRRVDWAHSRPVLALDIAWNVAFTAAAAAMLSSSAEESPIKPLHLWVFPSSFSDEAESPRGARRGGAVPRCWCARRRRCNCSGGARTGRTPAPSSCSTLPRTSPSPRRPPPCSCPLLRRAPSSRSDCGSSGTPPSDWSTSGSSAPTPAARHGAPEDRCLMSSLPVLGQTARTPTAKMTKGRKGGAAILRYLDYSHSYTGRCETMNTLISFLWWIIGFYWIFSGGEVLKHGAPRLYWYATFIFVASGFTNDNVQLVWFDYTKD

SEQ ID NO: 78401 - protein, 250 aa, Zea mays
  Coding DNA Sequence Number=SeqID_36622
  Gene Ontology: Mol. function=transferase activity
  Homolog annotation: Hit_ID=Q6EQX0; Match level="QueryCoverage=38%, HitCoverage=29%, E-value=8e-41, Identity=83%"; Hit description =Putative glutathione transferase
MSGAHRTVRCHLLAVGSATCPAQIARPTVGPADRWLTGQSGAHRTVRCTPDSPKWPKGTFPFHPLNGARSVRELYEIASSNYAGKPTVPVLWDKQLKTVVNNESSEIIRMLNAEFNGIARNPGLDLYPAHLQASIDEANELVYDAINNDVYKCGFAKKKDGCVLVPDLGLLTNIHDRARELFYYLKGGQVDYGEEHIKACDHNRALSCLLRAQPSAFCGALCWHVGCEGAATDACRQARLIAAMAISYEL

SEQ ID NO: 78402 - protein, 120 aa, Zea mays
  Coding DNA Sequence Number=SeqID_36623
MAVDSGDAAEGKSRDTDGGVVARMEGAAEPRSVRQRTRTAGHTAFLVDWRAEEDGRDENWVVGGFNGGRGELPRQAWHTVMGRRGVGVTVEQTMQIDRVETNGSDRRKAEQGEAAYPLPS

SEQ ID NO: 78403 - protein, 516 aa, Zea mays
  Coding DNA Sequence Number=SeqID_36624
  Homolog annotation: Hit_ID=Q6EQX0; Match level="QueryCoverage=22%, HitCoverage=35%, E-value=2e-40, Identity=71%"; Hit description =Putative glutathione transferase
EDTAPAPRSRAVRPKPADRPRRRRGHYQAIRRPVAGRHYCSPCGAEPKVPSTAKRFIIVFGDQKGINILFGDSAGDEVADLQNQAYMADSKDLNSASPNSDTRLTNLSAAEHENLEDDMKKMDEEIQRQQDQMLKVAKKWYLSHFKVDRHQKVVKEREMDADYMSSMLQQLPTIGDARSDRPEHQKSLVIRLMRKADINITGHPSPKNQKRKTPLLRLGHGPSGPRPRTVRAVAEGPTRRSGDLSQAATTVHLAKPNPSQSEPFVSTRSICTVRSTVTPTPRLGNSPLPPPASQFSALPSSSARQSAKKAVCPAVLVRCLTLRGSAAPSIRASTLPFGRISTVHRHNGLATKVEKSRKQMKERKNRVTKIRGVKKTKAGDAKKKGGSYLPCHFSHHRLWHTTRCLAFLKLKGLDHAIGVTVVKPIFERTKESDEHLGWVFPAAADEEPGAEPNPLNDARSVRELYEIASSNYAGKPTIPVLWDKQLKTVVNNESSEIIRMLNAEFNGIARNPGLDL

SEQ ID NO: 78404 - protein, 376 aa, Zea mays
  Coding DNA Sequence Number=SeqID_36625
  Gene Ontology: Mol. function=DNA binding; Biological process =regulation of transcription
  Homolog annotation: Hit_ID=Q8RV35; Match level="QueryCoverage=52%, HitCoverage=68%, E-value=3e-16, Identity=32%"; Hit description =Putative OsNAC protein
MAANDHVFRATNEASVALLRSLRAGTVDQRFKAFIHHADVYTAAPEELVAGLEPVPGTNVTEDGYNRQWYIYCPKRYKNGEGRTSGHRLRAVETAGTCWHTETGPKPMQGLPGATVCSLSYGHKEKEDEGTSGRHRFHRMGWRMFEYDDTQGGGGDHVLCKVHRSSSSLAKNKSKAKRTATGDHPEAPPTKVIHDVQVQMQDPAGAIFTGAYPTMDDPLLMVRGEEASEAEHGGDLGKFNIGGLLLNIDNVDWKALLDNVDGEQQQQQPCAEPAKQSSVQVQVDPAATLMPSNVHGHEQGRDSMMVGGEEGQRRRIEEQVSVDDLLDVNNVDWKALLDMLEDDEEQGLPLQQQPCAEPAAEQSQSSRIEDPAVPPV

SEQ ID NO: 78405 - protein, 156 aa, Zea mays
  Coding DNA Sequence Number=SeqID_36626
  Homolog annotation: Hit_ID=Q8RV35; Match level="QueryCoverage=64%, HitCoverage=31%, E-value=3e-07, Identity=36%"; Hit description =Putative OsNAC protein
MGCRGDTQIRVMIGLADKPSPASSPATRERTLAGRHHLEIGDRWHMAANDHVFRATNEASVALLRSLRAGTVDQRFKAFIHHADVYTAAPEELVAGLEPVPGTNVTEDGYNRQWYIYCPKRYKNGEGRTSGHRLRAVETAGTCWHTETGPKLPSAK

SEQ ID NO: 78406 - protein, 429 aa, Zea mays
  Coding DNA Sequence Number=SeqID_36627
  Homolog annotation: Hit_ID=Q8RV35; Match level="QueryCoverage=46%, HitCoverage=68%, E-value=4e-16, Identity=32%"; Hit description =Putative OsNAC protein
MKHYSLEDNEPWTKVDKNTITKLADKPSPASSPATRERTLAGRHHLEIGDRWHMAANDHVFRATNEASVALLRSLRAGTVDQRFKAFIHHADVYTAAPEELVAGLEPVPGTNVTEDGYNRQWYIYCPKRYKNGEGRTSGHRLRAVETAGTCWHTETGPKPMQGLPGATVCSLSYGHKEKEDEGTSGRHRFHRMGWRMFEYDDTQGGGGDHVLCKVHRSSSSLAKNKSKAKRTATGDHPEAPPTKVIHDVQVQMQDPAGAIFTGAYPTMDDPLLMVRGEEASEAEHGGDLGKFNIGGLLLNIDNVDWKALLDNVDGEQQQQQPCAEPAKQSSVQVQVDPAATLMPSNVHGHEQGRDSMMVGGEEGQRRRIEEQVSVDDLLDVNNVDWKALLDMLEDDEEQGLPLQQQPCAEPAAEQSQSSRIEDPAVPPV

SEQ ID NO: 78407 - protein, 164 aa, Zea mays
  Coding DNA Sequence Number=SeqID_36628
  Gene Ontology: Mol. function=carboxyl- and carbamoyltransferase activity; Cellular component=ornithine carbamoyltransferase complex; Biological process=amino acid metabolic process
  Homolog annotation: Hit_ID=Q8SA97; Match level="QueryCoverage=55%, HitCoverage=13%, E-value=2e-11, Identity=51%"; Hit description =Ornithine carbamoyltransferase
MARHGTRSNEGPGPPPPPNFLPDNVPAVVERKERIQVYNGGVAECYVSSGGRASALSTCQCGSRRDLGTLLVGRRGGSSEAEVESVFHGRGRARAPGSGEAEVVRQRLGRSPSPGVGRSGVRRLLGLSPSPSPRSGGAEFAVFRGLARVQALGRAERSSPSSGA

SEQ ID NO: 78408 - protein, 70 aa, Zea mays
  Coding DNA Sequence Number=SeqID_36629
MKLWKETSRSSKTTTSSRCGLAATPSRLPMKAAFIYVSFPHFDLLRKERIQVYNGGVAECYVSSGGEIAP

SEQ ID NO: 78409 - protein, 497 aa, Zea mays
  Coding DNA Sequence Number=SeqID_36630
  Homolog annotation: Hit_ID=Q6K1W0; Match level="QueryCoverage=22%, HitCoverage=42%, E-value=8e-11, Identity=33%"; Hit description=NAM -like protein
  Subcellular localization annotation: CTP_CleavageSite=42; ConfidenceScore=5.04e-01
MWRLSSVRYPGNGSSSRHGEESGTSFPLSLAIPFLSAVPLSRCALSEAATKLGSKRPWVGGSCSGPLHALGRKEEGGVESPIEVVRGTAAVPRRRLAITKRLRRQLPSFKIGAEKRKRNRRTMTSDWNHLMPKYGSFLSQADLDNLDPDHFGNNLQLDGNAEGSTPPSSVKKATQPTKLANFFSEDDMRLCHAWLAVSCDPIVSTGQKRQGFWNRITEAYNSRHGTMPERTTKSLMSRWDSIKTQCSIFSGYMTVVLRQNPSGLSDATRMNRNGWTITWVSKIRDLTQFQINPTLSTLMHSSKEKAKKARSVDTSSTDSKYLTRMGELSLEHLSVYKSVASTKERKLESMNRVNRQKLILEKKLNLEKVKIDRQKLKEDKEEEVMIPNMDLIFNVSSMYRGKRTEDDLQVLDRIRRADVGRTARVGRLVLGGGADVEQGVGLVAAGTELGWAFSRRSGNSAAADRAGARSDGAGQRIQVYNGGVAECYVSSGGELAP

SEQ ID NO: 78410 - protein, 348 aa, Zea mays
  Coding DNA Sequence Number=SeqID_36631
  Gene Ontology: Mol. function=cysteine-type peptidase activity; Biological process=proteolysis
  Homolog annotation: Hit_ID=Q53MK8; Match level="QueryCoverage=75%, HitCoverage=28%, E-value=7e-23, Identity=27%"; Hit description=Ulp1 protease family, C-terminal catalytic domain, putative
MKNVDRPPSNPKRIIIQSTQECFSVDIPRAPAGTVRPETRHAADEDDDFMPLSKKRNLDDSPGKVLKKVVTNRRKAVPPPRQQRLNVRCNPQDVLVSIQILNDRQQQAIARRGFSSILDMRLDALGSRSHLAWLMEKLDHNDMTIRAGPGKELKITKDTVHLILGLPNAGGGTALGIDEAVVANNLRAELGLSKEDFGVTALQDRLRKGSDDDLSIRCFFLILFNRLLFPTASWGITNHEVLLTEQMDRFHQIDWCQLIFNDLCQAAKKWHNRSVTNVSTTIYGCSIVILNFNIIFSDMLYIYLIIFNLQQHKTRTNTFDVPRPDPSGQHSIHIELPLIRDLISSKLN

SEQ ID NO: 78411 - protein, 342 aa, Zea mays
  Coding DNA Sequence Number=SeqID_36632
  Gene Ontology: Mol. function=cysteine-type peptidase activity; Biological process=proteolysis
  Homolog annotation: Hit_ID=Q53MK8; Match level="QueryCoverage=74%, HitCoverage=26%, E-value=2e-28, Identity=29%"; Hit description=Ulp1 protease family, C-terminal catalytic domain, putative
MKNVDRPPSNPKRIIIQSTQECFSVDIPRAPAGTVRPETRHAADEDDDFMPLSKKRNLDDSPGKVLKKVVTKRRKAVPPPRQQRLNVRCNPQDVLVSIQILNDRQQQAIARRGFSSILDMRLDALGSRSHLAWLMEKLDHNDMTIRAGPGKELKITKDTVHLILGLPNAGGGTALGIDEAVVANNLRAELGLSKEDFGVTALQDRLRKGSDDDLSIRCFFLILFNRLLFPTASWGITNHEVLLTEQMDRFHQIDWCQLIFNDLCQAAKKWHNRSVTNVSTTIYGCSIVILLYYLDPLHDSAAPQNKRGTPRIKYFDRNIIQALTRADKGKIRKGEEAFGHCS

SEQ ID NO: 78412 - protein, 231 aa, Zea mays
  Coding DNA Sequence Number=SeqID_36633
  Gene Ontology: Mol. function=cysteine-type peptidase activity; Biological process=proteolysis
IRPGQTLLMYLVLTHLDSTQFTSNSRSSGILISSKLNQLPSCHRLGFIEKLSHFDTEVGKACSVIKQTLQQIVEKQYNLSDVFGELIDEVLRAESGDNEDGYDVQKTNSKSDDILPQTAEGCTCPAPPTVPDMSTPFSQQDTQFKDTQGKHGDGGKNMPTNTNVTPKATPHMEPDAPIFDATPQIKSTGGVQQAAETDLPDSGPCFDQTPSEHVSVELIQLQTLHRSWFPW

SEQ ID NO: 78413 - protein, 97 aa, Zea mays
  Coding DNA Sequence Number=SeqID_36634
  Gene Ontology: Mol. function=cysteine protease inhibitor activity; Biological process=defense response
  Homolog annotation: Hit_ID=Q4FZ48; Match level="QueryCoverage=81%, HitCoverage=45%, E-value=3e-38, Identity=97%"; Hit description =Putative cystatin
  Pfam annotation: Domain name=Cystatin; Domain location=8-96; Score =9.6; E_value=0.027; Accession=PF00031.11; Description=Cystatin domain
MAGEAGAGGSRSARAAENVKDPYVQGVGEWAVKEHNRQTGESLQFAEVVSGMEQVVAGTNYKLNLATKDPTSSYQAVVFDPLPNSTKKRQLMSFKSI

SEQ ID NO: 78414 - protein, 184 aa, Zea mays
  Coding DNA Sequence Number=SeqID_36635
  Homolog annotation: Hit_ID=Q4FZ48; Match level="QueryCoverage=45%, HitCoverage=48%, E-value=1e-38, Identity=95%"; Hit description =Putative cystatin
  Pfam annotation: Domain name=Cystatin; Domain location=112-182; Score= 3.3; E_value=0.1; Accession=PF00031.11; Description=Cystatin domain
MAYVTGNKPCGRIRPSAERQRRGHVPSGPDGVVSENATLTAHEIPLGLFSAQLRVAAQASCLHTVVRGTPNPGRCNSYKGHHVNNELIGVQTVKVIAIWRSARAAGVTTLSGQYVKIENVKDPYVQGVGEWAVKEHNRQTGESLEFAEVVSGMEQVVAGTNYKLNLATKDPTSSYQAVLPSSCV

SEQ ID NO: 78415 - protein, 182 aa, Zea mays
  Coding DNA Sequence Number=SeqID_36636
MPWGHIACQKGGKAACPLRNKCGGRAAQSPYVMLRPLAYVMDNKPCGSIRPLTGWGAEALRIEPGHASIPDLCLGHGTSSPGTLLWVVWSSLGGVRTLSNGSRLLYFWGPGCAPRGHVSSGPDGVVSENATSTAHEILLVTVGPPMVTPTATPAPAADWPVTSVLNVFVGPCAGCLELLRRF

SEQ ID NO: 78416 - protein, 161 aa, Zea mays
  Coding DNA Sequence Number=SeqID_36637
MKAKSHHQPNQGGTCKNCATSKAEYTNTQLDLPGYNGSSSLISCEKQTIRIEFLNLARPHRLGIQCSTDPGHRRAVAALVPTISRMGDPVSGRVRDKVRARLHSGIRTLILIPILSHRQRIPMDPCPQTIIILLSKWIQAIPDLARVLEKSLDFYRDSDLA

SEQ ID NO: 78417 - protein, 93 aa, Zea mays
  Coding DNA Sequence Number=SeqID_36638
MKAKSHHQPNQGGTCKNYATSKAEYTNTQLDLPGYNGSSSLISCEKQTIRIEFLTLQGLTALAYNTPLTPAAAVQWPHLYPPYLEWETQSQVA

SEQ ID NO: 78418 - protein, 94 aa, Zea mays
  Coding DNA Sequence Number=SeqID_36639
MKAKSHHQPNQGGTCKNYATSKAEYTNTQLDLPGYNGSSSLISCEKQTIRIEFYPCKDECPSGQGVTLHKIATAIGGGVSVAKAQRLWKAVVGP

SEQ ID NO: 78419 - protein, 95 aa, Zea mays
  Coding DNA Sequence Number=SeqID_36640
MVPTSKAWDKIKKTNPQPRCRSANGGMKAKSHHQPNQGGTCKNYATSKAEYTNTQLDLPGLTALAYNAPLTPAAAVQWPHLYPPYLEWETQSQVA

SEQ ID NO: 78420 - protein, 59 aa, Zea mays
  Coding DNA Sequence Number=SeqID_36641
MVPTSKAWDKIKKTNPQPRCRSANGGSTCRDWMPAYLKELGTAPRRRPRLGPGPEHSFG

SEQ ID NO: 78421 - protein, 61 aa, Zea mays
  Coding DNA Sequence Number=SeqID_36642
MVPTSKAWDKIKKTNPQPRCRSANGGLTALAYNAPLTPAAAVQWPHLYPPYLEWETQSQVA

SEQ ID NO: 78422 - protein, 129 aa, Zea mays
  Coding DNA Sequence Number=SeqID_36643
  Gene Ontology: Mol. function=hydrogen ion transporting ATP synthase activity, rotational mechanism; Cellular component=proton -transporting two-sector ATPase complex; Biological process=ATP synthesis coupled proton transport
  Homolog annotation: Hit_ID=Q84LS4; Match level="QueryCoverage=68%, HitCoverage=57%, E-value=2e-32, Identity=69%"; Hit description =Superal1
  Subcellular localization annotation: CTP_CleavageSite=43; ConfidenceScore=5.02e-01
MQAKMQVIGKSMQSIVKSLNSMLATRNLQKMFETMDNFERQFVNMEVADDYGLEVFVGLPQATAHAIPAAKDKEKVDEYDLSRRLAELKAHDWEGLSVFSGDDRFILAPAHLACALLWLPSNVVEELLV

SEQ ID NO: 78423 - protein, 131 aa, Zea mays
  Coding DNA Sequence Number=SeqID_36644
  Gene Ontology: Mol. function=hydrogen ion transporting ATP synthase activity, rotational mechanism; Cellular component=proton -transporting two-sector ATPase complex; Biological process=ATP synthesis coupled proton transport
  Homolog annotation: Hit_ID=Q84LS4; Match level="QueryCoverage=64%, HitCoverage=55%, E-value=7e-28, Identity=65%"; Hit description =Superal1
MQVIGKSMQSIVKSLNSMLATRNLQKMFETMDNFERQFVNMEVADDYGLEVFVGLPQATTHAIPAAKDKEKVYEYDLSCRLAELKVYDWEGLSVFSGKGGLAFIEAFLAQKIYFRKFGLRPFFQGYGFRIC

SEQ ID NO: 78424 - protein, 198 aa, Zea mays
  Coding DNA Sequence Number=SeqID_36645
  Homolog annotation: Hit_ID=Q84LS4; Match level="QueryCoverage=42%, HitCoverage=55%, E-value=1e-27, Identity=65%"; Hit description =Superal1
MQVIGKSMQSIVKSLNSMLATRNLQKMFETMDNFERQFVNMEVADDYGLEVFVGLPQATTHAIPAAKDKEKVYEYDLSCRLAELKVYDWEGLSVFSGKGGLAFIEAFLAQKIYFRKFGLRPFFQGYGFRICEADDSKGRLNSVGGGWEGAVHGEVAEFRGGDHRRWALGEGLGLGSGASGSRPREGAARLTQFLAGPT

SEQ ID NO: 78425 - protein, 43 aa, Zea mays
  Coding DNA Sequence Number=SeqID_36646
MARVRGDCLGRVVPVPCSSQGYYTKVLELYLRNNFGNGSIAKL

SEQ ID NO: 78426 - protein, 154 aa, Zea mays
  Coding DNA Sequence Number=SeqID_36647
MARVRGDCLGRVVPVPCSSQGYYTKVLELYLRNNFGNKFPEEDDKIQEVVSEEESASVPAHQACMIKDYLNWPHALDMGQGKLEPGYSIHEKTIAHWEWRDGESGTYPPGKGPPKRGGALSGGADLFMQWRIRGNGRHMQGLSATYVVWLEILS

SEQ ID NO: 78427 - protein, 154 aa, Zea mays; identical to SEQ ID NO: 78426
  Coding DNA Sequence Number=SeqID_36648

SEQ ID NO: 78428 - protein, 176 aa, Zea mays
  Coding DNA Sequence Number=SeqID_36649
MQPPDHQVTWDEFKLAFWEHYIPEGVLHMKQEEFMKLKQGAVSQQVQSFVPKMATCLDLSYSRDVSTALAVEAKYAGPGKSKGFGGDRSNQGPEKRQSLYSSVLPLPPLQQLSRVPLVLVSPHSRVQQLAASIVGSLDTSSKTARIRGVTTLIISKTLGVQAKARETRQIMQQEKI

SEQ ID NO: 78429 - protein, 85 aa, Zea mays
  Coding DNA Sequence Number=SeqID_36650
MVLVAEREAQEGKEPGSLGAATETRIVQKPVYYVSEVLHEAKALQEICPFMTKYLMTRNCAIGVDLEVPIDDLSGLLLIMCPDCK

SEQ ID NO: 78430 - protein, 120 aa, Zea mays
  Coding DNA Sequence Number=SeqID_36651
MVLVAEREAQEGKEPGSLGAATETRIVQKPVYYVSEVLHEAKALQEICPFMTKYLMTRNCAIGVDLEVPIDDVTGLLLIMCPDCKDVRVFAANTTYSNNVGKRFFKCPRKNRRNVSEVVE

SEQ ID NO: 78431 - protein, 200 aa, Zea mays
  Coding DNA Sequence Number=SeqID_36652
MVLVAEREAQEGKEPGSLGAATETRIVQKPVYYVSEVLHEAKALQEICPFMTKYLMTRNCAIGVDLEVPIDDVTGLLLIMCPDCKDVRVFAANTTYSNNVGKRFFKCPRKNRRNGTCDRFWFEEEYLVFLQDNGYLPSASSTITASSTTKVPELLGKIDSLEQNLNKVTKMEIWAFVLLDTSCVICVFVMYVGNKDIYCL

SEQ ID NO: 78432 - protein, 289 aa, Zea mays
  Coding DNA Sequence Number=SeqID_36653
MTLDVKLILDEFNRRFDEWETRWDRRFSSAAYIDQPPTPPSVNHPSDASARAPPTRAAAVGAVVTADNWGGCFDDGELYCAAPSVIADDWGGLFDGEVATVNTEFADHRYGPSSTDPDAPHDADADSFFINTGEGPVEPIFGDTAVGAFGDVGAVPDLVAEEEVPVDTPTKCLMRVLNRGDYYGADASSAVDAAVVLLAEAGCTLLIPPHHPSVPAPCLLEGLAAFAASSPARLHQMLLPTALHMPEPRSCTPLLSRAPLLTRALTETVLVYPPQRMFEEFSDKELTQF

SEQ ID NO: 78433 - protein, 297 aa, Zea mays
  Coding DNA Sequence Number=SeqID_36654
  Homolog annotation: Hit_ID=Q69NX2; Match level="QueryCoverage=21%, HitCoverage=6%, E-value=2e-09, Identity=52%"; Hit description =Putative fanconi anemia, complementation group D2
MTLDVKLILDEFNRRFDEWETRWDRRFSSAAYIDQPPTPPSVNHPSDASARAPPTRAAAVGAVVTADNWGGCFDDGELYCAAPSVIADDWGGLFDGEVATVNTEFADHRYGPSSTDPDAPHDADADSFFINTGEGPVEPIFGDTAVGAFGDVGAVPDLVAEEEVPVDTPTKCLMRVLNRGDYYGADASSAVDAAVVLLAEAGCTLLIPPHHPSVPAPCLLEGLAAFAASSPARLHQMLLPTALHMPSLARALLSFPALHCSLEHSQRRYKVLVYPPQRMFEEFSDKVLHRLGGKPKL

SEQ ID NO: 78434 - protein, 534 aa, Zea mays
  Coding DNA Sequence Number=SeqID_36655
  Homolog annotation: Hit_ID=Q69NX2; Match level="QueryCoverage=11%, HitCoverage=6%, E-value=4e-09, Identity=52%"; Hit description =Putative fanconi anemia, complementation group D2
MTLDVKLILDEFNRRFDEWETRWDRRFSSAAYIDQPPTPPSVNHPSDASARAPPTRAAAVGAVVTADNWGGCFDDGELYCAAPSVIADDWGGLFDGEVATVNTEFADHRYGPSSTDPDAPHDADADSFFINTGEGPVEPIFGDTAVGAFGDVGAVPDLVAEEEVPVDTPTKCLMRVLNRGDYYGADASSAVDAAVVLLAEAGCTLLIPPHHPSVPAPCLLEGLAAFAASSPARLHQMLLPTALHMPSLARALLSFPALHCSLEHSQRRLHGGVDWISSYGGYMHVNGDNILHQELGVVNQCSYNWAVGKISGVTGFYKQHNEGLPCGAASLHTSWLMQQKPFTSLQQIEEGILVQMAQEVQCMNWQVLVYPPQRMFEEFSDKLSLNKDGGAGKNLYIIKTVLFQLEVLLHITVFCEVSAVSNKFITFPWNPGVSKVLHRLGGKPKLKKELATNIERHLLPEMLEVANGYIFHELHLTLASIGVTHMISCGKYLIWIIGLLTPWDPGRVVLNLKFVMLWLEGKPNLKKGGMSGIQ

SEQ ID NO: 78435 - protein, 140 aa, Zea mays
  Coding DNA Sequence Number=SeqID_36656
  Homolog annotation: Hit_ID=Q75GY0; Match level="QueryCoverage=57%, HitCoverage=35%, E-value=2e-31, Identity=72%"; Hit description =Expressed protein
MECRLHHLALLLGLLVWAAAAATGGGAQPVCEPSIIATQIALFCMPDMPTAPCCEPIIASIDLGGGVPCLCRVAAQPQLVLARLNATHHLALYASCGGQHTMGAHLAAACQQDLVLSFLRSSLLDGVSLRVSETFMLFSF

SEQ ID NO: 78436 - protein, 773 aa, Zea mays
  Coding DNA Sequence Number=SeqID_36657
  Homolog annotation: Hit_ID=Q75GY0; Match level="QueryCoverage=9%, HitCoverage=33%, E-value=1e-27, Identity=72%"; Hit description =Expressed protein
  Pfam annotation: Domain name=OmpH; Domain location=230-598; Score= -23.4; E_value=0.054; Accession=PF03938.4; Description=Outer membrane protein (OmpH-like)
MNSGSRKITRDSQEQRKQRFETTKKPVPVTGCLTPSPPPPAFMECRLHHLALLLGLLVWAAAAATGGGAQPVCEPSIIATQIALFCMPDMPTAPCCEPIIASIDLGGGVPCLCRVAAQPQLVLARLNATHHLALYASCGGQHTMGAHLAAACQQAPSPPATVLVLAPPPPQAANTRDDPSPAAAEQEAVPYRGHRRRPRPGQPHASPAAAPTMPPPPPPHSGSDKGCVVVVSAALELVFFVMAGIVFVLDLRRQLVGLKSPNLGSRTGRGARALRRHHLQIRYCHHRRSCQPDRHHRGGSGSNSSRGGSSSNVCPASKATGRFTAPRPPLLRRPWTFLPHRSPCPPGVWFPSACAYWGRRRRSVSGYHGCSFLVGAKPTIGGGPGGSCCVCPHCADDAGAELAPSDPQDPPVTVEATPSGSQVPAGGPEVAALPTAAAGPTGIGCSVGGRRGGRVQLSRRKLRRVRRKPRRRLSGESGRRSKPSTNALATGAKDFKEEIRKVSDREEEVTRKERSLVKKKEHLDRKEEAVTALHDKLKAYNAVLEKQRDKQAAAEAKLQQELADKASDIARAEGNLKAREASLVKRTTDLTWQEEDLAFREEMWARRNKLLDELELEAEEKGKRLEGKVWTLEEQVRQFQAAHATQTAPGSQAVEVMRKTLDDLRAEQHAGAQRIAAWAGEASTTLVPLGMSPIPALVRSASISDALPILDSAADRLRRLDQILGARLEAEGSRLCRRPLSPVADTEDAAWKSVQDAVDAVVGRFQRDPADNE

SEQ ID NO: 78437 - protein, 151 aa, Zea mays
  Coding DNA Sequence Number=SeqID_36658
MWARWNKLLDEHELEAEEKGKRMEGKVQTLEEQVRQFQAAQAVQATQTASGPQAVEPASISDALPILDSAADHLRRLDQILGARLEAEGNRLCRSAIEYVLTCFRSHDPTISLGPVIAGPVADTEDAAREGVQDAMDTVVGCFQRDPADDE

SEQ ID NO: 78438 - protein, 199 aa, Zea mays
  Coding DNA Sequence Number=SeqID_36659
MGDLWTNIRADLTKMQWLLQIKAAVQHEQHQLALSARLRTSVAVGIQAAACGFLALQKVREMRRQMLKAALVTVDLGTRRRDLTLSDDYQQWHQAAISKCEHDTCPAGDELQLYDSGGREDTHLVINKGTLFSATTFRYRPPRGRLRWCLVLGQVDSVFEHPLCGSSRASCLSRRGVVSGPKEAHRGVAVAAAMGPKGD

SEQ ID NO: 78439 - protein, 185 aa, Zea mays
  Coding DNA Sequence Number=SeqID_36660
MQWLLQIKAAVQHEQHQLALSARLRTSVAVGIQAAACGFLALQKVREMRRQMLKAALVTVDLGTRRRDLTLSDDYQQWHQAAISKCEHDTCPAGDELQLYDSGGREDTHLVINKGTLFSATTFRYRPPRGRLRWCLVLGQVDSVFEHPLCGSSRASCLSRRGVVSGPKEAHRGVAVAAAMGPKGD

SEQ ID NO: 78440 - protein, 555 aa, Zea mays
  Coding DNA Sequence Number=SeqID_36661
  Gene Ontology: Mol. function=electron carrier activity; Cellular component=endoplasmic reticulum; Biological process=electron transport
  Homolog annotation: Hit_ID=Q653S9; Match level="QueryCoverage=75%, HitCoverage=67%, E-value=1e-169, Identity=65%"; Hit description =Putative NADPH-cytochrome P450 oxydoreductase isoform 3
  Pfam annotation: Domain name=FAD_binding_1; Domain location=212-408; Score=143.8; E_value=4.5e-40; Accession=PF00667.10; Description=FAD binding domain
  Pfam annotation: Domain name=NAD_binding_1; Domain location=419-521; Score=107.2; E_value=4.9e-29; Accession=PF00175.11; Description =Oxidoreductase NAD-binding domain
  Pfam module annotation: Pfam domain module=FAD_binding_1::NAD_binding_ 1; Domain location=212-408::419-521
MQATLQKVEQGLLQIKAAVQHEQHQLALSARLRTSAAMLEAALVTVDLGTRRRDLTLSDGHQQWHQAAISKCEHDTCPAGDELQLYDSGGREDTHLVINKGALFSATTFRYRPPRGRLRWLLLRPIPGIEKRASFPLVCVGAPREDSHTRTKLLVGKELLWPELDKLLRQEDDSSTAPTPYTAAIPEYRVVFVKPEDDMYINKSFALSNGHTVYDIQHPCRANVAVRRELHTPASDRSCIHLEFDIAGTGLKLLISPLYLYRYETGDHVGVYAENCIETVEEAEKLLGYSPDTLFSIYADQEDGTPLCGGSLPPPFPSPCTVRTALTRYADLLNSPKKSALLALAAHASDSKEAERLRHLASPAGKKDYLSSPAAKILLNIFLTEHSTPLEDSKDCSWAPIFVRQSNFKLPADPTVPIIMIGPGTGLAPFRGFLQERLALKQAEVELGHAVLFFGCRNRKMDFIYEDELNNFVDAGALSELIVAFSREGPTKEYVQHKMAQKGGYIYVCGDAKGMARDVHRTLHTIVQEQGSMDNNSKAESYVKSLQMEGRYLRD

SEQ ID NO: 78441 - protein, 151 aa, Zea mays
  Coding DNA Sequence Number=SeqID_36662
  Pfam annotation: Domain name=DUF581; Domain location=73-112; Score= -3.7; E_value=0.035; Accession=PF04570.5; Description=Protein of unknown function (DUF581)
MTWQGAPDCPFSDKPFTYFIDGRALFLESNYFDPIGKARCTFDGLRYGAAFNPLRCARMLLRRMAEKLPVLLHYQSLHVHTYFKNSRGDKSFCSTECREKFMVNEMEDELKEEGFGDSVEPSCSLSILYDKSLRYSIIVYINIYIAGSFFN

SEQ ID NO: 78442 - protein, 88 aa, Zea mays
  Coding DNA Sequence Number=SeqID_36663
MAEKLPVLLHYQSLHVHTYFKNSRGDKSFCSTKCREKFMVNEMEDELKEEGFGDSVEPSCSLSILYDKSLRYSIIVYINIYIAGSFFN

SEQ ID NO: 78443 - protein, 344 aa, Zea mays
  Coding DNA Sequence Number=SeqID_36664
  Homolog annotation: Hit_ID=Q10FM1; Match level="QueryCoverage=13%, HitCoverage=7%, E-value=3e-11, Identity=70%"; Hit description =Endonuclease/Exonuclease/phosphatase family protein, expressed
  Pfam annotation: Domain name=DUF581; Domain location=116-162; Score =25.1; E_value=1.7e-05; Accession=PF04570.5; Description=Protein of unknown function (DUF581)
MTRDEVPTERLESRVEEWEGGCPKCAELKLSRENAAFCDIALLSILIFILLVASTLTDLNGAFGWLAIHIDNLKVNFMCTFDGLRYGAAFNSLQCARMLLRRMAEKLRVLLRYQSLHVHTYFKNSRPSEKLKEGEDIYIYQGDKSFCSTECRENFMVDEMEGKGGWKHLFCMGAAWRELIGRKQTLTRFLNVPREKGISWDLLFIQGKKPLTRKLSIPAGVLSPYRRLILICMACNCCTARYGWRSGSNCWMLPSLYVSSTLRLRAFFVSNFFCGFAFNKLKRSTDQLRRNADAVEILRKTRFPHVHGAGEKKSPETILDHETMRGLWQQMFGLGFSGWFYDTL

SEQ ID NO: 78444 - protein, 124 aa, Zea mays
  Coding DNA Sequence Number=SeqID_36665
  Gene Ontology: Mol. function=carboxyl- and carbamoyltransferase activity; Cellular component=ornithine carbamoyltransferase complex; Biological process=amino acid metabolic process
  Homolog annotation: Hit_ID=Q8SA97; Match level="QueryCoverage=75%, HitCoverage=17%, E-value=6e-13, Identity=49%"; Hit description =Ornithine carbamoyltransferase
  Subcellular localization annotation: CTP_CleavageSite=64; ConfidenceScore=5.59e-01
MAPAQWSTPTDTCKSATVRGQFAQSQSSARRLGDVEAPPRSRSSLSSVVEVESEPLGRARRRPSAKARAEFEPWGRAKQSSLSSGAEPKSEPWVGRSGVRRCLQGLSPSPSPGSGGAEFAVFRG

SEQ ID NO: 78445 - protein, 113 aa, Zea mays
  Coding DNA Sequence Number=SeqID_36666
  Homolog annotation: Hit_ID=Q2QT85; Match level="QueryCoverage=28%, HitCoverage=11%, E-value=9e-09, Identity=87%"; Hit description=3' exoribonuclease family, domain 1 containing protein, expressed
  Subcellular localization annotation: CTP_CleavageSite=64; ConfidenceScore=5.23e-01
MAKNLDALKWWWLGVFIAPTTKSTIGVGLLSMGAPDSPVRQPRHPTVRVLTVLTVGALTSWCTRQSGAASDMHCSLSGVAIDLSSLIVVDGKVCWDLYVDGLVVSSGGYNDTK

SEQ ID NO: 78446 - protein, 168 aa, Zea mays
  Coding DNA Sequence Number=SeqID_36667
  Subcellular localization annotation: CTP_CleavageSite=64; ConfidenceScore=5.54e-01
MSSRVDIRVPKSPVSLPSCSRTALPRVDVRVPNPAPVRRFPTSRRHTIAAGPDSVDSAWPHRSRTNLAKGALLLTDKDLESEESLWSLYERWRSVHTVSRDLTEKQSRFDAFKEEFVSKYTGAKVVDPDSEAAAARLASDVCVSSSDESPPQLAASAVNTIVTALKDH

SEQ ID NO: 78447 - protein, 200 aa, Zea mays
  Coding DNA Sequence Number=SeqID_36668
  Homolog annotation: Hit_ID=Q6RCL8; Match level="QueryCoverage=45%, HitCoverage=36%, E-value=2e-09, Identity=31%"; Hit description =Putative cysteine protease 2
  Subcellular localization annotation: CTP_CleavageSite=64; ConfidenceScore=5.54e-01
MSSRVDIRVPKSPVSLPSCSRTALPRVDVRVPNPAPVRRFPTSRRHTIAAGPDSVDSAWPHRSRTNLAKGALLLTDKDLESEESLWSLYERWRSVHTVSRDLTEKQSRFDAFKEEFVSKYTGAKVVDPDSEAAAARLASDVLERHEAVTAVKDQGQCASCWAWARLNCSSPVVVRSETDTAAVACIPDARRDTSRMFERH

SEQ ID NO: 78448 - protein, 621 aa, Zea mays
  Coding DNA Sequence Number=SeqID_36669
  Homolog annotation: Hit_ID=Q75LK9; Match level="QueryCoverage=16%, HitCoverage=43%, E-value=1e-39, Identity=75%"; Hit description =Expressed protein
  Pfam annotation: Domain name=Inhibitor_I29; Domain location=12-68; Score=60.4; E_value=6e-15; Accession=PF08246.2; Description =Cathepsin propeptide inhibitor domain (
  Pfam annotation: Domain name=Peptidase_C1; Domain location=138-276; Score=-121.2; E_value=0.0056; Accession=PF00112.13; Description =Papain family cysteine protease
  Pfam module annotation: Pfam domain module=Inhibitor_I29::Peptidase _C1; Domain location=12-68::138-276
MDKDLESKESMYERWSSVHTVSRDLTEKQSRFEAFKANSRHIGEFNKMKDVPYKLGLNKFADLTREEFVSKYTGAKVVDPDSEAAATAARLASGVRVLSSDELPPQLVASTVNAIITAVKDHRAVTAVNGVNLFCIADWRDHGAITAVKDQGQCGSCWAFSAVGANKRKVEKIENDYPKCKFIAQCFIYDIDVAYDVLITIQSIVKYVVVLLDKSGEPNGKIYTWDATFLRKRLGYSAHKLLSVDFPSEDAGKGWQSKIVKQLVHCSLLVKIAFLFNRNADRRNTEGSNQYPYVSPSGSGSAAGAVACIACPTLYAYLKKTDPGVPAQLLEYDERFGQYGCDFTFYDYNRPEELPAAMKHAYRVIVADPPYLSKECLEKFAKAVSFLARPEGSFLLLLTDHSVELIDLYLAIWVCNWASTSPDVMGQRQRHPLAPIGGSGDGTSFHLQQPMEADDGAFGVWDDGRVDAPTPHGCAVHPGSLPGCSWRSLRVPVDKRSLEMAVEVDARWEPMGALEYYDYWRAMYSARSNRLPPLYFPLHKQEEEIVIVKLPIVGDENVSIYANGPYQTSPLDAAPVKKESESQAWLGLGPNAIKSNLNLKHTTTQPNKTAQQPHQSLCRTI

SEQ ID NO: 78449 - protein, 154 aa, Zea mays
  Coding DNA Sequence Number=SeqID_36670
MADLTEEVSDCCFSSGWWGPSYGACRYCPAYDALMLPRHCNGSLHSSDGALPTTSTSSPTTTASTAPPAPPPVAPFTSFPQRLRHHRRRKPPRPPLPGPAAAHPSVPARSRAARGAATTVVSSTPHAPLKSLYGGQIDTRRNNRGEELLFNSSK

SEQ ID NO: 78450 - protein, 203 aa, Zea mays
  Coding DNA Sequence Number=SeqID_36671
  Homolog annotation: Hit_ID=Q10SN6; Match level="QueryCoverage=18%, HitCoverage=10%, E-value=5e-09, Identity=79%"; Hit description =Hydrolase, alpha/beta fold family protein, expressed
  Subcellular localization annotation: CTP_CleavageSite=60; ConfidenceScore=5.85e-01
MPTTSTSSPTTTASTAPPAPPFTHTTSTSPDSAHARLQRRAGSGSATAATSPRAACPGIKLGSPSSSPTDSLAPERTPSAPPRYRPIQAPPPPPMGDVHDPASFSPLSSDAGLSPHFPPALADAGAGALDLSFTSTASASTSSFTTATTFSARSSLSLPSFSSSTSLSPRPHSSSASLARQDQGRCRLQVHQMRQGRARAILL

SEQ ID NO: 78451 - protein, 218 aa, Zea mays
  Coding DNA Sequence Number=SeqID_36672
  Homolog annotation: Hit_ID=Q10SN6; Match level="QueryCoverage=16%, HitCoverage=10%, E-value=6e-09, Identity=79%"; Hit description =Hydrolase, alpha/beta fold family protein, expressed
  Subcellular localization annotation: CTP_CleavageSite=60; ConfidenceScore=5.85e-01
MPTTSTSSPTTTASTAPPAPPFTHTTSTSPDSAHARLQRRAGSGSATAATSPRAACPGIKLGSPSSSPTDSLAPERTPSAPPRYRPIQAPPPPPMGDVHDPASFSPLSSDAGLSPHFPPALADAGAGALDLSFTSTASASTSSFTTATTFSARSSLSLPSFSSSTSLSPRPHSSSASLARQRPAHALSTIDSNSGYGAEQGEKKLRAAIAATYWLPWY

SEQ ID NO: 78452 - protein, 83 aa, Zea mays
  Coding DNA Sequence Number=SeqID_36673
MEAVLTKLGGVEFLGHREGGSAAELQLRRAIPKFDSNLGRLKMEPGQAATGSASGRGRRTRTGISPGFSAARKSQASSGLGRR

SEQ ID NO: 78453 - protein, 83 aa, Zea mays
  Coding DNA Sequence Number=SeqID_36674
MEAVLTKLGGVEFLGHREGGSAAELQLRRAIPKFDGNLGRLKMEPGQAATGSASGRGRRTRTRILPGFSAARKSQASSELGRR

SEQ ID NO: 78454 - protein, 88 aa, Zea mays
  Coding DNA Sequence Number=SeqID_36675
MRIRGGDDLRREISGDPAHELSINTVLNVSGKGAKTTEVSYRDSVCLTALPATSSDTEAMKGVRRAIPKFDGNLGRLKMEPGQAATGV

SEQ ID NO: 78455 - protein, 149 aa, Zea mays
  Coding DNA Sequence Number=SeqID_36676
TAGERGRRNSGKERGNWGASRVVDVGAELTVAMDTAELQRRRRNKLGRWRFAAMAIWRARSEGEVEEGAGWCANEGGGDGEQGSGLKWPRARWGEPHARRGRGDRGTRGGGYAKTEKLTSRARDAEREKKALVLGEPYSKSVGKMASAP

SEQ ID NO: 78456 - protein, 173 aa, Zea mays
  Coding DNA Sequence Number=SeqID_36677
ELQGPFGETETRRWPGSTVAAARRTAGERGRRNSGKERGNWGASRVVDVGAELTVAMDTAELQRRRRNKLGRWRFAAMAIWRARSEGEVEEGAGWCANEGGGDGEQGSGLKWPRARWGEPHARRGRGDRGTRGGGYAKTEKLTSRARDAEREKKALVLGEPYSKSVGKMASAP

SEQ ID NO: 78457 - protein, 71 aa, Zea mays
  Coding DNA Sequence Number=SeqID_36678
MAESTGRVDTYICTGVRFFSGGVRTNGEIHGGSQAMRAAGERASAKEAHSAQPPERSADLTRGAQVTARLF

SEQ ID NO: 78458 - protein, 177 aa, Zea mays
  Coding DNA Sequence Number=SeqID_36679
MHNTFTVETKLRRQIQAATGVVPFLGMAREIFNRQPRKAPWIRLSKARVVGNLKVHTQRPRFLPRRRAFHPHSLSSVSLCGFHGQAPAPMEESTGLISSRPRGSHQTSVSKRRKGGLLHAGPASQWLARVVKSGFRNPSVSTQRAKALVCGPHQSAHSRGGSGPVRSGRGKNPWWAG

SEQ ID NO: 78459 - protein, 252 aa, Zea mays
  Coding DNA Sequence Number=SeqID_36680
MYCSMSGVPVRACLTSARFWRALNALQAAKFQSRVFLEHRTLSDDLGDLPKVKTTAGMMFHGEGGPLLPRRPVMAVRRALGRNHTTQSAHAPPANPTGPGNEVDGKHRCLSAAASLHPHSLSSISLCGFRGQALAPMAESTGRADTYICTGVRFFSGGVRTNGEIHGGSQAMCAAGERASTKEVDSAQPPERSADLTRGAQVTASKWPMADLTRAPAEAAIRTHLSARGREGDGSPGGNKEVGQNQSCGPIS

SEQ ID NO: 78460 - protein, 364 aa, Zea mays
  Coding DNA Sequence Number=SeqID_36681
  Homolog annotation: Hit_ID=Q6K832; Match level="QueryCoverage=40%, HitCoverage=22%, E-value=6e-42, Identity=64%"; Hit description =Lipase class 3 protein-like
  Pfam annotation: Domain name=Lipase_3; Domain location=157-287; Score= -5.9; E_value=0.0015; Accession=PF01764.16; Description=Lipase (class 3)
  Subcellular localization annotation: CTP_CleavageSite=48; ConfidenceScore=5.44e-01
MASPPHSVEVRTPGDSPRPTAALLSPSVAAPQPSIASRLLLLLTAAVAAATAFVLLRRPSPSDLHCSPRKDRDLLYPVIHSPTELLSYRGRELLLCEIHAALHGRPGTCCTPMWKSHPRRFKVTGYTMEDVLMQEPKAGILKPAFTILLDRDKKSILLLIRGTHSIRDTLTTATGAVVPFHHTIVQEGGVSDLVLGYALRALSGTSIADVPRLQNKGLNYFIAIFFVFDARVVGHSLGGGTAALLTYVLREQKERPQFTGARFCLGRRWKVLHAPLDPAPPHPTHARQNRHHDRLSEVSRIEEVEEPLKPALTFASPSERRIRAGGVGSGLMSVSLVARSTMEPAMEGGGNDRREAPQAGRPLL

SEQ ID NO: 78461 - protein, 125 aa, Zea mays
  Coding DNA Sequence Number=SeqID_36682
  Subcellular localization annotation: CTP_CleavageSite=64; ConfidenceScore=5.68e-01
MASPPHSVEVRTPGDSPRPTAALLSPSVAAPQPSTASRLLLLLTAVVAAATTFVLLRPPITVVTAASATARPLSKPVVLLTPCHPRRFKVFWSPPVLLALYSLIEIRVLGIYIALQGRTGTCSTP

SEQ ID NO: 78462 - protein, 276 aa, Zea mays
  Coding DNA Sequence Number=SeqID_36683
MTTSRQRSPAGAFNARQKRAEVRHARAGTPDTLQYMSGVPPDIQAGPEDRSSNGRNPTAWPISHETLIRGRGIQPCAPARGLLASTRGRDFQCPAPPPLVRLHRPIFSPAGQPATPQSIACRWRLRPHSVEVRTPDDSPRPTAALLSPSVAAPQPSTASRLLLLLTAVVAAATAFVLLRPPITVVTAASATARPLSKLSKPVGFTLLSKEGQGLALPRDPLPHRAAFLPRSRTPVRDPRCSPWKAGDLLYPDVEISSSAIQGVLLTPCPSRSLLFD

SEQ ID NO: 78463 - protein, 122 aa, Zea mays
  Coding DNA Sequence Number=SeqID_36684
  Gene Ontology: Mol. function=serine-type peptidase activity; Cellular component=outer membrane-bounded periplasmic space; Biological process=proteolysis
  Homolog annotation: Hit_ID=Q8S3I8; Match level="QueryCoverage=85%, HitCoverage=22%, E-value=2e-33, Identity=89%"; Hit description=D1 protease-like protein precursor
  Pfam annotation: Domain name=Peptidase_S41; Domain location=1-87; Score=20.1; E_value=9.9e-08; Accession=PF03572.8; Description =Peptidase family S41B
MTPRELNNYPRKDTLYVWTASASEIVASALHDNCKAVLVGERTFGKGLIQSVFELHDGSGIIVTVGKYMTPNHKDINGNGIEPDYNRLPGTLRKRQISFVAIEFCNISMKPEVTFHDVELKN

SEQ ID NO: 78464 - protein, 153 aa, Zea mays
  Coding DNA Sequence Number=SeqID_36685
  Gene Ontology: Mol. function=serine-type peptidase activity; Cellular component=outer membrane-bounded periplasmic space; Biological process=proteolysis
  Homolog annotation: Hit_ID=Q8S3I8; Match level="QueryCoverage=56%, HitCoverage=21%, E-value=9e-39, Identity=88%"; Hit description=D1 protease-like protein precursor
  Pfam annotation: Domain name=Peptidase_S41; Domain location=2-87; Score=25.0; E_value=4e-08; Accession=PF03572.8; Description =Peptidase family S41B
MTPRKLNNYPRKDTLYVWTASASEIVASALHDNCKAVLVGERTFGKGLIQSVFELHDGSGIVVTVGKYMTPNHKDINGNGIEPDYNRLPDFNEARGYISRCGTNKADALPDYYTTLHVARADTISSVSASVDTTSTAQGEHVAGGLCGMVQEI

SEQ ID NO: 78465 - protein, 187 aa, Zea mays
  Coding DNA Sequence Number=SeqID_36686
  Gene Ontology: Mol. function=serine-type peptidase activity; Biological process=proteolysis
  Homolog annotation: Hit_ID=Q5SN67; Match level="QueryCoverage=43%, HitCoverage=17%, E-value=2e-33, Identity=81%"; Hit description =Carboxy-terminal proteinase-like
  Pfam annotation: Domain name=Peptidase_S41; Domain location=2-121; Score=3.8; E_value=2.1e-06; Accession=PF03572.8; Description =Peptidase family S41B
MNVCELTLAVSHTPQVKTRTPVIYKDVTFDPVPLYIICMRLGPSIPGVYVRARVLVPQNPGVTLHDNCKAVLVGERTFGKGLIQSVFELHDGSGIVVTVGKYMTPNHKDINGNGIEPDYNRLPDFNEARGYISRCGTNKADALPDYYTTLHVARADTISSVSASVDTASTAQGEHVAGGLCGMVQEI

SEQ ID NO: 78466 - protein, 137 aa, Zea mays
  Coding DNA Sequence Number=SeqID_36687
  Subcellular localization annotation: CTP_CleavageSite=36; ConfidenceScore=5.22e-01
MAVVGEQVRAPASDSLPGSSSGQASVCGRVGEPHAPAAVRPGRAREARGIMSRLTLGSLLGLIELEILQHSGTDTKAQAKVFEKEREQTKMGIVRNKEKHCGWDSFFSMVHLVLVIYEMIHQISGKRKYNAMDNHKK

SEQ ID NO: 78467 - protein, 103 aa, Zea mays
  Coding DNA Sequence Number=SeqID_36688
MAVAGEQHVLVLFTGIMSRLTLGSLLGLVELEILQHSGTDTKAQAKVFEKEREQTKMGIVRNKEKHCGWDSFFSMVHLVLVIYEMVHQISGKRKYNAMDNHKK

SEQ ID NO: 78468 - protein, 132 aa, Zea mays
  Coding DNA Sequence Number=SeqID_36689
MAVAGEQKSIVLDIILKLLLNQPFEKIPYAASEYHMHVLVLFTGIMSRLTLGSLLGLVELEILQHSGTDTKAQAKVFEKEREQTKMGIVRNKEKHCGWDSFFSMVHLVLVIYEMVHQISGKRKYNAMDNHKK

SEQ ID NO: 78469 - protein, 82 aa, Zea mays
  Coding DNA Sequence Number=SeqID_36690
MVGTSAVTARAAAGVSGALYAKAVRPGRERGIDGDGCHVQGRSTLTCRTMQELVDGVTWPTTLPPGWTVEWDVAPAGEEHEE

SEQ ID NO: 78470 - protein, 75 aa, Zea mays
  Coding DNA Sequence Number=SeqID_36691
MVGTSAVTVRRQPGVSGALYAKAVRPGRERGIDGDGCHVWGTMQELVDGVTWPTTLPPGWTVEWDVAPAGEEHEE

SEQ ID NO: 78471 - protein, 156 aa, Zea mays
  Coding DNA Sequence Number=SeqID_36692
  Subcellular localization annotation: CTP_CleavageSite=20; ConfidenceScore=5.08e-01
MSTVPIDSPFASRPHRLSIQCSTDPSCRRAVTALAGELVGGEEFGLSRAQLTNQTGQRASPGIKEGGRPKSGEVDLRLPVKFFQVRGLGKLHKLMAKLTERLARLGSDYSGLATVAEALAAMAGGKELAGAKEGRLANDGFELWIKVNTIDLWLKV

SEQ ID NO: 78472 - protein, 156 aa, Zea mays
  Coding DNA Sequence Number=SeqID_36693
RICPGVSQLSGSPRCQEEVCAGLLQRFARLRPLATFEHWKKQTATCSTPSAAPEHARARPRRAQAKPVPWSASATIKRPGALAVPLRTRSSLTGAQFAAPSERTVHVSVKLPERGIGLCFTGEAGPRSPDFNRPPATVDQDPPRANPTLRRNSLAA

SEQ ID NO: 78473 - protein, 180 aa, Zea mays
  Coding DNA Sequence Number=SeqID_36694
RICPGVSQLSDSPRCQEEVCAGLLQRFARLRPLATFEHWKKQTATCSTPSAAPEHARARPRRAQAKPVPWSASATIKRPGALAVPLRTRSSLTGAQFAAPSEKTVHVSVKLPERGIGLCFTGEAGPRSPDFNRPPATVDQEYILVPEQGAAQEVAPDPAPEPAPEDLPATALEGKPRFYA

SEQ ID NO: 78474 - protein, 158 aa, Zea mays
  Coding DNA Sequence Number=SeqID_36695
MRRRYIRHKGPTRQRPRSRVYARRETPRTQARTSVTSQKRKRERGNGLSWDCNLADGEYVLVPEQGAAQEVAPDPALEPTPEDLPTTALEGKPRRLPSSCDLRRGLPFRLWWVQVRSLHDGSWGSLEDMVAGVTWPSILPPGWTVEWDPASAEEEHEE

SEQ ID NO: 78475 - protein, 68 aa, Zea mays
  Coding DNA Sequence Number=SeqID_36696
  Subcellular localization annotation: CTP_CleavageSite=21; ConfidenceScore=5.05e-01
MRRRYIRHKGPTRQRPRSRVYAQRETPRTQTRTSVTSQKRKRERGNGLPWGRREKEWAELEKSAQTRF

SEQ ID NO: 78476 - protein, 140 aa, Zea mays
  Coding DNA Sequence Number=SeqID_36697
MAADRARTQASGLLRRGDEMWLRVIEEKRHIYRARDRDRNGQLETPDSHGARRELAFCLREEESVRTGHPRSWREERLGAVGPPISGMSVGRTARRETPRTQARTPVTSQKRKRERGNGLPWGRREKEWAELEKPAQTRF

SEQ ID NO: 78477 - protein, 492 aa, Zea mays
  Coding DNA Sequence Number=SeqID_36698
  Gene Ontology: Mol. function=phosphoprotein phosphatase activity; Cellular component=nucleus; Biological process=chromatin modification
  Homolog annotation: Hit_ID=P22198; Match level="QueryCoverage=61%, HitCoverage=95%, E-value=1e-171, Identity=95%"; Hit description =Serine/threonine-protein phosphatase PP1
  Pfam annotation: Domain name=Metallophos; Domain location=235-430; Score=154.3; E_value=3.3e-43; Accession=PF00149.18; Description =Calcineurin-like phosphoesterase
  Subcellular localization annotation: CTP_CleavageSite=32; ConfidenceScore=5.69e-01
MTTIDMAGAAAAATGSGSPYVRRVQVPGPAVRAGVRACSRPTSTARPRPGRRALPRFAANHKVLGASKATPPSCCPTSPSPTAARPSSPSPTRRRPGSATARPRLRLRRPDLRSPAAGRHPASAADALQTKAQLACGVQGAAHSPASHHHQWPDNASISAGRREEALADMCVVRLQLGAKPNLQGDRRTNLRERAQRGNLKPGKNAQLSESEIKQLCAAAKEIFLHQPNLLELEAPIKICGDVHGQYSDLLRLFDYGGYPPQANYLFLGDYVDRGKQSLETICLLLAYKVKYPENFFLLRGNHECASVNRIYGFYDECKRRFSVKLWKTFTDCFNCLPVSALIDEKILCMHGGLSPELNKLEQILNLSRPTDVPDTGLLCDLLWSDPSNEATGWAINDRGVSYTFGPDKVSEFLEKHDLDLICRAHQVVEDGYEFFASRQLVTMFSAPNYCGEFDNAGAMMSVDETLMCSFQILKPARKVLGGSTNNKSGFK

SEQ ID NO: 78478 - protein, 386 aa, Zea mays
  Coding DNA Sequence Number=SeqID_36699
  Gene Ontology: Mol. function=phosphoprotein phosphatase activity; Cellular component=nucleus; Biological process=chromatin modification
  Homolog annotation: Hit_ID=P22198; Match level="QueryCoverage=81%, HitCoverage=99%, E-value=0.0, Identity=97%"; Hit description =Serine/threonine-protein phosphatase PP1
  Pfam annotation: Domain name=Metallophos; Domain location=54-249; Score=154.3; E_value=3.3e-43; Accession=PF00149.18; Description =Calcineurin-like phosphoesterase
MDPALLDDVIRRLLEVKNLKPGKNAQLSESEIKQLCAAAKEIFLHQPNLLELEAPIKICGDVHGQYSDLLRLFDYGGYPPQANYLFLGDYVDRGKQSLETICLLLAYKVKYPENFFLLRGNHECASVNRIYGFYDECKRRFSVKLWKTFTDCFNCLPVSALIDEKILCMHGGLSPELNKLEQILNLSRPTDVPDTGLLCDLLWSDPSNEATGWAINDRGVSYTFGPDKVSEFLEKHDLDLICRAHQVVEDGYEFFASRQLVTMFSAPNYCGEFDNAGAMMSVDETLMCSFQILKPARKVLGGSTNNKSGFKSARPGGVSNPRVTEAKTIDPLLRAWANPIMTSTIPATLQATETCGWDWTTPSTYSPTQADEPAYTAAYNAASLAR

SEQ ID NO: 78479 - protein, 62 aa, Zea mays
  Coding DNA Sequence Number=SeqID_36700
MELPLDAQSSGRRLDVDERVEQCRAVAGVLHVLARFVQVLQMQHLRGGELGYPLTAPPPLII

SEQ ID NO: 78480 - protein, 62 aa, Zea mays
  Coding DNA Sequence Number=SeqID_36701
MELPLDAQSSGRRLDVDERVEQCRAVTGVLHVLARFVQVLQMQHLRGGELGYTLTAPPPLII

SEQ ID NO: 78481 - protein, 62 aa, Zea mays
  Coding DNA Sequence Number=SeqID_36702
MELPLDAQSSGRRLDVDERVEQCRAVAGVLHVLARFVQVLQMQHLRGGELGYFLTAPPPLII

SEQ ID NO: 78482 - protein, 62 aa, Zea mays
  Coding DNA Sequence Number=SeqID_36703
MELPLDAQSIGRRIDVDERVEQCRAVAGVLHVLARFVQVLQMQHLRGGELGYLLTAPLPLII

SEQ ID NO: 78483 - protein, 62 aa, Zea mays
  Coding DNA Sequence Number=SeqID_36704
MELPLDAQSSRRRLDVDERVEQCRAVAGVLHVLARFVQVLQMQHLRGGELGYLLTAPPPLII

SEQ ID NO: 78484 - protein, 471 aa, Zea mays
  Coding DNA Sequence Number=SeqID_36705
  Gene Ontology: Mol. function=cysteine-type peptidase activity; Biological process=proteolysis
  Homolog annotation: Hit_ID=Q53MK8; Match level="QueryCoverage=88%, HitCoverage=47%, E-value=5e-34, Identity=24%"; Hit description=Ulp1 protease family, C-terminal catalytic domain, putative
MKQVDRPPNNPKRITIQSSQECFSVDIPSAEHHNPCPEVENPSNADSQNVTNETVQIDSDEDDFMPAMKKRNVSESHTRVLRKVVTKRVKHEELPRQRLNVRCNPQDVIASINLLNERQREAIRRKGFSSILDMTVDALCSRSHLQWLMDKLDPKDMTIRPGPGKELKITKDIVHLILGVPNHGGGKPLGIDEAVAASNLRAELGVAKDEFNVAVLQDRLRKGEDDDLSIRCFFLILFNRLLFPTASWGITYHEVLLTEEMHRFHEIDWCQLIFNDLCEAAKKWHNRITTNVSTTIYGCSIVVLLYYLDHLHTAAAPHNKSGTPRIKFFDKNIIKALTKADKRKVRHGAESFGHCEPECRTNIFDAPRPGPMPRPTFNIKLPSIKEMMSSKINDLPHRHRSKFTDILAAYDLEVDKSCVAIKDSIDKIIVKQYDIADKFIELIDEVLRAESENLENETDEPQQPGDSADSA

SEQ ID NO: 78485 - protein, 492 aa, Zea mays
  Coding DNA Sequence Number=SeqID_36706
  Gene Ontology: Mol. function=cysteine-type peptidase activity; Biological process=proteolysis
  Homolog annotation: Hit_ID=Q53MK8; Match level="QueryCoverage=78%, HitCoverage=41%, E-value=1e-32, Identity=24%"; Hit description=Ulp1 protease family, C-terminal catalytic domain, putative
MKQVDRPPNNPKRITIQSSQECFSVDIPSAEHPNPCPEVENPSNADSQNVTNETVQIDSDEDDFMPAMKKRNVSESHTRVLRKVVTKRVKHEELPRQRLNVRCNPQDVIASINILNERQREAIRRKGFSSILDMTVDALCSRSHLQWLMDKLDPKDMTIRPGPGKELKITKDIVHLILGVPNHGGGKPLGIDEAVAASNLRAELGVAKDEFNVAVLHDRLRKGEDDDLSIRCFFLILFNRLLFPTASWGITYHEVLLTEEMHRFHEIDWCQLIFNDLCEAAKKWHNRITTNVSTTIYGCSIVVLLYYLDHLHTAAAPHNKSGTPRIKFCEKNIIKALTKADKRKVRHGAESVGHCEFGSSTETCYAVGHILAAYDLEVDKSCVAIKDSIDKIIVKQYDIADKFIELIDEVLRAESENLENETDEPQQPGNSADSAGHTVDATQPTPDMPSQASQLETQLGATQFEEIHERQQHIRTVLVFLSRRIGCGSDQQ

SEQ ID NO: 78486 - protein, 436 aa, Zea mays
  Coding DNA Sequence Number=SeqID_36707
  Gene Ontology: Mol. function=cysteine-type peptidase activity; Biological process=proteolysis
  Homolog annotation: Hit_ID=Q53MK8; Match level="QueryCoverage=78%, HitCoverage=36%, E-value=2e-27, Identity=25%"; Hit description=Ulp1 protease family, C-terminal catalytic domain, putative
  Subcellular localization annotation: CTP_CleavageSite=73; ConfidenceScore=5.43e-01
MTSVVLSPLWKQGDVSRIPAAPPDVLLQGSGTSLTATLSRTQGSSTSPTATLAYFYERITGQNIYANVFHMIAANALFGYSKQVDRPPNNPKRITIQSSQECFSVDIPSAEHPNPCPEVENPSNADSQNVTNETVQIDSDEDDFMPAMKKRNVSESHTRVLRKVVTKRVKHEELPRQRLNVRCNPQDVIASINILNERQREAIRRKGFSSILDMTVDALCSRSHLQWLMDKLDPKDMTIRPGPGKELKITKDIVHLILGVPNHGGGKPLGIDEAVAASNLRAELGVAKDEFNVAVLQDRLRKGEDDDLSIRCFFLILFNCLLFPTASWGITYHEVLLTEEMHRFHEIDWCQLIFNDLCEAAKKWHNRITTNVSTTIYGCSIVVLLYYLDHLHTAAAPHNKSGTPRIKFFDKNIIKALTKADKRKVRHGAESFGNCE

SEQ ID NO: 78487 - protein, 114 aa, Zea mays
  Coding DNA Sequence Number=SeqID_36708
MWLFVSVLVLPSVEWPKRANLALRPVRDLFPAPRGYLVHGARTAPFEAPGQEVGLRFLGWLQEELEVLPTIVTDLMSFASLITCEGAVNALSHEGCEHFKVFDQSDEGFERGIF

SEQ ID NO: 78488 - protein, 69 aa, Zea mays
  Coding DNA Sequence Number=SeqID_36709
  Subcellular localization annotation: CTP_CleavageSite=32; ConfidenceScore=5.13e-01
MRVTRGRASGLLWRAQSASNTWLFVSVLVLPSAERPKRANLSLRPGIKCTTSCIIGLLGAFGFRRSSKT

SEQ ID NO: 78489 - protein, 154 aa, Zea mays
  Coding DNA Sequence Number=SeqID_36710
MAARLIGGEGGLARGGVGSGRFWRSQRGSTLRVGRGWERLCWPVYGGGGSGGRGHAVRGAMLVIWCSGEVERARRSTVEVPGGFIGAGAGNGAGLALARTGDAGAASGVLWRAQSASNTWLFASVLVLPSAERPKHANLALRPVRDLFPAPRAT

SEQ ID NO: 78490 - protein, 110 aa, Zea mays
  Coding DNA Sequence Number=SeqID_36711
MNKNPGNRNAITNGTPVPPPQVRTTPLHGGRPAEQQKTDERLAAARSDCDNNHPRPGRRSGLGSSFGAGVATGGLSPAEDENQPFRPGDGDPGLLAPYLSRYGWRKSPWD

SEQ ID NO: 78491 - protein, 188 aa, Zea mays
  Coding DNA Sequence Number=SeqID_36712
MNKNPGNRNAITNGTPVPPPQVRTTPLHGGRPAEQQKTDERLAAARSDCDNNHPRPGRRSGLGSSFGAGVATGGLSPAEDENQPFRPGDGDPGLLAPYLSRHGWRKSPWDRGMPFSPRRGGRKRQPTHAGAAPRLASSFILAWTTKILEAEGGVEAAAWLASPTIKPEVAIPGDHRWRGVAGLRDENP

SEQ ID NO: 78492 - protein, 107 aa, Zea mays
  Coding DNA Sequence Number=SeqID_36713
MVSPVSCKRVIRVDVRAPFVGGQLGAQRHAQKYLRQLARRLLDAWAWASKLACQKLEKHVHLPGQTPPPAVTQDGDLQFDGGESGPGRDLYSSLGLKDFRHPGQDGR

SEQ ID NO: 78493 - protein, 128 aa, Zea mays
  Coding DNA Sequence Number=SeqID_36714
MGTEHGVSDELQAGNPSGRPCPIRWGSARGPEARPKRLARRLLDAWAWASKLACQKSEKRVHLARLHAAYMAARPFRPLVWAKPGHTPPPAVTQDGDLQFDGGESGPGRGLYSSLGLKDFRHPGQDGR

SEQ ID NO: 78494 - protein, 219 aa, Zea mays
  Coding DNA Sequence Number=SeqID_36715
MGTEHGVSSELQAGSEGSMPPSDGIPLQDRSRWSRKCPRQLARRLLDAWVWASKLACQKSEKRIHLARLHAACMAARPFRPLVWAKVGVACNRWAVVRTTRGGLASSALSRLATPRHRRSPKMVTSSSTVGKADQVAASTPPSASRIFVIQAKMEDEASRGAAPESLGPFDLVVWGSPSLVKETPRPPFDEPRADAKVDQPRPRVGLAPLEAGWPRPQG

SEQ ID NO: 78495 - protein, 123 aa, Zea mays
  Coding DNA Sequence Number=SeqID_36716
MTEAQGRDGATMAELRLRKNHSGERGPAEPGREGAHQRVSREADGKAKLTVALDGARAQRRPWNRRWTSAGGGGGSRFVWAERERERKSWVEGGNGRGEVGEQGAGFTRGAGARLWPENTQTW

SEQ ID NO: 78496 - protein, 169 aa, Zea mays
  Coding DNA Sequence Number=SeqID_36717
MTEAQGRDGATMAELRLRKNHSGERGPAEPGREGAHQRVSREADGKAKLTVALDGARAQRRPWNRRWTSAGGGGGSRFVWAERERERKSWVEGGNGRGEVGEQGAGFTRGAGARLWPENTQTWVRPRWGDRGREVRDTLTSGSVGQREGERGLPVRHRDARAQARAGWV

SEQ ID NO: 78497 - protein, 225 aa, Zea mays
  Coding DNA Sequence Number=SeqID_36718
GLAGGDENGRSRSDAQRTVERRMCSETAPMMLRRPRWPRRATAPPRWGRSAALVPGHRDAAPRLHAGRTGWLRATKPADRAGRGRAERAVVRLLVQQSRGERERGYAQGENAGRLQGIVHVLVEEGEGPTGGPARQGMQHMQATTRGGCCVSEGQRGSSRSWVLTELLHAYMDETPDSTLGNHACKEARHACKKTRDANHHGMHIRTTCKEKENKYLHAMHVREK

SEQ ID NO: 78498 - protein, 255 aa, Zea mays
  Coding DNA Sequence Number=SeqID_36719
MLTSQRRRMARRVRSEARAQRRRGTDRTAQGLAGGDENGRSRSDAQRTVERRMCSETAPMMLRRPRWPRRATAPPRWGRSAALVPGHRDAAPRLHAGRTGWLRATKPADRAGRGRAERAVVRLLVQQSRGERERGYAQGENAGRLQGIVHVLVEEGEGPTGGPARQGMQHMQATTRGGCCVSEGQRGSSRSWVLTELLHAYMDETPDSTLGNHACKEAGHACKKTRDANHHGMHIRTTCKEKENKYLHAMHVREK

SEQ ID NO: 78499 - protein, 227 aa, Zea mays
  Coding DNA Sequence Number=SeqID_36720
MARRVRNEARAQRRRGTDRTAQGLAGGDENGRSRSDAQRTVERRMCSETAPMMLRRPRWPHRATAPPRWGRSAALVPGHRDAAPRLHAGRTGWLRATKPADRAGRGRAERAVVRLLVQQSRGERERGYAQGENAGRLQGIVHVLVEEGEGPTGGPARQGMQHMQATTRGGCCVSEGQRGSSRSWVLTELLHAYMDETPDSTLGNHACKEARHACKKTRDANHHGMHI

SEQ ID NO: 78500 - protein, 63 aa, Zea mays
  Coding DNA Sequence Number=SeqID_36721
MAGGNTLAGAKERWLADEGECGAKRGSNGSWCGFLRETLGDTGVSQSSPPMGVTKGRLGTKSV

SEQ ID NO: 78501 - protein, 61 aa, Zea mays
  Coding DNA Sequence Number=SeqID_36722
MAGGNTLAGAKERWLADEGECGAKRGFELGIKVNIPDLWLKLFDAHAYFGSQEVMALGVAF

SEQ ID NO: 78502 - protein, 134 aa, Zea mays
  Coding DNA Sequence Number=SeqID_36723
MAGGNTLAGAKERWLADEGECGAKRGFELGIKVNIPDLWLKPPCDSVSHGCSVAESGCLLQAETHSALPGHWGLTAAGLPSSDIASPSGLVLHNGNMLCFHPELVLLDCSGCLLGREDEVPADSASGTDIFLTD

SEQ ID NO: 78503 - protein, 183 aa, Zea mays
  Coding DNA Sequence Number=SeqID_36724
MAGGNTLAGAKERWLADEGECGAKRGFELGIKVNIPDLWLKPWGKDKKGPGSPRRSGGKRKCEPSPSSEYFGDSKYLEEEFSSESEGSPGIAAEVWTYIRSIERARLEGLDESEVSSDEENSSDSFEEGSGGDGEDEGDDGDSSGGDNDGDDDGKGGGGDGGSRGGDDGKGDSSKASGKAPLA

SEQ ID NO: 78504 - protein, 141 aa, Zea mays
  Coding DNA Sequence Number=SeqID_36725
MGKDKKGPGSPRRSGGKRKCEPSPSSEYFGDSKYLEEEFSSESEGSPGIAAEVWTYIRSIERARLEGLDESEVSSDEENSSDSFEEGSGGDGEDEGDDGDSSGGDNDGDDDGKGGGGDGGSRGGDDGKGDSSKASGKAPLA

SEQ ID NO: 78505 - protein, 461 aa, Zea mays
  Coding DNA Sequence Number=SeqID_36726
  Gene Ontology: Mol. function=protein serine/threonine kinase activity; Cellular component=cytoplasm; Biological process=protein amino acid phosphorylation
  Homolog annotation: Hit_ID=Q84SL0; Match level="QueryCoverage=69%, HitCoverage=58%, E-value=1e-163, Identity=89%"; Hit description =Putative calcium-dependent protein kinase
  Pfam annotation: Domain name=Pkinase; Domain location=2-148; Score= -30.1; E_value=9.1e-07; Accession=PF00069.15; Description=Protein kinase domain
  Pfam annotation: Domain name=efhand; Domain location=195-223; Score =28.2; E_value=3e-05; Accession=PF00036.22; Description=EF hand
  Pfam annotation: Domain name=efhand; Domain location=231-259; Score =25.7; E_value=0.00016; Accession=PF00036.22; Description=EF hand
  Pfam annotation: Domain name=efhand; Domain location=267-295; Score =21.2; E_value=0.0038; Accession=PF00036.22; Description=EF hand
  Pfam annotation: Domain name=efhand; Domain location=303-331; Score =38.7; E_value=1.9e-08; Accession=PF00036.22; Description=EF hand
  Pfam module annotation: Pfam domain module=Pkinase::efhand::efhand::ef hand::efhand; Domain location=2-148::195-223::231-259::267-295::303 -331
MAGVGETLRSFMEEFGDQGEDSIILSPRLKEISTPDRPAALRFLGERFSEIFGSPYYMAPEVLKRNYGPEVDVWSARVILYILLCGVPPFWAETEQGVAQAIIRSVIDFKRDPWPRVSDNAKDLVRGMLNPDQKRRLTAHQVLGHPWLQNIKKAPNVNLGETVKARLQQFSVMNKFKKHALRVIAEHLWVEEAADIKDMFEKMDLNKDQMLSFEELKLGLHKFGQQMPDADVQTLMEAADADGNGSLNYGEFVTLFVHLRKIGNDEHLHKAFAYFDRNQSDYIEIDELRESLADDLGQNREEIINAIIRDVDTDKDGKISYDEFATMMKAGTDGRKASRQYSRERFTSLSLKLQKDGSLQMTITRRAFYDRRISRRSVVMESKGFVFKIMGGCDKQCFTMKQGVLTSSMQGASSSSSISRCLESKKVKKKFEDVEYQKLLPCHNESLAKRRSKLSTATTFA

SEQ ID NO: 78506 - protein, 450 aa, Zea mays
  Coding DNA Sequence Number=SeqID_36727
  Gene Ontology: Mol. function=protein serine/threonine kinase activity; Cellular component=cytoplasm; Biological process=protein amino acid phosphorylation
  Homolog annotation: Hit_ID=Q84SL0; Match level="QueryCoverage=71%, HitCoverage=58%, E-value=1e-163, Identity=89%"; Hit description =Putative calcium-dependent protein kinase
  Pfam annotation: Domain name=Pkinase; Domain location=2-148; Score= -30.1; E_value=9.1e-07; Accession=PF00069.15; Description=Protein kinase domain
  Pfam annotation: Domain name=efhand; Domain location=195-223; Score =28.2; E_value=3e-05; Accession=PF00036.22; Description=EF hand
  Pfam annotation: Domain name=efhand; Domain location=231-259; Score =25.7; E_value=0.00016; Accession=PF00036.22; Description=EF hand
  Pfam annotation: Domain name=efhand; Domain location=267-295; Score =21.2; E_value=0.0038; Accession=PF00036.22; Description=EF hand
  Pfam annotation: Domain name=efhand; Domain location=303-331; Score =38.7; E_value=1.9e-08; Accession=PF00036.22; Description=EF hand
  Pfam module annotation: Pfam domain module=Pkinase::efhand::efhand::ef hand::efhand; Domain location=2-148::195-223::231-259::267-295::303 -331
MAGVGETLRSFMEEFGDQGEDSIILSPRLKEISTPDRPAALRFLGERFSEIFGSPYYMAPEVLKRNYGPEVDVWSARVILYILLCGVPPFWAETEQGVAQAIIRSVIDFKRDPWPRVSDNAKDLVRGMLNPDQKRRLTAHQVLGHPWLQNIKKAPNVNLGETVKARLQQFSVMNKFKKHALRVIAEHLWVEEAADIKDMFEKMDLNKDQMLSFEELKLGLHKFGQQMPDADVQTLMEAADADGNGSLNYGEFVTLFVHLRKIGNDEHLHKAFAYFDRNQSDYIEIDELRESLADDLGQNREEIINAIIRDVDTDKDGKISYDEFATMMKAGTDGRKASRQYSRERFTSLSLKLQKDGSLQMTITRRAFYDRRISRRSVVMRASKIRKLFNLSKDDDVRKYVNTYCRTFTTKNSKKVKKKFEDVEYQKLLPCHNESLAKRRSKLSTATTFA

SEQ ID NO: 78507 - protein, 338 aa, Zea mays
  Coding DNA Sequence Number=SeqID_36728
  Homolog annotation: Hit_ID=Q75HV1; Match level="QueryCoverage=31%, HitCoverage=9%, E-value=2e-11, Identity=59%"; Hit description =Putative kinesin-related protein
  Subcellular localization annotation: CTP_CleavageSite=42; ConfidenceScore=5.15e-01
MVALASASDETLAAVLYHLKPHTVDTFLPPRRAGPQSASATVSMEGESVRGLCTPLPRIVLDPAMAAVAIHGRVVASALDSASPPSMAVVVGLCSSSSRYSVTIMLAGVIDGEALDPTTTLAWHFFSWVSFAHLDPLAIYFAHSLLLTVTGIPWAFLTELQDIYYPAANHVNKSDYDKCEGFPLPQNRSDGAGSGRRWGILLAAAFTSAGHVPAVANARSGGLRGYRRRPESRAAAVASAGYRFVLLQQMASRVCCVRLMVGKLFVVENIAVGSEVEQEEPKKEVMAGVGETLRSFMEEFGDQGEDSIILSPRLKEISTHDRPAALRLLLSVFTLTDS

SEQ ID NO: 78508 - protein, 81 aa, Zea mays
  Coding DNA Sequence Number=SeqID_36729
MPKLSPIKLRHSDLSQDEGVNRLKDEMTNKPMIVCVMIVIDCKGHKSFENKSPIVRKQQSFVAFALRWCQKKNLKSEASGG

SEQ ID NO: 78509 - protein, 140 aa, Zea mays
  Coding DNA Sequence Number=SeqID_36730
MQLYARLSQEDKAVMLKLLKRAREQSEARQRIEDILSTKMLSFEELTKEHEELKCSHDYLVQSKSSFELEFAGAKDDTYQKLKEENERLLGVCFVVEDPKEREHLRQILSEAAPKLSPIKLRHSDRSQDEGVNRLKDEMT

SEQ ID NO: 78510 - protein, 63 aa, Zea mays
  Coding DNA Sequence Number=SeqID_36731
MAAIEDFYQGSRDEVCFVVEDPKAREHLRQILSEVAPKPSPIKLRHSDRSQDEGVNRLKDEMT

SEQ ID NO: 78511 - protein, 87 aa, Zea mays
  Coding DNA Sequence Number=SeqID_36732
  Homolog annotation: Hit_ID=Q5Z880; Match level="QueryCoverage=32%, HitCoverage=5%, E-value=1e-07, Identity=89%"; Hit description =Putative Synoviolin 1
MGEKGSVYILLGSIRIADYVRYRKITSNMNERFPDATSEELDVETGEQAEEEVPLRLLHGSFSSTGRILSTGTVPCCLPQCARVIVY

SEQ ID NO: 78512 - protein, 680 aa, Zea mays
  Coding DNA Sequence Number=SeqID_36733
  Gene Ontology: Mol. function=metal ion binding; Cellular component =endoplasmic reticulum; Biological process=ubiquitin cycle
  Homolog annotation: Hit_ID=Q5Z880; Match level="QueryCoverage=54%, HitCoverage=75%, E-value=1e-178, Identity=84%"; Hit description =Putative Synoviolin 1
  Pfam annotation: Domain name=PHD; Domain location=530-571; Score=0.0; E_value=0.057; Accession=PF00628.19; Description=PHD-finger
  Pfam annotation: Domain name=zf-C3HC4; Domain location=531-568; Score= 42.4; E_value=1.6e-09; Accession=PF00097.15; Description=Zinc finger, C3HC4 type (RING finger)
  Pfam module annotation: Pfam domain module=PHD::zf-C3HC4; Domain location=530-571::531-568
MSARRSSSRREARKAASVGSGCEDVASTSACSARERKECGGGGVWCDCRGAGAGAVRWSGSEEGDDDGGAAGRSGPRFLGSDLAIRRVCRRGSGPRRGAGTAAEQRARWLTGGAGVSSDTSRGETGWGEGFRPWAISEGVHRERAEVAELVEVVGEEVTGVELVRAAPSRRRRLPKRMTCVVRIWKLGCIRFNVRSSRVVSQKKFMSNEKYFNMNRRQRRSSGVFGKVSAVGRRPPVAKMIRLPTYAAFSLLATASAAYYAFSSREQFYPAMVYLSTSKICFVLLLNTGLVAMCVAWQLARRLFLGSLREAEVERLNEQSWREVIEILFAVTIFRQDFSVSFLAMVAALLLVKALHWLAQKRVEYIETTPSVPLLSHIRIVSFMVFLLTVDCLFLSNSLRSLIQKQEASVAIFFSFEYMILATSTVSTFVKYIFYVSDMLMEGQWEKKAVYTFYLELISDLVHLSLYMLFFIAIFLNYGVPLHLIRELYETFRNFRIRIADYVRYRKITSNMNERFPDATSEELDVSDATCIICREEMTTAKKLLCGHLFHVHCLRSWLERQHTCPTCRAPIIPADNGHAVSARQHGAQAGVQPGTATPSSEGAPGENMSRHQAKLEAAAAAASLYGRSFVYPPANTLKSAVSLEVAQAAPNPSCRRLFSPPCLATIRVSVDVFGTNNHG

SEQ ID NO: 78513 - protein, 63 aa, Zea mays
  Coding DNA Sequence Number=SeqID_36734
  Homolog annotation: Hit_ID=Q10QF0; Match level="QueryCoverage=62%, HitCoverage=12%, E-value=5e-07, Identity=65%"; Hit description =Expressed protein
METYIAGSRLSKYVLVYFSILFIRFRAGIVTREMLALPKPQFMLIGLLEALGAASGMAAAGNQ

SEQ ID NO: 78514 - protein, 107 aa, Zea mays
  Coding DNA Sequence Number=SeqID_36735
  Homolog annotation: Hit_ID=Q6ZIX9; Match level="QueryCoverage=55%, HitCoverage=5%, E-value=3e-09, Identity=57%"; Hit description=Cyclin- like protein
MSKSSFVRHSGDLALKFLEFVFIDGAKCLEGKRPDIFVVNSFGSGFQLISTSYILDRIDYTVSSSDLFEELWSSFTDIEGALKDIKGPLRDIEGTLIATEGALMAIE

SEQ ID NO: 78515 - protein, 357 aa, Zea mays
  Coding DNA Sequence Number=SeqID_36736
  Homolog annotation: Hit_ID=Q2QQ06; Match level="QueryCoverage=72%, HitCoverage=95%, E-value=1e-49, Identity=60%"; Hit description =Expressed protein
  Subcellular localization annotation: CTP_CleavageSite=33; ConfidenceScore=5.37e-01
MPVPPLLSPLRLPSPAPPLHRNGAPWRRPTQLRAALRVPPPLHLGLAAARGDGVRRFVGTLGSKRARAVGAIRVSAISGDGGGGAGGTGIAAAAAATVVFAVMNRVLYKLALVPMKNYPFFLAQFATFGYVLVYFSILFIRFRAGIVTREMLALPKPQFMLIGLLEALGAASGMAAAAMLPGPSIPVLSQEFVFIDGAKRLEGKKPDIFVVNSFGSGFQALFIFLLLPFLSNLKGIPFAELPAYLTRGAACFLNVGGNLKDFSDCHGAPLLPLLYITLNMAFNISVLNLVKMSTAVVASLTSTLAVPLSIYILSLPLPYLPEGTNLSASFLIGVATLVLGLLLYNLPQESTNQVKED
